United States Patent Application Publication US 2007/0016974 A1 - sequence listing, part 5

SEQ ID NO: 25650 - DNA, 478 bp, Oryza sativa
  unsure (1)..(478): unsure at all n locations
  Clone ID: uC-osflM2020118c06a1
ccaaagaagcaatataatcctttggattaatcatcatatcatcaccatttgaaaatgataaattataaaagcgagagtgggcgggagagcgtaaccttgtacgcctacctcctccatttcccacacagctttttttttcttctttcgctcgcccggtttctgcaaatcgcaacacagaccgaccacacaatccccaaccccaacaaactcaaagaacccaaccggtaacacaattacatcatagcagtagtagtattactagcagcagcagcggcggcgatgccggcgccgagggtcgccgccggcgagcggcggttcagctgtactggacgaaggagcggagaatgtgttgggcctccagttggccggatgacctttgttggcgacgagcgtcttgccggactcgttgcggatgcggatggagaaaggggcctggagcctgtggtggttgtccagcctncagatggagccccacgac

SEQ ID NO: 25651 - DNA, 391 bp, Oryza sativa
  Clone ID: uC-osflM2020118c07a1
ttttcctccttttcttttttttttttttctttttttggtgactttttaataaaatttacgggtttttcccaatatttttttcttggtgggaccaacccacacaaacacatattgagggttgcaaaaaacaaacatgccatctgcaagattggaagggaaaaggaacacaggggaagaccaaccacaatactctcccaagggctgtcctaacaaccaaaaaaaggcccaaagaaagctgctatcatgcgggaccaaccaactaaatggaaaacgcaaacgcaccatatcttaaaaccttgccacacccgcacgaacaaaaagctaggctgcgagtaaaactcacactgtgttctaaagcatacaccaaccaggtttaacctgaaaatggaac

SEQ ID NO: 25652 - DNA, 340 bp, Oryza sativa
  Clone ID: uC-osflM2020118c08a1
ggggggaaaaaaaacccccccttttggttttttttttcaaaaaaaaaaacttgtggttgtgcaaaatttacccaaaaaaaccaaattccgggggaattttttggggggggttttaaaaaaggaagcccaaaaacccctttttttttggggtttggggaaaaaatttttaaaaatttttttccaacaacaaaagggcgatgggttttttgggaaatgggattttctggcgggccctctttttgaaaacgcggggggggacccccggggcggggaaaatttttctgggggcaccaaagagctccctttaagggggagttcccccgcaaacccggaagaaggg

SEQ ID NO: 25653 - DNA, 452 bp, Oryza sativa
  Clone ID: uC-osflM2020118c09a1
ctaatcaggtaggatggaatcatgtagtgtacaagatgactgaacagaaagaaggaacaaatccatcttcccaacaactagccaggacaatgtgcaagaccaaacatgaacctgagcccaacctgaaatgcaaatatgcaattggaaagaaaattccattgtatacattacactcgtggtaaatgcacatcatgtttgaaattgtgcacaaaccagccactatacacactaccctgtttcgctatagaactagatctcgcctcttcttctttgggtttgttgcttctgcacagcctgatcctttcctcatcatggccacaaactctgaataatctatccgcccatcattattagagtctgcatctgtgatgacatccttgatctcgttggcgtcgtataacccttgttccttcaaggcttgctcgagctcttcctttgtgatgtacccacta

SEQ ID NO: 25654 - DNA, 272 bp, Oryza sativa
  unsure (1)..(272): unsure at all n locations
  Clone ID: uC-osflM2020118c10a1
aaaaaaaaaaaaaacanggaaacctttaaaaaaaaattggggaaaaacccccccacncacaaattcattttaacaccaaccaaacacaccaaagaacccccccaaaccaaacccacacaccaaaccacaacccaaaaaagccaacgcacccccacaaaccgaagaacccacacaccccaaaataacccacaaaacaacccgaagaaacaaagttcccacaaccctacaacccccgtggaaacaaaactctaccaattcctaacaccatgcat

SEQ ID NO: 25655 - DNA, 487 bp, Oryza sativa
  Clone ID: uC-osflM2020118c11a1
aagggcacaataacgtgggatcgaaataggaattcttatacagctatcttttgacgctacacggaagttcgacgctgggaaagtttgactacaaatggactcaacatatgacaacacaacatagcaagttttaacaaacttggcgcattccagcaagtaggatctctcagccatggttgaaggactggtaaaccggaacctgagaaatcatatgcccaagattgtcatagcaatgggggtatatcattgctggagttggccactgtgggtagaccgcagttccagaagaggagcccatagataaatcgggttggccaaagtacacagaaggttggtttcttgacatattagcagactgcataaaaccaacaccatactgcataaactgtggcacaacaaaattgaagccaccaggactcacttgaagtcgtgcactgggcccctaacataccttttgtagtacgatcatagtcaggatcactacgat

SEQ ID NO: 25656 - DNA, 364 bp, Oryza sativa
  Clone ID: uC-osflM2020118d01a1
aaacataaattgcaaatatattataccaagctttgtatgcttgcagatctatgaacaggaatggtgcctaaaagctataatggtaataattaaggagcagcaatcaaactacggtgcagttgcttatttcagctaagctctgacaaagacctccgaatgcacgggtagtatctgaggactaacagactcatcaaaaattatctgggcgattgctgaagctctttcaagatgcaatacatctgccttgagaaaatggggcagtgcctccgagtggacctttcggaggccttgagggcgaacctccttgggagcaatcaggaacagttggataagacggctagctttcctcagcaggaaatccacc

SEQ ID NO: 25657 - DNA, 235 bp, Oryza sativa
  unsure (1)..(235): unsure at all n locations
  Clone ID: uC-osflM2020118d02a1
gggggnnnnttnnnnnnnnnnnnnggggaataaatatacactttttttagggggacgcatgatttacattactcctaggtgacagagatggccccctaattgaagaaacccatttcggtggaaacaaatccaatggaacatttcccttgtttatttggggggttttagactttgtttacaagggccttgaaccagggggataaacatttttttttcgagtttcccaggttggttg

SEQ ID NO: 25658 - DNA, 273 bp, Oryza sativa
  unsure (1)..(273): unsure at all n locations
  Clone ID: uC-osflM2020118d03a1
gggggtnnaccaggcccaaatgggccttaacaaagtagttaaacttggacaataaaccacgatgtggggcgaagcaatgcaccattttcattagtgctttcagcattttttcgacttttttcacatttattttttccgcagagatggccatcttactggtttgggacttgagagtagggcacggttggatcgctaactcatagtatccctccatttatttagattctagacaacatattgaaaatcaacaaaactttttgatatgcagaaaag

SEQ ID NO: 25659 - DNA, 449 bp, Oryza sativa
  unsure (1)..(449): unsure at all n locations
  Clone ID: uC-osflM2020118d04a1
ttttttttttttttgggtttttttttttttttttttgggnaaaaacaaaacaaggcggccattaaataatcccgccacatgctttttaagggtttacatctggggtaatcgtagggtttcacaaacaggcctgatcctccatggactagtttttttatgaacaactttttgccttttaaagagggaaaacaggcggttggttgcccaagaccagccttttttagattttgaacagtggcaggttccgaagtttttttcccttattccgagggcaacttcaacagggccgggttgtttgttttacatgccgggggtggccactttgggtgcaaacacaactgggggggaagcctttgggccctccgttaattttttgaatgcatttccataggggccatggttttaataactgtaaacaaaagggccgccaaatgtttgaagagatctcg

SEQ ID NO: 25660 - DNA, 595 bp, Oryza sativa
  unsure (1)..(595): unsure at all n locations
  Clone ID: uC-osflM2020118d05a1
gtctccttccatgctgttccaccagcgccggcggcctccgnctccgttcccgcccgtctcgcttcccgcagaaggctgcgacgacgaggagcgggcgcgccggcgcgggggcgcgggcggtggtccggtgcatggcggcggcggcggtggcggcgtccgacgcggcgcagctcaagagcgcccgggaggacatcagggagatcctcaagaccacctactgccaccccatcatggtccgtcttgggtggcacgattctggcacgtacgacaagaacatcgaggagtggccgcagaggggcggagccgacgggagcttgagatttgacgccgaattgagccacggagccaatgctggtctgattaatgctttgaagcttatccaaccaatcaaggacaaatacccgggtataacttatgctgatttgttccagttggcaagtgctacagcaattgaggaagnctggtgggccgaaaattccaatgaaatatggacgagttgatgtcacagcagctgagcagtgcccaccagaggggaggcttcctgatgccggtccatgtgtgccccgtgatcatctttagggggattctacaggat

SEQ ID NO: 25661 - DNA, 458 bp, Oryza sativa
  Clone ID: uC-osflM2020118d06a1
tttattttttttttttctttaccatttttatttttttttttttttggggtttttttcagacacaatgggggttaaaccggggattgggcaaacagcttaccagaggggaaaacagggcacagggatatagcgcaatatcccatgtagtaaaaaagaaacatttgagcaatggaatccccatggggctacaagtttggggggctacaactacccagtggtcaaccaagttcattagaacaaatggccaaccactttagcagaagcccttaggggccaaaatgttgggaccgcattagggattctaaatcaggccctggagctgcaaatcagggtagggcttctgggtgaagatatttccctcctgatcttcggactttttttctaggactggccgccacttgttcagcccttgtggttgttgaattttttcccaaagttcttttgcctcctggatggat

SEQ ID NO: 25662 - DNA, 508 bp, Oryza sativa
  unsure (1)..(508): unsure at all n locations
  Clone ID: uC-osflM2020118d07a1
agtatcgaaatatcttttcagcatgaatgaagaaataaatgtgacaaacagtaagatggaatacatgagagatcgtgcatgaaacccagcaggtttccccacactatgtgctgcagagctttgttttactatggcgtcctccctgatggataggaaactaaaggaaagggaaggaaaaggggatttacaaatgccagtcatccatccattggttagcaagccatgttcatttgctgctgttcccgttgcactggtgtaccacaccattgctgggtgtattaccatttgcatagatcccattgctgctgccaacatccttgcgcttcagattggccttctttaaaccccatatacaattgtgtgatcatcacttgcagatgcagncatgtgcggattcgcaggattccagctcacacagttgaccgtgccggtgtgaccaggcagagtttcaatagatctccagtagctctatgccatatatagatctgaagtaggaaaattattccag

SEQ ID NO: 25663 - DNA, 417 bp, Oryza sativa
  Clone ID: uC-osflM2020118d08a1
ggcagcaaaaaaatagaaaactcttttttttttcaatttagcattgttcaggttgcctcaacttattccttattccttgtcctggttctacagtgaaactctcatcaggtcagtattcacctttccaatttatgaaagctgttaagaaaaaaagtttattcaagggaaaactacctatacttgcttataattaaaatttgccttccttattttagcacaacaaatcatatccctaatttttttttctggcatggataattgcaatcataccatagttctaactctccttgtcctcttccttcgctactcgaatcatgctcaacgccgatatatttgtcccgaacaacttatcccttacagccatgtactccggccatgtcacggcctgatacacggccttgctctccggcgaccccg

SEQ ID NO: 25664 - DNA, 394 bp, Oryza sativa
  unsure (1)..(394): unsure at all n locations
  Clone ID: uC-osflM2020118d09a1
gncncgagaaagatatcgtccgattgtccttctattgattcttttccgatcgagatgtatggatccatgtgtctacatacctagattctgttcatggattaacgaaaatgtgcaagagctctatttgcctctgccattctatgagtcgcttcctttttgcgtatggcacccccaccccctttggcagcatctactaattcggaacttaatttgaaagccatatttcgacccggacgcttttgggatgcttcttataaccaacgaatggcaaggtgctcttccttggttagatcctatttcaatcggaactttccgcgtcgatccttttttattacgtcttgtttttacctctatatggggagttactctacgtattgcttgacgtaaaaccaat

SEQ ID NO: 25665 - DNA, 425 bp, Oryza sativa
  Clone ID: uC-osflM2020118d10a1
accactgagcaataagaagatttatacaggatgacagtaccaggaatctcaatacaagagaaacaaaaaaggggaagtctgaacatcaatgtgcataatacattccaaaacctcgctagaaataaccgcttgtgccaaattgggggtaaaaataatatacacatggatggacaagaaccagaacaaagctcggaacaatgtagtgacgcccttggtgctgcatagagcagaccatgtacaaataaagaataccctgtaaaacttgggataacggcagagtaagccaccggccaatcgtcttcgaaacatgaccaagattgctggcaaacatggcctttcacgtaccatgtcaccaatcaagcaaaactagtaaacatgcagcctttgtagtgggaaagagattcatgcttcagaaaagatcatgc

SEQ ID NO: 25666 - DNA, 400 bp, Oryza sativa
  Clone ID: uC-osflM2020118d11a1
ggggggggcaaaagtatgggaccatactggttggcacaaaatttggcatgtcaaatggggtttttggtaaactacaagaggcaagttttgggtccaaaaattaatgaaagggatcccgttgaaaaatgcccaggcaagggcttttttgcaaaagccaaatgcatttacaataacaggatccaacaggggggatttttccggccaaacatatcctttggggtatatatacaggacatttcctataactcaaatgctaacttaaagaaccaagggggtggatcttttgcttcaagaactcatacaaggaatgttttttttaacacttttttgcctcttttcctgttcgggctcaaagcattaaaaatttttgcatcctcggcgttcgaaagaattctagcag

SEQ ID NO: 25667 - DNA, 423 bp, Oryza sativa
  unsure (1)..(423): unsure at all n locations
  Clone ID: uC-osflM2020118d12a1
aaaaaaaaaaaaaaaaaanatgggacctttaaaaaaatttggggaaaaccccccaaaantaaacaaacatttaaccccaaaaaattacacccaaaatatccccttttcccaaccccccaacaaaaattcctctcccaaaaaaccataaaccaatcccattcaaaacaccccccccaaaacaaattcttaatttacccaacccccctaacaaccggcccacaaggcccacatgacggggtagctcggcagaaacccaaacccaaacagcccggacgccaacccgccgacgtcgcgctgcaaaaaaaaaaagccgaggtaaccccactccgccccccacgagttctaaaaaatccaatcctttttgccgcctttcgccgagccgccgccctcccgaaataaaaaaaaactcgccgtagcccacca

SEQ ID NO: 25668 - DNA, 272 bp, Oryza sativa
  Clone ID: uC-osflM2020118e01a1
ccaggaaaacttccccgtttataacggggggggggaaaaaaattgggggccatcccgccaccaaaacccaattttggccaaaaaatttgggggggtggcccctaaaaaaacatcctgggggggcgggggggcccacccccaccctttttttttgacccaaccccccccaaaggccgggcaaaaacaaccccctaaaaaaaccttgggtttatgtaagctggggttcccatttttttaaaggggccgttttttgacccctttaaaaaaaggaa

SEQ ID NO: 25669 - DNA, 386 bp, Oryza sativa
  Clone ID: uC-osflM2020118e02a1
ataaaaattgacaaaactggaattattggaaaggaaagcatcaacaattattttaacaagcaagaatatgagaactggaatccagacaaggcaagtcttccaagaagcttatatatgcaagcaactccatggaactttgagtgcaacacagaccaaagcaatctagtgaagaaaagccatagaaacagaacctagcagaaagcaagcagcaatgccgatacttgagctagcgatcttcatcatcccgatgacgctcatttttgccccatgccggcgattagtgttactaattaccaagcttcagcaactggaagaagatcatcatgcacacaagggtcaacatctccagcaattgggaggtttctggcaagggatacaaacaataa

SEQ ID NO: 25670 - DNA, 554 bp, Oryza sativa
  Clone ID: uC-osflM2020118e03a1
ctcaaatatgttcatatgatattttgccgggacatgacttgtttgcccactcacaaggagaaaatagaacaagaagcaaagtcaagtaggtaaaagacatgtactaattttgttattccttatgccgaagcaatattggatcaaaaatattctccacaatgtcgtggagcttgattgattatatggaatggtgatatgatctctctttgtgaactctgcatcctttcgctcaaaggtcctcggggccattgatatccttgttctcgatcactgctccatctgggatttccagtttgacaccaggttgggctgtgatggtcaccttgcccttcaatgtgatgctagagccaaaccaaacatcaccggaaaccttcaagggtgtcaagctcaacaatgctggggattgacttgaagcgaccaaggaaacacccgaccttcttgaactctggacccagttcaattgagggattcgatgggtttgttctggccgggttgcgtgtaacaaagccatcaaccaaggtatatagatcagactgtactagcttgaaaatctg

SEQ ID NO: 25671 - DNA, 379 bp, Oryza sativa
  Clone ID: uC-osflM2020118e05a1
gtctgaaaaataaattactatgaagttgtacataatgagcaagggaagcaagtagcttcatggactgtaggagtagtacataaaacatgtgttaagatttaacattatcattagtagtatatagtagggtgttagttgaggccgtcgtcttggaggcgccagtcggtggcgtagtaggagttggggaggccgagccagaacttgaatgcctccgcggcgcgcttcctctcccgcctccgatcctgcctcgcctgcgacgcgtgcttgctggtgaacatccgcgagtgcaggtccacgtacatcctcttgtacttggccttgttgggctccacccccatcttctccatcctcgccaccatctccagcgccttcctgaaca

SEQ ID NO: 25672 - DNA, 519 bp, Oryza sativa
  unsure (1)..(519): unsure at all n locations
  Clone ID: uC-osflM2020118e06a1
ancccnnnnnnnnggcagaagcccacacgccacagaccacagtaaaagaacttaaaaaaaaagagtgcaatcatggagatctccaacgtaaatgcctctcgaggaaacacagggcatcttttgcttaacaaaagagtacaaagcagagtactctgcacaggcggaacagcctaacagccatgcgtttgccagctcgctcaggcccaagagactgcaacgacttaaaatttattgtaaaacaaggctcaacactgcaccatgtagcgtgcgttgctttcgttctcacaagacatcattgacaataaaatgctggaaatcgggatatcacatacatattaaactccaaaataaagtgccacataaggcacataaagcgtggtaccaccttacccaccatttgattgacaagtaacccagacaaatgttgaaatttgacgagcaggtaggattgtcaatttaacttaagtcacagtttactgcatcagaaggttgtgaaggtccagccagccagtccatgac

SEQ ID NO: 25673 - DNA, 514 bp, Oryza sativa
  Clone ID: uC-osflM2020118e07a1
agaatggagaaagcttggtgtttatttaggtatatttaccaactccgccaataacatcattcagatacaacgacaaacaaacaaagatactcttgtagctaatacgaacttccaagcattattggtactttttttatccaaataacaaagctctaatcaattgctgctgttgtattgcgccctttcaaaactgctcatggaaaagctatcattttttagtccctctaagagttttttcagacatcaaggtacttgctggctgtgtggacatccttgtctcctcttccactgcagttcaccaccaccctcacgccgtcgggcagcgttgggcagagcttctccaggtaggcgagcgcatgggatgtctccagagcagggatgatgccctccagccgagagacgcgcttgaaagcatccagtgcctcctgatctgtcacactgtcatattcagcacgtccaatatccttcaaaaagctatgctcaggcccaacaccagtgtagtccagcccagcac

SEQ ID NO: 25674 - DNA, 516 bp, Oryza sativa
  unsure (1)..(516): unsure at all n locations
  Clone ID: uC-osflM2020118e08a1
cacgtgaaacacattaaggtttgataaataaaaagatctccagctggagtgtgacaccacatagtctctgaggactgtctgggactctgggtttatttattgaccaacattacagataagaaagcgcacagcacaaacaaactcgaagcactcatgacgcgaactggaaatactcatgacgaacgaaatactgaaaagacgataaggcgaagtaggcgatgattgggaggagattcggcgcatcactcttcctcagattcagaatccgcgctctggagccactccacgaacggcttggcattcttcaccacctgggactccttgccaccagcaacagattcattataccactgagttatcacttcttcatcagngacgtccccatcatacagggccttgagaacaatcggcacctccttcacagcttcggggcttgacttggcgccgaaggccaccagcgcttgcagcaggaccatctgggaggcttcatcaggcacagcagcagcgaggaatttc

SEQ ID NO: 25675 - DNA, 420 bp, Oryza sativa
  Clone ID: uC-osflM2020118e09a1
tttttatcttttttttttttttttttttttttttttttggttttttttttttttggggggctttttttttttttttttttttttatatttttttttttaggagaccaaaccgagtttatagaccgaactgaaacttgaatatacaatttgccacaacccccaactcaagcccctatgacggggatccatatgtccaaaaattttgccccccgaaaaaacgacccaatctccctacaaggaaagccagctagccgctaactcaagtcatggagagctgccaaaaaagcggccaacctaacatggcaacccccagacaagaacttgataccaatgggccccctggcacccatgagcctcaccaaggaccgccagaaccagccgaagccggaagcccaaaaaaaccccgaatccagccccagc

SEQ ID NO: 25676 - DNA, 452 bp, Oryza sativa
  Clone ID: uC-osflM2020118e10a1
acccaaacggcagcttctcacataaataagggagaccgattgctcaaggttgagaatcaaaaaccgaaagaaataggctctttgagcagagtgcagaacataaacaaaaatgcctgttgcaaattgcaagactacaggtaaacttaaatgccataaggagtttgtttggcagcataagatgaaactactgcgataaggctactctctcactcgtgatgctcttccttgtcatcatcatcagcaccagctgaggagttgagagcattcaatgtttcgacgagactggccttgctctgctagcaggttagcttcttgaggatgtatctcttgtgggcagccggttccttcttggtcgatttggccatggtaggatcagcgcggatggcagcatggaccttcttgtacagtgattccatgccatcagcgtcaattcccttcttgaggtactcact

SEQ ID NO: 25677 - DNA, 555 bp, Oryza sativa
  unsure (1)..(555): unsure at all n locations
  Clone ID: uC-osflM2020118e11a1
ttttttttattatcctttttttttttttttttttttttgtgtttttttttttttattttggggtatttacattattttttgtttaaaaaatatgtatcaagatttttaataaaaaaaccaaggggaaccatggtcccagccccagnccaaaaaaaaaaaagggggaaaaaaaaaaaaaaaaaaaagcgggaaaaaaaaacaagagggggaaaaaaaccccggggcaaaaaaaaaaaaaaaaggggaaaaaaaaaaacggggtgtcaaaaaagggggggggggatcggcccccacaaaaaaaaaaaaaaaaggggggcgggaaaacgggggaagagaggcagccccccccggggcaaaaaaaaaaaaaaaaagccccccaaagggggggcccaaaaaaaaaacgaggggagggacaaaaaacccagacaaaagaaggagggggaaaaaaaaaaaaaacccccattttagctcaagccaccgccggctgaaaaaaaaagtgttggaagggcgggggggggggcccaagatttaagaaaaagagctttcccacccccc

SEQ ID NO: 25678 - DNA, 520 bp, Oryza sativa
  Clone ID: uC-osflM2020118e12a1
cattatggcaaaaacatcatcttcttcttgaggttcttagtgtacacaacaccagctcgatcatcatctcgtcgcactaaacccatcttccccaacccaaagacaacgaactcgctggccacaaatccatccaaccacaattaaccactgctaagctacggtcccccacttcacttgccggggacgaagttggtggcgtacgcccaggcgttgttgttgacggggtcggcgaggtggtcggcgaggttctcgagggggcccttgccggtgacgatggcctggacgaagaagccgaacatggagaacatggcgaggcggccgttcttgatctccttcaccttgagctccgcgaacgcctcggggtcatcggcgaggccgagcgggccgaaggcgccgccggggtagagcgggtcgacgacctcgccgagcggcccgccggcgatgcggtacccctcgacggcgcccatgagcaccacctgcaccgcccagatggcgaggatgctctgcgcgtggatcaggc

SEQ ID NO: 25679 - DNA, 437 bp, Oryza sativa
  unsure (1)..(437): unsure at all n locations
  Clone ID: uC-osflM2020118f01a1
actccgcctctgcagctttctgcgcatgcctgatggcgtccgcagcctgtcccttgctgccgaggaccatcacccacatgtagcgggagaggtcgtcgacgagcagcaggaaataacgtcgtcctcctggtgtggccggtgtcactgggccacacaagtccccgtgcacgagcccgagccgctccttggctcggaagctcgtctgctggggaaaggggagccgccgctgctttgtcaccacgcagacgtcgcagagctgctccacgtggtcaaggcacggcatgcctcgcaccatctccttggcactgagctgcttcagggcctcgaagggcaggtgcccgaagcgctcgtgccactgccatcgcctcgtcgtcccgacgagcggcgaggcaactgggatgtgcgacctgcgcgctggngatgtagagtcgattagt

SEQ ID NO: 25680 - DNA, 337 bp, Oryza sativa
  Clone ID: uC-osflM2020118f02a1
cccaaaggtccacacttacagtacgttcaacgtacaactgatccaagcaaatgaaacaggtttgatgatgcactgatgcgagaaactaaacggttggatcggagtcggagacgaggcgatcatggacaagcggcggcggcggcgatgagcttagtagtcggtggtggggagctgctcgtgggtgtgggagatgaagaggacctcgtagatgacgccggcgaggccaccgccgatgagtgggccaacccagtacacccactgggactcccaggaccagctgacgagggccgggccgaaggagacggccgggttcatggaggtcgccgtcgaacgcgcc

SEQ ID NO: 25681 - DNA, 508 bp, Oryza sativa
  Clone ID: uC-osflM2020118f04a1
aaatccaacttattcgatcatatatttctgtgcagtgaaccatttgtattggtcgaaaaggtttggtcacaagagtatatgggaagaactgatcgagtttagtaaacaaaaaatggctgaccaaaaactctccagaaaagctaattgctccatctctccctgtacaatatgatgatgtgctccatcatttctcagactgtctgccactctgtgtgtctttagactttacgcagcactcacaggtgagatggctttgccgaaaagcccagcgattgctttgccaggatcctactgcttgatgagagactagccatcgagaacagctttaaccccagcattctgaacgaatgaaatatggtctggggggaacagccctgattcccctacaacaattatgcctttctgagctatagtttgtcctctttcaccctcaagaagatttttagtgtttgaaatatcaacttgaaaagtctcgaggttacggttattgatgccgatgagcttgaca

SEQ ID NO: 25682 - DNA, 462 bp, Oryza sativa
  Clone ID: uC-osflM2020118f05a1
gcaaatcgatccatgcgaccatgcgtgcagatcagttggagcacaaatttacatgttacacccacaccctacacccatgcataataatacatcgtatatacgtacgtacatacatacccctctcgatcacacgcaccatcgatcgtacaaagttgcgtacatacatacgtacacacatatacgcatacgcacgtacatacatacataattaaaaactcgtaattaattaaatacgtagttgatggcatctctaatggaacttgaggctggtggagagcctgcttgtggaccgggatcagcgagtgtgatcaagtcaggttctgcacggggccaacccctgtgaagagcgcctggacggagaagccgaggaaggcgagcatggcgagcctgccattcttgatctccttgagcttgagctccttcatatccgcctcgctcttggtcccgaagccgagcgggttg

SEQ ID NO: 25683 - DNA, 350 bp, Oryza sativa
  unsure (1)..(350): unsure at all n locations
  Clone ID: uC-osflM2020118f06a1
annngnnnnnnaagagctcacacattggagggattcattcagtcatcgggtggaaaaaggaagcataatattacatctcccatcttacatgtcctcaccaaaagagagaaaagaagaagaagaagaagaagaagaagaagaagacgaagaagaagaagaagaagagagagaacaagcgagacatcggttgacgcgacgcgtgccgcgcttaaccacgaaaattaaccggccatacacatgacgatttagccggaagtactaagcacggcgcccctgtgtgtgcgatcgatgctgcatcaggcgccgatcttgtagctgcccatgtcctccttgatcatctccagctcctg

SEQ ID NO: 25684 - DNA, 365 bp, Oryza sativa
  Clone ID: uC-osflM2020118f07a1
cgagaaagatatcgtgcgatctgggttctatcgattctttcccgatcgagatgaatggctccatgcgtctacatacctagatgctggtcatggcataacgaagatgtgcaagagctctatttgcctgtgccattctatgagaggttttctttttgcgtatgggaccgccacccactttggcagcatctactaatcctacacttattttgaaagccatatttagagccggacgcttttgagatgcttgtaatgaccaacgaatgggacgtgctcttgcttgtttagatcctatatgaatcggaactttccgcggagatgctttgatattacgtcgggtggctactcctatattgagagtcactata

SEQ ID NO: 25685 - DNA, 276 bp, Oryza sativa
  Clone ID: uC-osflM2020118f08a1
ggcggaaagcatagggggaaggtaaaacacatatggggggagaccctatcaactcagaataatgcataggaacacttgatcaaacctgtaaccagcgcactgcggttcgaacgtcctatgataccggatcagaagagcaccaccactcgcggctacgtggagggctacaaaatatcaatttccagggccccggtgggctgcaccacataggcgaaagcgagttctgaaaccgcgtagggcacccaggcaagaggcaaacttgggacttatcacgtc

SEQ ID NO: 25686 - DNA, 404 bp, Oryza sativa
  Clone ID: uC-osflM2020118f09a1
gaccctatagagcgcgcgcccttactttttttttctcctaaattcaaaacccacgatttatcagggggggaattttaagaccacaaacgggggagaccccaaaaggcaagaaaagagaaagggcccagccgaaacaaccttgcgccagttacgcccatgctagggcactagaataccccggcagagagcccacccacgcgcgtgccccggaagggaaacgggttgagaaggaccgatcatcctctacggggggctgtacaggcaacagaacatcttaagaactcgcgcggtgcccccgcatgagctatgttaccaactcaacggaacaacaattgtggaatcgaaagaagcggcggtcttttaaacaaggccgctggaccccattccacgctgcaagaatgtgg

SEQ ID NO: 25687 - DNA, 413 bp, Oryza sativa
  Clone ID: uC-osflM2020118f10a1
caaattcaaaaaccacgatttataaagtgccggagatgaagtacacaaattaacattacatcgagttttaataaaacatcatgcgaaaagccagcaaaaacaaaaggcagcatacagctaatgaagctctactggagtagctcgcaaaaggtccgacttattttcagtagcactctactccatttcttccgaaagagtgaccatcttctactgggtgttgtacatgtgacggatcaggtcaacaacgcgagagctgtatccccattcgttgtcataccaagacacaagcttaacaaagttgtcattgagagcaataccggcctttgcatcaaagatgcttgacctgttgtcaccctggaagtctgtggaaacaaggtcctcctcaacgtaacccagaatacccttgagtttcc

SEQ ID NO: 25688 - DNA, 526 bp, Oryza sativa
  unsure (1)..(526): unsure at all n locations
  Clone ID: uC-osflM2020118f11a1
attaggtgagaatatttttagatttaactggtttctataccaacagaaaacaattgagtaaaatcaatcagggtgcaatatccatcatcaataaggcctttccatcactggaatggcaaccttcagcaaaaatccaatcgaatactccataatgtagtgactccttgccacttgcagcaagaagaaccagttctggttcaagcacaaaactgcatttatgatcctttcaggcttgtacaaactgtccaatgatgagctcacaaacagccaaccgaaaccacttcatcacagatagcgatctttgcattgatgagaacccctcggcctcaggaccttcacatggtgctccaccaccactagcggacactgtcttgttttncggtgtcagctactgaatctgaatcggttttactactaccgcttaagcagtacttctgcagccatctatcagtctcccacagtacatgcatgatgctcttcctcgcagaatacccatggctttcaaagggagtatcacccaacgaga

SEQ ID NO: 25689 - DNA, 400 bp, Oryza sativa
  Clone ID: uC-osflM2020118f12a1
tttttctccttttccttttttttttttttttttttttgggtttttttttaatttttttttgggtttaccccccccttttgcttgttcaaaaaaaaaacacaacacccttttttattgatccggtttaaaacccgcccaaaaatacaccctcccggaaaaaatctaaccttttttccaatattaggtcaaccaaacacgggggcccaaccaaaccctaccttttttcgggaccaggaccgccctttacaggcccggggacacacagacacactttttgggaaagacccccatccttataaacccaggcagcttaacctaaagcccaaaccccccatgggaactcgggcggggcgggcatcacttgccggggacaaaggtccaggctactgcccacatcctg

SEQ ID NO: 25690 - DNA, 355 bp, Oryza sativa
  Clone ID: uC-osflM2020118g01a1
caaccaactttttttttgcttatgggggttttttttccatttacctttgtttttttttttttttttttttccctttcctgccgccccaaagggggggcttaaaataaatgggttggcacactgcctccctttttttcccaaggaccccatctttcaaccttttaaaaaccccgcgccctttttttcgcgggcccgccctttacccctcctccccccccgttaccccaaatataaaaggtcccccagcaaggaatcgccctgtctcccacggggtcattaggagcccccacaactgatgttcccgggggagggggccccaaaacatctctgcccaataatcactcgggatccccca

SEQ ID NO: 25691 - DNA, 369 bp, Oryza sativa
  Clone ID: uC-osflM2020118g02a1
atggcaaaaacatcatcttcttcttcatgttcttagtgtacacaacaccaactcgatcatcatctcgtcgcactaaacccatcttccccaacccaaagacaacgaactcgctggccacaaatccatccaaccacaattaaccactgctaagctacggtcccccacttcacttgccggggacgaagttggtggcgtacgcccaggcgttgttgttgacggggtcggcgaggtggtcggcgaggttctcgagggggcccttgccggtgacgatggcctggacgaagaagccgaacatggagaacatggcgaggcggccgttcttgatctccttcaccttgagctccgcgaacgcctcggggtcatcggcga

SEQ ID NO: 25692 - DNA, 405 bp, Oryza sativa
  unsure (1)..(405): unsure at all n locations
  Clone ID: uC-osflM2020118g03a1
ctaannnacacagcacaatacttttattatatatgagctatcaaggaacagttacaatcctagatggtttcaaacttccatccttatctatgatcccatttacatgaagagtgccacaaaagcatcaacatcaaaacagaagagggtaaacatatttacaaaaacgcacagctggtcaagttgatagggcttgcatgcttttagtttacttatttatgtccaccaaactgacctggaggcgaaatacctcatgaacagcaccacgcttaagaatggctagaattgttgccccctctgacatggtgagctcactcaatgaaatttcatgagactcggattcatcaggcaaccggaaaccgtagaaccatctaccaggcttgtataagctcacacacacttttcttt

SEQ ID NO: 25693 - DNA, 438 bp, Oryza sativa
  unsure (1)..(438): unsure at all n locations
  Clone ID: uC-osflM2020118g04a1
gagaaatagcttcatcaatagcgcttttcttattacgcttgtagttaccagcaatccaggagagtatccgtggattcatacaggtgatattatgcatattaaatcaaaactgcgtagcgtggcccaggtttctcaacgggaatagcaacagcttctatatagaactacagattggattcatctcgctgttcgaggacgatgacgcagactggtcgaaagggtttgccacatgatggagttcatatctggctgttcgacgaagatgatgcagactggtcgaaagagtttgccacatgatggctgaggccgtggngaatgttggtggcttgtttggccgtcctatcgttctctttggcttcgtcgatgtccttctggcttaggaagcttggctggttggttgatgatagcagcctcgcccacatctatcagtgatcttga

SEQ ID NO: 25694 - DNA, 432 bp, Oryza sativa
  unsure (1)..(432): unsure at all n locations
  Clone ID: uC-osflM2020118g05a1
attaaatgttatgtttactcattttttgaaaggaggtgtgtttactcattcatataaaaaaaaagttacactggtgtacaaaacccatactacagtgacaatgctgctggagtacaagcatccataaatagaagttattagaccagacatttgaccatgtaaggcccctcaagttcataacccagtttacggtagtagtggcgagtcccaactcctgatataacagcgattttctttgaacgatgctccttgcgagcaattctttctggttcttccatcaaaagagtaccataaccctggtgttgtagttttgtctgcatcacgaccatgtacagggactgcagttccatataccatgaagttcacggacaattgaacacctncctactagctcagggcatgtaacattgcggccacattttcgcaatcgca

SEQ ID NO: 25695 - DNA, 503 bp, Oryza sativa
  unsure (1)..(503): unsure at all n locations
  Clone ID: uC-osflM2020118g06a1
cagaagcaaataacgtgtgtataaatattacgacaacaaaggggctaatcctctgcagactgaagtcatcatcatcgcacatgattaaaaaaaatacaatgggacgcatcatctcttagcccgcgagatgggaaaccccctcagaaattgtactaatcgttccaaattcatcagcacacaccgttaattacttactacttgtatttatgtatttatgtatgtatatctcacaacggatacacgtcgaatctttattacttgtgtccttcaccggcagtcccctgatattcttcagcaagcagcagcagggaagcagtagcctcaggcgtcatccttgtctgcaaagatgtcaagaagggagagcgcctcggcgacgctgagctccagccttgacttggngccgtcgtaatggtgagggatcggccgaaggcgtcctcctccacgggcatagatctcctcgtcgaaccttacctgtgcagggagcgcgactcccggggcacttt

SEQ ID NO: 25696 - DNA, 339 bp, Oryza sativa
  unsure (1)..(339): unsure at all n locations
  Clone ID: uC-osflM2020118g07a1
ttttntttatatatattttattcattttaccaatcagggggttttttaagttttttataagggaaacccacattttttttggtcaccggccagtgaaacctccaaaacaccccacaagaaaaagagaaaacccacagagacaacaacctaaacctggaggcctaagtgagaaaaactaaaactacggggcggggggggaaaacgcctaggccaccactgaggggggggaaagatagaagagatgcacccgcagcaaaaaaagggctccccaaggaccaatggaaacggaaactccaaacgacgccaccaaaaaaagaaaaccgccaggccgcccttaaa

SEQ ID NO: 25697 - DNA, 149 bp, Oryza sativa
  Clone ID: uC-osflM2020118g08a1
caagcaaaaaatctaacaggtgtatttaggcagatccacctctctacatcatcatagtcatagtacaagaactcgacgaattcagaagaaacattggcagctacacctagagaaaaaaaaaaaaaaaaaaaaggggcgccgctcgcgat

SEQ ID NO: 25698 - DNA, 378 bp, Oryza sativa
  Clone ID: uC-osflM2020118g09a1
ggcaaccaagggcacattttggttaaacaaatggcaaggttaaatccacccttttcttgtctgcgcaaagtaacagaagaaactaggcatggggatttttttacaacactccgcccggtcactggagcaactacaagattgggagagtttaaaataaaacttttctaaagaaacaatcaccccccaccatatataggcatttggttatgagatggcccggcggaacattttagaacatagcccaccaactttttttggtccccacatgtacttcaggggcacttggggatctacagaacaggtgccttctaccactcctagcagggtttgtaaaggctaaaactagggggaaaccggtaaggcttacgactggggcag

SEQ ID NO: 25699 - DNA, 386 bp, Oryza sativa
  Clone ID: uC-osflM2020118g10a1
ctggggttccccccagccccccaggagtcccacaccaaagagacagccaccaggaaaaaaacccccaagccccggcgagggcccccaaaaagaccccccacagccccccccaaaaccccccaaccggaaacaacccccgggaaaaaaacaaaaaccccgccgggaaaaggggccagaaaaacaacccccaaaaaacctggggggggggcggggaaaaacccccccgggggaaagggcaaaaccaccccaaaaaaaaaagcccccccggggagccccccaggaagaccccccagcgctcctttccccaaaagggggggaaaaaccgcccccccccgcctgggcgcggggggggggacaccccccagggggacaaacaacgggagacc

SEQ ID NO: 25700 - DNA, 458 bp, Oryza sativa
  Clone ID: uC-osflM2020118g11a1
aaacaagccaatatccttgtattaattatggagagtacttccaatgtccaaacaggtaaaatctaacttataaggtaaaacaaaatgggccagctataacaactagatgcccacttacaagtaatcctcgtgaaatccaaccaccatcacccaagaactgatcctcacaaaggaatgtcgaagaactatcaaaaagtaatcgcccagacaacagaccacttttaagcgacaagcttcagtataattggcaggagggaacacaagaagcaagatagcactactgtgcagacaaaccctcataaggtgctaacactaacaacttttgtaagaagtcaaaaggtgtgtgtatacagaactagctgcaaaacgcggcactcgtttacattctgaaattctgcctcgtcttgatcatacgcttcaatgcggcaagccagaagttgcactcgtcccagtcgctc

SEQ ID NO: 25701 - DNA, 537 bp, Oryza sativa
  Clone ID: uC-osflM2020118g12a1
tttttctcctttcctatttttttttttttttttttttggggtctttttttattatttttgggcgaaccaaccccctcccaaaaggcaaaaccaaaagcaacaccactaaccacaaaaaactctaagcccaacaaaaacttaacaaaaaaaaaaatcgtcccaaacgacccaaaccaaacagaagacagccgccaacacttcccagtctaattgaccaaccagatggcctcaagcactaacccagcactcacaggagagatgtctttgccgaaaagcccaccgattgctctgccaggaccctcctgcttgatgagagactccccaacgagaacagctttaaccccagcattctgaacgaatgaaatatggtctggcgtgaacagccctgattcccctacaacaattatgcctttctgagctacagcttgtcctctctcaccctcaagaagatctttagtgctagaaacatcaactcgaaaagtctcgaggttacagccattgatgccgatgagctggacaccatctatccctaacaca

SEQ ID NO: 25702 - DNA, 338 bp, Oryza sativa
  unsure (1)..(338): unsure at all n locations
  Clone ID: uC-osflM2020118h01a1
cgttaatagaacgtttggaatttcactgaaaatttaccaggaaacaaatgatagagcaaagaaaaggagttgcaaacctgcaattcgacgaaatttcataccgaaaaccatctataacaaaacaatccctaaaatagcagctaaaaaaagaaagagtaggtgcaatttaccacctgaattacctcagctttgctcgcgcgagctctgtggccaggcggtggccggtgcgccggtgcgccggtgctcaccggcggcggcgatgagagagacaaggcggttgggnctgtccaccgccagagggaggagacgccacgtgggcggagacagtggaaatgggc

SEQ ID NO: 25703 - DNA, 341 bp, Oryza sativa
  unsure (1)..(341): unsure at all n locations
  Clone ID: uC-osflM2020118h02a1
ancancatcatcaggctaaatggaccacttacatagttaattacatctgacgaaacacttgagcactcatctcaaatcaacctgtcgatctgaactctgaaagacacgcacgaacacgacttaattaacatctgattgattaactatgtattatatatatcattcacgatcttgatcgatcgatcgatctcgctatatatatatatttgttcttcatcgatcgatggatcatatcatcatcatcatcagtattaacaaataattatntaatttgatcatgaggagacgctgaatggcttgtaatgtgcgacggatttgatgaggccctggatggaaccggc

SEQ ID NO: 25704 - DNA, 379 bp, Oryza sativa
  unsure (1)..(379): unsure at all n locations
  Clone ID: uC-osflM2020118h03a1
ctgnganccaatcattgcaaggacaaacagtgtaggtatcgatgacaaaatttgactgctatagatgagaagaggacacaaaatcgctcagcagttcactttgacattttgtgacttgctggctaactgattctccaccgtttgatatattcccacgaaaactcaaaattgccattttgataaaactggcgtttttttggtctaaagaagcccaagggcaagtaaaggaaactcatggatgaggagcaaacaaaattcccatgaaatggttcatatggccatgacttttgcacataaggcatgggcttacgcttccatcttgtcgaaagaatccagcagatgctcgatgtccggggttacaatcgcgcgcttgctgatc

SEQ ID NO: 25705 - DNA, 441 bp, Oryza sativa
  unsure (1)..(441): unsure at all n locations
  Clone ID: uC-osflM2020118h04a1
cttgttaaaangnnnanggnacattagaaaatgggggtttttttgtattgtaacggggccaagcacaaagagaataaaataggcacattacgctcttataaacggaaggacaacaaagccacaaggcgtcctctattcaaagagatcggcatcatgcacaatatcgtctctcttcaggtgtaggaaacaacatatgcaattagctgctatattcttcctgttatttgtccaggacagttacaaggtagtgcacaatatccacaagaagaaaggcctcctgatgaacgtgtgtacaaggcccagggttccccctaataaaatctgctgtggccatagttgcatactaccccatttggctaatttccacgcctagcacagtgccatcgcttggagaacaatccttgagttaatgctgaaaaatgatattccttgcctgattga

SEQ ID NO: 25706 - DNA, 516 bp, Oryza sativa
  unsure (1)..(516): unsure at all n locations
  Clone ID: uC-osflM2020118h05a1
aaaagggtaaactcttcataataatattagtaagacattatagctgatgtcttttgatcacactgcgatcaaattatgcatcataggcagtacaactccgcgtcaggaaaaagtagaggagatatatttcttgttattacttaatacagcattcacatatatcgaaccatccggtacgtacgtagtagtactccacgcgttcacatcgatgatcggggacgatatcctcaggtagtacttatgcaaaagcgttggcgtaaactgacgaactgaacggacggacggtcggatttagggctcccataagtccaagttgccggagacgaagtcgtagtggccgccgacgagcttgagggtgccgttggcgatcccctccttgacgaacggtaggcttggaggttctcagggattggttcacggcctccttctcaagatggcgcattggtcatcgaaaggcagcgaggcgtgctcggtctgaaccttcttcttggcggngaaaccggtcctgacccagtc

SEQ ID NO: 25707 - DNA, 377 bp, Oryza sativa
  unsure (1)..(377): unsure at all n locations
  Clone ID: uC-osflM2020118h06a1
ccttttcctccaaaaccgncaacatttgatcaattttttggtgattttttaaatacattgccggattaccacccttttattataatagttaatataagcagccaaaacatccaggcaggaaaaaaaaaaggagataaatctcatatatgaacccaatagggcaataacacatttatcaaaactactacacgctgatgaaaaacgcatgtgccccccccgatgacttttaacctcgtacagaagcaccacctgcaataagagattctttgttaggggggaaaaaaacggacttccgagagcaaagacaccatcaataattaccaccaggcggggaccaaccccccctggggatcatacaattgaccttaccgataaac

SEQ ID NO: 25708 - DNA, 417 bp, Oryza sativa
  Clone ID: uC-osflM2020118h07a1
atcaaatatctcctccatttgaccaatcagtggacgagtcaagctatacataaccccaccacactcttttttttctctctgttcatttcagtttccattacatccaaaaagaaaaagaaaaactctctgaatctcatatctgaacctgtaagcttcaatttacatctatcagaactactatacggtggtgtaaaacgcatgtgcctctcctgatatcttttttcgctcggagagttgcacctgctgcaataagagaatctcgcaaaggaggaatggaaatggagtcggtgatcgatgccaccatcagtccatcaccaccaggctgccattattcttttcttgtgatcttcaccattgccctttctgtataaacttgtggcaatggccgaggaagatgatgcatgacggcctggctta

SEQ ID NO: 25709 - DNA, 432 bp, Oryza sativa
  Clone ID: uC-osflM2020118h08a1
aaatcaggtacaacggcattattcattacatgatcatgcaacacttcacgaaagttgtaatcgaattgagatggcagttaagctttcgaacgctaatacaactcggaaagtattcagtgcctacctgcaggcaacactgcatgaggtggtgctacattttctccaaagcacagaagtacattttaagcagaaaacaggggcttagatgcccttctccagcattgcccggactctggtagggagaccatatagcctgatgaacccttcagcatcagcctggttgtagatctccccattctcaaatgaggagatgtcttccctgtacaggctgtatgggctcttccgggacgcgacgtttacggagcccttgtacagcttgagagtcacggagccggctgttgtcgcggtaatgttctccatgaacgcatcaat

SEQ ID NO: 25710 - DNA, 449 bp, Oryza sativa
  Clone ID: uC-osflM2020118h10a1
ggaaggcaaatgttcgtgaagataggcacatatatgtatcgtacaatgtcctctccgcttgtcgaaatgcaaataacatcatcgggggatatgatcatcagttcacgagaacagaggaagaaacaaaagctaaaaattaaaaccatcaacagcccgatcgagtttgcattactagatacacacattgcagccttccttccctctctccatgtatcgatatatcaacccggccacgcacaaaacatttgttcattccctactcgagctgcgcgtaccacaccccttggatcttgacatccttgggcaccttggcgccgaggtctgtgtccgacggctgcacgctctcgaagacgccaatcacctcgccggtctctggcttgctcttggtgacgctcaacgtgatgttgcccgtcgacgacgaggcgttcttgacgttctccttagcgagc

SEQ ID NO: 25711 - DNA, 449 bp, Oryza sativa
  Clone ID: uC-osflM2020118h11a1
gggggggggctgcacaaaacaggattacgtaacaataccctttgcccaaaacaaggcaatactacaacatctgtggcgagtacagaggtacaaaagtcaggccccgtaagcctttcgattaaaaaccaaactgaaacacccacgattttttaacaccccacgaaaaacaatctgatagctagctcctttggggggggaacctaaagagctttatcttcccaaaacatccacatcattatctggcatgactatatagtttcgatacctaaaaaggcagcgttcactcagggatatccgccatgtcttcctttcatttaagcccggccaagatgcttcaagccttgttggcaatgttgttggaaagccagtcaagcccctcatacaacccctaaccagaggtagcacatgtgctctggatgtaccaatgccgcttgcgcaaggagtgcaaa

SEQ ID NO: 25712 - DNA, 368 bp, Oryza sativa
  Clone ID: uC-osflM202037a11b1
ttctttgatggagcactcagcgatgtggagctgagggactttcatgacaaatgcgtgagtgctcctctccagcctactgaaattgcaggcgtgaagagagtggttcaagagaagatgcctgaaggcgtgaatgacaatggccttaccttgactggattcctttttcttcatgctctttttattgagaaaggacgactagaaactacatggactgtcctaaggaagtttggttatgataatgaaatcaagcttaaagatgaccttattccaacaattaaacgagcgcccgatcaaaccctggagttgacaggtcaagccattgatttcttgagaagaattttcaatatgtttgacacagatcatgatta

SEQ ID NO: 25713 - DNA, 220 bp, Oryza sativa
  Clone ID: uC-osflM202037b02b1
gtctttttttccacagtgcatctagtgtcaaactcgggggggactgttattaacccgctggtcccacataccgtgtccctcgtaatgtctatgaaccaacctccggaacctgtatctagacagagagcctccacagtaaatactacgtaacaaaaaagtatctagtacatctagtgctacagtactgagatatcctacacgccttttcttcctgagtgca

SEQ ID NO: 25714 - DNA, 513 bp, Oryza sativa
  Clone ID: uC-osflM202037b12b1
ttctttaccaccaccttcatcttggttggctggggtcactcctactacctacctgcgggtgcagttggcttgctgaaccctcctcaagaacccacgcctctcctctcgcggcggctgctaaccgagccatggcgcgcaagaagatccgggagtacgactccaagcgcctcctcaaggagcacctgaagcgcctcgccggtatcgacctccagatcctctccggccatgttacacaatcgacggacttcacagagctggtaaaccagcagccatggctgtcaaccatgaagttggtcgtgaagcccgacatgctgctcgggaagcgtggcaagagcggacttgaggccctcaacctagatattgctcaagtcaggagtttgtgaaggagacgctgggagtctaggtcgagatgggtggctgcaaggctccaatcaccaccttcattggtgagccattttgtaccccatgatcaagaatactacctttctatttgcctcgagaggctgggcagca

SEQ ID NO: 25715 - DNA, 461 bp, Oryza sativa
  Clone ID: uC-osflM202037c01b1
ccacgcgtccggttgttttcgttgcggggaagcaaccaaccaatcgggagagttagcgagagaagaggggaggaggaaagtctcaggaccgacagtgataggcgaaatccctctgatcgagttcgcgttcttgggaaattcttctgggagttcttcgaagaatccgcctctgaccactacgacggattggaggcgtggagtgccaaagattcgctagatcggggggcctcttcctagcaggccttggttcaagatcgagaggaagcactttgtgagggtttccagtgcccgatacttttttttttccagaatcttaagcggccgcggcagtggtgttgatgcgctgcgtctccagatccactgctgcagtcggcagcgccagtggagattgcagcgactcattatcggggggtgccctgccctggtttcagtatcatctactttggctgtggttggggatc

SEQ ID NO: 25716 - DNA, 441 bp, Oryza sativa
  Clone ID: uC-osflM202037c03b1
gcggtggctgccatggcgtcgttaggagctaacagcgatggccgagtcctgcacacctgcacactctccccaaagccggttacagctttgagcagaagcatgggggccattcctggacaccatgtttttcagtctccacgagctcggattgcagtgcgagctagcaccgagcgtgcgacctggctgcctgggctcgatccacctcctcacctcgacggcacattacctggcgatttcggatttgatcccctgggtctcggggaggaaccggcaaacttgaaatggtatgttcaagccgaacttgtgcactgccggtttgcgatggcaagggttgctggcatccttgcgactgatttgatacgtgtatcaggaatcaacaacctgccagtgtggtttgaagcaggtgcaacaaaattcgacttcgctaacaccacggcactc

SEQ ID NO: 25717 - DNA, 454 bp, Oryza sativa
  Clone ID: uC-osflM202037c08b1
gtcttctcctcctcacacctcaccttccccctcggtgctccgatcgcgcgcgcatggcgatgtcacgagccgccgccgctgccgcggggactcccgtggcgcggcggcgattgatgggggccgtggcggcgaggtcgatggcgtcgtggttcggccacgtggaaccggccgccaaggaccccatcctcggcgtcaccgaggcgttcctcgccgacccctccccggacaaagtcaacgtcggcgtcggcgcgtaccgggacgacagcgggaagcccgtggtgctggagtgcgtgcgcgaggcggagcggcggatcgccgggagcatgaacatggagtaccttccaatgggtggaagcataaagatgattgaagaatcacttaaactggcctatggggagaactgtgagttcatcaaggacaagaggatcgcagcagtgcaggctctttcaggaac

SEQ ID NO: 25718 - DNA, 522 bp, Oryza sativa
  unsure (1)..(522): unsure at all n locations
  Clone ID: uC-osflM202037c09b1
gtttgttcgtgaggagagcagagggaaagcgcgagggggaaggaggaggaaaggtgcacaaggtcagactaagtttgcgttgaagaacaaaggagaggaaaaatgtcgcctgctgaggcatcgcgtgaggagaatgtgtacatggcaaagcttgccgagcaggctgagcgttacgaggaaatggtcgaattcatggagaaggtggcaaagaccactgatgttggtgagctcaccgttgaggagcggaacctgctttctgtggcttacaagaacgtgattggtgctcggagggcatcgtggaggatcatctcttctattgagcagaaggaggagagccgtgggaatgaggcatatgttgcatcaattaaggagtaccgtagcaggattgaaactgagctcagcaagatctgtgatggtatccttaagcttctggattcccaccttgtcccatctgccactgctgcagagtccaangtgttctacctgaaaatgaatggtgactaccacaggtaccttgctgag

SEQ ID NO: 25719 - DNA, 481 bp, Oryza sativa
  Clone ID: uC-osflM202037c11b1
gtcctttgagattgctgagaaagctagagatgctatccttagtggcaagtttgaccaggtccgcgttaacctcccaaatggtgatatggtgggtcacactggtgacattgaggccacagtggttgcttgcaaagctgctgatgaggctgtcaagatgattctggatgccattgagcaagtgggtggcatctatttggtcaccgccgatcatggcaacgccgaggatatggtgaagaggaacaaatccggccagccacagcttgacaagaaaggcgaaatccagattcttacctcacacactcttcagccagtgccagttgccattggaggccctggcctacattctggggtgagattccgcaacgacgtgcagacccctggcctctgcaacgtcgtcgcaccgtgatgaaccttcacgggtttgaggcccctgctgactacgagccaaccctaattgagtagttgacaaataattaaatgt

SEQ ID NO: 25720 - DNA, 485 bp, Oryza sativa
  unsure (1)..(485): unsure at all n locations
  Clone ID: uC-osflM202037d02b1
gcgtctcttaggccaggtacgtcaagttccactgggggggcacctgcggcgtcagctgggtgatggacgacgaggccacgctcgtctgcggcaagaaccacagccacgccacccaggacctctacgactccatcgccgccggcaacttccccgagtggaagctgttcgtccaggtgatcgacccggaggaggaggagaggttcgacttcgacccgctggatgacaccaagacatggccggaggacgaggtgccgctccggcccgtggggcgcctcgttctcaaccgcaacgtcgacaacttcttcaacgagaacgagcagctggcgttcgggccggagctggtggtgccggggatctactactccgacgacaagatgctgcactgcatggtgttcgcgtacgccgacacgcagcgctacaggctggggccaaactacctgatgctgccngtgaacgcgcccaagtgcgcccaccacaacaaccac

SEQ ID NO: 25721 - DNA, 471 bp, Oryza sativa
  Clone ID: uC-osflM202037d03b1
cggtctcttgggcgaagcttcctcccccccaaaccgggtgcgctcctcctcctcctgggggggcaccacggcgacgccgccgcctcagagcccctagctcccggaggtccctcgcccccggcagctccgacggcctcacggaaggaggagtaacgtgggcgttgattggatttttttggtttccccccaccttgagtgagtctgtgccgtttccccggcggcgagggagggcagagggctgatcatggtcgtgcgccgccggtgccttgccgagatttcccccaaccgccaccgacgatcgttcacttggcacaaaggggagtagcactgtccaagctgttgtgggccgtcagggagattgggcaacctgtgggggttcagatcgacataagtacgtcagtatttcagccatcgatcaatctggcggttcatatggctgtgcttgcaacctttctggcagataggagagag

SEQ ID NO: 25722 - DNA, 446 bp, Oryza sativa
  Clone ID: uC-osflM202037d11b1
tatctctaggaaaaaatcatcatggtcgtcatggaggggagagacagtatagcctaatctaatcccagattgctagtgattagcacgtagatacatagaagcgatcgatcgaggacacatcgagaaaaaggtaaaagggagatcaattaatcgaagaagagagtttttgaaatatcgatcgatctagctatcatcatgtcgttcatccggaagaagtcgatggagttcttgaagagcttcgaggtgccggcgaagaacccgtcggaggaggcgcagcgccggtggcgggatgccgtcggcacgctcgtcaagaaccgccgccgccgcttccggatggtacccgacctcgacaagcgctcgcaggccgagacccatcgccgcaagatccaggagaagcttcgtgttgcactcttcgttcagaaagctgcacttcagttcatcgatgc

SEQ ID NO: 25723 - DNA, 459 bp, Oryza sativa
  Clone ID: uC-osflM202037d12b1
gtactaaccgacggtttccccggccatggctggtgggccgccgtggggaaccccgagccccgagcgcggcagcaggaggaagggcgaggacccgtggctcgcggcgagccttcgcccggtgaatttcctcccggggctcgcgattgggttcctcctcggcctactcgtggacttgacctcctcatggaggccccaatcgagtccaccgatggctccggctgcccctgcgccgcggggctccaagcggacgggtggctcgtcgcacgctggcgggggcatctgacgcgaagagcttaagacggtcttggtcgtgcgttaggacctcaagatgcggtctggaaaaataggttctcaatgtgctcatgcagcaactggtctgtatgcatgactgatggctatgctaccgtgtcttttgagacagtgggagcaatttggacaagctaagagctgtttaacatg

SEQ ID NO: 25724 - DNA, 472 bp, Oryza sativa
  Clone ID: uC-osflM202037e03b1
ccgtttctcggcgccgccaccccgcaccaggtaagggggggggagtaagaagatgtggggcaggaagttcgagcacccgaggcacggatccctcggcttcctcccgaggaagcgctcctcccgccaccgcggcaaggtgaagtcattccccaaggatgacgtcaacaaaccatgccacctcacctcctttgtcggttacaaggctggaatgacccacattgtgcgtgaggtcgagaagcctgtttccaaactccacaagaaggagacctgtgaggctgttaccattattgagacacctcctattgtcgttgttggacttgtggcctatgtgaagactccacgtggcttacgcagtctcaactctgtctgggctcagcatcttagtgaagaagtaaggagaaggttctacaagaactggtgcaagagcaagaagaaggctttcaccaagtatgctctcaagtatgatagcgat

SEQ ID NO: 25725 - DNA, 381 bp, Oryza sativa
  Clone ID: uC-osflM202037e08b1
attgtatcaccttcaaagtttggtgccattatggagtgcactccagaaacaccgggggcgatcctaagcactgagcctgtgcctactgttgcttccaccctgagtgaagatgagccagttctgtgtgaagatcatgtatcatgttcaactccacaaattgatactacaatcacctcaaatccaccgaaagttggtaaaactgttacccttacttcaagcatgctgattgctagtcactctattcaagcaccgtctatatcaccggcaccacagggtgatagggtctctaaaggtattggtgctcccaccaaatcacctgctacacagggtgataaggtctctatagctgttccgactccctcaaaatcaccttgtacacat

SEQ ID NO: 25726 - DNA, 359 bp, Oryza sativa
  Clone ID: uC-osflM202037f03b1
taatcctctccattggtgttcttttaatcggcgagagagggggtgctccaagaattgcaaaggggagaggagagatgagagagtgaagaacaactacataactaaagcatctctctctctctcctctctctctctctagaacacaagaacaatttagcgattactagctagtgttcatcaaaactgaacttggacaagaaatttacctaaagttagtattccacgatgagctttcttgagcaggcaaccgagcggatggcaccaccgccggcgaggctcggctccatcaccaagctgacggcggcatcgtcgtacttcgccaacctcttctccaccttcctcgggccagtgagctcccc

SEQ ID NO: 25727 - DNA, 462 bp, Oryza sativa
  Clone ID: uC-osflM202037f05b1
cagttcttttctaccacgtacaacagcagaagtgagagagggagaagaagacaagggaagaggaggagcttagctagccagccatggcgaggcgctctccttgcctcgccgtcgccatgctcctgcttggggcgttggcggtggcgagcgccttcattgatgaagcggcggctgctggccgggggctcggccatggcgcccgcttcatgagcaagcagggtcgtgtgacatacgagaagctgccggagccggagccgaagccaaagccaaagcctcatcctaaacccacgccaaaacctgagcccaagccagagccggagccaaaaccagtacctgagcctgagcctaaaccggaaccaaagccagaaccaaaacctgagcctaagcctgaacctaaaccatacccagagccaaaaccggagccgaagccagagccaaaacctgagccggagcctaaacctg

SEQ ID NO: 25728 - DNA, 368 bp, Oryza sativa
  Clone ID: uC-osflM202037f09b1
tttttatataagtccagctctggtctatcttgggggagaaccaatgctcttcagagggctgctgtaatggctgctgttagaggaggttcttacgacagcacagtggctaaaaccagtgcctcgtcattggttactcctgaacagatcagtaatttcatatcgaacttaaatttgatggaccagattggtattgatgagttaaatcatatatttacccacagccaaagattaaacagtgatgccattgttgcttttgtgaaagctctttgcaaggactcaatgactgagttgcagtctccaacggatcctcgtatcttctgccttacaaaaatagtagaaatcgcgcattacaacgtgaaccgcatacg

SEQ ID NO: 25729 - DNA, 442 bp, Oryza sativa
  Clone ID: uC-osflM202037g04b1
cttttcatgaaagttgcagaggcttgtgctcgtgttggtgcccttgactatggtttgaaggttttatggaagcataatgtttatggaattacgcctaccattggttctgctcattatctactgaaacatgctaaagagaaaaatgacactaaactaatgggaagtataatgcaagtccttcagagaaattcgatgccattgcaaccaggcactgctgatatagtcttcagcatctgctataatgctgatagatgggatttactctcaaaatatgcgagaagattcgtgaagtctgaagtcaagctgcatggtgcttcatttgacatttggatggacttcgctgcaaagttggagactcccaatctatatggaacatcaatagcctgagaggcaagtcagtcaaacgctataatcttgcaacaggttttgcatgtgtaaaggg

SEQ ID NO: 25730 - DNA, 402 bp, Oryza sativa
  Clone ID: uC-osflM202037g08b1
ctttctcgtgggcacgaagagagctcagctgctgcctctagcttacttggtgataaggaggaggaggaggaggagggcaccgacatggcctcagccacggcgtacaccgtggcgctcctcggcgccaccggcgcgcgcgtccccgccgctccacgctccgccgtgcttctgccgcgccgcggcggcgtgctccaaccgctgcgcctccaggacgcgccgcgactgtccctgctccgcgtcagggccgcctccgacgacacctccacctcggccagcggcgacgagctcgtcgccgacctcaaggcaaagtgggaggcgatcgaggacaagccgacgttcctcctctacagcggcggcgccgtcgtcgccctctggctcaccaccgtcgtcgtcggcgccatc

SEQ ID NO: 25731 - DNA, 455 bp, Oryza sativa
  Clone ID: uC-osflM202037g10b1
atctcctcctcccaaatcaacccacacccgtgggatccactccgctgctcttcggagggcgccgcccagctgcttgctccgcgttggctggctaccagcggctctgtgcgcgctcgcgctcgcgctggcgcccgcctcggacgccacgtcggcgtcgctggtgggcatcaactacggccgcgtggggagcaacctcccgccgccgcaggccgtgctgccgctgctcgagggcctcggcattggccgcgtgcggctctacgacgccgaccctgctgtgctgcacgccttcgccaagaccggggtcgagctcttcgtcggcgtgcccgaccagtccctggccgggctcgctgacccgggtggcgcggattcgtggctcatgtccaacgtcatgcccttcctgccggacacaaagatcgccgcgctcaccgtcggcaacgaggtgctcacgggcaaca

SEQ ID NO: 25732 - DNA, 504 bp, Oryza sativa
  Clone ID: uC-osflM202037g11b1
gtactattcaacaaataaaaaaagacccaccacggctgccgccggcctctccctgcggccgacgacggctctcctcctccatccgccgctgccccacatgcatcggcgccgtcgtcgtcgtcgcgtcatggtcgtggtagtcatcgtcgtcgtcgcgtcggcgctgtcggtggggaggagggaggagggagccaacagcaaagaggggatcgagccggcggcggaggcggggaggaggggagctggtggatccgcagcttggcgacgttgcgaaggtcgtcgtcgtcgtcgaggaggaagacggcggcgaggagggagctaacggcggaggcggggaggaggggagccggtggatccgtagcttcgcggcgtcgcgaaggtcatcgtcgtcacggcccgagggagtcggcggcgtcgcggtcgtcgtcgtcgtcgaggagggagccggctgcggaggcggaggatttctcctaagagtgtgcgtgtgtgtgagagagagagaga

SEQ ID NO: 25733 - DNA, 202 bp, Oryza sativa
  Clone ID: uC-osflM202037h01b1
gagttttctccccccgtctcgtcgtctcctccgctgggtgcgcctacccaacacgaggggcggctgaacagaagagggggagtaggcggtgatctccatctggcgactcgcgagcatagcaagggaggggatcctgatctggatgaagctctcctcttaacttcagcgccttaaccttaatacatgtaccagtttgagtttg

SEQ ID NO: 25734 - DNA, 334 bp, Oryza sativa
  Clone ID: uC-osflM202037h07b1
tttaaccacacgtgcgagattcctccccccgtctcgtcatcctctccgctggttgctcctacaagagacggggggtagcttaagttcttgatcgttggtgattgcttggagcctttgagccaccaggaagaaagaagaggaggaggatgcggaggagagatagatgagaggctgcggccgacgttgactggggcactgttccaagagagagtagcctccaaagatgtgaagctaacaagctgcacaagtaggagaggtgactgctcctaaactgactgataaggaactacacacaaggtaagtacatgatgatgacaaggaaaatctagtgaat

SEQ ID NO: 25735 - DNA, 341 bp, Oryza sativa
  Clone ID: uC-osflM202037h08b1
acggttctttgctgccatatacctgacactatcaagggggggccaatgcacgcattaatgggtttctgcgtttgtgctggagatgtgcttatggtactaacctgaatgttttagactggtggatgctcatccttttgatcactcagctatatcagccaaaagagaacatatatgccatgcccggggatcatctgatgcgtagcgtgtgaaatgggaaacttaatggcacccatcagaatctgaattattaatccatggttggaaagcaacctgtgaatatccgaatgcactgatgcttagatcgaggagattatccgcagctctattgtactgtcgaacaa

SEQ ID NO: 25736 - DNA, 363 bp, Oryza sativa
  Clone ID: uC-osflM202037h09b1
ccttcctcctgcagcagctgtcgtaagtcgtggcaggacagctgctgcgatatctatggcaccaggaaggatccttccgaggaggaaaggcaaacggcgggacgcttgagccaacacacaccattgacaaaaacattaattagatcgtgatagaggaatataacaatcacagaagccatggcaagcagcggcaaggagcaccggcgaggtgttccacgcccaccgccgttgtcgctctacatcgagagggagcaaggtgaggtcatcatggctggtcaggcgctggcgacgacgaggatgctccagcaggtcgccaccagcagcagtggcaagaagaggatactgtgcaagcagctgtccatg

SEQ ID NO: 25737 - DNA, 570 bp, Oryza sativa
  Clone ID: uC-osflM202050a02b1
attaatgaggggttttttttaaataatgatggggtttaaataattatatatttaatattataattaaaataatattaatataaaaataaatatttaatataataatatacgaatataattatttataataaattattatatactatatatatattttttataaataaatattataatatatttatattataaaaataaataatataatttatttataattttaaaatattataaattaatttattattaatattaatttttttattattataaaattatatcaaatttaattttataaaatatataaattattttaaaattttattatattactattaaaattaaaaatatttatttttatataaatattatttttaatatattttatatatttataatattatatataaaatttatagtttttatattaatttaaaaattttaaaataaaatataattaattattaataattaaatttaaattaattaaatttaattaatactaatataattattatttaattaaataaattaatatataaactattattatattataatattaattat

SEQ ID NO: 25738 - DNA, 57 bp, Oryza sativa
  Clone ID: uC-osflM202050a03b1
tactcatctagtcgatcggtcatgtcgtctcagcagggactttaaaactgcacggcg

SEQ ID NO: 25739 - DNA, 61 bp, Oryza sativa
  Clone ID: uC-osflM202050a05b1
tcctagattcttcgagctcccggccatggctgaacccgatgtattaaattcctcaccttta

SEQ ID NO: 25740 - DNA, 284 bp, Oryza sativa
  Clone ID: uC-osflM202050a07b1
ttgctgaattcaagcagcttgaaactaacgttggcgtgaaggaatctgatgcctgggctgctgagcctcaagatgcctatggtttggagaagcttgcaactgaggagctctgcaagcactacaccaaggactttggcattgagtgccgtgttggccgtttccacaacatatatggcccctttggaacatggaaagggggtcgtgagaaggcaccagctgcattctgcaggaaggctcagacttccactgacaggtttgagatgcggggttcatggttcttacac

SEQ ID NO: 25741 - DNA, 267 bp, Oryza sativa
  Clone ID: uC-osflM202050a08b1
tggtaccaccttgctggtttcaatgccttttggtgggcccatcacctactggtgattgcatatatcctcttggtgctgcactcctacttcatatttctcaccaagcagtggtacaatcgaacgacgtggatgttcttggcagttccagtcctcttttactcctgcgagagaactatcagaagagttcgcgagagcagttatggggtgaccgtcatcaaggcagcaatttaccctggaaatgtgctctctattcacaatgaataaacc

SEQ ID NO: 25742 - DNA, 191 bp, Oryza sativa
  Clone ID: uC-osflM202050a09b1
tctttatatccgtagagcaaataactcatatgccgagagtttatcattggtgggagcttcaataggttagtgcgcttggcgaattcacaggccctatcttgtggtatgaactgggtacgcgatgatttgcactgcgtatcgggggcttaccattagattatgccactacttttttaaagcgttcaaaccca

SEQ ID NO: 25743 - DNA, 436 bp, Oryza sativa
  Clone ID: uC-osflM202050a10b1
taacccggacgcagcagccgcagcggaagagggaagcgaagcaagcgaagctcgaggggagatggctcgcggcgtggcggcggtggttttgggtaagggttgtatctgtaatattatatggcttcgtcacctttcttttcttttcttcccttcctcttctttttctccttttctcgttatttttactctctactctttcttcttttttcttcttttctttttatcttctttatccttccttttattttcttttttttttttatcttctcttttttccttttttttattatttctttctattttttttttttctttccttttctctttttcttactttttcttttattctttttttttctctttctcttttttctattcatatttttctttattaattttttcttattttttttttcttttttttttctctcatttt

SEQ ID NO: 25744 - DNA, 251 bp, Oryza sativa
  Clone ID: uC-osflM202050b04b1
ggctacattctggctccaattcaggacggtcgacaccagttgctcctgctgatggaatatctgctagcagttcagtagtagagagtgaagtgagtaacatgactacaattcaggagctgaaaaatgaagaaaataccgagaagcaagaagtgcaagcaagttgatcggtcataaacttatactgctggtctgtgtgaaaattagcacatctatttggtgtatattgaacgtattcatactgtaatgtacca

SEQ ID NO: 25745 - DNA, 303 bp, Oryza sativa
  Clone ID: uC-osflM202050b05b1
ctattgagatcttagccgcgccggagatcgagagggaggagcggcgacgcgggcgcccccgatccctcctcctcgccgccgacggcgtcgtaggtgtcacgagcaataattagtcatctactactacataccgatgtagtaacctatcggtggattgaggtttatttatattcttacttttatttataacattttttatttatttattatttctatcttctattatatattaattttaatttaaataataactcatatatatttcttccataatatttttcattcacaatacttatatatcaa

SEQ ID NO: 25746 - DNA, 368 bp, Oryza sativa
  Clone ID: uC-osflM202050b06b1
tttatttagctttgccttttgccttctccatgggtgcatcctgtgagcacatatactactaatccacccctaatccgttgcagaaagcctttgctctcttcttgctttcctcaaatcgttgtgtcaagccagcagctggagcagagcagccatggcttcctaggcctacctagacgaagatgcggagttaggcacggactcttttgaccagcgtggatgttaaatcagtgaacttccttggatgcttaaagaaaggggagtgagcttttctctagatttgcaggtgtacaagcaatattgaccattattggctgtgagggcggtgaagcaaattggtgccttcaccctctggtaaacctggtggtgtt

SEQ ID NO: 25747 - DNA, 243 bp, Oryza sativa
  Clone ID: uC-osflM202050b10b1
tgaggggggaagagaggatctagtaaagtgccgggattcttagatacagatgccggattatttagaggcattaggaaactagtatatatcgaaaaaaagttaatgtttaatcacattgtttaaagaataaccatacctcaatttctataaataaaaattacttacatttatatcttatataatcaaaatccactatctctaatctttatcataaatattaaatatttcgttccttaaccaaat

SEQ ID NO: 25748 - DNA, 352 bp, Oryza sativa
  Clone ID: uC-osflM202050b11b1
ttttcggcatcaatatgacattcctggctacgtggactttgttgtctctaacgcagttaactttactctgacaatgaatgagatgggtgctaagatgattgggttcgttggtgttccaccacttggttgttgtccctcacagagaactggtccatcaagagaatgcgaaccattacgaaatcaagcatcagaattatttaatactagaatgaagcaggaaatcgatcgactaaatgtcgaacataatattgatggtttaaggggttgtttattttgacattatcattcaatttgcttcatcctgatttcacaaaaccttgttattaatgctcttacaggatacattctgatt

SEQ ID NO: 25749 - DNA, 120 bp, Oryza sativa
  Clone ID: uC-osflM202050c01b1
ttctaaaaccctctccgactctccccttctgccactcttctccggcggcggcggcggcggcggcgggagcgcatcggagatgatcatcccggtgcggtgcttcacctgcggtaaggttga

SEQ ID NO: 25750 - DNA, 147 bp, Oryza sativa
  Clone ID: uC-osflM202050c02b1
ctcctgcactctgatcaggagctcttcaatggcggagctactgatgctctgggtcagtcttacattagtagccagagcacattctttgctgattctgcgacgggcatgatcaagatgggggacatcacactcgtgacgggatcaaat

SEQ ID NO: 25751 - DNA, 132 bp, Oryza sativa
  Clone ID: uC-osflM202050c04b1
tttattcttcgatcatcaacttctaaaccctaggggggtttttattaaaccatagaccaaaaatcacctaaagaataatttcacaattaccatttcatacctctaataattcaacatttctaatccaaccat

SEQ ID NO: 25752 - DNA, 183 bp, Oryza sativa
  Clone ID: uC-osflM202050c11b1
tgcttacccttcaagaaacaagaaagacaacaccaacaaactagctagctcaccaatggcctcgttgtcctccttccggctcgccgtggcagtggtggcattgttgttctttcttttatgcttcacttgtgtcattcttatggtatatttgctctttatttcttatttattttatctttctat

SEQ ID NO: 25753 - DNA, 462 bp, Oryza sativa
  Clone ID: uC-osflM202050d07b1
tcgtttgcagtgaagaagggagagctctcttgagagatagcgagagcgagcgagacaaatcaactgattctttgtcaaatcggggagaagggaaggtgattggcagagtgctcaacttattactcaaagagaaaatgttttccagtgaaactccatccgagttgaaagagcttggcacaatttcggagtctgtagctgatggtactggaggatttgaacattgcagaaaatgtttagcaaaaactgttcacaatgccactccaaggcaacttctgcaagctaggcagctgatttctaatcaaacacaaaaacaccacaaaaagcagtcacctccatcagcatcacacctggtacctcgttgggctatttacgcattgactgttgcttgagtcctttttattggagcagtagctactgccatatatggattcttcttccgagaaagaaggtaatactggcatg

SEQ ID NO: 25754 - DNA, 428 bp, Oryza sativa
  Clone ID: uC-osflM202050d09b1
tcgtcgatctccccaatccgagagctccggaggaggggcgcggaggcggagatggcgctgctgcgagcgctgctcagatctgccgagatctcccccgatcgcaaggctgcacttgagtacctccattatctatcgagagcacagcctactcgttctctaacaggggctggcctttattctgctggcaaatcattcagcactcaggctgctactacatcaagcacaccacaacctccaccaccacctgcacctccggagaagactcactttggtgacctcaaagatgaggaccgcatttttaccaacctctatgggcagcatgaccctttcctgaaaggtgcaatgaagaggggtgactggcatagaaccaaggatttggtgcttaaaggggcagactggatagtgaatgaaatgaagaaatcgggact

SEQ ID NO: 25755 - DNA, 463 bp, Oryza sativa
  Clone ID: uC-osflM202050d12b1
tcggtcgaagcaatggcgacctcgtcgccacggggggcttgcgctgctcctctgcgtgcgccgccgcctcctccccgctccgccccgcgcgccctcccccgcggcgccacctcgcctgcgcctgcccctccgccgctcgccgccccccgcgcgcgccaagttcggcaagttcgaggcctccgacgccgcccccacggaggcctccgccgaggaggcggaatcagcggcggcagcgggtgatggggcggcggaacagaaagcggaggaggacgacagctgcttgccgtcggacttggagggcgcgatatggcaatcggggaaagcgagcgccgatttcgcaactctggtggcatgcgaaccattgcagagctactgatccctcaggtggaattcctcaacgaggaaagagcacaagctgaggtctgggcactgtcaaggatattcctggacacacttggaaaaa

SEQ ID NO: 25756 - DNA, 377 bp, Oryza sativa
  Clone ID: uC-osflM202050e02b1
tttagtatatcgtcctaccttcatacagctgaaaaaggtcccttatatacaagataggggtaggaggagggccgggagctcgacggatttcgatcaattgtggtttttttttttgtggtaaccgtataagagaggagattttgtttaacgtagctagatcatatctgagttgagttttagcaatggaggtgctgatccggtggagcaaactgccggcggccggctccttggtgctgtacgccgtcttcttgctgtcggcggcggccacatcggaggccaacatcggcgagtacgacgagtactggcagaagcgcaagctcatggctgatgccgccgccgaggctacctacaagcgtgaccccttcgagggcaccaac

SEQ ID NO: 25757 - DNA, 217 bp, Oryza sativa
  Clone ID: uC-osflM202050e06b1
attgctcttgatgagagggctaatgagtaccaggggcagtacaggactattggcctctactggattgcgagagatggaggattgatgctccttctgtgtcagttcctggtcacaaaagagacctttgaaagctgcaaaatccaagtgttctgcatagcatatgaggatactgatgctgacgagctcaaggctgacgtcaaaaaggtcttgtatgatc

SEQ ID NO: 25758 - DNA, 477 bp, Oryza sativa
  Clone ID: uC-osflM202050e11b1
tcgctcagaaaacatttgctgtccttgcaaatgcacttgattgttgttccaattcgacatcaaagctaacaaattatattgctatagcacaacgtggagaatgcgctttcactgctaaagcaaagattgcacagactggaggtgcagttggtttactagttatcaatgataatgaagaactttacaagatggtttgcagtgacaacgatacttccattaatgttacaatacctgttgtaatgataccacagtcagctggaaaaaagatgaagggcctcttggatcagggagcaaggctggaggtgcagctatattcaccaaatcgaccagttgtagacctttcagcatgcttcttgtggataatggctataggaaccatagtttgtgcttcactctggactgaatttgttgcatgcaggcaagttgatgagcgttataatcagttgacacggaaggatgggcctaattctggacaac

SEQ ID NO: 25759 - DNA, 438 bp, Oryza sativa
  Clone ID: uC-osflM202050f04b1
tttttgtctcgtcgtcctcgcatctccactcgccaggggcaagattaagatcggaatcaacggtttcggaaggatcgggaggctcgtggccagggtggccctccagagcgaggatgtcgagctcgtcgccgtcaacgaccccttcatcaccaccgactacatgacctacatgttcaagtacgataccgtgcacggccaatggaagcacagcgacatcaagatcaaggactccaagactctgctcttgggcgagaagccggtcaccgttttcggcatcaggaaccctgacgagattccgtgggctgaggctggtgctgagtatgtcgtggagtccaccggtgtcttcactgacaaggagaaggctgctgcttacttgaaggggggtgccagaaaggtgtcatttcagccccgagcaaaagatgctccgatgtttgtctg

SEQ ID NO: 25760 - DNA, 466 bp, Oryza sativa
  Clone ID: uC-osflM202050f12b1
ttggttatacaacttgaatggccacatccgcgggaggtccgcgcagatgaaccgggtccgcaacggtgagctctaccgttacatctgcgacaccaagggtgcttttgtgcagcccgctttctacgaggcattcggtctcactgttgttgagtccatgacctgtggtctcccgacattcgcaaccgcctatggtggtccagctgagatcatcgtgaacggagtgtctggcttccacattgacccataccagggtgacaaggcctcggcgctgctcgttgagttctttgagaagtgccaggaagaccccagccactggaccaagatctcgcagggcggtcttcagcgtatcgaggagaaatacacctggaagctctactctgagaggctgatgaccctcaccggcgtctacggattctggaagtacgtctcgaaccttgagaggcgtgaaacccgccgctaccttgag

SEQ ID NO: 25761 - DNA, 439 bp, Oryza sativa
  Clone ID: uC-osflM202050g09b1
tcgctaggggctcgcgtcgcgtcccgacgagtgggaggtcgtcctcaaggtgaagtatggtgaaactcttaagaggttcggtgggtatgtgcaaggaccacaattcagcctgaacttatccgctctccggtccaagattgcatctgcttttaagtttggttcggatgtcgacttcattctgacttacactgatgaggatggggatattgtcatgctggatgatgatgatgatctgcatgatgctgctattcatcagaaactgaaccccctcaggattaatgttcagttaaacaacagccacactgcagcacctcaagccaaacagcaggattcagataatatacctctcaggtccaccaccactgaagacccactagctcatattaaatcagttatcgatgaggttttgaagccgatatctatgaagtccatccaggag

SEQ ID NO: 25762 - DNA, 435 bp, Oryza sativa
  Clone ID: uC-osflM202050g10b1
tttattagatctagagccgtccttttcctcctatttcacatactccggagagagggggtttattgatactagtaggtaaaatttccacaatggatgatgataaagtgactgcacatcctcacaccttttaagatgctttgcagaacattcagcacctggagcgtgtgtcttcatcagaaacacaggctcaggaccatcagaacgtcactcggatcacacatgtgatgcattcacacccaccaatgccattgatgctagttacatcaatcacccaccagggccttcacgtgtcctactttgatttcgatactttagactacggtgagcatgctaactatacttgtcgcgcctactcagtggatgaaaaaacatacattgaccacactgatgcatggaccatggactggtcatgacaagctttttactataaatcat

SEQ ID NO: 25763 - DNA, 375 bp, Oryza sativa
  Clone ID: uC-osflM202050g12b1
aggtggacgattcggaactctgtggtgtgatgacccaaagaaggggcggatgtatgccgatttcattggaagtgctggaagcatcttcgagctcatcactccgctctatcctggatacttcctcccacttgcgtccttggggaatctagcaaaggctgtacgaagaggatttagggatccatccttccgtgttatccaaaatcacttcacggaatctggaaatttatgggaggttgctgcaaaggaggaactatgggaagtaggagctcacttggtaggcctttctatcggtgtatttattatggatacatcaagtataaagtcatcatacccaacacttgctttgacatggcttggtgtccgtcttttacatct

SEQ ID NO: 25764 - DNA, 348 bp, Oryza sativa
  Clone ID: uC-osflM202050h01b1
ctcacatcacgcaaccctactctcccaacaccggaccgccgcccctcgccgattcgctccgccgcctccgccatcccgcgccgccgttgcacccccatcccgcgccgccctcgccgatctcttcccttgcctccgcgccgtcggtctgcatcctccgcgcgccgatctcctccctcgcctcctcgcaccgatctcctccctcgctgccgcgctgaagaaaaggagctgcatcgccggtcgcctctcctcctcaagaccacgaagcgccggttccacaccgccgttcttcttcgctttctccgccaccgccgccagggagaagactccgccctccggcatggcgccatc

SEQ ID NO: 25765 - DNA, 449 bp, Oryza sativa
  unsure (1)..(449): unsure at all n locations
  Clone ID: uC-osflM202050h03b1
tgttctccgcatcagcagcagcaagcagctaatggggcgacgtacgcacaccgcgggccggggcgagatggcgcagtcgatgctggtgtcgggagccaatggcacggtggccgccgcgagcaccagcaggctgcagcccgtgcggccgacgccgttctcgcggctcgtgctgtcgcagccgtcgtcgtcgctggggcgcgcggtgtccgtcaagacggtggcgctgttcggcaggtccaagaccaaggccgcgcccgcaagaaaggctgagccgaagccaaagttcaagaccgaggacggcatcttcggcacgttcggtgggatcggtttcaccaaggagaacgagcttttcgtcnggcgtgtcgccatgctcgggtttgccgcgtcgatcctgggtgaggccatcaccgggaagggaattctggggcagctgaccttgagacggggat

SEQ ID NO: 25766 - DNA, 460 bp, Oryza sativa
  unsure (1)..(460): unsure at all n locations
  Clone ID: uC-osflM202050h04b1
gtggtcggagcctttcgtgccggcgggctggtgggccacctactggcgctgcggcggcgtcgctgccgtggagccggctgtggccgaggtggaggacttctccccggagtggtggcgcctcgtcggctcctccccggccttccgcgaccgctggctccgggactactccgcgctgggcctcctcgacgacaacgacaacggcgacggcgacgacctcgaggggttcctcctccccgacgacctcttctcctccacccctcatctggtgggagaaccggcggatgagaaggagggcaagggtttcggcggcgccggggggaagaaggtgaagggcgggtccgcccaggtggtggcgtggggcatcgacaagtggtggcgcgcgcactccttgncgcggaggtgcccaagtacgccgacaggcgcccagagggtcgccgccgccggcgttgggtcaaccccc

SEQ ID NO: 25767 - DNA, 416 bp, Oryza sativa
  Clone ID: uC-osflM202050h06b1
ctcatcgtcgacgaggaataaggcggcggcgggggcggaagctaaggcggcgaggatgcagtacaagaacctggggaggtcggggctgcgggtgagccagctgtcgtacggggcgtgggtgacgttcggcaaccagctggacgtgaaggaggcgaaggcgctgctccaggcgtgccgcgacgccggcgtgtacttcttcgacaacgccgaggtgtacgcgaacgggcgcgccgtggagatcatggggcaggcgatgcgggacctcgggtggcgccgctccgacgtcgtcgtctccaccaagctcttctggggagggcagggccccaacgacatgggcctcttccggaagcacatcttcgagggccttcgggggtcgctcaagcgcctcgacatggactacgtcgacgtcggctact

SEQ ID NO: 25768 - DNA, 204 bp, Oryza sativa
  Clone ID: uC-osflM202076a01b1
gtgatggctgagcaggctaatcaaccgactgtgcttcataagttcggtggccaggtccaccttggctccagcttttctgaaggtgtacggtctttgaacatctgcccatttgtcttatcctatgactggcgccttaccacacggagctacatgaccaatggccttgttcaatggtttcattcaacattcatatgatgtcttcct

SEQ ID NO: 25769 - DNA, 100 bp, Oryza sativa
  Clone ID: uC-osflM202076a02b1
catgaactgccttacccaggtggacacgaagggggtcactatgaaccccaccggcgacctctccagcgcgcgctttagtgagaagaacctttttactgtc

SEQ ID NO: 25770 - DNA, 119 bp, Oryza sativa
  Clone ID: uC-osflM202076a03b1
gtctggagggagctcccccccctcctcgctgcgggccgtttacgccgttttctgggagaggagaaatccgtaggctcagaggatttttggtagtcttgtctcgtgatattcgttaagag

SEQ ID NO: 25771 - DNA, 94 bp, Oryza sativa
  Clone ID: uC-osflM202076a04b1
actaaactgccatgcccgtatggccacagccggtgccgccgtggaccggcttgtacggcggctagccgcagatgctggtcgtttgaagctgctc

SEQ ID NO: 25772 - DNA, 83 bp, Oryza sativa
  Clone ID: uC-osflM202076a08b1
taataatgctgacctcacattagttagtccggaaggtttagggaggttcagcgcttttatatcaacctcatgacttcttctcc

SEQ ID NO: 25773 - DNA, 69 bp, Oryza sativa
  Clone ID: uC-osflM202076a11b1
tagcgagcggaggaggaaaaatcaatctgccgctaccctcctagacggtgccgggctatttatacactc

SEQ ID NO: 25774 - DNA, 321 bp, Oryza sativa
  Clone ID: uC-osflM202076b06b1
gtctgaaggaagaaacctaaccctaagattgcgattcggcggcagcgacgaggcgtgggcggagatgaggaggcccaccatagaagagaaactggcgacctactccatgttccaggttcgtcagggatccaccgtcccgatcaccgcgcgggagtggctggactctgtgatggctggagttggctcgatctctctggcggtgcggggtgctggctcgatctcggcggcggcaggagcgggagatggggcttgctcgagctcagtggcggaggcggggactgcttcgatctcggcggtggtagcggcagatgggccttcctc

SEQ ID NO: 25775 - DNA, 114 bp, Oryza sativa
  Clone ID: uC-osflM202076b08b1
taattactctgtcccaacgccgctgctcgcgggctccctctctcccacgaaagatggcgattcacattgctgggtacccccgcatgggctcccaagagggagcttaagcctgcc

SEQ ID NO: 25776 - DNA, 234 bp, Oryza sativa
  Clone ID: uC-osflM202076c04b1
atgctttcaacctcctctctcttctcatcaagcctcaatcaaaaggcttgaagggaagaagagcaactccagcaggtagaaaggccagaagcaaagatggcgatctccagcctatatgccaccacctccctgcactccccatgcaccaccaacacaagcttcaggcagaatcaggtcattttcttcaccaccagaagcaacaggaggggtagcacatggtaccgcggatcaaga

SEQ ID NO: 25777 - DNA, 305 bp, Oryza sativa
  Clone ID: uC-osflM202076c08b1
tgatgcaagtacagtagccatggcgaagcatctcgcgctgtccgtggccgccgcggtggccgtgtcgtggctggcggcgtcgtcggcggcggcggcggggttctacgagaagttcgacgtggtgggcgccggcgaccacgtgagggtggtgagcgacgacgggaagacgcagcaggtggcgctgacgctggaccggagctccgggtccgggttcacctacaaggacacctacctgttcggcgagttcagcgttcagatgaagctcgttggtggtaacttctccggaaccgttacctccttttacc

SEQ ID NO: 25778 - DNA, 83 bp, Oryza sativa
  Clone ID: uC-osflM202076c12b1
tatagcgagctagccagatagccatatcttgggtgttctttgacatcgtcgctgcttgaccaattcttggggaggaggactct

SEQ ID NO: 25779 - DNA, 391 bp, Oryza sativa
  Clone ID: uC-osflM202076d01b1
ttttaagagaaaaaaaaaatggagctcttcgggtccaccgtcgcctccgcgcgcgccaccgcccccttatgcttcgcctcctccttccaccaccgccgcgctgctcctcccgccgtcgccgccgccgccaccctccgccgcagcaaccgccacctcccgactcgaggatggcggtgcgcgagcgcggcggcgccggacccggtgccatcggaggagcccgcgtcggcgtcggcgtccaccgtcgtcgtcacggaggacaagcccgatccgccgccggcggaggagaagagcgaggaggtcgcggcggtctctaatggcgggtctctggagaccgtggcggcggcgccggggttcgcgggggcagccgaggaagaccgcggcttggctgaca

SEQ ID NO: 25780 - DNA, 293 bp, Oryza sativa
  Clone ID: uC-osflM202076d06b1
taccaccaaaatagagggccgtggcaatggcgtcaagactaacattgtgaacatgggggatatagcaaaagccttagccaggcctgcttcctacacaacaaagtactttggatgtgagcttggtgcacagtctaaatttgatgagaagactggtatttccttggttaatggggcacatgatcctgctaagctgccttggtctcctcgagaacttcatcaggaagtctgttcaatgccttggatgttgtatctctgtgacttgtgttcctatcttctagaactagttgactttc

SEQ ID NO: 25781 - DNA, 468 bp, Oryza sativa
  Clone ID: uC-osflM202076d08b1
tctttggctgccaagctagctcgcctccacagtctgcgcgaacgcctcggtgccaccttctcgtctcatcccaatgagttgattgcactcttctctaggtatgttaaccagggaaagggaatgctccagcgtcaccagctgcttgcggagttcgatgccttgatcgaagctgacaaagagaaatatgctccctttgaagacattctccgggctgctcaggaagccattgtgctgccgccctgggttgcactggccatcaggccaaggcctggtgtctgggactacattcgggtgaatgtaagtgagttggcagtggaagagctgagtgtttctgagtacttggcattcaaggaacagcttgttgatggacccacccaacagcaacctctgtttttgcgccttgattttgggccctttaatgtcttctttcccggcccgtccatgttctaattaatttgtaatgggggt

SEQ ID NO: 25782 - DNA, 147 bp, Oryza sativa
  Clone ID: uC-osflM202076d09b1
tcgtactctacctacctacctacctactctaggcgggagagatggtggggaagagcggataataaaatatttaaatataatatttttaaattatataattttatatgtttattaatatttattattttaaatctattatattattta

SEQ ID NO: 25783 - DNA, 152 bp, Oryza sativa
  Clone ID: uC-osflM202076d10b1
taaaagacccgcgcgcctcgtactaccagggggggcattaaccaaacctggcgtgttcaaaaatcaccaccaccaccatccttctcctcaccccaccgccaagtcaccctctactcccactcctccctacccccattaatcctctctcttcc

SEQ ID NO: 25784 - DNA, 384 bp, Oryza sativa
  Clone ID: uC-osflM202076d11b1
tgttcccccatatcacatcctctccttcctcttggtctgctcactcagctctcccccgcgcgcgccaccgtcgtcgccatgtcgggcaacatcgccttcggccgcttcgatgactccttcagcgcggcctccctcaaggcctacgtcgccgagttcatctccaccctcgtcttcgtcttcgccggcgtcggctccgccatcgcctacaccaagttgaccggcggcgcgccgcttgacccggccgggctggtcgccgtggcggtgtgccacgggttctggctgttcgtgttggtggctcatctcgcccacatttttcgtgaggtcttctttacctcgttctgcactttattgttctttcttccctcgtgtctttccccctctccc

SEQ ID NO: 25785 - DNA, 165 bp, Oryza sativa
  Clone ID: uC-osflM202076d12b1
ttaaccgcgtcgagagtagacaaggggagccggcgccgtggatccaactggggcttctccgacgccgtcgccatggatccgaagctggtggaggtgactctatcttttttacgatttaaggaagtcttttgctggaacttctgccttcacctgagatgacctgtt

SEQ ID NO: 25786 - DNA, 55 bp, Oryza sativa
  Clone ID: uC-osflM202076e01b1
ggagagagaccactaacctacgggggacttcgaacactgcagaccacgaggagcc

SEQ ID NO: 25787 - DNA, 85 bp, Oryza sativa
  Clone ID: uC-osflM202076e03b1
tgtgtttccaacctgagaccaacactgacaataggggccttgttaaagcttgcggggataaaaaaggttacagaataggactaaa

SEQ ID NO: 25788 - DNA, 137 bp, Oryza sativa
  unsure (1)..(137): unsure at all n locations
  Clone ID: uC-osflM202076e05b1
gtangaacctctctgcagggctgctgctgctaggttgcagaaaaaaaaaactctcatcttttgcaggaagagacatcactgtttctgcattcgtgtgcctttggatcaagccgtgctcttccctttttagtgcccat

SEQ ID NO: 25789 - DNA, 57 bp, Oryza sativa
  Clone ID: uC-osflM202076e06b1
atcactgaacaagatcaccaggtacagaacagaggaatttaagaagataactgggga

SEQ ID NO: 25790 - DNA, 54 bp, Oryza sativa
  Clone ID: uC-osflM202076f01b1
gatcatgctgttgaaggtgatgctgattgtgacggcttttttgaggaatggggc

SEQ ID NO: 25791 - DNA, 67 bp, Oryza sativa
  Clone ID: uC-osflM202076f04b1
tcccggtcgaccacgcgtccgtttcttccaactactacgccggcaagtccaaggggataactagact

SEQ ID NO: 25792 - DNA, 186 bp, Oryza sativa
  Clone ID: uC-osflM202076f08b1
tcctcacattgaataattatttttaataattgtaggtttttttttccgggtccagaggtctgcccgatgcccaacctagcaagtatccgatctgtgccagctctgtacgcatcatggttgtgcagatcgctatcgagaaatgaatataacacatttcttttggggtggccctcttttcctatttct

SEQ ID NO: 25793 - DNA, 205 bp, Oryza sativa
  Clone ID: uC-osflM202076g05b1
tcgacggctgctcggaattcggagggagggaggaaggaatcggagtgttcggtaagcttcgcgaagcgggatggaggcgccgcgcctccgcctcccgttcctcctactggtggccctcgtcgccttgcctccggtggtctcctctgctgccccctgctgtccaccccgtcgccaggtccccttccctcccttctctcttctctct

SEQ ID NO: 25794 - DNA, 491 bp, Oryza sativa
  Clone ID: uC-osflM202076g08b1
ctgcagtttttaggacagaaagaagcattcggagagaatattgaagtggagatcactggaagcacaaaggatgctcagatgtttgctcaacagcaagctaagcaggaaaatgctggcactttgtcaaatggtgattatagagtggttcaccatccaattgtatgatttataagaactttctatgattttcgctattggttactaatactgtcctgctctctgcttgttctgcttttcattcattccgtcttttttactctcttttcttctttctttcttctcttttctatcttccttctcacctttttatcagcttctcttcttttccttccttacttttctttcttatctctccatctccccatttcatttctttctattttcctctttctttaccattttctatctaccttttctcctatctttttctccttttttcctctctctctttctttccctcaatcttttatctcctctctcttttatcctct

SEQ ID NO: 25795 - DNA, 419 bp, Oryza sativa
  Clone ID: uC-osflM202076g09b1
ttgatagaaaagaaaaatcccctccgcctcctcccccaatccttaacctaaactccgatcccctccgccttccatggctgccatgggaagaactgtactaccttcctatgttcttctggatcgcatcgttcgatcggaggaggaagccgtcgaggaggagtcggagtgggcggccatggagtgcgcggactggaagtcgttcggttgccaccccggtgacaaacctttccccaggtaacccgctagggcgaatggcttgctgactcttgttgagccttttcgagcaccacctctatattttcattcacttctttattccttcttccatctcttattctctctccctccacttttcctcttttttcctaattcatctttcaaactctattttatcctatctttcaatctttccttctttc

SEQ ID NO: 25796 - DNA, 127 bp, Oryza sativa
  Clone ID: uC-osflM202076g11b1
tgatgcagcagcagcatcaggggaagggtctagaagcttctattagcttcttccgggatgaacgtgatcgcgaagatccagtaggcccgttcgccccattcccctccccctcttctcattacctttc

SEQ ID NO: 25797 - DNA, 103 bp, Oryza sativa
  Clone ID: uC-osflM202076g12b1
taatatttaatcctttttccgcagtgacacatgagcacttaccccttctgctcctcctcctcgccgatcccccaatccctaaccctagactccaacacctcca

SEQ ID NO: 25798 - DNA, 280 bp, Oryza sativa
  Clone ID: uC-osflM202076h01b1
gtgagctctgccttttggtttgctcttggtggaaagcagaattacacaagcagaaatgccacacatgatgttgttagagagcctcacttgtatacattctcattgaggaatgggaaactggaggtcactgaaattttcaacttttcacaagatgatttgctgactgaagacatgatggttcttgatacacatggggaagtctttgattggatgggtcagtgtgtggatgctaaagagaagcagaaggcatttgaaattggccagaaatatgcagaacatg

SEQ ID NO: 25799 - DNA, 380 bp, Oryza sativa
  Clone ID: uC-osflM202076h02b1
tttctagggcgatggtgtcagctagggtgaggcaatctctgtaggatatgctatcccaacatgctatgcttttgctggaccttgctgggcgtgacctaactgactacctcatgaagatcctgaggagcgtgggtactaattgacggcacaggacctgagggaaattgcgagggacatgaaggagaagctttcctacatcgtcctgcactatgaccaggaaatggagactgccatgaccagctcctccgggagaagagctacgagcttactgatggacaggttatcaccattggtgctgagcgtttccgctgccttgggtgcatttccagcctttcttcataggaatggaagctgccggtatccatgagactacatacaac

SEQ ID NO: 25800 - DNA, 291 bp, Oryza sativa
  Clone ID: uC-osflM202076h03b1
gtggggtttttttatgtttttgctgggctatttttttttttttttttttatttttttttttggggaaaaaaccagaccctttaaaagattggttattggaaaaattcaaattcgggaatggggataatacttaaaggttcccccaaaaagggggtgaaaattggttacaaaccaaggttttatcttggggcaaacattcaggtgcgggttaacattatggttgcttattataaccggaaaaacagcgcacatgggggctaaaataaaaatttttcgcagattttgcttttt

SEQ ID NO: 25801 - DNA, 74 bp, Oryza sativa
  Clone ID: uC-osflM202076h04b1
gtacatagctagcgttagcttggttagttgtgggggtagcattctagctagctcaagggctaaagacattgagg

SEQ ID NO: 25802 - DNA, 155 bp, Oryza sativa
  Clone ID: uC-osflM202076h07b1
gacgcgcacaggagtgggtcaacaagcgcacctggcgtagtataaaaaataacattggcaagttgaaagcaaaaggggttgactctgttatcttgtgtctctgtgaatgacccttatgcccctaatggaagggcagaaaagcttacaggaaaaga

SEQ ID NO: 25803 - DNA, 59 bp, Oryza sativa
  Clone ID: uC-osflM202076h08b1
tcgtactagatcgcgagcgcacgcacccaccgacgatgtttctgaagcagccacccgcc

SEQ ID NO: 25804 - DNA, 174 bp, Oryza sativa
  Clone ID: uC-osflM202081a01b1
tgatcgaacaacgcactctgcagctagctatacaaggtctgtttaattagctaggtagctagcgagtcataaatcaagaagccatggacttttacgggcggcgcgagcagtacggcgggtatggcgggtacggtggcggcggcgccctggcgacgccggggtacgcgccggcgg

SEQ ID NO: 25805 - DNA, 253 bp, Oryza sativa
  Clone ID: uC-osflM202081a02b1
aataatttacctcctccacctcctcctcctgcggggcgatcgtatcggcccggctcctcctactccgccgccgccaccgccgtcgcagataggagaagatggccggacttgataccttactctttacctcggagtctgtgaacgagggccacccttgacaagctctgcgaccaagtctcagatgctgagcttgatgcctgccttgcctaggaccctgacagtaaggtcgcttgtgagacctgtaccttgacaa

SEQ ID NO: 25806 - DNA, 424 bp, Oryza sativa
  Clone ID: uC-osflM202081a05b1
ttttctggtagcttttctcctggttctcctctgcgtgcatcgcccgagctattaagcgcagcagttatggaagcaaagaaatggttagaagagaaaaggcagggattaggttcaaagcctgaagaccatggaccttgcacattaaacactgatatgcttaactctgggtttgaatctgacatgggttctccagttgatttagcaaaatcatacatgcagtcattgcctccttggcaatctccattcttaggtagccagaagtttaaaacaccaccctctgctgggttacatatgtatgattatgaagggaagtccaaatattctctcccctcatcaaaggtcaccaccaaggaagaatatctttccaatttttgggaaaatttggaggaatcttgtaggttttgcctgggatcattttggaagt

SEQ ID NO: 25807 - DNA, 397 bp, Oryza sativa
  Clone ID: uC-osflM202081a07b1
tgtttggataaaaggcaattacctgaagtggacaaaacttctatgtacaaagcttctggatatatggacgttgataaaataaatgcagctgcttggcccgctttggtggctgacttggatgctggagaccagagcattacagctcttgcatttggttttacaaggctcttccagccggataaacccgtgacgaaaggacaagtggctcttgcactttcaactggtgattctgctgatgtggttatggaggagcttgctcgtattgaagcagagaaaatagctgaagatgctgtaaatgcacatggtgaactcgttgctcaagttgagaaaggatctgaatgccacttttgagagagagcttacaaaggaaagagaaaaatttgagagaccttgaaaa

SEQ ID NO: 25808 - DNA, 546 bp, Oryza sativa
  Clone ID: uC-osflM202081a09b1
tgatggatatctgtttgcatctttccggcttgagggggctgaaaactcttgcgaggaccacgaatgggctcgttctttctaagaagctcccaaggttgaaagaatgtgggctcaatgctctaaatattagcttggacaccgttggctcctgcatagtttgagttttctacatgtccttatcggccattttcaagctttcgtatcgctttgatgctttatattctacttcgctattcccttcttttttctttctattctccctgtttttatcttcctgtttacatttacctttatatctcaccatccttcttcttttcttttctacttctttttttttcatatacttcttcttttcactttcattattcttctcttacttatcctccatctatattaattattcttcactttataaattctcttatttcacatttttctttcttattttcttttctctcctctctcttactctattattcttttaccattcctttatcttatcttcttttctctctattttcactctttcttatcttttgttctact

SEQ ID NO: 25809 - DNA, 493 bp, Oryza sativa
  Clone ID: uC-osflM202081a10b1
tttgtcgtctccctccgccgctttcttcccctttagggacccttccaaaattcaaacgcgaccaagccgccggcgaggtgaacgaaacccaaccatggcaggcggcggaggtggcgaggggaaggtggcgtgcgcggcgtggatccggcgccgggaggagaaggagaaggcgacgcgcgtcttcgcggcgtacgggcgggcggggtcgccgccggccgtggaggtgctcgggttcgactccaaggagtgctccctctccgaacccctggcgagggcggagctcggggaggagccgggcgacgcgccgcgtggcatcacggtgcaccccagcggcgacgagctcgtctgcgccacggccaaggggtgcaggctattcaagctgatttttgaagagttcactggtcgacttatttcaagagacgcttcaacacttgaatccgttggaccgcagaagtgtcttgttttagcactgatggatctaaatttggcattg

SEQ ID NO: 25810 - DNA, 302 bp, Oryza sativa
  Clone ID: uC-osflM202081c02b1
catctcctgagacagaatatggcaggatgaacattggtagccgaccatcaaagagaaagcctagtggtggcattgaatcgctccgtgcaattccttggatttttgcttggacacaaactaggtttcatcttcctgtatggcttggatttggtggagcgttcaaacatataatgcagaaggatatcaggaacatccatacactgaaagaaatgttcaatgagtggccattcttcagggtcaccttggacttgcttgagatggttttcgtcaagggagacccaggatttgttgctttatatgac

SEQ ID NO: 25811 - DNA, 502 bp, Oryza sativa
  Clone ID: uC-osflM202081c05b1
ctatctcgttcctccttcctcatcaccaccatacgggaacactacgacaccagccagcaagcagcggaggagagagagagagagagagagactccatagacggccatcgatcgtacgcgactccccccatccatccatccacccgccggcgccccctccctctcatcgatcgatcgattcccaccgccgcccccgttttgaccacctacctagggtttcccccatcggaatgatgaccatgagcgacgatggagaccgcacctgcccgctctgtgctgaggacatggacatcactgaccagcagctcaagccctgcaaatgcggctatgagatttgtgtctggtgctggcaccacatcattgatatggctgagaaagaggacactgagggccgctgtcccgcatgccgcaactcgctatgacaaagataggattgtcagatggctgccacttggacaggacggtagtggagaaaaatgtggacaagaaacagaagacccaaa

SEQ ID NO: 25812 - DNA, 100 bp, Oryza sativa
  Clone ID: uC-osflM202081c06b1
cgtaagtttaacccaggcgggacctttccatttttgccaccttatagagcttgtcggcgacggacacctacaggaacttccttctggagccattgcagag

SEQ ID NO: 25813 - DNA, 197 bp, Oryza sativa
  Clone ID: uC-osflM202081c09b1
tcgtccccgtggtcaccgtggacggcgcgttcgacggctgcgtggagttccgcgaggtgctcgccgcggaggagctcgacgccgacgccgacgtccaccccgacgacgtatacgccctccactactcctgcggaaccaccggcctccacaagggcgtcatgcacacccaacgcaaaatgatcaccagcgttcatcca

SEQ ID NO: 25814 - DNA, 345 bp, Oryza sativa
  Clone ID: uC-osflM202081c10b1
taaaaaaaggaaaaaaaaacaaaacacaccaagcgcaaataaaagcgacaatgggatcgctcaccaccaacatcgtcctcgccgtcgccgtggtggcagcgctggtcggcggcgggtcgtgcggtccgcccaaggtgccacccggtccgtacatcacgtccaactacaacgccccgtggttccccgccagggccacctggttcggtcagccctacggctccggctcctccgtcattggtggtgcgtgcgggattaagaacgttaatttggcttccttcaacggtttgatttttttggcgcaacgttctctatttttatggtctgcctgggatgccttctttgcct

SEQ ID NO: 25815 - DNA, 220 bp, Oryza sativa
  unsure (1)..(220): unsure at all n locations
  Clone ID: uC-osflM202081d03b1
ggatcnnctctgaacctcgtgtacatcntgcgagtgcaagtnggctcttccttgaggttgccagactacctggaagcaggtcatcaaggattaancgactatctcagaagagccggtttgtcaatccgtgttgttggcccttcatgtttcaactactgttctctggcatataagatttgtccgtctcttggcttttgctgttcaagaatggacactcggt

SEQ ID NO: 25816 - DNA, 234 bp, Oryza sativa
  Clone ID: uC-osflM202081d11b1
tggaagaagccgctcctcctcttcccgcggcccttctcctcgtcctcctcacccaaccctaccttccctcctgccgcgccaccgcccaacgaccgcgacgacgcctcaccaaagcccagcgagggggagggatcttgagattggacctggagctccttaggttttcaacgttgatgttgagatcacaatggggagcatagtgaagcatgagcttgacaagacgactggaatgat

SEQ ID NO: 25817 - DNA, 354 bp, Oryza sativa
  Clone ID: uC-osflM202081e01b1
gctgaagccgagcgaccgccttctcgatccatatcgtccggtcgagttcttggtcgatctcttccctcctccacctcctcctcacaggttcttggtgtagcttgccactttcaccagcaaagtttcatgtctgatctcgacattcagatcccaactgccttcgatccctttgctgaggccaatgctggagactctggtgcggctgcaggatcaaaggactacgttcatgtacgcatccagcagcgtaatggccgtaagagcctgaccactgttcagggattgaagaaggaatccagctacaacatgatccttaaagatctcaagaaagagtttttgcttttttggccctgttgt

SEQ ID NO: 25818 - DNA, 340 bp, Oryza sativa
  Clone ID: uC-osflM202081e04b1
tgtttttctcccccacctccacctcctccgctgccgaggcgagatctcgccgccgccgccattccccaatccgccccaaaacccccaccccccaaaccctccgatcgatccgagggaggagccaatcccgcgctcgaattcgttcgccccgaatcagccgctggatgcgtcgagctcgaggcggcggaattcaaatctgagctcgccgttggcgcggatccgacggggatggcgacggcggtgtcgaagtcggcggctaagccgcaccccaggtcgcccaccaccgcgcagccgccgaacaacggctccgcggcgggggcggcggcggggggcgggggcg

SEQ ID NO: 25819 - DNA, 500 bp, Oryza sativa
  Clone ID: uC-osflM202081e11b1
ttctagcctctcccaccaccaccaccaccacgggcactacacactatgctcagggcatctccctccttccctcctataggaatccaaacccgccgcatcccggttcatgtcctgccgctccccatgtcgccgcccctcgagctcgactacataggcctctcgccttcgccgacgccgccctcctacttctccgccgccgacgaccgcgcggacgacgtctacctgaagggcaccgagctccgcctcggcctccctggctccgagtcgccggtccgacgccctgcggctattgcccgttgccgctgccactgtcaccacccttgagctgctgcccgccaagggtgccaagctccgtgttcccctcccaggaccctcttacgctgcccacttgtcgccatctttatcggctatggatgcttctcctcggctattctaccttaatcatacaactgcccaacttctaattcactattctctcactctccctttatctctataaa

SEQ ID NO: 25820 - DNA, 63 bp, Oryza sativa
  Clone ID: uC-osflM202081f04b1
gtaatttcaaacccaaaccaaaccaccacctgaggggcgcttcaaccgcggcgagcgcccccc

SEQ ID NO: 25821 - DNA, 517 bp, Oryza sativa
  Clone ID: uC-osflM202081f05b1
ttcttctcatggcgaagccgcagcttcttctggggggcgccgccgccgcactgctactcgtcgttgcagcctccgccaagaaatccggcgacgtgacggagctccagatcggcgtcaagcacaagccagaatcctgcagcattcaagctcacaaaggcgacagagttaaagttcactaccgtggaaaacttactgatggaacagattttgattctagctatgaaagaggtgacccaatcgaatttgagttgggcactggccaagtgatcaaagggtgggatcagggcattctgggcatgtgcgttggcgagaagaggaagctgaagatcccttaaagctcggttatggtgctcaagggtcaccgccgaccatccctggtggagcgactctcattttcgataccgagcttgttgctgtcaatggcgagccagccagcaaatccgatgaggacgatgatgacagcgagctttagaatggcaggaaggttcacattttacgcgccaaaacaaagtctagt

SEQ ID NO: 25822 - DNA, 472 bp, Oryza sativa
  Clone ID: uC-osflM202081f08b1
tttgttgtttcaagatggcgacgtgcacacttgcaggttcatgtgtgtccttgagcaatgctagaactcaggcctccaaggtggcggcggtcaagagcccggcatctctaagcttcttcagccaaggcatgcagtttccaagcctgaaggcctcctccaagaagcttgacgtctcggcaatggctacctacaaggttaagctcatcacaccagaagggcaagagcacgagttcgaggctccggatgacacctacatccttgatgccgccgagaccgctggagtagagcttccctactcatgccgtgctggagcatgctctacctgtgccggtaagatcgaggctggctccgtcgaccagtcggatggatcattccttgatgatgcgcagcaggaagaaggctatgtgctgacatgtgtctcctaccctaagtccgactgcgtcatccatactcacaaggaggagacctttac

SEQ ID NO: 25823 - DNA, 245 bp, Oryza sativa
  Clone ID: uC-osflM202081f11b1
tcgtagggctcatgatgaagacctttatgatgttagttactcggagatgccctttcggtttcactgatgcccatttgggcgattggcatatctatcatccttttttaaggaatgagaatcatcacccccagttacttttcatgacttcatgggacaacatatgtttacggagcatgtagctgctgtatcttctgcacctggggcaactcattcatgcccatatgaagaataacttgcattctatt

SEQ ID NO: 25824 - DNA, 189 bp, Oryza sativa
  Clone ID: uC-osflM202081g02b1
gctcgtcctcgtcgggacgacggcagacaatggccgccgccgcgatgatcctcccattactattgctattgtgttggtttctgctgctgtctgtgggcgacgcgatgtgttggttcaacgacgacgcatcagcatcggcaccagcggggtggttggtgtcgtggaccaatgggatgggttggttcatgg

SEQ ID NO: 25825 - DNA, 517 bp, Oryza sativa
  unsure (1)..(517): unsure at all n locations
  Clone ID: uC-osflM202081g05b1
nctgtttgttggcggaaacagggacaaagttcaggggaagattgttaaggagaaaattaagcttccggcatatttatctagcgaagttcattctctgctaaaaggcttactgcacaaagaagctggcaggaggctgggctgtggaccaggcgggagcaatgaaataaagaatcacaagtggttcaagtcagtaaactggaagaagctagactcccgacagattcagccaagcttccgcccaaatgttgctggcaaaacctgcatcgccaactttgacgagtgctggaccagcatgcccgtgctcgactctccagtggccagccctgtcgctgcagatagcaacttcgtgggattcagctatgtgaggccagcgcccttccttcagaggccgagtcctctaggctgaagacctccagttgagaccgaaatacatcttgccactgggtatgaagctgacaaaattactgtttcgatgattattatgtaaaactacctatttatgttgttcggtttgtct

SEQ ID NO: 25826 - DNA, 390 bp, Oryza sativa
  Clone ID: uC-osflM202081g09b1
taagagccgggtggcggcggggtacggcgggggagggtacgggtacggcgggtacgaggggcgggacgacaggaagtggtggccgtggctcgtgcccaccgtgattgtcgcctgcatcgcggtgttcatcgtcgagatgtacgtcaacaactgccccaagcacggcagcgcgctcggcggctgcgtcgccggcttcctccgccgtttcttctttcagccgctccgcgagaacccgctcctcggcccgtcttccgccactttgcagaaaatgggagcttttgactggaacaaagtttgtcatcagcacccaggatggggtctcattagctggatctggcttcatgctggccctaatccatttgggtgggaacatgctgaggttactgttta

SEQ ID NO: 25827 - DNA, 127 bp, Oryza sativa
  Clone ID: uC-osflM202081g11b1
tgagagaccgagtaagactgtctactactcagtgaaatttatcaacaagggagacgggcttaccagaatccactcttaaagatgttcctattctagctcgacaatagaaccactaaattaaaatata

SEQ ID NO: 25828 - DNA, 369 bp, Oryza sativa
  Clone ID: uC-osflM202081h04b1
cgtgttcttggttggtgatgctgcatctgtgggttgggtcttggaaccgagtgggaggtacgtaggaggtaggcccttcgtgaggcatgaacacgtcgagggcggaggataaggccatcgactactggttccccatcagctccttccgcaacgccaagtggtggtacttcgctttccacaacgtcaccgccatggtcggcgccggcgttctcagcctacccttcgccatgtccgagctcggctggggtcctggggtggcggtgatcatcatgttgagggtgatcactctgtccacgctgaggcagatggtttaagtgttgaagtgcttaacaaggttttttttttcctctattcaacttttctttatcc

SEQ ID NO: 25829 - DNA, 72 bp, Oryza sativa
  Clone ID: uC-osflM202081h05b1
gatacagaaatctctcgtctcgtcgtctccgttcgttgctctaagaccagtcgcggctgaacaggggagggc

SEQ ID NO: 25830 - DNA, 195 bp, Oryza sativa
  Clone ID: uC-osflM202081h07b1
tgcggctccgcccagacaagggactactacctggactccttcagctccagcaggaggcgccggagcgccgaccgaaagtccttctccgacgccggcgaccaaaaccccaggatggtggccgcgggtgtcaatgccagggtttcaccggccacagagttgacccaccagtgcgacaccatttcactatcaccagtc

SEQ ID NO: 25831 - DNA, 480 bp, Oryza sativa
  Clone ID: uC-osflM202081h08b1
tttatggatgctaaaaattaccatgcttggtctcataggcagtgggttcttcaagcactgggtggatgggagactgaactacagtattgcaaccagctgcttgaggaagacgtcttcaataattcagcttggaatcagagataccttgtaataacaagttcaccacttcttggaggccttgcagcaatgcgtgactcggaagtggattacacagttggggctattctggctaaccctcagaatgaaagcccctggagatacctcaaaggcctgtacaagggtgaaaataacttgctgatggctgatgagcgcatctctgatgtttgtctcaaggtcctgaaacatgattcgacctgcgtatttgctttgagcttgctgctcgatcttttttaaattggtttacaaccttcagatgaactcaaaggaactatcgaagcataaagaactctgatcctgaagcaaatgaacaatagatgcttg

SEQ ID NO: 25832 - DNA, 400 bp, Oryza sativa
  Clone ID: uC-osflM202081h09b1
tcgtagagccttgctgctgatcatacggttgcctgcccatcatcatcatcatctgctgctgctgctgatcatactgttgttgctgctgctggagcatgaacatatgctgctgctgctgcgccatggcggccatctgcacgtttaagggcggagcaatggcgttcgaggcgtagaacgggttctgcattggctgctgcatcattgggccagatgatgctggggctgctgcctcccaggggttgtagcttgcgttctgttgcgcttgtcggtgcgcctcgttgtataggctgtcaagggtgagcaagtccagcccaccagcctgttgttgaagtgaagtttcaggttaagcgtgtttagtgtggttttagagggttccaattagcaaattttagacaaattt

SEQ ID NO: 25833 - DNA, 231 bp, Oryza sativa
  Clone ID: uC-osflM202083a02b1
tatgaaaatcatcaaaactttagctactgaatgagatgggtgatgaaatggctcaacaatcacatggtgagccaaagacatgtgcaacagccaacagtgcaaccattgaaaaaaagggaagatattttttttctaacatgtaagaacccgaaagatgaagctttctctcactattctaatttcttgttaagatgcgattttgtgattcatttatatcctgtaggatcaaga

SEQ ID NO: 25834 - DNA, 213 bp, Oryza sativa
  Clone ID: uC-osflM202083a03b1
ttatcctgatcgtcgccgtccttgaattgccggctcccatcccacgaattccggccctcccaccctcctgagatctctctctctgcctcacctccgtatttaggtaggcggcgggcgcatcacgtactattgacctctgctgcccgccgccgccgccgtacagtcggctgattgagcggaattcccattccttttcgcccggtttccggcgct

SEQ ID NO: 25835 - DNA, 444 bp, Oryza sativa
  unsure (1)..(444): unsure at all n locations
  Clone ID: uC-osflM202083a05b1
tttatacagtggtgttcttctttttatgtagttcaaaccgtaaaagataatcaggctattttttaacagtagcttgtagacatacccagcagactccacgaattttggctaaattttttgagtctttgcatcatggtctaaaaattcataaaacactgcatagtcccaacctaaaaacagtaggtaacctggttgtcgaatttgtgtagcccaatctagatggataaaatcttagttcctttagggtagctcaaaaggttacccatcaatctctctgattttctttttaaaaatttaacttttcgtgagctgcacattttgttgcttcattttccatcctttcatttaaaccatatgctnttcgttggatttctttatttttgaaagttttatttgactaatgcttttgacatgctattttggactttaatcaattattttgaa

SEQ ID NO: 25836 - DNA, 519 bp, Oryza sativa
  Clone ID: uC-osflM202083a09b1
tcttattttcttgtttcatggaagcagattgttagtcatgaagaaggtttgctcttgaaagataactttgaaggtggtgcaacctgggcctttgaagttggtacgcgatctatgacatgtccaatcatagtagaggatctcaatccaccccgtcaaatgcttgtggagatgctttgtaaagagagaggaatcttcttggaaatagctgatcaaattagaggtttagggttgactatcttgaaaggtgtgatggaagttcgtaaagataagatttgggctcgctttgctgttgaggcaaacaaggatgtaactcggatggaaatatttctttctcttgtccatcttctggaacctagcactgggagctctattttgtcagcaggtgttgagaacactagcctgccgcgcgatagtttctttccatcgtctattccagccactggtttctccaactgcttgtgacacgatgtaccataccttaacaggtggagcgctgtgagtgggtaaaggtttcacctg

SEQ ID NO: 25837 - DNA, 399 bp, Oryza sativa
  Clone ID: uC-osflM202083a12b1
tcggcagccacctcgacgaggtgaagcgcatggtggcgcagttccgcgagccgctggtcaagatccagggcgccaccctccgcgtcggccaggtggccgccgtcgcccaggccaaggacgccgccggcgtcgccgtcgagctcgacgaggaggcccgcccccgcgtcaaggccagcagcgagtggatcctcaactgcatcgcccacggcggcgacatctacggcgtcaccaccggcttcggcggcacctcccaccgtcgcaccaaggacggccccgccctccaagtcgagctcctcaggcatctcaacgccggaatcttcggcactggctccgatggccacacgctgccgtcggagacggtgcgggcggccatgctcgtgcgcatcaacaccctcctca

SEQ ID NO: 25838 - DNA, 378 bp, Oryza sativa
  Clone ID: uC-osflM202083b01b1
ctttacctccttccggcggagctacggtgagccttctactccgcgccggcgtgcggtcggtgagcaggaagggggtctgttctatggtcctcttggctgtggtaagactttgttggtcaaggcaattgctaacaagtgccaggttaattttattaacaatatgggacgtgatcatattactcatgagcgataggtttatgaaggaagactgtcatatgaacaagaggtattttaagtacgctagattgttcgacaagttcaaggtcgatcgtgagagaggtattaccattgatattgccctgtggaagtatgagaccaccaagtactattgtacggtcattgatgctctcttggttatcgtgtatttattaagaacta

SEQ ID NO: 25839 - DNA, 359 bp, Oryza sativa
  Clone ID: uC-osflM202083b02b1
gttgggcttgatgacttaaaaggcctcaggaatgtgtagtcacttattatgagatattgtgacatcatagcagattcaggtatcacacacttatcagatctgacagatgtgaaagaattgctattggcttgatgtagaaacactgatctggctgttaatgatcttagaggcttgtccaagctaacacagatgaatgcggagggctgcccaaagactgctgcctgtaaggaagctatatcaggataggctagtgtggtggtgctgaacatgagtcagtgtggcatcatcagtggaagcagagaaaactatccaggtgatgacatagaggaggaccctaacatgggagcagctcctgttgc

SEQ ID NO: 25840 - DNA, 529 bp, Oryza sativa
  Clone ID: uC-osflM202083b07b1
tgccgccgccgccgcagcctcctcctctcgtcttctccttcgagttgttagctccctccttattcaaccatgggtaaggagaagacgcacatcaacattgtggtcattggccacgtcgactccggcaagtcgaccaccacgggccatctgatctacaagcttggaggtatcgacaagcgtgtgatcgagaggttcgagaaggaagccgctgagatgaacaagaggtccttcaagtacgcgtgggtgctcgacaagctcaaggccgagcgtgagagaggtatcaccattgatatcgccctgtggaagttcgagaccaccaagtactactgcacggtcatcgatgcccctggtcaccgtgacttcatcaagaacatgatcacgggtacctcccaagctgactgtgccgtgctcatcattgactccaccactggtggttttgaggctggtatctcccaggatggccagacccgtgagcacgctcttcttgcttttactcttggagtgaagcagatgatctgttgctgcacaa

SEQ ID NO: 25841 - DNA, 479 bp, Oryza sativa
  Clone ID: uC-osflM202083b08b1
tttgttggcctgcaggtggtgggcgggtgggtggcggcgcaagaagcaggtgatgccccggcgagcatcgtggggccatgctcgcgtacaggagacaagaaggcgtgcgtggagttgttgtcgggcatcccggaggcccggaaggcgacaacggagggccctctcgcggagctgtacctgcgggcaatcgtcaaccagacgacggaggccaaggcgatggctaccaagctgctagccaccatgaaggggaagggcgtgccacccgtgtgcctccagcagtgcaccgtcagcgtcgacaccctctacaacgcccttgccgactttttctttgcctccgccgacgttaacaaaaagtacagggacttggacggtttacttgtgtgctttcttaaacaacccgtccatctgcatgagcgcgtgccccattcggtcgtgcgatatggaagaggtcactatctgcgacaggttccaccaacctt

SEQ ID NO: 25842 - DNA, 423 bp, Oryza sativa
  Clone ID: uC-osflM202083b09b1
ttgcgcatctgcatccaaaaccaaacccaaactcgtcttctccaccggagcagagcagcggcggcggcaatggacgccctcctcgtggagaaggtcctcctgggcctgttcgtggcggcggtgctggccctagtggtggccaagctcaccgggaagaggctccgcctcccgcccggccccgccggcgcgcccatcgtcggcaactggctccaggtcggcgacgacctcaaccaccgcaacctgatggcgctggcgcggcggttcggcgacatcctcctcctccgcatgggcgtccgcacttggggttgggtgtccagcccggacctcgccaaggaggtgctccacacccagggcgtcgagttcggctcccgcacccgcaacgtggtgttcgacatcttcaccgggaaggggcaggacatggtg

SEQ ID NO: 25843 - DNA, 440 bp, Oryza sativa
  Clone ID: uC-osflM202083c03b1
gtctccgtccaaaggagatttgttctatggccctcctggcagaggcaagactaccgctggccaaagcaaatgttaacgagagccaggctaacttcattagtgtcaaggcacctgagctgcttaccatgtggcctggtgagagcgaggccaatgtgcgtgagatttttgacaaggctaggcagccagctccttgtgtcctcttctttgatgagcttgactcaattgctacccagagaggaagcagtgttggtgatgccggaggtgctgctgatagagtgctgaaccagctgctgactgagatggacggcatgaacgcgaagaaaaccgtgctcattattggtgctactaacaggccagatatcattgaccctgccttgctaaggccagggcgtcttgatcagcttatctacattcctctggctgatgatcaatctaagctg

SEQ ID NO: 25844 - DNA, 341 bp, Oryza sativa
  Clone ID: uC-osflM202083c05b1
tctatttttcgagaaccaaatcacacctcgcctgcagtgtctcgtgtcccagaacgcgattgcgtttttttttttgcacgtttggcttccatatccctcgtctcttgtactcccttactcacatgacggtctagccgtaagccctggccagggcccagggctgctcattatgggctgccaggagatggaggctctgccttcagaatatgattcacgaggctaaggcactgtaggtagatgaatgctctacagaggattacattgacattggtggtcttgagaaacttttcgattaggctggaagtagcattagtattgctccatgactcacaaggaccggt

SEQ ID NO: 25845 - DNA, 179 bp, Oryza sativa
  Clone ID: uC-osflM202083c08b1
ggtggtgtgtggcctccttcccctccctcctctcgcgaggttgccatgcctcccccaagatcctagaacgcatccccacaacctcacctcgctcgcaagaatcttcttcccaccatcgccctccctcgggatcgatccaacccgatcatcaatcggggcggggaaggaggaggagggga

SEQ ID NO: 25846 - DNA, 494 bp, Oryza sativa
  Clone ID: uC-osflM202083c09b1
tggagactgtccaatatccagtggagcatcctgagaaatttgagaagtttggcatgtctccgtccaaaggtgttctgttctatggccctcctggctgtggtaagactttgttggccaaggcaattgctaacgagtgccaggctaacttcattagtgtcaagggacctgagctgcttaccatgtggtttggtgagagtgaggccaatgtgcgtgagatttttgacaaggctaggcagtcagctccttgtgtcctcttctttgatgagcttgactcaattgctacccagagaggaagcagtgttggtgatgccggaggtgctgctgatagagtgctgaaccagttgttgactgagatggacggcatgaacgcgaagaaaaccgtgttcattattggtgctactaacaggccagatatcattgaccctgccttgctaaggccagggcgtcttgatcagcttatctacattcctctgcctgatgatcaatctaggctg

SEQ ID NO: 25847 - DNA, 415 bp, Oryza sativa
  Clone ID: uC-osflM202083c10b1
tctagttctagatcgcgagcgccgccctttttttttttttttgtcaagagtagtatctttattgagaagcaaaagcaagcggcaaaaccattacacactgcttgctgggcaccgtcccatggccgaacgtgaaaaacatagcccaagagagtagtacaatttacagcagcagtagcatatctccctcaattatacactcaccactcatcgtcacagcacaagcactaggtttttggtcatgctaaggaatgaaatttctccagagctagcacctaaaacctttttccgtttcggaggaaatcagctcaggttttctgacgtggcatggttacaacaaggtttcttgcttgtttctgcaagagaaaccagtcatggtcctcatggagttcaccaaatttacaatgacaggcttgga

SEQ ID NO: 25848 - DNA, 315 bp, Oryza sativa
  Clone ID: uC-osflM202083d02b1
ttgtacgcgtggtcggacgcgtgggcggacgcgtgggcgaacgaacaacgcactctgcagctagctatacaatctctgtttaattagctaggtagctagcgagtcataaatcaagaagccatggacttttacgggcggcgcgagcagtacggcgggtatggcgggtacggtggcggcggcgccctggcgacgccggggtacgcgccggcggcgccgtacgggatgtcgcaggtgaacatcgaggggaacgggtgtggcaggacgctgccgccgtagctgacggagaaggtgtactgcctggcgaatcccgaacta

SEQ ID NO: 25849 - DNA, 349 bp, Oryza sativa
  Clone ID: uC-osflM202083d07b1
tcgttacgtcaaggtcgacgacgacgtccacgtcaacctagggatgctgacgagcaggctggcgaggtacaggacgaggccgagggtgtacgtgggctgcatgaagtccggcccggttctgtcacagaagggcgtgaagtaccacgagccggagtactggaagttcggggacgaggggaaccggtacttccggcatgccaccggccagatctacgccatctccaaggacctcgcctcctacatctacatcaaccagccgatactgcaccggttcgcgaacgaggacgtgtcgctgggggcgtggctgatagggcttggaggtggtgtacgtggcctaccgtagttggag

SEQ ID NO: 25850 - DNA, 487 bp, Oryza sativa
  Clone ID: uC-osflM202083d09b1
tcttctccccgccgccgccatgggtgcgtacaagtacgtgtcggagctatggaggaggaagcagtcggacgtgatgaggttcgtgcagcgcgtgcggtgctgggagtacaggcagcagccggccatcgtccgcctcacccgccccacccgccccgacaaggcccgccgcctcggctacaaggccaagcagggttatgtggtttaccgtgtccgtgtgaggcgtggtggcaggaagaggccagtgcccaagggtattgtctacggcaagcccaagcaccagggtatcacccagctcaagttccagaggaacaagaggtcagttgctgaggagagagctgggcgcaagttgggcggactcagggtgctcaactcctactgggtgaacgaggactccacctacaagtactttgagatcattcttggggatgttgctcacagtgctattcgcaatgaccccaggatcaactggctctgcaagcctgtgcac

SEQ ID NO: 25851 - DNA, 511 bp, Oryza sativa
  Clone ID: uC-osflM202083d11b1
tttgcagggaagtccggagttggaagcgatcgatggcggctactacgacgggacgagttgttgcactcggcgcggtggccgtggtggtggcgctgacattcctcgccggcggcgcggacgccgactgctacgacttctgcttcaaggactgcatggccagggagaacaacatggtcgactactgcagctacgcctgcgacaagacgtgccagccggacaagcccacgctgtactcgtcgtcgtcgtcgtcccgcctcgccggcgacatggagtgccaactctcctgcgccttgggctcctgccaccgcctccttccggacggcaagggcgccgtggaggcctgcttcgggcagtgctacgacggctgcaagaccacggcggcggccagactgccgaggcctctccgcgccggccactacgtgctctctagtccccctgatgacgtagaccatgatccggaccaccgctacgtgttctctagcccccatgatgacgtagaccatgatccgga

SEQ ID NO: 25852 - DNA, 209 bp, Oryza sativa
  Clone ID: uC-osflM202083e01b1
tgtatgagctgtagtacacgtgaagcttttcttgattcgggtgtatccatggcgcgggatgacgacccggccaagaaattagctgtggatggcggaatacctaccactgtacaaggtctgcggatgcggccgactcgtatgctgtcgcgttcagcgccgttaaggtcgtccttgcaattcatgctgttgagatctacgattttcttgac

SEQ ID NO: 25853 - DNA, 434 bp, Oryza sativa
  Clone ID: uC-osflM202083e02b1
tgttgcctctcctcctcctccctaacccctacgcttccagaaccttctcgaagctcccgctcccccccccttccgctccaatggcgaaggaaccgatgcgcgtgctcgtcaccggcgccgcaggacaaattggatatgctcttgtccccatgattgctaggggtgtgatgttgggtgctgaccagcctgttattctacacatgcttgacattccaccagctactgaatctcttaatggccttaagatggagctggttgatgctgcatttcctcttttgaagggaattgtcgcaacaactgatgctgtggaggcctgcactggtgtgaatgttgcggctatggttggtgggttccccccgtaggcgggactggaagggcatggtgtttttgttaaaacaatgtcttcttctactatacccagttttcttcttttt

SEQ ID NO: 25854 - DNA, 446 bp, Oryza sativa
  Clone ID: uC-osflM202083e05b1
tgctactctctctctctctctctctctcctcgaaaaccccaacacacacaacgcgaaccccactccgcgatggcgtccgccggcgatcgccgcggcggcggggggcctcccggctccggcgacgactccgggggtggttgggagactgatgagaagagggtaatgacaccagcgcaccaggttgggaaggtgcaatggggacaatggaattcttcaaaggctgcacctgcacctggtgcaccacggagtggctctggagcttttcatcattctggaaacacttcggttcgacattctgatcgtaggccagcaagaggcactcctaggccactaccacaaaacaggtcttttgaggcagaagtgcaagcaccgcacggaggtgggactgcaccctctggccaatggctggcagtggggagcccggttttgcccacctggcactgaaa

SEQ ID NO: 25855 - DNA, 517 bp, Oryza sativa
  Clone ID: uC-osflM202083e10b1
ttccgcctctcttcttgttaggggatccgaaatctcggtggacgagagacttggtggtaagattcgccggccatggcgggcgccgtgctggtcgccatcgcggcctccatcggcaacttgctgcagggctgggataatgcaaccattgcaggtgcggtactgtacatcaagaaggaattcaacttgcagagcgagccccttatcgaaggcctgatcgtggccatgtcgctcattggggcgacgatcatcacgacgttctctggagcagtggctgattcttttggtaggcggcccatgctgatcgcgtcggctgtcctctactttgttagtgggctagtgatgctttgggcgccaaatgtgtatgtgttgctcttggcgaggctcattgacgggttcgggatcggtttggctgtcacgcttgtaccattgtacatctctgagactgccccgacggacatcagaggactgcttaacacgctgccgcagttcagtgggtctggagggatgtccctttcat

SEQ ID NO: 25856 - DNA, 489 bp, Oryza sativa
  Clone ID: uC-osflM202083e11b1
tctcgagctaaaaacctcactaccacaacaagcatcttggtttctgctaaaacaaagacttcattatatttcaacaatggatttaacaacaggagccatatggttgttcctggctcaactgttcgtcgctgcaacaatgttgagtaagattgcaacaagagaaagaacaagaaccactggcacaaaattctctagaccaccgcctccacccttggcccgtggagctcctcttgtaggggttttaccatcggtggtcgtcaatggcccggcggaactcatcctgccaccaatctcagatgatggtttgtgttttccctgtctgctgccttcatcagaaggcgtctcttcatgtcgttcttttggcttttagtctcttttttatcttatatcgattccctactcattttgttttatttccttccctattctcttttctttctacttcaactttccttttcttcttctatctttttacatctacctcttctc

SEQ ID NO: 25857 - DNA, 577 bp, Oryza sativa
  Clone ID: uC-osflM202083f01b1
tcttctctctcctcccctccccatggcgcggcggggccattaccaccacctggcggaggtggtcattcttgcgttgttctataagttatttttttttttttttatatattttatttttgcttttcattcttatattttatcattatttttttaatatttattttattattttgtttaattcatttattttagattatattgtatattattatattttattttttgtaaatttggaatttttttattttattatattttcattatttttataattaaatttttttttttatttgatttaattatttattatttgctttttctattttattttgtatttaatattcaacattatttacttatattaattattttgatattttatttttttttatttattcttgattttctatttgtattttttctcatttggattttttttttttttatttatctaatttttttttcatttatttttatatatatttaatctttttttatattatcttttatctgaaatttattttattttttttattattctatttttataatattttttttttgttcatttaatttt

SEQ ID NO: 25858 - DNA, 338 bp, Oryza sativa
  Clone ID: uC-osflM202083f02b1
ctttctccccgtctcgattccccaccagcggcgaaaccctaaccctagagcggccaccgccatggagaagcgcgcgaccaccaccagggcggtggtgctccgcctcgacgacctctcccttccgccgcgccgcctcaccgtgccgttccgtctcccggtctcccacctcctccgcgcgctgccgcagccgctgctcgagtcgacgtcgatgtactctcaccgccggacggccgtctcgctcctgcagttcgcgccacgtgtattctttaaacgctcacaggccactggtccagtgggtttgcccttgcttgccctagagacatgaaaacagacacata

SEQ ID NO: 25859 - DNA, 503 bp, Oryza sativa
  Clone ID: uC-osflM202083f04b1
tgttgccctagctaggaatagctaatattgctggtagcattaggctgctacgcgagccaatcggccaatcagagcatcctaaggttggcacgggcctgcattggcggcagagagagagagagagagcgatcccttggttgtactgctagcgcccaaaacccaatttaggttgggaactgacttgcatggctctttgggccgcaagaagtgcagggagtgctacacaaaccatgtacgcactctatttgaggcgcaaggactccaagttcttcaactgcttgcagcgaagacaccagaactcgctggagatgatgccgctgttcttcgtcacgctgctggtcggcgggctgcagcacccgctcgtcgccgcggggctcggggtgttctacgccgtctcgaggttcttctaccttaagggctacgccaccggcattccggacaaccgcctcaagattggggggctgaacttcttggcgatctttgggctgatcatttgcaccgct

SEQ ID NO: 25860 - DNA, 337 bp, Oryza sativa
  Clone ID: uC-osflM202083f05b1
gctttttatactcttaggatgaaacacgacatgcagaatgataacaagaacatggctgacttaatagcatatagaataaagtttacacctcatccccatgctggcgacaagtggtttatctatccaagctatgactatgctcattgtttggctgactctcttgaaaacattacccattcgttgtgcacactagaatttgacatacgtcgtccttcatactactggctgctcgtattcctggaccagtaccagccatatgtttgggaatattcaaggttaaacatatcaaacaatgttatgtccaagcgaaagctaaataaacttgtgacagagaagc

SEQ ID NO: 25861 - DNA, 220 bp, Oryza sativa
  Clone ID: uC-osflM202083f06b1
ttctgctgcggcggcggcggccaacgaggggggagagagtatagctcctgtacccatcccttcctatgacatcttctagctttcttctcttcacactccttctcttcttctctccttttttaaccttctactctctttgtattcttcctattctctttcttcttttcttttccctccttctctcttctccttctttttctctttttctctttccttctct

SEQ ID NO: 25862 - DNA, 451 bp, Oryza sativa
  Clone ID: uC-osflM202083f08b1
tgccgctccatctccaagcccgaatccccaaaaccctagcccaccccctgccgccatggccgcctcccccaccggctcctcctcctcggcccccgccgccgcggcggcggcggcggccgaggccaccgacgggccgaccctcagcgtcgtctcgaagcggctccgcgcgctgcggaagaagcacaaccggatcctccagatggaggagtcgctcgccggcgggaggaagctcaacaaggagcaggagggggtgctccgatccaagcccgccgtcgtcgcgctcatcgacgagctcgagcggatgcgcgcccctctcgccgccgccctcgccgaggagcttctcctcccgccccgccccctactcctccgccgcgccgccgccctccgcattctcctccgccgcaggcgccgcggattcgtccgtcgtcgaggatcttctcgcgctcatcta

SEQ ID NO: 25863 - DNA, 453 bp, Oryza sativa
  Clone ID: uC-osflM202083f09b1
tgaaaaggcctgtgtcaaggagagggtagtagcaccttgctctcctttgccttcagagaaaccggaagcaatggcgtctgctactctcctcaagtcatctttccttcccaagaagtctgaatggggtgccacccgccaggctgccgcccccaagccggtgactgtctccatggttgtccgcgctggtgcctacgacgatgagcttgtcaagaccgcgaaaaccattgcatcaccaggaaggggtatccttgccatggatgagtcgaacgcgacctgcggtaagaggcttgcgtcaattggccttgagaacaccgaggccaaccgccaggcttaccggaccctccttgtcaccgcaccgggcttgggacagtacatctccggtgctatcctcttcgaggagactctgtaccagtcaactgtagatggcaagaagaatgtcgacatcctcactga

SEQ ID NO: 25864 - DNA, 440 bp, Oryza sativa
  Clone ID: uC-osflM202083f12b1
gcgtgggcgaggcggcgccgcttggtctagctagtagccacagggagaggtggtagccgcagccgccgacgacgagacctcgccgccggggggagggcaccatgtgtggcatcctcgccgcgctcggtgtcgcagacgtctccctcgccaagcgctcccgcatcatcgagctatcccgccggttacgtcatagaggccctgattggagtggtatacactgctatcaggattgctatcttgcacaccagcggttggctattgttgatcccacatccggagaccagccgttgtacaatgaggacaaatctgttgttgtgacggtgaatggagagatctataaccatgaagaattgaaagctaacctgaaatctcataaattccaaactgctagcgattgtgaagttattgctcatctgtttgaggaatatgggaggaatttg

SEQ ID NO: 25865 - DNA, 514 bp, Oryza sativa
  unsure (1)..(514): unsure at all n locations
  Clone ID: uC-osflM202083g03b1
ctctctctcattctctctctctctctctctctctctctctgccccttttcccccacctacacgccacattctctctccctctcctccccccattgcggctaccaaatgctcctccagatttgctccaaggtatgctatgtttttatgtatgcatctgtagcacccatgtcctctccttttccctctccttgttctttgtagcagtgtgtgtagcctgcccatgtcatggcatgccaagggaaggcagaaagaattgcacaaaacaacagagaggcaggcaggcaggcagatgatggtcttgatcatcagctggatttagttagttttgtgtgtcatactataataatacacacatgggatgatagctaattcaattaggggagtacttgcttgtatgcacatctccatgtgtatgtttggtgtgtgtgcatgcatgctngcatatgcagcaaacacacacaaagnttggttatttatttgcttatttgctcctggnggtcagcctgaactggct

SEQ ID NO: 25866 - DNA, 446 bp, Oryza sativa
  Clone ID: uC-osflM202083g04b1
tcataaacaaaggcgcacaacgaacccgcaggcagccaaccgcagcagtggtactatgttgttagccatgggcaaaggcaaggtgatgaccagcaagtagatcgtgaatcatgtagtctactctcgaggtggggctagtccggttgactgattcttgaggacgggtagttgctgacgcttacactgtagaggacttgcggttcagggtttcagtccaagtacgagtacctctactgtaagattgatatgcagttaaagctcgttctcgggaactccgtcggcactgtcaccgaacctattttactacttatgggcctgcgcatgatgagattgactttcagtttctggggaatgtgaccggggagctcgacacgctgcacaccaacgtgttcactcatgggcagggtcagcgcgagatgcaattctgcctttggaacgaccccacc

SEQ ID NO: 25867 - DNA, 456 bp, Oryza sativa
  Clone ID: uC-osflM202083g05b1
ggtcatggcgctcaaggtcgtctctttccccggggacttggccgcggtctcattcctcgactccaacagaggaggagctttcaaccagctcaaagtggacctcccgtttcaaacgagggacagaagagcagtttccctgagaaggacttgctgttcaatgcaacaggctccaccaccagcatggcctggtcgagccgttgctgaacctgggaggaggtcatgggatggccccaagcctatctcaattgttggctcaaccggttctattggcacacagacattggacatagttgcggagaatccagataaattccgggttgctgctcttgctgctggctccaatgtgactcttctagctgatcaggtgaaaacattcaaaccaaagcttgttgctgtaagaaatgagtcattagttgatgagctaaaggaagccttagctgattgtgattggaaagc

SEQ ID NO: 25868 - DNA, 524 bp, Oryza sativa
  Clone ID: uC-osflM202083g07b1
tcgttgctactagccggtgagctagctaactaactacgtggctatggcccccaccgagatggccttctagggcacctctgtggctagagttcaagggctcaagttcaccgccgatctccgagagagccgccgctccaccaactggggcttcggcggcgttagtaatgggggaaggatcaagtgcatgcaggtgtggtcaattgagggcatgaagaagtttgagaccgtatcatacctgccagcactcaccgtggaggatcttttgaagcagatcgcgtgcctgttttgatccaggtggtagccttgtgtcgcgttcagcacggttgggtacgcctaccgagagagccacaggtctaccggatacatacgatggcaggtattggaccatgtggaagctgcccatgttcggctgcaccgatgccacccaggtgctcaaggagctcgaggaggccaagaaggcctaccctgatgccctttgtccgatcatcggcttgacaacgccaggcaggtgcagttgattagct

SEQ ID NO: 25869 - DNA, 408 bp, Oryza sativa
  Clone ID: uC-osflM202083g08b1
tcttcaggctcctcttcttcctgctcttctccaccaccgcgctctactcctccacctcgtcgtcctcctcctccgccgtgctccgcgccacgacgacgacgacgaccaccaccacaaccaccacgaccaccaccaacaccttcaccctctccttccaagccaacccaaaccctcccccatctaacctctccaaccacactgccctggacgcggcgggggcggccgggcacacgcagagccacgtggtggtggggcggcatgggatacggatccggccatggccgcaccctgaccccgccgaggtgatgcgggtgcaccggatcatggagcgcgtgcaggaggagcagcggacgaggtctggctctcagtagccccgctctgttctgctcgtgacgactctctacattc

SEQ ID NO: 25870 - DNA, 245 bp, Oryza sativa
  Clone ID: uC-osflM202083h01b1
tttatatgcgagagagatctctcccgagctcgatccggtccaccgcgacacgaagacgaccatggtgatggctcgctcccagcttgccgccgtgttcctcgccgtcctcgtctcggtggcgccgctcgccggcgcggcggacaacctgcaggacgcgtgcaaccggacgctgttccccaaggtgtgcattcaggcgctgacgacgaacccggagagccggacggcgaacgcgcggcggctggcgg

SEQ ID NO: 25871 - DNA, 170 bp, Oryza sativa
  Clone ID: uC-osflM202083h03b1
atctatcatcaagtgattgttgccaaggcaatacgctaagggaacatttgctgtcttatataataagaggggatgactattaagctttaggctcttttgtgctcattatctacataagtgcatgcttaagtgcttgatgtatccatgctcgttgacctaggatcaaactt

SEQ ID NO: 25872 - DNA, 254 bp, Oryza sativa
  Clone ID: uC-osflM202083h05b1
taatcacccgccggagaggaaggccgccgccggcgccatgctcagggtcgccgggaggcgcctcaccaccgccctcgcctggcgccccgccgcggcggccggcgccaggggcccgctcgccgggggctccctccccggcgactacgaattctcgcgtgcgccccaagggccgggctaccccggggagtcctcgtacttagccgcttctaggggcttttcctcagaaactcttgttccagggtacccggatgtta

SEQ ID NO: 25873 - DNA, 201 bp, Oryza sativa
  Clone ID: uC-osflM202083h07b1
ttgtattaacccaaactccctccacacacattaaccactgcacaaacgcagccagcgacagcgaggatggccggccgagccagctgcgtactcatcctcctcctcgccattgccggcttcgccgacgtcctcgccgccggcggcgcgacgccatcgtcgtcgtcgtcgcaggtgagcacgacgacggcatccgagtttgta

SEQ ID NO: 25874 - DNA, 484 bp, Oryza sativa
  Clone ID: uC-osflM202083h09b1
ttaagtctccttcacactcccactccagcggcagctgagcagagagctccaccgccgccggccaccatgagttctcaccaccgctacgcccacctcctcgacgaccccttcttccccttcccaccgccgtcctcctcctcctgccccttcctctccccacccgccgcttcctccacctgcccattcttcgccctcgactcccccttcgctgctgaccctttccatctccaccccttcctccccacgccgcccactagctccctcctcgaccccttcctcctccacaccctcaccgaccgcgtctcccaactcgagctcgccctcgccgcccgcgccccacaccccaggcccaccagcaggaagtgcacctatgtcaccgagtccaccggccgcaaggtcaagtggaccaccgaggacatgcctcgcgccggcgagagggtgctcaagtgggaggctgagcttgactcccctacgacgatggatt

SEQ ID NO: 25875 - DNA, 382 bp, Oryza sativa
  Clone ID: uC-osflM202084a02a1
caaacacaatacccttataagtacttattattaggaaagtagcgtgcatgggcataaatggcagcggggggcaggttaagaatcacaatgctgagcagcgaggaaacaaaacaccataatgggacagagcaaaagcctccgaaagggagcttttaggcagaaggcttttcccacttgaggggctttaccacctcccaggtgaagtctgggtcgtcccttccgaagtgaccgtaagccgccgtcttgaggtagcgtccgttgccgcctttcttgaggtcaaggttgatgatgatcatgccaggcctgaagtcgaagttctcctttacaatcttgaggatctccttgtcagggatcctgccagtgccgtatgtgtcgaccaata

SEQ ID NO: 25876 - DNA, 388 bp, Oryza sativa
  Clone ID: uC-osflM202084a04a1
aaccggtaatctgcctcatttgtatttagctacatgggtactgtcaacggtaccttgcaaattacccctgctactatgtaaagatgacaaaagacagtttcatgctaaagcaccgtatagatacacaaaaatgtcaaaaaaaaaaagaggtaaagacatatcgatgtaattaaacaccatcttgtgatacattaagcagcagattcacaattgcaccagcaaaaaagaaatcaaggttacttactcattttagcccagaactaatagcgtccccatcttaccttgtgagggcacacttgatacatttccttgtcacagaaactacttgccaactttgcgcagattcattcaatattttgtcagggtttttttggttccccaaatgctt

SEQ ID NO: 25877 - DNA, 384 bp, Oryza sativa
  Clone ID: uC-osflM202084a05a1
aaagagacatggaatattacaagaagcactcaaacatcttcagagttacaaaattcatgtcacgctacagggagtatcaagaactctcttgaacatcaggcaattcttacctcctaccagactacatgttctaccaaaaaccatccaatccggtcgcacatcccacttccatttatatatgttaattgggagacaccattgtatcacatttgtagcaaatgatggttcgagctgtctcatcagtcgatcttcacagaagcatatatcttcctcacgaaccagaagcaagcatagaagccaatggtaccagtcagcacgaaaaaagcatacgagatgatcagcatgtaacccaagtagagaatgcctgaaacaagcttcgtgatc

SEQ ID NO: 25878 - DNA, 345 bp, Oryza sativa
  Clone ID: uC-osflM202084a06a1
ggagatgagcaccacgacgcacttgatgctcttgcacaccgtctggatcaccgtcggcccgggctccgggatcgtcaggttcaggttgtcgccgaacccctccgcgtacggcggctcgccgaccaccacgatcgcgtagtcgtacttgtcgccggtgaccacgctgctgtccgggttctccgagtacaccaccgtcgtgctgggatcaacggtggccttgatcgccgacaggatcgtcgtgccagcagtgatgttgttgccgggctgtccttgccaggtgatggtccatcctccacactgtctgcccaaatcatcagcatggctttccgcgacgagaattttacc

SEQ ID NO: 25879 - DNA, 391 bp, Oryza sativa
  Clone ID: uC-osflM202084a07a1
gaaatgaaataccatttctttccactgttgcctcagtgtaaagcttctaattaatttaaacagtttacagcatacagcatacatatttggtgcttttttataaaaaaataaaacaaaaattggacaatttccgagcttgccaaggaggaacatcaagctggaactctaattgcacatctatatgtctgcacagttatccacatttcacacacaaacataggaacatctgatatatttcgagtattaaatcctttggattaaattttgtataccttcattggagcatgaaatgaaagaattttggggacaaaactcaccaaatgtaaccatccatataatccagggtagaaacctttcacctagggcacctgcactgatatcgaaatcgggt

SEQ ID NO: 25880 - DNA, 358 bp, Oryza sativa
  Clone ID: uC-osflM202084a08a1
tttttttttttttttttttttttttttttttttttttttttttttttttttttttttttttttttttttttttttttatttttttttttttttttttttttgggggggccacttcaaacgggggaatgtaaattgttactataaaaaaaaaaacggggttttttttgggggggaaaaatttaaggggttaaaaggaatataaaaatggaaccggttttttaaaaaaacggagatggttttttttatggggaaaaaaaaaggggatacactcccgtgtttaagggggggaaaaaaaaacgttattttattttattgttcgccccacagggaaaaaaaactaaaaacttttttttgggtc

SEQ ID NO: 25881 - DNA, 323 bp, Oryza sativa
  Clone ID: uC-osflM202084a09a1
aagcaaggccctgaaaccccattccagggggccaaaggggcccaaggggcaaaagaaacatggggggctcaacaagacccccactaaagggggacaaaaaaggggggaaaaaaaacgccccggagggggcaaaagccgcattttggaacaaaagaaccccccaaaagcccggggggggaaaggcccaaaaaaacaagccttttaagccgaaggggtctcgacctcgccataggggaaatcccgggggaaaacccggggggccttggcggtgacggggcacccaacggtgacccagggcccaagggtcctcctggcgggcccgg

SEQ ID NO: 25882 - DNA, 389 bp, Oryza sativa
  Clone ID: uC-osflM202084a10a1
atgtaaatggttgatttctattaggtaaccgctcagcaaactgtcggtttgggcagcagagagttcagcaaaggggtcaggtgcttgggacccgagtatctgacatggcatacatggaaagaaaaggtgctgcttcttgtcttaacatgaatagtagaaggtatatatccccgaagtactggttttagaccatgtatgctaacatatgtcgtactattgatgagaaactgttcagtgaattatgtagcctctgcagttgatcagctggagatcactttcttaagctctcaatgatgtaggcgccgtataggtccattgagtacttgattgcgttgatggcattttttgctgggagaaacttattgacagcaacttctttggtctcattc

SEQ ID NO: 25883 - DNA, 309 bp, Oryza sativa
  Clone ID: uC-osflM202084a11a1
aaagatacaagaccgttttctcgaattagtaaatataggcaataaatgcaaagttttataaaaggtacaaggagcctgcaaaaaaagaaaaaacacacctaaattaaacattccccactccttaccccatccgacagtgacctttcctgcatacctggcttggacctacatgccagggacacttgatctcataccccatccaagtgaggaatttcacatgaagagttttcagaatttccacaataaatacgataagctttcagaaaaaagacccaccacattgcaagtcatggatttcccagcagttct

SEQ ID NO: 25884 - DNA, 378 bp, Oryza sativa
  Clone ID: uC-osflM202084a12a1
agttgagcaccacgacgcacttgatgctcttgcacaccgtctggatcaccgtcggcccgggctccgggatcgtcaggttcaggttgtcgccgaacccctccgcgtacggcggctcgccgaccaccacgatcgctgtttttttttttaaattttattattttaattattttttttttttttatttatttaccacctgtattgtctgtgtttaatatgttgtatcattttctcttactgtttatttttatgcccagcagggtatgttgtttgccgggcttgtcctttgccaaggtgatggtcccattcctttttttttttttatttattatttatctatttttttttttttttatttattttttttttctatttgttttc

SEQ ID NO: 25885 - DNA, 385 bp, Oryza sativa
  Clone ID: uC-osflM202084b02a1
agtaaaaaggtaaactcttcataataatattattaagacattatagctgatgtcttttgatcacactgcgatcaaattatgcatcataggcagtacaactccgcgtcaggaaaaagtagaggagatatatttcttgttattacttaatacagcattcacatatatcgaaccatccggtacgtacgtagtagtactccacgcgttcacatcgatgatcggggacgatatcctcaggtagtacttatgcaaaagcgttggcgtaaactgacgaactgaacggacggacggtcggatttagggctcccataagtccaagttgccggagacgaagtcgtagtggccgccgacgagcttgagggtgccgttggcgatcccctccttgacg

SEQ ID NO: 25886 - DNA, 391 bp, Oryza sativa
  Clone ID: uC-osflM202084b03a1
gacagcaaatagcttggtaactttgaaactccacagtacaatacggcggtctagaggtccagacaaagagcatcaaagcaagaatgaagagaaagacaattggaatcacataaaaagatggcccaaagcacactaatttttattacaaccgccacgacagtcttgatcgtactgactctaaggcgcaaaatacaaatcggcattaatcttttgcggatatcccgctctctaaaggcttcttattcctcagcaaatcccagttcagagagcttgaggtgggcctcggcgtaatccgcaaagaaggcgtcctcatccgcagcatatttctccaccagtggacggaaggctgggtcagccatgagggctttgtcacttggcagctgaagaaggc

SEQ ID NO: 25887 - DNA, 394 bp, Oryza sativa
  Clone ID: uC-osflM202084b04a1
ggcaaaacaatgcatacactgtgcctcatttaagagaaccgcagagggtaaatcttggcttcccattccaatattccatcatattaggctaaacagctatagattacaaaacatgccagagtttgaaggtgacactgctgtagaaggaaaccatgtcccatggcagtatggtacatgttccaaccggctgatttggagaacggttggaaggtcaacaatctagagtactagacggaacatgctgaaaggaacagattagatcaaggaccagaggagctacacaatgaacgaacagaacaaggctggcatttttattttagctgtctattctaaagagctcttgagactactgaggatatatggtcattcactatcactagttcactactgcata

SEQ ID NO: 25888 - DNA, 372 bp, Oryza sativa
  Clone ID: uC-osflM202084b05a1
caaattcaaaaaccacgatttataaagtgccggagatgaagtacacaaattaacattacatcgagttttaataaaacatcatgcgaaaagccagcaaaaacaaaaggcagcatacagctaatgaagctctactggagtagctcgcaaaaggtccgacttattttcagtagcactctactccatttcttccgaaagagtgaccatcttctactgggtgttgtacatgtgacggatcaggtcaacaacgcgagagctgtatccccattcgttgtcataccaagacacaagcttaacaaagttgtcattgagagcaataccggcctttgcatcaaagatgcttgacctgttgtcaccctggaagtctgtggaaac

SEQ ID NO: 25889 - DNA, 350 bp, Oryza sativa
  Clone ID: uC-osflM202084b06a1
acaagtaaagctgatgactgttgtttggagttacatgaaatggttcactgaatgtttcttggctgaacatgaaataaaatgacactgctgaaagactagagtgcagtgtgaagcagtaacatgtccaacttcattgtagctcagccgggctcacttatggttgttagggactgatcgatctcctctgtcgtgagtgctctgaaaacacgatcatctttcctcacaacaccgaccttaatcttggtggccttgaaatcttcctgaagaactgattgcaatgcaaaaattgcaatctggacagtttccttgtaggagaactgtggggcatacttcattttcttttccagaaa

SEQ ID NO: 25890 - DNA, 390 bp, Oryza sativa
  Clone ID: uC-osflM202084b07a1
caacaaatatatatagttagaaggaaaggaacacccttgcattcttacattgatgttgcagtcttgcaggaccttataaattatatagcgacatctacatttaccaattggaacagttagtggttgcacgatgttacctacctacaatttgtacgtgctcgcacaagacacatttgtgcactatcctaatctacaaaactactgccgccttatataaaacctggatacctcactccaatttcgcatccagttttgcaatgcttctcaggagttgtttggagcagacattctgcgcctgagctacatatcgcccacgatttgctttcacccatgcaggttccttgggaacaaagtgtgagaaaccaaacttgattaagaagagagcatgct

SEQ ID NO: 25891 - DNA, 390 bp, Oryza sativa
  Clone ID: uC-osflM202084b08a1
caagccttctattttggtaatatgcatttcacggatttactatcttgtcagttgtcatatcaccacagaaactatttcacatcttcatttcttcacaataatgaagattaagctgactcagatttacaaaagaaaataaaaggaggaggatatctgcctcgggaagcaaagatgagcagggctgaactactgtagagaattgtagaaaagaatcaacacgactgatattccaataatgacaggaaaggcagttaacagatatagagcagaatatcccactgcggagggcacttcagtttcatcatcttcctcctcttcatcatccaaatcagcagcagaatcccaatcaatgttaagtcttttagcagctgtctcaggatcaatgcctgt

SEQ ID NO: 25892 - DNA, 341 bp, Oryza sativa
  Clone ID: uC-osflM202084b09a1
agcaaggaacaatgttcacctttattttttaaaatttcttgggggggggggaaaatgtttcacaaatttgggccaagcagcacacatttacaatttacagacattgaacaagccatgcagggacctaataaaactggagtaccccagtccccccctttaagtatcaactcaacatacacagtttcccgggaaccgccaaatttaagattaaacaagggtgaagatgcaacatcgcaggccctttgaactattctgaaaaactaagtccccccgagtttccccccttaagggtttgatgagaaccgattgggattggggaaaaaccggtcatcctccattgg

SEQ ID NO: 25893 - DNA, 261 bp, Oryza sativa
  Clone ID: uC-osflM202084b10a1
aggaaaaatgacagggtttttatttctagaatccccggtttggcctttgcaccaacaggttcccaaaggggttttggccccaaagaacaaaaagaatttctatcccccccaaagcccaactaaaaaaaacccccatttgattccaccaaatttaaaagggaaccccacccggaatgaacagcaccccccttggaagaacccgggcgccccaaagaattgcaagttggagcccaagccccgggggtaacccggggaaactgg

SEQ ID NO: 25894 - DNA, 392 bp, Oryza sativa
  Clone ID: uC-osflM202084b11a1
acgacaaaccacgaacttggatattaaagatgccacaaagaaggttcacataaacaacacaggtcacagcagcgaaagctacaagcaaaccctgcataatcgaaaagcaaatgtttttcaaaaccagacacacaaactgatagatagaagcccacacggacagatcataggatagcagcagtaatcaagcattgccaaggcaccaggcaagaaccctgaacctctctagtactcgtcaccctcatcaccctcgtcaccatcgtcgaactcggagccgacctcctcgtagtccttctccagcgcggcgaggtcctcgcgggccttggagaactcccccttcttcatgccctcgccgacgtaccagtggacgaaggcgcgcttggagtacatga

SEQ ID NO: 25895 - DNA, 356 bp, Oryza sativa
  Clone ID: uC-osflM202084b12a1
gtataaatagtgtgccattgcttgcagccttgcactgccaaccatttgcaggtataataatataaacattcaatatccccaagaaaccaacaaaaaaggacagaactaaacgatccatccccatctgcagattctgtccacacttgttcatacttctatcttgcatgactatctttttgtgttcagacatcatctcaatcgttctcatatcacagtggcacatgatttgagatgcttaatcaggagaatcaatggagatgatcccatcagctgtcaccaatcatgcttggttttcgtcgtttatccttgccgccgccagcttggtaaacaggctttcatcgtagacttctcgcacg

SEQ ID NO: 25896 - DNA, 393 bp, Oryza sativa
  Clone ID: uC-osflM202084c01a1
aagaatgccaaacatggtattatttatctaaaaactatacaagagcgcgacataagtctgtgaccaactaaactcacatgtcgcataattttcaagaacttcataaaaaacagacgctgaaataaaaccttgaaacttctcagtccggtttccagtagtgagataaatcatgaaatctttgttcggatatattaccatcatcaagatagggccaacttctgtatcacaactatctcagctggaagatcgtgttctaggactcgagaaaattactgaatactatggagcagagtcctcaggaccaagaatcatcaattatgatgcaaatgctacagcgctgtcagccacatcgaggatccatcaaatctaaaaaacgaaaagcaagcaaaggaa

SEQ ID NO: 25897 - DNA, 409 bp, Oryza sativa
  Clone ID: uC-osflM202084c02a1
gtgtgaaggatcaaccagccggggttggtggtatcagacggtcacgcgctgttcatgctgaagctgttctgcctgttcgcgcgcacgcccacgccggcgccgacgttggcgccgacgttggcaccgacgttggcgccgatgcccgcaccagcgccagcgccggcgccagcgccgacgttggcaccgacgttggcaccgatgccggcgcgagcgccgactcccgcaccagcgccagcaccagcaccagcaccagcgccgacgccggcgccgacgttggcaccgacgttagctccgatgccagcgcgagctccagcgccgactcccgcaccagcgccagcgccagcaccagcaccagcgccgacgcccgcgccggcgttcgcaccgacgttagcaccgatgccggcgcgag

SEQ ID NO: 25898 - DNA, 367 bp, Oryza sativa
  Clone ID: uC-osflM202084c03a1
ggatcacaacacaccacattgcaacatgcctaaaaacgatggaaatggagagaatccttacactacttgcaaataaagctgggctgatatgtgccatttcttacaagaaaaccagcttccaagaaaacagaaaaatacagaacttgaataatcttccggatggcaaaataccattgttccaggacttattaacaggatttaaagcattatgcaattacagaactacagtatccaaaaaaatatagatatttgagaaaacctgcaatcacggattcaccagttgtgcagcatgcagcttcatgttcttcagatccatgcaggactatactgaattaggaccactcgttcacacgaagcttagtgacat

SEQ ID NO: 25899 - DNA, 142 bp, Oryza sativa
  Clone ID: uC-osflM202084c04a1
ttttttttttttgttttttttttttttttttttttttttttttttttttttttttttttttttttttttttattttttttttttttattattttttaaatttactatataaattaaataaaaaaaatttatttctaattaac

SEQ ID NO: 25900 - DNA, 246 bp, Oryza sativa
  Clone ID: uC-osflM202084c05a1
gggctcctccttggcggcgccggcgccggcgttgtcgtaggcctgcgccaccggtgtcgccgtcgccggcgtgctgctctccttagcggccgtggccgccgcgggcgcgccggcggcgttgtcgtaggccttcgcctccagcgtcggcgtgctggtctgcggcttggcggcgtcttcgcattcctttttccaacgccgcccgccgccttctgtcgtcggcggcctccgtcgccggcttggctggcg

SEQ ID NO: 25901 - DNA, 117 bp, Oryza sativa
  Clone ID: uC-osflM202084c06a1
tttttttttttttttttttttttttttttgtatttatttttttttctttttatttttttttttttaatttttttttttttttttatttgggccccccaaaaattataagacacattt

SEQ ID NO: 25902 - DNA, 388 bp, Oryza sativa
  Clone ID: uC-osflM202084c08a1
aacgaccaatggtttctggtaacctttatcatcagtgcagttcatacaatagtaatttgccatgaagaacacgagtataaggcacatcataacatgtctaccaggtttacaaccgaacattataaggcaccagaaagctttattgatgagacgtgccgagggtcctacaaatagattcctcctatggagaattaatactagtatatatacaaatctattttaagaaatatttcgaccaaaatgcgtctccctgacgacaatgtgcaaatactccatcctcctacctggaacttgtacattgcacgagctaataacaccagtgaaatctagagacgctggctatttccatacggtctcgttcgcatcagtgaaaatggcattgtgatgc

SEQ ID NO: 25903 - DNA, 381 bp, Oryza sativa
  Clone ID: uC-osflM202084c09a1
aagcaaaagatcacaaaaaatgtcaagaacaagagaagaatgtcatcgggttcagtacatatatgcatcgatcgatgaattaggccgggaggtaggacggcggcagcggcaggccgacgaccttgccgcagcggagggcgttctccggcatgttgtactcgtcccggagcgacctcgccggcgagacgacgctgatgtagagctgctcgccgaggtagtgcctctcccagatgttggacctcacgttccacatcccggcgttgtcgaacgtcagcatgatcgccgtccacgacctcgggtacacctggaccgagtgccggctcaccccgtccagcaggttggacgtttttcttttcttcggcgaccactttcccgggccca

SEQ ID NO: 25904 - DNA, 119 bp, Oryza sativa
  Clone ID: uC-osflM202084c10a1
ctacgcattatgaaattgaattaattaagccaacacaaacacgtacgtacacgtgcagcaaaagtttcatgcagatgctctaccgttcttttgtagcatttaaaaattttgaagccatg

SEQ ID NO: 25905 - DNA, 262 bp, Oryza sativa
  Clone ID: uC-osflM202084c11a1
gggcgttcaaaaaaaaaaaaaatctcacccaaaataaaaaaacccgaaaacaaaaaaagcccttaacttggaaaaccacccattccaaattccaaaaagccggcccaaaaaaaaatatgccccccccaaaaaagcaaaaattgggcaagccagctcgggaaaaaactcaaaaaaaaggggccacacaaaaaaaaaaccccccccgtggttaaccggacccaaacaagaggggggggggccaaaggggcggaaaaaaaaccag

SEQ ID NO: 25906 - DNA, 383 bp, Oryza sativa
  Clone ID: uC-osflM202084c12a1
cccaggaagtttgaaaaagtactcgattttccacaactgaatgtgatataatagcatcagatgcagtggagcaagtacaaaactaacggaagcaattcaaaagaacaatcagttattctttgtttgcatcatttgaaccctcctccataggcactgcttctgctgcatctcctttcttacctttcttcttttttccaccacttttcttctttgtttttgtccccaaagcaagccatgccttgatctcagcgttgtcttcaatggatttagtgggctgcaactcctgaagtgaatgcgatgttaccctctgtgaaccagatggcagcagaagcacagtaaacttgatgtgtgcaacaaggtcgcctggcttcttgtgaaggaca

SEQ ID NO: 25907 - DNA, 381 bp, Oryza sativa
  Clone ID: uC-osflM202084d01a1
aaactctctttctcattttttatgtgggcatatgttatcttcaaatatgtattaaagtgattatatataattgtggatgttcttaattattatttttccagacaatatgataattttgcattgtcttaaatctatttttatatgacttgcactgaatttccgctcaattggactgattctaagaaaattaattttactttcatgaaatttaatgatttattaaccaaatattatgccaccgttgcgtagcacgggcatgttactagttaataaaaaattaacaaccaaatgtatcaattatcattaattaattactaatgattaagattattagtaatgaaggatattcttaatttcttatccggccaatttgaccaattt

SEQ ID NO: 25908 - DNA, 286 bp, Oryza sativa
  Clone ID: uC-osflM202084d02a1
ccaaacccttttttttcccctggttttctatttaatttcattccgatagataccaccaagcatttaaaaccccataaccaaagggaactcaattcatgggaacatcacgggcaaaaaacccctaacactggagggatggaaagagggctttccgactcgagagagccactggacacaataaccactccgacttgataaaaaaaagattttgccccggttagctaaggataactggccacaaggggccccaccaaacagtccctccagatccccccggaatcccccc

SEQ ID NO: 25909 - DNA, 385 bp, Oryza sativa
  Clone ID: uC-osflM202084d03a1
cactaagattcattcattcattcatttgatcaaagcaaacgagacgagctttcttcttgcgatcaaaaacacagatgggcaaccacacagttaacacaaactagatagttccacacaaaactaacgatgataacgatcggatgatgatgatggtagctcgattagatagatagataacttggccatgagggccccaccgctcagttcctccagttcccgtcggagttgccgccgccgcggctgccgtagccgccgccgtagccgccgccgtagccgccgtcaccacggccgccaccgtagccaccgccaccgtcgtagccgccttcacggcgctggccgtagccaccgccggcggcaccaccaccgtagccgccggcaccgtagc

SEQ ID NO: 25910 - DNA, 392 bp, Oryza sativa
  Clone ID: uC-osflM202084d04a1
cagtcacaaaacacagtgcacatgttatcagaagttcacttatcagtacgagaattcgaacagagactggtccgagatattcttgccaagctaaaatagacgggcgccatctcaggccttggaaaacataaacatgttatgtagcatgcatatatacacacatcgccggataaatacgctagttaaaagctacggtcttcttctctcggcgtatgcgtccacctcgtcattaggaacgtgacaacaacacgtttaggccgacttcgcgaagccaaccctcatcttgccgtagtcgaacacggtatggtaggcacccatgaaaacgtcacccaggatccagagaggaccacggggaggagggatgtccatggctgtgaatccactgatgcact

SEQ ID NO: 25911 - DNA, 231 bp, Oryza sativa
  Clone ID: uC-osflM202084d05a1
aaactcgtataaatatatgataatattacgccaaaagatcactgattcttaacaaactctttgcagctacagacactggaattcataccgtactattactgattgacaaagccagaaatttgcccaggatacacagaagaaccgtatatcatcattcacccaaggcaggctgctcaagctgcccaatcttattacccaacaccataatcccctgaaaaacctcagttctcc

SEQ ID NO: 25912 - DNA, 417 bp, Oryza sativa
  Clone ID: uC-osflM202084d06a1
tcgtttcgcgccggcgtggcgtccgtcgtgacgtcggaccagttcgagcgcatgctgccccaccgcgacgacgcggcgtgccccgcccgcgggttctacgcctaccgcgccttcgtcgccgcggccggcgcgttcccggccttcgccgccacgggcgacgccgacacccgcaagcgtgaggtcgccgcgttcctggcccagacttcccacgcgacctctggtgggccctactcgtggggctactgctacaaggaggtgaagggcgcgacgtcagacttctgcgtgccgaacgcgcgctggccgtgcgcgcccggcaaggcgtaccacgcccggggacccatgcaaatcgcatacaactacaactatggggcggccggcgaggcgatcggcccggaccttgtgggcaaacccggagct

SEQ ID NO: 25913 - DNA, 362 bp, Oryza sativa
  Clone ID: uC-osflM202084d07a1
aaatgaaatactcgccattgcttgcagtacgtacagagccgaaattgctacactacccttaagtttgcatgccgccgctagctgcttatcgaacaatctcacatggccacgcatgagctgatacatagcattgggggagtttctcaaccgggatttgatcagggggacagggacatatttatagaacagttcagcgactaaattaaacgggggcgccgttgcttttcccgccattggggacgacctggtgtttgtcggtgtcattcatgaagggctttcagaaccagggttggtttcacacccttttggtcatcttctcgatggggatgtttctggtcctcgggccggaagaaaagcaccaa

SEQ ID NO: 25914 - DNA, 368 bp, Oryza sativa
  Clone ID: uC-osflM202084d08a1
aactgtgtatatatttttctcttaagataatataaatggtttacatctccagccaataccgacggtcgatcacagccaaggcaatgtagtgtatatatatgtcactaatcatgcgtatgtatattacaaatgtacttatctatatacagggattgaaatcctatatcttcaaagtcatcatggcttagacccatggtttatcggtcccacatatcagtgacgaaagtacgtacctttgaaggtagaagagcctgttccatatacagcagaagtaaaacataagaggtggcacaaaagcatcatatcgctaatcaatcagagcgatgcgctggaagaggtgcgatgatcggcggcggcggcggcgcttt

SEQ ID NO: 25915 - DNA, 348 bp, Oryza sativa
  Clone ID: uC-osflM202084d09a1
aaatgagtgcaaatgcaccacagttttttgagcttttgattgcatcaaccaaagagattttggcaggaaaaaaaggcattgccagaagttaaggcaagcagggggtgatctcatacaacctatacatccatctgccacagctatagatgagatcacttctgcgaaaacggaagcaaagaaaggtttgagctttattctgactaaaggaacctagtgttgggtgaaactgactgtacatttgaatgtacattgaaccactgaaaatgtgatggtgagcctaagagagatcagtaactcttgagagatggctgccatggtcatggtcatcactggacctgtggcttgaca

SEQ ID NO: 25916 - DNA, 353 bp, Oryza sativa
  Clone ID: uC-osflM202084d10a1
gcaccattggatacatctctttattaagctaatgttaccaaatgagccatggagtgaatgttctaggtattatggggacttgttaccatcgaaattacatatagaccacagcaagcatacagttttagttacagggaatacacaggatgaatcaacacctgagggtatgcaaatccttcaagatctttatatccatatatcagaggggcaatctccaccaggatatctcatttcatgggccaaggagggaccctttggctcagcaccaaaatttacaaagaagttagggttgatcgatagtcctcctttctcagtgtcgacgttgatctgcaacatgtgggagccctttttga

SEQ ID NO: 25917 - DNA, 332 bp, Oryza sativa
  Clone ID: uC-osflM202084d11a1
ataggcgccccccgcagatcaacaagtacttagtaatagtggagtaggtaattacagagcaacaagaggaggagggtacaatcacacacaaagactcttgatgaatgaacaaagaatcacatcagcgtctccaaattacttaggtacgtacaaaacagatcgatcggcaatgtaaactccgttattgcatgctgcaatcgtagattaatttacttctacacgggcggcggcggctccattttgagcttcggagaggcttaaatttgaaggaacgtttgatgcactgcttaggagaaacatatttttgatgatgatcatggggtcttgggggc

SEQ ID NO: 25918 - DNA, 284 bp, Oryza sativa
  Clone ID: uC-osflM202084d12a1
ggaaagcaagcagtctagtaggggaccaatccggccttttgcacgcatacagtaacttaaacgctactacgctttttttacatggggaacattttcatttttggggacataaaagggcatttgacatataattagggggcacatgtgtgcatgctgttgctgaatgcagggctagattattcgttcgcagcagggagcgaaattgggggaacaattttttcagggtgggtccggtttaccaggaagagcttcttgaacatttgggggggcagttattacatggg

SEQ ID NO: 25919 - DNA, 397 bp, Oryza sativa
  Clone ID: uC-osflM202084e01a1
aagcagaagaaacactgaatgacaggtggattcagttatgttcactatggtcgtttttctacacatgtaaataaatatcagtttgtcaccaaactgtcaacaaaaaatgagagaaagaagaaaacaaaaattgcgtatggccaacaagaacacgggccaaaattccaatggacatttcttctaacaaagatgcagctataagtgacaggtatcttgccacacaattatcccctgaactacagcaagcgtgtccgaaaagaacttgctcaatcagtagcaactttcctcctggcagcccttgcgttatcatattcaaacttgagcacatctggaatgtgtgaagtatccttcatatacaaccacctcgctattgcactctcctcaatcattggaaaat

SEQ ID NO: 25920 - DNA, 298 bp, Oryza sativa
  Clone ID: uC-osflM202084e02a1
gaaataattcacacgattgataaatttatttttgaaatttgataacaatgttacaaatgtggcgtgcatgcgatcaatgggtgggaagcaagtatcacaattaattaattgaaatacaaaagtatgcacgatttaatcgacggtggtgggtatccaaaaaaaatttagcgtaaggcctatatttaagaaagaaatgaggaattgtatgtatgaagttgaatgaaaaaatgatttataatgtaaaattgagagttgggaatttttgaaatcgaaaattgagaaaaacaatgtttccaaa

SEQ ID NO: 25921 - DNA, 60 bp, Oryza sativa
  Clone ID: uC-osflM202084e03a1
tttttttttgtggtttttttttttttttgttttttttttatttttttttttttttttttt

SEQ ID NO: 25922 - DNA, 374 bp, Oryza sativa
  Clone ID: uC-osflM202084e04a1
accaatctaatcaggttgacagatataaatacaagagctacaggccttacttagactcaaaaactacattctacaagtggaatatagccgtaagaaatgccgagaagagcagcacttaggtgtattacaagtttccaccatatgaatgttgcaagaatttcccgacaacagtatcgcgcctagagctaaacaaatggaggctacaagtttgtatctggcagcaacacagcatcaatcagtctggacataatacagcagcgaccgatgcgcgcccttcgtgtagtgtacaacaatagaatgaaaaactccctttggatggcccccaagtatcaaacaagcaatttgttacatttgaagctttttttaccacaacc

SEQ ID NO: 25923 - DNA, 133 bp, Oryza sativa
  Clone ID: uC-osflM202084e05a1
aaaaaagcaaaaggaaataacttttccatcccaaaaaaaaaaaggtttttgggtaaaaacgggttccccccaacttaaaacaaaatttgggagacttttttaaggggacaacccacggggttttctaactctt

SEQ ID NO: 25924 - DNA, 300 bp, Oryza sativa
  Clone ID: uC-osflM202084e06a1
aaaaccctactaatatttatttttaaaataccataccctcacactcattttacttttaaccgaacaatataatagcccatcagatgcaatgtttaacccctaactccgggtttggcttcacattgggaaaaaagggtttgacctttaactttggctatggcttggcttgggggttagtccgaacccaaatgggaacagggggttgtaaagcttggcgccgaaatttattggtaggtggccccccggtttgaaccaagtccggggaattttgccggtgaagccgtgatcccccaacagcac

SEQ ID NO: 25925 - DNA, 397 bp, Oryza sativa
  Clone ID: uC-osflM202084e07a1
aatattcagagatacacggctgaacaaaatattcacagttttaaaattggacaaagagtccaacttacaagtattcagttgacagaagaacacgaaaccttcgaggagaaaagcaagcaagccactctggtacttagaagcagaacctctttttctgcatataatggatgaacacatatgaattggctagctcagtgttatgagatattctttacattttttttcctaatactatatgatgttgttgacttttagatatatggttgaccattcatcttattaagaaaactatgcaagtattatttattttgttatgatttattttttttattaaagatactttaagcataacttatattttttatatttacacttttttttaataaaacgaatggtt

SEQ ID NO: 25926 - DNA, 372 bp, Oryza sativa
  Clone ID: uC-osflM202084e08a1
aacagaagacttaagcataatgagaaacgttgaacagattaactttcatgccacctaaattagagattggcgcattacactgctacttgtaaagataatgacaaagatacatgcagatagccaccatacaggtcagcacccaggtcacagatgaggcatgtaaactactgcaaagggacaggacatgcctaaaacctacacctaaaaggattctgcagtttgtaatctagagtacatacagacaattactcagaccaaacagttgcagagcaacctacaaagccaacaaattttagaatttcattggcttttaccttatgggaacaaacttgtttggtccatgcttcgcccaaaagggttttaggtcaattg

SEQ ID NO: 25927 - DNA, 393 bp, Oryza sativa
  Clone ID: uC-osflM202084e09a1
ggtcaagaatacttaccattttccaattctatacaagaaatttcatatttgatcaatgtacacgtaatatgtatagttcccctagcccccgactgttttatcgggagattctcccaggaagacagtcagataagacatgtaaaaaattagtaaagaggaaattcccctaaaccctggctgtgtgctcaggaatgtacataactacgggatatactgactagaatgaacaagtcgatatgaggaaaaataataataatctagaatgcagactagcgtcccatgctactggagcatcgactcgatgcgtccgtccttgtcgtacgcctccacaatctttttggcataggaaggaatgtgctgctccgctctttgcttgccccatgcccgattcac

SEQ ID NO: 25928 - DNA, 379 bp, Oryza sativa
  Clone ID: uC-osflM202084e10a1
ttttttttttttttttttttttttttttttttttttttttttttttttttttttttttttttttggaaccctgggaaaaataaaatagatttttttattcaattccagagcctacaagtaaaataaacataacattttataatccaaacttggtccccgtaaaagttacccgtaatttagcacattaaggaacaaacaaaatttgaacagggtcatccctgggacgggatgacgggcagggttattagccctgggattttcttaattgaatggggggaggaaactctttttttcaaaagggctttatttccatttgaacaagggtcaagtagtcccttttttttaagaaatgggggtttaaaaaggtaataattgctct

SEQ ID NO: 25929 - DNA, 312 bp, Oryza sativa
  Clone ID: uC-osflM202084e11a1
aaaaaataaaaaaaaaaaaaaaaaaaaaaaaaaaaaaaaaaaaaaaaaaaaaaaaaaaaaaaaaaaaaaaaaacagaaaaaaaaaaaaaaaaaaagaagaaaaaaaaaaaaaaaaaaaaaaaaataaaaacaaaaaaaaacaaaacataaaaaaataaaaaaaaaaaaaaaaaaaaaaaaaaaacaaattaaaccaaaaaaaaaaaaaaaaaaaaaaaatccaggaaaaaacataaaccaaaataaataaacaaaaaaaaaaaacacaaaaaaaaaaaaaaaaaaaaaaacaaaaaaaaaccaaaaagaaaa

SEQ ID NO: 25930 - DNA, 334 bp, Oryza sativa
  Clone ID: uC-osflM202084e12a1
ggaccgcaaatttgcaatgggaacaataacattgccaaaaaaaccggtttaaagccaaaattttacaaaaaacttggcttttctcaaaagggccccccctggtgtttcgggaacttttccctgttaacaaaatacaaagagggggagaaacatttttgtaaaaacacaaggggaaacccccatttccaaaaaacttgcaaatgggggggggtaaaacacaggtttgaacaacaacaacaacacattggtgggatgccgtatgttacacggggaaactttgttggattggggcaatgtcgagccccttgggctttaccaccgacttttagggccc

SEQ ID NO: 25931 - DNA, 401 bp, Oryza sativa
  Clone ID: uC-osflM202084f01a1
aaaaagctatatacattatagactcgtatacaattacactgccacggtaatatctgaacaagaaaacatagccaggtagaccctggctccctggatctcaatgctgtcgtcgaaggattggccggttgaattgttgtacagggtgaaaaagacccacagatccgtgccaagctgcgtaaccgcaacggtgactgcgacctttttacgtggactcgtccctgcagtgtggaatatcacacgatcttttcccccgtaaagcagctcaatgtccctacatgttggctaaggccaacaagctgatgtgcacgagatccaaaagtctagcaatctaacctaagtggccagaatctgaagattcacaaagcaacacacgatgtcgaagcttttttctatcggagaac

SEQ ID NO: 25932 - DNA, 387 bp, Oryza sativa
  Clone ID: uC-osflM202084f02a1
attagcccctcggcctaaaaaagcatgagcaataaatagccttcaaccagatgctacaagattgctacctcaatgcacaaaatgattcatccccacccgccgggaactaagactccattggttggttgcaggcaaaattactaagccaaacaagaatgaactgtccactaaaaaaatgtgcggagtttatacaccaagaagaaccttatgatttacagagacatctagcagatgctacgatatttatggaagagaggaatgcatataattacaataactttggcggaggaggtccggagaaatcggcctgactgtacgagagtctttggatccaattggacagtctcttcttggtctgaacaggaggttcctggcagttggtgcttg

SEQ ID NO: 25933 - DNA, 394 bp, Oryza sativa
  Clone ID: uC-osflM202084f03a1
gaaaaaaaaaagcccaagccttgataggagttatacacatgaaaaacaacccaaacttggttgagttagcccctctcgagagtaaaacacggccactaatctcaaaaagctaagattaacgtcatcattttcaccatataccccacgcgcaatttactaattaatcggaaactgatgaaatcatcatcgggtgtagttggaaacccccacacccacctgagccgccgccgccgccgccgggcgagtgggctcatgggaggttgaggaacacggcggtcgggtccgggtcggcgaacccggcgccggccggccagtaggacgccatgtcgaacgccggcggcggccactcgaagtgcaggtccgggtcggccagactcttggtgatggacgggta

SEQ ID NO: 25934 - DNA, 107 bp, Oryza sativa
  Clone ID: uC-osflM202084f04a1
gtcacctagagggatgaatagggatttccaaaaatttcttaaacttacaaacagcttagaactaactggatagtccggttccactgtagacaacctgactatagagc

SEQ ID NO: 25935 - DNA, 299 bp, Oryza sativa
  Clone ID: uC-osflM202084f05a1
aaaagcaaaagaaaagccatccctgggcttcagagaagcccctaaacagatccccttttaacaggtaaggggattcccaaaggggaaaaaaaggggaaaatgggtgaacattttaaggggttttatcaaacataattgggggaatccgggaaaaaaaggggtttttagattccacaagtatccggggggaatctcctttaggggggttttcattttggggaggggccaaacgaaggagggactgaacccgaaagaaatttttacgggtaaccccccgacggggcttttgaaaaaccaac

SEQ ID NO: 25936 - DNA, 388 bp, Oryza sativa
  Clone ID: uC-osflM202084f06a1
aaataaacagaggcataaactacactcttaagattttgtgcttagatagtcatcctcggtacaaagtaccagcaataccccctcgtaaatagaactgacaaaacagtagataatcaagcaataagaagtctaacacaacagcaatactacatgaaaatgctctccccttagccatgcccctcctcatccaaaatccatgtaatcaacttcacctcccacagaattctgttgatctccacctttccaagagggaggagacatatgcattatatgggtctgcttcttgtgtgagggtgcggtcaacaaaccccttgtcgctttaggctaccctttatacctggagctgtacgaagataccctgatatgttactgctcatggaggcatagc

SEQ ID NO: 25937 - DNA, 396 bp, Oryza sativa
  Clone ID: uC-osflM202084f07a1
acacggtggtcaataaataagagtgcatgtacaagtcaaaaatatagtagtagtatacataaggtccacaacatcagctaattaagttactccttttttggcttattatttcatatgcactggtgttaaaattcctgcggcggaacaagacttttgctttttcggctggaaagattgagctttccatggagcatcagcagcacaacacaattgaacagctagctattctttttaagtcgatcttgaaacatacattactatgatgctgggattaaagagctggagaagagcttctgtgtctctccatttttttttacatcattgagggaatgatcttggccgaaatgaccggcttttactttaccacaggggaagaaaaccttttttagtcaggtg

SEQ ID NO: 25938 - DNA, 344 bp, Oryza sativa
  Clone ID: uC-osflM202084f08a1
cttcgggggaacaaaagggatatatatttagggatattgctcccacagggcatgaatcatgaatttgaccttggcgaacagtttgctaatgggcccatcagcacatacatatgtaactttttagaaaacccaagaaggtttttttgggaggcatacaaaaaaaaattgagggggattaatcgcaatgggcatgccctttacccgttagaaaagggttaacatacatgcatgccaaattttttagctttatggaccacttttaattgatgaccacctcattgtcggcgttaaatctctccatggggcttagaatccttggaactgagggggcggaagtaaagccc

SEQ ID NO: 25939 - DNA, 369 bp, Oryza sativa
  Clone ID: uC-osflM202084f09a1
cctcgacaagtcttgcaatcttggtaagaaactaaaatagaacacggactttggatttgttcatatgtaaacaatacaaatttttcgcaagaggacaaacacgggatggtattcaaccatgtaggaaccgttaaaccagaaaccagatttaattttacacaacttcccacgaattaatgcagcgccgccacacggtcaaggcagagaacacgtacagtatacgttgtcagttcacgaggacctccggcagcatggcgtccttggccgccggtggcggctgcacgaagcgccgccagtaccagtgccgcgcccagacggcgcccaaggcctcgagcggcacccccttggtcttcggcaggaacgcccaca

SEQ ID NO: 25940 - DNA, 387 bp, Oryza sativa
  Clone ID: uC-osflM202084f10a1
catccaaaggctgtcaatctataactagagtaccatcgtgaatttgtgtatttgttcatccaaaaactgtcgctgccttcccttacccgactaaattggctatgcaatgtttatcaacagatcataacctagctgttaagttccaccatcgaggggtgtcaagaactaaaaatttcacatcaaaaggaagtacagaaatggctagaatcatgaaactctcgtcagatttggtcttctggagattctgcacaaccattcccaacacatttggcaacgaagtctattggagaacggacatgaacatcagcatcaccagaagtagcatggccttctcgagaatccttaggtacattagcagcaacattgtcagcaggatcgacaggagtg

SEQ ID NO: 25941 - DNA, 69 bp, Oryza sativa
  Clone ID: uC-osflM202084f11a1
gggtggcggaggaggaggaggaggaggaggagccggggtgggggcggctagggttagggatccgttggt

SEQ ID NO: 25942 - DNA, 330 bp, Oryza sativa
  Clone ID: uC-osflM202084f12a1
gagtgaagtcccacaaagactttattcacatagcgaaaaacatatgacaggaaaatgtagcaataacactttcagtacctcatcatgacctgatctatcatctcatttcacaccggagagaacaaaagccttgctatacaactgatttagtgatttttaaccagacatgtgtattcacagtttgctgtgccgaagttttttccttttgggtgtacgtatgatgcaatagaaccaattttgcttttttgtaactacctagattttggagtgctttggcttgctgggtgaactccttgcggaggactttccttatgaccttgtttgaggctg

SEQ ID NO: 25943 - DNA, 350 bp, Oryza sativa
  Clone ID: uC-osflM202084g01a1
ccaacaagcctactgccttttcccaaattaatatgtaaccttttgggaaaacatcctcacttttttgggaagaaaaaaaaacctacaagtttaaaaaaaaaaaaaaggccccaaaaaagaaggcaaatccttatttgctcatgcaaacaacatatttgcaatggcaaacccagggaaataagggaccagtttatatggatggcctgaacaattcgcagaaaaatcactctttggggttagaaaaaaaaccccgggggggcggggggccattgcccctttgcagccacggggttgttttccctgccatgctcacgtttttgggaatagtaagccttgtttttttgacgggg

SEQ ID NO: 25944 - DNA, 398 bp, Oryza sativa
  Clone ID: uC-osflM202084g02a1
gatcccaaatgttctcattgattgatagcgatatcatagaagcagcgacacgaattaagatttaaaaccaaccccaagaaggatcgcagatccaactccaccgaatcgatccaagaactccgcctaatccaaccaaaccatgggcgatctcatctcaccaacacgacacgaactcataaaaagactaacaccaccaccacctcctccttatttagggactcgacgactcaagacgactgatactggcgaaaggcgaaggggaacagcacagatctaggagagctggccgcagtcggcgatgacgaccggcttggcggtgctcccgccgcgggatcccaccttctcgatggccttgacgacgtccatgccctcgacgacgcggccgaacacgacgtgct

SEQ ID NO: 25945 - DNA, 344 bp, Oryza sativa
  Clone ID: uC-osflM202084g04a1
gaattgaaagcgtcaaataatttaatatcaaaattttctgatcgagaattgaagactcgatcatgggcccaggtaggagagcagacaccatagaccgatagactttctgctcactccacaaacctagctctattttttaaatttaaaatacatttttttccgtcccctgtgtgcataggtagctagacaacggaagaattccatgcaggcttagtcgacttggatctctgatttgtagagagcgttggccttccaattatcggggatgacgtcgttggcgacaagcttttggtcagactcggtggtgacacggagggagaaggggcccttgagtggcttgggag

SEQ ID NO: 25946 - DNA, 277 bp, Oryza sativa
  Clone ID: uC-osflM202084g05a1
aaccgaatagaaataaacgagttttaaacgactaacatagtgcacattgcgagcagatattaacggtccatgcaacgagtgccatggccgtgggcaaaacttaacgaacgctaagatatctcaaatgcagccagcataaccaccacttcaacgatgctcatttcttcttggcggcagccttggtcaccttggcaccggttgggtccttcttctccacgttcttgatgacgccaacagccaccgtttgcctcatgtcacgcacggcaaaacgaccaag

SEQ ID NO: 25947 - DNA, 326 bp, Oryza sativa
  Clone ID: uC-osflM202084g06a1
aggatctgcttacccttgtggcctgacatcgcgtttcccattgttggatcgtgaaatttcttatgcacgtgacaaatttatacaggtgcattgcccatgtacacaggaaaacacgacaaaagacctaaaattccagtgcgtcgttgaacccggcgtcgtaggcggcgtcagcctccatgtcgccgaccatttccccgagcatcatcccgccgaccgcgccgccgaggagcccgagtccgaggcccatgcccattcgtccacctttcctcgccgccggctgttgtgccgccgcgtagctgtacctcgccggcggcggtgggccggcg

SEQ ID NO: 25948 - DNA, 269 bp, Oryza sativa
  Clone ID: uC-osflM202084g07a1
ggaacaagctgcgattaaaatggacaggttcagtagttatcctaacaggttcaaaagtgcgggatccagcctaataacatccaccccccagctggttcttaaacaaacccgacataaacaagacttccaaaacatccacaagttcaggccataacatagcagccaagcgggtggtcagcaaaagaacatggagctcctgactttgttatgcaggcgagggaatttgggccccggagcgcttccccccgaggtttggccaccatgggttg

SEQ ID NO: 25949 - DNA, 314 bp, Oryza sativa
  Clone ID: uC-osflM202084g08a1
ggaaaacgaaggcatgactgggctataaattagttcctattacccccacaagcatgacggggccacgtttgggaataaatcccaaagaacccttggattacagggacattaccatactttggaagggccatttagggcccttttttttccatttgcaaaaagccaacacccctatgggttcaagaaaaacaagggcaattgggtttaaacaagggggaccaccgcagcaattcccagggaccccccctggaaaaaaacccccagttcgtcaaacaaaatgggagggggcccaccccccccttttggggctttgg

SEQ ID NO: 25950 - DNA, 389 bp, Oryza sativa
  Clone ID: uC-osflM202084g09a1
aaaagcatggcaaaagaattttgcctaatatatttatggagtggaagattgataataaatcaaaagattacatcagcaaagaatacattaggagaatttgcatacatgtttcattctgcgctaacaactgggacaacgactttgctactatcattctgttcgattagctatatatattctaatgtacagaagtaacaggccgaggccgtccagtaacgttcacttttttgtgctttaaagaatgggaaacagtataatctccacagaaaaaaaaaagctaataaacccccagccacaagccgcagtagccagccatactgcaagttcttctcctgcatgatacggcctccactccacagtcatcatcggtcctgcatctgtgggtaggt

SEQ ID NO: 25951 - DNA, 382 bp, Oryza sativa
  Clone ID: uC-osflM202084g10a1
aaatcaattggacgacacaattgcgtcatgcaacatttcaatatcgccaaagagcttcgacacaacatccctggagcaccctccattgtcactgtttttttaacatctatcatgcttttcacagtttactcaatctgctcgcctatgagatcaaggcctactaacaagaaagatatgccctggaacaggaggaagtagaaatgtataccctgtttcgagagcaaactgcgagctgcagcggttaggaggagcaatgagagtgcaagctctttcttgtatatccggttgtgcttcttctttacgtcctttctaggagcggactgctcctttgcaatagcgtcgaggttaggcgcccgttagttttttggtggttcaactcttt

SEQ ID NO: 25952 - DNA, 325 bp, Oryza sativa
  Clone ID: uC-osflM202084g11a1
atcaaccaacataatattagcttgcaaaaagaatttaaaatcgccatatatatggctttacgaacctcccccaaacttcaacaaatgcacaaacgtttgtcctacttgatatacatatatttatcgaattatcgcgtaatttaccatgtagaagtccaaggaccatgcataaacataaaatcaaaaacatgcgtggataatatatctaagaaaacaataagcaaccaagccaattcggagaaaggaaaggattaattaggagaaggttggaaaataggagggaatatgcttggcttcgtgcacgccattcattataggcaacctc

SEQ ID NO: 25953 - DNA, 349 bp, Oryza sativa
  Clone ID: uC-osflM202084g12a1
agcaatctagaatcggatatgtcattttatagtataacgtctgaacacccttctattcagattcattgaaatatctcatctaattctagattgccatattatgagtctgagggagtactgaacaatgcacttcagcggcagccaatacggatcagacaaatttatgtacaacgaaaggagagtctcggtagaacgaccaggcataatatgtacacacatgtcatgttgccatgcatattcacacgcatatgggacgcggtttttttgcacctagcccatctgccgttcgatcgtttccgtgatgcgtgctgtatttctccctcgtgacgttgtttttccccacctgagt

SEQ ID NO: 25954 - DNA, 281 bp, Oryza sativa
  Clone ID: uC-osflM202084h01a1
aaatataaccagagggctttgccgtgtttcaagtacgattagtttcaacacaaaggcatggcagatggaaccaatattgaacacaaactcggaggggggggttaccgagggcacaaccgacaaccctactttttttaatcgtcattatcagcgacgggggcagcagacccaaaaggatcagccgcagttccagaaccagtttttgtccgttcgaaacggaactcactgccaaacccgggagactgctgcaacgtttgggcgaacgcctggtacttgcggat

SEQ ID NO: 25955 - DNA, 396 bp, Oryza sativa
  Clone ID: uC-osflM202084h02a1
gaacaaggtaacattttattaaactgaacatggcttcagtgaagaagctcttattcttgctgtccaacaaaagccactgcaaaaacgcagttacatgactaagtgaggtagttgatgaactcgacagctgttgcaacagcgcctccggtgatggcgtccttgatgatcttgtctttgtggttgttgctggcagcagagatcagagcaccacttaaagcaccttcaatcatagcattcttctgcaaaaatcccaggaggaaacggaaaataatgaatcaagatcaaataatagcaccaagcataaattatacagtacagagtaataaacactggagttcataaatctaaatattgcctaaaacaaactattcatggaaaatcagtttaaggcttact

SEQ ID NO: 25956 - DNA, 368 bp, Oryza sativa
  Clone ID: uC-osflM202084h03a1
ataatcccccgaaatttccactcatcataagcacaaggagtccacaaccgccacaaccattacaagcactactgccatgacaatctgcccgaggctcgccgccgcggcggcccgccggtgcgcgctcgacggcttgggtatcgtgtccgggagcgcgcactcctcgccgtcgaagtagagccttttggggaagccttcccccttggcaatgttgacgttcggcgcgtccttccgcgagaaggagatgacggactgctgcttcccgggcacccttgggtcctccggcgtcctcccctcggtgatcggttcgaggtaggtgagcccgggcaacccctgcatgaagatgctgttgttgaacggggccccca

SEQ ID NO: 25957 - DNA, 308 bp, Oryza sativa
  Clone ID: uC-osflM202084h04a1
agacgtaagttcagcaatgtattttttttcctcaccttttctaggcgactggattgttctaacttatgcaatatactcggcaaagaatgttattaggttacaagagggaaataaatgcatgtagagcatgaattatgcaattcccgcatgagtttggtacccacattgcagagtagcacaagaataatttatctactactcttattgtgtagcacatactcgagccatgcctatccttttaaacctattgtagggtactgaactattttcatcttgctgtgggcccacaaaacacctgttccactgga

SEQ ID NO: 25958 - DNA, 387 bp, Oryza sativa
  Clone ID: uC-osflM202084h05a1
gtcaaattcaaatactgtatatgtttatccattccttgcttgctgatcattcaaaagaagcttgaaggaaaaggattacccataatttgggagattttactgttaacggaatacgaatcatgtgtgttttacatatctcatccaaaaggagaatagaacaatgagaaacaagatggatgattggaaaacaattcttattagcaaccatcatttggttggttgtttagtcctctggatgtcttggaaacagaaaaccacgcctgtcagaccgaaatcatcctcaaataacggtacagaacataacaaccatcacttctcttctgtcaatcgcagcactagccacatcttgctgagttggcgccacgtatgttgggttgggtgtaccca

SEQ ID NO: 25959 - DNA, 92 bp, Oryza sativa
  Clone ID: uC-osflM202084h06a1
cttcaccttcgtgaaatgcagggcgccttacgcggccggtctatccttggttagaccgcccaccacccaccccgatgtgtgaaggaagttcg

SEQ ID NO: 25960 - DNA, 240 bp, Oryza sativa
  Clone ID: uC-osflM202084h07a1
attccaatgttttttttttttggcccccgtaaaattgaagaaaattccctgcctgttttcggtcccaaagaaatatctgaaggaggtatttttatagatcaaagggttttaaaaaggtcagaaccaagacgggggtcttttttcggacaacgaccttggcctatttgtttggggggctttaaaccactatcccgtgtatatttgggcattcgagggtactcccggcccttgttttttggg

SEQ ID NO: 25961 - DNA, 370 bp, Oryza sativa
  Clone ID: uC-osflM202084h08a1
caaaccaaggggatggatctttattgatcttagctatttactgacatactgtacatgctgaagttgcaaaaaattactacccggccgtggctgggatgatgatggggctcctcacgatgtgttcgtccgagacccacttcaggttgccctcggcgccggcgacgtttggttggccggcccaccgaaccgtcacggggaagctctgcatttccttcagctccgggaaccgaagcattggcggttgtacgatcacggacacgtccttgggcatgtcgacgacggccgtgtacacggaactgggctttccgacgtttggtcaccgtccggtttaccgtgatcggttgcgccagcaggtttaccacaagggatg

SEQ ID NO: 25962 - DNA, 374 bp, Oryza sativa
  Clone ID: uC-osflM202084h09a1
caagatacaggcattcctcgccatgccaccaattgatatatacatacatgcacggtgctatttacaacttccaagcacacaaacatgctagcaacacagaaaacgagatgacaaactcttgggcaacagaacgatcaattagaccaacacatttcccacatgcaccaaacaacatgacaatctaaaacttaaaaagaaaatgaacagcacaacatgcaacaaaaagaatggattgctgttaatttcctgcaggatcctcagaagcagtacgcctccttagcttggagcgagtcacacggatcgtctcctccattggtctctcctctactgtctcacctggaacaggatcacccttttctgtgccctctacggca

SEQ ID NO: 25963 - DNA, 344 bp, Oryza sativa
  Clone ID: uC-osflM202084h10a1
ttattcggccgcggcgacccggcacggtggctggagatcgccgggaagctgctcgcggcgcgggacctggtcggctgcaagcgcctcgcggagcgcgcggtggacgcggagcccctcctcccgggcgccgacgagctcctcgccgtggccgacgtcctcctcgcgtcccagcgcctgctcccctccggccgccccgatcccatcgccgtgctccacctacaacccaaccccgaccccgccgaggtcaagcgctcctaccgccggctcttcaaccttcttttctccaaccctcgccccggcgctgacgccggccttcgctgcgtgcaagaagccttcggttacct

SEQ ID NO: 25964 - DNA, 391 bp, Oryza sativa
  Clone ID: uC-osflM202084h11a1
agaaaccaaatacaatcacatatattacacagggcatcatacaatatttatcacctgtagtccaaaattacaccatttatcaccggtcatgcatcgatgattcggcctgaagctagttggaccaacatatttgcgtgcaagcaataacagtaacattattgatttgcatatattctgcacaaatgcagaaacataatattatcccttgtttcaaatataatgcaaaaatggctgctcaaaaagagcatcacccaagagacttttattggtattttcttcatgagatcagggtctgattgctccatctgacgatgataattaattagcgcctcaggctgtgcaggatatattcagcataaagatccatggagtacttgatggcctcctgagc

SEQ ID NO: 25965 - DNA, 287 bp, Oryza sativa
  Clone ID: uC-osflM202084h12a1
agtacagtacttgcataatttcagtttgaaaaaaataaaaaaggaacaaaatgtaaacacgatgtgaagttgtatataactcctacttttctacatagtacacaatcttaccaaaacataatgataccaaagggatatataactaattaattaacctccttagcacttggttaggttgaaaagaaggcgttgacactcgacgactaaacgagggcaacctgcgaagaacaccgaggttggcaagctgaccatcaagaacacggtgatccccacggcgacgcccggcc

SEQ ID NO: 25966 - DNA, 526 bp, Oryza sativa
  unsure (1)..(526): unsure at all n locations
  Clone ID: uC-osflM202088a01b1
ttttcgtgtagttttaggccatctgagggcctgtgaatggctctcggcctccttcatttttcatagcatttgtgtagtgtgtgcaaatccatcatcgcatcttcatatctgaagaaatgaaggtgaccactcagctcaagcccatggcctcctcgtcgacgtcgccgtcgccgtcgcggctgccgcggagcgcgagcggcaaggcgcccacctcgccgccgtccagctccaacgcctcgcgccgccaccaccagcagccgccgcgggcctcggcgtcgacgcccgccaccccggcgccgtcgcgccaccacctcaggtcgctgtccatcagctgcatgacgatcaggaccgacgacgactcgccgncgncggccgncacccacaaggacaaggcggcgacggccaagccgctgtcctactactcgtcgatgctgtcgccgaggaagctcatgcagcgcgcgttccgcgcgtttccgcgcagcaagtcgtctcgcccgaggaagagcaaggacgacttcttcgtcgc

SEQ ID NO: 25967 - DNA, 262 bp, Oryza sativa
  Clone ID: uC-osflM202088a03a1
ggatagaaaattattttattttcattcaaagcatattattattcagactgataagcgtcgaacaaaggtacgtagccaccttggatacgttcccctacacctgcacctatacacacacggacacggtacacgtgaggagtataaaaagaaaaataacaagcccgatccgatgcaacggttgcgatgacttggccgggggcacttggggtcggcgggggcttgtggaatcgagtggagcccctgggcgacgatcttggcggca

SEQ ID NO: 25968 - DNA, 269 bp, Oryza sativa
  Clone ID: uC-osflM202088a04a1
gcaactggaataaaccatccacatcgcgcaggatcactcaatccaagctgtgaaattcccagcatatgccacgttacaacctctggtccttccacaaaaattgaaaaagaaaaaaaaagcaacatctctagaaggctaaaataaacacttcaagaaaccgaacatttacaattccagcgcctagaatctattcccaggtgggcgagaagcccatgcagggttggaacagagattcgacactcagacaacagttccaaatccatgaccga

SEQ ID NO: 25969 - DNA, 265 bp, Oryza sativa
  Clone ID: uC-osflM202088a05a1
gaacgaaagtacgtatagaattcatccataggagtaggcatgcatatgctgatatgccaggtttacagatagatcacttgacaattaccgtgcatatgccatctatacaatagttaatttgcagcaatgagacgtcgccctggctgaatttactctgtaaattctttgatctcaaattaatcatatgtataatttaggtatgatgtgtgatcagttgttcttgtcgtcgaccgccgacgacgacccgtcggcgccggggggacac

SEQ ID NO: 25970 - DNA, 269 bp, Oryza sativa
  Clone ID: uC-osflM202088a06a1
agccacaggagtctttgaattctccattctgcctttcaataaagacaatacaccatttctacaagaaaaaatcatatagaaacgaaacaacataagcaaagtgccgtgctttctaattgcacccgccaagatggtacactcaaatacaagttgcaaaaaccaaaatccagaatgcacataacagtaagaattcaaaaagagtacgcgctaacagagctaaaccaccatattctgaaggctgactgtactgaagaagccccaagtcatga

SEQ ID NO: 25971 - DNA, 241 bp, Oryza sativa
  Clone ID: uC-osflM202088a07a1
ttttttttttttttattttttttttttttttttttttttttttttttttttttttttttttttttttttaatttatttttttttttttttatttttttttttttttttttattattaaaaaactccttttaaaaaaaaaaaaaaaaaaaaaaaaaaaaattatactcaggagtaaaaaaatatatgggggagaaaaaaaagttggacacaaaaaaaaaaaaaactaaaaagggaactaatt

SEQ ID NO: 25972 - DNA, 262 bp, Oryza sativa
  Clone ID: uC-osflM202088a08a1
ggaatggaaagccatattattattagacagcaatgtgctcactgagaccatgagacattaacacatttttcaaatggtacttggaagttatccaagtgatctgtattcataaactttacggactgaagaaagaatgaatgatcccatgtaaatgggaaagatcagctgcttatgaaaatctacgttgatgcatcagggggtacaatccttaacccccaactatttctctactttctacactaaacacattgctaacgaaggt

SEQ ID NO: 25973 - DNA, 251 bp, Oryza sativa
  Clone ID: uC-osflM202088a09a1
atagattcatctctatttatttatcaaaattaaagaaaagaattatacatagtattaacctgcacgtatcaaccccctaggatatacacacacaccccaagtgtacaaaaaaaataaaattttgaaattcttcatattctgttcttcctcaatgaccgaaaagggcctgaaatcaaatgaattcccttctgttggccagatctgttagtgattcaccttcaccatttcctttgggaaaccaaaataatctt

SEQ ID NO: 25974 - DNA, 267 bp, Oryza sativa
  Clone ID: uC-osflM202088a10a1
tttttgaacgaatgttttttttgaattttttcattggacttggcctatttaatttagaaacccaaaacaaagggaccagtccatgccatgttaattggatttgacctgacaaactgatggaacaaatggaatggaccaattaccaatgttaccacgccagatcaaaagggcacaattcgagggggaaacctggggtctttttaggaggctactgggtcacatgatttgggggccatattttacaaacacgggcggtgcaaataacaa

SEQ ID NO: 25975 - DNA, 263 bp, Oryza sativa
  Clone ID: uC-osflM202088a11a1
ttttggggggaaagtagtttttgaattcttcattctgggtgggattgctttggggaaaatcccggcttctcaattaatgccctggccatgcacccacatgggccttcacagacacatgaaaaatgcctcgaccgaaaccgaaaaatgcataaagcaaactgactaactttggctgcaaagcgaccgatcgaagggagtcataaaacgcaattttattcgaaggataggggccggaacgggggggcagactgttactgtagaag

SEQ ID NO: 25976 - DNA, 164 bp, Oryza sativa
  Clone ID: uC-osflM202088a12a1
cgggcaaaagaaaaaaacccggcaagaaagaaaaatggtttcaaggtttgggcaccaaaatccaaaaaaaacataccaaaaagaattggaaaagtgtaaaaaaaaaaagacccaaaagatttttttaagcccgaaaaaagggggaaaaaaaacacaaaaggggt

SEQ ID NO: 25977 - DNA, 255 bp, Oryza sativa
  Clone ID: uC-osflM202088b02a1
ctcaattatcagaactcctgaatcattactttgtcaagagctacatttctaaccattgtaattaagcagtacaagatcgctgattgcacatatgacacatcaacgcattatgttatcagacacatgagatgtgctatgacaagtttatgccgcctaaccttcaatccttcagttctttccttcaagctggaaagcaggccttccatcaccatccgccacaacaggctgtatgtcttgttggtcgtgaatcttgtc

SEQ ID NO: 25978 - DNA, 114 bp, Oryza sativa
  Clone ID: uC-osflM202088b03a1
gcaggaacactgaatacaagctgtgaattgactaacacaagacaggagacaaccccggctccttggacaaaagttgcaacagaaaaaataacgtgatcgagtccacaaggctaa

SEQ ID NO: 25979 - DNA, 214 bp, Oryza sativa
  Clone ID: uC-osflM202088b04a1
ataggcgtaccagagcgggcaatggcggctcatgaagatctcgacggagccgagcgcccaccggagcacctggtgcagacgatccgacaggttgatgggcgccgaccccttgaatgccgccctcgccggcgtgcagtacaccgacttccacccacggcaatgcatcttgaaccccgttaagatgtcctccgtcaccgacccgtagatccaccca

SEQ ID NO: 25980 - DNA, 256 bp, Oryza sativa
  Clone ID: uC-osflM202088b05a1
catctcttacttcccaaaaaacttctgtaaaaattcaccatttagaaggtgcgaacacttttaacaaaccaatggccaattgggaatatggaacagccggtacccttttattaggccgtttccatcattcggtacaaattgggcaacacaaagaacgatcggccctccaaaacagaattcacaggtcccaacaaaacggtacaaggttcttccaaatttttcaatcactcatggaggaagaaggcaccttcaatcg

SEQ ID NO: 25981 - DNA, 130 bp, Oryza sativa
  Clone ID: uC-osflM202088b06a1
ttttaaatggcaataaagagatttacacgaagattgaattagggcctctaatattcgacggaaaattaattacgtgctttaagcacattaagcttttgtaagacacgaaaggtaaaccatggatacaaca

SEQ ID NO: 25982 - DNA, 259 bp, Oryza sativa
  Clone ID: uC-osflM202088b07a1
aggtattcactggagcaattatatattgaagtcaatctgaggcaagtgttcggatctattatgacataaggattgggtgcctaacggactttttttatcttggatttctccacgtaacaaaaaaacctttttttaatttaaaaagctagtctattttttttaagagtataagtccctatctatatctactttccttgagcataatatagatttttttattcgattccaaattccaagataactcattagaattattaat

SEQ ID NO: 25983 - DNA, 279 bp, Oryza sativa
  Clone ID: uC-osflM202088b08a1
gcacggggaggacgtgaagagggaggtggccatcatgcggcgcatgtcgtcggcgtcgtcgtcgcgcgggggcggcgccgcgtcgtccgccgccgtggtgcggctccgcgaggcatgcgaggacgccgccgacggctccgtccacctcgtcatggagctctgcgagggcggcgagctgttcgaccgcatcgtggcgcgcggacactactccgagcgcgccgtcgccaacattttccgcaccatcgtcgacgtcgtccagctgtgccactcgaacggggt

SEQ ID NO: 25984 - DNA, 263 bp, Oryza sativa
  Clone ID: uC-osflM202088b10a1
catccttacataccagtagttctacttttatttttctttttctagtttttgcgatgagcttgtacaaataattggcctatagtttatatggatctgcctgatccttattattatccactttgcatcatttgctacaaattgtgcaatacatcatgggtctgttccatatagcagtatatatttgtttcaaaaagaacaaagtacaaggctgatcctcttcttttataggaaaaagagtttcttctggtcctcttggtgcaggg

SEQ ID NO: 25985 - DNA, 257 bp, Oryza sativa
  Clone ID: uC-osflM202088b11a1
gataaaatagtgggttacacaagattaaattaaaacctataatattcgacgtataattaattcgtgcattaagcacattaaattttgcgagcactcagagattgggtgacgcgacccacacgtacgtacctggtctgcactgcacagtgcacatcatacacacacgattcatcagtacacaaattaccaacttaacgtaacaacacacggtaacacatgtactcttaccatccaagaaaaaatcaacttctaactac

SEQ ID NO: 25986 - DNA, 118 bp, Oryza sativa
  Clone ID: uC-osflM202088b12a1
tttttggggggaagcaagaaagaaatggcatatcgtgtatctagccaattcaataaattaaactttttaaacatcatattatcataggtgcatttttaaaatcttgaaaggttaacca

SEQ ID NO: 25987 - DNA, 250 bp, Oryza sativa
  Clone ID: uC-osflM202088c02a1
aaccactaaagattttttttactacatgcagttcacatgttcgacagaatcacaatgggcaccagcccaggttcacagaagtacagatcatgttgcttaatcaaaccacctcataagcaggcaaaatctggagaactacatatcacaatctctattgacataacccagacatgctccggaatgcagaagcatcacctcattcgacggctctgatcagtatggaaaaccaaatttttcattggatctcact

SEQ ID NO: 25988 - DNA, 225 bp, Oryza sativa
  Clone ID: uC-osflM202088c05a1
accttgcaaccgaacggttgtcaaggtcaaaacaacaagaaccagacgcggcgaaaaaagctgcggcaggaataacgaacttaactggtcaaaagggcaacccacgaacagtgaaccccgaaggggggcccgaatgcaaaagcccctatgagggcaacaaaaggcgatagaaatggcctggtaaggtagaattccccccggaaaaatttttccgcgaggaaaaag

SEQ ID NO: 25989 - DNA, 256 bp, Oryza sativa
  Clone ID: uC-osflM202088c07a1
atgtgtagattgcaaatcaataggcaaacttagctcctttataaaattcccaacaaacataaggttagggatctaccagaaagcaaaatctgccgacgtagaccctaaacacaaccgtggagtaattactcgtgcaattaacttagcttaatctccctctaggctctagtagtttcagtttcagtagtactgtagttttttcaccagctgaatctgacccacagcagcaacgaaccagagcgcaagaacacaacgc

SEQ ID NO: 25990 - DNA, 251 bp, Oryza sativa
  Clone ID: uC-osflM202088c08a1
gttagcatcaataaagaattacaaatgaagatgaaactggcttgtctgacagagatcaaagactgtacttaacagcgccatcttaagcaaagatgaatcgctaatattaacctattctatacactgccaaatgtggcactatgctatggactacctatatatatatggggcactaacctcttttctgtggtctacactagagccttgttccaggcattcctcagtcatacaggtgcatatatgggctaact

SEQ ID NO: 25991 - DNA, 141 bp, Oryza sativa
  Clone ID: uC-osflM202088c09a1
gacctgaattaatccttgttacacactttgatgatcgcacttaatccttgttaacacattttggcttacattttggcaaaacacaataagcttaaaccctttttactaatttttgccttagcacaaggttaattaggtaca

SEQ ID NO: 25992 - DNA, 264 bp, Oryza sativa
  Clone ID: uC-osflM202088c10a1
tttttgtggggttttttggttttggaaactaaaagaaggaacctttttattgcatagtagcatatgaacttttgataacatagctcggtacaggtattggcataaaaccggacaactgaaatcagccattcaatcttattttacaagcatgggctcttcagcaagatcaaaaatgaaagatggccatgttgccaactattttttatgatagcaattgagtagattctattctaaatatctaatttttttcaggcttagtgtttt

SEQ ID NO: 25993 - DNA, 67 bp, Oryza sativa
  Clone ID: uC-osflM202088c11a1
gggtgggtaatttttcttttgaggatctttttaccttgcaccacaacagctgtaaaagccaaaacaa

SEQ ID NO: 25994 - DNA, 279 bp, Oryza sativa
  Clone ID: uC-osflM202088c12a1
ataggcgtaccagagcgggcaatggcggctcatgaagatctcgacggagccgagcgcccaccggagcacctggtgcagacgatccgacaggttgatgggcgccgaccccttgaatgccgccctcgccggcgtgcagtacaccgacttccacccacggcaatgcatcttgaaccccgttaagatgtcctccgtcaccgacccgtagatccacccaatctccttgccccactcggtcttctcctcgtagccgcagctgatgacgtggatggcctccttgat

SEQ ID NO: 25995 - DNA, 245 bp, Oryza sativa
  Clone ID: uC-osflM202088d02a1
gggggacaatacatttgcaagcttcattgaacatttatgtagcgaacaaacagttcattgacaacattttgcaaagtaggtaggggtgctcaatcatagcagtagcacatggtgtccaaaccatttacacgaatagcattaacacacgtacaaagacttgggcacaatcaaatagagtttatgtccctaggagatttggcgaagctaacataacaagacacctttttttttaactttcacaatag

SEQ ID NO: 25996 - DNA, 100 bp, Oryza sativa
  Clone ID: uC-osflM202088d04a1
cgccctccttttttttttttaattgaactgtaaatgtaccaggggatatattatagcaagacagaagtgcttctggggacactttacaataacaacatgt

SEQ ID NO: 25997 - DNA, 255 bp, Oryza sativa
  Clone ID: uC-osflM202088d05a1
agctagaacactgctgctaccatgagatagtttatccccctgtagtactgtacatcagaaattcaccactcaactcaccccctcacccatgcatccagatccatgcatgcaggaaacaattaccacaacacacacagtaagtctgaatctcatcacatccatctctctctctctcctccccccaattcattaacatcttatacatgcatactccacaaaaaaaaaaaaaggaagaaacaagaagagaacatcttc

SEQ ID NO: 25998 - DNA, 260 bp, Oryza sativa
  Clone ID: uC-osflM202088d07a1
ggacaaaacaaaattgaactattatatcatctagtagtaaaaagagtttgtatatagtatctcaatgcaagcccatctgccgggggtggttaatggacacaagatagatgggggatgaactctagcgattagcaccgtaccgtcactggaaatccgcttcaatcatcatctatccagtgtacattatctgttgtggccttgtcacattataacatagtcacataatcaaatattatatatttggatgattcttctgttaa

SEQ ID NO: 25999 - DNA, 258 bp, Oryza sativa
  Clone ID: uC-osflM202088d08a1
atagagaatcgattatataggtttgaataaacattatgcgaccgaagaacaggaagaaaaagagaaaaaagaaagtgtgacaagctcaaaacaaattaaaaggcgtttaacgatgacgacacattgaatcatttctagaagcaacagcgcatctgacttggcttagctagcagctaacatgtttctgaagcccttttttagttccacacatcattggatggttggccactccttcctaatctcaaagtagtaactcat

SEQ ID NO: 26000 - DNA, 63 bp, Oryza sativa
  Clone ID: uC-osflM202088d09a1
ttttttgggttttttttttttttttgttttttttttttttttttttttttttatttttaggat

SEQ ID NO: 26001 - DNA, 254 bp, Oryza sativa
  Clone ID: uC-osflM202088d10a1
gaacagaaaatctaccagagcatagattattgcaaatgttgtttgttacaattgacacttacaaaataacatgacaacaattgccaaaatgaaaaaaaaaggaaatgaaatcaaagctttctcaaaaaagacgcgcgaccaaaactaaactgattatgctattctccctcaaactcaatactctagttttcactccctccagttaaaattaggccggccaaatcatatcactaaaaatgcaacaaatgattact

SEQ ID NO: 26002 - DNA, 236 bp, Oryza sativa
  Clone ID: uC-osflM202088d12a1
atagcactaacaataataatcattgatgctgaagaccatgttatgaaacaatcgggcatatggttcattgaactgtgcatattttcacagctttgcacatacagttctatggatatagtagaaggaagataacttacagaaatatagccgaactgcagaagcgtcgaagagaaaatactgacaacataaatattgcacaatggaaacatgaagcatggtatcaatgtggatgcaag

SEQ ID NO: 26003 - DNA, 65 bp, Oryza sativa
  Clone ID: uC-osflM202088e01a1
aagctacagccaaggaaaattttcatatctgtaagatctatgcttacatattttgttcaaccata

SEQ ID NO: 26004 - DNA, 248 bp, Oryza sativa
  Clone ID: uC-osflM202088e03a1
tttttttttttttttttttttttttttttttttattattattttttttttttttattatttttttggatttaatgaaacacatgttcgaccaaatcgtggaaaaaaaaaaaattaacatgcaacaagaaaagcaaggggggaaaaaagatgaattaacgcagggaggggtaccagcattctgacgaaagacgaccaaaaacaagaaaagaggtgcggtgtagacgagacaaaagaggaggattaccat

SEQ ID NO: 26005 - DNA, 87 bp, Oryza sativa
  Clone ID: uC-osflM202088e06a1
acgggggtaactttaaattataagtgaaaaaccggaaccaccaaaacaaacttctgcgtcaatcgcaccctttctaatcaaataact

SEQ ID NO: 26006 - DNA, 258 bp, Oryza sativa
  Clone ID: uC-osflM202088e07a1
aataatacaagttcatatattgctcaaatattcaactgcaagaattaacgagcgagtttttttttcctcactcgatggatggatggatgcaacagcgtgtgtcaattaatcatcatatcaggatttatggctagcttaaccaatcaaatcaaatcaatttcaatttctccttcttggcatggatacggcgttgccgtcgaagagctcgtcgatgatggcctcgaggtcctcggcggagagcttgatgtacttttccgc

SEQ ID NO: 26007 - DNA, 234 bp, Oryza sativa
  Clone ID: uC-osflM202088e09a1
ttttttttttttttttttttttttttttttttttttttttttttttttttttttttttttttttttttttttttttttttttttttttttttttttttttttataatttaattttttttttttttatatttttttttttttttttaaaaaaaaaaaaaaaattaatcatgggtagaaaaaaaaaaggagttttattttgaataagatagaaaaaaaacatagttacttaagccc

SEQ ID NO: 26008 - DNA, 250 bp, Oryza sativa
  Clone ID: uC-osflM202088e10a1
acataaatatatatcagcgcgtctccatgtatagagaatcgattatataggtttgaataaacattatgcgaccgaagaacaggaagaaaaagagaaaaaagaaagtgtgacaagctcaaaacaaattaaaaggcgtttaacgatgacgacacattgaatcatttctagaagcaacagcgcatctgacttggcttagctagcagctaacatgtttctgaagcccttttttagttccacacatcattggatg

SEQ ID NO: 26009 - DNA, 82 bp, Oryza sativa
  Clone ID: uC-osflM202088e11a1
acataaatatatattagggcgtatccatgaatagagaagcgattgtattggaccgcatcaacattttgtgaccgtacaacag

SEQ ID NO: 26010 - DNA, 222 bp, Oryza sativa
  Clone ID: uC-osflM202088e12a1
gaacgagttaaaaaaagtttcaggtaaactgaactgaatgctttatgctttttcccaaacattttattgggagctccacgaaaagggggggggcatttttttgaattacaggtcattttagggggtagttaagcagcagcaagaaatgggggggttgttaaacaaggggcatatacggattataccgaaagaaatgtaattcagcaccccattattgcgcag

SEQ ID NO: 26011 - DNA, 239 bp, Oryza sativa
  Clone ID: uC-osflM202088f01a1
caacaaccatttcctgcctttttattatgctctcggggttaatgaaacacatgattgcccacacggggcaaattatttagaataacatgctacaagctaatctagccttgaaatagtatttatgtagccggaaggtactccccggttcttaggcagggggccaatgccatatatgagtctccctgtggcaggaccaaacgggtttaatgcgcttttggagttccgatccctgcaccttt

SEQ ID NO: 26012 - DNA, 277 bp, Oryza sativa
  Clone ID: uC-osflM202088f02a1
gggaaggcggcgatggagcggcaccagtcgatcgacgcgcagctgcggctgctcgcgccggggaaggtatccgaggacgacaagctcgtcgagtacgacgccctcctcgtcgaccgcttcctcgacatcctccaggacctgcacggccctcacctccgcgaattcgtgcaggagtgctacgagctgtcggcggagtacgagaacgacagggacgaggcgcggctcgacgagctggggaggaagctcaccagcctgccgccgggggactccatcgtcg

SEQ ID NO: 26013 - DNA, 136 bp, Oryza sativa
  Clone ID: uC-osflM202088f04a1
ggcaacctatcagaaacagtaactttttggctagggagtataattctttacataactcatagttctatgttacacgcaaagagctgaaacgccaccacatttgggaaatctaacttgaggaaggaagggctaataa

SEQ ID NO: 26014 - DNA, 249 bp, Oryza sativa
  Clone ID: uC-osflM202088f06a1
acagggtaatctttccttctcattcaaaaacctgcaacaccgcaacagtcataagggcaaatgcaccctcgttcaatacattgcagatttggggaggatttacaggactctgcagattgcactagcaccgtccatgccaacctagaaacatgaatatgaatagtagcaccatcatgaactgataataactcaattcggcgcttactactacgaatagcaacctgaggaattcatacataccactactag

SEQ ID NO: 26015 - DNA, 115 bp, Oryza sativa
  Clone ID: uC-osflM202088f07a1
catatcaagaatatccttactggccatttatttttatgttggggacgccaggaaagatgggactagcccatgttcaaaaactcttttgttcaaaacaaaacacagtgacgcccag

SEQ ID NO: 26016 - DNA, 112 bp, Oryza sativa
  Clone ID: uC-osflM202088f09a1
gcaagcaaacattacgtaagtcacagtacataataatatatgcccaacaccaagctgaaaagaaattggagcccaaattgtccttacaataaacaaactcctcaccagtaag

SEQ ID NO: 26017 - DNA, 222 bp, Oryza sativa
  Clone ID: uC-osflM202088f10a1
gttccatatagcagcatatatttgtttcaaaaagaacaaagtacaaggctgatcctcttcttttataggaaaaagagtttcttctggtccttttggcgcagggttgagaactttactggatggtccaaatgaaggtacacatcaaatatggcacactgaatctctcatttgagaagccagttcttcaagaatgtcgagtaaaccacacattgcttaggtcaa

SEQ ID NO: 26018 - DNA, 219 bp, Oryza sativa
  Clone ID: uC-osflM202088f11a1
accatacctttttatttatcccttgctacaaattttttacaacaaactccttacagtttggttttaggggtcactgatcaaagaacacaaaggctagacaatccctatttatattattattattattacctccctaattaacatccttatcaaaccttttcacaattttcagatgtcataaactgttgcataatcctggaagatggagctggtttcagg

SEQ ID NO: 26019 - DNA, 271 bp, Oryza sativa
  Clone ID: uC-osflM202088f12a1
ttcggccggaatcttggcgccgtccgtgtccgcgggagacgaccgcttgatcttgttcatgatcctctgcaccgagtcctgcgggtccgacgatggcgcgtcgttcatggatgacccccgctcgccgtcgatggacaggcgcagcgagaggtcctggacgtccatgagcgagtcctccagggcttcctcctcctcggcggccgcgtccgccggcgtgtccatcagccagcgcgggttcctgatccggcatccggctatcctggtgaggtat

SEQ ID NO: 26020 - DNA, 254 bp, Oryza sativa
  Clone ID: uC-osflM202088g01a1
ggaacacaatagtgtatatgttggatatatctatcaacaatgtataccaagtttttccacataaccttatctgaagcatcctttaataattcaactcatatccctgatgatatacacattggttgttcttattatctgcttttaggatgaactcccagaaattggcaatttgccagagatatcgaactgaatcaaattagtgagctatgtaaactttgagataagccgtcggtcaaaagggatttcttcagaaa

SEQ ID NO: 26021 - DNA, 282 bp, Oryza sativa
  Clone ID: uC-osflM202088g02a1
gctgcgtcgcgtgcccacgccaatcccgtggcggcggaaggaggaggagcaagcgcttgggaggagctaaaccctagaggcggagctctagaatcgaatccccccccttccttccgctttgcggcgatgagtcggcggcaggagatttgccgcaacttccagcgcggaagttgcaagtacggagcgcagtgcaggtatttgcatgcctcccctcaccagcaacagcagcagcagcagcagcagcaggcgaagcccaacccgtttggatttggcaccggaagc

SEQ ID NO: 26022 - DNA, 238 bp, Oryza sativa
  Clone ID: uC-osflM202088g03a1
caaacatataaaaaataagttttcactatggctttagctagaaaatacaaactctgttattaatcagaacaaacatataacataagattgcgtaaaatacttcttgaagctacattgcagaaacatatataacatctgcatctgaagcatatggattggtccttcatttataccatatcagtcgacattgatcaactagcattattatatgtagctactagcatatctcgatcacatt

SEQ ID NO: 26023 - DNA, 247 bp, Oryza sativa
  Clone ID: uC-osflM202088g04a1
cctagtaggagaattaaagctgatgcctttggacatggacactactgatatgagtagcgtgatgatttctcaggtagtactagtaccaaacaaagctcggagatgaagccgcgctttacggttcacatcatgtacaactcattggggaactttttattccggctccctggcttagcttactccactttatttttattatttcttcttattattattctaagtttctaacctgtcctgcaggtgcaag

SEQ ID NO: 26024 - DNA, 240 bp, Oryza sativa
  Clone ID: uC-osflM202088g05a1
aaaaacagagcagctttgcccgcaacagtcttagagagtaaaccgtgacggtcgttccaaaatagcattaaacacaatacggatacacattctcccggaactccttggtacaatatcctaagtgaatgtctaattaaagacaaacaaaaaacttacaaacattctaggggtctatcacaaccatcacacatagcagatcactcgtgatcacaaaaatgagtgtcaatgcttgttactctt

SEQ ID NO: 26025 - DNA, 259 bp, Oryza sativa
  Clone ID: uC-osflM202088g06a1
acatagtaatctttccttctcattcaaaaacctgcaacaccgcaacagtcataagggcaaatgcaccctcgttcaattcattgcagatttggggaatatttacagcactctgcagtttgcactagcaccgcccatgccaaccagaaacatgaatatgaatagtagcaccatcatgaactgataataatcaattcgcgcttactactacgaatagcacctgaggaattcatacatacactactagctctctcgagctgca

SEQ ID NO: 26026 - DNA, 258 bp, Oryza sativa
  Clone ID: uC-osflM202088g07a1
ccaccaaaaacaagctcagcgcttttatagtttttgtcaactagatcccctacacttgtatttaactatactgatcggataaagcagtgtttgaaatgatgtatctatttttcattccagaagccggttggggtatacaaaatggcaaaatatacagcgtcacctcttcatcaggacaccaccggcataaccatgcgtgctgataactcatgcgtgggaacatactttctcttgcctagaactgccggagcacatacg

SEQ ID NO: 26027 - DNA, 51 bp, Oryza sativa
  Clone ID: uC-osflM202088g08a1
acaaggtataaaaagctagaacaaaaaattatggcttgtgaaataaggcca

SEQ ID NO: 26028 - DNA, 266 bp, Oryza sativa
  Clone ID: uC-osflM202088g09a1
aaagcgggtgaactcataattccactaaacctaacaggatcaatcaaaatgcatcattcacctaaagagaaggatctacagtcgtggccgtacatcagtggctgtttttccaagcataaaatgctaacttaatcatactcctgtgctgatggatatgtatatacttactaacagctgagtggtgccgagaaggttaaataaaggtcacttctgtgctgactacggagtgagtgagaaatcatttagggctgtacaaaaatgtgagg

SEQ ID NO: 26029 - DNA, 178 bp, Oryza sativa
  Clone ID: uC-osflM202088g10a1
taggtaggcggtagtggtggggtagggcgagcgaaaagcacgcgcgaggaggcggcggcgtagggggagcggaaaccgtggacgtgcgctccaaaatagcgttaaacacaatactggatacacattttccccgcgaactttcttgtttacacatattcctaagtggaaatgttttaat

SEQ ID NO: 26030 - DNA, 257 bp, Oryza sativa
  Clone ID: uC-osflM202088g12a1
attcagaaacttcagtccaaatctcatgtattaataagtctatactcccagcattgcccccaattctccactcattgttttaggttacacgaaaaggctcaaacgtgaactattttgtacatttacttcaagatgtaatcctcatgttacagttgccatcgtactacacttcaacaacagaatctaaccacaataggggttacatctgttcccaaatcaactaagtatgatataaatatcagaactccatcactgga

SEQ ID NO: 26031 - DNA, 264 bp, Oryza sativa
  Clone ID: uC-osflM202088h01a1
gggctatcaatgtttatcattgtgaatagaagaatgatacatgaaaaaaaaaacgaagtttgacagtttgcctgttcagattgggatgttagaatcacagtgtgagcagggaacccagggaagcaggaaaaagaagatgcatgccagctatacatgaggcaagtctacagagaaagagattgatgctttgacttaccggaagtgaggacggtatcccaactgcaaatgaagtttttttatgccacgggatggggtttcaatctg

SEQ ID NO: 26032 - DNA, 265 bp, Oryza sativa
  Clone ID: uC-osflM202088h02a1
gagctatcatcagatcaatcagcaacttcagaacaagctgttacccaagcacatttattgatatggtacaaaggtagatccactgattaaaagctgcacatcccattgttagagcaaggcctgcaagttcattcatcttctgaggtaacatcagattggtcagcctcttcttgctttggcacaggagagacaattgcggcccagcaaaaagaatgaccggtccttcaggcggaggaaagttgcaccggagttgcctgaaacgcac

SEQ ID NO: 26033 - DNA, 52 bp, Oryza sativa
  Clone ID: uC-osflM202088h03a1
agggaaaagttcatggcattcctatattattcagcgcgtcaaaggcaacatg

SEQ ID NO: 26034 - DNA, 260 bp, Oryza sativa
  Clone ID: uC-osflM202088h04a1
gaacaaatatggcgttttatattggcatgtaacatgaacagaagaacctacaaattacgaccaagttcacatccaactcccaaacaaaagaggacgacgcaaagttgccaacaacacacatgaactgaagactccgcagcatagggaagcccctgcagggcggtaaatctagtcagtgacccacgcgctgtcctaccatgtatgctgctgacctgctgtcctactacacaaaggcaagacgcccgcggggaagctagcta

SEQ ID NO: 26035 - DNA, 258 bp, Oryza sativa
  Clone ID: uC-osflM202088h05a1
aaaagcaaccatgagttgtttccctttggcctccattgattcatcaataaataatgttacatgtaatattctccgtgtgttatatggtggctatagtttagtggtagaattcttaccagccacaaattaacgaactttgtacatttttctcacaaattaggagaaaagcaggagtaaaacagagccacgatcaaaaccaggagtaacccggagctcgttgttatggcttctttccctggatctttttaaggtatttcc

SEQ ID NO: 26036 - DNA, 255 bp, Oryza sativa
  Clone ID: uC-osflM202088h06a1
acctcgagcatgccacatggaatcagcatgtgaagctcttgggtgtccacttccagtctctctccagcgggtacaagaagacaattagacagtagttaacattacggggttttgtccatttcctcggcaatgatccaaatgatacgctcaagaggcgaccttggacatatctttgctggatctgttgtatttcatgtggctctggaccaaatggcctgcagcttgagcagagatgagggacaactccccagcaag

SEQ ID NO: 26037 - DNA, 268 bp, Oryza sativa
  Clone ID: uC-osflM202088h07a1
ttttgtggtgtttttatgtttatcattgtgttttgtatattttttaaggaaagcgcgttttttgatttggtatcagggtggtgataaactaatcaaggatccattaaccacggttgggacacaccagggtgtgttttaacacattaaagaagggtaatgcaggccaattagagtatggagcgtaacaggtcaagggggctcctgcccagaaatgattttggccaaactttgcaaccgggggaagcttgtgctgggtttggcggaaaca

SEQ ID NO: 26038 - DNA, 267 bp, Oryza sativa
  Clone ID: uC-osflM202088h08a1
gagcaaaagcacacagtaatttgcataaatatcatttacatcatccgatgtacaacaaattaatcaagccacacgcaaaatctatattgtaaggatgtaaagctcaaatcctcaatgctgctctcctcctaatattgggaggggcttattgcttgtgagcaaatcaaatcaatacctatagttccttttctgttttccctcaaattttacaactcaagcattgtacaaaacaagaaaacaagcaaaatggcaaaccaaagtatcaac

SEQ ID NO: 26039 - DNA, 102 bp, Oryza sativa
  Clone ID: uC-osflM202088h09a1
gttcacagtgaagtatattgtttgcattttacaatattaacagcggcattccaagtaatgagcacataactccaaactggaagcagtcctgtaaataattga

SEQ ID NO: 26040 - DNA, 257 bp, Oryza sativa
  Clone ID: uC-osflM202088h10a1
gatgaacaatgttttaaaaaccatggcagatgaaattactcagatactatatctcttcttgccaacagaacatctgtctttctgatacggtgaccacatagcataatccagctaaaacttattctgatactttgcaactgaatcatcaaccttgagcaactgggcagaacccatgcataattgcagcagaccaaactttgtccatatcaagcaccttgtcaccacattcatgctcattccatccctccaacgcatga

SEQ ID NO: 26041 - DNA, 122 bp, Oryza sativa
  Clone ID: uC-osflM202088h11a1
tttttatcgtggatctttcctttttttatcttttttctttatttttttattaataattaatgtttcatgtaatagaaaacaagaagacgatgagacagaaagggacagggcaaaaaaaagac

SEQ ID NO: 26042 - DNA, 248 bp, Oryza sativa
  Clone ID: uC-osflM202088h12a1
gggctggctaacacaaaagcttcatttgagcgttaccagttgtgtagcagaaaaaagaatttagaacttctatagacaattgattgagcctaaagactgctgcataccacattattaccacttacaggagaaatattttgacaaaaagtacaaaccagattaactttggcaccacaaacacactttattacccaattattaagataaaagaatgtccaaacagctaaagcagaaaatcaaataaacta

SEQ ID NO: 26043 - DNA, 259 bp, Oryza sativa
  Clone ID: uC-osflM202089a01a1
gataaataactcgatcttactggataatatcttattacatgctagtacgtaacattatcttacattgtgcatggtgtattatatggatcatataacattaattgtggcacacccagcccatcatgatcaaagaaaaaaaattccaaactaaaaatccttagcttcaattcctggcacactagtaacatgacaacactatatattccataaatttctagtacaaaagcatctaattaaccaacgttaaccggagcaatgt

SEQ ID NO: 26044 - DNA, 232 bp, Oryza sativa
  unsure (1)..(232): unsure at all n locations
  Clone ID: uC-osflM202092a01b1
ttgtangttgccgaccggcagcagtccgaggagggggatgtataagtggagctggaggggcacgacgacaacgacgtcatggacgacgacgaggactggtaccagcgtcgtctgcggcgcgaggacttctacctgcctgactacgacgaggaggtatcccggggttagggctatagccactgagacgcggggaccgcggcgggcgaatgaagagctcattgagaaggacaat

SEQ ID NO: 26045 - DNA, 518 bp, Oryza sativa
  unsure (1)..(518): unsure at all n locations
  Clone ID: uC-osflM202092a03b1
tttccttgactttggcttccccactctctcttcttcttgggaggctgggagctaccagcacaacacaccaaggaagctgaggtgcgttgatttcttgatatcatggccaagaggcacctcttgttggtgacaacttgtttgtgggctctgtcatgtgccttgctgcttcatgcttcctctgatgggttcctgagagtcaacctcaacaagaagagattggacaaggaagatctcactgccgccaagttggcgcagcagggcaaccgtcttctgaagaccggcagttcagacagtgatcctgtccctctggtggactacctcaacacccagtactatggggntgattggcctcggctcaccgccgcagaacttcacggtgatatttgacactggaagctccaacctgtgggttccttcagcaaaatgctatttttcgatagcatgctacctccacagcagatacaactcgaaaaagtcgagctcttacaagcagatggagaaacttgcacaatacatac

SEQ ID NO: 26046 - DNA, 424 bp, Oryza sativa
  Clone ID: uC-osflM202092a06b1
tttttctttggctcttcagagttttgtccatctctatcttcagagttcttcagagtttgcttaccatatgatcgtgatcaggtatcggaattctctttatttataactacaatgcaatcgctcattttacccgtaacaattaccaagagcttgtttagttgacaatagagatatcaaggcatatatggctgtttgtgttacacaagataccgatgaattttgtagtgatgcccttctattgggaattcataaatgctgccttgatgagatactacagctccaataagtattttttaatgcctagaggttaatgaaacgtatagcatatggtccgcagggctaaccaacagtggatcatcccaaacgaaaaaaaaaactatgcatgtctctccacgcgcattatttttcaggtaacatacatgag

SEQ ID NO: 26047 - DNA, 442 bp, Oryza sativa
  Clone ID: uC-osflM202092a08b1
tgacactcgagctgagcacgtctagctagctatatctctcaacatcttccgagctactactagtagctagctagctagaggaagcagcagcaatggcgaaatcttgcaccttggtactactacttgtcgcactggtcgggctctcacttcttgtgagccccattgcttgctcccgcaagctcagcaagccgaaacccaagccgaagccgagcatgaagaagccggtggtccgggctcacaacaactacaccggtagcccgtcggtgacggtcaccaccggctgggccgccgccggcgccacgtactacggcgcccccaacggcgacggcagcgacggcggcgcttgcggctaccagaccgccgtcgggcagcggccgttctcgtcgatgatcgccgccgggagcccgtcgctgtacaagggaggcaaggggtgcggcgcgtg

SEQ ID NO: 26048 - DNA, 481 bp, Oryza sativa
  Clone ID: uC-osflM202092b02b1
ttttcccgtctcctcgcccgccgccctcgactgccgtctcctcgcctgccgctggcgccgatctccatcctgctagcagaggtggcgccggcgtcctcctgctcccgccgcattcgcatcctaatccatcccatccggcctcggcctcgaatttcgtctcctcgcccgccgcttgcgccgatccccatcctgcgagcagaggtggcgcccggcgtcctccttcttccaccgcatcgtcgctcgccgctagtatattgaaggctgaagctttgtgggtatccagcaagtatttcaatggcgctgctacagtttggaggtaccttggctcccaaacttggggaaaaacctcagctgttgcccaggtcacctgcacttacaagagttatttatgctgatccaagatttctggtgtcaaaaagtggtagcggaggcaggcttaaacaccttgtatcacctactgctagtttacaatcatggacat

SEQ ID NO: 26049 - DNA, 437 bp, Oryza sativa
  Clone ID: uC-osflM202092b03b1
cttgctcaaaagacacacattccaaaagcatctgtggccatctcctcctagtcctaggctcgcgtcaatggcggcgtccaccatggcactctcctcccctgccgccctcgccggcaaggcggtcgccaatgccaaggtgttcggcgagggccgcgtcacgatgcgcaagtcggcggccaagcccaagcccgccgcggcgtcggggagcccgtggtacggcgccgaccgcgtgctctacctcggcccgctctccggcgagccgccgtcctacctcaccggcgagttccccggcgactacggctgggacaccgccgggctgtcggccgacccggagacgttcgccaagaaccgggagctggagggtgatccactgccggtgggccatgctgggcgcgctcggctgcgtcttcccggagctctctcgcccgcacggcgtg

SEQ ID NO: 26050 - DNA, 481 bp, Oryza sativa
  Clone ID: uC-osflM202092b05b1
ttcatatccgtagagcaaataactcatattcctagagtttatcattggtgtaagcttcaataggttagtgcgcttggcgaattcacaggccctatcttgtggtatgaactgggtacgcgatgatttgcactgcgtattgggggcttaccataagataatgccatgaatttgtcaagcgttcaaacccactgaaatgttgtgtgaaggtaaatatttcaaagtgttcatgaagaaaaggcaggtaaatatttcgttacttccccgtgacatgctaagccagaaacaatctcgctgcatgtgatatgctcagccagaaacagaaacaaaagagaaaaagagagtgattcttcccagcttttttcatgtgttgtctggctagagcctactcgctgagtgcctataaaaggaacgttacgaacgaaagaagcagactcaagaatagtatatcattggtgtaagcttcaataggttagtgtacttt

SEQ ID NO: 26051 - DNA, 445 bp, Oryza sativa
  Clone ID: uC-osflM202092b08b1
gctttttagcttaactccctatctaatttattgtggaaattccgggatctgtgattggacatggaaaatagaaatactttatcttgggtaaaggaacagatgactcgatcgatttctgtatcgatcatgatatacgtaataactcggacatctatttcaaatgcatatcccatttttgcgcagcaaggttatgaaaacccacgagaagcaactggacgaattgtatgtgccaattgccatttagcgaataagcctgtggatattgaagttccccaagcagtgcttcccgatactgtatttgaagcagatcttcgaattccttatgatatgcaactgaaacaagttcttgctaatgggaaaaagggagggttgaatgtgggtgctgttcttattttgcccgagggattctaaataaggccgcccgaccgtatttttcctgagttga

SEQ ID NO: 26052 - DNA, 384 bp, Oryza sativa
  Clone ID: uC-osflM202092c03b1
gttatatcgtcgtcattaattggagctagctagggaggcagcaggcagagcgcaggggggcggccgggcggcgagggaaccatgagcaaaggtgctatcatcggcgcttccaccgtgctggtggtggcggtggtggcagccgtgtgcgtggtgtcgttcaagaacggcggcggcggcaaggaggatggcgagctgtccacgtcggtgaagtcggtgaaggccttctgccagccgacggactaccagcagacgtgcgaggaggagctggggaaggccgccggcaatggcgccagctcgccgacggacctggccaaggccatgttcgccgtgacgtcggagaagatcttcaaggccatcagcgagtcgtcgacgctggaggagctc

SEQ ID NO: 26053 - DNA, 402 bp, Oryza sativa
  Clone ID: uC-osflM202092c07b1
ttcaggtctcacagctcactgcatcaatggccggggccaccatggcgctctcctccccggcgatggcccgcgcggcgccgacgacctcctccgcgctctgcggagaggcgcggatcaccatgcgcaagaccgccgcgaagcccaagccggcggcagcgtcagggagcccgcggtacggcgccgaccgtgtactctacctcggcccgatctccggcgagccgccgagctacctcaccggcgagttcccgggcgactaccggtgggacaccgcggagctctcctgcgacccggagacgttcgccaagaaccgggagctggagtgtgatccactcccggtgggcgatgctgggcgcgctcggctgcgtattccctgagctactcgtccgggacggcgtcaagttc

SEQ ID NO: 26054 - DNA, 423 bp, Oryza sativa
  Clone ID: uC-osflM202092c09b1
tagcattcgcatccacgagaccactcgaacccgacccgcctcgccgccgccgccaccgaagtaatcccttaattggtcaaaatgtctcgggaggagaatgtctacatggccaagctggccgagcaggctgaaaggtatgaggagatggttgagtacatggagaaggctgcaaagactgtagatgtggaagagctcactgttgaggagcgcaacctcttgtctgttgcttacaagaatgtgattggtgcccgccgtgcctcctggcgtattgtctcatccattgaacagaaggaggagggtcgtggcaatgaggaacatgttactctgatcaaggagtaccgtggcaagattgaagctgagctgagcaagatttgcgatggtatcctgaagttgcttgactcacaccttgtgccctcatctact

SEQ ID NO: 26055 - DNA, 305 bp, Oryza sativa
  Clone ID: uC-osflM202092c11b1
tacccttatcatatcatcgtcgtcgtccccactttccgctccaatggcgatcgaagccgcgcgcctctccccgtccctcgccgccgccgccatcctcggccgccgcggcgctcctcccgacgccctccccctccgccgcgccctcccgctcctgctccccccgcgccgccgccgcctctgcttcctcgccgccgcgggcggggacggacgcgccgacgccctcccctcgacggagctccgcaagcgccggggcggcgcatcatcctactcctccggtgatcctggtggtggtgaggactagaagc

SEQ ID NO: 26056 - DNA, 418 bp, Oryza sativa
  unsure (1)..(418): unsure at all n locations
  Clone ID: uC-osflM202092d03b1
tgttaagggcagagggagggagagagcggcggcggcgacgccgaaaacattcttcaggcagggcgagaaggtcgtcggcccnntcaacgaccttctcggacttcgatccgatcactgagcgccgccatgtccagaggcagaggcaagagcgcaggcgcgtcatggttgcagccggcgccgcgtcggtcattcttatcatcatcgtcatgggcggcgcggccgccgtgtacaacgcgagcttcggtgatggtggctcctcttcctcctccggttcagcgtcaggtggcggcgcgcagcccagcctgcacggcgtgtccaagatcatcaaggcgatgtgcgcgcagacggactacaaggacacctgcgagaagagcctcgccaggccgncgcgaacgccgcgcgtcgtcgtcgtcgtcgt

SEQ ID NO: 26057 - DNA, 447 bp, Oryza sativa
  unsure (1)..(447): unsure at all n locations
  Clone ID: uC-osflM202092d08b1
taacaccgtaattccgttccgttccgttccgttccgtcgccccccccggccggcgagggcgagggcgatgtccttcttcttccgcatggcgtcgcggctgcggccgtcgacgccggaggaggtggtccgctccatcaaggactccttccaggccctccacaccaagaacggcgccagggctctagaagaggttgagaaaaacctctcgtcattgaggcaaatgctgtctggtgatggagaagcagaaccaaatcaagaacaagtcttgcaaataacccttgagatttgcaaggagggatgtcctttccctctttgttcagaatctgccttcgcttggttggggagtacgaaaagatctggctcactgctggtgcnnnngggctaggcagaagtttgatgagagctactgctgtgtgaagtacattgagaaccatctggagcttttag

SEQ ID NO: 26058 - DNA, 414 bp, Oryza sativa
  Clone ID: uC-osflM202092e02b1
gttttccctgggttgtggttaggggatcagcagggcgcctgcatgaggcactgtgatgttattacaggctggcttggccaaagggattcattggatcggcttccgttctgcggttgtgcaattgggacagccgacgggtgcatctatgttttaggtggattctctacaggctcaccgatgaaatgtgtatggaggtatgatcctgtcagccatacgggtccggatgctcggtcgatgagcaccgggcgcgcgttctgcaaggctagcctgctgaacaacaagctgtatgttgttgggggaggcaccaatcgtcaaagacgggctgggtacgctgcacatccttccaggtgaatgacccaacgacaggaattttggtggaagagcctgacatcccgttctcgaaagcgcaagctc

SEQ ID NO: 26059 - DNA, 509 bp, Oryza sativa
  Clone ID: uC-osflM202092e03b1
tttacagttcagatttgcggcaaaggctattgaagcaaagaaggctcaataatcccagatcagggcaggtctctgatagacataatgtctatcctgaggatgaacgccatgaccgtcatcgtcagcgtggtgaagagcaagcttccaatgacggcgtctcaagctctcgattgcgtggtagaataagacttccagcggaaacaacgtttgacagacttggcttacagcctgagaaagagagagacagagggcctcgagctagattgtcaccaccaagtcaaacagaccttagagggaagcttcatgataggctaaaggctaaaccaaatgaggatgtatctggtaatgtacaaagttctttgtcaaaagcaaatgaagatgctgaatcgttgaactttgctgggccaaagagccttgcagagctgaaagcaaaaaggttgcaggcagtttaatgaagagtagtcgttctttaacagggccagttcgaatgacatccgaaatagttacca

SEQ ID NO: 26060 - DNA, 354 bp, Oryza sativa
  Clone ID: uC-osflM202092e05b1
gtttaatccatatccaattgagaggaagcagagggggagagaggaaggaggcaggaggctgccataactccgcccgcaacctccgctctctgtctcgcggtgacctcgtacgtacccccgcgctagctgttaatggaaacgccgcgccctctcctcctcccttcccatcatcctcccgcggcctcgccctcctcttcttcttcttcctcctccttcccctacagatagcgaagcgagatggattgctgtagataggatacgcatactgtggctcttcccccctagcttcttccatctcctcgatcgtgttcagattgattttggctttcgcttggcactgtgtgggtggtggtg

SEQ ID NO: 26061 - DNA, 398 bp, Oryza sativa
  Clone ID: uC-osflM202092e06b1
gtgttcactgcgttcttcttctcgatttatctttcttggtttcttgatctgtagcttattagcggccatgtgcggcggagcaatcatctccgggttcatcccgccgtcggccgctgcggcggcggcggctgcggcggccaagaagcagcagggcaggagggtcacggccgacgtgctgcggccggggatgctgcggaaggggaaggcggcggcggcggaggaggactttgaggccgacttccgcgagttcgagcgtggcatgagcgacgacgaggcggaggggggcggcggcgaggaggaggaggacgacgacgacgtggtcgtgggtggcccccccgccggcggcggcgaggtttgtcgtccgtgccgcgggcaaggcggcgcccccaactgcagat

SEQ ID NO: 26062 - DNA, 356 bp, Oryza sativa
  Clone ID: uC-osflM202092e07b1
ttcacgcgtccgtgagcctgttcaagacgttcaccgacgccgtgtggcggctcgccgcgccgctcgaggcgttcctccgcgcgctgccgcggcggccggactgcgtcgtcgccgactcgtgcagcccgtggacggccggcgtcgcgcggcggctcggcgtgccgcggctcgtgttccatggcccgtcagcgctgtacatactcgcggtgcataacctggcgaggcacggcgtgtacgaccgcgacgacggcgaccttgagccggtcgacgtgccggacttgccggaggctggcgccgtgacgaccaacaggccgtcctcacttgggctcttccactggaccgggcctgagagacac

SEQ ID NO: 26063 - DNA, 318 bp, Oryza sativa
  Clone ID: uC-osflM202092f02b1
gtgaaaagaaaaaaaaaaagagataaaaaaaaatctcctcctcctcctcctcgccgccgccgccatggacgcctccgccggaggcggggggaactcgctgccgacggtgggggccgacggggccaagcggcgggtgtgctacttctacgacgcggaggtggggaactactactacgggcaggggcacccgatgaagccccaccgcatccggatgacccacgcgctgctcgcccactacgggctcctcgaccagatgcaggtgctcaagccccacccggcgcgcgaccgcgacctctgtcgcttccacgccgacgacta

SEQ ID NO: 26064 - DNA, 447 bp, Oryza sativa
  Clone ID: uC-osflM202092f07b1
atcccatctcccctccgccgcttttgctcccgccgtccgtcccggagccgcctctctccggccgccgccgccgccgccgctgcctctcgtgacgtgagggatgagtcaaactcagtgctccaaagttgtgcgtggcagaggcaggaacaaaaggaaatggacagccgatgaagatgaggagcttgtcaaagcattgcgcgaggtttctcttgatcctagatttaaggtcgaaggagggggattcaagaactgttattctcaagggatagagaacattcttgcgcaaaggctgccaggccgtggtattagatccagtcctcatgtcgattcttcggtaaaagtgctgaagaggaagtattatgcgatcaaagatatgttagcgctgcccaggttctcgtgggacggcatgcggcagatgattcagtgtgaaaaagagtatatgatgct

SEQ ID NO: 26065 - DNA, 235 bp, Oryza sativa
  Clone ID: uC-osflM202092g01b1
tgttatatcctctcttctcctcgtgcccaccaccagcaccgtagcaatggcgggcagcgggccgatcaacaaggaggacccgctcaactggggcgcggcggcggccgagatggccggcagccacctcgaccaggtgaagcgcatggtggcgcagatccgcgagccgctggtcaagatccacggcgccaccctccgcgtcggccaggtggacgtcgtcgtccaagccaaggacgcc

SEQ ID NO: 26066 - DNA, 320 bp, Oryza sativa
  Clone ID: uC-osflM202092g10b1
tttctcctatgccaggggacgtgccactgagctctcgtcgctaatattaacaccttgacttctttgctagctgtgactactgcctctgactatagacagtttaatgctgccatctcagctgaatctttgtctgacgctccagcctcggctcctgaatccatgcagggttcaaaggggaagatttgccaaaatacgattgtggccatgcattttgaacggtgagactgctgtccaaatttggatgtctggacatcaatattcccggggaggttttgctataatactctctggaatcgggtcatctataaggggtggttgtg

SEQ ID NO: 26067 - DNA, 263 bp, Oryza sativa
  Clone ID: uC-osflM202092g12b1
gaagcaaaagttaggtatctctcccaacaaagcagaatgatgacagaccgcaaggacacaatattaagatgtccatgagcgaatagacacaacagcaaattctagggaaaccaaacactacagtgccacaacaagaactgcaaggtcagagaaagcaaacaacaaaaggacacatgataccaatgggtagaaccctaaccaagaataggaggaagataatgaccacaaatgaaacttaacgagcttccagaggtgaaaagtga

SEQ ID NO: 26068 - DNA, 202 bp, Oryza sativa
  Clone ID: uC-osflM202092h02b1
tctttggccgccgcctccgaaccctagctctgggggtctctatgtctcactctgtggctctctcgcgccccacccagatctgcgccggcgacagcaaggatggacggcggcggggctcagctccaccaccgcgggcggcgcccaggtgcggtggagtccgccgcgcgaacgccccggggctggggctgctccttcgctggcg

SEQ ID NO: 26069 - DNA, 381 bp, Oryza sativa
  Clone ID: uC-osflM202092h06b1
tttcgaccaaacctcgtcggttccgtctcgaggtcggcgccgccgactccaccgccaagaggtggggaagcaacccgtaaccgccgactagtgagatgaacaccgacatcaccgcgtctgtgaagtcccagtacccggtgccggacctgtacccgaccttgaccaaggtctgttgggagtatctccgcgctctactaccgtgcggctctccaccatctccgccgtcttcgacaccgtcttctacctctacctgatcaagacggggatccacaggccattgatggtgaccgtatgcctcatcgcggtgctgggagggttcatgtacgcgctccaggagctcgtcatgcgcctcatggtcttgttcgcaacgactcccaggtc

SEQ ID NO: 26070 - DNA, 345 bp, Oryza sativa
  Clone ID: uC-osflM202092h07b1
gtgtgtagcagcaacaacatttggccgctctgaagattggtgacggagaatgcccggcggctccctcctcaatagcggcggcatggcggactacggcggcggtggcggcagcggcggcggcctcacgttcccggtcgtggttacctgcctcatggcggccctccgtggcctcatcttcggctacgacattggcatctcaggtggtgtgtcggagatggagtcattcctggagaagtccttcctggcttgctgaaggggacggcgcacgccagcaaggacgtgtactgcatctacaacaggcaggcgctcacggcgttcacctcgtcgatgtacgcgttccgcatg

SEQ ID NO: 26071 - DNA, 530 bp, Oryza sativa
  Clone ID: uC-osflM202092h11b1
ttacacagcgtgggaaaaataattgacatcgagagtgatgggctactcataattgatattcctaaccgggctgtacattggcaggcagatccatcagacatggaaaagatagaaaagtttaaggtcggtgattgggttagagtgaaggcagcagtaccatcccctaaatatggctgggaggatgtgactcgtagcagtattggggtggttcatagtctagaagaagatggagatatgggtgttgctttctgcttcagaagcaagcctttttcttgctcagttgcagatgtggagaaggcacagccttttgaggtaggagaaaaaattcatgtgttaccttcaatatctcagcctcgccttggatggtcaaatgaaactgcagcaaccatcggggctatctcaaggatagacatggatgggactctaaatgtcaaggtgtctggcaaaaatagctttgtgaaggtagctccagtgatgctgagaggctttcggcttttgaggctggagactgggtgcggttgaaatctaat

SEQ ID NO: 26072 - DNA, 276 bp, Oryza sativa
  Clone ID: uC-osflM202097a01b1
tcctctccgctactatactgtcctctctgtgctccgccacctaaccgcactacccggagatagagagagtgagagagagagagatccacatcactcacagcatcaaatcacctcccactttgtcccagatgcaagccgtctgcaccacccattggccctcctcgcagacccctccgggcgatctgatgccctcacacacagcggtggtggtcatggccaatgcggcgtaagcctatgtcgtgggattacaaacgcgttcctgacaaagacgccaac

SEQ ID NO: 26073 - DNA, 484 bp, Oryza sativa
  Clone ID: uC-osflM202097a02b1
gcggctacggcggcgaacgcggcggggatggcggcggcgagctacaccgccatgcacctggacctcgcctccctcgacagcgttcgccagttcgtggacaacttccggcgctccggcatgccgctcgacgcgctggtgtgcaacgccgccatctaccggccgacggcgcggcagccgacattcaccgccgacggttacgagaggagcgtccgggtgaaccacctgggccacttcctcctcgcccgcctgatgctcgacgacctgaagaaatccgactacccgtgggggcggctcatcatcctcggctgcatcaccggcaacaccaacacccttgccggcaacgtccctcacaaggccgggctaggcgacctccgggggctcgccggtgggctccgcgggcagaaccggtcggcgatcatcgacggcgcggagagctttgacggcgccaatgcgtacaagacagcaagatctgtacatgctgacg

SEQ ID NO: 26074 - DNA, 438 bp, Oryza sativa
  Clone ID: uC-osflM202097a03b1
ttggtatattccaagcttgcgggactagccactagccagcccagccaggggaaggggaggagctgcaagcccaaccccctgctcaaccctaaattgcttccgccgatcgcccagggactagagtgttactatggctagagcaaatgagatggtcagggcagactcaaggatgatggatgtctttagtgccctggcatctaaatcagggccactgacatttgaagactcgctcagatttgtcaagaaagtgaaggcttgtaactacatgttgcatttgccattgtttgacattcttggaagaatggagctatcccggcttgaggcctaccgagagttacagctgctgtttcaaaattacccggatttgcacgaagagcttgaaaagtttagaccttcagtgcctataaaacatccagcaaacaacatttggccctggct

SEQ ID NO: 26075 - DNA, 461 bp, Oryza sativa
  Clone ID: uC-osflM202097a05b1
actctctccacacaggtaagaagccggcggcggcggcggcgatggtttccctcaagctgcagaagcggctcgcctccagcgtgctcaaatgcggcaagggccaggtctggctcgacccccatgggggcaacgagatcctcatgggccacttccggtagaacattccgaggtgggtcagggagggtttcattatcaagaagccccagaagattcactccaggtccccgtgcacggagagcccatgaggccaagcagaagggacgtcactctggctatggcaagcgtaggggtaccagggaggctaggctccccaccaagatcctgtggatgaggaggatgcgtgtgctcaggcgtttgctgcgcaagtatcgtgaggccaagaagattgacaagcacatgtatcatgacatgtacatgaaggtcaagggtaacatgttcaagaacaagcgggttctcatgga

SEQ ID NO: 26076 - DNA, 374 bp, Oryza sativa
  Clone ID: uC-osflM202097b01b1
tctttgaggcgggttggcttttcctgaacctctttaccttctcctactgggacctgctccggggccggcaccacggctagtggggtgagatggcggcccccgatgtagtgcccctcgggctgtcgtcgcggtctccgctgggccaccgactaccgctccctcgagggctgcttcttcacctacggcgagatcctcctctacaagatcatcaacgacagggagacggcaaggtcacgtgggtttggctatagcaccttctactccgagcaggcgatgcgcaacgccatcgagggcatgaacggcaaggagctctacggtcgcaacatcaccgtcaatgatgcccagtccctccgctccggcggcggaggctgtgg

SEQ ID NO: 26077 - DNA, 424 bp, Oryza sativa
  Clone ID: uC-osflM202097b08b1
ggggtttgaaagtgcacatttcaagttaagccatgagatgactcaattgcttgatccatctggaacaatgaagagtgacacttggaatcagtttctgagattgtgtgtcaaagggtacctagcaggaaggagacacatgaatgggattattactaccgttaatttgatggtggacagtggcctgccttgctttagcaggggagaacctatcgctaatctgcgaaaacgttttcatccagagatgaacgagcgtgaggctgctaattttatggtcagaacatgtgtggatgcctacaacaaatggactaccgcagggtacgacttgattcaatacttgcagcagggtattgagaaatagtctatttcttcctttgtaatgggggggtcgtgtacatcaattgtatgtagccactaattcttttat

SEQ ID NO: 26078 - DNA, 137 bp, Oryza sativa
  Clone ID: uC-osflM202097b09b1
atccggtggtttgatgttattcctaaatttgaagtgcttttaatcatgatatgcgaacatgtgttagtacttattatggctctactgcctttgtgttgacataaagactaaaaacaaagttaaggaggacactacag

SEQ ID NO: 26079 - DNA, 318 bp, Oryza sativa
  Clone ID: uC-osflM202097b12b1
ttgtacgcgtgggtgaataattatttttaataattctaggtttttttttttggctttagatatattcccaatccccaacctaccaataatccgatctctcccagttctgttcggatcaaggctgtgtcgatcgcaaaaaagacaaaaaaaaaacactttccttttggggtggctcatctgttgatcacttctttgtttcccgcgttttgttggggattcgattttcgggttaagattttctacacgatggccttgaacttggctcagagcgccgtggcggcagcgtgcttctcgaccgccggtgatgcgcggcgagct

SEQ ID NO: 26080 - DNA, 372 bp, Oryza sativa
  Clone ID: uC-osflM202097c01b1
gaagctgcgccggcctgcacgcggcccggactgcctgggtggacccacgcgcgcgttgtgtcttgggtggcatgctcgatggcaccggatgcggattcattgtgctaccaccccctctgtaggggtggccgctggggagtacacaactcccgcctgctccctacgccggccgtccccaagcccggcgggggactcgccggtcccggtctgtgtgtaggactgcatactatggacggtagccatgtcggcgacgtgaaccggtcgcttggcatgatgggcaacggcccaagcggcagccgccgagaccgcgactcggtgcgacgcggtcgggaggaagagaacgacagtcgctgccgcagccacaacctggac

SEQ ID NO: 26081 - DNA, 439 bp, Oryza sativa
  Clone ID: uC-osflM202097c02b1
atcgtccaagcatctgcaaaccaacgcgtccaatctgaggtgacggagacggagctgttcagcgtggtgaaggagaagcacggcaagggattctcgcgattcatcgaggagaaggtggtcgccctcgccggcgacatcatctacgacgacctgggcctcgatcccccgttgcttcaacacctcgccgacaacctcgacgtcatggtcaatggcgctgccaccaccaacttctactgcaggtatgatgtgtcgctggatgtgaatgtgctgggagtgaagcatctgtgccaattggccaagaaatgcaagggcctcaaggtcttcctccatgtctccactgcttacgctggcggcgagcaggaggggctaatccaggaatgggcgttcgaggaggggtgggcgctgccagaggcgatgcacctggacgtggacgcggagc

SEQ ID NO: 26082 - DNA, 490 bp, Oryza sativa
  Clone ID: uC-osflM202097c04b1
gttgtttccggagcggacggagccctggggcttttgcatgttcagatcgacgcatccttcctctggacattgctggtaggctgcgattgctgaacaagctaatcaaccgactgtgcttcagatgttcggtggtctgtctcaccttgactctaccttctctgaaggcgtacggcctcgtaacatttgcccatctgtcttatactatgacatgcgcttttccacaatgagctacatgacccagggccttgttaatggtggcatcaacgttccaatgatgtcgcactctccaattgttgctaatgctccaactgagaaaggtggcaaacacttcatgattgatatcctcatgggtggagtgtcagccgtagtttctgagactgctgctgctccgattgagcgtgtgaagctgcttatccagaaccaggatgaaatgatcaaggctgagatgctctcataacatacagggtattgaagactgcttgggcgcact

SEQ ID NO: 26083 - DNA, 258 bp, Oryza sativa
  Clone ID: uC-osflM202097c06b1
gttggcgacgttgattgcttttggtgggcacagaggtttgggtagcacttgtccagtgtaagtgttagaagctgctgtaccagagcataaggattgataccccttgaaaccggtacttaggggacacactgcgagtagataccgcacagtgtgaccggacacagccaatgagcggacccaacactgatagcttcgtgggtgacaacaaagaggctggcttgtgccccctggaaccgctggatgatcatagctttggag

SEQ ID NO: 26084 - DNA, 236 bp, Oryza sativa
  Clone ID: uC-osflM202097c07b1
tcgttcaagcttatgcaaaccaacgcgggcaatctgtggtgacggtgaccgtgctcgatcatcgcggggaaggataagcacggaggggattctcgcattcatgcgagaggaggtgcctggcgaaatattacacacctggctaatcccttgttaaactgcgcaacctatctatggaatggccttcaccacactttcagaggatatgtgagtggatggattgcctgggagtgtagcat

SEQ ID NO: 26085 - DNA, 490 bp, Oryza sativa
  Clone ID: uC-osflM202097c09b1
ctccgccaccttcgcccttctagaaccttcccgcgtccgccaatggcgacctgctcgtgggccgccaccacggcggcggcggcgcccccccgcccgcccgccaggtgccgctcgcgcgtcgccgcgctccgccgcacggccgccgcctccgccgccgccgacagctgcgtcctcgccgaagcgcccaaggggctcaaggtggagcaggcggatgcggtcgagccagcggcggcggcggcggcgcggagggacgtggggccggacacggtggcgtccatcatcctcggcgggggtgccggcacgcgcctcttccctctcacgcggaccagggccatgcccgcggtgcctgctgtgcgatgttacaggctgatcgatatcccgatgagcaactgcatatacagcaagatcaacaagatctacgttctcacccagcttaactcccagtctctcaaccgtcacatggcgcgcacttataacattggcgaagggg

SEQ ID NO: 26086 - DNA, 468 bp, Oryza sativa
  Clone ID: uC-osflM202097c10b1
ctgacgcgtgggttttgtttgcagttagtggaactgagtttggttcttcctattcagatacattgtttcctgcatgatcaatgactcaaatctcaatgaagataggcatattgctattccaggttggttatctgaatgtgcgcaggtttgcaatttgcatatcattggatgtatatggttgataacttgatatgggagtaattgggaaatctgcgataaggtatgaaccttcccttttgaagcatttctacagcactattgaagtaccacatagtttttttggccatatttatttataaccatgcaaggaataataactcttcctaattagggctaatttttttgtacaaactctatgattaacagaattgttctaatttgaaacagagctctctggcttagagcttgatcagtgagttaaactaattgtagaatacgtgagtaccgaacatgttataatttgaagca

SEQ ID NO: 26087 - DNA, 488 bp, Oryza sativa
  Clone ID: uC-osflM202097d01b1
gctggccaaagcactctagcaagagagattaaggaacataatccattgcactttgcatttgaggtgtcttctggggggcggacaataaaattgagaacaagaagttctgctaaagtgaaagattgggtatctgcaataaatactgctcgacgacccccagagggttggtctcacccacaccgttttggttcattcgcaccacctaggggtttgactgaagatggtagcgtcgtacaatggtttcttgatgggcaagctgcgtttaatgctattgcttcttcaattgaggaagccaaatcggagatattcattactgattggtggctgtgcccagaactgtaccttcgacgccctttccaccatcatgaatcctctagacttgatattcttctagaatcaagggcaaagcaaggtgtacagatctatattcttttgtacaaggaagtttctcttgcattgaaaattaacagcatgtacagcaaacagag

SEQ ID NO: 26088 - DNA, 489 bp, Oryza sativa
  Clone ID: uC-osflM202097d05b1
gtcttgcctggcccgcgccgcaatgtcctctcggcaatcaacaacggcggtggcacgaacagcgacacggcgtcggtggacggcggcgagggcggggctgggccggcggcgcctgtgatcgagttcaccgggagggaggatgtggagcggctgctcgccgagaagatgaaggggaagagcaagaccgactacaaggggagaactgagcagatgagtgagtacatcaagaagctgacagcttgcatccgctggtacattgagttggaggacggctacttggtcgagcaggagaagctccgtagtacgatggatgcagagaatgcccagcacgcctagttggatgcccagcttagcagtgatctggaagagctgaaagctgcacacctgaacttgacgcggcagtgcgattcgttggaggataagcttaacaaggagaaggccgacaggatgcttgctgtggagtcctaccagaaggagaggcagcaaagg

SEQ ID NO: 26089 - DNA, 270 bp, Oryza sativa
  Clone ID: uC-osflM202097d08b1
gtctgtttgagtccctttatccggacaaattgcaggtaaatccaaagagggcaacggggttgtaatgcttccattttggatgtacttgtgacaatatgaacaaactcggcaggatgcattaacatctaaaagagggggtcaatacagctctgttccctgttatgatggacatatgcaaagcaatgtggtccttggcaacacaaaattcaacccttcctttgctgtcgtgaactcatggacagtgcggattggcaacaactttggaaaaag

SEQ ID NO: 26090 - DNA, 383 bp, Oryza sativa
  Clone ID: uC-osflM202097d09b1
gccagctccagccacacgagcctagttcaggtagatacaatggcgtccaccgcctctttcatgctcgccgtcttgctggcggtggccgtcgcggcggcgccggcgagggcggtgcgatgcccgccgagcgacaagcaggcgctgatgagagtgaagcagtcgctgggaaacccggcgacgctgtcgacgtggtccctggcgtcggcggactgctgcgagtgggaccacgtccggtgcgacgaggccgggcgcgtgaacaacgtcttcatcgacggcgccaacgacgtccgcggccagatcccgtccgccgtggcggggctgacggcgctcatgtcgctggcgctgttccgcctaccgggcctctacggtcccattccggcgtg

SEQ ID NO: 26091 - DNA, 465 bp, Oryza sativa
  Clone ID: uC-osflM202097e01b1
cggacgcgtggggagagagaggagagcggcggcgatggcgtcgtcgtcgtcgtcggcgtcgagcaggttctcgccggcgctgcaggcgtcggatctcaacgacttcatcgccccctcgcaggactgcatcatctacctcaacaagggcccctccgcccgccgccttccgatcaaacaaaaggaaattgcagtgagcacaaatcctccagaggaagcagtcaagatttcactgaaggactgtttggcttgcagtggttgcataacatcagcagaaacagttatgcttgagaagcaaagcttgggtgacttcattactcgcatcaactctgacaaagctgtcatagtatcggtctctccacagtcaagagcatcgctagctgcattctttggtctttctcaatcacaggttttcagaaaactcactgcgcttgtcaagtcgatgggcgtaaaggcagtttacgacac

SEQ ID NO: 26092 - DNA, 323 bp, Oryza sativa
  Clone ID: uC-osflM202097e03b1
ctcgtcgacgccaaggtggacgtggtgctcgccggccacgtccactcgtacgagcgcagccggaggttcgcgaacatcgactacaacatcgtgaacggcaaggcgacgccggcggcgaacgtggacgcgccggtgtacatcacgatcggcgacggggggaacatcgaggggatcgccaacaacttcacggtgccgcagccggcctactcggcgttccgggaggccagcttcggccacgccacgctggagatcaagaaccggacgcacgcgcactacgcgtggcaccgcaaccacgacggcgccaaggccgtcgccgacgccgt

SEQ ID NO: 26093 - DNA, 379 bp, Oryza sativa
  Clone ID: uC-osflM202097e07b1
gtgcttgcgagcttctacaagagcgaccacttgaagaaccgggcgtacgacccgtaccacaactacacgagcccgacggtggtcatcctctgcgccgacgcgttgcagagcatgtacgcgcagatggtgtgcggcctgcgccagagcaacgacatgctgcgcctcggcgcctgtgtcgcctgcggtctcctgcggggcatccagctttctccagctcaactgggagcagctcgccggaaacatcgagtccggtgagctcaccactagcgtcaccgacccgtcggtgcgcgaggattgcgacgccatcctcctcccggaccccgagctcggcaagcttatccgtgccgagtgctccaagggcgactgggccggcctcatc

SEQ ID NO: 26094 - DNA, 507 bp, Oryza sativa
  Clone ID: uC-osflM202097e10b1
ttaagtttgaggatcactaccacttctcatgccagttcacaactgacttgattgcgatgaaccacgctgacttcatcatcaccagtaccttccaagagattgccggaaacaaggacactgttggtcagtatgagtctcacatggcattcaccatgcctggtctgtaccgtgttgtccacggtattgatgtttttgacccgaagtttaacattgtctcgcctggtgcggacatgtccatctacttcccttactctgagtctcgtaagaggctcacctccctccacccagagattgaggagttgctctacagcgaagttgacaacaacgagcacaagtttatgctgaaggacaggaacaagccaatcatcttctccatggctcgtcttgaccgtgtcaagaacttgactggtctggttgagctgtatggtcgcaaccctcgcctgcaagagctggttaccctgtggctgtctgtggtgaccatggcaacccatctaatgacaaggagga

SEQ ID NO: 26095 - DNA, 407 bp, Oryza sativa
  Clone ID: uC-osflM202097f08b1
tgttattgcccttcttcctctcgcttgcgccaccaagccattcgcgaaccttctagaaccccccaaaaccggacacctgggggtcacgctgctcttgcggtccgctgccgccagcgccgtctccctccgcggcgcccgctcgcaccacatactgtcctcctgcctccccaaggggggaagagcctgatgggcgcgcgccggccaggagggcgcccaattccggtgcagggcctgggtgcctgctgcactggctggcgtcggttcattcggaatcactgcgcgctgcaactccacctggaggtcggccgcttcggagggtaccaccgcgctgacgaggactgagcccgtggtttctgccgagtggctgcactccaacctcaaagaccccgatgtggaaggacttgatg

SEQ ID NO: 26096 - DNA, 404 bp, Oryza sativa
  Clone ID: uC-osflM202097f12b1
gttcccgatatggaagcacccgaccggtcagttgcagcatcaccatcttaaaagggggctatctaaagaacatggcgcacgtgctgacataaaccaactctcaaccggcactgatcaaagtgtctgtacttgaacagaacacttgtctaatgttctatcactcgatgctcaggactacatggttttcacagaatcaaaaaacgcaaatggcgaccctatcacattgcggcctgacgcacgaagcacatctgctcataaccaatacggatggggcagcatgcaccatgactgccgtcttcttaccacttaaaatagcgcaaggaacgcaacctgactattaaaagatccagctgaattcatgcccattactttagaagaggcatcagaacctctgccacagcaca

SEQ ID NO: 26097 - DNA, 254 bp, Oryza sativa
  Clone ID: uC-osflM202097g01b1
cctgtgtcaaggagggcatccccccggaccagcagcgtctcatcttcgctggcaagcagcttgaggatggccgcaccctggccgactacaacattcagaaggagtctaccctccaccttgtgctcaagctcaagggaggcatgcagatcttcgtcaagaccttgactggcaagaccatcacccttgaggtcgagtcgtctgacaccattgacaaagccaaggcccagaccccaggcacggagggcattccccca

SEQ ID NO: 26098 - DNA, 487 bp, Oryza sativa
  Clone ID: uC-osflM202097g05b1
ttttctcatgttttcgctctcgatctgctacagaagcaatagtagccagcatatcaatcgatcgatccgtacaatggcggccctgaagatgaacaggatggccgtggcggcgctgttcctcgtcgccgaggtggtggcgggcggcgctggcgctagcgcccacacaggagggggggctggatctgtggccgacgccggcgttggcgccggcgtcggagctggcgctgacgccgccctcggggttggcgccggtgccgccggcgccgacggggctggagttggagctggaattggagccgccgccaacgtcgccgggtctctcaccggcgccgctgatggcgccgccggcgtggcacccaaggtgcatgtgtgagatcgatcgatcgatcgagcgcgccgcggctttcatctccacgactccattccgccgcagcggctccggcgatccatatttttataaattcgcagtcgattggttggtggtaat

SEQ ID NO: 26099 - DNA, 450 bp, Oryza sativa
  Clone ID: uC-osflM202097g12b1
ctcgagcattcaggggagagggtacgtgcaggagccaaggtccaacaaagcgatacctccttctcctcctcctcctcatcctcgtcatcagattcgccgcacgcgcacgatgcaggaagaattcgattggccaaccttagtgttatcaacatcaccagaaacagaaaatgttacctccagctctgtgagaagcacaaccaagaatgacgtggttattcagcaaggctccatctcttcatactggccatgggatgtcatgaaacttgaaaacgacacccattttctgtctgattcttcaggagatgggatgaaatgcacaaagggtgaccattttctatctcatgccaaccgggggtcaatggacctgggattatcaagaccaaccttgaaggtccaattttgctactgaccttggatcacatgcatattctaaggaagccaggacacttg

SEQ ID NO: 26100 - DNA, 337 bp, Oryza sativa
  Clone ID: uC-osflM202097h01b1
cctaaccctaaccctagcacggggctgccgcccatctccgcctactaccagacgcgcgcggagcaccacgccgtcgtctccagcgactggctcgcgcacgccgccgccgcggcctcgctccctccctcctccgatgccgtcgacgcggacgccgactccgacgccgcggcgctgctctcccccgggagcaacggcggcggcggcggggtgatccaagagttcaaacttctggcgccgcaagcccgaggccgcggaggccgcggcggccatcatggcgctcgccggcggtattcggttcagcaggggcaccaccatgatggagctcgagatcgagctc

SEQ ID NO: 26101 - DNA, 495 bp, Oryza sativa
  Clone ID: uC-osflM202097h05b1
gtcttctgtcaaaccagcattcaacaatcttgccaatgcaaatgcgtttgtctacccatctgctaacttcacttcaaacaagccgtttgttcagcctgataacatgccatttgttcctgcaatgaactctgctgctcctattgaggaccctatcatcaactctgaccagggaagcaactcatttggctgctctgactttggctgggagaatgataccaagacaccagatattacatcaattgctcccatttcaaccatagctgaagtcgatgaatctgcattcattaagagcagtaccaacccaatggtccctcctgttatggagaacagcgctgttgatctgcctgatttagaaccctacatgaggttccttctggatgatggtgctggtgactcaattgatagccttctcaacctggatggatcacaggatgttgtcagcaacatggacctctggagctttgatgacatgcccgttagcgatttctattgagg

SEQ ID NO: 26102 - DNA, 470 bp, Oryza sativa
  Clone ID: uC-osflM202097h07b1
tttttgtgctattttcaacaacatctatgcattctgtgggtcgattgctggcgagcagctctattcatctgaaagtctggatgatagccaaaagctctctgctgatgcattggttaagaaggcatatgataattggatgtatgccattgaatatgatggcaaagctctcttgaactctaaaccgaaaaaaaagggtgcaccaccctgtgataccatgagacacatcctactctgagaaaacctgctttatacgaacagcgcatctcatcagcgagcatgacaggaccatctccagcaggaggaagtggcactggaactgattccatagggtatgatggggaccaagcagtttcacagccatctcaactttaaagtacatcttgcaatgtccctgtgccatacgatgacaccctttcatttttaccgcctagaatgttgatggggtctgataataaagataccgaaatgat

SEQ ID NO: 26103 - DNA, 476 bp, Oryza sativa
  Clone ID: uC-osflM202097h09b1
tgttcatcatgtgaaagggcaaagaggaccctctcctccactgcccaaactactattgaaattgattccctctttgagggtgttgatttctattccaccatcaccagagccaggtttgaggagcttaacatggacctcttcaggaaatgtatggagcctgtggagaagtgcctgagggatgcaaagatggacaagagcactgtccatgatgttgtccttgttggtggctcaactagaatccctagggttcagcagcttctgcaggatttcttcaatgggaaggaactctgcaagagcattaaccctgatgaagctgtggcatacggtgctgccgtccaggctgctatccttagtggagaggggaacgagaaggtgcaagatcttcttctcttgatgtgactccactgtctcttggtctcgagacagcgggaagtgtgatgacagtgctcattccaggtacaccaccattcctacca

SEQ ID NO: 26104 - DNA, 361 bp, Oryza sativa
  Clone ID: uC-osflM202052a01b1
tactgggagagctatgcaagaggcgctgcttatgccctgcaaaattttggatatgatctcaagaagggtattataggatatatctctggcgtgaaaggacttgacagtccagggctcactgcatctgcagcagtcgggattgcctatctgatggctctagacaacgtgaacgaccgggccgtgctcccagaggacaacattcaggtggacaagtccatcgaaaataaatctttgggtcttgaaaatggccttctggatccatcagctattctgctctcccggtatggctttctcaccttcacgggcctgcaagacccgccacacattccctacggctacatcttacatctttgatgtaaaa

SEQ ID NO: 26105 - DNA, 499 bp, Oryza sativa
  Clone ID: uC-osflM202052a02b1
tatgaacccgaggaatcaaccgtcgaacagcttgaagacatccatgacaacaactcctctgaacaacctccagctccagctgacatgaacaaccaacagtcagatttccagcccatgacggcgatgagcatgagcaagtcatgctccctcaccgatctcctcaacaccatcgactgcgccgcgctctcgcagtttctcctcgacggctcatccgacgccatcgctgagcctcctgctcctcccagccccctaatatacacaacacctcatccaaattaccaaacactaaactataacattaacagcaacagcagcatgccacacgccttcgagtcacgcctagatcatcacgatggttacgttaacaattataatgttaatggcctgaggaggaagagaatgatggcgtgtagtgcaacttcctttgatgatggcagcagcagcaatgactttgtgcattgccgtgtcaagaaaccgcagctgctgccaagtgattcga

SEQ ID NO: 26106 - DNA, 424 bp, Oryza sativa
  Clone ID: uC-osflM202052a03b1
tataaaaggaaaaaaaaacaaaacacaccaagccaaataaaagcgacaatgggatcgctcaccaccaacatcgtcctcgccgtcgccgtggtggcagcgctggtcggcggcgggtcgtgcggcccgcccaaggtgccacccggcccgaacatcacgaccaactacaacgccccgtggctccccgccagggccacctggtacggacagccctacggctccggctccaccgacaatggtggcgcgtgcgggatcaagaacgtcaacctgcctccctacaacggcatgatctcctgcggcaacgtcccaatcttcaaggacggcaggggatgcggctcatgctacgagctgaagtgtgagcagccggcggcgtgctcgaagcagccggtgacggtgttcatcacggacatgaactacgagcccatct

SEQ ID NO: 26107 - DNA, 489 bp, Oryza sativa
  Clone ID: uC-osflM202052a08b1
tacctacagtccagatcaggtgctggtgagcaatggagctaagcaatgcattacgcaagccgtacttgccgtttgctcacctggtgatgaggttttgataccagcaccatactgggtcagttatcctgagatggctacattggctggtgcaactccagtgatccttcctacaagcatatcagagaatttcttgctaaggccagagctgcttgcttcaaagatcaacgagaaatcgaggcttttgattctctgctctccttctaatccaactggatcagtatatccaaaggagctgcttgaagaaatagctgacatagtcaagaagtatcctaggcttcttgttttgtctgatgagatttatgagcatatcatctatcagccagcaaaacacacaagctttgcttcattgcctggaatgtgggatagaacattaactgtaaatggtttttctaaagcttttgcaatgaccggcttgcgacttggatacct

SEQ ID NO: 26108 - DNA, 251 bp, Oryza sativa
  Clone ID: uC-osflM202052a09b1
tacgcactgacacactcagcttaagcgagcgagcgagtgaacgagagagagagacagagatggcgagtgttgcctccttcccggcgatcaacatggagaacctggagaccgaggagaggggcgcagcaatggaggtcatccgcgacgcctgccagaactggggcttattcgagatgctgaaccatggcatcgtgcacgagctgatggacgaggtggagcgcgtgagcaaggcgcactacgccaactgccgg

SEQ ID NO: 26109 - DNA, 90 bp, Oryza sativa
  Clone ID: uC-osflM202052a11b1
gtgaaagtccatagctgctgctatagagacacctagaatcaaacaacagggccagcactgtgacaacggggggaacaggcacacccccga

SEQ ID NO: 26110 - DNA, 351 bp, Oryza sativa
  Clone ID: uC-osflM202052b01b1
gtgcggttggcgtagcgatgattcccctcgagtcgcggtggggaatccgacgggaccagcaccccgaggggcaggagcgacaaccggcgcttccgcggattgtgcgaaccccgaagggccacgcagagcgtctaaaccacacagcctttggaatccttaaaaacgaatagatcagtgtcaatgacctgaaactgataataattacaaaaacgccttatacgaggactaggagactatccagatggaccccttcaggaccaaggggaatagccagcctaccaacacttctatctttcaaaaacatataaattcttctcacttactgactcacaataccatacactatctcac

SEQ ID NO: 26111 - DNA, 511 bp, Oryza sativa
  Clone ID: uC-osflM202052b09b1
tgcacattttccccaaataataatagaggaaggggaaaaacacatttgcagccacatcatccatggcctctctccgcaccattccggtgatcttcggcatcctcttctatgtccttgccagcactgccactgccaccgacgcaccggactacgtcgtccaaggccgtgtctactgtgacacgtgccgcgccgggttcgagaccaatgtcaccgagtatatcaagggtgccaaggtcaggctggagtgcaagcactttggcaccgacaaggtcgagcgtgcgattgacggtgtgactgatgagaccgggacatacaagattgagctcaaggacagccatgaggaggacatctgcgaggttgtcctcgtccacagcccccttgcaaactgctctgaaatcgaggccgaaagggatcgtgcccgtgttctgctcaccaggaatggcggcttctgtgacaacctgcgcttagccacccactcgggtacctcaagggccatccactgcccgtctgc

SEQ ID NO: 26112 - DNA, 359 bp, Oryza sativa
  Clone ID: uC-osflM202052b10b1
tttttacaatatcgtggaggatcttgagaagctaaagatcactgtgaactcttcagaacagccaaaaaggctgaccaggctgctcatagtgccaccaatgtgtcaccaaagggtaatctgaagccaagatcgctgaattctgatgcagctcaaagtaaggaagcagctaaaaaagacaacattcagaagaagcctgatgcaaaggttagaggctcctacaaccggaatcctgcaaaagaagccatcaccaagaatactggtaagaaagccaagaagcaggtcaaggggcagaaggaagattgcaatggaggcagcgaggctttgccagttggtacagagcaagaacctgttgatgtggt

SEQ ID NO: 26113 - DNA, 147 bp, Oryza sativa
  Clone ID: uC-osflM202052b11b1
tattatactgtgagacttgcccacgaaagatgactggttgaaattcaaatgactaggacacattgtgatcctaatgagttggctatatatgatagatatgagacaaaagtgcacatggcgaataaagcctgagagaggtcatacaag

SEQ ID NO: 26114 - DNA, 504 bp, Oryza sativa
  Clone ID: uC-osflM202052c02b1
tgagagactctgccgggttcctgaagattagttcaggttctgttgtgcttccaattgggaagttatcaatcggtctttgccggcaccgatcgttgctgtttaagaccttagcagacactatcagtctcccatgtcgagttgtgaggggatgcaggtactgcaaatctgctggtgctgcttcatgcctggtgcactttggtaatgacagggaatatctgattgatttgatagggaacccaggcttcttatctgaacctgactccctcttaaatgggctctcatccatttcagtttcttcaccattgcgcccaccaaaatacaattcagctgatattgttaataacttcaagtcattggcgaagcaatatttccttgattgccaatcgctaaatatgatgttcaatgatccagcagcagggacgggctgttgactcagatgaggccatgggatcaaatattggtccaaacttatcaccctgcacaaacagtgattttcaagctaac

SEQ ID NO: 26115 - DNA, 256 bp, Oryza sativa
  Clone ID: uC-osflM202052c04b1
tacagctgcagctcccacgccgccggcgacgacgacctcctcctcctcctcctcttcttggcggaaggaagccattggtgaccccggccaggtgctggcctgtggttccggccggcgccggcgccaatgggaaattgccagccgccgaagttgccgccgttgtgaaccaacacccgggcgggcaggtgggaacgggtctactggccggccaccgccggggacgtcatgcgcagcaacccaagccactacgtcgccc

SEQ ID NO: 26116 - DNA, 455 bp, Oryza sativa
  Clone ID: uC-osflM202052c05b1
tcacgcgtccgggaggggtaagaagctccaagaggaatgggcggttccagtgaaatctgttgaagacattaacgagcgattcatgaacttctgtcaaggaaaacttacaagcagcccatggtctgagcttgatggccttcaacctgagacaaagataatagacgaccaattggtgaagattaaccagaagggcttccttaccattaacagccaacctgctgttaatggagagagatctgattcaacaagtgttggtggggggtggccctggaggctctgtttaccagaaggcctatcttgagctcttctgttcaaaagagaagctggatcaggctattgagaagagcaagggcgttcccttttgtaacatacatttgccgtgaacaaggaccgggagtcattctaaaacattcccacaaccgctgggattgcggtcccctgtggttgttctccct

SEQ ID NO: 26117 - DNA, 334 bp, Oryza sativa
  unsure (1)..(334): unsure at all n locations
  Clone ID: uC-osflM202052c08b1
tctcctccacccgcccctccctcccacacacaccacaccaccaccaccaccacccacccctcgtatgcaattattcacgcccagtcgccgcctccaccgccgccgcctgctcgactcaccaccgcagggcggcctcctcctgccgcatgggtgactcgacggtggccggcgcgctggtgccatcggtgccgaagcaggagcaggcgccgtcgggggacgcgtccacggcggcgttggcggtggcgggggagggaagggatgtttctttttcntnttgcttttgtggggggccccggggtggccgcggccgccgggggcctcccctgcccgttct

SEQ ID NO: 26118 - DNA, 308 bp, Oryza sativa
  Clone ID: uC-osflM202052c10b1
tccgactctcgtaagattaaggggggaggaattggagggcacaggcccccattttaatcagcggaaatcaaatccacgcattatatatatttaatctaacccccaactttaacttaggagcacactagctagctagctgctaagttaactatctgatcaggccacagactctggcctgaccagccattaatctcttgctggttgattaggtgctattagcttcccgctcctcggttggttgccctgtactaatacatactcccatctattcgcctgagaaaatatcgaaaagtagcagcaaagaggag

SEQ ID NO: 26119 - DNA, 527 bp, Oryza sativa
  Clone ID: uC-osflM202052d02b1
tatcactaatggtggtgatatagctgcctcttccgttgttcaagttgtcggtcttgtcctttgtttgcatgcagctgctaaaatttctcacagagctcaaaacattgcttcactggctagtcgatggcatgccttagtaacatgctctagtgattctacttatgtaagcacaccaaacagttctgggaaccttgtgccttttccagcacatatgttcttgagagacttttcagaaagtgatttggaatctctggagagtggctcagtacaaggcaattctcatggcacagctcaattggcttcatacatgtcttcataccacaagagggaatcacttgtgctgtatcttctgggcaacccaggtggcatcacgatatttggctggatcgttgatcggacattcctaaatacaattctgatgctcgaattaacacttgtgctcttcgtgcttagcaagacccgtgtggttccggcccaaacattagttcttgattacatcaggttttcatgatgggggctatcacatc

SEQ ID NO: 26120 - DNA, 231 bp, Oryza sativa
  Clone ID: uC-osflM202052d05b1
gtgtttttactacgcaaaaaagttgtcattccattcgacgtttagttattccgccatgaacaccacaagcgttttacaacagcaagcaacggacggagccaactcaatgacagacaaaccggacaagacacgtcgtccacacggacgccgaccatgacaacacctaaaccgaacaatgggggagggaaaaaaacgatgggaataacacgacaggggcccaaggtgggacac

SEQ ID NO: 26121 - DNA, 460 bp, Oryza sativa
  unsure (1)..(460): unsure at all n locations
  Clone ID: uC-osflM202052d06b1
tcgattcctcgccaccacacccacccacccaccaatggcgtcctcccgcctcctcctcctcgccgcgctgctcgccacggcggcggtgctggcggcgtcgcagaagccgaaggccgccacgccgacgaaggccacgccggcgtcgcccggccccgcggcggcggcggccgacggccccgcgccgacgaacgtgacggcagtgctggagaagtccggcaagtacaccaccttcctccggctcctccacgagagccgggtggacacccagatcaacagccagctgatggacagctacaacgggctgaccatggttcgcgccaccggacgccgcgttcgcggcgctcaagccgggcacgctcaactcgctgtcgtcgcagaccagatccagctgatgctctctgcgtgctccgcggttctacagcctcgccatgctcaccaccctcggcggncccgtgaacac

SEQ ID NO: 26122 - DNA, 324 bp, Oryza sativa
  Clone ID: uC-osflM202052d12b1
tatcaaccagagagagagggcgagagggcgccgcgcgcctcctccaataatacactgccacgtcttgcgtgccacgtaggccaccccaccaccatgcgccgccgcgggaggatgatcccgccggcgctgctgctggccgccgcggtggcggcggcgctcgcgacggccgtgtcggggcaggggcggccggtcaccgagagcggcgcgcagacggcgccgacgccgtcgacgttcacgcccaaggacaacttcctcatcgactgcggcagcacgagccccgtcaccaccggcggcaaggtgtacaagacggacgcgcaatcgaac

SEQ ID NO: 26123 - DNA, 440 bp, Oryza sativa
  Clone ID: uC-osflM202052e01b1
tgattttagccgccgccgccgccgacgccggtcacccgcgccttcgacgagctccagcccgtagacctcgccggatctccccggtggccgtgaccttcaccgacctccacaccgccggcgggctcaaagccctcgagcagcacctctgcggcaagacctacgtctccggaaacgcgatcagcaaggacgacatcaaggtgttcgccgccgtgccatcaaagcctggagctgagttcccgaacgctgctcgctggtatgataccgtcgctgcggccctcgcttcaaggttccctggcatggcagatggagtgaatctgcctggaggaggtgcggcatcgtctgctgcagcggctgctgcagctggtaatgatgctgatgaggatgatgatgacctgcagctttctggtgatgagacctatggagacccgacagctttgctt

SEQ ID NO: 26124 - DNA, 336 bp, Oryza sativa
  Clone ID: uC-osflM202052e06b1
ttataaaccctagacttgcacagatcgagacgagagaggctagcagcaacattcttcgacaatggctagccttgcaatcttcgccgctgtagccttcgttctcctcgccgcctcggtgtcgtcgtcgtcggcggctttgtacaccgtcggcgatgcgagggggtgggcagtgccgcccacaggctcagagtcgtacaaccattggggtctaaagaatcgcttccgcgtaggcgacgtcgtggagttcaagtacgtgaacgaatcggtggtgggcggtgaaccacgagggctacaggaactgcagctcgctgagcccggtgatccggttcacggacg

SEQ ID NO: 26125 - DNA, 420 bp, Oryza sativa
  Clone ID: uC-osflM202052e07b1
ttgattcttttcattgggaaagttcttgcatcagttgaaagtttatcgatggcagtaatagcatcgacactggactccctactggatcttttgtcaggtttcatactctggtttactgcacatgctatgaaaaagcccaacaagtatagctatccaattgggaagagacgaatgcagccagtgggcataatagtatttgcatctgtaatgggtacacttggcttccaagtgctaattgaatccgggcgtcagcttatcacaaatgagcaccaagtgttcgaccacaggaaggagctgtggatgatcggcagcatgtcctcagtcgcagtggtgaagttcttcctgatgctctactgccggtcgttcaagaacgagatcgtgagagcctacgcgcaggaccatttcttcgacgtgatcacc

SEQ ID NO: 26126 - DNA, 281 bp, Oryza sativa
  Clone ID: uC-osflM202052e09b1
ttgtgttctctgcaacaatgcccagttggattagaaaaatcacaagcaagtacttgaaagatccaatcattattgacctagttggtgatgaggaccagaaattacctgaaggaatctctctttattcaattgcctctgagcactatgggaagccatcaattcttggtccattgatcaaagtgagcactcttctgaatgtatgatgtgttttatagtttgcaccagaagcgactgtcttgtatacacttccacaggagcatgcttatggagggaaatgtatt

SEQ ID NO: 26127 - DNA, 354 bp, Oryza sativa
  unsure (1)..(354): unsure at all n locations
  Clone ID: uC-osflM202052e10b1
tatgcctcctcttttgccctccaagggggaggaggatcagggagaaagggagggccaaacaatacaaaaagaattactgcaggaaccctagggattataattagcgagttaacggcaaattaagatgccggtgtcacggggcggcaaggccgcttcgtcgaacgctttctgcttctgctgcttctccctttccctctcaacttctcaagtggcagtggtgggagggtagcatctggcccaagcagataatgngctcttgaatatgatcgcttttttctgtggtaaaatttgtgtgcaagatctggggtacaaaaggaggggacagcagcacaagggaggagaaggagttcttgc

SEQ ID NO: 26128 - DNA, 248 bp, Oryza sativa
  Clone ID: uC-osflM202052e11b1
taccagcaaagaggaacaaacaatccctaagagataggaataaaaatcggagatatgggaagatttcgacccgagtgactcctacaatagaggtgagcaacaaagaaaagattcaaacagttgctgaaggcaataattccctgattcctggttcaaagtcaggacaggttgtcagtgagaaagaacctgagccttctgaatgcagtgagtcatgtgcttctgtgcctaatctagaacaaacaggtact

SEQ ID NO: 26129 - DNA, 214 bp, Oryza sativa
  Clone ID: uC-osflM202052f02b1
tttatactctcgcctaccatttcgcccccctccgcaagcaatccaccactgcatcggcggcgagggctcaccggcggcgagccatgtgcggcggcgccatcatccaccacctgaaggggcacccggaggggtcgcgccgggcgacggaggggctactgtggcccgagaagaagaagcccaggtggggcggcggcgggaggcgccacttcggggg

SEQ ID NO: 26130 - DNA, 385 bp, Oryza sativa
  Clone ID: uC-osflM202052f03b1
ttcggctctcgccatcgccatcctcctctcccttcccggagaagacgccttcctccgccgatcaccacccggtagggcgaggagggagccaaatccaaatcagcagccatggcgcagatgctgctccatgggacgctgcacgccaccatcttcgaggcggcgtcgctctccaacccgcaccgcgccagcggaagcgcccccaagttcatccgcaagttagcggaggggattgaggacactgcggccacctgcctaggcgcaagcagtgtctccagaatccagcatccggcctatgactacatgagtgcataaggtgggacacctggatgcccattggccgcaacgatgctccagaagtacagggcgctcttgctggaaagaggag

SEQ ID NO: 26131 - DNA, 488 bp, Oryza sativa
  unsure (1)..(488): unsure at all n locations
  Clone ID: uC-osflM202052f06b1
tatattatgagtgaaaatattgctggaaatgctgactgtttcttgagttccacaattaatctggcagcagttcttgttcgccatggtcaatatgaagctgctcagagtcttctgggcattctcgacacacacatgaactatgtgaaagcatctcaagctgaccaggatacagatcttgcacgctcatcatgccttcatctcaatggattttgccttctggtgcttgcacgtgatgaagcaaacattgtcctgaaagaatccaaggttcatgaagctatccgatgcttcttcagagctgcatctgggcaagaagctccaaaggctcttcagaagctctctgtggaaacagggtttcaaatctccggggaatgcagatcttttacagcatggaggcttcgttactatgagtgggcaatgcaaatttttgagcagcactccatgagtgaaggngcatgcgagtttgctcttggggctcttgaacaaataga

SEQ ID NO: 26132 - DNA, 485 bp, Oryza sativa
  unsure (1)..(485): unsure at all n locations
  Clone ID: uC-osflM202052f07b1
ttgcgaccgggcgctcgccaagatctgcggcgtgatcgccgccgacgagaggcggcacgaggcgggctacacgatggcgtccggcaggctgttcgagctcgacccggacggcatggcgcgcgcgctggcggacgtcatgcgcgggaaggtgaccatgccggggcagctcatgtcggacggccgcgacggcgacggcgagcacagcctgttcgcccggttctccgccgtggcggagcgcgccggcgtgtacacggcgagggactacggcgacctcgtcgagcacttcgtgcggaggtggcgggtggcggagctcgcggcggggctctccggcgagggccgacgcgcgcaggagtacctgtgcgggttggcgcccaagatccggaggatggaggagctggcccaccggagggcggcccgcatcgagcccgccatggccngtttcagctggatcttcgataggcccgtcatgctgggctgatcaaccc

SEQ ID NO: 26133 - DNA, 381 bp, Oryza sativa
  Clone ID: uC-osflM202052f11b1
tacgtttcctccgggtccgccgctactcctccgctccgctgcctgcctagcctagccttcgccgtcgccgccgccgccgccgccctcgccgttgattccgccgcccgccgcgtgatggacggggaggaggcgccgccgggagcgctcaacctggacgactacgcccccgccggggcccgcaccgtcgactgcttcaggcgcattcataggaacggcgagggcacctacggagaagaattcgaggctatggatattataactggagaaagagcctgcacttaagaaaatcaaactgcggtgatggcacataatggctccaaggctataacttgcgtgagattaaactattaaaaaagcttgatcacgatgacaccattcaga

SEQ ID NO: 26134 - DNA, 174 bp, Oryza sativa
  Clone ID: uC-osflM202052g06b1
taccttatctcctttccccccaccacctccagagatatttccccacctccgccgccgccgccgccatggagtccggcctcgtcgcaagccaccgcctccgcgtccccttcgccgccgcccaccaccgccaccacccggccgcgccgccgcacctcctccgccagcggcggtgca

SEQ ID NO: 26135 - DNA, 370 bp, Oryza sativa
  Clone ID: uC-osflM202052g08b1
tctgctgcatgccgcatgctcctactgctcctatatacatcccatcctcgccgcgatttccttcgccgccgccgccgaatatagtcttcttccccggcgccggggcacgcgaaaagggtttgcttctagcagaatatgtcgtgctttgcatgctgtggagatgaagatactcaaggagtaccagacaacaggaatccatacccagggaaccatccagcaaggagcgatgcatatcgcacagctgatccaactccaagaggtcctcaacctgtgaaagtgcaaccaattgcagtccccatcattcctggtgatgaaattagggaagtgactaacaaatgtggtgatgaagctttgattggtgaaggttcct

SEQ ID NO: 26136 - DNA, 467 bp, Oryza sativa
  Clone ID: uC-osflM202052g09b1
tgcatattcgcttggcgtcgatcctgtatggcatggtagccgcagtgagctgccttttcttaactccttgaagatgaagctgtctattcttattggagttgcacaaatgaaccttggaataatgatgagttactttaacgcaaagtttttcagaaatgctattaatgtttggtatcagtttattcctcagctgatattcttgaacagcttatttggttacctttcactcctcatcattattaagtggtgcacgggctcaaaagctgacctttaccatgtgatgatatatatgttcctgagtccaactgatgatcttggggagaacgagctatttcctgggcagaaactagtgcagcttgtactacttctgcttgctctggtttctgtgccttggatgctgattccgaaaccatttttcctgaagaagcaacatgagcagaggcaccaaggcccgcagtacaccatgc

SEQ ID NO: 26137 - DNA, 243 bp, Oryza sativa
  Clone ID: uC-osflM202052g10b1
tacgcacggacggacgccatggacgaagccctggtgggcaggctggaggccgcggtgtcccggctcgaagctctcaatggcgccgccggtgccacggcgagaggcggctacggcggccaggtcgaccacgcgtcggcgcatgacccagcgatcctggcgttcgacgagctcgtctgccgcgccgtcgggagggtgtcggcggccgccggcaagatcggacgctgaggtccctgaggtgaccag

SEQ ID NO: 26138 - DNA, 423 bp, Oryza sativa
  Clone ID: uC-osflM202052g12b1
tatccagttattttaactaggcttaagcaaaagcaagaggaatggtcaaggtgccggtcagattttaataaagtttgggctgaaatatacgctaagaattatcacaagtcccttgatcatcgcagcttctatttcaaacaacaggacacaaagaatctgagtacaaaagctctattagctgcaatcaaagaagttaatgagaagaaaaggacggaggatgatatgcttcttactattgcttctgggaataggcggccaatagttcccaatatgtcatttgagtatgtagacccagaaattcatgaagatctttatcagatcatcaagtcctcttgtggagaagtctgcagttcttcggatcaaggttgccaagtgatgaaaatctgggctacattttctggagcctattttgggtgttccatc

SEQ ID NO: 26139 - DNA, 108 bp, Oryza sativa
  Clone ID: uC-osflM202052h01b1
ctcacctcgtgtctcgcggagtccggagagcagtggctctgctcatggagtcccgccgcgtcgtagcagcagggcggagccatgtcgttcgggaagggaggttgaggc

SEQ ID NO: 26140 - DNA, 168 bp, Oryza sativa
  Clone ID: uC-osflM202052h02b1
cccacgcgtccgttagcagagagagagaagagagcggcaccgtgtgttgtttcaagagagcgagggttacatgcccaccgccaccatggacctctcgcccccggcgctggccggcaaggccgccgcgaaggtgcacggcgaggggcgcatcaccatgcgcaagacagc

SEQ ID NO: 26141 - DNA, 459 bp, Oryza sativa
  Clone ID: uC-osflM202052h04b1
tggagaggtcgtagccgtcggtgccgttcccgttgctgcaggcgccggaggagagcgcgatacagggcctgtcaccatccacctaccgcttcgactgcgacaacccgcgaaagggcacccccgtcaagatccagtggagcgacctcttcctcaactgcgtgccctccttcaggcagcgcgcggagaacgaccccacggtgcccgatgcgcccgccaaggccgagaagtttgcccagaggtacactgcaatgctcgaggagttgaagaagaacccagagagtaatggagggccaccagattgcattcttctttgcaggcttcgtgagctagtccttagagaactgggatttagggatatattcaagaaggttaaggatgaggagaatgctaaggctatgtcactctttgagggcgttggtcagcgaaatgatgagattgaagatgatgggaaacgagcag

SEQ ID NO: 26142 - DNA, 302 bp, Oryza sativa
  Clone ID: uC-osflM202052h05b1
ttcaaaaggctaaacctcgattacgcctccccaaacccgccgcgaaacgaagcgaaagcgagttcctccgatcccgaccacttgctcttctcatggcgtcctcccacatcatccttccgccggacgacgacgacgaggagcagcgccggctggaggaggaggaggacgaggatccgcgggcgcggagcgggcctccccccggggcgccagagcacgcgatgtaggcggcgctggcggatgcaagacgtgcgtgccgctctgaggcgactcctaccagaacactccaaggactgcgcaacgcc

SEQ ID NO: 26143 - DNA, 251 bp, Oryza sativa
  Clone ID: uC-osflM202052h10b1
taccatctccatctcctcccttcacccccgatcgcattcgctgccgcccactccgtgctcgcctcgcctcccctcagagagattaaagcagcagcggctttctttcctctgcgtttcttggattgcagcaaaatcgatcccccccccccctccccccgcgttccaattttggtggtggattgcagctcttgcgccatcgctttgggtgggactctggccccccgtggtaaggagagggctcctctgggggg

SEQ ID NO: 26144 - DNA, 146 bp, Oryza sativa
  Clone ID: uC-osflM202053a01b1
ttaaaagcaagtgaggtttcagacttcagaggtgctctggaggagtttggtctcgagcatcatctctctgaagcctgagagagattcagctccgattaccacttgaccatggcgagcaaatacagaggctactaccacgacgaggc

SEQ ID NO: 26145 - DNA, 281 bp, Oryza sativa
  Clone ID: uC-osflM202053a03b1
tcgttcggaggagcagccgtacgagtgcgtgcggtggttcgacgcgcagcccccggcgtccgggctctttctctgcttcggcagcaaggggctcctgccgccgcccaaggtgcgggagatagccgccgcgctggaacgcagcggcggtcaccgcttcctgtgggtgctgcgcggcccgcccaaggacagtcggcaggggcagccgggtggcccacggacgccatgctcgacgagctcctccccgaggggttcttggagaggaccaaggggagggggctcgt

SEQ ID NO: 26146 - DNA, 532 bp, Oryza sativa
  Clone ID: uC-osflM202053a05b1
ttcgttagaggggagccaacggaatatttatgcaaaagcttgtactggcctgagaagggtgcatttttctcccttcctcatgataagctggcacttgcggatgagcaatgatgctcttgtcagcagaaagagccagacggtgatgaattgcaaatactatccaagaacagcttcatttacagaaacattacctacaatgtcaatgactatttgtatgctacacctggctatttctctcaagaggaggatcgtgcaaccttcaagggagggcgaaatgtgggtctaaagccctatgtagtttgccatctattggatgtccatgaacctgctggatccagaaaaattcatccagcatcaacaaaaatcagtgttagaagattttacagaccagatgacatttcatcagccaaagcttatgtttctgaccattgagagggttactattgggaaaaatagttaaagtgcctgtggtatgatagagggaaaagtgaggccaaaagaagacgacatctcaacttagatgttccaggat

SEQ ID NO: 26147 - DNA, 448 bp, Oryza sativa
  Clone ID: uC-osflM202053a09b1
cgttcgtttaccagcaagaccatacaactgcccagactagtatctttgacgctgacatctagagcatgatggtctgccgatggagaacgtctattatacacagggcgaattactggtgagggatggtatgacatctactatggacatgagagacggatatgctgatgatgaggggtctgcccttaatcaacataccaatgatggcattcttactgtgtcgaaaagtttgccggaacgcacagataaaagcactagtctggatgattcaaaaaagtggcacttagatcctgccgagacatatagtgcgggttacaaaagatcaaagacaaataagcacaagaaaaatttggattcagatgcatatggaaatggggagagcacttccgtatccaatgatgatgacgggtatcaacctacagattacagttctgttaaacctgatagggct

SEQ ID NO: 26148 - DNA, 493 bp, Oryza sativa
  Clone ID: uC-osflM202053a10b1
ttcgttcggagtgagcggcagcaagtgttcactgcgttcttcttctcgatgtatctttcttggtttctcgatctgtagcttattagcggccatgtgcggcggagcaatgatctccgggttcatcccgccgtcggccgctgcggcggcggcggctgcggcggccaagaagcagcagggcaggagggtcacggtcgacgtgctgaggccgtggatgctgcagaaggggaaggcggtggcggcggaggaggactatgcggccgactttcgcgagttcgagcgtggcatgagcgacgaccaggcggaaggtggcatccccaaggtactactgcacggtcatcgatgcccctgggcaccgggactttatcaagaacatgatcacgggtaccttccgggctgactgtgccgcgcgcatcattgactccaccactggtggtttgaggctggtatcttcaaggatggccaacccgtgagcaccctctttttgttttacttc

SEQ ID NO: 26149 - DNA, 309 bp, Oryza sativa
  Clone ID: uC-osflM202053a12b1
cttccaaatttcatatggcttcatttcttattccaatttaaaatctgtaacaaggattccatccgaattatttaaattagaacccatgtctcgatactcaattagagcgacatgtatccactagcagcgtcatttacagagacactacctacactgtgaatgactatttgtgtattagacccctctctttctttctcgagaggatggtcgtcttcctccgcaacgcctggtacgccatcgccgccttcaccttctccgatatctcctccgcgccgatcaccccggcctccccctcccagctccaggtgt

SEQ ID NO: 26150 - DNA, 544 bp, Oryza sativa
  unsure (1)..(544): unsure at all n locations
  Clone ID: uC-osflM202053b03b1
gtgaccaccaccacggtaccacccacctcccatctcccccatctccggcgatcgccggcggcgagatggacctcctcgtggcgcagatcacggccgacctgaggtcgtcggacgcgctgcggcagtcgtcggcgctgctgcaggcgctgcagcagtgcgcggcggggcgggacgtgtccgcggtggcgcgcaccgtggcgaccgagatcctggcggcgccgtcgtcggcggtatgcaagcgcctcgcgctcgacctcctccgcgctctcccgctgccccccgacctcctcgacccgctgctgctctcctccctcgcctccgacctctccttcccggacccggacgtcgccgcctcgtccatcgcctcgttcccctcgctcccttcccacctcctgccgtagctcctctcctgggaccacgccgacatagacgccgcgctctgctaccccgacgagtcgctccgactcgcnggggtgacctcgctctctcgctcctccgcgggacgacctcgcgctatgtgctcctccaacccgtcgtcatgcgc

SEQ ID NO: 26151 - DNA, 528 bp, Oryza sativa
  unsure (1)..(528): unsure at all n locations
  Clone ID: uC-osflM202053b09b1
tctgtttgagcttggagagagacaacaatggcggctcaggctcttctctctgggaggcagctgctggggaggccattgcaatcttcagtctccaggtcttcttcctccaggaaggcacccttcatggtcagggcagaggccactccccctgccaagcaaggtgctgacaggcagctgtggttcgcatccaagcagtccctgagctacctggatggcacgcttccgggagacttcgggttcgacccgctggggctatcggacccggaggggaccggtgggttcatcgagccacggtggctggcctacggcgaggtgttcaacggccggacggcgatgatgggcgtcgtcggcatggtcgccccggagctcctcggcaagctgggcctcgtccccgccgagacggcgatcccgtggttccagaccggcgtgaacccccccgcgggcacctacacctactgngccgacccttacactctttttggcttcgagctcgccctcgccggcttgccgagcaccgccgtttcagga

SEQ ID NO: 26152 - DNA, 488 bp, Oryza sativa
  Clone ID: uC-osflM202053b10b1
tcgtatcatcaagtcctattaaacatttggagaatggctgaagaaaagaagaccccatgcctgaatgagcggatcctgtcgtcgctctcgaagcgatccgtggctgcgcattcctggcatgatcttgagattggacctggagctcctcaggttttcaatgttgttgttgagatcacaaaggggagcaaagtgaagtatgagcttgacaagaagactggaatgatcaaggttgacagggtgctatactcatcggtggtgtacccgcacaactacggtttcataccgtgaacgctgtgcgaagatgggggatccaatgggatgtgcttggtcctgatgcaggaaccagtgattcctggctgctaccttagagccatggccattggcctcatgcctatgattgatcagggtgaggaagatgataagaccatgggggattgcgttgatgatcccgtgtttcgccccttatatgatataaggtgttttttttc

SEQ ID NO: 26153 - DNA, 589 bp, Oryza sativa
  Clone ID: uC-osflM202053c05b1
gcctgctggtgccgctgcggaattaattgctggaccgacgcacgcgtttgttcccaacgaccgcccttgagaagatgctggcagtccggtgctagctcttctgtgctatggatccttggctggcgacatgtaacggccgagattgatatcgccaacatgacggcgctacataaacatgtttcgttcttggaccggaacaaggatggcattatcactccgtctgagaccattgatgggattgttgcaatcggttgtgactatgcatttgctagagactgtgccgcccctgtgcatgctggtcttggtcctaaaacaagccccaaggacgcaccattacctcacttgtcgatatacataaagaacatctataaaggaatgcacgggagtgacacaggtgcactagatgctaaaggaagggaacaccaaccacatgcctatatatacatatcttacataagtgttagaagatatcacatgatatcatataatgaatggtcaagcatattaacagtaatatgtgatgcatatgcatctaaatagcaggatagttacatattattagtttaaatgctttaggagtacatacaaa

SEQ ID NO: 26154 - DNA, 496 bp, Oryza sativa
  Clone ID: uC-osflM202053d02b1
ctcctcggttcggttccgtggttcgtctagggtttagtgggttgagatggcagcgctaaagcctgattgcgacatagttggtgacaatctctgtggcaagagtttcactgaggcattcgatgcggcctgcttcccacttacactattctcaactttatttgaacctggatggtcttctgggagttcagcagtctgccatacaagggcttttgtcattgctggtggaaggaggtgctgagaatgtaaatcagtgttttctagaagcttcacgtttctggaagtactgagcttgttcgcattttgctaaagattgcctatcagaacagcttggctgtcgatggcgatcttgctctagtctatgcttctcactactgcaaatttgaaacgatggcatgcttggtggatgaagggcatgccacatttttcctttggcccttagttacagcttttgagcgtggttgcttgtcggttgtccattggttcgccacccgtcttg

SEQ ID NO: 26155 - DNA, 485 bp, Oryza sativa
  unsure (1)..(485): unsure at all n locations
  Clone ID: uC-osflM202053d04b1
tttctgtcgtccaatttggatatctacagcatctgaattggatataacttataactcataagtggcatgtctgcgaaggttgcaaggcacctagaagctaattacgttgggatggcagattgggctggtcttcagactgatatccttggtgtaattgtaaagaagcttgccgtccctgactatctgagattccgtgctgtatgcacatcttggaaccatctctgtagggatgtattcaactgtccaaggatagacccatggctgatgctccctacaaatgcgctgaatgattctaaatttttgtgtgtacctgaaaggaagaaccaaaccattcgtctgccgagcactgatacaatctttggctccacctggattcctgtatggttcttcccatggttggctcatcttttacagcccatctcatggaaccatgcagctggttaatcccatangtggcatgcagttcaatcttcccccaatcggac

SEQ ID NO: 26156 - DNA, 455 bp, Oryza sativa
  Clone ID: uC-osflM202053d07b1
tcgtaaggcggccggggtggggatcctgctgcagatatcgatgctggtggtctccttcgtgctcggccacgtcctccgccgccgcaaggtctactacatccccgaggccagcgcctccctcctcatcgggatgattgttggcggccttgctaagatatcaaacactcaaagaagtattaggagatggttcaattttcgggaggactccttccttcttttcttacttcctccaattatatttcagtctggattcagcttagcaccaaaaccattcttttcaaattttggtgccattataacatttgcaatcttgggaaccttcattgcttctattgtcactggtcttttagtatacgttggcgggctaatatacattgtctttaagtcgcccctggctgcgtgcatgatggttcggcgctctggtgttaggcacctgatcctggtccagcactgcc

SEQ ID NO: 26157 - DNA, 468 bp, Oryza sativa
  unsure (1)..(468): unsure at all n locations
  Clone ID: uC-osflM202053d08b1
tcttagtgttacaaagcaaactgcagcactcaccaagaggtacagttccatctatcagcgtttaaagccttcttggacatagctggtgacaatctcagtggcaagattttcactgaggcattcgatgcggcctgcttcccacttacactattctcaactttatttgaacctggatggtcttctgggagttcagcagttgccatacaagggcttttgtcattgctggtggaaggaggtgctgagaatgtaaatcagtgttttctagaagcttcacgttttggaagtactgagcttgtacgcattctgctaaagattgctcatcagaacagcttggctgtcgatgtcgatcttgctctagtctatgcttctcactactgcaaatttgaaacgatggcatgcttggtggatgaagggcatgccacatctntcctttgtcccttagtaaaagcttttgagcgtggttgcttg

SEQ ID NO: 26158 - DNA, 303 bp, Oryza sativa
  Clone ID: uC-osflM202053d11b1
tcgtgggtgcacctgagcagattctccaccttgctcataacaaaccggagatagagcggagggtccatgctgtgattgacaaatttgcagaacgtggacttagatcgcttgctgtagcataccaggaagtaccagaggggacgaaagaaagccctggtggcccatggcattttgttggtctcatgccactttttgatcctccaaggcacgacagtgctgaaacaattcggcgggcacttaatcttggtgtcaatgtcaagatgatcacaggtgatcagctggcaattggaaaagaaacaggcg

SEQ ID NO: 26159 - DNA, 249 bp, Oryza sativa
  Clone ID: uC-osflM202053d12b1
tcgtattctcctcacctgacctcacacgccgcgtgggtgacattgacagccgggccccaccacagaccgcgacggccatggaccacgatcccaaggagcggctcctcctgacgtcccgcgccgaggaggtggtggcggacaatggggcccaccgtcgcgccgcgcccgatgtgggcggtggtgggggcggcgtggacattgacaggcacgggctgaagaggcgcggtggggggccgcagtcgtgggggc

SEQ ID NO: 26160 - DNA, 423 bp, Oryza sativa
  Clone ID: uC-osflM202053e02b1
taacctctcgcagaatagacacaggctttgcttcgtttcatggaagaacacacacagagatagaggtgacgagcgagagagggtaataaaccgttgtgtctcactgggggagggaatgatgtccgaaggcgaggagcacgggtcgctgctggagaagatcaacgacatgatccatgagttcaagaagggatcgtcgtcatcctcgacctaggactccgactacgacaagaagcaccaccacatgtccaagtacaagaagaagctgttcttcggccggacgaacccgctacatcacgttctaggaggaggcactgctgctgatcttgtgctgcggagggacaagcagacgtcagggagcatcctggccggagtgaccgtgatctggtagctgttcgaggggatcggttaccactcttctaacct

SEQ ID NO: 26161 - DNA, 558 bp, Oryza sativa
  Clone ID: uC-osflM202053e04b1
tcgttgactctacaccgagaggtggggcgaattgaaacctcaagatgggcatgccagtgcacctatcgtcagccttacgagtggctgactcaccactgtgccagcgaaggctcatcaggttcttagcatgagcaggacagaacctgtctctattaagagttgtctgtcaccgaatttcatcaaggatcaaaagatgagctgctggactcgctgtgtgtatgattgcaatactgaacttatccgtcttcaaattagggatcagaaggcaaagaacggcatggttgtcgctcgggagttggtcggagtaacaaagtcatcaaagaaaccatttaagctagcagagttcgtggacaacaagtggtcactgagcaactctaacttatgcatcactaatgacatgaaaccaagcaaggatggctctatacttgagctcaaatgtgacaacaaaacgatcaaactctaccagggaaagaggctagaatttcaacggaagtgctgcaacaatcacgcagaggagaatgcttcagctattactgctgtgaagttctctgctgaaca

SEQ ID NO: 26162 - DNA, 470 bp, Oryza sativa
  Clone ID: uC-osflM202053e05b1
gcgttcgttctcgaggaagatcaagacaatcggccctcttgagctccggatcctcagaaagggaaccttcaaggagatcctagatcatttcctgagccttggtggtgcggtgagccagttcaagacaccaaggtttgtgaacccatcaaacagcatggtgttgcagatactgagtagaaatgtcacccaaagttatttcagtactgcctatggattttgatacaaagaaacatattagatgctagcagctgcatgtaattacctttttacctcttgtttttcagctttactgtagtctccaccggaagaaaacgtttggtttagtctcttgaataatctattttcttatcctgtttgtgactatctagaatctatgtaaatggcccagctctagtgaaagttatggttgatgttatcaggaaagaaaatgtggtgttttccgttaattataaactatccttctttttacc

SEQ ID NO: 26163 - DNA, 157 bp, Oryza sativa
  Clone ID: uC-osflM202053e07b1
tagaaggagaggagcagccatggcgtcgtcggtggcagcggcggcgagcacgttcctggggacgaggctggcggacccggcgccgcagagcgggaggatcgtggcgaggttcgggttcggcggcgggaagaaggcggcggtgatgaaggcggtgagg

SEQ ID NO: 26164 - DNA, 572 bp, Oryza sativa
  Clone ID: uC-osflM202053f01b1
ggctcgcccgccggtaccggccgggactgaatggctgggccgacccacgcgttcgttcagatagtggaagggccagacgcagggatggcgatctgcaggctatatgccaccacctgcctgcactcccgatgcaccaccagcacaagctggaggcagagtcaggtcatcttcttcaccaccagaagcaacaggaggggtagcacaaggtacggaggagcaggaacctttcaggtttcatgctcagtcgacaagccagtggtgattggccttgcagcagactcaggatgcgggaagagcacctttatgcgccggctcaccagtgtgtttggtggtgctgcagagccacccaagggtggcaacccagactcaaacacactcatcagtgacacgacaacggtgatatgcctcgatgactaccattccttggacaggactggcaggaaggagaaaggtgtgactgccctggaccctagggcaaacgattctgatctcatgtatgagcaggtgaaggcaatcaaagaagggcaggcaattgagaagccaatctacaaccatgttactggtcttctaga

SEQ ID NO: 26165 - DNA, 394 bp, Oryza sativa
  Clone ID: uC-osflM202053f03b1
gttcacccaaaccgcgatttctgatcgatcgatcgttagctcgatccaagaacccatcttttctttgatccccaatcctcttttgccgaggattaattgggagaagatgacgatgatggggtgtgccgtgctgctcgtggtggtggcgtccatggcggcggaggcggcgggaaggacaatgactgcatactacaggatgggtggatatgctcttcaggccgcatatatattgtccaaagaaggaatcagtgctgaggtgataaaccttcgttcaattagaccacttgatagagctactatcaatgcatctgttagaaaaacaaattgattggtgaccattgaggaaagctttccacagaatgggattggtgctgagatatgcatgtctgttgtt

SEQ ID NO: 26166 - DNA, 523 bp, Oryza sativa
  Clone ID: uC-osflM202053f04b1
ttaatacaaattaaacctattgtgcgaacatccctgttcctctgctccagtgtttacattgctacaagtttctttgcatatctcctcttcggcgagggtaccctagatgatgttctcgctaacttcgatgcaaatcttgggattccatttagttccgtctttgatgatatagtgcgagtgagctatgctgctcacgttatgcttgtctttcccatagtcttctttgcccttaggctcaacttggatggactgctcttccccacatcaaggcacttttctcgtgacaacaagagatttgccataatcactatctcactcctcacagtaatttatcttgctgccattttcataccgagcatttgggatgcattccagtttactggtgcaactgctgctgtcctgattggtttcatcttccctgccatggttatacttagggatccttatggaatcgcattcaagcgtgacaagatcttggctgtaaccatgatcgtgcttgctgtcctcttcaattcttgtgcta

SEQ ID NO: 26167 - DNA, 421 bp, Oryza sativa
  Clone ID: uC-osflM202053f07b1
tcgttgaaatatggttgtagcagttcggaggatcatcaatttgttagaggtataccaatatatgcaataagtcaagtccttgagaaggtaatctctggtactcctggaccatttcgtattatcaatggagttaggaggccaataccattcatcagacttctggaggtggaactctatccaactttgctttcaaaggcaagaagttatggattgagtgatagctgggtgcaggctctagctaagaaggaccctgtgcgaagacaaggtttgcgggtcaaaggttgtttggctggatcccaagcagaaaattcccttgaacagggagacatgaaccctgctataataaggagccaattcaggcttctagatttgagaatgcttgccgaaattgaccaatctgttgttcagatggagccttaca

SEQ ID NO: 26168 - DNA, 527 bp, Oryza sativa
  Clone ID: uC-osflM202053f11b1
tcgtcaccattagccatcaacgaccagcatctcggctttgctcgccttctcgaagcttctgctgccatggcggaccagctcttcgaagagcagattgtagagttcagggaggccttcagcctcttcgacaaggacggcgacgggtctatcaccaccaaggagctaggaaccgtgatgcgaagtctgtggcagaacccaacagaggcggtgctgcatgacatgatcagcgaggtggacacgctcagcaaccgcaccatcgcattcaaggagttcctgggcctgaaggcgcgcaagctgagggacatggactctcgggaggagctgagggaggcactcaccgcattctacagggccccgatccgcaccatatccacaggcacgctcatacacacgatggccgacatgacagcgatattcaccgcacccgtatggtcacacgtacccaccacctgcaaaaggacagcccacatatccacctgcgccctatgcttcaacttaaccaccagcaccatattgatatggcacac

SEQ ID NO: 26169 - DNA, 350 bp, Oryza sativa
  Clone ID: uC-osflM202053f12b1
tcgtctagctagaccaacccacccagccatgaagaatgacgacgacaatgggtagctgttcctcgacgccgctgtaccgaggttttagacacagtggggcaggcgctatgcccatttctcgcgtcccgagaggcagccgtaactcgccatcaccacctcccgatccgcgcgctttctctcccgcgccccctgcggatctgccggctctggaagggcgagagggcgctggagtcgtctcggtggcgctagggttgaagctggtgggggaaggaggtggattggcatgcggttcagagtgggtcgcgggaacaaaggcatcaaagaaaccagtgttgtggtctctctctttg

SEQ ID NO: 26170 - DNA, 541 bp, Oryza sativa
  Clone ID: uC-osflM202053g01b1
gccccacccgtacgttttaaagggaaactactatgtcggtgctccaaaccaagacattggggggtgtgtgcaggaaggaggcttctggcaccgccgcggacctggtggactcgattagcacgtacaggatgatgaacgactagttggtcgcgcatgtcacacacaaggacaggaaagagatcgagctcgacctcgacctcaacctcgagtaagcaaggatgcagtgctactcgtacggcgacggaggggtcaatcgacggtgtagagcacaatacgtacgatctgctaatagtcttagttctgattgagacgccctctggcttcgcaatgttcggtatgagtggggacagactcatgtaaccaaatgccctgcaggaaatctgggcaaactttggcgtgcactataagttcatttggctgaaggaatttcgagaaatcaaggacaagtccagtgccattaatcatgatactggtgtcagatgcgaccttgctgagatgatcatgaagtggcatcaccctgggcagaaaatggccgttgaaa

SEQ ID NO: 26171 - DNA, 505 bp, Oryza sativa
  Clone ID: uC-osflM202053g03b1
accggaacggaatggctggaccaacgcatgcgtgctttcatgttaggagacagggagagggaggaggcccatggttcaaatgagtgcaatgactgctatccaggtagactgaacacgggctgccaaatcactgcaggatgcacggcaccagcttcaagttgacaacgaggagacagaaaagctgcacgagaggctggtgtacactgaatcagcgtgtgctgaggctagcacggctctgcatgaggcagagactgataaagagagtcttgaagagaaactgagatacacagaagctgctgttgctgaagccaacaagtctgtgcaggaggcaacatatgaaaattcacaactgaaggagcgattactagataaagagaacgcactgcagagcctaacccaggagaacgacgagttcaggttgcgagaagctgatgccatgaagaagatagatgaattgtctgccttgcttgctgaagcgatgatacagaaacatcccgaggaggag

SEQ ID NO: 26172 - DNA, 558 bp, Oryza sativa
  Clone ID: uC-osflM202053g05b1
cttccttcctcgacccacccgtcctttctttccgcttctctagtctagtccacaggctggttcccacccgataggcgctgcctggtgctgtgtggtgtggtgaggtgcggcggtcgaggactacctcaggagctcttcccatctcactcttcttcacacttctgtccttgtgcctctgcgtctctgtgcccctttcgctcctctgcctttttctcggcttctggcccgttcccttctcttctcctgttccctcctctctctttttccccctcttttttccttctcactctttctctcttcgcttccttccactctcctctcttattcctcttcttctttctctcctcttctttcctttcttcccttctcctcttccccttccctcccctctcctcctcttctctcctcttcttcccctctcccttcctcccttttcctctttttcccccttttccccttttctttttcctttctccccccttcccttttccccttctcttcttctctctcttccctctctcttctttcctttccctcctttttctcttttccctctct

SEQ ID NO: 26173 - DNA, 216 bp, Oryza sativa
  Clone ID: uC-osflM202053g06b1
cttgagcgagaggagaggaggaggaggaggaggctagatatggtggcaccgaacggtaaggcagggggaagggagccagagacgctagaggaggcagtgagagctggatggaaccaggagtgcgctgagcatgaccagtgcgtcttcttccaactggaaacgatagagaagactccttgtctcacaaagatcaaatctatattccgtggaccatta

SEQ ID NO: 26174 - DNA, 169 bp, Oryza sativa
  Clone ID: uC-osflM202053g08b1
tccgtaagaatggggaaatgccaccaagaccgaagcacaaggcctagcgctagccctgtaccgcgccgacgcggaggaggcacaaggcagagcaataactgaaagaaggcgaaaacgaactgcaaagagacaacgaggagaaagaaaagcttcaagagaggatggagac

SEQ ID NO: 26175 - DNA, 374 bp, Oryza sativa
  Clone ID: uC-osflM202053g09b1
tcgttcatttttggagatatggggaaggctgaggccgatggttcaaatgagtgcaatgacttcgagcctggttcactgaacacgacctaccagctaattaaagatttgaagaatattgatatggtaatacatattggggacatctgctatgctaatggttatctgtcacaatgggatcaatttaccgcacaagttgaacccattgcatccagtgtgccttacatggttggaagcggcaaccatgaaagagattggcctggatcaggttccttctatgggaatttggattcaggtggtgaatgcggtgtaccagctcagaatatgttctacgtgccagcagagaaccgggagcaattctgggtcttcgatgacta

SEQ ID NO: 26176 - DNA, 165 bp, Oryza sativa
  Clone ID: uC-osflM202053g10b1
tcgtggagatctgtctcctggtcaacagcctgtgtcttccctggaattggctttgtggtccttacaaccaagggtgcggtcggggtggcgcgcgccgacactggcgtcgcaaaacgccgacgttgcaaggatggtccggtcacccggccggcgcgacctagggtg

SEQ ID NO: 26177 - DNA, 143 bp, Oryza sativa
  Clone ID: uC-osflM202053g12b1
tcgttctcactcaccgaagctacccagctctattgccccgctacttgatcgatcagcaggctagatatggtggctccgaacgggaaggcgggggaaaggagccagagacactagaggaggcagcgagagctgggtgcacagag

SEQ ID NO: 26178 - DNA, 187 bp, Oryza sativa
  unsure (1)..(187): unsure at all n locations
  Clone ID: uC-osflM202053h03b1
ttgtcttcccctctgcgtcgaaggaaatctcccgtctcgtcgtcgctccttgcgccgatctccatcccgcgagtcgcgagcagagagcaggggaggggaggggaggggcncagangcacntnctgctccatcctgactatgctcttcctaatagaggtcccatagtcggacggaggatgctcacgga

SEQ ID NO: 26179 - DNA, 317 bp, Oryza sativa
  Clone ID: uC-osflM202053h07b1
aaaactcccataaacccctcctctaggagagagagcttagagctcaccgacgacacgagaacccaagcaacccccccacacccagctgagtagcggacgcagcaccagcagtcgcggggaaagggacacgtctagccgccccagcttcccgcctccctgccatgccgacgccgcggacgcgtccaagccacaggaacagcaaccactccgacgaacacctcgcctgcgcgatggaggcggcggcgctggacgcgatggcggggacgaggtgggggcaggtggctggcgcctcgagacggccgtgtgggcgcagggcc

SEQ ID NO: 26180 - DNA, 438 bp, Oryza sativa
  unsure (1)..(438): unsure at all n locations
  Clone ID: uC-osflM202053h10b1
tcgttgaccaacaagtccatagtactccccagactatatccttgaagctgaaattcagatcaagaagctttgcagatggagcaggttcatcagacaaatcaagaattactactgcagtagggaatgacatgaactctgaacatgataaaggtcatatgctgcatgatgagggttctgcccttaatcaacatacgaatgatggcatccttactgtgtcgaaaagtttgccggaacgcacagataaaagcactagtctggatgattcaaaaaagtggcacttagatcctgcaaagacatatagtgcagtttacaaaagatcaaagacaaataagcacaagaaaaatttggattcagatgcatatggaaatggggagagcacttccgtatccatgatgatgacggntatcaacctacagnatacagtcctgttaaacctga

SEQ ID NO: 26181 - DNA, 431 bp, Oryza sativa
  Clone ID: uC-osflM202053h12b1
tcgtacaaatgctggctacatggttacagatggccttgtcattgctgctgggagcagctgggcgacgaactctatggaaggttggcaaaagaatagggaccgagtgagcagcttggatgatgagacattgagccgtcaaggagtagcaagaaggtaagcactggcgaggtagtaaggatccacgcgtggaggcaggaagacaggagatggctactcattgcaggggtgagtttgggcatgtcatctggaagcacacatcgtggggaggaaaaggaaaagaatataaggtacccatgctgcacgaatgttggctcaatctgggtcggccatgcaaaagaggataaactatccagaatcgaaacccacatgccgaggtcaatcgcacatcaaggttgatactgactacaagaatgggctagtgcgattttgtt

SEQ ID NO: 26182 - DNA, 425 bp, Oryza sativa
  Clone ID: uC-osflM202065a02a1
aatcaagatagcgctatattagtatatttcacttgcaaaatacaacaacggaatcagaaagctgccagccaaggccatgaacgctgcaggcgccacggcattgcagcagcaatctcacacgattacaacacggataaatacagcaagctcaaaaaggaaaaaaaaaacacggacggagaaacaacgtaatctgctgatgagcgtacgagaagccttcaggatcctgaattcctccctttcttatattcggtgcacgtatcgtctcttcctggatcttgtcgcgttcgcgggtggactggttcgatcagcagatgggcaggggctcgccgttccactccttgaggcactcgagcatcgggtcgatgagcttgcgctcgctgatggccaggaacaccttgttgcactcctcgccgggggacttgagc

SEQ ID NO: 26183 - DNA, 452 bp, Oryza sativa
  Clone ID: uC-osflM202065a03a1
ttttgttaattagaacgggctctgtaacaataatatgaataaataatttacagactttttagatactaataacaaaacacaagaaaacaccaccaggtaagtggcatccattatcctcccatcactagtcggctcgctgaaaagtacgaaacacatacggtgaaattgtacattttatcttggactatatgtatctctgtacaggagaataccccattattccattgagccacacaaatggcaacactggcatatctggccacgcaaaatgagcggctccatcaccagcaagagttcctcccacccccttcccaaaatcacggtgttagtaagaaacatgaccaccgatgatcaattaaccagattaccagagcaatgtgcccaccagaacacttttgtcatgtgaagacaacagctgaagattgcttgaagctggaaccggttgctttatt

SEQ ID NO: 26184 - DNA, 454 bp, Oryza sativa
  Clone ID: uC-osflM202065a04a1
tttttgtttttttgaagttaaccaccatttttcgcactaacataaattagccaaaataattatttctgacaaggatagatatctcaacaatcagatcatagtccagctagttctatccagaaattgaattttacagtaatgttacaacccttcatcttagtgaagtatttgggcttaaagattgcatcctccttgcagttctatggaagagcagccgatgtcaccaccaagtataagaaagctctgagaacctagatgtgtccagcaaatttacatactcctagctaggaaagtagcaaggcctcagaaagatagcagtgctaccagaacacatactaggctcctgctaatctacacaatacaaatcactaagctagacataagccaagaagaagctaggaaatgattctaaaccccaggaggcaaaacttacaagcaagagcacttcaaaaac

SEQ ID NO: 26185 - DNA, 447 bp, Oryza sativa
  Clone ID: uC-osflM202065a05a1
cctcatgaagattcacaatttcacatttaaccaaatagtaaatgacagggttacgtacagaagttacaacacaaattatacaaattattcgatctaacaatgtcagaaatggtcatacatgatagaagttctttttttggctattacagagtacagggtgcttcagctatttctcatccatgctcaactgcaaacaccgaagctaagtatatattggatcctacgatagcacaccgttagctccaataatattgttacaacgacttttgctaacaatttacaccgaaggaaatcagcgtaggagtacatcagcacaaggacacctaagattcaccaacctgaatcgtatgcagctctgctgctctttgttttcattgatgcccctccgtcttcggcggtatgctgcggacgttcttgaggaggtcgtgaatcttgagagcatggcgt

SEQ ID NO: 26186 - DNA, 412 bp, Oryza sativa
  Clone ID: uC-osflM202065a06a1
gttggaaatagtcaaccgtgacacaaataaataacatcattcggtcatacatagttttaacaatagatataataaaagtaaaagactcctccctcctcaccagcacatagcacagcctagcaactacaaaaattcccataacatggcataaaaatttggaaattgtctacgaccacagtgacttttaaaacagaacccccacctttatcactcccccccccccccagataagacagtgatacttcagacaaaaacaatccttatcaggccccttaacataactcttctgaacttgatcacagaaggtcagcgacgttggccggcagctcctcaatcaccacattgtagaacctctggatgtcaaacagcattctctcattgtcacgggtcacaaagttaatgggaacacctt

SEQ ID NO: 26187 - DNA, 370 bp, Oryza sativa
  unsure (1)..(370): unsure at all n locations
  Clone ID: uC-osflM202065a07a1
atacattatgcatctaagggacaagaagtttttgttccacttcattggatcgagattcagacaggagcacaacacggttagactcaggattgattgattaattaattaattaacagtgccttttaattataactgctcgatcagccacgctgaggcagattctttctctcttctcctggggtagtgctcatcttgatttcatttcacatcctggagtagccatcgtactgatccatgaaagtgtcgttgaacttcttgaanctggtcatgatggcaggcatgtcctcctcagctggcaggatggtcgtcctcaggtggaacaccccttctttttgtccgaaacctgaccctggaacagtggatattccag

SEQ ID NO: 26188 - DNA, 449 bp, Oryza sativa
  Clone ID: uC-osflM202065a08a1
ttgttttttagttgatgatatagctgcatcctctttctttaagcaccctattacaagcatattaaattgtacaagcaccttacttttaccgggcaaattgtcccattgctactttgttgttttcatacgactacttgggacagattattattacttgcctaataggacggatgttagaaatgcatatgttccaataaaataacaaaaggatgcagtagcttgtttggggttcatggtgaaatttctcgagggtttgcaagcagatggagaccattgtcgatatggagagtgaacattgttttatagattggctccttggattcatcttccagtctgaacttgaagaaatgtatcagggtagcagccatgatcttcatctgcctgtgtgcaaattctttccccaagcagatacgtggcccagcattgaaagacacaaacttgaacgggct

SEQ ID NO: 26189 - DNA, 332 bp, Oryza sativa
  Clone ID: uC-osflM202065a09a1
gggggacgagacatcctaaattttttttcaccaggaatttttttggaaaaggcgaagcttataaaattttttcaaaccctggggggggaacctttagcaaccctgaaaagggttcttttaaggggttccaacccgggggaacttggatgcttttgggatacaaaaagagggcaaagagctggcatgcccaagctttttttgctttttccacccgaaaaccaaggttacgggggtaggcatgaaacttgacctccggtgtcccccccccagaaagggagaggggggcccccacctgatgaatacccccatggggagacaccacctcaagattg

SEQ ID NO: 26190 - DNA, 252 bp, Oryza sativa
  Clone ID: uC-osflM202065a10a1
gagaacaaccgccgtttaatggactttgacaatgtatgcgacagcagtattgctcactgggctggctacggtaagaatcaacacctacagcaggtgggttggtagataaattgatacttaatggaaagagacaacccggcatcttaatgaagcatggtggcttaaagataagcttactcctggcagttattatgaagaggatcctgggctaccaccaagtttatgagagctcttaggacgcggatgtgaaca

SEQ ID NO: 26191 - DNA, 377 bp, Oryza sativa
  Clone ID: uC-osflM202065a11a1
cctcatgaggatgcacaatttcacatttaaccaaatagtaaatgacagggttacgtacagaagttacaacacaaattatacaaattattcgatctaacaatgtcagaaatggtcatacatgatagaagttctttttttggctattacagagtacagggtgcttcagctatttctcatccatgctcaactgcaaacaccgaagctaagtatatattggatcctacgatagcacaccgttagctccaataatattgttacaacgacttttgctaacaatttacaccgaaggaaatcagcgtaggagtacatcagcacagggacacctaagattcaccaacctgaaacctatggagctctgatagtttttgtttatattg

SEQ ID NO: 26192 - DNA, 404 bp, Oryza sativa
  Clone ID: uC-osflM202065b01a1
tttgtttgtggttgttttttgatgaacaacactgcagtttcagggcaatacatttaaaacaatcaatgaaaaaaaataattcctgccctagggccttctgcataaatgcgcatgtcctctatcatgacaatgcattggctcttccgtgatcaccatcaacaattcgacctatacgcacaaacatgcatgctcctcgccctatcgccctctaaatttgcatcgccaccgctttcaaaaatgcttttaattaatacaacttttttatctgtagaacctataggatcacattgaccagaacccggccggccacagatcaagatttcttgagtaaggtacctatggtgttgaacaaaaaattagctcacacagctacaaaataggaatcatttccggctagccgtgga

SEQ ID NO: 26193 - DNA, 433 bp, Oryza sativa
  Clone ID: uC-osflM202065b02a1
accatataacctactaaattcgtatatccattaagcctcctcaagcagccttggtatgtatttacatgtacctgattttcactcatagctagctccgatcgaactcgatcttcctcgcccactagagtaaatcccaaccaacaacatagccgaaagatcagatgtctcactatacatgcttcagctaaggccccacccccatatccgatgtacacatgatatcaggaactggaattgattcaatgccagtaatttcatctaagcaaattcaattccctgaggatcctactctagtgtacacgattgagccgcacaaacttactgagcatggaagcaagaaccttcatccattgcagatggcattgaggagcacatgccccagcatgaggtccacgaaatactggtgcccgaccttgccatcccgccataacaa

SEQ ID NO: 26194 - DNA, 420 bp, Oryza sativa
  Clone ID: uC-osflM202065b03a1
ggtctcgagaatcgggatcatatcttgcaccgcatatagcgcatactaatacagggttacaaaacatgtttttgttcacgcgcaatgcaaccacagaatgccgtgaaaaaaaacaacgaataaaacgtcatgattggcctcatatggccaatacagaaacgtttctaaaactacccttgctattcctgggactgactatgagcaaattaagtttaatgtgcaccttgagagaatcgtttatagggatatatattgctgacggccataaaaatgtggtcgagaatcaagaatactgctaaaccatgtgaatatatatcattaccatgttgagattcaatagccaccggcaaagaactgcctccctgccgttgttgaaaacttgaagttgattctctactggcagtctgtcactcaagctat

SEQ ID NO: 26195 - DNA, 427 bp, Oryza sativa
  Clone ID: uC-osflM202065b04a1
gggctagaaacgataaataacattacatcacatagtttcatacaccacatatgcattaagttgaacaaatcttaaggaaataaaaacacacattgtctcatacaagcaagcccaaatttgtccgaccaacaacaatgatagatggaaaagagatgtggctcttccccctttggcatcgaggaccaaaaagagataaattaaaattggagagagaacctaatgccatatggagtgcaatcatcatgcccatcatcaccactatcaccatgtcccacaccttccttctcctgaacaacaccactactagcttcgtcggcaaagggatcatcgaacactttatcactttcattgacctcggagccatcgggggagcaaggaaagttgtagtctgcttcttcaattacgctcgccccttcctggctttgat

SEQ ID NO: 26196 - DNA, 402 bp, Oryza sativa
  Clone ID: uC-osflM202065b05a1
atgcacccgaacataggattgttgatgggaaacacatgcatttgacaaaagggacactgacctccacaaccagggggaaggaacccctagtaattaactattcgacactaacagcaacaaagattaacacaaaacatcaatcaatcaaatggaacaaattagtgaactcagtgcaaaatgataaacgtaaaaggcccttttctttcacgttaaaagacctacacaacaaacagcacggtcgggtcgtgataattaacaaatttagacactgtcaccaaagtaaaacacaaaattagtaaataggactgtgcaaaagaaggaaaaaccaaatgcatgggcatcccaaatccctggacaaccgggaggaaagacttgacattttacagaggggtaccaggactc

SEQ ID NO: 26197 - DNA, 384 bp, Oryza sativa
  Clone ID: uC-osflM202065b06a1
ccccacgcgagcaaccccatttttctgaaaaaacactattggacaaccttcaagggggggaagaccatatatgaaatgggggtttttcataagggcaaaggatcgctcttttgggtggagcctaaagatgaactttttaaaaaaaaaaaaaaattatttttttggaaaattctcccaaaaaaaaggaccatccctccgtttttgataccatgtccccagttcccaacaaaaagggcccggacaacaacgtttggtttcccttttgcacattcttacaggaggccagggaaggggccgtttccccgttgttgattccaacccttaaccaatttgtctgggcaaaagattgcaccgttttttgcaaaagatccatgtggggcatgt

SEQ ID NO: 26198 - DNA, 385 bp, Oryza sativa
  unsure (1)..(385): unsure at all n locations
  Clone ID: uC-osflM202065b07a1
attcaaaaaaacatttattaacaccaaaatgaacatggaactagggtttgggttattttcaccactgcatcactgggacagggaggcccattgtaaaaccatgctgttcatgttgggaggtgagtttggaggccaatccccatcgtttggtgcttaactgattttgctccggggaaaactcgcaaacgtttttattgacagggtagccgagggcatcgatgatcattcgggagttttcctttaagaaacgaacaatacccttcacgaactggggcatttgctcatttgngacccactttttgatccgagccaaccactgggggaaactgtcggggaccttttccgtgatttcctggtggagagcgttgatcacgggggaagcaac

SEQ ID NO: 26199 - DNA, 450 bp, Oryza sativa
  Clone ID: uC-osflM202065b09a1
ttgtttttttatatataacacaagaacaccatcatatataatttattatctaagattcgtaacaagctccgtttaagaaaaactcccgagatttctacctaaatcctaggcattattagtaagttctataacaagcccaataatatagttccataaactatgaaataaagagcatctatctaattagcatctctaaaacacaaatacataatatatttagcacggtcaaaagcttggattggcattgaattcttagttggcgtttacaccagcagagtctaggaggaaaccagggtgcagggcctcttgatcttcaggtttgggttttacctcttggagcagtttgacacactcctctattttggcagacaacatgtttgatgagtaaagtagcatgaccacttcagaattacctagctcaagtaacattccagtgattttactggcaag

SEQ ID NO: 26200 - DNA, 418 bp, Oryza sativa
  Clone ID: uC-osflM202065b10a1
agcacgcgaacataggattgttgatgtgaaacacatgcattcgacaaaagggaaatgaaatacgacaacgaaagcagttctcttagcagtagaccaactagaacatgtaagggtaacggcacaacacatgcgggggccaaaaatttagagcttgtcctcgaaatcggagaggggagtcatttgctccttgagacccttccttttgcggatatcctgcaccagggttgaagcctgcgagccagcttcaagaggatcagaggtcatcatgtcccaatggtcgaacacacactgggggaaggcctggccagatgtcgcagccctaagctggcttgagaacccaaaggactctgatgacagggaggtaagccttgatgttggacagaggggtaccaggcctttgcatttcctcgaacacatg

SEQ ID NO: 26201 - DNA, 439 bp, Oryza sativa
  Clone ID: uC-osflM202065b11a1
gtagaagaaagattgttattacatatggtacttccacaataatgataactacactgctgcctcgatctcatggcatcctggcacagaaaccgcattaatgcgttctaatggcaaagaaaaatttacaggatgaactgaaatacagattccacgtatgtcccgtcccgcttaagattaacatagtacaacctggcattctttatggagttgttcttttctccgtttccacagttcccttggaggtaaactaaaacatcattaacagtaacaagacagcaggctcagtaaggtcggtatcgccaatcagcccttgatctgctactgctacttccgctgtgaccataaccgtaatcatagtcgataccactgcagaacctgccataagttcgcattgaaccataagccccataaagatccatgggttccatgtaaccaccac

SEQ ID NO: 26202 - DNA, 454 bp, Oryza sativa
  Clone ID: uC-osflM202065b12a1
tttgtgtttttttgaagttaaccaccatttttcgcactaacataaattagccaaaataattatttctgacaaggatagatatctcaacaatcagatcatagtccagctagttctatccagaaattgaattttacagtaatgttacaacccttcatcttagtgaagtatttgggcttaaagattgcatcctccttgcagttctatggaagagcagccgatgtcaccaccaagtataagaaagctctgagaacctagatgtgtccagcaaatttacatactcctagctaggaaagtagcaaggcctcagaaagatagcagtgctaccagaacacatactaggctcctgctaatctacacaatacaaatcactaagctagacataagccaagaagaagctaggaaatgattctaaaccccaggaggcaaaacttacaagcaagagcacttaaaaact

SEQ ID NO: 26203 - DNA, 415 bp, Oryza sativa
  unsure (1)..(415): unsure at all n locations
  Clone ID: uC-osflM202065c01a1
gatgggttcacaattcgcagataaaaaaacacaagcaatccctagtacagtacacaaaaaaggaaaaatcaacaccagactgagagaaccgccaatgatgaaggcgatgccacaccatactatcatcaaaaggcaactcaaatttcaaatttccatgtcaccaaagggaggccaatagagcacgattgtttcaaatttcagttctcatgacagctctggatcaggatcagtcccaagcactagaaaaaccttgcccgccacctccgtagctgctaccgccaccatagccgncttcaccgncaccaccaccatatncgncacctncataaccttcaccttcaccaccataccctncaccaccactgcctctgtctcgtcggaagtcccggccaccaaacctagcaccaccacctga

SEQ ID NO: 26204 - DNA, 443 bp, Oryza sativa
  Clone ID: uC-osflM202065c02a1
attataaaatgacttgtattatattcccaacattaaagtttgatattcggatacattttgctcactgtggcagacaaagcagaccacctagagcccttttattcagaatatatgcaagataataaagaacattggtcatagcatatactagtactatatgaatagtctggctggctgcttcacaaagtaacagagtgatcgctactggagttttgagtattctttaatcttcagtgcgcttccctcatcagcagctcctcatcttcttaccctctgtgccatctatctcctcgacagcatcgtcttcccagtagagagcctccattttaccagctttctccgtgttttcatcagcaaagcaatgcagaacagatcgtggcgacccggtggcgatttcagcagtagcagtgaagctctggtaaatgagcaaacccccagaaggc

SEQ ID NO: 26205 - DNA, 442 bp, Oryza sativa
  unsure (1)..(442): unsure at all n locations
  Clone ID: uC-osflM202065c03a1
aacaagacacttcttgataccctgagtcggtgctgaacaaggagagttggctacattatcccattgtacagcataatccccacagggtattacagatttacagtgtttctagcaacattgctctgatttttgctctcaactcactcggcacttcagttgttgcctgggaggattgagcagtgtcaccagggggcttttcctggttctgggagacttctgggagaactatagtttgtttgctcttatctcggtcatcgtcctttttcctttttgaactggaacggtggtccctctggtgtctatgtgaactcctatgctcatcatccnnnttgtannngnnagcttgcctgngaccatgccttgacttggagctcctgtgctcatgctcatcttctgaagagctatcacggngcctatgatgcctgngttccagatccttgga

SEQ ID NO: 26206 - DNA, 470 bp, Oryza sativa
  Clone ID: uC-osflM202065c04a1
gcggcgccctttttttttttgttttttttttttgaagagaataacatcaccatatatccattgctatcaaaggccttgcttgaccttacaacagggtacaaagtacgccgactaattccaagttccatcgactgggtcattaattatcatcatgtacaaacaataatcatgcccccacttatttttttgcttttcagcatgattaattagggacacaacctcgcgcttaattttgatccggcatgcatgcatggattaaaagatttcagggacagaacacaaaacccagctataacaacaaacagcacattacaaagtgtcacattgttttttctcagctgaacctagtatttcagttcagtccccatctgcatccatcatatccacagctgcttccttccattcttctttacctttgtggaagaaaccagctgaaatagtagtagtagtagtaaaaccttcaatcttgc

SEQ ID NO: 26207 - DNA, 419 bp, Oryza sativa
  Clone ID: uC-osflM202065c05a1
gaagcacaagagttcagttgcagtttcaggtttaacaagagaacataagcaatgtatgcgtttccatctgaatggaatgcaatactacagaggttaaatagtagtacagaatctgatttgtctaggactgactgcagggcatcagctcatttaatcttttgagggtacattattgcaaacagaactgatcaaaacaacggtggaatactcttgagacagcaccatgctcatttcattctgcagaactaacaggtaggttgccaggtatgtaagcatctcaaactatgtgttccgctaacgctaggatcttgagatgcttctttttcctgagttcgtggggaacaggaccaaatacacgagtgccaatcagctcgcctttgttgttcacaaggacaatcgcgttgtcatcaaactggatc

SEQ ID NO: 26208 - DNA, 427 bp, Oryza sativa
  Clone ID: uC-osflM202065c06a1
gttaaacggaacatcacagctgaaaatatctttccatcatatatgcagttactcaatggaatattacaaattaaattatcgtcgcgcttagttcctgccatattctgtttgtctgctatgaatttcagttgtacagaaacatctttaaacttaccagaaaaaaaaaagaataaatcagatcgtggtcttctcaatgctcgctaagcaatggagctgtaaaaatagtgaaacaactttgtttcagaccttctggtcaagctctgattgtgatgacttctgagttttctcgctgggcaccgagtaaacctgccgctctttgcctcccggttttgacgaagcattcccgtaccaaatcatgccaatcacagcaagcatcatgccaaggactacgtgaaaattaaggccctcttttccaaagaaagaaaac

SEQ ID NO: 26209 - DNA, 104 bp, Oryza sativa
  Clone ID: uC-osflM202065c07a1
ggccgcccttttttttttgtttttttttttttttttttttttttttttttttttttttttttttttttttttttgggctagggaaacaacacggggattagggg

SEQ ID NO: 26210 - DNA, 443 bp, Oryza sativa
  unsure (1)..(443): unsure at all n locations
  Clone ID: uC-osflM202065c08a1
ggacagccctaagtaaccattactttacaatatggtgctcaaatcacaagcttttacacgtatatatatatagtaatgatggattttatctttacatatgattctttaccctatcacccccaccatctaaccttatattacatttcctgctatacctcctcttctgtattaaatggcaactacaaagctacaaatcccatgccctttcaggcatgttattctcccactaggtgttacaaatgctgccccccaattctctctcttaatgtccatggtcctgattgtttctctgctgtcttcaggccacaaaatcatgcagaagaggtgaatgctcaaaccgnngccgttgatccatctgattcatcgaatcataatccgaagatgcgacggtgacaccaagaggagcagtagcattgtagatgtcatcctcattaacaccaggg

SEQ ID NO: 26211 - DNA, 444 bp, Oryza sativa
  Clone ID: uC-osflM202065c09a1
gagacagaaaatacgtagatattattgtcggaattgcctgcaaaggctgttataggatactgaacatagcatactgaacaaaagaaacgaaaatgtagcctctcccaacctacagatgggtctctgaacagacgaacatcagcaggtcggccttctacttggacctaagagatgatgagatgatactctcagaaacggcagttaccgattccgcgaagcgacagcatttctaaacgccatgactagagtttcaagctctgcctgccattggtgacagcctcaagcttcaggaacaacccggactcagtttgacatcacgcgaggcgaccgcggacgcacgggtgtcttggaagggctcaccctgataggaagtgtgccaagaaccattccactatagttcagggctagaatggcgctttctgcttgagcaaactcaacaaatgc

SEQ ID NO: 26212 - DNA, 430 bp, Oryza sativa
  Clone ID: uC-osflM202065c10a1
gaaagcacattatggtattttttttttttattgtttaacattgataacttttgctttgtttgtgttttcagcagaagggaaaggaaactaccgaggatacttattcaacagtttcggaacttttatgactgaccatggttaatggggtcaaccaatctttccaccttacgtttttggttacccatttttttttaaccccagcatacttcccaagagcacaacacctgcttacaagcgaaatgcctaactaacccggcgggctgctttacaaaaaaaccaaacaaactccttaacaggataaaattccgcggtaggaaaacaaagtattgaagtgttcccagaggtcccatccaactaaacaaacactcaataattttgcctcaacggatcctttggccaggggagaagatatcaaagtgtaccttcctta

SEQ ID NO: 26213 - DNA, 130 bp, Oryza sativa
  Clone ID: uC-osflM202065c11a1
ataggatcaaaacattgctattaccacaactttttaaggatggaatggagtagcaatactttcaccccaaaatacagtttagcgacagtatcttagaaaagcctgttgctttgccgtcatggctggcaag

SEQ ID NO: 26214 - DNA, 435 bp, Oryza sativa
  Clone ID: uC-osflM202065c12a1
aaacaatctcatcttttgcatttaaatcaacgaaaatgctttgatgcacctgtttgtgggcatacaacatctatctatacaatactcagcaacagcctatgtaacagacgtaagaataatatggtatggagatgtaataactcgaaaatgcctaaaaagaaaaaaaaatcatcgccctgtgtgtacaaaagtaacggaacttctgaagggtcagcaagtcagcagctgtacgacgcctcctgaacaaacttctccactgtacaacgatcaatcctggacctaacctcttgtgatgctgttcgcctaaacctgtgcatgcttatgtacggtcacttggtggactttgtgcgggctcaggtctgcttcttcccgcctgccaagatgcgggagatctggaggcctcggctgaaggcctggttgaagagcagcctcgtc

SEQ ID NO: 26215 - DNA, 337 bp, Oryza sativa
  Clone ID: uC-osflM202065d01a1
ggaaaaaaaaaattgggccccacaaaggtcaatttaaaccccgaaaggcaaacagaaaaaccctgggggggcttggttaaaaccccccaaaaagggttccccggggggggttatttcttttcccccgggcccccccaaatttttttttgggggccccccccggaacaattttttccaagttcccgccccccccaatggggggggggggaggccctaccttgggggggggggggggggggggggtccccccctttttgaaaaagggaacccttaccccccccttgggggggggctttatgggcgggttacccgggggggggccccaaccccttatttt

SEQ ID NO: 26216 - DNA, 438 bp, Oryza sativa
  Clone ID: uC-osflM202065d02a1
gttattacaactttctggactgtcagtacagctatagatcacaacaagagtatctaaattcagaatttgctaataaatttacaattatcttagtttacaactacattttcccacagatgtaagatccagaagctaaaatgctggagttatattgacaccaagggacacagcaatgaagatgtttcatgctgctgcatctgcacaaaattgttgccctcttttcaggagcgacaagacatttctgaactgcggatcagcggatattcatgagcaccttgctaccttcatctcctatgtattcaccacaaaaaatactggatctaatagatctgaattttcacacagctagcaccccaacaatattaacgtaagctagcgaaacctatgtggtatgtcacaagcagctaaataaataatggagcctcagcatgaacacat

SEQ ID NO: 26217 - DNA, 397 bp, Oryza sativa
  Clone ID: uC-osflM202065d03a1
gttactccaatgtgtttcagtatattgctatactagtgtttcagtaagcgccggagcgcagcaaaagttccaatgtgcttacgtatctctacaattctgcagcacaaggagaggtaaagtaattaacctgaaaattaactaattatcaaggctttagcatgaagcggtggtgctgccgctgccgcttgacgtgaagctgacgccgctcatggaccctccgctgccgcccagaccagacgccttctccttggccgccctccggatgtcggcttcccggcggtcggcgaaggacaggaaggactggagcttgctgcgccgggagagggagcggctgccgtcgctggcggacagctgcagcgcagcgggggtcctcctcccgagtcgtggcgtgagtact

SEQ ID NO: 26218 - DNA, 448 bp, Oryza sativa
  Clone ID: uC-osflM202065d04a1
gctcgcgatccaagaagcgccaaaggaggaagaagactcctctctcttctcctcccttggctgcaattgcaatactgcaatacagcaaatccatatccagagaagcggttgaattccaggagccgtgtttgcgcagagaacgcatgctgcttctggaatcgtttcctgcctacttttcttctcctcccgtttggctgggcgccgctgctctctccgcctcagctcctcctcctcctcctcgtcgctctcttccctgtcgcggctgttgcgttttgccagttagagcccgactgcgtcggagccgtggcggggattgttgttgccggtgccaaaaatctgatcttggcgaaggttttcgggtggaaagcatgggttctcgctaactgccactctaaaagccgtcggcactcctgaagcatgagaggcctacccttcattcacagcgctt

SEQ ID NO: 26219 - DNA, 239 bp, Oryza sativa
  Clone ID: uC-osflM202065d05a1
acaggcacacttaccactaatgaattttttaacttcccagtttgtgggaaggaacagtccatgaacaactggggaaaggttttgctcttaccttaccaacggggtactagaactactactactgggaaataatggccagtttggaaaactccagcccgccaaggagggaggcaccaacaatgggtccattattgggtaaaaacggaaaatggacctgtgaaaaacaaagtttggttggg

SEQ ID NO: 26220 - DNA, 403 bp, Oryza sativa
  Clone ID: uC-osflM202065d06a1
cccaaatagagccatcgtgtaagaaagatttgttttttttttggggtctgcgatactataagcaacagagttttgtaccagtttaaaagcagcctttttttacttttgccacataaacatattcagtttaactccacttttagcaccctggggggatgtcatgggatgagaggcaggaccgactgacttgttaactaacgggattattaaagctgccaggctttttgaagctattttgtacacattttttgatagcccatgggctgacacgatcatttccagctcagccttaagaagagcttgcttgttttcataatatggactccaccgggagaaagctgcaccatgcgggaggccacctgaggatttatcttggctagttgtaaaacactttcccccaaga

SEQ ID NO: 26221 - DNA, 377 bp, Oryza sativa
  Clone ID: uC-osflM202065d07a1
agcatcaaaaccaaaaaattattattagtaggggcttatgggccatcaaattaatgaatacacatcatgcctttgaaactgattttggtaattcatgatgagatttccagagttgacaacaaatcacattttttttaggcgacaatgggaaaatgggttttagactaacaatttcacttgggtggaaaggtacatttaaaggtttccaaggtcagaacaacatattcctttgactgcacacagtgcctccaggtactagttaaacaaatggagaacaggaattggggaatcaccgactggaggggctattttttttttccctcaaccaggcccatcttccagcgaattgcaaaggggcaatttacgagacatgggtt

SEQ ID NO: 26222 - DNA, 450 bp, Oryza sativa
  Clone ID: uC-osflM202065d08a1
ggcggatgcggcgcccgcgggaggcggcggcggcggcagcggcggcgagctcctgtccgcggcgcgcgcgccggggttcgcggcgtggctgcgcggcctgcggcggagcatccaccggcacccggagctggcgttcgaggaggtccgcaccagcgagctcgtccgcgccgagctcgacgcgatcggggtcccctacgagtggcccgtcgcccgcaccggcgtcgtcgccaccatcgccggcggcgacggcgctggggccgggaccgtcttcgcgctcagggcggacatggacgcgctccccctgcaggaattggtagattgggaacacaagagtgaggaaagcggaaagatgcatgcttgtggacatgatgctcacaccactatgcttctaggagctgccaagctacttcaatctcagaaggatgaccttaagggtactgtgaagctcgt

SEQ ID NO: 26223 - DNA, 216 bp, Oryza sativa
  Clone ID: uC-osflM202065d09a1
gcaaaggttattaaatacaataacaccatttagcaaccaaagcacgactatcaaaattacatgataaaattattattgtcttgaattatgtaaacgatgataacaaatccttttccagctacaaaagaaccagcataacaacaaagaattataaagttgcttaagtaatctctcccttcatctcaaaaagagctatatctagggggcctaggccac

SEQ ID NO: 26224 - DNA, 427 bp, Oryza sativa
  Clone ID: uC-osflM202065d10a1
aaagtccgaaagatggcaacaacagccattccaattttaaatcgacactgagtccaggttcacatagacatttaactcatctgaagtatttttgaaactgtacattattgtaaaccaggcattttaaagccatacattgcttgtggatacaagaacactaacaatacagatatcgcgagcagctcaattcgaatttgagccggttcgcacagaagccacgcagattcaaccatccaattcattcgagtgactggaacctcgaccgctgaccaagaaatcttcgttcgctggattccaggaaataatttcccttcacagcatctgtgtctcataacatgaagccacgcttccttcatcactgatatttgatgacattcctttggagtctgacattcatgcctcctcttccttacggaagatattcatt

SEQ ID NO: 26225 - DNA, 279 bp, Oryza sativa
  Clone ID: uC-osflM202065d11a1
aaaaaaaaaacaaaaaaaaccccaaaaaccaaaaaaaaaaaaaaatgggaaaaaagggaaaaaaaaggaaaaaaaaacaagaacaaacaaattaaacacaacttttcccaaaacctcaaaaaaaaagccagattgccccgacctcccccatccccaacccacaacaaggttctttggggccaattgggggcaactggccccccggggggcccccggagagccccgggaaccccggggggccccccgggggaaacccgggggcgcccccgccccccggcc

SEQ ID NO: 26226 - DNA, 436 bp, Oryza sativa
  Clone ID: uC-osflM202065d12a1
ggctgacaagggacaacttttgagttattatgcatgaatttcctaattaacaaggattctccaactagccaagttcagagctggatgagattacagatacacaagcgttttattccctactcttgtgttgatatttcaaacaatagtggcagttgcacaatttttatgacatatatatatagttctagttacatggcgtccttcgaaagccggtatggtcgggatgcaccgagcattagtgagctcatccactgcatccccacgctcaaagacagcagcagcccccatgccagaacctatgcacatggaaatcacaccaaatcgacagtctttgccccgtcgcttcatttcgttgagaagggtactgacagaccgtgcacctgtagcacccaatggatgcccaagagccattgcacctccgttaacgttaactttt

SEQ ID NO: 26227 - DNA, 452 bp, Oryza sativa
  Clone ID: uC-osflM202065e01a1
caatccaatttctcataccatttcagattcaaacctaattacatgtaccatctcagattcaactaataacagatacaatcagaatacaacagaattcaaacaatatttcatctcagattcaacctaataacaggaaatctgaaaacagaaaacaaaacaaatctttcaaacattgaatggaatcactccttgcttctcgtcctccactcatagcaaatagaggattgaattacagcaaggccttcttgttgatgtgcaaatgggaatttttcgctacaacttatacatagcttcttgagatgtgcttatcacagatttcccaattaccctcatatcaagttatcaaccatatagagccagtgatcttcaaatttatatcaaccatatacagccattgatctgcaaattgcaaacttccacacatccagagaaccaacctggaataacaatct

SEQ ID NO: 26228 - DNA, 360 bp, Oryza sativa
  unsure (1)..(360): unsure at all n locations
  Clone ID: uC-osflM202065e02a1
ggaaatctaaaaccagttattcaatcaaaaaaaaaaattactgcaactgcaagtacagcggaaaaggacgcgagaataagcaatttcgtgggtcgtagtaattcactcgtaatcctctttgctccgtggaactaactagtgtttcaccctagtaacggtgaatgagatcggcgaatgctgcagggttcttctcgtagtgatcgatctcagcctttcgtacagcaataacggcagtgacaagtttatcgccgatcaattcatgcatgattttgtctgcagctagtgcttcgacagattccatcaagtccttcggcatcctttnnagcttggagttggaggcataacctgcagggtttgatt

SEQ ID NO: 26229 - DNA, 418 bp, Oryza sativa
  Clone ID: uC-osflM202065e04a1
attcaacaggggttttatgtcattgccacagaaaaaaatgcgccaacctcagcaatagccctatggaagaagaaccaaccaaggcacaagctgaacgttaatcctgtcaatttttttacaaccttactaatgacccccatgttcttatttctgtgagattacactgaaaatctactcttatctctgcctacagacaaccaaacacgcaccccaaagccttccggtaaatggagggaaactctattatatgcagtgacagggcatatatgttaattttagttaataccgtctcataagaaatgcactgtagtttcatttttttgccaacacatccggaatatgttgacataatcatgtcggagagaatggccctgagcctcctgtaccttgatctgggcaccattatatgatccctaca

SEQ ID NO: 26230 - DNA, 380 bp, Oryza sativa
  unsure (1)..(380): unsure at all n locations
  Clone ID: uC-osflM202065e05a1
aaacagcggtttcatttcttttctatgttttattttttttttttttttgcagaagcatagggacagacgagccgagtaagttaaatttcaaggtagaggatggcacacatgagcagccacacgaaaagaccagaatgctctgggcggggggagaatacactgccgcattacaaattcccaatacacgggaatggaatacggccttaaaacggtgcagctacatgactgctgctatatgatatgacaggaacacacacagctgttcatgcataatgagaactgaggaatacaaggcctctaggttcacattcactgatngcttgggaaatccctcccattcactatcttgtggaggattgggcctgagcactactggaccc

SEQ ID NO: 26231 - DNA, 395 bp, Oryza sativa
  unsure (1)..(395): unsure at all n locations
  Clone ID: uC-osflM202065e06a1
gtgtttttttttttttttcggtttttagcgacaatttggcactgccatggccaaaatgtgcacctaggttaggacttaggagttcttattccattgttcataagaagctaattagacatgcatacataaaaggggggctgttttttcagaggctggaaaggaccattttgccaagcagtgcctgctatcctcagccttatcagacaaaaaaactcaaaataaacccatgagcagaattcctgcatctctaattactcaagcatatatatttgtacaaattaagtagcaatttggctggcagatcccttcagctccagccgaantttccctttagaacatgctcccaatctgatgacaagcgcttagtaaaaatggcacttaaaatgcccgtctgc

SEQ ID NO: 26232 - DNA, 318 bp, Oryza sativa
  Clone ID: uC-osflM202065e07a1
gggaccatacccagattaaacctaactacatcgcccatctcagattcaactaataccagatacaatcagaatacaacagaatttaaacaatatttcatctcagattcaacctaataacaggaaatctgaaaacagaaaacaaaacaaatctttcaaacattgaatggaatcactccttgcttcttggcctccactcatagcaaatagaggattgaattacagcaaggccttcttgttgatgtgcaaatggaatttttcgctacaacttatacatagcttcttgagatgtgcttatcacagatttcccaattaccctca

SEQ ID NO: 26233 - DNA, 246 bp, Oryza sativa
  Clone ID: uC-osflM202065e08a1
ttgttttttttttagccacctgcattttttttctagttcattatatgcgaactttgtacacgtagcatttgaagtacagaagaatcttttgaggaaaatccattttggtgatctttcaaaaatcatacaaggcactcttgcaggcatacataaacttgtctcaccatatagtccgtctcaaactatgatgcataaatatggttttgttatctcgtatacgatcaaccattcatcgtgtacaagaaa

SEQ ID NO: 26234 - DNA, 465 bp, Oryza sativa
  Clone ID: uC-osflM202065e09a1
tcgtcggcgtggggcatcgcttcgtcgcgggctccctatccagggagggagaggaggagcgcgagctggtggtgccctaccaggtcgttccatgccacaaggggaatgaatgcaagggattactatgatgttcttggagtgaacaaagatgcatctgcatcagacataaagaaggcatattatctgctcgcaaagaaattccatcctgatactaataaagaagatgctgatgcagaaaagaaatttcaagaagttcagcatgcctacgaggttttgaaggatgatgataagcgtgaaacatacgaccagcttggagcagaagcttatgagcgccaagcgtcaggtggtggccccgatgatttttctgggagtcatccatttggtgacatttttggtgatatgtttgataatccttttgccatgagaggaggtcgagatgtcaaggttccaatcaaactatcatta

SEQ ID NO: 26235 - DNA, 434 bp, Oryza sativa
  unsure (1)..(434): unsure at all n locations
  Clone ID: uC-osflM202065e10a1
aatccaacagtagtatcatgtcattcccacagtaaaaaatgcgccaacctcagcaatagccctatggaagaagaaccaaccaaggcacaagctgaacgttaatcctgtcaatttttttacaaccttactaatgacccccatgttcttatttctgtgagattacactgtcactctacttttaacctccctccagacaaccaaaactgcctcaaattcttcctgtaattcgatttctcctctattatatacnatgaacacacacactgatcatcagaattagactgtatataaaaatgcctctagtttcacctacactgctgcctcctgaaatttctcgcattcatcatcttgttgagcatggccctgagcctcctggaccctgcaccggcctttatcatgcccttcctcccggccttctgcgggtttgagcacag

SEQ ID NO: 26236 - DNA, 74 bp, Oryza sativa
  Clone ID: uC-osflM202065e11a1
acaaacggaaagaagggggcaaaggtgaaaaaaaaaaaaaaagaaaaaaacgggggggggcggggggggggggg

SEQ ID NO: 26237 - DNA, 381 bp, Oryza sativa
  Clone ID: uC-osflM202065e12a1
agggacaatttggcactgccatggccaaaatgtgcagctaggttaggacttaggagttcttatacaattgttcataagaagctaattagacatgcatacataaaagtggggctgttttttcagaggctggaaagcaccattttgccaagcagggcctgctatcctcagccttatcagacaaaaaaactcaaaataaacccatgagcagaattcctgcatctttaattactcaagcatatatatatgtacaaattaagtagcaatctggctggcagatcccttcagctccagccgatttcttccttcagaacatgctcccaatctgatgacaagccatattcagaattgccactcaaaatgccgtctgctccggtgaacatg

SEQ ID NO: 26238 - DNA, 456 bp, Oryza sativa
  Clone ID: uC-osflM202065f01a1
caaaaaccttctgtaaaaattcaccatttttgaaggtgcgtacactgatagaagaccaaaaatgaattgggaaaaaaatacaaatgttacacatctatgtggccggccgaccaatccggcccaattaacacaacacaaagaacaaacgggcctccaaaacagaattgattgggcccaattaaattggtaatagttactccgaaatatttgaatcactttggtggcgggaggatccttcaatcgccgtagatgaagttgtgactcaccgcgccgccgctgcacttatctactcgcctttgccggtgtgcttgaagcacttggcgtcgccggtggacccgagtaactcttcgtggcaggtgggtttgaactactcgccgtcgccggtgcagttgaattacttgccgtcaccggtgcagttgagttgctgggtgtcgccggtgcagttgagttacttac

SEQ ID NO: 26239 - DNA, 448 bp, Oryza sativa
  Clone ID: uC-osflM202065f02a1
acagcaacaacagcatagcttgccttatttgtttgtttccacaagatgaaaatgtcagcggaccaggaactgccacaagagaaggcggcaattagctctgccaacctgggcagccagcccccaaaggtgcaaatactccccccaacctgcccatttccgcttggtcccaacacgctacaacaaagaccacaagcccccctgggtacacgggctgttttgttaagtactcagcatactatttttacaactagaagcttttgttggatttctacagaatgctcgccaacgattaacagggcagataacctggcctaaaacaagcaggttctccggatgaagccacatcgttcaggcgtcgcatgctaattttagttcaggattttccaaggaacaacgggacgcaggtcattgaatcatcggatcaccagaagaaactgtgtgcatgtgc

SEQ ID NO: 26240 - DNA, 398 bp, Oryza sativa
  unsure (1)..(398): unsure at all n locations
  Clone ID: uC-osflM202065f03a1
gcggcgcccttttttttttttttttttttttttttttttttttttttttttttttttttttttttttttttttttttttttttttttttttttttttttttttttatttttatttgtctttatttaataaaaaacgacgcacacgtacacacggctcatttttttattacaatctgaaggagagttgaccacgcacgcgtgcaggcactttaccttggttacaatttgtactaacgtaaacccgacaagttcccttgcacggctgcacccgtcgtaccgtgtactacacggccacgtccccgtacgcgaaaaaacaccaaacacgtataccgttacggaccccgggctaaaccttacnnaagagcatcanctcnccggcggcgatggatggatggatg

SEQ ID NO: 26241 - DNA, 406 bp, Oryza sativa
  Clone ID: uC-osflM202065f04a1
ttttgtttttttttttttttttttttttttttttttttttttggcacgaacaccatgagatcaatgaaatatccttgctcatcctgcagccttaattatatatattacatatgggacatacactgggaagaaaaataaaaaaaaataactccttgattaattcccccatttggttcacgcacaccacccaacccaaaaggggccacgaacacaacaagatacattttggtactgttcctccgacctccaatcgttcgatccgagcccatgcacgcgcccgatcgatgcaacagctagcgatcaaacacgaagcgcgcatgcaagcgaaacccaactttgtgggttagatccatggcgagcgaaagcggggttgattgcttataggccgagggcgccgagcggggtt

SEQ ID NO: 26242 - DNA, 398 bp, Oryza sativa
  unsure (1)..(398): unsure at all n locations
  Clone ID: uC-osflM202065f05a1
cttccatgacgttgtttccccgcacataaggcctatgactgcacatatcacctcgtctcagctctagcagttacaatagaaaccatgctgcatctcttgctactaacgcactagaaagtagcacatattttgtgtgcatttataggctatttcaacaccaaaatttacaccaacacacagactcaactagtacacaatgaaatccgcatgacgcttatttgcatagttgctcaagggaatgctgaaacaaatgcagagaaacaagttcgatatgtgcaagaactaacgagatttatttattggcagnnggctcgggagatttggcgagttagccccgagttagcttccccttttaaaaccagcaactgtacattctcagagagcccaagtcttcaagc

SEQ ID NO: 26243 - DNA, 445 bp, Oryza sativa
  Clone ID: uC-osflM202065f06a1
tttgtttctgaaacaaacatctttattattaatgaaaataaattactagctaatacatataataataccattccagtgaatttataaaagcctaataaatgaattaactgctaaaagaaattgattcgccgaacatggacaccatgcgttatcaagatgtacgtacgtactaaggcatgacttggaacaaattaaactgtgctaattaggctagaaagtatgagaaaagccttttgaacccccccttgataccgagacatggctgagactccatagctataccagacgctgcctgcagcgacctcttgtggaggcgcttgcaggtgtcgtcatcgcaggggcaaaacacccctaggtcgttcaggccaatgcgatggatggccggtttgttcaccaccttgatgtcacaacggacgatgatggagtcgtcgtcctccccaacata

SEQ ID NO: 26244 - DNA, 440 bp, Oryza sativa
  unsure (1)..(440): unsure at all n locations
  Clone ID: uC-osflM202065f07a1
aggatgaattcaaccatagcaaatctttaatgttaaccacatagaggttcagattccagacaacaaaaagggctaatcagtaccaaaacattccgataagcatagacgctaattggattctccagttcaagaaacaagcattctagtaaccacccttgagatcattgaccacatcatacggaatgggggtaacagtctccagcgtagcaccctcaaccatgaaaccaggtttgggtccctcgggctgtctcttggtgctgataacctcaccacgggccttggcatcagccttgagctgatcgttcttgattttcctcaggcggagctcctcggtgcacctggatggctggacatgctccacacggacatggatcctcttcctgatgatgcggttaccgacctgcttgttgatctcgacgncgatggtgtgtttggtgacc

SEQ ID NO: 26245 - DNA, 294 bp, Oryza sativa
  Clone ID: uC-osflM202065f08a1
ttgtttttttttttttttttttcctccaacatgtatttttttattcgattgccacgacgcgaaataaacaatgccaccacccttaagacccaattgaccttttctacagtttctatccatcacacaagggcagaaagtcataacagataatattacaccacggagaaaaagattaaagagaatgtactctggttcattaacttagtgatatctctaagctgccaacaaggtgccgtatctgatagcataacgcattctaaaaaagggaaaatgcaacaactaaccccagtaacc

SEQ ID NO: 26246 - DNA, 442 bp, Oryza sativa
  Clone ID: uC-osflM202065f10a1
gcataatgttcttcagtaatatatgtactcattcatgacgttgtttccccgcacataaggcctatgactggtaataaaacaccgattcagctctagcagttacaatagaaaccatgttgtattcttgctactaacgcactagaaagtagcacatattttgtgtgcatttataggttatttcaacaccaaaatttacaccaacacacagactcaactagtacacaatgaaatccgcatgacgcttatttgcatagttgctcaagggaatgctgaaacaaatgcagagaaacaagttcgatatgtgcaagaactaacgagatttatttattggcagttggctcgggagatttggcgagttacccccgagttagcttcccctttcaaaaccagcaactgtacattctcagagagcccaagtcttcaagcacttcagatccttgct

SEQ ID NO: 26247 - DNA, 339 bp, Oryza sativa
  Clone ID: uC-osflM202065f11a1
ttgttttttttttttttttttttttttttttttttttttttttttttttttttttttttttgggactgaaacatttttatttcctcatcctttttattcattcctcccaaagagacggatccatggaagtttttttgcccttatcaggcaaggaaagcacacacacacgggggcaggggaagggttttgaacaaaaccttaataaacattcaaagctaaaacaaacaaggggaccaaaccaaatccccaaaaaaaaaaacccaggggaaaggccaaattttttttttgtccccaacgcctccgtgtaacccccaccttttggggaattttttttaccct

SEQ ID NO: 26248 - DNA, 447 bp, Oryza sativa
  Clone ID: uC-osflM202065f12a1
ttgttttttttttttttttttttttttttttttgggcaaaaataaacccagtgatgatatgatttcaggatcttcaaattttacacaaggggcagctcctcttttcttctcaacaagatggaatagaattcgggaattacaagcgtgcagctttagcctttaagcttgggttatcaaaatcgctcctcttttagcataccatagttcaccagcaccccaaagccttccggtcaatgttgggaaacttggaggttggagatcagggcatatatttatttttcggttattccatcccatgtaatcatgggacatcttttctttgccaacacatcctgattatgcttacataagctggccagacaataaaatatgtccatttccatacctgaatctgggcaccctttcatgaccccgagataaatgggatctcggctagtgaagtgggaa

SEQ ID NO: 26249 - DNA, 449 bp, Oryza sativa
  unsure (1)..(449): unsure at all n locations
  Clone ID: uC-osflM202065g01a1
gggcnaaaaaaatgcacatatatatatatatatatatatatgtatgtattattagaaaaaaaatggcatagatatagatacataagaaataagtgaattacaccagctggcgcagtggcacatccggaaaaaaacatgaaagaatgagggaaataaagcaaagaataaagctaggtcgtcacttatttattccagaaatggccaatggccatttcctagtgctccgaccctcagcaaaataatctcatcagtagctaaatcgtgcagcaagcaagatgccctcgatctccatggatctccatcatgggtaggacgacgaaggcgtttccttctttggggctgactcgggttttggctcgggcttagactctggctgtggatatagttttggttatggcttggattctggttctggttttgactttgagtatgactttcgctctggcttc

SEQ ID NO: 26250 - DNA, 457 bp, Oryza sativa
  unsure (1)..(457): unsure at all n locations
  Clone ID: uC-osflM202065g02a1
aaaggaacacaactcattttttattgatatatgttggatgaatccaataaaaccgatacaagttacgaaaaatcagactagatgaatcctccccgatcacatgagcaaaagctttngacgaaagctgtnctatagtcgtggaagcaataacacttgataaagataggaattcagacacgagaggttgcagactataagatgtcatcaaatctccttgaacgccgcgaagagatcaccgttgatgtagtcgttgtccacaagactaaccaagaagtagctcttctggaccttgtctagtatctccctagatgagtcgnccttagggaacaggnaaggnnaantttttgattaaattttgaaaggttcgtctttccaaaccataaagctggctgagttaatgatagttggntggactatttncttggnagggaaaanaccctatgtgaccgcattcaca

SEQ ID NO: 26251 - DNA, 129 bp, Oryza sativa
  Clone ID: uC-osflM202065g04a1
gttgttcgcgcgcatcatgcattttatttaggcacggtccacaattcatacatggagagaggacacggcttgttagcagacactcacggtatagtagggcaggctgaaagaatattgcttcttgaaacc

SEQ ID NO: 26252 - DNA, 440 bp, Oryza sativa
  Clone ID: uC-osflM202065g05a1
ggagaacgacacattaaaattagtatgccaaccgcaaattttcatcttcgaatacattggtccgtaaaatccaaggacaaagtgtacaatcaaccagtagaaaccagaaagatcaagaaattgtgttcttgatctctaaagcctattatgcaaagggggcagaaattaacttaagacaggcaacaacagaaaaagatctcagcagatgctagcataagcttttcactcctgatccagctcgaatggaacttcttcttggacgtctacctcctcttcaatctcaacttccttggtgtcgtactcttcctcatcgtcactggcctccccgtctctgagctccatcctgtatggtctctcttcctcgtgcagctgcttccacttggcaacccatccttcccattcctcctgaagctgcttccgcctcttgcgttcctgctcgc

SEQ ID NO: 26253 - DNA, 422 bp, Oryza sativa
  Clone ID: uC-osflM202065g06a1
aacaaaaggactgcaaaattttctgccttaggcagaaagtttggcttaggtttggccaaaccagtacaaaccgaacccccacatttgtccttccaataccgccataagaatttcaaagacacagcaaataattttgaggtactgtgccatgttggcacgagggaaacatgattgaactatctgctacgagctcacgactaagagtccatgagcacatacaggacaagaaaatacaacagttgtggtggcaagccgactgaagggtttgaccagcgcatcccctgggaacgagcgaaattgttctacaccactacctataaccaccggcacctaccaaacattcaaccctttgagctctacctctgttgaacatgattgcttagaagaacataagttacaacataaggactatagggcatgga

SEQ ID NO: 26254 - DNA, 125 bp, Oryza sativa
  Clone ID: uC-osflM202065g07a1
gtgtcatatttttttattttttttttttttgtttgtataaaaagaaaaaaaaaggctatttagggtaattacagaacccgggtaacaatattacaatcaggaagtgtaaaatagtatgataacgg

SEQ ID NO: 26255 - DNA, 279 bp, Oryza sativa
  Clone ID: uC-osflM202065g08a1
ggggagtaaggtttatttactccgccaaccccaccccactccttatttttgtttggctataatgtggaaaaagttaggggaattagtaaaaaaagaaattttgggtgttgtttaaaaaaatgaaaggttttttttttgtttataaaattaaaagttaaatatggaatttaagatgttagagttggtgtatttaataaaagggagagtggggtaatgttggttgttttatggttaagggtagtttattttttgagggaacgggaattggaaaaattggtt

SEQ ID NO: 26256 - DNA, 441 bp, Oryza sativa
  unsure (1)..(441): unsure at all n locations
  Clone ID: uC-osflM202065g09a1
gaccatgagagggtacctcgtattaccaaatactcgcaatgttagtacaatgcacaaatcctggagcaaatttcttttttgttgaccaacacgcatgcaaaacatgagattatccattaacttagcaacataaaaaagcagcatcacgaaagttagctccacttctggatattttacatggtcaggatgctaagtttttctacaaaacagcacttccattctccaaaataaagatactagacctagagctaattccagaataaatttcagtggtaagattttacaacatgcaggcttctgatggaattctgtcttcatgttccagcaattgttttacaaggtataagtggtttcaagcatgtgcccaccatcaccagncatagngtctgcatagtttgcttgatgctggctcccagcatatggtgcattccttcgcacacg

SEQ ID NO: 26257 - DNA, 264 bp, Oryza sativa
  Clone ID: uC-osflM202065g10a1
cgtaaaatccaaggacaaagtgtacaatcaaccagtagaaaccagaaagatcaagaaattgtgttcttgatctctaaagcctattatgcaaagggggcagaaattaacttaagacaggcaacaacagaaaatgatctcagcagatgctagcataagctttttactcctgatccagctcgaatggaacttacttcttggacgtatacctacttttcaatctcaacttccttggagtcgtactcttccttattgtaactggcctcc

SEQ ID NO: 26258 - DNA, 392 bp, Oryza sativa
  Clone ID: uC-osflM202065g11a1
atccatgcaggcagcctgtttgtgcccttgtgcagatgcatttcatttatacaagtagaaggcactcaaatcagccaccacatgaacacacacatgttccatcatcgatcgatctacacatgcatcacccggtcatgcacttacaaacaaaagatctacttgaagaagtacgggaggtcgagcacgtagaggaggaagtaggcccagaggacgccggagatgccgccgaagaagaagccgccggtgaacttggcccagccgtcggcggtctgcagcttgtcggcctccttcttgcggccggtgagcgtcagcgtcggcgccgtggacggctcgccctcgccgaaggaggcgacgccgtacatggtgaggcagactctgaggatggtgactag

SEQ ID NO: 26259 - DNA, 466 bp, Oryza sativa
  Clone ID: uC-osflM202065h01a1
gggtcactcacaaattggcatcgttttagctggcttcgttgtagatcctataataacgatacatcattaattcgatcatcccttggatgcggcctgcggcttacattaaatctcgatccaaagaagcaaagatgatgacagacagaaattaattaagctagaaatctcctcgatcgatcacacacacacacacaattaaggtacatacatacatgcactgctgcaactgcaactgcagggtcggtgcgtggctactacaagtgtacacatggtacgttggttggcaccatctcgatcgtgtcgatgtgctcacttgccggggacgaagttggtggcgtatgcccaggcgttgttggcgacggggtcggccacgtggtcgaagaggttctcgatggggccccttgccgtgacgatggcctggacgaagaaacccaacatggagaacatggcgaggcgggcggtcttt

SEQ ID NO: 26260 - DNA, 466 bp, Oryza sativa
  Clone ID: uC-osflM202065h02a1
acttcaaatgtgtatccgtatattcgatatgacaatcaaacctaaaaattttccccaactaaacaagacctttatatatatacatatttttcaaaaagtaagaatttttttttgcatgtttaaaatactcggcgtggcaacgacgccgtccagcttggagtagagcgccgcggccattctcagcgcctccagcttctttgaagggaagccctcgaacctggcaagcaccagcaatggaagccagtcaggccggccggccggcacggcgccgcgcatgcgcggcgccatggcagagcagccgagctcgaggggagtgagctggtttgtagtgcgcgcccggacgaacgcctgcgtctcgtcggtcaggcacgcgagctgcagtggaacctcgccagctcgcccatgtccatggattggaacgcgccgacggcgtctttcagctccaggatcgccgccgggtgggttc

SEQ ID NO: 26261 - DNA, 259 bp, Oryza sativa
  Clone ID: uC-osflM202065h03a1
gatatatacttaaactaaacgtggccttggtcaatctacgaacaaaggagacagtgagcaatgttttaaagacgatcaaaaaagtaaggacggagaccccacactctcttcttggcaacagagcatctttgtcattcttaccgcctccacattctttaatgggaagcactctaacctcggaagttccagcactggaagacagccatgaccaactggccacacagcgacgcataatcgcggcagaccaaaccttgtccat

SEQ ID NO: 26262 - DNA, 433 bp, Oryza sativa
  Clone ID: uC-osflM202065h04a1
ttttgttttttttttttttttttgttttttttttttttttttttttaaaaaggcaaatacagctcctcattttccatttttttgaagctgatgaatcaaatgagcacaaaccaaagaacaaacagcacaataaaaactacagccctagccactaattaaccacatccaaagctacaggctacagattgggcgccggggagacatgaacctataaacatttgctactcgctggagcttaaatggtttagaacgttaatttgtttccaatcgaatctacatacaataatttgtagacctacccaggtggttaacaaggtaaccgagggtgccggtgctatcgacgctagtaccgccggcgaaaaaggggtaggggaggatctctggaacggtgggcccgttacggggctgcctcgagagcttgttcaggaaggca

SEQ ID NO: 26263 - DNA, 432 bp, Oryza sativa
  Clone ID: uC-osflM202065h05a1
tttgtttttttttttttttttggttttttttatttgtttgttaagatcattgtatggagtatagccaactggtaattgatatatggtatttgagaggtcttcacacatgtgtcacggctaaaatcccctgtgaacagacatatgctttgatgcactgctattaattactaggccaaaagggtaatctggctcaaccgatggaatcccctatactagtttgagaccataaaccccacaacaaatcctgctaagtgacggcatataatattatggaaacacagcaggattctacaaagttggaaggtgcttgagtaacctcccacttcttatgccacagccgttagtcgtgctgggcagtctagcaccgggagggtggggggtggaacctaccctaagctggaacgttgatgtagtcagcctgagacttgcaga

SEQ ID NO: 26264 - DNA, 443 bp, Oryza sativa
  Clone ID: uC-osflM202065h06a1
ggattgaaattgtaataaggatgatctggaaaactaaagcgtttcatacatctcaatggagctgaaacttcaactaacaaaagagcgagtttatacatggcgaattggagataaataatactactagtagcagtctagcacaagcaacggcctggaaaataaggcgagattattacatcaccttatgagaattccatttgcttccctggggaagcaaactgcacctaccaaatgtattattgagcgcaaaattttaaccaagcagccatgtcaagttgcagtattgcagggggttgcaatttcagcaaattctgatacttcttcacttccggcgagcctccagtgccttgttcaactgctcgatcgcctcattcgacaccggcttcggtccactgtccaccatctccttgccgttcccgtggcgatctggcttcgccaggaaa

SEQ ID NO: 26265 - DNA, 466 bp, Oryza sativa
  unsure (1)..(466): unsure at all n locations
  Clone ID: uC-osflM202065h07a1
angttcaagcacagctggtacgagatgaggattaccatgaaacagaatccataaaacagcacttgaccacaatcgccgaatgcaaaaacatataaaaacaccaaaattaaacatctccagacatatctttaattcgagctacctaacatggtgccaaaaagtgctaacataaaccaaacatctgaaggccaacctgcttgaattctgaaatccagataggcaagctacataatttgggcccagttactcagcacagaaagttttatgatcattaaggaaacaactagttgcaaacttcttttctcattcctcatcttcctcctcaccgtaaccggcaccgncggttgccttgttgtggttcttcctcttcaccctaccaggggggcctccaccgaatgggcttgtcagtgagaagtcaatgtgcttctcagactcaaccctcaccatgaacgacgggatgttgaca

SEQ ID NO: 26266 - DNA, 472 bp, Oryza sativa
  Clone ID: uC-osflM202065h08a1
tgtgtttgccaagagtgttgtgttgctgaattacactatggactaaaaaggacagatacttatacagaaagtagccatggccagtctttgatcaaaggagatgatgaacaatgttttaaaaaccatggcagatgaaattactcagatactatatctcttcttgccaacagaacatctctctttctgatacggtgaccacatagcataatccagctaaaacttattctgatactttgcaactgaatcatcaaccttgagcaactgggcagaacccatgcataattgcagcagaccaaactttgtccatatcaagcaccttgtcaccacattcatgctcattccatccctccaacgcatgaagaattcccgcgattcgccatgcgctcataaccctccttggcagccaattttcgcatgaatgcacattctgcagcgtttttggtacagccattgcaggagttgccgagtagct

SEQ ID NO: 26267 - DNA, 447 bp, Oryza sativa
  Clone ID: uC-osflM202065h10a1
ttgtttttttttatctttaaaggcaagaatattattcataaatgacgcatgatttttatcaaaacgcttgcaaatgatatcagataagtagagtcaacaagacaaaactgtatctgccaaagcacacctccccaactccacccaattacgccattatttctgggcaaaagcaaacggcttcccattcctccccttcaccagtctcaaaccataaaccccacaacaaatcctcctaagtgacggcatataagatgatgaaaacaaagcaggatactccagagtcgtcatggcgaacttcaagttgacacttctcatgccacagccgctagtcgtgctgggcagcctagtaccggtagtgcgcgggcttgtagggaccctcaactggaacgctgatgtagtcagcctgcgacttggagagcttggtcagcctggcaccaagcttgccca

SEQ ID NO: 26268 - DNA, 440 bp, Oryza sativa
  Clone ID: uC-osflM202065h11a1
aaagaatatatgtaatccattaattggttgtaaagatcattgcaaggagtatagttgcatgaatcttgtatatatggtatctatgtggcctacaaacatgtaacacagctgatatcgctgtgaaagaatatgtatctgcagcctagaatactacccaaagcttctctgtccaatgaggaatccagataataatttggcaacttataatcattgcaaaattgagtaatcttatatctgagtctgctcttgcaaagcaaagcagctccaaaaaattgcaggatgcttgagtaacctccactgcattatcggtttttcttcgaaactttcgggttcttgcacatgcggatgcttgcaggagtaacctccactagctcatcttcttgaataaactctatgcagtcgtccagactgtagcttaacgcttcatcgagaaccactga

SEQ ID NO: 26269 - DNA, 456 bp, Oryza sativa
  Clone ID: uC-osflM202065h12a1
gccggcgtgctgcttctcctcgtgctggtacgccgcctggtggtagctgtggacgctgccttggcggcttggtgggcagaggtcgtcgtcgtcgtcgctctcgtcgtcgtcgtcgcagtcgtcgtcgtcagaatcttcctcctcgcaaccgtaggattggtggcggtattgggtatggccgccgccggcagtgaagtgctgcttgttggaggcagtcctcccgtacgcggcggcagtggcggtggcgccaccgtagtggtgctgcccgccgccagccacggcgaccgcgtggtggcggttgtagttgtacccgccggcgccgcagccgttgacaccctcgatcgcctggtgctgcttgtaggtggcgtgctgcttcacggcgccgccgccgccgccgtggtggcggccgtaccctccggcggcgtcgtactgatcctctatctcgtggtaggagga

SEQ ID NO: 26270 - DNA, 325 bp, Oryza sativa
  Clone ID: uC-osflM202066a01a1
ggacaacatgcaatttataaaacgtattggattacacgtacgcacagatcgtgtacatactgaagaaaattaagatagaacatgcccacagggggcgggcaacataaagtattcagctgatacagagagagaatggagcgctgcatgtttgccggagctgatattttaattactttggtcatatatgctggagcaagtgcgtgcttaattactagctgatcaactccctttgggctagcatgttaagctcgatcgatcgatccaagcaggatggatttaactgaccttgttgcagtccgtggagaggctgatggggaagcccacg

SEQ ID NO: 26271 - DNA, 406 bp, Oryza sativa
  Clone ID: uC-osflM202066a01b1
tgtgtttcgttccttcgttgcgttgcgttggttgatggatagatcgttctcgatggtgatggagggcatgggcatggcggcggcgtgggcggcgggggacctgtgggtgctggcggcggcggtggtggccggcgtggtgctggtcgacgcggtggtgcggagggcgcacgactgggttcgcgtggcggcgctgggggcggagaggaggtcgaggttgccgccgggggagatggggtggccgatggtgggcagcatgtgggcgttcctccgcgccttcaagtccggcaaccccgacgccttcatcggctccttcatccgacggtttgggcggacaggggtgtacaggacgttcatgttcagcagcccgacgatctggcggtgacgccggatgcgtgcaagcatgtgc

SEQ ID NO: 26272 - DNA, 514 bp, Oryza sativa
  Clone ID: uC-osflM202066a03b1
ttcattgcatctccatcatctccccatcctcgggtggactcgtgtcttccattggtgcatccctcgcgcgcatctccgacgagctctctactccctcctccgccgccgacgatgattcacctccactccccgccgacggcgcccgccgcattcggcggcgccggctcggcggactggcggcggcggcggcggtggtcatggtcgtcgtcgtcccgcgctccggtggctaaaggtggccatcttcgtccgtgcgtttggcggcgcggcggcgacgacggcggcggcgaggatcatcacgccgacagcggcggcggcggcggaggaggagcggcgtggagggcgcgggccaccaccgccggcgtgtcgagctccagcagtacagccaaagggctgcaagccaacatcatcgaacatgagaccccccggatcacgaaatggcccaatgaatcacgcgacctcgacgatcaccaacataacaacgaggctgatgaggaggcagatgatgagctgcagc

SEQ ID NO: 26273 - DNA, 474 bp, Oryza sativa
  Clone ID: uC-osflM202066a04b1
ttggttggaaccgaagagcccctacggaggacatgccataaacgaggtactgaaccatgattacatttagacctagattcgtagtgagacatttatagtcctagattcaaagtgggaaaaattacaaaattacagttgtgcttagcttcttacatattcaaaagaaacatatagaaaaggcggtaaaaaaaaagaagataaaaaaaatgtgaagaaagtaaaagagcccactgacttctactggtctacaccaagaaggccctatacacatcttatcttatagggtagtagtacaccatatgccagttccagtctagcttcagctgcagctgccatctgaattgttctctcatgttcggttcttgaaagatcacactgcaaaatgtttgcttcatgtaatgtttcccgctgaattgccgttgctggtctcgcctcaacctgcaggctatgatggagtatcatctacagatctac

SEQ ID NO: 26274 - DNA, 287 bp, Oryza sativa
  Clone ID: uC-osflM202066a06b1
tttctttgtaaggaggagctcccacgtgagcggtgggcttttttaaagacgggcgccttctaacaacttagccgaacatggcggcggattacaacacaaagccgcttgctgagaaggaccactcctcgtaatgcacggtggacaaagacaccggttggctcgtcaacaacatcgccgtgcactgcaatcccaactgcagttcgaactctctcgccccatccagaaaacatttcttcaatgtccacaagggaaccctcatgtatcatcagcccaaccttaagtacatt

SEQ ID NO: 26275 - DNA, 527 bp, Oryza sativa
  Clone ID: uC-osflM202066a08b1
ttcgtgtacgcgtgggcgacggcgaaggggccggcgggggtctcccgcgctcgcgcgggtctaacctgccgctgccggcgccgcactccgacccaaacctccagttctccgggacggacgatgacttctccaaccgtcacagcagctcgtcggcgacgggcggcgcgagccccgggtactactccgactacccgtccagcttcagcggcgagtgctcgccgtacaacatgtcgccctggaaccagaccatggcgtcgccgtggtcgcaccacagcgacgcgtccatggccgggctcggcggcgcgcccgccatggcgcccgggaccagcctcatcggctcgctggtgagggaggaagggcacatatactcgctcgccgacaagaccgacaccctgtacaccggctccgacagcaagaacatccgcgtgtggcgcaagcagaaggattcccgcgggttcatgtcggctagcggccttgtcaaggccatcgtcatctccggcgagcgcatcttcaccgggcaccaggac

SEQ ID NO: 26276 - DNA, 557 bp, Oryza sativa
  Clone ID: uC-osflM202066a09b1
tcgtaaaattcccatcgcttctcaagttctacgcgggctgtggcagttgcttctgggcccgccgccgccgccagttctagggttagctcgtcggcgtccagccctctcactctccccctccgctctcacgatggcggagagcgcgaagccgacgccgcagctggagctcttcaactcgatgacgaagaagaaggagctcttcgagccgcttgtggaggggaaggtccgcatgtatgtgtgcggcgtcacgccctacgacttcagccacatcggccacgcccgcgcctacgtcggcttcgacgtcctctacaggtatcttaaattcttggggtacgaggtcgaatatgtgcgcaacttcactgatattgatgacaagattatcaaacgagcaaatgaagctggtgaaactgtaactagcttgagcagcccgtttattaatgaattccttctcgatatgggtcaacttcagtggttacccccaacttgtgagccacgtgtgacggatcacattgaacatatcatagagttgataaccaagattatggagaatgggaaag

SEQ ID NO: 26277 - DNA, 510 bp, Oryza sativa
  Clone ID: uC-osflM202066b01b1
ttcattgcgagagagatctctcccgagctcgaggcggtcctccgcgacacgaagacgaccatggcgatggctcgctcccagcttgccgccgtgttcctcgccgtcctcgtctcggtggcgccgctcgccggcgcggtggacatcctccaggacgcgtgcaaccggacgctgttccccaaggtgtgcatccaggcgctgacgacgaacccggagagccggacggcgaacgcgcggtggctggcggagctgtcggtgtacgtggcggcggaggtgggcacggcggtggcggcgttcgcgcaccacgagctgaacggcgtgaaagaggacgccctgctcaagtgcgtggacagctgctccgaccacatctaggaggcggtggcgcacctcagcgcgctcaccctctagctcaccgacgccaagttcctcgaggtcaaggcctggctcttcgccacgctcgggggcttctccacctgcgaggacaccctgcaggacgcccccatcagcgagatc

SEQ ID NO: 26278 - DNA, 548 bp, Oryza sativa
  Clone ID: uC-osflM202066b02b1
ttcttttccatagctagcccactcgagcccttcaacttctcgcccaagttttgaagggatccagcgccgccgtcgccgcgatggagcacgccgtcgttgagggggagtccttctcgcccgactgctccaccctcctcatgccggcgctctcgatcggcaacgtggggcagctcgccgtcgacctgctggtgtcttcgtcgcgcgcgaggcgggtggcgtacctcgacgagccgtccgtgctgccctgcgccggcaacgacgccttcggccccgacgccgtcggtgatctcgcgctcgcgctggaagcttatgaatctccatcccataggctggccttcatacagcaacggtccccaattattacagggatggtggtttcatttgcaaaaaatgttgctaattttataagcagcattgaaaaagaccatgttgctatcctttcaagtttagattcaggcaagagaaggataattgatgcatccagtgatatgcaagtttattacctttcaaggtgcaacgaggacggttctgatccgaaatgtgagaac

SEQ ID NO: 26279 - DNA, 344 bp, Oryza sativa
  Clone ID: uC-osflM202066b09b1
tcgttctttgagcttagctatggcaatggccgggccgcttacattggtggtgggggcggctgccgcggccgtcgtcttcgtcggcggcggcgtggaggggtggctgctcaaggaggggttctaccagcagagctgcccgcgcgcggaggcgctggtgaagcactacgtggagcagtacgtccccctcgccccctccgtcgtcgccaccctcatccgcacccacttccacgactgcttcgtcagggggtgcgacgcgtcggtgtcgctgaacgggacggacggggcggtggcggagacggacgctgtgccgaacctgacactcccggggttcttcttaattgacc

SEQ ID NO: 26280 - DNA, 571 bp, Oryza sativa
  unsure (1)..(571): unsure at all n locations
  Clone ID: uC-osflM202066b10b1
ctcgtgtttaactgcacctgcccctacaaaccatgttttttcatactctcctgtggaacagctaaaccagaataccaatatgtctgcaaatgctatgttgtctgatcattattcactatatggtgatcatgagcgtgagagatttctgaggaatacccggatgagaacaagccctaatgagtatgatcaatcatcgtccaatctcttgcctgaaggaagtctcaggtgttctgtttatcagcctactcagcaacagtctttgtttattccagtacaacctagagcatcgagctcttcaacaagttctcttagtcggccttatgtgcctgctgtcactcaattctcacaaaatttgcaccgtgctccatcaagtggcaattttggttcgagaatagggatttttcctagttctgctgatacaacaaaccagttatcttcacaagatcccaacaggagctcggtgagaggcaattttnctgagccccctctgctagggtcttctctgtttccttctgacctcgcagaattgctatctatgcccggaggcagaagcaaccaacaaaattccagt

SEQ ID NO: 26281 - DNA, 514 bp, Oryza sativa
  Clone ID: uC-osflM202066c02b1
tgtcagaaggacgcctacgtcggcgacgaggcgcagtccaagaggggtatcttgaccctcaagtaccccatcgagcatggtatcgtcagcaactgggatgatatggagaagatctggcatcacaccttctacaacgagctccgtgtggccccggaggagcaccccgtcctcctcaccgaggctcctctcaaccccaaggccaatcgtgagaagatgacccagatcatgtttgagaccttcaacacccctgctatgtacgtcgccatccaggccgtcctctctctgtatgccagtggtcgtaccacaggtattgtgttggactctggtgatggtgtcagccacactgtccccatctatgaaggatatgctctcccccatgctatccttcgtctcgaccttgctgggcgtgatctcactgattacctcatgaagatcctgacggagcgtggttactcattcaccacaacggccgagcgggaaattgtgagggacatgaaggagaaagctttctaca

SEQ ID NO: 26282 - DNA, 391 bp, Oryza sativa
  unsure (1)..(391): unsure at all n locations
  Clone ID: uC-osflM202066c04b1
ctgaatcaccagccgccgccaccaccgccgccgttaaactggccgatggcggggggaggcggcagcggctctggtggtggagggcagctatanctactcccacagagacattgcttatacctatccaaattctactacaataacttccagctcaatctcaccggcattagacaatatacacggactttcaaagtctttgaccatcttataaacttgtcgcttgatgaagctctttaattctaaaaaagagcaataagatccattgaaactatcatggaaaaccatacagctagctcttattgcctgtagcgatacatcatcgactcttaaataaacaaccctattaacaaactatatttccaacccccttcacatcaataaagcataaacc

SEQ ID NO: 26283 - DNA, 507 bp, Oryza sativa
  Clone ID: uC-osflM202066c07b1
tataggcttcagagacacaaagcacttgacaaacgcacaagggcttgcagttataactgttatgctcgtcacgacatgtttgatgtcactggttattcttctttgctggaacaagagcattgtctatgctctcagcttccttcttttctttggtgcaatcgaagtaatctacttcgcggcttcacttgtgaagtttcacgaaggggcttgggtacctgtcactctttccttcattttcatgatggtgatgtgtgtgtggcactatggaactaaaaagaagtatgagtttgatgtgcaaaacaaggtctccataagttggctcttgaatattggcccttccttgggaattgttcgtgtacgaggaattggtctgatacacacagagcttatgtcagggattccagccattttctcccactttgtgaccaacttgcctgcgtttcatcaggttctggtgtttctatgcattaaatcagtatccgtaccacacgttcagcctgaggagcg

SEQ ID NO: 26284 - DNA, 538 bp, Oryza sativa
  Clone ID: uC-osflM202066d09b1
ttgaactagtggctgtgtggatgaactctgattggattccagctactatttgccatccatttcttgctgaattctctcttctttaattcatcctctcttctcctcttctccttcatcactaggcagtagccacagtagccagtagctagctagcttgtcaagctaggagctagcagctgtgtgtcgtcgatggcatccaccgccgccttcctgtccacgctcgccggctcgaccagcctgggcggcgccacgccggccagcggcggcgggagcgggaggagcaagacggcgaggttcttgaggaggcagcggcgcggcggcgcggcgagggcggcggtgtccggcacggagcatgcgccggagacgacgaataagaagggcggcggctgcggcggcggagacgagcgggtggtgcaggtgcacaagcgcgaggagctcgacggcgcgctgcgggcggccaaagaaccgcctgtggtggtggagttcgcggcgagccacagcgtgcacagcagccgcatctacccgtgctggtggagct

SEQ ID NO: 26285 - DNA, 512 bp, Oryza sativa
  Clone ID: uC-osflM202066e01b1
tgtcttttctcaattgggttattgcagcttcatgggagggtgctcctcctgtccaaatgggagaacgatatcctcacatgttcttgatcctcctactttttcatggagcccatgcggctttgaaagatccagtacagaaatggcagactcttggaggtcagcgtcctcttgtcattgctcgtggagggttctccggcttgtttcctgattcaagccagttatcgtaccaatttgcaatgtcgagtaccttgcatgatgtggctctgtactgtgatctgcaattgtccagtgatggcttgggcttctgcaaaactggattgacattagagaactcgacgcttatcgccgaagcctgtcctaagagggccaagacatacaaggtgaatggagaggaaatccatgggtggtttgctttggatttcaacgcagacgagcttgatcagaatgtcacattgattccggacatattttctcgcccagcacatttgatgggaccatgggactgttaccct

SEQ ID NO: 26286 - DNA, 396 bp, Oryza sativa
  Clone ID: uC-osflM202066e11b1
tcgtctgaactgaagcaggggaggggaggagaggagaggagagagcatcgcgttcaccgttgagagaagagaaggaagtaagacgagcgcaatgcgtagcgtcacggtgctcgttctgctcctcgcctgcgcggcagagcgcgccgccgtcggcgctgtcaccgacggactgctgccttacgagaacttccaagagggcccacgcaattgggaccttgtgaacgtcacggctgtgcgacggggcgatcgctatccgaccgtgggatatttaccgtgttcgtgcagcgcatcgagtctggcgacaagcaggagctcatggtcttgatggtgtcctactgcgtgacctccgtgcgcctccccacccatgcgaggattcgctaatgcgtcttatttacc

SEQ ID NO: 26287 - DNA, 444 bp, Oryza sativa
  unsure (1)..(444): unsure at all n locations
  Clone ID: uC-osflM202066f02b1
ttcatattaaagcctcccatcaacttcttgcacacaccctccctttggctttcatctgcatctattcatttgcagattgagagccaaagacattatattgattctatcaggagggttgtgctagcgaattcttgttagcaacaaattgacatattgctcggcacatccccaccgagaataccaagatgacgttctctggtacacaggacaagtgcaatgcttgtgacaagaccgtgcatttcattgatctccttaccgaggacagtattccctaccacaagtcttgcttcagatgcagccactgcaaaggcacactttcgatgtgcagctattcgtccatggatggggttctttactgcaagacccattttgagcagctattcaaggaaacaggcaccttcaaagagaacttgccctcangtacaaggcatacagtgaacaggc

SEQ ID NO: 26288 - DNA, 413 bp, Oryza sativa
  Clone ID: uC-osflM202066f07b1
tcgtttcaagccaagaagagggagagcaccaaggacacgcgactagcagaagccgagcgaccgccttctcgatccatatcttccggtcgagttcttggtcgatctcttccctcctccacctcctcctcacaggttcttggtgtagcttgccactttcaccagcaaagtttcatgtctgatctcgacattcagatcccaactgccttcgatccctttgctgaggccaatgctggagactctggtgcggctgcaggatcaaaggactacgttcatgtacgcatccagcagcgtaatggccgtaagagcctgaccactgtccagggattgaagaaggaattcagctacaacaagatcctcaaagatctcaagaaagagttttgctgcaatggtactgttgtccaggacccagagct

SEQ ID NO: 26289 - DNA, 536 bp, Oryza sativa
  Clone ID: uC-osflM202066f12b1
tcttctaatcggacggcgatggtaaatcgtagggggtaatcaaaagtcgatggtgtattgtacaatgcgacaaagtcgatggtaaattgtagatgtgtgacaaagtcagtggcatataatggattctctcctatatatatataggacttatgaaatgacttagctaaatgatttatcattttagaagtgattgcaagactccaattaatgaaacaaactgttcaatcatccatatattaaaaatattactgaattttaaattggcaaatcatgatatatgggttcttgttctctcttgtagctaatcgctataatatgtatgatatcgagttaccgatcatacatcaacgctacaaaatcactgttcactaaaccttaagtgagttgccatgtctcgtagatggcaccctccatctctaaatcttggcttcgccactgattattgttgcagcaggtacacctattagacatgcattcagttgatgagcattgaccacccaaccaaggtaccaatcaattttcgtccaaaacatatg

SEQ ID NO: 26290 - DNA, 421 bp, Oryza sativa
  Clone ID: uC-osflM202066g02b1
ttctatgaaggtgtcgctgatcagggcggtgctgtgggtcatcttgcagtgcctgggcgccatctgcggcgtggggctcgttaaggggttccagagctcgtactacgcgcggtacggcgggggagccaacgagctcagcgacggctactccaagggcaccggtctcggcgcggagatcatcgggaccttcgtgctcgtatacaccgtcttctccgacaccgaccccaagcgcaacgcccgcgactaccacattccggtgttggctcctctcccaattggattcgcggtgttcatggtccatctggacaccattcccattaccggcaccggcattaacccagcgaggagcttgtgaaccgcggttatctacaacaaggacatggcctgggatgaccaatggatcttctgggtgggccccctg

SEQ ID NO: 26291 - DNA, 498 bp, Oryza sativa
  Clone ID: uC-osflM202066g04b1
tttatatggtcatcgagattgaaagcaaatgggggtgtctttgtaaatatcattgtgaagaaggatatgaaacagtccctattattctgttgggacatgtcgaaatgcactggtactgggtttaaaactcttgaaaacaaaaacaaaccattagtactgaaggagctaaagaaactgtggaataaagaggatcctgatcttccatgggagcaagaagagttttcaccttcaaatacattacttgtggatgattccccttacaaggctctgggcaatccggcacacactggcatttttactcacccgtacaggtatcttaacaagaaagatgattcattgggaccaggtggagatcttccggtgtatctggagaaccttgctactgcagatgatgttcagcgctatgtacaggagcacccattcggtcaaccttccattacatagagtgatcgacattggaatttctatgcgaaaatactagataaactggagaagccc

SEQ ID NO: 26292 - DNA, 469 bp, Oryza sativa
  Clone ID: uC-osflM202066g10b1
ttcgtttcgtgttcgtcttcctctcgccgctgattcgattcgatccgatccgatccaaggggaggggaagcaatggcgacgaagaggagcgcggtgacgctgggggaggcggatctgagggggaagaaggtgtttgtgcgggtcgacctcaacgtgccgttcgacgactcccagaagatcaccgtcgacagccggatgcgcgcgtccgtgcccactgtcaagttcctcctcgagaagggcgccaaggtcatcctggccagccatctgggccgtgcgaagggtgtcacccccaagtacagtttgaagactcttgatccacgcttgactgagctacttggagtcgatgttgcgatggccaatgattgcattggtgaggaagttgagaaattggctgctgctttgacggaaggtggtgttctactcctagagaatgctagattgtacaaggaggtagacaagaatgatcctg

SEQ ID NO: 26293 - DNA, 562 bp, Oryza sativa
  Clone ID: uC-osflM202066g12b1
tcttaatttctgttatccagtctttgggagaggaggatataaatgtgaagtttctggtgcaactagacaaattaatccgtcttttagagactcctgtatttgcttacttacgtttgcagcttcttgagcctggaaaacatacctggcttctcaaaacactttatggtctcctgatgctactgcctcagcaaagtgcagccttcaagatcttgagaactcggctgaagactgtgcctttcagtgaaaatttgaaacgcacatcttcaacaaatccatactctcagattctacaagtgacagaagatggtaatcgaaatcacgacactcagagctacaatgcaatcaatttcccatcccggctccaccagtttgagagcatgcagcagcagcacagagttcatctaaagaatcaactgcaatcccaaaaatctgcttcagctatagtattatcacaggaaattcaaagatacgaagaagcacattcctcttcgacatcaagagattggcaggcccccttcgagaacatccagaggcatttcatgatgcattttgttgattggat

SEQ ID NO: 26294 - DNA, 336 bp, Oryza sativa
  Clone ID: uC-osflM202066h08b1
ttcgctcgccggcggcgaccaagaaaccacgcgaaggcgtggcattcccgagcggcgagggctactacctccacctcctcctgctcgcgatcctgccaagcctcgtcgcgcggcgcggcgcggcgcatcagggcggcgtcaacgagaagcagctcctgctccaggtcaagcgcgcgtggggggaccccgcggcgctcgcgtcgtggacggacgcggcgccgcactgccgctgggtgtacgtgtcctgcgacggcggcggcaccggccgcgtcacgtcgctgtccctccccaacgtcgcggtcgccggcgccgtccccgacgccatcggtgggctga

SEQ ID NO: 26295 - DNA, 438 bp, Oryza sativa
  Clone ID: uC-osflM202066h10b1
tcgtttccatcgctatggctgcctcgttgcgagccttcctccgccctcaccggggccgtctcctcctccgccagagccgcagcctctccgccagcgccgccccggccggtgccgccgccgcatccacggttatccggcgcagcgtagtggaggtgctccgggagcgggggctcgtggaggccaccacttctgagtctctggggtcggcttcagcgagccctagggagctcaaggcgtactgcggcttcgaccccacggcggagagcctccacctcgggaacctcctcgggctcgtcgtgctctcctggttccgccgctgcggtcacaacgccgtcgcgctcgtcggcggcgccaccggccgtgtcggtgacccctctggaaagagcgccgagcgggccgagctcgacctcgccgccgtcgagaccaactccaacgcta

SEQ ID NO: 26296 - DNA, 389 bp, Oryza sativa
  Clone ID: uC-osflM202115a03b1
tctggacagaaggatgaggcttactttgcagcaaacgctgctgctcaggcctccaggaggtcatcacctcgtgtgacaaacgaggaagtccaaaaggctgctgctgctctgaaggggtctgaccaccgccgtgctaccaatgttagcgctagactggacgcacagcagaagaagctcaaccttccagtccttcctacaaccacaattggttcattcccacagactgtggagctcaggagagtccgccgcgagtacaaggcaaaaaagatctctgaggaggagtacatcagtgccatcaaggaggaaatcagaagggttgttaagatccaggaagagcttgcattcgatgtccctgctcacggcgagcctgagagaaacgattgggttga

SEQ ID NO: 26297 - DNA, 292 bp, Oryza sativa
  Clone ID: uC-osflM202115a04b1
attgctgcatgctttagaaggagtgcctggtgaaaatgaaattggtgcaagagcagaaaatcttttggatacccttgccaacaaagaaaataatggtgatggcttcttggcagagaagattcaagagctccgacatgctacaagggatgaaatgcgacgccgtgctctaagaaaagagaaatgctacttcaggggctaggaatgcgacaagaatttgcttctgatggaggtagacgtattgttgtgtctcagcctataattgaaggcttggatgatggggaagaagaagaga

SEQ ID NO: 26298 - DNA, 117 bp, Oryza sativa
  Clone ID: uC-osflM202115a07b1
ttactactgctgctactgtgttcgtgttcctctcttggcctctctcttggttcgtgttccttccttctttctttgcgagaaagaaagatgggattctgggagcgctaggttttcctg

SEQ ID NO: 26299 - DNA, 394 bp, Oryza sativa
  Clone ID: uC-osflM202115b02a1
gggtaaacattgatcacaggccaagatattaactttttttagggggagaaattacacccaattacactggcaacaatgccagaaagaccactcccacgccaaacaaaaaaaaaggctgtgggcacacaggaacgaacaccctacagcaccagaggcagtgcaatgcaccacacacgaaaaagggtaaacatggacctccatggattatacgcatgattatgaaacatgaggcagctttcttaaagctcgaaaatcactacaggactgataaggcattaaaccagttctaagggttccagctaagtcatcaaaaagaaaaaagaaagaaggcaccggggggccctcacattcccccttgaaagtgaccagatgcacaaaatgcttacgatcggta

SEQ ID NO: 26300 - DNA, 466 bp, Oryza sativa
  Clone ID: uC-osflM202115b03a1
ttttgtttaggtaaaagacatgtactaattttgttattccttatgccgaagcaatattggatcaaaaatattctccacaatgtcgtggagcttgattgattatatggaatggcgatatgatctctctttgtgaactctgcatcctttcgctcaaaggtcctcggggccattgatatccttgttctcgatcactgctccatctgggatttccagtttgacaccaggttgggctgtgatggtcaccttgcccttcaatgtgatgctagagccaaaccaaacatcaccggaaaccttcaaggtgtcaagctcaacaatgctggggattgacttgaagcgaccaaggaaacacccgacctttttgaactctggacccagttcaattgagggattcgatgggtttgttctggccgggttgcgtgtaacaaagccatcaaccaaggtatatagatcagactgtactagctgc

SEQ ID NO: 26301 - DNA, 297 bp, Oryza sativa
  Clone ID: uC-osflM202115b04a1
tttttgtttttttttttttttgtttttttttttttttttttttttttttttttttttttttttttattttttttttatttttataaaaattatatttaaaaaaaataaaaaataaaaaaaaaaaaaaaataaaaaggaaaaaagaaccaaaaaaaaaaaaaaaaaaaaaaaaaaaaagaaaaaaaaaaaaaaaaaaaaaaaaaaaaatgaaaaaaaaaactaaaccatgggaaccaaaatgacaatcaacgtaaccaaagctcctgaaaaaaaaagcatggaaaaatacatcccttc

SEQ ID NO: 26302 - DNA, 114 bp, Oryza sativa
  Clone ID: uC-osflM202115b06b1
taccgtgccgctcgctccagcatggccgccgtgccgttgtgccacctacgaccacgacatgaccggcacggatgcaagcggaaaagacggcaacctattcacctaaattggtta

SEQ ID NO: 26303 - DNA, 419 bp, Oryza sativa
  Clone ID: uC-osflM202115b08a1
ttgttttttttaatttcatggtcttttatttgttttttcttattgccttatcttttttgtatcaaaaatattctcacaatgtcgtggagcttgattgattatattgaatggggatatgaactctctttgagaactctggatccctttcgttaaaggtccctggggcccttgaaatccttgttttcgatcactgctccatccgggattttccagtttgcccccaggctgggccttggatggtcaccctggccttcaatgggatgcttgaggccaacccaacatgaccggaaacctttaagggggccagccccacaatgctgaaaattgacttggagggacccaggggaccacccgccctttttgaactttggacccagttcaattgagggatccgttggttttgtcctggccgggttgcc

SEQ ID NO: 26304 - DNA, 447 bp, Oryza sativa
  Clone ID: uC-osflM202115b09a1
ggggctactctaacaccacaaaatcttccccttgagttgggattcttactatgaacatactacgtccaaaccgagataaatatacacgtctaacagaatatctaaaccgagagaaatcagaaattagaaagagaattcacatcaacattgacacgggtggttttcgcgctgcaccaatcacgaagcacccaagcacgaatctcggagcgccgatgcctaaacgcatttgagaaaccgttccaagctcgccgccgacgacccggccggaccctaccacgccgccgccatggtgcgcgcgatctgccccgacttcctcctcatcgcctcgcccttctccgtgtacccgattaccgtccccacggcctaggtcacctccccactttgcaccgacgagctgtacaggttcccgggcgccacctgcacgcacacccccgagtgcagcaccac

SEQ ID NO: 26305 - DNA, 463 bp, Oryza sativa
  Clone ID: uC-osflM202115c02a1
ttttgttagaactcaatgatcctatgcttcatggatttaaattataaaggacacatgctttcaaaattccgagtacttttgtgcagcacaatacaatgtcactgcggttccttattaggggtaaaaggagaaaaggaagacaaaaaaacatcgctcatcagaagatgtcacccctgcttgtaatcacgtcctggctacagaacgggcatatagaaaccagaatccaaaaatttaacttgtacagaacttaacaatgaagagatcttatgaagccgactccttggcgatcttctcagctttaggaatgacttcctcaatgcctcccaccatatagaatgactgctcgggaaggtcatcatatttcccatccaaaacaccctggaaactgttgacgctctccttcagctccacgtactttccaggagcacccgtgaaaacttcagccacatggaagggctggctc

SEQ ID NO: 26306 - DNA, 463 bp, Oryza sativa
  Clone ID: uC-osflM202115c03a1
tttgtttttttttttttttttgttttcacagaaaatcaatccttgcatgcaggggaaatcgatggatcgacctctctccttaacttgttcttaattctcatgtacaatcaaagaaacacacacgcacacacacatgcgtgcactgcatctttctgagcaacgaactcgattgatttgattttaattcgctagggattaaagagaagctgagatagagatttcgacgatcatgcgacgctgaaggagctggctgcgctctcgacgaacttcctggcgcccttgaaccaccttttgtcgccggcctgcgccttgcaaatgtacagcttgccgtcgttgacggtggccgtgatcagctggtgcttgccgccctcgtcgccgtccgccgtcctcgtcagcaccgttacgctgtagtactgtttccctcccaccaccggcgccgagctctccaggatgttcgccgtcg

SEQ ID NO: 26307 - DNA, 350 bp, Oryza sativa
  Clone ID: uC-osflM202115c04a1
actgattaatatatatcattaccagcagttctagcaaaagcatcagccattcagccccagcacatcatttctaatacctgtgtgctccaccgtccaaatgagcttccaaatatctatctaaattattcttctattaacaggacagaaaagcatattacaaggctacaattgccactgaagcaaaaactaataagagatgacagcaaataaaaagaaaaaaatgtgtgataagtagctctcattggatcgcatctaaggtctctttcctcttaatcctcctcttgatctccttctccagcttcttaatcccacccaccttcttcagctccttgggaccaaggaacagccca

SEQ ID NO: 26308 - DNA, 475 bp, Oryza sativa
  Clone ID: uC-osflM202115d02a1
ttttgttttttttttttgaaacaaaacaaacttttataaataaaaatcagtcacagtggaatgttgatcccgtaggagatctgcaaattgttgcgttcgaattctaggattatcaaagacagcatctccgcagagtgaagatcaccacatggcaaccattaccacctgctaccgtctattctgaactcaaaattgaaacaaatcacagctcaagataggacagccatcacatctgatactctcaagacaatgtagttggtgccatcagctcccttgaactcactgcctgcgtacttggagtacatcacagtgctgcccgctgaaactgacaatggctgccttttgccttcatcatcaagagggcctggaccaacggctacaactgttccgattgatggcttctccttagtggtttcagtgagaataagggcaccagcagttttgtcttcagcctcagcaaccttgatgagaaccc

SEQ ID NO: 26309 - DNA, 473 bp, Oryza sativa
  Clone ID: uC-osflM202115d04a1
gtgcgtcctcagcttctcgctggcgcgcgaccggttcctccgccgccgcttcttctcggcggggctccgccccttctccatccgcctcccgtcccccgccggcgccgggaccagcgtccacgtgtgggcgccgccgcggccggcgcgccgccccgtcctcctcctccacggcttcggcgcctccaccacgtggcagtgggcgtcctacctccggccgctcctcgccgccggcttcgaccccatcgtccccgacctcctcttcttcggcgactcctgcacgctcgccgccgaccgctccgaggtgttccaggcgacggccgtcaaggccgccatggacgccatcggggtgaggcggttcgacgtggtcggcgtcagctacggcgggttcgtggcctaccggatggccgccatgtacccggaggcggtggaccgggcggtgatggtgtgcgccggggtctgcctggaggagaccg

SEQ ID NO: 26310 - DNA, 298 bp, Oryza sativa
  Clone ID: uC-osflM202115d04b1
tcccgaatcgaaaccccaccatccgccgccggtgccgtcgtcgccgcgacacctgacgccatggaccccggcggcctgcgcccagcgccccagtcggccgacgccgtcgccgtcgccgtggctgcgggggcgggggcgggggcgtccgcggcggacgagccccgcgacgcgcgcgtggtgcgggagctcctgcgctccatggggctgagcgagggggagtacgagccgtggttggtgcaccagttcctttgactggcgctaccgttacgtctgtgacttgctcggagacgcccaattt

SEQ ID NO: 26311 - DNA, 75 bp, Oryza sativa
  Clone ID: uC-osflM202115d05b1
tgccgttcttgcgtcctgcagctctctctcatcacagtttcgctttggccaaaaaaacaatactgcaggtggttc

SEQ ID NO: 26312 - DNA, 447 bp, Oryza sativa
  unsure (1)..(447): unsure at all n locations
  Clone ID: uC-osflM202115d06b1
tctcttccgacctcctcccctctgatccggcgcggccatggcgtcgagcgggagcagcacggtggtgggagagatggagagcagcttggagcgggtngaggcgganntctnngtcaccttcagccgccaccttcttcagggccctctcctgaagcgatccgatacactaagaaaatggattgaacggtgggttatacttgatcctgcatctggaaagatggaatacacgattcctagaagtgtttctccctgttagttgatattattatgtttgttttatccttcacttctactgtttcctcctaaccccttctctctcttgacctactctcagctttcttccgttccttttctctctctcaccttccaatttatctttctcttctttcctttccttcttttcttctccttttcttttctttttcttttatatttctcattcacttc

SEQ ID NO: 26313 - DNA, 366 bp, Oryza sativa
  Clone ID: uC-osflM202115e02b1
gcagggaaatttaaagctgatctttcatggtgatctgaattattacaagcttctgtggttcatcaaaataaaatctccattaccttacctaaacatgcagatatatgtgaaactaagttggccgtacgtaacagtggatgagaaaggaaacaaaagtaacaaaaaagtagacacaacacatcaattaacacaaccagccaagagcaaccgaatcaatcaataatcgtgtcacgttcacgagaagcacagtgcttttgcccttccttctcgcgctcatggatgcagcgccgagtaagtcctgtacttgtcctccttcgccgaccggcgtgtcctgctcgctgccggcgccggcgccggagtgctttg

SEQ ID NO: 26314 - DNA, 453 bp, Oryza sativa
  unsure (1)..(453): unsure at all n locations
  Clone ID: uC-osflM202115e03b1
atgagaccaaaggagtgtatgttgctaagcttgaagaacttaaaaaggtggggggtcccattgaggcaaggtacaaggaatggatggacagaggcccttccatcgaccaacttgcttactgtatcaacagtttcagagatgctgccttgtccaaagatccgaagtttgatcacattgagatggaggagaaacagaaggtgattaaccagtgttccgaagcagaagtctggctgagagagaaaatacagcagcaagatgctctgccgaagcatgctaaccctgtcctactctcttctgatttaaagaaaaaggccgaaacggttgacaggttctgcaaaccgataatgatgaagccgaaaccagctcctaagccacagacgcccncacaaacgccaccgaccgagaccccggctggcggagcccaaacaccagagcagcaacctcagggagctg

SEQ ID NO: 26315 - DNA, 137 bp, Oryza sativa
  Clone ID: uC-osflM202115e04b1
tagcggccggccatcatcagtgatcctctacaatcatcgactttcagcaaattaagatggctgctgccttctcctccaccgttggagctccggcgtccactccgaccaactttctggggaagaagctgaagatgcag

SEQ ID NO: 26316 - DNA, 88 bp, Oryza sativa
  Clone ID: uC-osflM202115e05b1
taccgtgcacattctgaggagattcccctgggcccctttttattttaaatacctttctcttccccccccccccccttactcctttcta

SEQ ID NO: 26317 - DNA, 370 bp, Oryza sativa
  unsure (1)..(370): unsure at all n locations
  Clone ID: uC-osflM202115e10b1
ggangggggggtggagggggctaaatcagcttaaatttccccttttctgaacccatcctttacaaaacacaagctgccttccccaaatccaggccacgggggttacatttttccttttggtacaccagccggtttacaaactgaagaagatcgtcatccctctggaatcctattaatcagcctcttcatggggattccccaagtactggaatatccacctttaatgcagctgcacctccttttcaccattcagaggactcaaaatcggttcttgcagatactcgacgatattcttggccacctctttggccttctctagattgactgcatgcccagcttttttgataaccaccaatcgggatttctcccc

SEQ ID NO: 26318 - DNA, 105 bp, Oryza sativa
  Clone ID: uC-osflM202115f02b1
taccgatcacagtgctcaaccgtcgcgtccggtctgggttcttttacacagcaggtcccactactcaaacagaagattaagatagccaaagtccagataatgaat

SEQ ID NO: 26319 - DNA, 124 bp, Oryza sativa
  Clone ID: uC-osflM202115f09b1
ttacatgttacttgaacttcctctaaaagccggtcccagattctcatgggagaattcatattaccgaggtatatgatgatgatctccaatgaaagcccccccagagaaccctaaaacgggcgaa

SEQ ID NO: 26320 - DNA, 189 bp, Oryza sativa
  Clone ID: uC-osflM202115f12b1
gttaggtgtacaagatgccaccggacctgaaccggacaaagctcttcccaccggccaatttcaagatcgccggtgcatcatcactgaacccagactacacctgtggccagccggtgcccgtcagtcccacagagttccctgatccaagcggtcttgattcaacgtctctggtgaccgtgtcctggtatt

SEQ ID NO: 26321 - DNA, 537 bp, Oryza sativa
  Clone ID: uC-osflM202115g04b1
ttcgagaggagaggcgtcggggcggggggaatggcgtcgtgggaggagcagctgcgtgacgagctcgccggccgagacctcgtcgtcgcctccgtccccggtaagggccttgtccttttcgccgttcgcagtttcttcccaggagaagtcgttttttcgtaagatccttactctttctacatcattctttatctcctctttttctttctgtttcatttttttctttttctatatccttctgtttttcttcttctttctttttctctttattctttctttttttatctctttttatcttctcttttctcttctttttttttttttttttctactttttattttttttcttttttccttttctattctttttcttttcttttttttttttttctttttcttcttctttttttttttcttatcttttctttttttttttctctttttcattattctttcttttcttcctctcttctttctttctctctttctttttttatttttctattatcttctttttttttctatttcattttcttt

SEQ ID NO: 26322 - DNA, 435 bp, Oryza sativa
  Clone ID: uC-osflM202115g06b1
ttcttcgccagatgctgtggatgagatcaatcaactaagatgtgctagtggagaccattcttcgattgctggttctggacccgatgaaatgcagggagggatcaccgcatcggatcaaatggatctactgattgagcaagtgaagatgcttgctggtgaaattgcttttggtaccagttcgctgaaaagactgattgagcaatctattgaagaccctgaagggacgaagaatcaaatagataatttagagcgtgaaatccgggagaagagaaggcatatgcgagccctggagcaaaaacttatggaaagcggtgaggccatcagttgctaatgcttccatgatggatatgcaacagacgattaccaagctgacagctcaatgcagtgagaaagcttttgaattagagtatagatcagcttataatcgcgtcctta

SEQ ID NO: 26323 - DNA, 314 bp, Oryza sativa
  Clone ID: uC-osflM202115h01b1
tatttcgctctctctctctctccctccccgattcgattcaattcgcgacgcctccgtgaaattctccaaagccagcttgccctgtagccgcgtgctccggccatggcgttcttcaggggcctgaccgcggtgtcgaggcttcgatcccgcgtggcacaggaggccaccacgcttggtggtgtgcgatggctgcagatgcagagcgcatctgatcttgatctcaagtcccagctgcaggaattgattcctgaacaacaggaccgcttaaagaaacttaaatcggagcatggaaaggtccaacttggaaatataac

SEQ ID NO: 26324 - DNA, 103 bp, Oryza sativa
  Clone ID: uC-osflM202115h06b1
ttttcgatcgtgtcgccaggcgcgccagcactggaccgtgttattttatatcctagacatgctcatacccgacaaagaacatcatttcataaatattaaaagg

SEQ ID NO: 26325 - DNA, 116 bp, Oryza sativa
  Clone ID: uC-osflM202115h07b1
gcgctcgtctactggcagctgcagggatgctgcccttggtgctatttgcaatattgctgtgaatttaacacccaggaaatcgattcttcttcaatctggggctgcctcccagcttg

SEQ ID NO: 26326 - DNA, 503 bp, Oryza sativa
  Clone ID: uC-osflM202054a01b1
atgctggctcgcccgcctgcaccggcccggccttcccggctggacccacccacgcgtatgattgtgcggaaaagcatcatgctctgggccatcgttcatgctactgatatggtgggagtcacatgtcataagtaggcgctctcccactggcaggtggcagcatgagctggtcaaacagcactccagctgggctgagaacactaaccctactgtaggaccgatgaatcgcatcaaggacattcttgctggcaacagtcagccaactccagctatacatggacatgctcgattgagctgattatgctcaccaagtcccgccgacatgctcagtgtatgagacatctcctaaatatgtacccacttgaatcatgatcatctgcgaagaatgaatgcactggggcatcatatactcaatactgacaatcgtctgggggcttatgcgccgaaagatgtaatagattcacacccccccttggatgtgaatctatgcgtttagtgtgatt

SEQ ID NO: 26327 - DNA, 498 bp, Oryza sativa
  Clone ID: uC-osflM202054a07b1
tttttctactagtttagtttttgcgaagtgttcttgtccaaatcacctgagaaataggtgtcgattttcagaactagcgtgctagccactagtgtggccatggaagtggtttcttccagccactcctgcttggcatttaaccgaacacctagcagtgcttggaggtttccggggaatggtcttggtccagggcatgcaaagctcactcggccaagaagtgcaattctttgtgtgcggtcagggacagcttcgaatcctgctgattctgggaaagttcatgcgagccatgggttctatgtaagtgatgtcgatgcagctctccaagggatcccgaagaaagtcggtgagatcgagaagatgatcattccgagcttgccagaaggacctgaaagctctctaattagtactggtttctgggaatggaagccgaagctgagtgtatattatgaaaagtctggcatagacaatagcaaggcaccgtctgtgctctttctacca

SEQ ID NO: 26328 - DNA, 449 bp, Oryza sativa
  Clone ID: uC-osflM202054a09b1
ctcttttattcatggaggagaagcacggggcgggggtgtcggtcaactacaagaagatgctctccatccagctgcgcgggttcgcttgcaagggcaagctcgacaaggttaaggcctactacaagctctccgacgccgacaaggactcgcccaaggccaagcctgccgcccccgcccccaaggcagcagcgccgaagccagcgaaggacgccgtcaaacccaagaaggacgccgccgctgccaaacccaagaaggcccccgccgctggcaccaagcgcaaggcgccggagaagaaggtggccgccaagccccaagaagtctccggcggcgaaggcgaaggccaagcccaagaccgttcggtcgccggccgagaagaagacccgcaaggcacctgcagcttgagttgggagtttggtcgatagctatgtaggccccctcctggctgaaat

SEQ ID NO: 26329 - DNA, 329 bp, Oryza sativa
  Clone ID: uC-osflM202054b04b1
ctctatttcctcgaaggcctcgagccctcccctaccttgttctacctgctcccatggaggctgaacaagttctatctatcacctccaaccccaaggtagacagtatcaccaatggcgacaatgcgatcatcatgcctagtgtgagcaccgaggagaaggagcacatcaatggagctgccgagacagatcatgttgtgatgatcaccgagccttccatggacagaaccctcgaagacgacaggacgatcaaccctgaggagaccttgcctaccgacctcttcaggatgaacctgctacaccacgatgaccgcagcaagacaagaattgca

SEQ ID NO: 26330 - DNA, 390 bp, Oryza sativa
  Clone ID: uC-osflM202054b10b1
ttgtcgggactacccgctgagtttaagcatataaataagtggaggagagtttggaggctatggcgctgaattactcgtcgtgctcgctcaccagctcgttcctgatgaacgaggactgcgctggcatgatgtgtgggtgcgggtgctggtcggaggaggcctcgccgctgtcatccggtggggtgaactccctgtggtgggatgagctggagtttgagctggagctggaagaggaagaggagttcgaccctgtggacctcttgcctaccgaccccttcggcatgaacctggagaccacgttcaccgcggcgatcgccagttgcattgaggacctcacagtcatgtccagtgctgggcgttttggagacagccccgatgaatgctgttttt

SEQ ID NO: 26331 - DNA, 413 bp, Oryza sativa
  unsure (1)..(413): unsure at all n locations
  Clone ID: uC-osflM202054c03b1
tgttaatgccggtgagccggatcgcggtgggcgcccccggcgagctgtcccacccggacacggccaaggccgccgtcgccgagttcatctctatgctcatcttcgtcttcgccggatcgggatccggcatggccttcagcaagctgacggacggcggcggcacgacgccgtcggggctgatcgccgcctccctggcgcacgcgctggccctgttcgtggcggtggcggtgggagccaacatctccggcgggcacgtgaacccggcggtgacattcggcgcgttcgtgggggggaacatcagcctggtgaaggcggctggtgtactggggtggcgcagctgctggngtcggtggtggcgtgcctgctgtcaagacggaacggncggcgccgtcgtgggtgccttctcgctgtcg

SEQ ID NO: 26332 - DNA, 448 bp, Oryza sativa
  Clone ID: uC-osflM202054c05b1
gccttctcatctagcgccgcctctctccacctccctcgtttcgatctagctcgccggcggcgatgtcgcagccggcggcggtggccgctggggcggcggcggggcagcagccgcagggccgggcgcaggcggcgaggcaggcgggcggcggactggggcagaccatcgccgggatcgtgcggatggccgtgttctggtacttcgccgccaagttcttcggcccgaagcggcccccggcggagccgggcatgctcatgtccaacctcttccagaagggagagccgctggatagtgggatgtatttatcagaaaatgagaaattcaatgacttcagtaatgaggatgcactcgtctggcatgaggcaaacataccatatgcagtctggggacctaccagtacgagaacgcacacattgacatactatccttctgaggctatcaagacaat

SEQ ID NO: 26333 - DNA, 286 bp, Oryza sativa
  Clone ID: uC-osflM202054c08b1
tcttttgcacctgcacgcgaagacggactcggaggtgacgtcgagcatggcggcgtcgtcgccgccgcgggcggcctactacgtgcagtcgccgagccacgacgacggggagaacaagacggcggcgtcgtccttccactcctcccccgcggcgtcgccgccgcgctccctcggcaaccactcccgcgagttctcctcctcccgcttctccgccgccaagtccggctcctcccgccgcaccgtcgccgccgggggagacggcggcaaaggcggtgtcgcggctggc

SEQ ID NO: 26334 - DNA, 404 bp, Oryza sativa
  unsure (1)..(404): unsure at all n locations
  Clone ID: uC-osflM202054c10b1
gctggctccgcctgcattgttccggtcctgtattcccttttcgtcccacgcgttcggtagaggaagtagagttgcggcgacgagtagttggggttgggggaagagtaggaggctgccgcncgccttcatcttatgcttttctgctgcggttgggctctgtcccctttttctccctcgctatccttcgcccgttggcttcgtctttctttcccctctctcctgtcttctcctgcggcttcttctgctcccgtttcttcctcccccgcctcttctacattccacttgccccttactgcttcagcatccatgcttccaccctgatgtctgattaggtccggctctcattgattgtccagttctttgattccattttttttgctgccctcctatggttctcttcttgc

SEQ ID NO: 26335 - DNA, 460 bp, Oryza sativa
  unsure (1)..(460): unsure at all n locations
  Clone ID: uC-osflM202054c11b1
gtgatggagaaccagttccaggatggcaaggaggaggtcatcgaagcttggtacatggatgacagtgaagaggaccagaggcttcctcatcatcgtgagcccaaagaattcattcctcttagcaaactttcagagttaggaatattaagctggcgcctgaatgctgatgactgggagaatgatgagaacctcaagaaaatccgtgaggccaggggatactcttacatggatatttgtgatgtgtgtccagaaaagctgccaaactatgaggctaagctgaaaaatttctttgaagaacacttgcatactgatgaagagatacgctattgtcttagggaaagtggatatcccgatgtcagggaccaaaatgatcagtggatccgtgtngcagtgaagaaagggggcatgattgctttgcctgcgggaatgtattaccgcttacattggacagtgacaacta

SEQ ID NO: 26336 - DNA, 400 bp, Oryza sativa
  Clone ID: uC-osflM202054c12b1
tccagatctaagcaggttgaaatggccacgacgcagcactccaacggcggcgccgccggcgacaacggcgaggccgcgccgccgtcggttccgccctccctcgcgccgtcgcggaaggtggccctggtgacgggcatcacggtgcaggacgggagctacctgacggagctgctgctcggcaagggctacgaggagcacggccttattcgccgttgctccaacttcaacacccagcggctcgaccatatctaccacgacccgaactcacagtcgtcgactgcgagtcccctgttgcgcctacactacgtttgacttttagatatgttcttgtttcgtcgcgcgctctttctcatgatgcccggacatggtcttcaaccgagtggaacatgttgaccatgct

SEQ ID NO: 26337 - DNA, 378 bp, Oryza sativa
  Clone ID: uC-osflM202054d05b1
cggtctcttgggttcgcacagtagcaggacagtcgccgcctccatcaatggcgaaaccgacggtggtggtgctgcccgtgtggggcgccggccacttcatgcccatgatcgaggccggcaagcggctgctccgcggcagcggcggtgcgctgtcggtcaccgtgctactcatgccagatgccgacgctgtgtcaactatgcgagcagagctcaacggaagcactgttctacctccaacaaaatgagacccaaactgagattcttagcatcctccaccatgaagtgcgcaacattggacctctaaaacagcagtgcatcacttttggtgactactacattccccttttcttataggaggtttagatggtaacacctgaa

SEQ ID NO: 26338 - DNA, 355 bp, Oryza sativa
  Clone ID: uC-osflM202054d08b1
ttctaaaatgccactcactttccccacacgcgttcgtcactccaagctcgatgtctctctcccccgccgctttggatcaatcgtcagcgactcaccattcggcgactcggccattgacagcgatagtcgcacgggttcttgcttatttggatccgttcttccggggagcgagctaaccgggcgagcgagatgcagcaccagcaaggatttgatacacacaggctacaccaggaagtaaaatcgcggtggttaaagcctaaagaggttctgcagatattgcagaatcatgatcggttcatcaccacacataagactcctcataagccaccgtgtgaaggtcggtctgttcttaacc

SEQ ID NO: 26339 - DNA, 486 bp, Oryza sativa
  Clone ID: uC-osflM202054e06b1
ctcttttctgcttccgatcaaatcgatccccaaattccccgatccccgcagccgctcctgcgactcgtaggtctcgtcaagtcggcggcgacgactttgatctctattcaagatgcagatctttgtgaagactctcactggcaagaccataacccttgaggttgagtcctcggataccattgacaatgtaaaggccaagatccaggacaaggagggaatcccaccggaccagcagcgtctcatcttcgctggcaagcagcttgaagatgggcgcacgcttgctgactacaacatccagaaggaatccaccctccaccttgtgctccgcctccggggaggcatgcaaatctttgtcaagaccttgactggcaagactatcaccttgaggctgagtcttctgatactattgacaacgttaaggcaaagatccaggacaaggaaggggattcccccggaccagcagcgtctgatctttgctggcaagca

SEQ ID NO: 26340 - DNA, 485 bp, Oryza sativa
  Clone ID: uC-osflM202054e08b1
tttctatcacctcgatccattcgcagtagctgcgaggtgtctgacatggcgtcggggcagaaggtggtgaagccgatggaggtgtcggtggaggccgggaacgccggggaggcggcgtggctggacgacgacgggcgggcgcggcggacgggcacgttctggacggcgagcgcgcacatcatcaccgccgtcatcggctccggcgtgctgtcgctggcgtgggcgatcgcgcagctgggctgggtggccggccccgccgtgatgctcctcttcgccttcgtcatctactacaccttcaccctcctcgccgagtgctaccgcaccggcgaccctgccaccggcaagcgcaactacacctacatggacgccgtgcgcgccaaccttggcggcgccaaggtcaccttttgcggtgtcatccagtacgccaacctcgttggcgttgccattggctacaccatcgcgttgttcattagcatgcgcgccat

SEQ ID NO: 26341 - DNA, 423 bp, Oryza sativa
  Clone ID: uC-osflM202054f01b1
gctcgcccgcctgcacgtacccgtacttaacttgctggaccgacccactcgttctgatacatatgacatgcgctttacacacaaggagctacatgacccagggccttgcaaacggtgggatcaacgtaccaatgatgtcctcctctccaatattagctaatgctccagctgaaaaaggaggcaaaaacttaatgatggatttcctcatgggtggagtgtcagccgcagtttcaaagactgctgctgctccgattgagcgtgtgaagctgcttatccagaaccaggatgaaatgatcaaggctggtaggctctcagagccatacaagggtattggggactgcttcggacgcactatcaaggatgagaggttttgctttattggggagaggaaacactgccaatgttatccgtttcttccccacc

SEQ ID NO: 26342 - DNA, 473 bp, Oryza sativa
  Clone ID: uC-osflM202054f08b1
ttttctgatcatcatatatctcttgtgagcttcagcaatgggggctctgccaagggctctagtcctcggcgtttgcgccgccgtcttgctggtgaacgtgctcgccgttgccgccgacggcgacgccgcggcggcggcgtccatggtcgtcggattggccaagtgcgccgactgcaccaggaagaacatgaaagctgaggccgttttcaagggtgttcgcgtggcgatcaagtgcaagaacagcaacggcgagtacgagacgaaggccaccggcgaggtcggcaagtctggcgcgttcgccgtgcccctcgcggcggacctcctcggcgacgacggcgagctgaggcagcaatgcttcgcgcagctgcacagcgcggcgtcgaaccagccatgccccgggcaggagccgtcgtggatcgtcaacgccgccgccgacaagaagaagaccttcgtggccgtcgccggcgacaccc

SEQ ID NO: 26343 - DNA, 310 bp, Oryza sativa
  Clone ID: uC-osflM202054f12b1
tcgtaagaagccgcagccgcaagccccaagagcgaaaccgtatcgaagggaaagtttgggatgcgcgttgctgcgacgacgcggcccgcctcctcctccgccgccgatccgctccccctcttcctcctcctcgccgtcgccgccgccgccgccgccctgttcctcgtcggctccgcgttcctcgccatggccggccacgtcctcggcggcgcgcacgacgccccctccgccgccaacagcgtcgagaccgacgcgctcgcccgcttcggcgttgacgagcacaacaagcgcgagaacgcgctgctggagt

SEQ ID NO: 26344 - DNA, 469 bp, Oryza sativa
  Clone ID: uC-osflM202054g05b1
tctcgtggaagggagacatcctcgcaatcgcagggacagagaatgatctggtcaaaggatcagactccaaattcgagaatgcggtgttgaagaagctcgacggacagctcggcggcctcctgtcggaggcatctgcggaggaggatttcaccggcaaagccgggcaatcagtggtgctccgcctcccggggcagggtttcaagagggtgggtctgatcggccttgggcagaacgccccctccaccacaacggcttgcaagggcatcggcgaatccgtcgcgttagttgccaagtctgctcaagctagcagcgcggctcttgtttttgctttcagtgggggggatcctggaagattttacgcttactgctgcggcttctattgctctagggactgtgcctgggctgcccgaggacagtagatacatgtttggattcctaattaagtgcaacattcatcaagtcgttcctt

SEQ ID NO: 26345 - DNA, 404 bp, Oryza sativa
  Clone ID: uC-osflM202054g08b1
taatccccactttattagcaccaaccccgtctccttcctccattcctccgccgctagaaccttctagaagctctcctcctcctcccatggcggcgacgatcgtgtccgtcaaggcgcgccagatcttcgacagcaggggcaaccccaccgtcgaggtcgatgtgtgctgctcagatggaacctttgcaagggctgcagttcccagtggtgcatcaactggtgtctatgaagctctcgaattgagggacggtggatctgattacttgggaaagggtgtttccaaggctgtcgacaatgtgaactcggttattgccccagctctgattggcaaggaccctacgtcacaggctgagcttgataactttatggttcagcagcttgatggaaccaaaaatggagtgggg

SEQ ID NO: 26346 - DNA, 210 bp, Oryza sativa
  Clone ID: uC-osflM202054g09b1
tgtaaaagatccatccgagaaagagaggagtagccatggcgcgtgggaagaatcacccggacggggaggaggaggaggcgccggcggcggcgggggaggaggaggcgccggtggagatggacgaggagggggagatggaggaggaggaggttgtggagccgtgtgcggcggagagggaggagtgagacgttctggaggtggcggtggtgc

SEQ ID NO: 26347 - DNA, 400 bp, Oryza sativa
  Clone ID: uC-osflM202054g11b1
atgcttcttcagggagggcacaactctgccggatcatcatctgggtgtacggtcacactgtctgtagatgggaaggccggctgcgcacatggggagcgcacgcgcgagccaaggctacatgataggtgtggaagacttgcactatggggcaaggagtggaaggacatgacctaatgcgaccgcgggctggatttatcagagatgtcatgcggctgactggttctgcctgggcatgtgatgtacaggggtggggtaactgggcctgcgagggctgctgaggatagcttgagcagagaatctgtagtgggcaacaacattcggactgattctgagactaggatatactctatggagagacaccattgaccatggcatcagcttacgcgtgacttctttgaag

SEQ ID NO: 26348 - DNA, 445 bp, Oryza sativa
  Clone ID: uC-osflM202054g12b1
atagcatagctgttctcacacctgccttgtagctagagtggttagcagagaagggaagcagtggagttcaggttcagccatggaggttgaggcttcctacagctatggcttccttccttcaggcaggcaccagccttatgcaccacctcctccccaccctgcagaggaaggcgaattgtgggagtactttccatgccctttctgttacatcgaggttgaggtgcccttcatctgcaaccatcttcaggaagagcattgctttgacaccagaaatgctgtgtgcccgttgtgcgccgacaatatagggagagacatgggtgcccattttcagagttcaatcacttacattttttcaagagaaggataccttctaggcccagcagctcatggtctacacccttcaacattttaaacccctactttgaggggcccttcccattttttt

SEQ ID NO: 26349 - DNA, 275 bp, Oryza sativa
  Clone ID: uC-osflM202054h02b1
tcacttatgttggccgcctcgccctgccggttccggacctacctgctcgacccacgcacgcgatctgtttcgcccgaccttgaagacggacggggtagagttggtgtctcccggcgcgctcggaacctccctagaaaaaatgacttatatggtcgacttcgacgccgggaacatatgaaccataaaatgtgtaaaaacgatgttaccaaaaatcgtggacaacaccacttaccgatcgtgggaattaacaaccagtttaattgttcacacgaaaa

SEQ ID NO: 26350 - DNA, 492 bp, Oryza sativa
  unsure (1)..(492): unsure at all n locations
  Clone ID: uC-osflM202054h03b1
tcgatttagaaaacggcgcccactatgaacacctggaggggactaaacatgctagaaacatctctcgtcgctctccaagatctctcactggacaagatatttgatgaagccggtaggaaggccctatacaacgagatcccgaaattgatggaacagggttacgtgtacctgcctggtggagcgtgcttgtccgggatggggcgccatgtttctttcgagcaagctgtagcatggaaggtgctcggagaagacaacaatgtgcactgcctcgccttctgcttcgtcaactggtccttcgtgtgacccaaaatccaatccaccatgctcgcagtcatcgtcgttgtcgtcagatctccattttttgcaatctctgtagaagagaggacaccaaaccaaccacanacctgtcagctgttagctaatgattctactagcttttctagatctttgaggcaaaatgctgccggtgcctgtaagagtgggtgcgtgcgt

SEQ ID NO: 26351 - DNA, 164 bp, Oryza sativa
  Clone ID: uC-osflM202055a09b1
ctcgtctaccagatgaagatggggatacagatgggaccgtatcgacgacgaagggagaactcgaactctggcctaccatttcgcccccctccggaggcaatccaccactgcatcgggggcgaggcgtcaccgcctgtgtgtgatgtgctgccgtcccatgatac

SEQ ID NO: 26352 - DNA, 304 bp, Oryza sativa
  Clone ID: uC-osflM202055a11b1
ttagcatactgtcatgctctgaatttattgcttcgccgagaggcacgtgaattcgccaatgaacttcgagcaagcacgaaagcacctaaaaatccagctgtttggcttgaaggttctaatagcggcggtcagaatggcagtagtgctgacacttcaacagtatctgatgcatattcaaagatgctaacaatatttatcccacttcttgtggatgaggagttccttttttgcacattttatgtgctttgaagtacctgcccttgttccaagctgtgcttccgaatgcttaaagttgatcaggggg

SEQ ID NO: 26353 - DNA, 264 bp, Oryza sativa
  Clone ID: uC-osflM202055a12b1
gggcaccgaattccgagagttcgagccacgcgccacgtcttgcgtttattcctcaaattccaccctcctctgctcttctgcttcgtatgggagactctccaggccgcgagcgcgctggaagcatggggtccttggctgccatccatggatccacgctaaatgcattgcgaggctgcaaattggtagcattcccttccccgctgcatgtgctgcaactatgtaagcaggagtgtctgatttgacacgcccgaatacagcttctca

SEQ ID NO: 26354 - DNA, 194 bp, Oryza sativa
  Clone ID: uC-osflM202055b05b1
acagcttctcagagagtgccgtaattggaaggggtgcttgtggcactgtctatataggctatcatgcctgatgggagaagggctgccgtgaaaaatctgaagtgccagggagaaggttccaatgtcgataagaagctttcgagctgagataaccacactcggtaatgtcagggcccggtacattgttaagctgc

SEQ ID NO: 26355 - DNA, 373 bp, Oryza sativa
  Clone ID: uC-osflM202055b06b1
cttacgcttgggcggtcactgatgaactttttgagtaatatcctacgggaagagggtggctttgagtacaagaaggctattgttgattcaattatcatactcattagagatattcctgatgcaaaagaaagtggtttatttcacttgtgtgaattcattgaagattgtgagttcacttatatgtctactcagatacttcactttttgggaaatgaaggtccaaagacatcagatcctagtaaatacatacgttatatatataacagagtgatacttgaaaatgctactgttcgagctagtgctgtaagtactttggcacagttcggtgcattggttgactcactcaagcctcgaattttttgtccttctgaga

SEQ ID NO: 26356 - DNA, 295 bp, Oryza sativa
  Clone ID: uC-osflM202055b07b1
tcccgtaaaaatctccacccgccgccgcctccggcgacaccgccaccgcccaccggagagatgttgctggtgagccaggccgccaatggttccgtctccgcgcggcggctgccctccaagcagcccggccgccacggcggtagcggcagcagcagcgtccccaacccgtacccgctcttcgccaccacgcgcctcctcccgcaccgtcgtcgccgccgcctcgcgctctccggcgccgacgcgcgggcggggggcccctagacgccccgggggagggccttttcggatcccccgc

SEQ ID NO: 26357 - DNA, 292 bp, Oryza sativa
  Clone ID: uC-osflM202055b11b1
ttggcctctcgctcagatccgttcctccggcgaaaagcgacggcgactttgttgacgctgcggcctcttcccgaccgcgcagcaaagatttgaggtcaccaatggatgattcaacggatgacgattcgtatcatccaagaaaacactatgcttatgatcgtcaggtttcttcaagcagatggcgtaccagccgcgagtatatcagaggtcccggtcccgaaactcatactactgagagtgctcaagatggacaggatccacctgctggagtatattactatggctatttttc

SEQ ID NO: 26358 - DNA, 199 bp, Oryza sativa
  unsure (1)..(199): unsure at all n locations
  Clone ID: uC-osflM202055b12b1
ggtaccgatccggaggttccagccacgacccacgttttcnccttgggcggtcactgatgaactgtttgagtaatatccctcgagaggcggatggctttgagtacaagaaggctattgttgattcaattatcatactcattagagatattcctgatgcaaaagaaagtggtttatttcacttgtgtgaatccattgaaga

SEQ ID NO: 26359 - DNA, 375 bp, Oryza sativa
  unsure (1)..(375): unsure at all n locations
  Clone ID: uC-osflM202055c01b1
cttggttcgttcttgactggaaggtttctttggtgatggcgaaggcgagcgtggtggtgcctgagcaggtgggcgcggcggtttttanatcatttatattatccttctatttatatttatatttttttctccccacctatttttcttttttttatattctatttatatctccattttattcacttatttttcttattttttaatttctatatttttataatatttctacatattttttttattttttctaatttttcttatattattctctatcttttttatttcttttatacatactcttctcttttttttttatattttattctatattttattttcttttaatattattacattatttttacactttttttt

SEQ ID NO: 26360 - DNA, 134 bp, Oryza sativa
  Clone ID: uC-osflM202055c03b1
aagcaaaaaacgggaactaattgatggctctgtttctgtgatctgctagttagtatttttttatatatatcttattttttattttattcaaatatctatacttaataaatatttttttttttttattttttatt

SEQ ID NO: 26361 - DNA, 353 bp, Oryza sativa
  Clone ID: uC-osflM202055c04b1
cttgactttttcactgaatatggagaagcaaaccggtattaagccagtgcagcccctgcccacccgagtttttttcttctcccttcttttttgtgagctcgcctcgggagacgtaattccatctccagaggcagagaattgaatgctactaccacccgtgaaaggtacggtgtgtcgtgtaccgccttgaaatcttagctggttcgccggtgatcatgccgtgaagccgccgccgcaggcatcttcccggcgagcgagttggtaggggcgctttcactcgcgtagcttcgaatcttggccttcccggcggcgattggatggtgcccctgaccctgaggtgaattccaagaaga

SEQ ID NO: 26362 - DNA, 461 bp, Oryza sativa
  Clone ID: uC-osflM202055c05b1
ttctcgctctcgccgcggagcttggaggtttgggtgagatcggagcagcgaagcggaggcagccgcagccatggcgttggccgctcgcctcgtctcccgctcccggcagctatactctgctcaagctgccttggcaaatggaggtgccactcaagtccgcttgtatgccaaggaggcagatcgtactcccgtcaatggtgatgacctattgaagggcatatcttttgaggtaaagaagaaatttgagactgcccttggtgtacttaagaaggaaaagatcactattgatccagatgatcctgcagcagtttctcgttatgcccaagtcatgaagactgtaagacaaaaggcagatcttctatccgactctgagaggattaaatataccattgtcacctttacaaagggcattcctgatgcacggacttacttgatatctcttcaggagatccggataatga

SEQ ID NO: 26363 - DNA, 348 bp, Oryza sativa
  Clone ID: uC-osflM202055c07b1
ggtaccgatccgcaatttccacctagacccacgcttcacacattgatacaagtgaaagcatgcaaggaaagcctcttgagagcgctaagaatgccatgtacactactctttctgagcttgtgcaaggagattacttcaacataataacatttaatgatgagcttcattcattctcatcttgtttggagcaagtaaatgagaaaacaatagaaaatgcaagggaatgggtgaacacaaacttcattgctgcgggtggcactgacctcatgcacccatctgagtgaggtaatatgctttgcttttaaactcttacaatgcacttccacaaatcttttttgtgaccgatgg

SEQ ID NO: 26364 - DNA, 57 bp, Oryza sativa
  Clone ID: uC-osflM202055d03b1
ttgcaatctattcatctccgacctacctacccgctgctgtttccttacgcgaaagag

SEQ ID NO: 26365 - DNA, 87 bp, Oryza sativa
  Clone ID: uC-osflM202055d06b1
ttccacctaccctttagccgtcgcagatccgatccaggaagagcttgccgtcgccgttgccataggcgctctacgtagagaagacct

SEQ ID NO: 26366 - DNA, 463 bp, Oryza sativa
  Clone ID: uC-osflM202055d07b1
tatccgcaaggggtacaaggctggtgcactcaaggaggggatgaagcatggctacgtccgcgaatgcgagtacgtggccatcttcgacgccgacttccagccggaccctgatttcctccgccgcaccatccccttcctcgtccacaactccgacatcgccctcgtccaggcccgctggcgtttcgtgaatgcagatgagtgcttgatgacaaggatgcaggagatgtccttggattaccacttcacagtggagcaggaagtgagctcctctgtctgcgcattcttcggcttcaatggaactgctggtgtgtggcgcgtttccgcggtaaacgaggcgggaggatggaaggaccggaccacagtggaggacatggatctggcatcaaggcgagtctaagggatggcagttgtctaccttggagaagttcggtcaaaagtgagccgccaggccttcaaagccttt

SEQ ID NO: 26367 - DNA, 66 bp, Oryza sativa
  Clone ID: uC-osflM202055d08b1
tcccgttatgttctagaacgcgagcgcacccgtgatccatcctcttacaattaggaggagggagcc

SEQ ID NO: 26368 - DNA, 115 bp, Oryza sativa
  Clone ID: uC-osflM202055d09b1
ccttgcgttggaagcatattggcacccattctatgccaattgtactctcctgaggctcccatcgacaactggagatctcatgaattcagcatatggtgttcttataccttattaa

SEQ ID NO: 26369 - DNA, 139 bp, Oryza sativa
  Clone ID: uC-osflM202055e03b1
tctatcctcaaattccccgatccccgcagccgctcctgcgactcgtaggtctcgtcaagtcggcggcgacgactttgatctctattcaagatgcagatctttgtgaagactcttactggcatgaccatatcccttgtgg

SEQ ID NO: 26370 - DNA, 89 bp, Oryza sativa
  Clone ID: uC-osflM202055e04b1
ttcagactttctgctgaagaaccccactgtgacgatcataagccctgggatcagcaacactagagtccattcaagactccataagcaac

SEQ ID NO: 26371 - DNA, 113 bp, Oryza sativa
  Clone ID: uC-osflM202055e08b1
agcttacgctctttttctcgccaacagaagaaaaaccctcatctacactcccccctcgccggagccacggagaccctatttacccactgtctagtcgacggagtgtgatcatc

SEQ ID NO: 26372 - DNA, 365 bp, Oryza sativa
  Clone ID: uC-osflM202055e09b1
tacgtctactacaacgaggcgagcggcgggaggtacgtgccccgcgccgtgctcatggacctcgagcccgggaccatgggctccgtgcgctccggccccttcggccagatcttccgccccgacaacttcgtcttcgggcagtccggcgccggaaacaactgggccaaggggcactacaccgagggcgccgagctcatcgactccgtcctcgacgtcgtccgcaaggaggccgagaactgcgactgcttacaaggattccaagtttgccattcattgggaggaggcactggatctggcatgggaacccttcttatttctaagattagggaggagtccccggatagaatgatgttgaccatttccgt

SEQ ID NO: 26373 - DNA, 134 bp, Oryza sativa
  Clone ID: uC-osflM202055e11b1
tgtcgtccgattctagccagctccagccacacgagcctagttcaggtagatacaatggcgtccaccgcctctttcatgctcgccgtcttgctggcggtggccgccgcggcggctcctgctaggccttctccttt

SEQ ID NO: 26374 - DNA, 259 bp, Oryza sativa
  unsure (1)..(259): unsure at all n locations
  Clone ID: uC-osflM202055f02b1
acgttggccttctttttttaganaaaaacaggctgcttctacttcccctcctcccatgcccgcatcgagatcttagccgcgccggagatcgagagggaggagcggcgacgcgggcgcccccgatccctccttctcgccgccgccgccgccggcggcgccggagcagcagcagccgacgacgacgacgaccgccgcagcagccgatcggtggaggaggggaggtttctatcaccttttgcgtcctcttctcccttcttct

SEQ ID NO: 26375 - DNA, 121 bp, Oryza sativa
  Clone ID: uC-osflM202055f04b1
gttctcttctgattgttatgttgccccttttctttgacgggtttgtgcacatcaaatgaattcatggcgagaaacttcgttttacatttaatctttatttaaattacacaccaactgtcag

SEQ ID NO: 26376 - DNA, 173 bp, Oryza sativa
  Clone ID: uC-osflM202055f05b1
attccgagagttcgtcccacgccgccacgcttccggtctttgcaatcatgcaagagattagcaaactgtcataccgggttactgaggaagatgttatccgtgcacgtaatcagctgaaatcttccatccaactgcacctcgatggttccactgctgtttgtgaggatattggc

SEQ ID NO: 26377 - DNA, 355 bp, Oryza sativa
  Clone ID: uC-osflM202055f06b1
gtggattctatcgggtttccctttcttcttcctcgcccacgcgcgtggcgccgccgccgcagagctcgattcagaccatggcgtcgccgtccatcccggcggctctccgccacccgcatgcccacgccgccggcctccgcctcctccgctcctcgggagacccctgcccgccctgcacccttccgtttaggttatgtggagtgccattaaaaaagggccatgtgtacgctggtgctgtatctgctaccaggagtcctggcttgggcaatgcagagaatctgcgtgagagtccaagcttgtcaaggagctggggtatgaatgggcagattggcgatgatcatgatattcttataga

SEQ ID NO: 26378 - DNA, 497 bp, Oryza sativa
  Clone ID: uC-osflM202055f10b1
gcaatcatgcaagagattagcaaactgtcataccgggttactgaggaagatgttatccgtgcacgtaatcagctgaaatcttccatccaactgcacctcgatggttccactgctgttgttgaggatattggccgtcagttactcatctatggtcgaagaattcctattcctgagctttttgcaagaatagatgcagttgacgcaagcacagtcaagcgagtggccaaccgtttcatttttgaccaggatatcgctattgctgcaatgggacccattcagggtcttccggactacaactggttcaggcgccggacctacatgctccgttactagactcttcaaccgatgtactatgtttacattctgcataggcaagataatcgcctcttttggcatcagtatattatggcctcgtccatgcacattgggtgtgccgacgtggaggaaattcttttgggcaccattttccctggttttttttgtccaatatcaaccaa

SEQ ID NO: 26379 - DNA, 66 bp, Oryza sativa
  Clone ID: uC-osflM202055g01b1
gtcgcggtccccttcctcacgccagagccaccacagctgaagcgtgatccagcgacggcccgcgcg

SEQ ID NO: 26380 - DNA, 74 bp, Oryza sativa
  unsure (1)..(74): unsure at all n locations
  Clone ID: uC-osflM202055g03b1
atggatctacnacgcagccgttcatttcttttaaaaaaacagaaaagcacaaccacaacaagtttatgaatgaa

SEQ ID NO: 26381 - DNA, 59 bp, Oryza sativa
  Clone ID: uC-osflM202055g06b1
cccacacatccggtgttagtccactagctaccaaccaagctgccggcgagaggtatggc

SEQ ID NO: 26382 - DNA, 79 bp, Oryza sativa
  Clone ID: uC-osflM202055g07b1
ggtaccgaaccgcaattcccaccccagacccacgcttccggtctcagcagccacagagctgaaccgaagcaggggaggg

SEQ ID NO: 26383 - DNA, 84 bp, Oryza sativa
  Clone ID: uC-osflM202055g08b1
tcccgcttgctttgcccacaacagagaaagcgcgaggagtggagctcaaaattaccacacccccaccaccaatcaaaaataata

SEQ ID NO: 26384 - DNA, 497 bp, Oryza sativa
  Clone ID: uC-osflM202055g09b1
ctcctctttaagaatttcgaagcttagccgaagatgccaatggagaggtcggtgccctgcccccgttgtgtctctctttttctcttttctttctctttttctcttcctttctttcttctttttcttcttctttcttattctctcttctttcttctcccttttttttctttttcttttttcttctctcttttttcttctttctttctctctactttttttctcttctctcttctctctctttctctgtctctcttttcatttttctttcttctcttttctctctttttctttcctttttttctcttttcttcttcttccttcttcttctttccttttcccttcctttttctctcttttctttctctctcttctttcttttatccctccttttttctctcctcttcctctttcctcttttctatcctctacttctttttccccctcctctttcctcttttcttcctttccttctcttctttctatcttatttctttctc

SEQ ID NO: 26385 - DNA, 392 bp, Oryza sativa
  Clone ID: uC-osflM202055h01b1
ctttccttccccaacaactcggccaaattcaaagcaaagccgccattactgctcctcttccattccactggggacgtacgagctccgcgcatcccttccattccattactgaccttggctgctgcggctgcagtgcagagggggtttggtggtgcggttgtcccgcgccctttcttctcctggggggtggtggcccctttccctcctcctgcccttcctttgctctttttttttcctctgttctctttcttccgtctcttttcttctgtctcttctttctgtcctctcctccctcgttccctctttctcgtttctcgcttttttcttctcgtctcctttctcctctcttcttcttccctttctcctcctcttcttcctcctccttctctcct

SEQ ID NO: 26386 - DNA, 127 bp, Oryza sativa
  unsure (1)..(127): unsure at all n locations
  Clone ID: uC-osflM202055h09b1
tctncgtttatggagcaacgaccgatagcacacaccgtgacgctcacataaaagatatacacttcagaccatctacggcttcacagaaggtcatctcattaatcacctgaacaggacataccctccc

SEQ ID NO: 26387 - DNA, 442 bp, Oryza sativa
  Clone ID: uC-osflM202063a02a1
aaattagaaaagccactttcagttatctaaaaccataaatcccattttattggtggcctctactttttactcctaacaaattattgacgacctcatcctacaccatgcagtataacatatgcgaccaacacaagtcccacgtgtcatcttactactggataagctcactagtgcctagtgatagctacaatacgtggcatctcgcctaatcagtccacgtcatcactcaccacccccatcacgcaaccccaccccaatcactcactcaccaccaccaaccaaccacagtactgctcgtgctcgtgtcgtgcactgcgacgccgaccagtcagtgctcgccgccgccgccggcgacgatgtccttgatccggagcatgaggtcgcgcgcctcggcgaactccgggaagatgtagaaggcgtggatggcgtcggggtagtccaa

SEQ ID NO: 26388 - DNA, 360 bp, Oryza sativa
  Clone ID: uC-osflM202063a04a1
cactgatcaattaactggtacacacccaacgtaaaatgcatgaacccttgttcgacttatacaggcaatgcttattattgagtcggaactattccgccctttaagaattaattaacttggtacataattaagcagcatcaatcctaaaatcggatgagagcagacttgagacggtaaaccgatcgacacggtaaaaattaagaagacccaattacgaagtggaccataataatagtatacgatccccgatgcgcagctgacttgctttagcagacgccggtggtcttcttcttggccagcacgggcctattccagagggagatcacctcgcgctgcttctccatctgcctctagctcgcc

SEQ ID NO: 26389 - DNA, 443 bp, Oryza sativa
  Clone ID: uC-osflM202063a05a1
aggagctacgacgcatgctccccgccgtcagctggtagcctcttgtgcggccgccctcgtcttttttttggtttttagcgcgggcttctttaagatgacagcttatgttcctgaaaagaaaaatgcttttcccgaaatgcggaattcaaataaaaatttcccgttgggggccacaagccaactttcctattggggcctcacttcttggcccgaaaaaatccttataaaccatactaatatttttccccttttccccatacaccattggaataattatgccaatggatttttttcgacgggttaatgagcaacccctcataattttccctaggggcaacggatttttcaaagaaaactggaaaaaaagaaatggggatatgaagaagggaaaatttgtggagccctgcatgcgccgcccggtgctaaaggcttcttggaatccg

SEQ ID NO: 26390 - DNA, 423 bp, Oryza sativa
  Clone ID: uC-osflM202063a06a1
gggataaaattagttttctcaaatcttattaagagggcacccatgtatacataatgttcatataaatcgagatttgaatcataacgattaaaggcatgcaaccataactttactaccataccagggcttctccaaatatggcattttgcatgtacacgaacaatacctatgatgcaatacaatgtatttgggattataacttcatttcccaattactttatacagaactccgaaatgataagctccggcaaactgtactttgggaagattccctttctttctccaacttgacgaacacactaccatcgtatatacctttcacactatccttgggaaaatatccgttcttatcacttgcaagaccataaattagcccccactcctttataggtgcccccatgaatgtgggtcatttggatctcg

SEQ ID NO: 26391 - DNA, 401 bp, Oryza sativa
  Clone ID: uC-osflM202063a07a1
ttgttaaattataaaagcctctttcatttttctaaaaccataaatcccattttattggtggctcttacggaaagcacctaacaaatcaatgacgaccacatccgacaccatgcaggaaaacatacgcgaccaacacaagacccacgagacatcttacaactggaggacctcactagcgccaaaggggagctacaaaacgcggaatctagcctaaacagacccacgaaaaaggaaccacccccaagacgcaaacggcccccaactacaaactgaccacgaccaaacaaccacagaactgctggagcccccgccgagcacggagacgccgaccaggcagagctcgccgacgtcgcctgaggcgcaagcccggaacccgagcatggggacacgcgcccggggaa

SEQ ID NO: 26392 - DNA, 436 bp, Oryza sativa
  Clone ID: uC-osflM202063a08a1
gaagatatatggtatatagctatcagggaaaaagatacaaaaaaatgtacatttgttgatttatggtcagcactatgcaaccatggtgatctcaaggcgcaagtatatatcatgtctgtaaatatatctttttcaaaaaagtttttacatctctataggcagtgagatgcatgctaccaaggcttcaggtcgcccaccggtccagcagtccagttcagggccctctccccgggcttcaagaagacgttttcgccatgtggaagcttgcgagcgagaccattcagtatctgatggaatgcatctcctgcctgagcaggctgggggaacagcatggcctgcttcatcgacgggttcgcgagaagcctctgcttcctcaggataacatctgttggtatggttgtcaggatactgtccagcttcggaacatcctcctcgg

SEQ ID NO: 26393 - DNA, 437 bp, Oryza sativa
  Clone ID: uC-osflM202063a09a1
aaacacaaagatgactgtcatgttagataaatcagctttaactgaaacaaacagattgataatttacatataggcctgaataatacagtcctcggaacatgactaccatcagcagcctttgctgctgggagaggaaagtatacatacaaatgcgggctaaaagaatgcaaaaaaagacaagatgtatgggcatatactatacacaagactagcaacgctatccaaaagatgagattggctgtgcagcctgtccaggaaggcaggagcttcgtgaagtttcggcaccttccagccacaaaaatggggcaaaatgtgcgcgttcatgtgtcactcgattcactccaattatctccgtcttcatcgtcgcttccaaccgcctgtcgtatggcgttcgctttctctattatggcagcaactttcaagttccttgttgaggc

SEQ ID NO: 26394 - DNA, 454 bp, Oryza sativa
  Clone ID: uC-osflM202063a10a1
attccattctgctcttctgattgtaatgccacagaagagcatcagtgtttaagtcatgtgcaaaattatgacaaacaaatttgccgtccaccttttgatctaacaaaagggctggtcactcccaaaactccagatggatatatacacatcatttcgtttattaactatcacacgagattcctaaaacacattcatatgcgaacatccgcaaaactttttaccagttgataagcttgttgcatgaattctgcatcttcagagtgaagttgacgctgtcattgtcctttgagcatttccaaggatgataacaatgatggtaacatcatcgcggtactttctcctgctcccaacaggtatcctcatcaattcttcagctgttaaagctgcttccttcgctgctttaagtaaaagttgctcaatgagatactttgcaggatcaccaattggattatca

SEQ ID NO: 26395 - DNA, 356 bp, Oryza sativa
  Clone ID: uC-osflM202063a11a1
gtggttgagagcgcggacgccgggaagatgaccgagtggtgccggggttgtagaaggaggcgatggacatgcggttgacgctggggctcgtgaggacgctgtgcatgacccttttgtacctgccgatggtgatcacctccagttggtcgtcgatgttggcaacaattgtttggcgtatggtacgggacgtacacccactagttttccttgagcagtttgatgccgcttacctgggggcaactggaacagttggatgatgccaccggcgtggcttgggcgcggagcgtcgctttcaagatcggggccttggatcggcgggtagctgttcaccttgaggccaaacgattgtgcgcact

SEQ ID NO: 26396 - DNA, 78 bp, Oryza sativa
  Clone ID: uC-osflM202063a12a1
tttttgtttttttaattttctggggtaaaccctggcataaaattatttttctcaaatccttattacacagtcccaccc

SEQ ID NO: 26397 - DNA, 428 bp, Oryza sativa
  Clone ID: uC-osflM202063b01a1
attccaaggaaaaaaccatcactaggttaaagtgtttatgtaggccttctttagcaaggccgaatacaccggtccatcccccggatatgggctttacatactagacaaaaggccgtgcctgaaaatttaattcctgtagccgaacagcatgtttaattctcaacgctattttctctgcagtctgcactgcatagcgtgcgtactgatctttggggctctgctgatgcagtgtcaaattgcctttgaaagaaacccatatggtacacgattttgcgcacattattctcataataagatagtaaactttgattcagtgatgaccacgccggcattttttcttccttcattgcagttcgcctaccggagcttcgttgagccacaagaagtggatgaaatcgtacagcttagcactcacgctaaccttgtac

SEQ ID NO: 26398 - DNA, 427 bp, Oryza sativa
  Clone ID: uC-osflM202063b02a1
ttgttttttttttttttttttttttttttttttttttttttttttttttttttttttttaaagccccaagaaacaaggattaaccccccaaggggtaaaaaaaagggcccttaagggggggcaaaaaaaactttttagcaacaaacggggaaaagcccccaaaaaaccccatcaccaagactccaggcaaagccccaaaatcacaaggttcgttacagccaggggggccaaggcccttttttggaaggacccgcgacaaacacaggatttggaaggtttacgggcccaaacacagggggaaggtcaagaccaaaaggggggggtcaataactccaagggtacggggggctaaaatgggagaaaacacagacccgactaaatttctttctttagcgggaagaccccagggggggaaaaaacaaaaccc

SEQ ID NO: 26399 - DNA, 371 bp, Oryza sativa
  Clone ID: uC-osflM202063b03a1
ggaaaaaaatttataacaaattaatggagggaaggatgaattagcaccccacacacacatacatttcgggaattatttatcacaaatcgggaggtttgcatatgaaataaacaaccaaacactcgacggataaattaaccaaactttgattaacaacaaacaatcgactgggaatttataaaaatatggatcgccggaaccgctgcgggcggatggagtcgtggagaaggaaaccgcggcgcgctcgatcgaacgaacgatttcacaaatgcaccttgggtgccaccccgggggggccctaaacggcgccggtgagagaccccgcgaccttggcggcggttccaattccagctccaacttcagccccgggg

SEQ ID NO: 26400 - DNA, 449 bp, Oryza sativa
  Clone ID: uC-osflM202063b05a1
gaaaggaactgtagaaactttattccagatttatcatttattacccatccctaggacggtaacattcttgtgatgaaaatacatatgcccatgcttaaggtaactggatacaaggaacttcacatcacgtcgaaaaggaaatattacaatacaggcatgaacgacacggggaaaaaaaggcttgaagtaactccggtagactcatcagaattacagcgtgcagtactgaacaagtagtaagattttgcaggaaacagttcatagatatacatgactggaatagatccggataccggatgaccagattcaccggtagttgcggtaaagtgggctgtacatgcagctctctgcatacttaaccaggtcctttggccgagggcgcctgcttgccaaaccaagttcatatgcctttgctgcaacgttggctgcaatgtgggcagagatctttc

SEQ ID NO: 26401 - DNA, 424 bp, Oryza sativa
  Clone ID: uC-osflM202063b06a1
tttttgttgagtaaaaatagtttctcagtagcacgcgaacataggattgttgatgtgaaacacatgcattcgacaaaagggaaatgaaatacgacaacgaaagcagttctcttagcagtagaccaactagaacatgtaagggtaacggcacaacacatgcggcggccaaaaatttagagcttgtcctcgaaatcggagaggggagtcatctgctccttgagacccttcctcttgcggatatcctgcaccagggttgaagcctgcgagccagcttcaagaggatcagaggtcatcatgtcccaatggtcgaacacacactgggggaaggcctggccagatgtcgcagccctaagctggcttgagaacccaaaggactcgatgacagggaggaaagccttgatgttgtacagaggggtaccaggcc

SEQ ID NO: 26402 - DNA, 70 bp, Oryza sativa
  Clone ID: uC-osflM202063b07a1
tttttttttttttttttttttttttttttttttttttttttttttttttttttttttttttttttttttt

SEQ ID NO: 26403 - DNA, 405 bp, Oryza sativa
  Clone ID: uC-osflM202063b08a1
gggataaaattagttttctcaaatcttattaagagggcccccatgtatacctaatggtcatataaatcgagatttgaatcataacgattaaaggcatgcaaccataactctactaccataccagggcttctccaaatatggcattttgcatgtaccccaacaatacctatgatgcaatacaatgtatttgggattataacttcatttcccaattactttatacagaactccgaaatgataagctccggcaaactgtactttgggaagattccctctctttctccaacttgacgaacacactaccatcgtatatacctctcacactatccttgggaaaatatcccgtcttatcactcgcaagaccataaattagcccccactcctttatagctgccccccatgatt

SEQ ID NO: 26404 - DNA, 431 bp, Oryza sativa
  Clone ID: uC-osflM202063b09a1
aaaaaaatcctgaagtctgtaccaaagttcagtattacacctcacagaaaatggcccgtgtctgcagctgtgtttcttcttcgacagtcatgcgttcctctgtcgaaggggaacaacgtacgggcagccaatccgagcacagtatatatagtatagcagttctgcccggggacagtcaatgtgtgtgcttcgttacattataggagtatatatttctgcacctacgcgagcccgtacttggacagtggtcttagttttcgtacactttgcactcgtcggtctccgggttgtccttgcagaagtcctccagtgggtcgccgctgccctgcaccggcgcgccgggccacttgctcgccaccagatgcgccagatcgaccacgcgttggctgtagccccactcgttgtcgtaccaggcgaccaccttgaccatg

SEQ ID NO: 26405 - DNA, 431 bp, Oryza sativa
  unsure (1)..(431): unsure at all n locations
  Clone ID: uC-osflM202063b10a1
cagaaatcagaactgaaattaaggacgacgattacaaaagggtcatcacaaagaggatgccagcaagccactgactttacaggattttttctcacgcatcacaaaccaacgaacgatgcgatcgacgaagaaccatccacccaaacgatcactactggctcaggagcagcatcgcctccggccgctgctgcccgaagccgtagaacgggtggtgtgaatggttgcggnttcttcgncgccgccttggccttcgcctcggccatcgacaccaccagcaggttctccttgtcgccgtcgtccacgcaggccttcctcctccacctgccctcgtaccgcgagttgctccggccgtagcactggtgctccattgccgacgcgcggagggctgccggcgtcgaccccgacgcatgcgcgctgctgaggttgaagct

SEQ ID NO: 26406 - DNA, 440 bp, Oryza sativa
  Clone ID: uC-osflM202063b11a1
caaaagtaggtccaccacttcatctcatgcatatcactgaagcaaatcagtttacaataggtttaagtgacaaatggtaagagacaagaagcctcatgactacggctcaagagtgtcacttagaacagtaaactatcaaatgtcaacagacaatttactccaccttttccaagaaatccttgatctctgccggggttagaactttgaattcacggtcagatcgaataactccaatttcaatattgttggctgagatttgaccctcatatccttctttcagagtcaaaatggcagtatggatggcatcatcaagctccatgtcttctgggaatcttttttcaagaaatgtctttgcattggagacatttttccccatagctgatgctttccaggagaagtatgatcctgagggatcaacctgatacaactgggggccattg

SEQ ID NO: 26407 - DNA, 412 bp, Oryza sativa
  Clone ID: uC-osflM202063b12a1
ttgttttaatcaaatggagaggatatcttttcttttattcccatatcaaatggtacaaatattaaactgtctaagaacataactcgaatccgtattaaccaagagtaaagaaacaaataaatacaaacaaaatacgcctcttacaacaacatcatttttcaccagcatgtgttcccctccctattagaagaagcccttcacttcagctcacaagcagcagcttcaagtaacaaaagaaaaaaagctcatcacctcatttgctcagttcatggcaggtcctccttcatgccgcggacgaactcctccgagtgttccttggtgacgcagctggcgagcatccgcgtgccgtcgagcggcagcggcgccttgaggatgacgacggaggcgatgaaatcgttgttgaccagcgggc

SEQ ID NO: 26408 - DNA, 440 bp, Oryza sativa
  Clone ID: uC-osflM202063c01a1
gacgagagcggagcacactaagattcattcattcattcatttgatcaaagcaaacgagacgagctttcttcttgcgatcaaaaacacagatgggcaaccacacagttaacacaaactagatagttccacacaaaactaacgatgataacgatcggatgatgatgatggtagctcgattagatagatagataacttggccatgagggccccaccgctcagttcctccagttcccgtcggagttgccgccgccgcggctgccgtagccgccgccgtagccgccgccgtagccgccgccaccacggccgccaccgtagccaccgccaccgccgtagccgccttcacggcgctggccgtagccaccgccgtcgtcaccaccaccgtagccgccgccaccgtagcctccgcctccgccgcgctggccgtagccaccgccgcctcc

SEQ ID NO: 26409 - DNA, 367 bp, Oryza sativa
  Clone ID: uC-osflM202063c02a1
gatctgctgaaatggtccaattgcaaagaagttggtggtacacgtgcaggaagtacatgaagattaagatcaatgtataatatgtacatcgtacaaatacgcaacagtcaacagatggcatcacttcaaatcttatttattcaactactacacgatagtaccactctttgcacacgtatgagcgccgtgccgggatggagagaggtccaaacccaacccaggacgaaatcaccacgcacgagggggtgctccggaccctgcttcgttcaaccggtccagcaatgtgttgaaatccatcggctggccactcttggtcatcctctgaataacattcattacctgctccctgggatatcccatggtgatt

SEQ ID NO: 26410 - DNA, 103 bp, Oryza sativa
  Clone ID: uC-osflM202063c03a1
ttgggtttttttttttttttggttttttttttccaaaaatgttttgaattaaaacaactttttttatatgggagaaacttaaaggaacaacaaggaccagaac

SEQ ID NO: 26411 - DNA, 395 bp, Oryza sativa
  Clone ID: uC-osflM202063c04a1
ggggcagaaatcattaataccaaggcagaatgcccagcccaaaaccaatacaagagtgccaataataattaaacaaactcaacatctagtacttgactatagcaaactgaagcccgtaccccacacgaaacacaaacttcgatcactgatcgggcttcgctgaccaggccttgaccaatcttgacacgaacttaacaaagctgcagtgcagaaaaagcaccaaactaacacacgccaaacacttccaaattccaaccatggcctggtctcacacacgccccaattaagcgctgctcttgtgctcgccggtggcggcggcggcggtcttgtcttcctcgccggagcccttgtggtaaccgggcagtttctccatgatcttgcccagtatacccttc

SEQ ID NO: 26412 - DNA, 372 bp, Oryza sativa
  Clone ID: uC-osflM202063c05a1
gtaccgtaaccagcaattggtatattaactcgagcaaacttaaaatgctcgaaaaagttgttcagcaacgaacaaaaaaaaagctctaagcaaaataaaactaatcacattgttgcccaatggcagataaagctttgagcataccaactgacgacggttacaaaatcctaccatctgagagcatcttcctcttgtttattggcccgggggaaaaaagggtaaaatgcggctaactctttcgagtttatgctcagttattagcatcaaagatgctcaaagagttaaaaaaaaaaaaaaaaaaacgcagccgtgtaggcgtgtgtagcttcaagcagcaaccttcttgcagtggttctccagccactccatggt

SEQ ID NO: 26413 - DNA, 297 bp, Oryza sativa
  Clone ID: uC-osflM202063c06a1
ttttggtttttgattttctatgaacatttttttattttagtattattcatggacagacacactggagactggagagagatgggagataagatcgagctcgtaggctcacgaattccaagcatataacaacaactacaatctttttcaccacgacggcccggaactcactacttacttaccgctggtaaaaacgcaacgcccaaggcttcttggatcagttgggggcggcggacgtagccttcatcggcggcggaggggtaccctcttctccgggtcccggggcgccgggatgagctg

SEQ ID NO: 26414 - DNA, 405 bp, Oryza sativa
  Clone ID: uC-osflM202063c07a1
ttgtttttgacgagagcggagcacactaagattcattcattcattcatttgatcaaagcaaacgagacgagctttcttcttgcgatcaaaaacacagatgggcaaccacacagttaacacaaactagatagttccacacaaaactaacgatgataacgatcggatgatgatgatggtagctcgattagatagatagataacttggccatgagggccccaccgctcagttcctccagttcccgtcggagttgccgccgccgcggctgccgtagccgccgccgtagccgccgccgtagccgccgccaccacggccgccaccgtagccaccgccaccgccgtagccgccttcacggcgctggccgtagccaccgccggcgtcaccaccaccgtagccgccggcaccgt

SEQ ID NO: 26415 - DNA, 435 bp, Oryza sativa
  Clone ID: uC-osflM202063c08a1
agctgtccaaccaggaaactggttcaagtatatgttggtggtacaagtatatgattgtacaatttctctttaccaaaaaactattgacactgacatgagcatatatggaacacaataactaaatacaagagagaaacataatcagacccttgaatatgtgacatgtccttgcaaattacaggttcatgacctaattttgataaccatgtgacagggctaagtccacatgcctaccaatttcatactgtaatatatttcaggatggatgagcgaacattctccatgaaagccacagcttcttcctgattgttggtcttggcgcttgctatattttcatcgaggagtgttagtatggacatgttgagctcattccgttcaaccatttcaagaagtgtcgattttttgtcgcttgattgcaggatctttgtgaggcgt

SEQ ID NO: 26416 - DNA, 368 bp, Oryza sativa
  Clone ID: uC-osflM202063c09a1
aacaaaaaaaagagagggaacgaggaccaaatttgcataccaaaccaggaccggccccatgaaatgaaaccaaaccaaacaggtgtccaggattccaggggtgagaagagacgagattggaattggtgacaatactaatgagggaccaagggctttggaacagcatatagatgcgggccttggatgaacaaaaaattagacctgttaacctggccccacagggcctcaatcgggggggggcaccattaaaacacttgcacagcatgcatgtaaaattcttacaaaggcacgctctgccttaaaggtcagagggaaactccaatccgaatgaagttaaaagttccaaaaatacaattgattacagggcc

SEQ ID NO: 26417 - DNA, 387 bp, Oryza sativa
  Clone ID: uC-osflM202063c10a1
cagggcaatggaagaacaaatgaggtttaattgtttttgtcactgtatgtgacagcagtaatgtacactgtacagtttcaggtttgcgacaacaacaacagggggtgggttgggagctcgtcaactaatttattcacacagatgaacccggtgcttatttttgcttgcttttgcgttgcgaactcgatgttgacgtttattatttgcttgcttttggacggccggcagcttcatcagccaacttattaagcgtttgtgaattgagctgtacaggtcgagaatctatgcctgggtttctcaattgggcttgctctccttcacggggaaaaggacattacagtcaaaaacttgttgtccggcagttgcctttatcctttcccatatccg

SEQ ID NO: 26418 - DNA, 441 bp, Oryza sativa
  Clone ID: uC-osflM202063c11a1
acgtaatcaatgatgaaattaattaattcccaaacatgtacatctatacatataaccggccggcggtggcggtggcggcggcggaggcggctgccggccgtgcagcggcggcagcagcaccggcgtggtggtggtggtcggcgaggacggcctcgaggacgtgcacgaccctgcccatggtgggcctgaccttggggttctggctgaggcagtcgtaggcgaggcgcgccacccgctcgacggcggcgtcgacgccgccgccgtagtccgccgccggcgccggcagcgccatccggcggtcgacgatcctctccagcttcttgggccggatgaggatggggcgggcccagtcgacgaggttgcacttgctgcagccggcggccggcggctcgagcgcgcggcggccgacgagcatctcgagcaggacgacgccgaagccgt

SEQ ID NO: 26419 - DNA, 369 bp, Oryza sativa
  Clone ID: uC-osflM202063c12a1
ttgttttaggaatccacaagaacatatatttatttcagcatcatccatggacagacacactggagactggagagagatgggagatcagatcgagctcgtaggctcacgaattccaagcatataacaacaactacaatctttttcaccacgacggcccggatctcactacttacttaccgctgctaaaacgcaacgcccatgtcttcttggatcagttggtggcggcggcgtcggcctcgtcggcggcggcggcgtccttcttctccggctccgggggcgccgggatgagctggaaggcggtgacggggagggcgcggccgatgccggccggggggcggaagacgagcttggtgccggaggggctgagga

SEQ ID NO: 26420 - DNA, 462 bp, Oryza sativa
  Clone ID: uC-osflM202063d01a1
gttcttgatgtccacgtcgagcggcgcctccaggcagttgagcgccatgccctcgcggtcggcggccgacggctcggggagcttctggccggacttgatcttgacgatgccggaggcaggctggctggacacgagcttgacggcgtcggactcggcgaggtcccatgcgcggccgacgaactccgtggagaagccggtgaagatgccggtggcaccggtgagctgcatgtttgtgaattggccggccttgtgcgccttcgatgtgtcgccgaggaagaggatgacgagctcgattggggactccgggaggttatgccaccatgtcaccacgccaaaggggagtgccagggagtctccctccttcacggcgatcaccttctccttgctcgcctccggcaggacaatgccacaagtgcccttgccttgaagaacatacgcaacctttccggagtcggaaaagct

SEQ ID NO: 26421 - DNA, 442 bp, Oryza sativa
  Clone ID: uC-osflM202063d02a1
aattaaagcagcaatcattggatcgttaagcaggttacaacccatgctacttacaaagaatttcgtaggaaaagtttgcagccatatacaatacaaatactattagaggtgtaccaaatttatatttgaacagaactcgtgtgcaggtagaattacacaatatatcatatccaaatcttggagaaaatgcatcttccatagtatcagctgcaaactcccaactcccaacttactcagcagctcaagcacgttattgtgaaattgagagatgcaacccttaccttgcaactttacacatacactatgatacaggttctcttgtcccattaagcacaggaatcagcatggcaaaagctgttagaagtagtgtcatttagttcttcaagaagagtgcatcatcagtatatggctcaacatatctagtctaaccaccagctaaata

SEQ ID NO: 26422 - DNA, 436 bp, Oryza sativa
  Clone ID: uC-osflM202063d03a1
caccccaaaatacagtttagcgacaatatcttagaaaagccgcttgctttgccgccatggctggcaagctgagcagagcagctaacacaaagaacacgagatcactataaaccaaacggcaacgaacgaagaaaatacagggtcttttttgtctgaagatacacgaagcggttcgttttcttttatttttagtctcctctcctcctcgatgatgggtgtatggcaatggcaatggcgatgggatcttggcttagttgatgggaaggggctcgccgttccactccttgaggcagtcgagcatggggtcgatgagcttgccctggctgatgccgaggaacaccttgttgcactcctcgccgggggacttgagcttttcgccggtgaggaatacgcagccgagcttctcgcggacgaaacggtagagcgggaacgaccg

SEQ ID NO: 26423 - DNA, 365 bp, Oryza sativa
  Clone ID: uC-osflM202063d04a1
tttttgttttttttgtctgaaatattgtcatatcaaaatttatcaggttcaagatttaaggttaagacttcctgtaatacattctcttcgaagaaaaataagctgatactgataggttacaggtggatgagccagccggaagtatggagggggcaatacgtgcacgattaccagatgacatggacagatggtttttagagtacccagttttcttttaactaatgggcgagttcattccaccattttttaaaaacagtctttgttgaatcaaaattgaaaactgaatttatgcgggagccttggtaaaatgaacatttcggccttttaaatgactgattgcatccttaaaaggggattttcccagc

SEQ ID NO: 26424 - DNA, 292 bp, Oryza sativa
  Clone ID: uC-osflM202063d05a1
attgtcacttatttcatcagaaaagaaacacatgctacatacaccacagctcacatccatataaggtgaaactacataattcaccaaataaatttaggtttcaacatacacatgttaattaaagaaatatcaaagctttaagacaagctagcttgcctaatctacaaattcagacagtcatgtgacatctcaacagatgaagcagctacatatatttcatcttaatatatctatcagcagaccaaagcaacaaattcttccatagatcaataattcaatatcgaatcagtca

SEQ ID NO: 26425 - DNA, 447 bp, Oryza sativa
  Clone ID: uC-osflM202063d07a1
aacaaaagccatactctctgtattaaagatccaacaggttcagagaacacgcaagctcagaactacacatcaccaaaattggagcaagtttgggggtacatatccgctcatacagtggaggatttatttctcgattctacgagctttttaactagagttcgaccgggaagtcaattacggatagaaatgagcatcctgtcttcacaaaacccatgcacacaacagtgggcatgaaccgcatgatattcaccatcaagtttagtagggctccacgggtgcgcggaacttggcaccagcgtagacagcagccgcaccaagctccttctcaatcctaagaagctggttgtatttggcaaggcgctctgatcggcagggtgctccagtcttgatctgacccgtggcccaaccaacagccaaataagcaatgaaggtatcctcagtttcacc

SEQ ID NO: 26426 - DNA, 338 bp, Oryza sativa
  Clone ID: uC-osflM202063d08a1
atacacgacttaattcataataatataagaaaccaatcggaatatacagggggcacacaactttttctaaggtctcactggattcgaatagggggcaccgacccagaccaattttttgacgggtaaaacagggacaaggaaacgaaagaaaagggggggaaaaagaaaaagaaaaaggagaagacgagggaaacgaactttgaaaaatcccgggttgggcagagcatcgggagggggcggaggggagctcatcaccttgcaactttacacgtacactatgacccaggtgctgtggtcccattaagcacaggaattacatggcaaaagctggtagaagg

SEQ ID NO: 26427 - DNA, 315 bp, Oryza sativa
  Clone ID: uC-osflM202063d09a1
ggacaacatgcaattcataaaacgtataggattacacgtacgcacagatcgtgtacatactgaagaaaattaagcatagaacatgcacacagggagacgtgcaacataaagcatacacgttgatacagacgagagaatggagccgctgcatgtcgtgccgcatgatgtatatatttaatgtacttttgttgatatgatggctgtacctaggtcacgtgggttaacttactcagttgaatcaacttcacgattgcagctagcaatgtttaagcctcgcatcggatggactccaagccagcgatctgatttcaactg

SEQ ID NO: 26428 - DNA, 435 bp, Oryza sativa
  Clone ID: uC-osflM202063d10a1
gtctgaaatattgtcatatcaaaatttatcaggttcaagagttcaggttaagactccctgtaatacattctcttcgaagaaaaataagctgatactgataggttacaggtggatgagccagccggaagtatggagggggcaatacgtgcacgattaccagatgacatggacagatgggctttagagcaacgtggtgccctttcactaatgggcgagttcattcacccattcttcagaaacagaatatgataaatcaaacaggaaaacggcgtaaatgccagaatcaatgaaaaatggcggctcatcgctcaactaataccggtaggcaaatgatggggcgatgttgtatccagctataatatgtggccttggatagcatcagcattcagcaggatttactccacctttttagcatctgcaatctccatgtcagat

SEQ ID NO: 26429 - DNA, 371 bp, Oryza sativa
  Clone ID: uC-osflM202063d11a1
gataagacccagaattcttttcctttcatttctgatttctgaaacaaggacaagcatgagtagtaaaaagaaaacctattctttcagagcaccgcacacctatgtgccttcaacaccagacagaatttcatttagtattccttctgggaaaatgagggagaaaaccttaaaacctcttttcagcagggaaaattttctactcatgaaacatccccacatcgctgaaacatcaacaaaaaaactcaatttgcgaagctgtatcttgatggctttgggcaaccacttcagccgacagtatgactgtctagcttaacaaattgagtttttttgctgatgattctactcatgaaacatccccacatggttgaaac

SEQ ID NO: 26430 - DNA, 424 bp, Oryza sativa
  Clone ID: uC-osflM202063d12a1
acgagaaataatgaacagtaatttaatggaaaagaagaaaacatagaggcgcagtactctgcagttaacaacgtagcacgctcactttacattatcggcttattgtcaccctgaaacaatctttcactctacaacatctaggtatggactaatgatgaccagctaaaaaaattaatggctgtattgtacaaattaagatccgagatcttggtatgagatgcttgtatacattgtaagaccatgagaaaaccgaaactgaactctcgtcaggcataatcttgcagtagagacacttgttggctgacgataacccaaggccatgaccaaaaaacttcgacaggttccatcaaaggcattaacaaagtcaaagctacgtacttgctgctgcagtggtttgcccatcaggctgagctggtgctgagga

SEQ ID NO: 26431 - DNA, 401 bp, Oryza sativa
  Clone ID: uC-osflM202063e01a1
gagaagcaggtaaaaaccttttaactgcccaaaaaacggcaacaggttttttggctaccaattaacatagcacgaggctaccaattctaactaccgttaggcttatatacagataccctataatcaacggactactatggtacattacataagcacaaggctagaatgtaggactacacggtaagtttcgccaacagataatacacagaaagacacgaagagaacacagagtctcccgcttttaatggccaccatcggggagaccaacttcatggtgtcccccttttcctccacaagaccttgcaacagactcgaacagcttttcgatctcaggtgcacagcgagtaaatgatcgagcccaaaaactgtagcagggattctttataagctcaatgaaagct

SEQ ID NO: 26432 - DNA, 281 bp, Oryza sativa
  Clone ID: uC-osflM202063e02a1
ggtacggtactaagccaaacaagcccataatcttccacatcttccctgatttgaacgtgcttatcgtaaaaaaaaaaccatgattaaattattgaactatggaggactggaggctataaattataatctaatctgggttttaattccaaacgaatattacgagcccttagccgcggaaagaacatcggacgtggaaagcccgcccttctatagcaacctacatgacttgagcaccctctctggtgattcatttaattgaccttctaaatttctctgacaaa

SEQ ID NO: 26433 - DNA, 376 bp, Oryza sativa
  Clone ID: uC-osflM202063e03a1
gctcaagatggttttattgacagaacacaggaaagccatggttatgatttaatataccgtcattacatgtatataatagatttatagaaaagaacaagggtatccagagagacactaccaaactcattaacaacacctgttgactgtagttgcatgttttcaccaagggtaagcaactgagggcaggcagcaaaccaacctataattgcctgttcagttcttccagttccaggccatataaaaatctgaagaattcccaggttgtgcgcaagcaagcatattcaatagtattatacacagactgagaaatgagaacatcgagcaccaatgattgcgcatcacaacttatcgaccgaacccatcctttctggggctg

SEQ ID NO: 26434 - DNA, 335 bp, Oryza sativa
  Clone ID: uC-osflM202063e04a1
ggaataaaatcatcaagtagatcttgggacacacggtaggggacatcacataacaccaatccagctacacacaaatagattattggttttggtccataaacaaattaaacatgacaactcttccttcttttaatccagctaaacaagtaaaaccttatatttctaaggaaaccataacacactgcaagaacaccattcttatggcaccatgctcagcatcttaatactggaacattttcagctcttggtcttggacttgacctttgctcttggggcaagaccaatggcttcggaacccttcatgatcctcaagcgtttgcatgactcgacaaaca

SEQ ID NO: 26435 - DNA, 401 bp, Oryza sativa
  Clone ID: uC-osflM202063e06a1
gctatggctactcccatattttttttaacgaaatgagccgatcctctaccctctatacactgtttatatttcaatatacctaaacccatataagactagataaatattaaccaggacttttccgcctagataaaaatctattatagccaacaaattgtgatcttttatttgcaaatacccccgtacatggtaaaacaaatacacatattcatctaagaaataactacaattaggaaacctggaagcctggaacatgccacaggaatttgcggacttgttttctgacaaacctcaaaagccttttgcctatgtttggaccacacgaaaaccggtttgaaccagcaaacaaaaacgggggagcccagccccaaatgaccttggaggcgtaatttgggaccaac

SEQ ID NO: 26436 - DNA, 428 bp, Oryza sativa
  Clone ID: uC-osflM202063e07a1
attcagaatccgggcctcattttattcgggaaaaagatgctcaggccagttccaggtcacctgatggcaagctcacaagttcagacagtcacgcacacacatacaatactctcggacaaactgtaacaagatgcaagctcccttgagattatcttatctcactctacgatgactgccggagctctgggcgcacgaaatcggcgttggcaggcacggagatgtcgacggtgggccgcagctcagcgcacacctcgattgcgccatggacggggtcggacatgaagttgctgatgaggtcctggttgatgggagcatccttgtccactgtcacgaatgcttgctgggtcaggatgtagcccaagcgtggcgcccatttccttgatcccagacgagccggcgttgagcagttgccaaccatgaaggccact

SEQ ID NO: 26437 - DNA, 368 bp, Oryza sativa
  Clone ID: uC-osflM202063e08a1
ggggacagcaacagaaatgcagtctcccagttccatttttcagggttcaacactccagtagcagtgtacactttcgaaatcaaataatggttcctcgcaaaaaagaaaaagaattgaataatgcatcatgcatgattgccttttagcctaaaagagggaataaaaagcggggaatgtacccaaaagttagtacacgaaaaaatggtcgcagatcaacaacggattaataactcccggaaattcttggacaagagcaaaaacaccactcaaaatcatggttacaagttggtaccggttccacatcggtaagggcacccgctaatggcgggggcattttgacaggggcagaaccattgcccccttccctt

SEQ ID NO: 26438 - DNA, 373 bp, Oryza sativa
  Clone ID: uC-osflM202063e09a1
ggcaagttgcaaacattatctgaccgaaaaaaaccaccagtttgatactattcgaaatcactgcaatgagtgagtgacacaatggagcaacaccaagagtgcactgcaaagccggttttgatccttacaccacacaaggcgagagggagacacacccgttgataatgttgttacaacatcgacatgaccatcgatatctgaggtgctacatggcgtacctctgagtccaggtccttgctgtgttctcgtacttgtgcctatctgtcttgtacatgtgggcgatcttagggaccagaggatcatcagggttcggatcagtcagcagggaacagattgacagcaacaccttggaaatggttagtgctgggcttca

SEQ ID NO: 26439 - DNA, 416 bp, Oryza sativa
  Clone ID: uC-osflM202063e10a1
gcttctaagtccttgttattgaatatactgcattggtagtttggtacaaagtgatccttcggtattgccctctgatcttggactgaacaaaaaacaaacctgaataagctgccttctagaggagataatcccaatgaaatcaggatagtttatcacgatgaattcaaccacaccagaagaaaaaattatagactcaaatgcttgtattcctcgatgtactctgctcgattctaaaatcagattagagtttgacaccgcaagagatgaggccacaggttggcctccgccggcgcccggagtgcggagtcaggccgcgcgctttatcccgccctggcgcccgaatagccccgcctgcaacacccaatcctcgatcatctcctgcgccgcgcggccgttgtccgccggcatgaggtgcc

SEQ ID NO: 26440 - DNA, 437 bp, Oryza sativa
  Clone ID: uC-osflM202063e11a1
gatacatattgcttaagggcacaaaatgaactacaaggacagtaaaccattaccgttgacaggaaggaagcctacaggcacatacccaaggcttcggggttcaaaatggacacaacctaaacatagaaccggactgtaccatggagccatttaaccagaatgcccacaatccttacagactgataagcaactaacatcacctccctgggatgctgaaggaacaaccgaacatttgctaccagccagcacgtgacagaacactgtgttcctcccaccagggaggggaaggaggtgcaacagcagaagcggcggcaggaggaacaggaactgcatcccacccttttgcagccacaggagctggagcagcaccccattccccagtcggtgcaccagggagggcaggaggctggacccctccaccccattgctggccaccc

SEQ ID NO: 26441 - DNA, 437 bp, Oryza sativa
  Clone ID: uC-osflM202063e12a1
gctaaagaacgatatttattatgaacaatttcgtgagcacggtagtatcacatgacactgagaatatgtggtatatcttcgcggacagtgagaaaaacggtcgccctccacgtttttttcttccttcaatttctccaatataacgtacagcttggcacatatctgtacaaaccgcggtactggtaaacaaaaacaacgtacacagcatactactttaggatcctcatgctggtacagccacaggtttttggctgggcttgattcccttgatagcttctgcatagtctggagccccgaaaacggttgaaccagcaacaatggcgttggccccagcttcaatgaccttgtaggcgtttttgggaccaactccaccatcaacctcaatccaagggtttactcccttctctgcacataatcttctcagctctgcaatcttc

SEQ ID NO: 26442 - DNA, 302 bp, Oryza sativa
  Clone ID: uC-osflM202063f02a1
aaccaaaaaaagacaaaccgcaaaggactggggaaaaggaaaaaaccgggaaaacactaaattcgccagaaaaaaaatggggaaagaaaaaaaggaaagttaagaaaaccaactcagcaaaattccaaaaaaaagggaatgaacgcgggggggcccaaaccaagatgactgggggggggacaacataactctggtgacagaaaaacccggagacagttagccggggcaaaaaaacaggacacgcaaaagtaacaacagctggagcgacgggaaaaaccaaaaagggccaaaaacaaacagag

SEQ ID NO: 26443 - DNA, 335 bp, Oryza sativa
  Clone ID: uC-osflM202063f03a1
ggggaaaaaaaaggacgtaaaaaaaaaaacccaaaaaataaaaaaaacaattaaaaaagggaaaggggaaaaaaaaacttggaaataaaaaaaagttaataaaacaagaattatccaaaaatatataaaaattgtgaaattattaaaaaattttttttggaaagtaaaaaaatattttttaaaaaaaacccggcgaaaaaaaaccggggcaaaaaaaagaatataaaaggggaccggcccggaaaaaaaaaacggggaaaaaaaattagcaaaatgtggtttaaaaaaaaaaaacattaagaaactctaattatgccaatattaaaaaaaaaaca

SEQ ID NO: 26444 - DNA, 220 bp, Oryza sativa
  Clone ID: uC-osflM202063f04a1
ataaatacgatccattgatttgcaaactgttttggagttttaaagcaaaacatatttgtaacaagaaataaaagaattgctcagagtgggaagaaccaaaaaaacatagatatttaggcacgacttattaagaataagaaaaactcaacgggtgtctgacactagagatctaccataaatagagcaggctaatagtaaatcgaatagactgacgcgaacg

SEQ ID NO: 26445 - DNA, 321 bp, Oryza sativa
  Clone ID: uC-osflM202063f05a1
gacttacagcatacacattaattcttcaagtctcaacttggattacagcgagattaacgtgcgctcctccctaacacctctacgtcacatcccgtagttaaccggacgtagagagagagagagagagagagagagagagagagagagagagagagagtacctctatttttcagattttattccgatgctgcttctggacaagtagtcctaaactcccgatcagcctcgagaagcctgccccgtgtgtgcaaaatccacaaatcacccacgacaaatcttacatgatccccaccgtatttgaggccattaacattgattaaa

SEQ ID NO: 26446 - DNA, 362 bp, Oryza sativa
  Clone ID: uC-osflM202063f07a1
gttagtacaaggaattatattacaagttgcattttaaagacaaacacgtttagttttaccagtagaagatgcataaagtatctgcttgcatgatgaacttaatgtttccatacttgggtaacccatctccccgtgttaccatccatctttctgcaaccctccattcatagcacatcgcatttccgtcggaacatgaaaccaccattcttttattccattacaccttgttgctacaagataagtgaattaactgtacagaaaaactaatgtacaggcaccgtaggggaagaaatatttatcagctgcttgacgtgatgtatctacacagatttcactggtcccgatcacgatcacgaataatt

SEQ ID NO: 26447 - DNA, 420 bp, Oryza sativa
  Clone ID: uC-osflM202063f08a1
aaaagaaataaataaccaatttatcgtacaccaagaatcatacatgcagacacgcaaaacacaaaaaagacgacgggaaaacgatcgagtaataacaaagttaaacagaaaacgcgaaagtaggcggtgatgtgactcagctatacttaaaacaaggccacgagccccgccgccgccaatgccaccaacgcggcaatgccggcgggcgcgcgcgtcgccgctgactcatcctccgacgccatcgccggcgcgagcgagggccccggcgacagcgagccgaggggagacagctccggtgccatcaggggcgacagctcgggcgccaagatgggcgccggggtcggggccacgatcggagccggcgccggcgatacgggcgctggcgccggcgatacgggagctggcgcgggggccaaggtc

SEQ ID NO: 26448 - DNA, 67 bp, Oryza sativa
  Clone ID: uC-osflM202063f09a1
tttttgataagtaggtttgatcttttttttttgcccaaaaaacggcatcaggtttttttggatacca

SEQ ID NO: 26449 - DNA, 422 bp, Oryza sativa
  Clone ID: uC-osflM202063f10a1
aacaaacgttgtttgccaatatatatatatatataatataattatatatccattcactagcaaagcaggagcaacgccatcagtcccagacagcccaggctcagagtaaaaaaaaaatcagaagatcacgatactggcgtatcagctactactatctgctatggtagccagccgtcatgtgacaccaccactgcccaagacattttctggggcctatcacctgtacaactaatctgcgcgttacttatgcgtgcagattaccagcaaaaacaaaacccgtaattagtagtattggatgctcccgctcagtaataaaaggttccttccttccttccggatggctacctatgaacctttctcctttgtcgcactagtatgctacgagctactactaactaacactgatgacagtacttggcaac

SEQ ID NO: 26450 - DNA, 365 bp, Oryza sativa
  Clone ID: uC-osflM202063f11a1
gatacagaatgctgaaaggtaaaatcttattcactcggacacttcaaagctacagtagaattgtgcgacaactcttgaatcatatgcatggctcctgggcacaagctgtacacaacctatgaagagaaacggtaagcactatatatccctttgcctcgtatgcagcctatgcttcatgacttataaacagagagcaacaatgtgctgggatgctgctgctacgacaaatgcttcgcctaaagttggcacttcatagcagggaatgcagctcccgggggggagggatcacaccggatacagatcagggtttgtgaagaagctcatggacagtctgagcaagcttagcttcacccctgatgccttcg

SEQ ID NO: 26451 - DNA, 430 bp, Oryza sativa
  Clone ID: uC-osflM202063f12a1
cacggatccaagttgaaattttactgctaggaatttcatcatacagttcgagaccatccaaggttagtgtactcaacttttaccaaactacagcacagcagcagccagcgcctccttaccccagatcaaattagtgcaaaacgcgcccaaatttacacacgcacgcacacactttttacaggcaccggcagcattttgccttcaaagatctagaaaagctagtagaatcattagctaacagctgacaggtttgtggttggtttggtgtcctctcttctacagagattgcaaaaaatggagatctgacgacaacgacgatgactgcgagcatggtggattggattttgggtcacacgaaggacccgttgacgaagcagaaggcgaggcagtgcacattgttgtcttttccgagcaccttccatgctacagc

SEQ ID NO: 26452 - DNA, 411 bp, Oryza sativa
  Clone ID: uC-osflM202063g01a1
agttggacgcgcgcagcatgcattttatttaggcacggtccacaattcatacatgtatagtggatacgtctcgtcggcagacactcacggtatagtagggtagtcgtgtgtacagtgatatagtcatatctgcgcgtcttttcatgccgttcgttgacttcgttcacagggtcagggtcgggtaggcgatatcgagtgtgacgccacacaggccggggccaccgacgtcgcggagaatccggatgtagccgcgctcgccccatgactggccccatgagttcttgatggtccagtacttggcgccggaagacgcgtcggtgccgtacccgacgacggtgacggcgtgcgctaggagcgtgccgcacgggcccgtgtaaacgccacccttgtagaactgcattccgctaccga

SEQ ID NO: 26453 - DNA, 343 bp, Oryza sativa
  Clone ID: uC-osflM202063g02a1
gggaaacgaataaaatcattattgcaaaaacatcatcttcttcttcatcttcttagtgtacacaacaccaactcgatcatcatctcgtcgcactaaacccatcttccccaacccaaagacaacgaactcgctggccacaaatccatccaaccacaattaaccactgctaagctacggtcccccacttcacttgccggggacgaagttggtggcgtacgcccaggcgttgttgttgacggggtcggcgaggtggtcggcgaggttctcgagggggcccttgccggtgacgatggcctggacgaagaagccgaacatggagaacatggcgaggcggccgttcttg

SEQ ID NO: 26454 - DNA, 358 bp, Oryza sativa
  Clone ID: uC-osflM202063g03a1
gaaaacagaaaaaaaaaatttatgtttgagattacacaaaatgtgagtgagaacagacacgaatggccacggcacagacgaccttttcaataattaagatacaaagctaatggtcaaaagccaatctaacttgttaaattggtgttacaagtttgcctgtacctgactaatcgactagagtagtagtacacactacacagctgctaactgcatgatcggatcaaaacggagaaaggtttgcagcaacaagtacaatattaacagtcacagttgttgaagcttcatgagataacttcagttgtttctgcaagattttgcatccatggggtttccctgcccttttggggaatgtacagat

SEQ ID NO: 26455 - DNA, 395 bp, Oryza sativa
  Clone ID: uC-osflM202063g04a1
gagataaaaggctcatcattttgattctaaacttcattaaattgacgaggttacaaagacaatttcgaatgacaaccacggaaggcgcaccctgccctcagcaatgcacctactcagatatgtaagaaaaagttacacgtatagaaatttgttaaactccttagaaacgttgattagtcaaaattttgtaaggattttcgttggtgtcctaaaaattttggaagagttatttaaagttcctatagcatcctccaaaatatgaaataccgaatgtttgtaattaatcataagttgtcacgggaggagcaggcgcagtgtcgacgacaggaggagctgatccggccgctgcataggtcttatcgggggttgatccggctactggagatgtctccttt

SEQ ID NO: 26456 - DNA, 287 bp, Oryza sativa
  Clone ID: uC-osflM202063g05a1
aagattccaaagcttacatgaatatccgtcaaatatcactatcaacgaattctttcaaactcaaattagtaaatacgcagaggattaattcgtaagaaaaaaattcagtgttaattagttttcacttccaaaaattcatcaattaagtagggagagaacggagggagaggtaaaaatattataagtaaataagttgaaaaaaatcgatcagctagaagttcttcttggcctggtaggtgttgccgtaggtccagtcgcgaggggcgacgcgccaggaggtggccttg

SEQ ID NO: 26457 - DNA, 265 bp, Oryza sativa
  Clone ID: uC-osflM202063g06a1
gttgaacaaaagggatatatatttatggatattgctaccacaaggcatgaatcatgaatatgaccttgtcgtacagtttgctcatgtgcacatcagcacatacatatgtaactatctagaagaaccaagaaagtatatattggatgcatacaaaaaaaaattgaaggggattaatcgcaatgacgcatgcacatttagccgattgagaagtgtttacatacatgcatgccatattctttagctttatggatcattcctcattgat

SEQ ID NO: 26458 - DNA, 448 bp, Oryza sativa
  Clone ID: uC-osflM202063g07a1
cattgccagtcctgacaaaagctgaaccaagcacacctcgctgcgaggaccaaacatgtcttttcgattgcccaagcaaaagataaagatagaactaaacaaactttgaaatatgatcgttagaacagccacacccggcacaacctttcgaagaacatttgtgttgtacgatcctccatgagcgtacaaatagctttagcccaaaaggaaggctacatgtcgtgctgcagcagctcgttcactgtctgagcaaggttaggctcgctcctgatgctctcgatccatctcgcgctgatacggaccctctcgaggctctgcttcagtgcacgcttgaaccaagggttgggtttacccgcgaagaaactcggaaacttcagcagccttttcctctgtggtgaaccgtgaaacagtagatttgacgaagtccgaatgagtgaacttgatggcc

SEQ ID NO: 26459 - DNA, 384 bp, Oryza sativa
  Clone ID: uC-osflM202063g08a1
ggcttattgcaccgaggagcaaacagttttcactcgagataccagtggcagtagcaggaccggtggcagaatacatatggcaaatagtcaaccatgacacaaataaataacatcattcggtcatacatagttttaacaatagatataataaaagtaaaagactcctccctcctcaccagcacatagcacagcctagcaactacaaaaattcccataacatggcataaaaatttggaaattgtctacgaccacagtgacttttaaaacagaacccccacctttatcactcccccccccccccagataagacagtgatacttcagacaaaaacaatccttatcaggccccttaacataacttttttgaacttgatcacagaaggtc

SEQ ID NO: 26460 - DNA, 369 bp, Oryza sativa
  Clone ID: uC-osflM202063g09a1
ggcaacacattttgctttgcacattgttcatctaccatgcatcaccacaacaccttatggagcaagaaggaaaccaccaccaccaccttccttctcgaattataaagcaccatcatcatcatcatctcttatgaaaaactatagataattactatacctaccttcgccttcaaggaagttgagttctcctttaaaagaaaggtgaaaacgagctaagtaaaaaagaaaaaagaaaaagaagaaaaaaagaagagcgatctagatgggactcatttcccatggggtatactggttgactgatcctgagagcatttctcaaccatcatgatggcgatcacctgtgacctgatgagcttcttcctcagactc

SEQ ID NO: 26461 - DNA, 348 bp, Oryza sativa
  Clone ID: uC-osflM202063g10a1
aaaaattaaaggagtttataaaccggttccgtaaatatcttaaggcgagatatacagatgccaaataggtgtacagtactcgaaattacaaagattataccagtataattaatcgttgggattaagagcatgaacgacccagttacgaggggtgcacggagtacgtgtgttgcttgcgcgcgtgtggatcgacgagattcttttgcaaaaattacctaattaattaatcggcgtgctctctggcgtcgtcgatattgcttattgtttggctagagttcgccggcggcggcggcggcgaggtcctcacaacctggggaaggggcgggcgaggcggtcggcgccggtgtt

SEQ ID NO: 26462 - DNA, 430 bp, Oryza sativa
  Clone ID: uC-osflM202063g11a1
aaaaaaatctatgtttgagattacacaaaatgtgagtgagaacagacacgaatggccacggcacagacgaccttctcaataattaagatacaaagctaatggtcaaaagccaatctaacttgttaaattggtgttacaagtttgcctgtacctgactaatcgactagagtagtagtacacactacacagctgctaactgcatgatcggatcaaaacggagaaaggtttgcagcaacaagtacaatattaacagtcacagttgttgaagcttcatgagataacttcagttgtttctgcaagattttgcatccatggggtctccctgccctcttggtgaatgtacagatgaagcatgcatcactctttggtttttagcagcagcctggtggttatcattatgtgactttagtgaagccgcttcatcaacagc

SEQ ID NO: 26463 - DNA, 431 bp, Oryza sativa
  Clone ID: uC-osflM202063g12a1
aattaattcacaacaccatatttcattgatcaggttcagaacctgcacagaaatacacactaccggtacagatctaaccttttctccaatactcgaacatccatccacgcggtccacacgaatacgtacatttatacggaacacgtacgtacatttactgcaccgggtacacacacgcacactctcctgcagagacgcgcattgacggaaacctagctagcttagctgaaggcgatgcgtagccatggcagcacggggggggcggcgctcacttgtcggggacgaagttggaggcgtaggcccaggcgttgttgttgacgggctcggagaggtggtctgcgaggttctcgagggggcccttgccggtgaccatggcctggacgaagaagccgaacatggagaacatggcgaggcggccgctattgatctcc

SEQ ID NO: 26464 - DNA, 413 bp, Oryza sativa
  Clone ID: uC-osflM202063h01a1
ctggtcaaacacaaaaggtacgtacacttatttcttcccgtacgttacatttcgaagccagctatgcatggttcggttcgtcgactgtaccatacgtagcataagtccataatttggtttagatttgctttgctccggatcccacacttccaaaatgtaaacacgatcatactcgcaagaaacttcatttctacaaaaactgacacacaccgaagacatgctctcttttgtattacaccttcacaagaatactagactggtcgtgttgatctgactggcaaggtcttcctgtggatgctcatgaacttggcaacaaattcttccagtttcaacagtgcacttgcgccaacgggcaatctcttatcatagtaggcatgccaataataaacctccctctttatactagattggat

SEQ ID NO: 26465 - DNA, 297 bp, Oryza sativa
  Clone ID: uC-osflM202063h02a1
aaaaaaaaaaaataagaataccaaccaaagagataaatttaacttaaaaaaaaggaaaccaaaagaaaaaacacgggatttttaattaagtacccaccaaaaaactggaaaggaaggaaaaaaatattgtacacaccccaaagatttttaaaaaaaaaataatttttagcacttaattaaataggagggatttctttagtctaaggttttggattaaaaactaaggaaaaaaaaagtaacagggacaaaaaatcaacccttggaacgggaaaaaaataaaattttaagataactagg

SEQ ID NO: 26466 - DNA, 300 bp, Oryza sativa
  Clone ID: uC-osflM202063h03a1
ccaaaatataaatatttttagctataaatctgaacaattgattcatagaaaaaaaatgttatattatgggacgggggagttactaccttacccccaactgctgcaacgatgaacagcaatcttttgtatcatgcaaaacaaaaccaaaatcctcaccgtgatacaatgaagtagtaggagctaaaatgctttgcctgcttccatcggttgagatggagcttttgcttgggatgagctcccagtttgagccacaccgtttgtcatctcttttctcgcaatgcaacgccagcttgtctcgtg

SEQ ID NO: 26467 - DNA, 422 bp, Oryza sativa
  Clone ID: uC-osflM202063h04a1
attactcgagcagcagcagcaggatctactcatcggggacgcatcctcttgatgcaggggacacgagcttcgtgtacttccaaagcgctccacgggcagccttgtgtggcggcggcgtccatttcctccgtctttcttccagctcagcttcagtcagttcaacatcaattactctcttcacaacatcaatggtaattttgtcaccggtttgaacaagaccaattgggcctccctcctgtgcttcaggacaaatggggcctacaacaaatccatgtgatcctccagaaaatctgccatcggtcagcagggcacactcctttccaagaccagcacccattattgcactagttggagtcagcatttcaggcttccctgggccaccttttgggccttctcctcggatcactactaccttccccttg

SEQ ID NO: 26468 - DNA, 433 bp, Oryza sativa
  Clone ID: uC-osflM202063h05a1
gatgcgaccgaggcagctttattcaacttgtccagaaccacttctctaccgactatcacttttgcatgggtaaaattaactaggtaccacgggttgattgtacagtatttctcaatgggacagacatgccgaaacatcaactatttcccccactctcactactctccatctcaccgtctttcagaaccttggcaaaatctggcgttggagctgtcaaacatgttagccgtcaggtcccgtctcctccatgtctacagccacaagcatccatgccctctcctactcacttgtttagagctcatccttgagaggctcggctggggccgactctgccttctccttcgcctgaccagcggtttccttgttcttcttaatgaagtcgacgatctcgtcggctgtcctgccgctttcatagggaaccatctttccactg

SEQ ID NO: 26469 - DNA, 305 bp, Oryza sativa
  Clone ID: uC-osflM202063h06a1
ttggggttttagttcagattcatggaattcatttaaacagaagagtcgctacacagaagccaacacaaagcagaaattccccccgaatcccatcgaaaccctagctcctacaccaccaccaccacccgcacgccaccaggaaggaaggaaggaaggaatcagccgtcgaagccgaagagggtgcggccctggcgcttgagcgcgtagacgacgtccatggcggtgacggtcttgcggcgggcgtgctcggtgtaggtgacggcgccccggatgacgttcttgaggaagatcttgagctcgccgcg

SEQ ID NO: 26470 - DNA, 296 bp, Oryza sativa
  Clone ID: uC-osflM202063h07a1
gttttttttaatttttttgttttttatttttttttaatatttattgttatttatttttaaaatgcaaaaaaaaaagaaaaaaaaaaaaaaaaaaaaaatacttaccaaaaaaaaaaaaaaaaaataaaaaaaaaaaaaaaaaagaaaacaaaaaccaaaaaagcaaacactaacaagaaaggaaacaaaaaacccggtgaccacaaaaaaaaaaagacaaccgaaaaaaaaagcataacacaaaaaaaaatgaaaagaaaaaccacaccggggggggaaaaacaaacagccaaggc

SEQ ID NO: 26471 - DNA, 188 bp, Oryza sativa
  Clone ID: uC-osflM202063h08a1
attgaaaaaaaaaaacatattaagtgaaaggtgagaaactaaagaaagggcaaatatttaaaaggggaacagaagtcaaacgcatcaaaaaaaaaaaaccaaaaaggggaggcccaagggaaaaagtaaataaaaactaaaaaaatttgaaattttgcatgggaagagaaggactttttgtttgggaa

SEQ ID NO: 26472 - DNA, 267 bp, Oryza sativa
  Clone ID: uC-osflM202063h09a1
aaaaaaaaaatcacaacaccaaatttcaatggacagggtaaaaacccgcacaaaaaaacacactaccgggacaaaactaaccttttttccaaaacttggacaaccaaccacgggggccaaaagaaaacgtacatttatacgggacacggacgaacaattaatggaacgcggacaaaaacgcacacttttctgcaaagaaccccaaaggagggaacctaaaaaggttaactgaaggggaaccgtccccatggaaaaacgggggggggg

SEQ ID NO: 26473 - DNA, 363 bp, Oryza sativa
  Clone ID: uC-osflM202063h10a1
aatgggagaactgaatttatttatttacttatttattacataaaacacatttcaaaaatatgacttatgccacctactagatgatacattaggggctatgacatttgcatttcatgatgtaaagaaaaagagaagatcatttttgcaacataattgttgtactctatagcttagcccagtttagcttcataattaatatcagtttaattttctgctctgacacccaagattggatcggccccagttgtaatgtttcaatctttgcatttataacacatacaaaatctttgtaacaagcctatatctgaagtgatgatttcacaccactttatctgaccacttcgcattaccattgacaacttt

SEQ ID NO: 26474 - DNA, 430 bp, Oryza sativa
  Clone ID: uC-osflM202063h11a1
tttttttttttttttttttttttttttttttttttttttttttttttttttttttttttttttttttttttttttttttttaaaaaaaaaaagacttggattaaattcccaaaaaaaaagtttgaaattgggaaaaaatttggaaaatgggggaaaaaaaggaaaccaactaaggcccttttattcaaaaaatatggaaaaaaaaaaaaaaaattgggaaaaggaaaaacaagaaataaataaaaaggcggggtgggtgtttcaaaaagaaaaaaagggaatgctatgggagatttggggatttttaaaatttaagggggattccctaaaaaggaggacctaaattttttaccctttgggccaaatatttccctgaaaggatttatttcccagaagagagccctcattttaccagttttttccggggttt

SEQ ID NO: 26475 - DNA, 398 bp, Oryza sativa
  Clone ID: uC-osflM202063h12a1
gccggcgtgctgcttctcctcgtgctggtacgccgcctggtggtagctgtggacgctgccttggcggcttggtgggcagaggtcgtcgtcgtcgtcgctctcgtcgtcgtcgtcgcagtcgtcgtcgtcagaatcttcctcctcgcaaccgtaggattggtggcggtattgggtatggccgccgccggcagtgaagtgctgcttgttggaggcagtcctcccgtacgcggcggcagtggcggtggcgccaccgtagtggtgctgcccgccgccagccacggcgaccgcgtggtggcggttgtagttgtacccgccggcgccgcagccgttgacaccctcgatcgcctggtgctgcttgtaggtggcgtgctgcttaacggggccgccgccgtcgtcgt

SEQ ID NO: 26476 - DNA, 173 bp, Oryza sativa
  Clone ID: uC-osflM202064a01a1
tttgtgtttttatttagtaatgtgattttttttattttattttttatgttctttatgagacccccctataggaatgttaaaaccgcatataaaaatattcgatccatgaaagcactttatggcagttcaaaaccacctttacttgggggcatacaaggacatcccagaaagct

SEQ ID NO: 26477 - DNA, 474 bp, Oryza sativa
  Clone ID: uC-osflM202068a02b1
cgtgggcgccgcccaactcgcgaaggcggggaaggaaaaaaagagagaaaaaaaaaggaagaaaaaaaaataaaactcgcgcacagcaaccgaatcatctgcctcctcctcaagtagtctagtcctcctctcttctccggagtctgcgtgcgatcgaagcagaggcgcggcgctcctcctcctcctccggctccgatccccatggcgttcatgcgttcccactccaatgcatcctccggtatgggggttgctcctgacatcagggacacattccttgagcttcagatgaagaaagcatttcgctatgttatcttcaaaatcgaggaaaagcaaaagcaagttgttgtggagaagaccggggcaacaactgagagttatgatgatttcctggcatctctcccagaaaatgactgcagatatgccctctatgattttgactttgttactggtgagaatgtgcaaaagagcaagatt

SEQ ID NO: 26478 - DNA, 255 bp, Oryza sativa
  Clone ID: uC-osflM202068a03b1
tgctaatcaaatccacccactccccatccaccggggggcttttttaaatcattcgtccgtacctcacccgcatgtataccaagctctatactccctccttcatcaactactatgattcacctccactcccctccgacagtgcccgtcgtattccctctcgccgcctcggatgacatgccaccacctacagcgacggccatcggtctacgacctccctccctcctctagaaaaaggtcgccatcattcacacgtgc

SEQ ID NO: 26479 - DNA, 480 bp, Oryza sativa
  Clone ID: uC-osflM202068a07b1
ttgttttcacctcctcctcctcctcctcttcctccgcgcgcgctagatccagggagagggagagggagagatcatggcggggacggtgacggtgccgtcggcgtcggtgccgtcgacgccgctgctcaaggacgagctggacatcgtgatcccgacgatccgcaacctggacttcctggagatgtggcggcccttcttccagccctaccacctcatcatcgtgcaggacggcgacccgaccaagaccatccgcgtccccgagggcttcgactacgagctctacaaccgcaacgacatcaaccggatcctcggccccaaggcctcctgcatctccttcaaggactccgcatgccgctgcttcggctacatggtctccaagaagaagtacgtcttcaccatcgacgacgactgcttcgttgccaaggacccatctggcaaggacatcaatgctcttgagcagcacatcaagaacctcctcag

SEQ ID NO: 26480 - DNA, 495 bp, Oryza sativa
  Clone ID: uC-osflM202068a10b1
tcggtcgagacctcctcgcgagtcgtcaatccatgggcgcctccgcgtcggcgtcgctgcgccaccacctcctcctccgccgccgcccgcgcttccccctcggccctagccccactttccgcacctcctccctaccccgccgccaccagcggctcttcgcctctgccccatcctcgtcgacggtggagaatggcgagccctcctcgccggtggagccgtccgacggtgcgtccgtcgtcgacgtgaatccgccgcgcgggaccagggatttccccccggaggacatgcgccttcgcacctggctcttcgaccagttcagggaggtgtcccgcgtcatggcgtttgaggaggtggacttcccagtgctcgagtctgaggcgctcttcattcgcaaggccggagaggagatcacgcagcagctttataacttcgaggataaaggagggcgccgtgttgttctgaggcctgaaatcaccccttccttggcacgcctag

SEQ ID NO: 26481 - DNA, 406 bp, Oryza sativa
  Clone ID: uC-osflM202068b01b1
tagtgagggaacgggagcggtagcgaggtcggggcggatttttgtaacacgtaggctgttaagcccaccgctccctatccatttgcaaaagaggacctcggagaagacgacgggggggcgcctctcgccggaactgctgacaacctctggctccccctaaacaggacattaatgctaaaagactgcctacacgaataaaccacaaactgagcaagccatacgttgaacgcactatagcagtccaatatctcagaggacggctatggagagattagcacaagttgcaacagtgtcggcggccacttaagctcaacagcagagatgatgacccccataaaaaaagcgtccccagatacatactgcactacccgcagagatggggctatctttaagccataaatttcaa

SEQ ID NO: 26482 - DNA, 505 bp, Oryza sativa
  Clone ID: uC-osflM202068b02b1
caggagcgtgatccaggaggtgaagggcgagatcggcgccatctcgcggcgggggttcaggtcgcggccggggcgagtccggcgagtggcggcggcggcggaggagccgccggacgagtcgtcggcggcggcgctggtgatgcgggagagctgctggacgcagctgccgccggagctcctgcgggaggtgctggcgagggtggaggagtcggaggggtggtggccgcgccgccgtgacgtggtggcgtgcgccggcgtctgccggagctggagggggatcgtcagggagatcgtgcgcaccccggaggcgtccgggaacctcaccttcccaatctctctcaagcagcctggcccgagggatgctcctatgaaatgattcattgtaaggaaccggaccactcagacatattacctgtacattggactgactgatgcattaactgatgatgggaagtttctacttgctgcacgcaaatgttgtaggaccacatgcactgagtacctg

SEQ ID NO: 26483 - DNA, 206 bp, Oryza sativa
  unsure (1)..(206): unsure at all n locations
  Clone ID: uC-osflM202068b03b1
tnctcctcgacacgtggacgcagccttccgtggggggtttgtaaaatacaaccgacggtacctaatgacaacccaaaacaaagcgggatgcattagctctagcctgccaccgatcagtaaccatatactgataccggccaactaaatacataccaagatccgcgtttaatatgcagatgcaatcacgaacgaagccaccgcctgcg

SEQ ID NO: 26484 - DNA, 532 bp, Oryza sativa
  unsure (1)..(532): unsure at all n locations
  Clone ID: uC-osflM202068b05b1
gttctacgcggcgacgccctatggcgacccaccacgcccgccgcctccccgccgccgccgccgtcctcctgctcgtcctcctcgccggcggctccgcggccgacgacgcctccagcgacgacgacgcgggcgtcccgccgtcgcccggctgctccaacaagttccagctggttaaggtgaagaattgggtaaatggaactgaaggtacaattgttgttgggttgagtgcaagatttggagcctccgtgcctcgagatattcatgaagctcagaaaacatttgctgtccttgcaaatccacttgattgttgttccaattcgacatcaaagctaacaaattatattgctatagcacaacgtggagaatgcgctttcactgctaaagcaaagattgcacagactggaggtgcagntggtttactagttatcaatgataatgaagaactttacaagatgggttgcagtgacaacgatacttncattaatgttacaatacctggtgtaatgataccacagtcaagctgaaaaaagat

SEQ ID NO: 26485 - DNA, 401 bp, Oryza sativa
  unsure (1)..(401): unsure at all n locations
  Clone ID: uC-osflM202068b06b1
gttcttttctcctcctctcgtgcgcctcctccccctcccccaccctcgccctcgcgatcccaattcgatccgctccggcctccccctcgatccggcgncccccgccaccggccctcgccgggcgcggaatccgcacgcccacgcccggattcgcgcggcgccggccgcggattcgtggtcccacccccgcccgccgtcgccggcgccggagaccctagatccgccttcgtctccgccgccatggtctggcgcatgaccggtctgtccgcggcctcgcccggggatacaatcctagacacggaaaattgtacactggaagaacttcttgtcgcggatgaaattagttatgagcgcaaagctctgaatacacgactcataaatttcttgcgcgacagagccca

SEQ ID NO: 26486 - DNA, 534 bp, Oryza sativa
  Clone ID: uC-osflM202068b08b1
ttctttatctccaaagaagcatctactgtgtacagggctactcttcgttatgaaggatttagtgagataatggcaaccttcgcgaaaattgggttttttgatgctgcaagtcatccactgttgcaacaaactactcgccctacatacagggattttcttgttgaactcttcaatgcttgtaacatctccacaaccgccagaaaggaatatagtgaagtctctggaggacaagatggtgaactgatttccagactcttgagttttgggcattgcaaagataaggaaatagctgctaagacagtcaaaacaatcaagttcttgggattatatgaggagacacagattccagagaactgttcaagtgcatttgatgtgatttgccagcgaatggagcagagaatggcttatatccacaatgagcaggatatggtactgctgcaccatgaggtggaggtggaatacccttgtggccgacccaaccgaaagcaccaagcaaccctacttgagtttggcaaggttgaaaatggcaggcct

SEQ ID NO: 26487 - DNA, 497 bp, Oryza sativa
  Clone ID: uC-osflM202068b11b1
gatactcaacatctgactgcccaattgtggagatatgggctggtaataaaataaatcgagaagatcgaacatttataggaaaatgggatgtacacgacatgatgttgtcatctccacatctttctggacccgaaaaaacaagtagcatgagtgaagagccaaggcacattaaatttcacttcccaaaccctatccgctgtcgtattgtttcaataaagatgacactcaaccatattgactctcattcaaccaagttcagagaggaatttgatcttttgtcattaagtgaaggcacattttctgaatccaagccaaccactccacagaattcatttatccatgcaaaaaggattgttatttttggcaacactctgagaaaggagacaaatcctgacacatctatgggaataatgaggatgaagacttatttagatagatcgcaaccactgggcagatttaggattccagttgaaagctgaaggctgagagataatgat

SEQ ID NO: 26488 - DNA, 564 bp, Oryza sativa
  Clone ID: uC-osflM202068c03b1
ttcacgcgtccgcgcactcctcctcctcctactcctcactcgccagcagccgcagccgaggaggaggcggaggcggatgcgggagatcccccgcgtggccgccgccgccgccgccggagatggacacgccggataggcccccccgcgccgccgccaccgcggccgtcgaggactctcctgtcttcaatttcatcaacagcctatctcctataccaccacctaagccttcagactcagcacataatgttcaactattcaagtcatcagacttggctcctgtttcctcaatctttgcctcaccacatgtcaatcctgcaaaggaatctaaacttccaatcagggaagattctgttcaactttctcgagaatcgcactctccgaacagtgtcagaactcgaacaggggccacaagctctattattagaatgatcagatgcaaaaacattgtttcagaaaattgcagtataacttgttacctaaatgattcaacttcaagtaaagcatctcaacccatccagctttgtggcggcagtgcagaaagtgatacgaatcaaaatactgatg

SEQ ID NO: 26489 - DNA, 562 bp, Oryza sativa
  Clone ID: uC-osflM202068c11b1
tgttactatggaataagacggctattccaatccggggggggactaagattgatgacttttctcaacttcctcttgagatgcaatggaccatcgttaacgaggccagggcatacgcgagagcgatgaaggcgaccctcttcttctgcagctcgacgcacaacatcaacgtgaacaagatcttcaagttcatcacggccaagctcttcaacctgccgtggacggtggagcgcaacctcaccgtcggcgagcccatcatagacttctgaagactctacacccttacactgacaaaatgctaggcaaaaaaacgtacacgagcccttccttccctccccttcgtcgtcttgctcctgacctttctctgccggaaatggaggccggccatggccatggctgagcagaactgagctcttgcatgtacatataggtgaaagaaaaaagaaaaaaaaagaaagaaaaaggatcaagttgaggttctcgttggagaaggagtatcccttcccttgtgcgtgcaagcaagggcagaagagaaaccgtgagatgttgcttgaacccttgtaca

SEQ ID NO: 26490 - DNA, 509 bp, Oryza sativa
  unsure (1)..(509): unsure at all n locations
  Clone ID: uC-osflM202068d05b1
ttcgtctggatctggcggggaggcgaccggcggtggggcctgctggtggcggcggcgacggcgacgcccggtggagcagaggtgggcgaggtccgactccgtgacggccggatccggctggacgacgacagacggcggtgggtgcatccttagatgcgcggccggcgtcggggcgagcgggcaacggaggcagcggctggcggcgatggtgcgacggcgtggaggccggcggcggcgtcgtcggggcggttgctggctgcttagtggcggatggcgacggcacagcggtggtctgtggaggcggtggctgccgtcggtggcagcggcgacgacgaccgtgactatggaggcagtggtgacgtcngcggtggggaaggagtcgggtgcgaggtgaggatggcgacggctaggtggctgggcgttcggcagcagcggctgcggtggtggtgatcgtgactgcggtcaccggaggcatgacgggctcagacggctagtcgagggcgtgggag

SEQ ID NO: 26491 - DNA, 567 bp, Oryza sativa
  Clone ID: uC-osflM202068d08b1
tcttgatcacaccgtccgccaccggaagagagagcccccctacgacgacgacgaccatggcgctcgcctccacctccgccaccgcgtccgcggccgtgctcaagacgcccttcctcggggcgaagcgcgcgctcgccaatgccgtcggcgtcgcgggcgccaagcccgcgccgcgccgcgcgctcgtcgtgtcggccaagaagtcgtggatcccggccttcaagagcgacgccgagttcatcaacccgccgtggctcgatggctcgctccccggtgacttcggcttcgacccgctggggctgggcaaggacccggcgttcctcaagtggtacagggaggcggagctgatccacgggcggtgggcgatggcggcggtgctggggatcttcgtcgggcaggcgtggagcggcgtgccgtggttcgaggccggcgcgcagccggaggccatcgcgcccttctccttcggctccctcctcgggacgcagctgctgctcatgggctgggtagagtccaagcggtgggtcgacttcttcaacccggactcgcaggcggtggagtgggccacgc

SEQ ID NO: 26492 - DNA, 472 bp, Oryza sativa
  Clone ID: uC-osflM202068d11b1
ttgttctttagcactgcatctttcttgctgggagcgatcacctctttggtctctggttaccttggaatgaagatcgccacatttgccaatgccagaactaccctggaagcaaggaagggtgttgggaaggcatttatcattgctttccgctctggtgctgttatgggcttcttgctggcatcaagtggtcttgtggttctttacatcgccattaatgtatttaagttgtattatggtgatgactgggaaggtctttttgagtctatcactggttatggtcttggtggatcttccatggctctcttcggaagggttggtggaggtatttacactaaggctgctgatgtgggtgctgatcttgttggcaaggttgagaggaacatccctgaagatgatcccaggaacccagctgggattgctgacattgtccgtgacaatgttggtgatattgtggaatgggaacagatctttt

SEQ ID NO: 26493 - DNA, 503 bp, Oryza sativa
  Clone ID: uC-osflM202068e01b1
gtcttactcacttcgctgcagaggaaaaaaaagagagaaaaatctccgatggctctccaggcggccaccaccacctccttcctcccctccgcgctctccgcccgcaaggagggagcggtgaaggactcggcgttcttgggcgttcgtctcggcgacgggctcaagctggagaccagtgctctcggccttcgcaccaagagggtgagcacgtcgtcggtggccatccgcgcgcaggcgtcggcggcggtgtcgtccccgacggcgacgccggcgtcgccgtcgggcaagcagacgctgcgcaagggcacggcggtcatcaccggcgcgtcgtccgggctcggcctcgcgacggcgaaggcgctggcggagacgggcaggtggcacgtcgtgatggggtgccgcgacttcctcaaggcgtcgcgccgccgcaggccgccggcatggagaagggcagctacaccatcgtccacctcgacctggcgtcgctcgacagcgtcaggcag

SEQ ID NO: 26494 - DNA, 545 bp, Oryza sativa
  unsure (1)..(545): unsure at all n locations
  Clone ID: uC-osflM202068f02b1
cattgtcaaccctcatctccccccctcctctccaccgacctcgatctcgcccctccccccacgcgcgcgatctcgcccagatctcgctgagccgccgccgccgccgcagcagcagcggccatggagaacctgatctcgctcgtcaacaagctgcagcgggcctgcaccgccctcggcgaccacggcgaggagagcgccctccccaccctctgggactcgctgccggccatcgccgtcgtcggaggccagagttcgggtaaatcctcggtgctggagagcgttgttgggaaggatttcctaccaagaggctcaggcattgtcacccgtcgtcccttggtgctgcagcttcataggatcgacggagacagagaatatgcagagttcatgcaccttcccaggaagagattcactgatttcgctcttgtgaggaaggagatagctgatgaaactgacagagaaactggtcgttcaaagcaaatatcatcggtccctattcatttaagcatatattctncaaatgttgtgaacctgactcttatcgatct

SEQ ID NO: 26495 - DNA, 514 bp, Oryza sativa
  Clone ID: uC-osflM202068f05b1
gtttgtgatctctttagctcggatcatctctgcatttgcatttgcagctgctcgtcacggcaatggcatccaccaacagctggacccacgagatcgagtcgccggtggccgcgccgcgcctgttccgcgccgccgtcatggactggcacacccttgcccccaagatcgcctcccacatcgtcgccagcgcccaccccgtcgacggcgacggcagcgtcggcagcgtcaggcagttcaacttcacctcagccatgccattcagccacatgaaggagaggctggagttcctggacgtggacaagtgcgagtgcaagtcgacgctggtggagggcggcggcatcggcaaggcgatcgagacggcgacgtcgcacatcaaggtggagccggcggcgaacggcgggagcgtcgtgaaggtggagtccacgtacaagctccttcccggagtggaggtgaaggacgagatcaccaaggctaaggagtccttcaccggcatcttcaagaccgccgaggccta

SEQ ID NO: 26496 - DNA, 553 bp, Oryza sativa
  unsure (1)..(553): unsure at all n locations
  Clone ID: uC-osflM202068f08b1
ttcagagaaaggcgtcttcgtactcgcctctctccgcgcctccgcgcttttcctcctcctctcccctctctcccttctccgccgccgtcgcagcatcaacccaatccgccgccatgagggagtgcatctcgatccacatcggccaggccggtatccaggtcgggaacgcgtgctgggagctctactgcctcgagcatggcatccaggctgatggtcagatgcccagtgacaggactgttggtggaggtgatgatgctttcaacaccttcttcagtgagactggtgctgggaagcatgttccccgtgctgtatttgttgatcttgagcctactgtgattgatgaggtgaggactggttgctaccgccagctcttccaccctgagcagctcatcaatggcaaggaggatgcagctaacaactttgcccgtggtcactacaccattggcaaggagattgttgatctgtgccttgaccgcatcaggaagcttgctgacaactgcactggtctccaaggtttncttgtgttcaacgctgttggaggtggaacgggctc

SEQ ID NO: 26497 - DNA, 333 bp, Oryza sativa
  Clone ID: uC-osflM202068f10b1
tcgtggagcgccagtcgggccggcccgcgcgggggccatttttacagaagggctggcctaggcaaccctctggtggcgggcggcctagctgatgaggacggacacgcgaggggcggcagttgccgggcggagcttctgctggttcctccggcggacagcaggccggacaaggccatacggcagtagacggctgacgacgaggcggccggccatgagaaccacatcaaggacatccgtctcgacatgggaaactgcgatctggatatcatattaacaggcgtttgacaaggatatgaagaacatcatgcacaaaatcaccagaaactgacttgt

SEQ ID NO: 26498 - DNA, 508 bp, Oryza sativa
  Clone ID: uC-osflM202068g03b1
ctccttagcgccgccgccgccacacactcccccacagctccccttcccttccactcctcctcctcctcggatcgggaggcggagcgagcaatcccccaaggaatttgtatttgtagcgtgatttgcaaagctagtcaagatggtgaagttcacagtagaagagctccgccggatcatggacaagaagaataacatccgtaatatgtccgtcattgctcatgtggaccacggaaagtctacacttacggattctcttgtggcggctgctggtattattgcccaggaagttgcgggtgatgttcgcatgactgatacccgtgcagatgaagctgagcgtggtattacaatcaaatccactggtatctctcttttctatgagatgagtgatgaatcactcaagttgtacaagggtgagagagatggaaatgagtacctgatcaaccttattgattcacctgggcacgttgatttttcttcggaggtcactgctgctcttcgtaatactgat

SEQ ID NO: 26499 - DNA, 395 bp, Oryza sativa
  Clone ID: uC-osflM202068g04b1
tagtgatggcgatgggattatcgcgagaggtctaggggttgtatagcttaaggtggcgattaggacacggtggaatcgatcggcggaacgggcgtccgggtgtacgatacgcggatggctcctactactcctcctactcgacgccgcactgttgcagcccctccttccggtagcggcggtagcaggcgaggtccgcatcgcgcttaagaagcagaaggtcgactagacctgacgcgttgggggccacctagccggggaggatgcccagcggcttctcgcgcggcgccaagggttatttgaccaaacgctccgtctgggcacgcttgaggaaggccagggctgctgccgagggcgacatcgtggcgccttaataactacctcaacgctcagtacta

SEQ ID NO: 26500 - DNA, 499 bp, Oryza sativa
  Clone ID: uC-osflM202068g05b1
ttgttctggacgtcagctctttcagtggccatggggcagtaaccacacaagaattgatgtctacagacacaagggagcaagaaattacatggctggcaaggtcttgtagtagcagtggaagtgatcctaacaagaaaaaatcagagcattaatcgcccaaagtgaacctgggggagaagatcatggttttgcagcagactatgtcacctttcgggaagacagatacagcgtctgtcctggtggaaaccataacctacatcaaatttcttcatggtacagatgccttcaatgtttatatctggatagatgctggtgctgagtgcactgctttacttgatggaggatcaattgaggaagctacctgcatttctgcaagactgactacttgagagcggtcaggtatctgatgagctttatcatattctacaaaggttgagtacagggaaatgaacgaggaatggatacatactcaagaaaggaggagttcgaacaagagagc

SEQ ID NO: 26501 - DNA, 393 bp, Oryza sativa
  Clone ID: uC-osflM202068g09b1
cttcgtcatgtgcgccgaccgctgcgacattccggcggacctttatcagattgctggggttatccccaaccagatcagggagaccgtcaccaaggacctgcactcgacgttgctcctgtcgtattcgacgccgtcgtaccgcatcgacattccgatcaatggccagagccagatggactacatctgcagagatgccatgaagcacctctccgacaggctgaagaatgtgctccgaccagagccgtagaccgattccacggcactgtcttaccggagatgaaccgcttccgcgtatttcaacgaagagcctaggcctcaccccaagcattgacgtggcatggaagtgcaagataaggggcaaggatgagaataattctgctatcgagttcgact

SEQ ID NO: 26502 - DNA, 361 bp, Oryza sativa
  unsure (1)..(361): unsure at all n locations
  Clone ID: uC-osflM202068g10b1
tcttgtactgctgggtatggggcttcgtcgtcgcgctcctggctgtggcggcggcggcggatggggaggaggaggaggggaagtggnatccnctgattnctatgccgtctgaggaaggggacgacgctgatgctgctgttcctgctcctgctcctgcggttgcgtattactgcgggacgagcatggccatcctcgtatcctgcttccttcacctactggaactacctgcaccagaccgatgtgtgccatgcgtaccagattctgcagaagggagcagtgaaggataacaacatcttcctgtttatgaatcgtgaccttctccataacaatctctctccaaggcctgttaccatcattcaac

SEQ ID NO: 26503 - DNA, 351 bp, Oryza sativa
  Clone ID: uC-osflM202068g12b1
tggtcgccgccgccgactcttgcctttcccacgccctttttcttggcggctggagagccatggcgatgcagtccggcaggcgagcctcgtagccaggaggggtcagttccccagtcacccaccccacacacgaagatagcgagcttgtagcgtgattttttttgtaggccgtcgaactcgcacctatggcgaccgcgaacccctttgacctcctcggcggcgacgacaacgacgaccccgcgcagctgctggccaaggcggccgtcgcggcgcagaaggccgaggcgaagaaggccgcgtgccggcgtgatctatttacttcactcattgctacaatgcatatcatattcc

SEQ ID NO: 26504 - DNA, 258 bp, Oryza sativa
  Clone ID: uC-osflM202068h02b1
ccccgatgatgaagccccccacgagacacaccgcacgggggcgtttttataaactactgcgtcggatacaccaacaacgccgccgccgacaccgacgaatactaacattacaactcagcctcaacgcctacagacacccaaccaaccaaccgtatatatcactcaaacacacaccactcaaagactcaccacccacagcagcacacgcattccataagcaatctcgctgtcataaacctacacgccgaaccaccccag

SEQ ID NO: 26505 - DNA, 434 bp, Oryza sativa
  unsure (1)..(434): unsure at all n locations
  Clone ID: uC-osflM202068h03b1
tnctccctttctgaacacagcaccaccccttctggtggattttccacctccctgtgaattgtgggcctgaggcgatggcggcgctcgccccgtccaagatgctcggcacccggctcaacttcgccggctcctcccgctacgccaccgcggcaccgaccaccggagcgcagaagatcgtctccctcttcagcaagaagcccgccccgaagcccaagcccgtcgacgtcacctactcgagccccgacatcggcgatgagctcggcaagtggtacggccctgacaggaggatcttcttgccggaggcgctcctggaccgctcagaggtgccggactacctcaaccgagaggggcccggagactacggctacgacccttttggccttagcaagaagccagaggacttcttcaagtaccaggcctatgagctgatccat

SEQ ID NO: 26506 - DNA, 498 bp, Oryza sativa
  Clone ID: uC-osflM202068h06b1
tttcttattgattgattgatgtatgggtatggggggcggtgtggtgatggtgatggtggaggcgacggcgatggcaatggcggtgcaagggagccgtgacccggatttcttcgtggagggcgacgtgtactgcgacacgtgccgcgcgcagtttcagacgaacgcgacgacggctatccaaggcgcgcgggtgcggctgcagtgccagcacttcatgagcgctagcgtgcccgtggagagatcggcggaggggacgacggacgcggcagggcactaccgcattgagctggtggacaacctcggcaccaacgaggtgtgtgcggcggcgctgcttagcagtccggaccccgaatgccacaagaccgaggtgggtcgcgaccgcacgcctgacaccctcgttcaggacgtcggcctcgccaccatggtccggcgcgccaatcctttcggcgttcttaagacccgtgcactccctatttgtggtgaccttctcaagagcta

SEQ ID NO: 26507 - DNA, 451 bp, Oryza sativa
  Clone ID: uC-osflM202068h08b1
tctgtatccgccgttcgcccccatgggcgggcgcgaggaccactcgccgcagatcggccacttccaccaccaccccgccgcgcgcccgctcggccactacggctccggcccgggcgccggcttcgaccacgggttcctcagccgggccgtcgccggaggcggcccgcccgtcggcccaccggggatgcaccaccgcatggtcggccccgccgccggcatggcgatgatggcgccgtcccccttcgtcgaagagctggagctcggatcccgaggaggcggcggcggcggcgggcgccgcgagcttactctgttcccgacgaccggcgaccactgaggcaagcagacagacagaccgacggcggcgagccggcgacgggcaccgggcttccgtcctcggggacatacaattcggtcgcttcatctccccctctgctagttccccaccagatcg

SEQ ID NO: 26508 - DNA, 160 bp, Oryza sativa
  Clone ID: uC-osflM202069a02a1
agtatgccaaccgcaaattttcatcttcgaatccattggtccgtaaaatccaaggacaatgtgtacaatcaaccagtagaaaccagaaagagcaagaaattggggtcccgacccttaaagcctaattatgcaaagggggcccgaaattttacttaagacc

SEQ ID NO: 26509 - DNA, 362 bp, Oryza sativa
  Clone ID: uC-osflM202069a03a1
gcagtaaccaaatcgattcacaggccacacatacaggtagtatacagattcgtctacacacaaggttattgcagaggcaaaacacgaggtatgtatatcaaacgctctagaaaagattcatgtgatgaaatacatgatgaaccacgtatgttctcaaggtaaaattaattaatgcagtatagttttaactttgtccatcgatctcaacctgtaactgtgacgacacactggctacagtgccctcgaggtactagcagtatagcagtagctgtagtacgtagcagcagcagcagcaggttcactgtcttgattggattggatcggattagtagacgtagttcttgacgaacatgccctccttg

SEQ ID NO: 26510 - DNA, 485 bp, Oryza sativa
  Clone ID: uC-osflM202069a04a1
gccagatcattatagaagtgctacgagcgtactgctcccctccttcagattggatcctcttcttcggccgcccctccttttttttgtggttttttttttttttttttttttttttgatcccaaatgatctcattgattgatagcgatttcatagaagcagcgacacgaattaagatttaaaaccaaccccaagaaggatcgcaaatccaactccaccaaattgatccaagaactccggctaatccaaccaaaccatgggcgatctcatttcaccaacacgacacgaactcataaaaagactaacaccaccaccacctgctacttatttagggactcgacgactcaagacgactgatactggcaaaaggcgaaggggaacagcacagatctaggagagctggccgcagtcggcgatgacaaccggcttggcggtgctcccgcccggggatcccacctttttgatggccttgacgacgttcatgccc

SEQ ID NO: 26511 - DNA, 387 bp, Oryza sativa
  Clone ID: uC-osflM202069a05a1
tttgtttttttttttttttttttttatatggccagcatatatatatatatataatcatccgatcctctttagtattaagattacaaacaaatttgagactaaaaatatgcatgcatgggctcaccaaacctatacaggaccaggcaaccgatgatggatgattgccaaaaaaaaacacacccccaaatctcatcaagaaaccaaagggtaaaaataagactagcttaatttgccaggttaattagacagagtagtcgtcgcgattcccacgagatataggctaatcggtccgttttctcggctcgacgtgtaaaaatgtaaccgatcgatccatttttttcagacatcaatcagcagtttggcattactactaattcaacatttaac

SEQ ID NO: 26512 - DNA, 360 bp, Oryza sativa
  Clone ID: uC-osflM202069a06a1
gaggaaagtttagggaaaatgtattgacatttgtgaaatgacactgtttttattagtgattagaaactgagggagtaattgtgtaccagtctgttgtaagctagctacctccagtcatgttcataaacagaggcagtctactgcctaagctgtccaagaactgacgaaaccatgtgcatggtagccggtttacgcattatcagcccagtgtcgtcatcttatttggagtctgaagcagtccgagaggtaaccctgatcaggttcggacgaaaatgggcgtgcaacatccaatcagtatgggttttggcaccgctcaaggaccgggatgtcctgggacggctggcgattgatcggagcttt

SEQ ID NO: 26513 - DNA, 359 bp, Oryza sativa
  Clone ID: uC-osflM202069a07a1
ggcgtcgcggctcctcctcggaggcacggtgcgggcgacggccctcctcctctccttccccgaccctctctctctatctcactctctctgccctagccttctacgctgtgtggaggcgtcgtcgcgcgcgcgcgcccggacggcgagcatctggatttgagcctaattgaagctgaacccccatggcccagcttaggtctgcgcctgcggaaagcgaggcggagccaggcgccgatggccctgcggatgaagccaatgctgtggaagaggagaaatctggtaagggcgaggatggcattgaggaggctgccgataccgttgattccgtgaaggattcagcaaagcctgaaggcatggat

SEQ ID NO: 26514 - DNA, 361 bp, Oryza sativa
  Clone ID: uC-osflM202069a08a1
cgggaagcccatctacctcactgggggggcaataaacaaattgggggggctgatattctttaaagacccatcccaaaatcatttaaccaactttaccccatcatgtaattaaccaaagggttggtcccaaagggggggtaaaaacaaaaagaaaaccaaaagcgcctaaccatttgtaccatatccccactaagttgagactttttaatttggggggggccaattgctacctggcacaggagtaaggaagggctaacaagaacaaagggatttccatgcgcggaaccccagggaacgggggctacccttgcccgtaagaggaatcggcttgggatgaccttatgccccctgatcgggaagc

SEQ ID NO: 26515 - DNA, 405 bp, Oryza sativa
  Clone ID: uC-osflM202069a09a1
aatatagacagcagaacatcactgggattgccattcaaaaactgcaaacaccacatctaaagtaaactgccaactgaagacaccaccttgtagtacaaaattacatatcgggagcataaatagggataattatcataacgtcccaaggaaataatcagatgagaagctataagcctataatgctcctcagcttcaagcatatagtacacttgaaacacgatacaatgcgttcttgttttggaatttgttgtccatcagaaatgagcaggctaaatctgagaaaaatgttcaacaatcatgtctacatcgccttgtcggttaagtacaaactatccaaaacagcaaatcctgcagcaacgccaccttcatctgacgataaaacttttgtccgcatcaagtaaccac

SEQ ID NO: 26516 - DNA, 114 bp, Oryza sativa
  Clone ID: uC-osflM202069a10a1
gttaaactaacccaaattaagctgtaaaaatccctacatgcaatgcccggtgttctcttcttttggagattaacaaaggtcttaaagagccaggaaccaccagcaagtcatcac

SEQ ID NO: 26517 - DNA, 430 bp, Oryza sativa
  Clone ID: uC-osflM202069a11a1
acaagaaaccatcatttttttttcacggctaatatgagtagccaaagttactaataaacatcatcaatacaacatcaaatgacagcacctctgtactgcaaagcatcctcactctcatcaactatgccaaatctagagaagggttctgaggtgaggcgaaaaaagaaaaaaaaattaccggcccaggtaggatacacaaagtcctcctagatgagataaacaaagtaataacataggccataggctacatcatattcttcttcacttgagaaaaaggaaatccaggacttttccagggatgtatttgcgatggtgatacaaaatgaaacttaggagtggtcatgccatggacatggcctctatggtttcttactttcttcactctgttgttgtatggcacaatgctcttcttagcttggaccttcatgtt

SEQ ID NO: 26518 - DNA, 68 bp, Oryza sativa
  Clone ID: uC-osflM202069a12a1
tgtgttttgtcagccatgcgggaagatctatgaactaattttaacaatgaatcagcgatcgactcatc

SEQ ID NO: 26519 - DNA, 340 bp, Oryza sativa
  Clone ID: uC-osflM202069b01a1
agcaaatcgatccatgcgaccatgcttgcaaatcagttggagcacaaatttacatgttacacccacaccctacacccatgcataataatacatggtatatacgttcgttcatacatacccctttggatcacacgcaccatcgatcgtacaaagttgggtacatacatacgttacacacattatacgtcatacgcatcgtacatacagtacataatttaaaaaactcgtaattaattaaataccgtagtttgatggcattctctaatggaaccttgaggctggtgaggaatgtttgttgtggtcgggtttcagtcgcggtgattcaagcaggtttctgcca

SEQ ID NO: 26520 - DNA, 411 bp, Oryza sativa
  Clone ID: uC-osflM202069b02a1
gacaaacatgaataaacagttcattactttagcgaaaatacagcggtttagatacatatatatggtatacaacaaggtagttgccttctctatgtacagagcagatcactcaagaacaatgcatagttctcatccatggaaacggtttggatatcaagagggtatgttcttacgcaggcacaagcgaagctcggttcagaccagcgagttggatccacaacgaggcacggatccgacttcttgaactcagccaccttttccccacagctggggcagtagtggtatttgtgccagaggcagtccatggaaggacaaaggaagcagacgcccatcatgaagggcatcatgcaagccacaactgatgctagacttggcttcgacctgttcaaagcaacaacagccatgagtgtg

SEQ ID NO: 26521 - DNA, 378 bp, Oryza sativa
  Clone ID: uC-osflM202069b03a1
cgaggggacaggcagggagctcctgcaatttactataaaaaaagagagttgacccagtttataaggaaaaccggacccaaaaaccttacaactgcacagttaattaaaggaaaactggcaaaaacccggcattgacaaaatctgaaccaaatgaacaattgtccaacagggaaaaaaacccctaaaacaaatccttaaaaaaggttaccctgacaaaacggggacaacgtccgatcctaacgaatccaaggttttcacccgaagagtttccttgaaggggagttgaaacgagggctccaaacgcaacgccttaaaaaaggggaacggcgtccgagggcgctgccgttagtagcaccaaaagcggagcaaggttttcac

SEQ ID NO: 26522 - DNA, 328 bp, Oryza sativa
  Clone ID: uC-osflM202069b04a1
ttgggttaagaaccaaaccggacatatattattattgcaaagggggggcaccagtcaaagggcctctaagcgaaaccaggcgaataattcaatttccaagggtggtagaaccggattaccatttggcgtgacataactcaaaagcccaggccaaagcagatgaaccatcatcgggtcatttatcagttgcccgaacacaccgcaggcaggcaccttcatgcagcaggtcaaacgccttggtgatgtcagtcaggttcatgccgggaggaacgtacccgtccaccttgatttccttggtcaaggacttctcaacgagccatggaacttg

SEQ ID NO: 26523 - DNA, 118 bp, Oryza sativa
  Clone ID: uC-osflM202069b05a1
gaacctatctttatttttttttttttttttttttttttaattttttttttttttatacacatcttttttctgatattacatttttttttttcattttttggggccccgggagcaacaa

SEQ ID NO: 26524 - DNA, 423 bp, Oryza sativa
  Clone ID: uC-osflM202069b06a1
gaacacaagaacaaattctgacattcattgctttaattttttttatacaattacaaagctacaaactgttccactcacttccacagagtaggcatttagctcagcgacattggagatatacaactttgataaatatcatctagctatgtgaaactagaaactcctcagtggaaaaggacataacttaaaacttcacaataacatcaaagccgagtttttcatgtgagcttttctatttccaaggtttcagatctgctacaggccccgcagtccagttgagatgcttctcgcctggctttaagtatacactgtctgggtgtgggagctttcgagcaaggccgttgaggatctgatggaatgcatctctaggttgtgctggctgcggaaacaacatggcctgtttcattgatggattggcgagta

SEQ ID NO: 26525 - DNA, 333 bp, Oryza sativa
  Clone ID: uC-osflM202069b07a1
gtagatatactctcgaaatgaaaaaaggaacatgaagaaaaaagaaagaagaggaagaatgaacagaagaaatcaaagaaacaatggcgagcgctgctgatcgatcaggtgctagtgcgaccgatcgaatgagctcacgagatgaatggacaaagaaaaggtgaacgtgtgtagtgtagtgtagtgtagagtagtgtacccatcggaggaggaggagagggagagcgagagcgagctagaagagcctcccaatcgaaccgcgggatcggcgaggtggtggtggtggtcgtttcggcggccatgggggtcgtcacggtggacgactacgtggac

SEQ ID NO: 26526 - DNA, 75 bp, Oryza sativa
  Clone ID: uC-osflM202069b08a1
tttttgttttttatgatttaacagtttattactttagagaggaatcaggggtctcggtacatacctatgaggatt

SEQ ID NO: 26527 - DNA, 421 bp, Oryza sativa
  Clone ID: uC-osflM202069b09a1
aacaaagcaaaaaggtgaaaatgcatattaagggtgtggcaggtgagaggaaaaggacatgaggaggggggtctattaaggccctacagttacgggacgtgacgatgcctaccatgactcttatgtttaatacagtgtaatagaccagaagagcttgaccgatgaatttcagcccgagtcatattgcattagatacatacttaacattggggtagaaggaccaagtatccgatcagcatgttccagattctatatacagaggatggcactaatagctgaaatagccataacattatcccctaagtaaatacacacaaggcgccacagtaaggaattaggttgcgtcaccaagctaagaacaacattcaacttggccataccaaccaatgtacgatacggtctggagccgatcctaactctg

SEQ ID NO: 26528 - DNA, 331 bp, Oryza sativa
  Clone ID: uC-osflM202069b10a1
gaaccgaactccaataggaggaggatagcttaatttgcacatagtaaaagagggatacacaactgagtactgaaattacaagtctgtgttcagataaaaacagtagtacaacaaacttgaagaggaacgtcgactccacaataattactaacaaagcaggcagcgggaaacagccgtcgcccatcagaaacagcttgctctggattggcatcttgacagtgataatagctgatgcaggttacgacctgctcttgaatggaattgccctgatgaccacctggtggtagatggcagcaagggcagcgccaatgaaggggccaacccataagat

SEQ ID NO: 26529 - DNA, 384 bp, Oryza sativa
  Clone ID: uC-osflM202069b12a1
aaacagcaatcatccccaaagatccaaacagcacattttttattatagcagaggggtgtcacagttcaaagggcttttaagcgaaacggggagaataattcaatttccaagggtggtagatctggattacaatttggcgggacatagctcaaaagcccagccaaaagcagatgaaccatcatgggttcatttatcagttgccagaacacaccggaggcagccaccttcatgcaggagggcaaacgccttggtgatgtcaggcaggttcatgctgggggtaacgtactcgtcccccttgatttccttggtcaaggactttttaacgggccatggaacttggcttcggctcttgaaaccgccgaaaggtgttccctttcagacacg

SEQ ID NO: 26530 - DNA, 107 bp, Oryza sativa
  Clone ID: uC-osflM202069c01a1
actattgcttatttacattttacttgttttatctttatgttcaaacaaattatctaaattttaggtaagtactaacaaaattttaaaggcacaacatatagaccctt

SEQ ID NO: 26531 - DNA, 95 bp, Oryza sativa
  Clone ID: uC-osflM202069c02a1
tttggttttgtaaaaatatctggattacaagtctgtctaattttccaaagggatagagggttcaatcacaatagactgagattgacaacgttaga

SEQ ID NO: 26532 - DNA, 182 bp, Oryza sativa
  Clone ID: uC-osflM202069c03a1
tttggttttttaagagtggatgtattacaagtttgtttaatttaccaaagggatagatcgatcgattacaatatctttgtttgtcaacgtttgaattcaattcaaaaatcatggggtgggttcaaataaacagaagggggcctatttccaaactagcaaacaaaatgattttgattgataga

SEQ ID NO: 26533 - DNA, 414 bp, Oryza sativa
  Clone ID: uC-osflM202069c04a1
agttaattattagacgagtcttatccactttgtgtagacatactgaatccgtgtctagtacatttttcagagtacttacctaatgcccgcaaaattgtatgcacagtgatcaagaagcattttaacatgcatccgtacattataaacctactcttcgaagatagcttattataatacaagatgaacagcacaagtcgagagctatatatgtcagatcatgagaagtgcatattgtagtatatgcagagatcaacttgcttttcaggtgccttcagttatctattgcatcttcagattctttccttttggcgatttcagcatgttctttgtttctgggtgctgggtttttggcaatgtacaacctttttgctgatgcaaggaacaactcccatgggacatcgccaacaagcattc

SEQ ID NO: 26534 - DNA, 238 bp, Oryza sativa
  Clone ID: uC-osflM202069c05a1
tataaaagagcttcgacgtatgcagcacgcagcacagagcgcggggaccctatagagggcgccccctttttttttttttttttttttttttttttttttttttttgcacagacaaaaatttaatctaaaatcttcattcccagaaccaaattttcggaacataacccaattgtagtgcatttctcagagtcatactaaatacattacactccgctttgacgtgaacaacccatctttc

SEQ ID NO: 26535 - DNA, 415 bp, Oryza sativa
  Clone ID: uC-osflM202069c06a1
agagcgcataaatcgtaacgctggctagactatacaaaggtgcacgagcttgcatataaaccaggtcaggatacaaaatgcccgcgggcataaacatctggaataacaattaggtttgacatggcactaccaaatgtccaaatcaagtaccgaagcaaactaggcgagctgaaagttcactgcggcttgggaacaggttcgagggcttcaatcatcacaacactgtttcccctgataaccaccatccctatgtcattcttgtcgtttccattgacctccactgtgttgtccacgaccaaattcataaactgatcgaatcctggaagagtgccaatgacaacacggttcgcattcagcttgatttggagcttcttgtccatgtacttcttcagatccggaggctggcccgatcggc

SEQ ID NO: 26536 - DNA, 403 bp, Oryza sativa
  unsure (1)..(403): unsure at all n locations
  Clone ID: uC-osflM202069c07a1
aagtaaatatatcatatattcgattatatatatatatataatagcagacaggttacatccattagaactcagaatcaccggaattgaacatcaaaagtacaacacaagcagcagcagcatcagccagcagcaaacgacatgattacccacgcttttggatgaagaacaangaagtacgagaagaagaagacgatggtcgaacaccttgatcgagctcaacaatggcgatcgatcaccaatcacctacttggtgaactcgatggcccaggcgttggcgtagatgtaggtggccttgaagccggtgaatccggcggcgcgggcgagctccctgaactccctctcgtacctctccttgccgccggggttgtgggcgagcatgatcatgtcgacgtggaacaccccc

SEQ ID NO: 26537 - DNA, 395 bp, Oryza sativa
  Clone ID: uC-osflM202069c08a1
attagtgtatgtattacaagtctgtctaatttaccaaagggatagatcgatcgattacaatagctgtgtttgacaacgttagattcaatcaaaaacatgggtgggtcaaaaaacagaggggcctataccaacagcaacaaatgatttgatgatgagttaatagaataatatccatccttcctacgaccgagagagagagagagcagtaagtaaacaattaatattggtaaacctggaccttactgaacaaacaacattaattctgctaatacatatgtacaacaaacacttttttcagcacatcggagctgactgcggtgctcactcatgctttgctttgatttgctttcctctcctgctgtatttaccctgttatatagtattctgtaacatcg

SEQ ID NO: 26538 - DNA, 133 bp, Oryza sativa
  Clone ID: uC-osflM202069c09a1
agaaagaagcattctctgatgcataacttctccgatttaatttaatccataccttgaagggggtcctcagctcagacacttgaatttggacccttgggcgggtatgaaaatctaccccaaatgccctcgcgat

SEQ ID NO: 26539 - DNA, 423 bp, Oryza sativa
  Clone ID: uC-osflM202069c10a1
tttggttttttttttttttctttttttttttttttttttttttctttttttttttttttttttctcccgggaaagaagcccggcccacccccgggaactccgggcccccaaaacccccggaatccgggggttccccttccgggaaattcaacccccgccaggccggacatttggtggggcgccccggggccacccaaaaaatcggggccgccccccccggccccccctggcgggaaggaacgggccaaacccccccaaggcccgggcaccggggcttaagccccccccgcccccggccccacaaaagggcccccggcccgggggcccccgggccgctaggggggacgacccctgaagggggggaaccaggcaattctggacccccacgcctccggggccccggggggcgccccgggaatcccg

SEQ ID NO: 26540 - DNA, 309 bp, Oryza sativa
  Clone ID: uC-osflM202069c11a1
gaaggaaaaactatgtatagcttgaaaagcatctaagcaaagataactacagcatccgacgtcccagttatactgagaaaacctaattttatggactatccctattacaagataaccttttcataactagggcaaacatccgacaaggtacaagcacacctgatcttacgattccatttttttttttgtttgcttttccaacaaatgcaacattagccctagtcacattaacatacaaacaagtcaatgtaaaagattagaaaaagctttacagtgaagatccaaccggcatgcacggctatctttgga

SEQ ID NO: 26541 - DNA, 397 bp, Oryza sativa
  Clone ID: uC-osflM202069c12a1
aagatccaaacagcacatatattattatagcagagtggtgtcacagttcaaagtgcttctaagcgaaacgagcagaataattcaatttccaaggctggtagatctggattacaatttggcgtgacatagctcagaagcacagccaaaagcagatgaaccatcatcggttcatttatcagttgccagaacacaccgcaggcagccaccttcatgcagcaggtcaaacgccttgttgatgtcagtcaggttcatgctgtgagtaacgtactcgtccaccttgatttccttgttcaagtacttctcaacgagccatggaacttggcttcggctcttgaaaccgccgaaagctgttcccttccagacacggccagtgacgagctggaatggtcgtgtagag

SEQ ID NO: 26542 - DNA, 395 bp, Oryza sativa
  Clone ID: uC-osflM202069d01a1
gctcccacaaacattcaatcaactctgttcaccagatatattactactaacccagaagacatctctaaattagatgctccgatttgctaatgagcgatagagatttacataatggagaggtgcgaatgttgtgaatctgcagatacactgaaacatgctgatacgtcctcccccggtctctgaatctggtgacaatcagagcacacgcaaaaatgggggcggatactcctactaggataatgcatactactacaacaattggtttggggggagccctcgcccctcagtctactccttgttccgggttgatcggtctttcttgtgcccgccaaggatacgggagatctgcagacctctgctgaaggcctggttgaagagcatcctggtctggaact

SEQ ID NO: 26543 - DNA, 59 bp, Oryza sativa
  Clone ID: uC-osflM202069d02a1
aaaaaaacgcgaaaaattttttcccttcttttggggggcccccccaaaaaaaccaaaaa

SEQ ID NO: 26544 - DNA, 225 bp, Oryza sativa
  Clone ID: uC-osflM202069d03a1
gggaaaaagggtacacaaatcctttagtatgatgataaaggcacccctataaaacgggttataaagggtccatttctaccaaaagaacttcacacatgagctctgaacgaataacaacaaggaccccaaaaattagttttcacaaggggcacacaacaatcccggtgctattggcgacagatgaattttataccgaactggcatcactggtccccgaaaatagag

SEQ ID NO: 26545 - DNA, 328 bp, Oryza sativa
  Clone ID: uC-osflM202069d04a1
tgtgggcgccctccttttttttttgggtttaaggaaatatggggtttgcattacaaaattataataactaccatgcacttattatttttgacaacggggcaaccaccttaaagacagttaattatagttcaagggaaaccaccccaaggccaacaatgacttgactaactaggataaataattataacaacacagactacccctagaatcttttggtaagggtacacggataatttgcctttgaaaagggagggatgttgcacagcacgacaggctgcatcaaagaaagcgcctgaggcggccccattttgctacataatgctacaac

SEQ ID NO: 26546 - DNA, 140 bp, Oryza sativa
  Clone ID: uC-osflM202069d05a1
tttttggttttttttgtctccaatacgctaataaaacgccattagaaatctccctgcagcagctctgccgcaaaatcacaccttgccccgtcaagtatcctgaaccgcatggttaatagctgccacattttttccaaagg

SEQ ID NO: 26547 - DNA, 118 bp, Oryza sativa
  Clone ID: uC-osflM202069d06a1
tttggtttttgaaagatcaaggttcttttttagaactctaatgacggtcattaatttcccagattctgtcattgtcgaacctccagggcatcctttcgcgtgcaattccttgtccgga

SEQ ID NO: 26548 - DNA, 409 bp, Oryza sativa
  Clone ID: uC-osflM202069d07a1
ggggaaagcattcttgggacgataatgaaactatgctactgatcccgtcttcatccatcaccgggcacgtattgctaaaaaaagtgttcgataaaatactactagaaccaactggcaatccagccagcatccagaaaaaggaattgccacctccaccggacaaagccagaggtgcaaagagctatcgcccaatgggcaccacaacccctgttcagtcgatcacactcataactggatctgcccgcccagcacacgatcccagggtacaatttccaagaatgcccagggcgctgcacttatgctgagctcaacctttagtacctggaaattgcgcaaggacgttgcttgcttcccaaaacgttaagtgcattcagatgggcttgttgcagaatactgacattcatctcca

SEQ ID NO: 26549 - DNA, 383 bp, Oryza sativa
  Clone ID: uC-osflM202069d11a1
aacaacagaaactctcacatcatattaaaaacaacacaaactcttcaatgcacaaatcctccgggctaaacgccgcgcaactgctaaaatggaagatcaaagcttcctaatcctatgacaacaattttctttcttgtgctaggcatattccctttgctgatacatacatggaacggaatgcaaagtagtatatagctgtgtaaagttgcaaatgaaatcccctggaatgccagtgctgcatctgcatgtatataaattaaccgggtgttctttacgagcgcacaccgttggggaaggacgcgttcagccatccacccttcttggcgcgctcgacgtagcagcataactgcttgccggcgtcccgcacgtccagcgcgaggtcg

SEQ ID NO: 26550 - DNA, 383 bp, Oryza sativa
  Clone ID: uC-osflM202069d12a1
gggtaccaaagatgctcattaatttcccagattctggcaatgttgaaccgccagggcaacatttgcatgcaattcatgtccggatgtccctatcaaatactccatgcaaaattgcaattgcatctatcaaactgacataacctggagaaactggtccatagatgcaagtatcaggggcatgcaacaggttcgtctaacccaccaaggtcttattactaacttgttgctggagagtacgcattttacacgctaagacaacggcgcaggaaaagatcggtcgtctcaggggtcgtgagaaatttccttgaggacattgcccaggttagcctcggccctggtgctctccacccatttggcattgatcctcactttctggatgcttt

SEQ ID NO: 26551 - DNA, 68 bp, Oryza sativa
  Clone ID: uC-osflM202069e01a1
cttcaaaaagaaatggagcgaaggccccaattcatgaaaggggaaacaggatgggcagtcccccatgg

SEQ ID NO: 26552 - DNA, 409 bp, Oryza sativa
  Clone ID: uC-osflM202069e02a1
gtaccagtctaaaagcagccttcttttactcttgccacataaacatattcagtttaactacacttttagcaccctgtgtggatgtcatgtgatgagaggcaggaccgactgacttgttcactcacgggattattcaagctgccaggctctttgaagctatctcgtacacatttctctgataggcccattggctgacacgatcatctccagctgagccttagcaagagcttgtctgctctcatcatatcgcctccaccgagagaaagctgacaccatgcgggaggccacctgaggatttatcttgtctagctgtaaaacaacttcacccaagaacttgtaaccagagccatcttttgcatggaaatttacaggggacccacaaaatcctccaattagcgaatacaccttg

SEQ ID NO: 26553 - DNA, 229 bp, Oryza sativa
  Clone ID: uC-osflM202069e03a1
acggcatacagcacgcagcacagtgcgcggatacccctgagagggcgccccctttttttttttgtttttggaagcatacgcacctttctcacctgtctacacaataattatacatatgcccggccctctccctcgtctcacttgacgctcgcgacattagtcagatttgcaaaacactcatggcggtgttaggttacatttttacttcccagcctacaaaaatttgaaa

SEQ ID NO: 26554 - DNA, 397 bp, Oryza sativa
  Clone ID: uC-osflM202069e04a1
gcctattgctacaaaacaaatgtttccattccaagtaaacattctcacacaaagattacctattacactcaggggctgcctctcgctaaagaaattcaagaactattcttttaacaacatatgtatgcttctactttctatcctgaaaatgatttctcattgatcaacttgaaaaatatgtttcctagtgagtcatgtgtcaactatatgagcacctccacatcatcctcggcgctttcttccaaaaggagatcatctctttgctcagccttcttccttctctcattcttcttcctggtctcctcacctatagcattggcgatggcgatgggtagccaaaatccaggcctttcgaggaactgagctcggtgaagaatcatcgcattacgccgtgtca

SEQ ID NO: 26555 - DNA, 219 bp, Oryza sativa
  Clone ID: uC-osflM202069e05a1
acactattggagagccaccacggcagaagcgcgcgcgcgcgagcgcgggccctttttagcgggcgccccctttttttttggttcgaagaccgaagagaaatacccccatgttaggaaaagccaaatctgtatattatattattaataaccaaaacctggcatgcccagctatggcttgggccccgtccggttcacagaacaaagagaaaacataaaaag

SEQ ID NO: 26556 - DNA, 91 bp, Oryza sativa
  Clone ID: uC-osflM202069e06a1
tggttttaaggcaaaaaggaagtttgcttaccattattttaacaaaaccatggaactattattcttggccacgaggccaccccctgacggc

SEQ ID NO: 26557 - DNA, 394 bp, Oryza sativa
  Clone ID: uC-osflM202069e07a1
gataacttaagaattaagatctccatcacataaaaacatacagtgactgagtactggattacacgattgagttgttcagggttcagataggaaaaacatcttggggactagagatagagggaatcgacagatgcgcagcagtagcgcgcgggaaacaggacatcacgattgctgttgcatgttcgtcggctgcgcagcggcggcgcggggcttaagacctgctcttgaatgggatcgccctgatgatcacctggtggtagatggcagccagggcagcgccaacgaagggaccaacccagaagatccaatggtcattccaggcatggtccttgctggagatgaaggcagcgccaaggcttctggctgggttgatgccagtcccggtgatggggat

SEQ ID NO: 26558 - DNA, 390 bp, Oryza sativa
  Clone ID: uC-osflM202069e09a1
gggaccgggagttccatactttcttaacacacaaaattatacaatacaggatcctgccgcctgtctcactgatgctagtgacattaggagattgcaaacatcaggcggcgtggtgcatattattcccaggtacaaaatttgaaactgctatatgtcggcatgtaaaatttccatgcatccaaccaaactatatcttcttgcccctgcaaatttcaggcagcagcctattctatctcgcgatatatgatgagactaaagcactaatcaaatgtacgggtcggtcctaaaatcagctatcccgatgcttctgctggctttgcgtctttctccttttcagcttggtttttctttggaaattcctcgatcagcacgcgctgtcttggtgtcaaa

SEQ ID NO: 26559 - DNA, 361 bp, Oryza sativa
  Clone ID: uC-osflM202069e10a1
ggaaaaatgccttttttatcaccagtatatatagatggcctgaatctattaaactaaaatcatccttgcttgcaaaatctgaagtccaaaaagtaaaatcctagaagtacaaaatctgaagaagttctcaactaggacaagacatcttattattcatacaaccaaaactagcataacaaaaaagcactccaaaagctgccaacagggataataatccaactcaaacctaactttttatcatcttcctgaaccaacgcgttgagtctttagggcaccgcgtgaaagggctccgggctacatagaccattccaaattttgaagtgaacccgagccgccactcgaagttgctaagcagggacca

SEQ ID NO: 26560 - DNA, 403 bp, Oryza sativa
  Clone ID: uC-osflM202069e11a1
gatacccaaatgaaatatactcatgtatagtatagcccatatctttatattatattattattaacaaaaacttgtcatgcccagctatggcttgggcgcgatctgatacacagaacaaagagaaaacataaaaaggagaaataattaatagcaagcgtcaagccggcctgcttaaaaggtgtaaaggcagctgccgtcgtcgctcctcgccgttgggtcgaagttcttggcaacagggtcggtgcaaccttccggcacaggcaggttacctgcttgctgtgctccttgccctcctcctcctatgcaggccgcctacgatgcatcgatgggatgcgaatagctagagatcttttattcaactggatggcgccaaaccgtagaaggaaccaggctttatggcgtc

SEQ ID NO: 26561 - DNA, 248 bp, Oryza sativa
  Clone ID: uC-osflM202069e12a1
caaggaaaaatggaatttggtttacaatattataataataaccatgcactttttatctttgacaacggggcaacaccttaaagaccgtaaattatagtccaaggcaaaccaccccagggccaacaatgacttgactaactagtataaataattataacaacacagactacccttagaatcttttgggtagtgtacacggataatttcgccttttgaaagagaggggttgtgcacagcacgacaggctg

SEQ ID NO: 26562 - DNA, 408 bp, Oryza sativa
  Clone ID: uC-osflM202069f01a1
acaaaaaaaaaatccaagcttgtgacatcagttgattaaataaattttacaatgatacaagagatatcggctgggaacaaaacgcagaaaagaaatgaagattctggggacctatactgatgacaaacttgcagcaaaacatgggtaaaatcaataacatggctgtcagcagcatttcctcgcttgcgcgagatggaaccatgaagcctcgggagcccatccagcgagtgaatgttcgtctgagttgcctctgtaaacgccccctgggaggcttggactccaggaaatcaatcatttctttcagcaaccagaggtgtgaaaatcagatgagtttgaactcatattcaccagccattgtgatgtatcgaacccaaggaagggcctgatatccactcttttggatgattt

SEQ ID NO: 26563 - DNA, 378 bp, Oryza sativa
  Clone ID: uC-osflM202069f02a1
gaaaaaggaagtgctcctttactatgattaatatttcaattaaaacataagcacttagctattatgtttccctgtttacatggtgattaaacacaacactgatcacggtcacacctaatctaaactttacaacgttttcatctacatttttgtacgctttctgggcataaaaaacaagcgaaaggcgaactgataggcagacacgcgcagactgaatacaccaacgctctgaagagcggaagaaaacgccagtaaaaatacatgaagcaaaccaagccgcgtaaaggcaacagaaacaaaagaaatctcgatcagaaatcaagcaacgcctttcgatcagaaacattaagcaacgtgaatcagcaagtgctgaggacc

SEQ ID NO: 26564 - DNA, 97 bp, Oryza sativa
  Clone ID: uC-osflM202069f03a1
aataaaaagaagcaattcctgataagaaaagagtccatagaagggcaggggaggcaaaaaccggtgaacacaatggcatctgctgtatcacggccac

SEQ ID NO: 26565 - DNA, 203 bp, Oryza sativa
  Clone ID: uC-osflM202069f04a1
gaccgtcacgatcaagctgtggaggcactccttgtagtagggcgccgctctttttttttttggtttaacaaaggaacaggcaattaatacattacttaaacaataggatttgaggagccacactgaaagagtctagaaccctcaacttctagtggtgacaatagaataaacaacccagatcatgggatgaaaagtttacagct

SEQ ID NO: 26566 - DNA, 294 bp, Oryza sativa
  Clone ID: uC-osflM202069f05a1
caaataccaagatcgatcgatcgatgtacaagtggatgcattaattcatcatcttgggtgttcttatattacaaatcaccaccatgcaagtcgccattaaccaccaacccagctttcctaatttaagtagtaatcaacaaaaggatgacctctcctttttccatacccttcccagctcgcttcgtcatcacaaaactaaacagttgcgcgcgaacgcacaccaacgcattgatcccgtttgaattgcgcgcgaaagagcttaaattaagaggatgaggagaaggtgccgaagat

SEQ ID NO: 26567 - DNA, 284 bp, Oryza sativa
  Clone ID: uC-osflM202069f06a1
tttttgtttttttttttttttttggttttttttttttttttttaaagctacctccaaatagggggtagcattgggtagcaaaccaaggatataactgaggaccaacattcaggtgcagcttcacatcatcggtgcttatcataactgcaataaccgcgcacatggggccataaactaagaacttattccggagtttcttggctgacactttaagaagaagaagctacccaactggggaaccattcccccggcatggttcggggggccctcctgagccagaaatt

SEQ ID NO: 26568 - DNA, 380 bp, Oryza sativa
  Clone ID: uC-osflM202069f07a1
ggatcaaaccagtcatttcattagcttgattattatataaatttacatcatactttgacatgtcttatttctggtcaagagtctggactatttacaaaatgtaccggaaagaatgaaaactaaagacccaaacctgggacccatggatcacacgatggaaataagggggatgggatcaagcaacaattcgagatgcagagcacaaaccaaaaacaacggaaaaagggtaatggtatggccttatatgggcattaaatggacccacattgaactgggactcgcttcaacattcataatccctttaaaacttttggccaaccagattgctgtttttcgaggagataccttattctttccgaaagggtttaaaacaaccccaa

SEQ ID NO: 26569 - DNA, 117 bp, Oryza sativa
  Clone ID: uC-osflM202069f08a1
gagaagaatattatacagacgtgatttctatacaaagccggagcattttagctcatggggaagaaatcccctaaaaaaaagagttattacaacgaaccatagtggtcgttttggaca

SEQ ID NO: 26570 - DNA, 93 bp, Oryza sativa
  Clone ID: uC-osflM202069f09a1
tttgttttttcttttttttttctttcttttttttttttattctttttcgaagaggaaaaacaaaacaatttcaacaatcgcccaaaccagacc

SEQ ID NO: 26571 - DNA, 377 bp, Oryza sativa
  Clone ID: uC-osflM202069f10a1
ctgggaccaaacatctcagaaacattaacagaaggggaaggataatatcatcgatgggccccggtgcacagggaagcaaattgtactagtagggataatagtatcaacacaacttagggactttaaaccagaacacaacacaactcatgaacacgatgatatgacagacgagcggcataggtataatggaagcccaaggctgcaccacagcacacgctcagagaccaccacggaggcgcaggacaaggggcaggggggactccttctggatgttatagtcggcaagggtgcggccatcctcgagctgcttgccggcgaagatgaggcgctgctggtctggaggggagccctccttatcctggatcttggccttcacg

SEQ ID NO: 26572 - DNA, 351 bp, Oryza sativa
  Clone ID: uC-osflM202069f11a1
aaacaaatcaatatacattgatatataatatttctgaaacaaatcaatataatacatggatcacgtacagagtacagtatatatatgtgggtgagctagctagctagctaggggtcatggcgtcgtcatttaactacaacactcttaacctcccctggcaataaaattcatcaccagtaagggaccactctatagctagatgcaagcaaaaccaacaacttgaattaaaattttgtttgatttctggatcgatcctagatgcggccggcagggcttagtccattcttcttacacattaattaacttgggaaaaaatgaagctaactaattaaagcaaagggggggaacata

SEQ ID NO: 26573 - DNA, 408 bp, Oryza sativa
  Clone ID: uC-osflM202069f12a1
agctaacagaacagagcagtcttaaaccgattagacaagtcaaaagataggtgcatttcaactacacaactgacagtgcatcggaagacagacaagacatgtgaattcaggagaggcctaagaatcggtcatcacaaaagagggcctgaactaaccatactaacgatcaactttgctgagttttatgttgtccttaggaagatttgctgaatcgttcagcaaaagcccgaccagttggaggacatcatcagcatcgtagatgatttcagtaagctttaggttctcacaccggatatccaccaaacgtgttttcttcgccttggccttccctttccttttcttagaatcctttggcagctcgcaaagccgcaacgtgagcttctccaaattaggcgagttctgcagaaa

SEQ ID NO: 26574 - DNA, 417 bp, Oryza sativa
  unsure (1)..(417): unsure at all n locations
  Clone ID: uC-osflM202069g01a1
cccccccccctcagattgaaatgaattaacattgcacaaatgattgcaatgccatatgcatcccacattccacaagtntgaaaatgcaatatnagtatatccatccactaattcaatacatatccaaagtctcaaatttcatcttcctcctacatcgagcgcaacagcagcacatctgcaatagcttcacagcagcagcatcgcaatgaccaaaagcccattaccaacagcacaacggccagaagcacaacagcaccaaaataacatctcacaatcanaatggtcgcaagttcagtgtcaccaaaatatcatctggaacctaattgagtatgagagcttactgctgagcatctgatgatgcaaacttggtgccaatcaaggagcgaacgaagctttggatttcacttccttgctgcc

SEQ ID NO: 26575 - DNA, 407 bp, Oryza sativa
  Clone ID: uC-osflM202069g02a1
caaaaaaaacataggagtccaggttcaggttcacatacaaatcaggttcaaaagcacaggagtccaggaacaaataaaaaacaaaaaataacacatgagtctaggttcaggttcacgcacaaatcaggttcaaaatagaacacaggaatatacccacgtcagggaatttgcccagccgacgtcaggagtcagattctaccccgagttagattatatcccgcttttctttcgtcgagttaggctggttcccccacactgtttcctactccagctttcaggagttagattctatcccgagtcagattctatccagcttttttttcgctatttttagctagcactcccactaacatgattgtacagattttttttctcaggccaaaatacaagaaaatatagatcgtaag

SEQ ID NO: 26576 - DNA, 411 bp, Oryza sativa
  Clone ID: uC-osflM202069g03a1
aagtattattccttaattaatacacttgtggaaaatttcaagtataagtgacagtaaaaatgaaataagttgacgacagaggagcaatgatagcctaacgcaataaacaggttgtaattaatcatagttaggctatcaattgtacaaatctgtgaatccaacttccaaccagaacaatcgaagtcataaaatatacatttctgtggagcagctatgcataagtgagtgcgcataatcttgtcaaccctcctcgccaaattcttttgtaaacctttcgtgcacctccaagtctttcttgctcactgtcggtctctgcctggcgaggactttctcgaaatctgtccttgagattggtggtggaaggatctttgctgcaaggcccttggatgcgagctcctgcatggttgtttg

SEQ ID NO: 26577 - DNA, 70 bp, Oryza sativa
  Clone ID: uC-osflM202069g04a1
tttttgggttttttagagttcaggtcaaattcttgttatccggcactttgcacggccgaagcataacatg

SEQ ID NO: 26578 - DNA, 168 bp, Oryza sativa
  Clone ID: uC-osflM202069g05a1
ttttgggtttttgaggatatcggtttttttttttttaccccaaacttttggttaaagaaacattccaaggatttcatggaaaaaaaaaaatttcgcccaagggccaagggaacaaaattttgaaccacgaaatggtagtaagggaacccggattatcttttttttcca

SEQ ID NO: 26579 - DNA, 160 bp, Oryza sativa
  Clone ID: uC-osflM202069g06a1
ggggaggaaaaacttgattgctgagtagctgaacgatatttccattggcattggcttctacagagggtttgggataaacctctcaagccatcaacacccaggtagaattacatcttgcatactcttaagagtttcaacatatggtgcttacgcaattgat

SEQ ID NO: 26580 - DNA, 409 bp, Oryza sativa
  unsure (1)..(409): unsure at all n locations
  Clone ID: uC-osflM202069g07a1
gtccgccggcgtgtccatcagccagcgcgggttcctgatccggcatccggctatcctggtgaggtatgtccggcaatgctccggccacgagtagagctggatgttgngcaggncgttcttccggcactcctgccacaggttcttgtccgccaccagcttcagcagcgcgtcggcaatggcgtgctggtcatgcgggtctaccagcagtccattgttcagagcatttttaatgtcaaccggaccgccgttcttggtggcgacgatcgggcagaccgtgagccgcagcctcgatcagggtgagaccgaaaggctcaacaagagcacgactgatgaagacgcccttaattttncctgtgaggcgataaatatccggttcgcctgactgcttgtgatgcttggggaatgcaac

SEQ ID NO: 26581 - DNA, 410 bp, Oryza sativa
  Clone ID: uC-osflM202069g08a1
gccggcgtggcgtccgtcgtgacgtcggaccagttcgagcgcatgctgccccaccgcgacgacgcggcgtgccccgcccgcgggttctacgcctaccgcgccttcgtcgccgcggccggcgcgttcccggccttcgccgccacgggcgacgccgacacccgcatgcgtgaggtcgccgcgttcctggcccagacttcccacgcgacctctggtgggccctactcgtggggctactgctacaaggaggtgaagggcgcgacgtcagacttatgcgtgccgaacgcgcgctggccgtgcgcgcccggcaaggcgtaccacgcccgcggacccatgcaaatcgcatacatctacaactattgggcggtcggtgaggcgatcggcgcggacctgctgggcaacccggagctggt

SEQ ID NO: 26582 - DNA, 418 bp, Oryza sativa
  Clone ID: uC-osflM202069g09a1
ctgtataaaatatggtcccatctaattcaatggcgcaagcaggaagtatcccccctcatggctgagtcccagccaacaaaaataaagtgtgtccaccccaaaaaaatcggcccagttacaacaaatgattcgattcattgtaaaagacacaatagtaccaccacggccacatttaacgctaggataacattggtttaaacttttgtgtaccaaaaccaactaccgatagtgtaagcagctggaacgttattatctccactcgagcaaatgataactccgcatattaacctccaactgaagaccttatattccaatctgcttctcgaacttctggatttgattcaagaatatccatgtgatcatcacatggggagcaatcctgacacagtacacagggaagccagcgtagaacttgaat

SEQ ID NO: 26583 - DNA, 377 bp, Oryza sativa
  Clone ID: uC-osflM202069g10a1
accccatacttttgtttaaagaatcattcaaaggatttcatggaaaaaaaaaagttcccccaagtgccaaggatcgacattttgaactagaaatgttagatggccccggattattttttttccacctggggctcttacaaatgggaaagaatggaatgagtagaattgattgcccgacatttattacataaataaccgttgatactcggtacgtgtccggtcgtttaccaatgtcggcggggtagcagtagacctttattgaaggttggcgtggggctcatgatgcgattacctccatagcagccactttgaaggattcatccatcaacttaaacttgtcagctggggcggcatcgaggacagctttagctgctttc

SEQ ID NO: 26584 - DNA, 395 bp, Oryza sativa
  Clone ID: uC-osflM202069g11a1
gatagaggagatcaaactgtgtttatagactgaactgaaacttgattatacagtttgccacgactcctaactcaagcccctatgacgtggatacatatgtacaaaagttttgacacctgagaaaatgatctagtttccctacatggatagctagctagtagctatctcatgtcatggagtgttgccaagaaggcgtccaacttgacattgtcacctcgagacaagaacttgatgcagatgggcgccctggcacccatgagtgtcagcatggacagcaagatcgagccgacgccgtcgccgcagatgagccccgacgccagcgccggcgagagcattcgcccgcggccggcgtccatctttttccacaggtacgccaccaggctgccgatgcacat

SEQ ID NO: 26585 - DNA, 98 bp, Oryza sativa
  Clone ID: uC-osflM202069g12a1
gaacaaggttacagccctcatatttggtatataaaataaggggggtggggggttattttgggtcttcttaatccaacccacatcacgggtgtacctcc

SEQ ID NO: 26586 - DNA, 385 bp, Oryza sativa
  Clone ID: uC-osflM202069h01a1
gaactaatatgattacattattggtagtttgtagtttatttacaaaggaaccttgatcattattattatgttcaaaggaagaagaaggcgcaagcaaccaaggaaggctataaatttcagtttcagtatatttacagatgagagtttctcccttcatttcagcagccataggcatgatcaggaaggccgttttcaacgaatattggcaggtataatagcgaccgggaccaggaagtactcacatcccacaggcagattgtacgggttcagcatggaagcgggcgaccggcggccaccggtatcaaggcgtgaagctttcatttggtcaccgtgcgagggaaggtttgctatgcgccgatcgatgtgcacaatctgcccgaatatg

SEQ ID NO: 26587 - DNA, 239 bp, Oryza sativa
  Clone ID: uC-osflM202069h02a1
ggttatgaattcgattacagtaaatgtatataaacctttatttagaaccgtaaaaaatataagctttatttttcaaatataacaaacagcgggttgacattaaccatactggttaaaatgctgagggaacaaaattgggggggagatccttctttttagacaatgggatgtcctgaaacctcataaccacatatgggaagccaattttggggacataggaaattaaaacatatttacca

SEQ ID NO: 26588 - DNA, 403 bp, Oryza sativa
  Clone ID: uC-osflM202069h03a1
ggcaagaaaggacgagcacccactggacgctgttatgaacatctttcaagtttcaacaagtgaacactccaagcttgctaaatcatgatctaccaaaagcgaaggcttctcatcaacaatcgtccagttatccatgagtcgccgacttgcgatattaaggcgtcccataacataacacaaagattggccatcccataacaccatcaaaggttggtactggtgggggggcgtgcttagcctggagttactgctcgagtacagtgggctaacataaagatcctccattcaggtcaacggccaaatcttccatggattgtcagcatgccagaattcaaggattgcagcaaggaattctggagatggattggcctgcagaaatttcttgtaaatttccaacaagaaa

SEQ ID NO: 26589 - DNA, 74 bp, Oryza sativa
  Clone ID: uC-osflM202069h04a1
catactcagtctggtttcagatgaaaaatgggaaactcagaactccagcaggggaacgagaaaccaacaagggg

SEQ ID NO: 26590 - DNA, 411 bp, Oryza sativa
  unsure (1)..(411): unsure at all n locations
  Clone ID: uC-osflM202069h05a1
gatccaaatcgaatccaaacacggacaggcgccagttgatttctggcatctttagtactcgaccaacagaacgaatcagctacatgaggaagaatatcatgtacaacccaacaaagtgacaaggtgtagggacgtttggcatcaccacaccctcacgggagaagtttctgcacgattcagcgtcagcatcaaaaagatctgtagttggcacagctaaacagtttcagcacaagctacaccactttacattacgttggagcatcgttctcctgccgncccgcttgatccctgccgnntttttcttgatagatcttttgagaaatcgcacggcaaataaatgggggtaaagcgtgctatcatctgcaagcaccatggcccgtacgaccgtggaattgcagctcaagccttgct

SEQ ID NO: 26591 - DNA, 253 bp, Oryza sativa
  Clone ID: uC-osflM202069h06a1
tttttggttggttatgaattgaatagtgttttataaaattaatatattgttaagacggaaagcaagtagccaaaatgagcccagtcaaaggagaacatgcaacgaagtaacaaagcaagcagaaatgccacacaaaggcgttttataaggctaagacgcaattcggagccagtagcaacctattacacccacccatcacagaccacaatcaagtaagcatcaacgtactattaacaacgacacggctgggtga

SEQ ID NO: 26592 - DNA, 414 bp, Oryza sativa
  Clone ID: uC-osflM202069h07a1
gggtatgaatcgaatagtgtattagaaaatcaatatatcgtcaagacctatagtatgtagcagatatgattccagtcaaataagaacatgagtagatgtagctcagcaagcaaaaatgcagcacattggctttttctctggttctgacgcagctagttgcagtaccaattttccaccacccattcaaccacaacaataagatcacgtaaattaacaagacctgctgctgtacatcagcatatcggcaaaggaagttttagtaaacatatagccggcaacatttcaacgattcgctaaaagggcaagacaggagatattggaagccctaatctgcatgagaatggttgtaacatattggaagatgatgctaacgagatgctgtaccctcaaaaccttcacggttggatggaccta

SEQ ID NO: 26593 - DNA, 256 bp, Oryza sativa
  Clone ID: uC-osflM202069h08a1
attacaacaacacacggacaaggcagtgaatgtccccccctcctgaatcttgggaggatctgaatttctagtacagatttgatcagcttgtaaactgtttactgttatagacagctttggatcagaacactgaacaccctaactccacacctttgacaattcagctgggggtgatcatttggattctctcctgccagaattagaatctgggatatatccaaggcagcaaaaggaggttgagggcattgtacaacag

SEQ ID NO: 26594 - DNA, 270 bp, Oryza sativa
  Clone ID: uC-osflM202069h09a1
ggaaagaaatcatttgtcactctaatcacaccattaatttttatacatgagaaaatggccgagttaaattatttaatacaccaccaaattacctgactatatgctcctttaggtaaaacactggcctccaactttgatcttctcccgtttaccatatactaacaaatcactgaaaggtagcctaaaaatacacttgcaaggaagaaacctgggatgggaacaatatgcatagtattggggctaaaattgcattttggagctggaattacc

SEQ ID NO: 26595 - DNA, 90 bp, Oryza sativa
  Clone ID: uC-osflM202069h10a1
cttgatgaataaggtggaatttattccttttgccgcccaactagaaaggcccacctggatgaggcatcccaaacatgcccaccaactgct

SEQ ID NO: 26596 - DNA, 408 bp, Oryza sativa
  unsure (1)..(408): unsure at all n locations
  Clone ID: uC-osflM202069h11a1
ttttgttttttttttttttttttttttttttttttttttttttttttttttttttttaaaaagaaaggccccccgcaaaaaaggttgccccctttgacctgaaaatacggccccgcaatgaatcggggacccccccccgggggcagcccgctgccttagggggggaaagatttagcacttcatgacccgatagaaacggcagaggggtgggccccccttagacccgacaaaggggccaaggggacccctgcaagggacccggggggcccaaataaccancncctctaacttggcccccattgcccttttaaaattaaaggcggggcccactccatagcacaaatttcatctgggggcaggccccgaaaagaaccatgtggggtttatttttggggccccccaaggggg

SEQ ID NO: 26597 - DNA, 128 bp, Oryza sativa
  Clone ID: uC-osflM202070a01a1
ggagaaaaggggcactatacactaatagcggtggtattaccccggaaaaaagaagggataaccaaaacaatgtaataaatacggaaacctggtggacgaggaccaaaaagataacagactaggccatt

SEQ ID NO: 26598 - DNA, 431 bp, Oryza sativa
  Clone ID: uC-osflM202095a05b1
ccctaatccatccatggcggttaatacttcgcgcgcatagatactaatcccatccgcgcgcggcctcaacatctcaacctccggccagcctcgcaatcctgctgctatctcggcggcggggaggaggtgatgagatcttcgggagcgcgtctcgcccggtcctaagatgcttgccggcggaggaagcagagttagcggcggcggcggcggcttcaacctcgcctcctacaagtacaaggaccccctcctcggacgcggcggccggagcttcctgttcggcaacacctggttcctcctctccacctacccggcgcgcctgctccacacagcggaccgccgcgcccccgccgccttcttcgcagacatcaaccggactccctgcgtgcgcacgcactgcacggggcagagctcgctgcagaggggcatttgta

SEQ ID NO: 26599 - DNA, 370 bp, Oryza sativa
  Clone ID: uC-osflM202095a11b1
ttgtttgacagcatgtgttcttgacgagagttcttcttggctgggtccaatcccaagattgatctatattatatagatggctctttatatagaatcttatcttgagatggaattgtcatcctagcttcatggaactctaacaagaacaatttattacaagatgaagctctagcatcatgctgtcctaggttattttggcagtttctttaggttagcaaaacagtcttacatagtagagatgatgccccaattctccatgaggagatagaattgtaattacaccagacttgtaatcttactaggaaaaactttagctgtgccattagaagtgaaacagcccacaattgcattgccgttgcgaaagacttgc

SEQ ID NO: 26600 - DNA, 486 bp, Oryza sativa
  Clone ID: uC-osflM202095a12b1
cttatccttctcttctacgtcacaaaagttgacacctttgcccctctcgaaccaaacggatttcagtacaacccaagcaatccaatcccatttattttttcctctcaaaagatcacaattttttcatcttcttctcgtgatatcctttgttttttttcatccatccatccattcccctttgcacggttgagctcgtctcacagttgttaattaacagcaagaacatttttttccttaaatttctatttaatttatactacttgcgagcgagagccacctaatcttggtgcccaccaagcataagcttcatcatcttcttcttctttgaagtcgtcttcttccctcctcctctcgtcgcctcttggaaagagagagagagagagagagagagagagagaggtgatcgagttgcagcaatggcgaggagggcgccatggctcgcccggattggggccgtgcccgttttgatcgttttttggtggcggt

SEQ ID NO: 26601 - DNA, 408 bp, Oryza sativa
  Clone ID: uC-osflM202095b03b1
actctcttcgaagaaaggctctcaccaatccaacggtgctcgatccatccatccatccaatccgcctcgctccatccatggcgtctgcggatgcggtctcgccggcgccggcgacgtccgccgcggcgcagcagcagctgcggaccgtggtgctgagggtgtccatccactgcctcggatgcaagaagaaggtcaggaaggtgctcaggagcatcgaaggcgtgaaggatgtgaaggtggacgccgcgatgcacaaggtgacggtgaccggcacggtggacggcgacacgctcgtcaagaggctgtacaagtcccggaagcaggccgcgccgtggcagcacccgcacgcggcgccggcgccggaggcggtccaggcgatagaggccgcgccgcaacagcctgaggctg

SEQ ID NO: 26602 - DNA, 456 bp, Oryza sativa
  Clone ID: uC-osflM202095b04b1
aattattaacacttgcatgaatgatcagaaggataagttgtggcctatgttgcagaagcttggtgtggtcatgaaggctgatgagaaggagcttatgggcaaggctctcatgaagcgtgttatgcaaacatggctgccagccagtaatgctcttcttgagatgatgatataccaccttccatctccgtccaaggcccagaggtaccgtgtggagaatttgtatgagggtcctcttgatgatgtctacgcaactgctatcagaaactgtgatccagaaggtcctcttatgctgtatgtttccaagatgattcccgcatcagacaaaggtaggttctttgcctttggtcgtgtcttctctgggagggttgcaactggcatgaaggtgcgtatcatgggtcccaactatgtccctggccagaagaaggatctgtatgtgaagagtgtccagcgtactgt

SEQ ID NO: 26603 - DNA, 464 bp, Oryza sativa
  Clone ID: uC-osflM202095b05b1
gagtagaatggcgctatgctatgctatgctacgctatgctacatcgtgtacttccaattgattcacagctcgcacgcttcaatctttgtagatcagtggtctgcttcactgctgtgagaaattgcgtgtggttttgcaattcatcggtgcttttttccccctttctttctaggttttgtgtatctaccgtctacagtcaccatggttggcaagctaatgggggattggaatataaatctctttttggtagttctttttttgtatgattgattttggcatgtctgtttgccatcacctttttttttaattaggaccaccaatggatagggttgttggtattaaactcgcaccatatcaaatcatcatgttatctttctttttcaagttttctggactcgtggcctgcccgaaggaacatgggaacttttagagggtttcctttctaaaaagctggttttttttca

SEQ ID NO: 26604 - DNA, 441 bp, Oryza sativa
  Clone ID: uC-osflM202095c02b1
gtggaatatatctgagtagtggagtccaaggaaaggaaccaactgaccttagcttagcttaccttagctcaaccccaagcttgaagcttccactataagaactcacccagccacacggctacttggacgacgaagcagcagcagcagcagtaaacagcatcgctcgctcgtcttcgtcgtcgtcgatcggctccggtgagggtgatcggtcgccggcagaggcttctgatgctggagaggccgccgatcctgaagagataccgcgcaccggggtgggcagtggtggctcgctggaaatgtcgtcgcagcagcagcacgccggtgaggtccccgtctccgtcgtcgtcgctgtccgggcgcggctcatgtggaccgggcagctgcacgagcggtttcgtctcgccgtggcggagctcggcggcgcggacagggcgacgccca

SEQ ID NO: 26605 - DNA, 547 bp, Oryza sativa
  Clone ID: uC-osflM202095c05b1
gtgccatcatcgacaatggccgcaagatcaccggcgccgtcgtcgacgagtgcgcctggacctgcgatcatgtcgcggcgggtaacaagaagatgtgcaacacgctgaggaagctgccgggggtgagctcgccgaaggagctcctgacggcggcggtgaagctgtcgatgaggaaggcgaaggcggcgagggcgaggttcgaggcggcggcgagggcggcggagaaggggacgccgatggagtccatcctggacacctgcaaggaagggtacgacagcacggtgtcggcgctgcaggaggtgcagcgctgcattgacgccaacgacagcaaggcgagccttatcaccaagatgtcggcggtgaccacctttaccggcgactgcggcaacgcctaacaggagcgggagctggagcccagccttgtgcttaaggccaccaagaacaaccgtaaccgcgtggtaccggggcccttgccatttgcgccaagctaaggctatatttaggcaactgatcatcactcgatatgaatgattgatcactttaaaat

SEQ ID NO: 26606 - DNA, 218 bp, Oryza sativa
  Clone ID: uC-osflM202095c06b1
attttgtatcgaacctggacttcgggcctatcagaaagcgagagctgctggggagccattgtctcagagtgccttgatggcgcatatcaataccaaggtcggtgacaattttgttcgtggatttggaatgcaacgacgatcagtcagatattgtggaagcagaagagaaacccgtgaaaaaccgtgttgcaaggtttcttgtgctcggtggagctgtt

SEQ ID NO: 26607 - DNA, 305 bp, Oryza sativa
  Clone ID: uC-osflM202095c08b1
ttgtgagcagagctaagctagctcagagtgagtagcgcgttgagcttgctgaagggagcggcaacgtcgaaggaggtgagcgaggagccggagcacgtgcggcccaaggactacaccgacccgccgccggcgccgctgttcgacgacggcgagctccggctgtggtccttctaccgggcgctcattgcggagttcatcgccacgctcctgcttctatacatcaccgccgccaccgtcaatgggtacaaggtgcagtcgtcccgccgacccgtgcggtggcgccggcccccttcgcatctcctggg

SEQ ID NO: 26608 - DNA, 508 bp, Oryza sativa
  Clone ID: uC-osflM202095c10b1
cctagccctagctctcccctatccctcgccgcacgcaccaccaccaaccatggccggcgcgcaggagtctctggtgttggccggcgtgatgcacggccacaacgacgtggtgacggccatcgcgacccccatcgacaactcgccgttcatcgtctcctcctcccgcgacaagtcgctgctggtgtgggacctcaccaaccccgtccagaacgtcggcgagggcgccggcgcctccgagtacggcgtgcccttccgccgcctcaccggccactcccacttcgtccaggacgtcgtcctcagctccgacggccagttcgcgctctctggctcctgggacggcgagctccgcctctgggacctctccaccggggtcaccacccgccgcttcgtcggccacgacaaagacgttctctccgtcgccttctccgtcgacaaccgccagatcgtcttcgtctaccgcgaccgcaccataagctgtggaacacccttcgcgagtgcaagtacacca

SEQ ID NO: 26609 - DNA, 364 bp, Oryza sativa
  Clone ID: uC-osflM202095c12b1
ctttgcttcgttttttttttctcaggccaagtttgtgtcctacctgatcaccgtgttcatggtggccatggccgtcttcttctcgtccaggatggctggctgggccgtctgccccggcgccggcggcatcaccggaggatgcgtctccggcggcgaggacgtcgccaagacctgcctcgccttcgcgctgctcacggtggcggcgcaggctcacctcgcgagcgtgctgctgatggatgagaagaagaagaggaatccgccggcggcgagctgggtcgcgtggctgctcgccgtcagtacctgtgcgtccgtctccggcatgttcctcgcctacatcagctacggcggctttgtggcggcgacc

SEQ ID NO: 26610 - DNA, 482 bp, Oryza sativa
  Clone ID: uC-osflM202095d02b1
cttcttccctcggcggcggcggcggcggctagcaatcgcgaggaggagaagatggtgaagaagagcaagaagagcaagagcaagcgcgtgacgctgcggcagaagcacaaggtgctccgcatggtgaaggagcaccaccgcatgaagcgcaaggaggccaagaaggaagggaagagccacaggaagaaggtcgagaaggaccccgggatccccaacgagtggcccttcaaggagcaggagctcaaggccctcgaggcccgccgcgcgcaggcgctccaggagctcgagctcaagaaggaggcgcgcaaggaaagggctaggaagagaaagcttggattgcttgaggacgaggacattgctaatttggcctctgcagcttctgctcagggcagcgagtttgcagagaaggatgcagcacaggagaatgcctcttagacgtggcttagagccaagatcattcagagagagccttctacaggagc

SEQ ID NO: 26611 - DNA, 422 bp, Oryza sativa
  Clone ID: uC-osflM202095d06b1
tttatctcgtgggtggaaatcgatattcatcggaaaatgccatggaacagcctgaagatcagaagttttctatagcttcaggttctcaactaagctcttctcagaatttattgaaccaaaagaaccacttggattcaacttcaccaagtaacataacttctgagtcctatccagaaagaaattgccagatcattccatctggggcttcctttgcagagagaaacttgaaggtgcagaagaaagtggccagttcggcatcaggacaacttatcagtgataatgtgactggacatcctggtcatcaaacattgacaagaagggcttcatatccttgcgagaatcatgaaattggaaagaggtccttaggaaaaagaggtttgggtcattctgatgttgcaatgggcaccttaatggtagttgat

SEQ ID NO: 26612 - DNA, 529 bp, Oryza sativa
  Clone ID: uC-osflM202095d07b1
gttggagagagcttggtgagctgcagagatggccccctccgtgatggcgtcgtcggccaccaccgtcgctcccttccaggggctcaagtccaccgccggcatgcccgtcgcccgccgctccggcaactccagcttcggcaacgtcagcaatggcggcaggatcaggtgcatgcaggtgtggccgattgagggcatcaagaagttcgagaccctctcctacctgccaccgctcaccgtggaggacctcctgaagcagatcgagtacctgctccgttccaagtgggtgccctgcctcgagttcagcaaggtcggatttgtctaccgtgagaaccacaggtcccctggatactacgacggcaggtactggaccatgtggaagctgcccatgttcgggtgcaccgacgccacccaggtgctcaaggagctcgaggaggccaagaaggcgtaccctgatgcattcgtccgtatcatcggcttcgacaacgttaggcaggtgcaggtcatcaggttcatcgcctacaagcccccg

SEQ ID NO: 26613 - DNA, 438 bp, Oryza sativa
  Clone ID: uC-osflM202095d08b1
gtcatttctcccccccatctcctctctgcttgcgagcttgtcaaccgcgcaaaggttcatatatacaccgatcgaaatcgatcggtgtagagccacactcttggagtcgatcgttcgctggttagctaactaagctaagctgagctgccttgctctcttcgacgatcaggttgcttggtttgacgagctgacgatcgaggagaagaggacggcgaacgtttttttgcaggatcagtactagggttcatcttggagaaccaatttgattcgatagaacgagcgagtcgaagaagatggtgctcgcgagcacgccgaaggtggtgctgggatgcgtggcgttcacgatcttctgggtgctggccgtgtttccgtcggtgccgttcatgccggtgggtcgcacgtcggggtccctcctgggcgccatgctgatggtgcttt

SEQ ID NO: 26614 - DNA, 543 bp, Oryza sativa
  Clone ID: uC-osflM202095d09b1
ttttggtggcggcgggggctgcggcggcggcggaggcggagcacatgcggaggctccacagccacgcccccggcgagcaccagtgcagctccgcgctcgtcaagcacatcaaggctcctgttcacctcgtgtggtcgctggtgcggagcttcgaccagccgcagaggtacaagccgttcgtcagccgctgcgtcgtgcgcggcggcgacctcgagatcggcagcgtgcgcgaggtcaacgtcaagaccggcctcccggcgaccaccagcacggagaggctcgagctgctcgacgacgacgagcacatcctcagcgtcaagttcgtcggcggcgaccaccgcctcaggaactactcatccatcgtaactgtccatccggagagcatcgatggaagaccagggacgctcgtgattgaatcatttgtggtggacgtgcctgatggaaatacaaaggacgagacatgctactttgtcgaggccgtgatcaagtgcaacttaacatctcttcgcgaggtatcagagcggctagcagttcagtcaccca

SEQ ID NO: 26615 - DNA, 347 bp, Oryza sativa
  Clone ID: uC-osflM202095e02b1
ccgggacttactggctggacccacgcgtccgatttattatatagaggaaggggaaaaacacatttgcagccacatcatccatggcctctctccgcaccattccggtgatcttcggcatcctcttctatgtccttgccagcactgccactgccaccgacgcaccggactacgtcgtccaaggccgtgtctactgtgacacgtgccgcgccgggttcgagaccaatgtcaccgagtatatcaagggtgccaaggtcaggctggagtgcaagcactttggcaccgacaaggtcgagcgtgcgattgacggtgtgactgatgagaccgggacatacaagattgagctcaag

SEQ ID NO: 26616 - DNA, 72 bp, Oryza sativa
  Clone ID: uC-osflM202095e03b1
tcccgggtggacccacccacgcggctaatagttcctttgcacaccatggtacatatgagatgagtgtattag

SEQ ID NO: 26617 - DNA, 413 bp, Oryza sativa
  Clone ID: uC-osflM202095e04b1
aattcttcacacagcaaaagcctctccactacctctccctccacctgtcgcctaaaccctagctcgcatctcgaggcatctcgcttcacctcgtcgtcgcggtcgccggagccggagccggaggcggcggaggagatgggcaccggaggcggcgagggggacaagtcggccgcgctgccgctggaggcgctgctggcgctggggctcgaccagcgcacggcggagaacgctctggtcaacagcaaggtcaccgccaacctcgccgccgtcatagccgaggctggtataagcggatgtgataagacggcctgggaacctcctgtacacggttgccactaaatacccaaccaatgcgcttgtccatcgtcccgtactcattgactatattgggtcaacgaagataaagaatcctg

SEQ ID NO: 26618 - DNA, 318 bp, Oryza sativa
  Clone ID: uC-osflM202095e05b1
cttctcatacttttgaggagggcaccgccatttagttaattagtagttgttaattatcttcactaaccttaattaccctcacgcaaagcactctctaatcctcctcggcgctcgcataatcttgtatccctcatctcagattatcatcacctcgccgtgttagaaaaaagggagtaagttcgttttatcgtcggatttggtgagagttcgccggagtagaagaagatgacggtgacgccgcagatcacggtgagcgacgggaggctggcggtgcgggggcggacggtgctgaccggtgtgcccgagaacgtgacggcg

SEQ ID NO: 26619 - DNA, 507 bp, Oryza sativa
  unsure (1)..(507): unsure at all n locations
  Clone ID: uC-osflM202095e07b1
tttcacagttcacaccaccttccttccttcccgactccccacaccggccggtctccttctcgctgcagggagagagagctcgagctcttctctgctgctgctgctgccatggcgattccgttgctgctgctgctcttgctggccatgtccacaggctcagatggggcgttctgcgtgtgcaagcccgaccagagcccggcggcgatgcagaaggccatcgactacgcgtgctgtcgcggcgccgactgcacccagatcatgcagtccggcgcgtgctaccagccgagcaccatcgtcgcgcactgctcctacgccaccaactcctacttccagaagaacagccccatcggcgccacctgcgacttcggtggtgtngtcacccttaccaacaccgaccccaggttcggcacctgcaagtacccggccaccgctagcggcgtaggcaccggaatgggaaccggtaccagcaccggcactggcactggagttggcaccggcggcacccgc

SEQ ID NO: 26620 - DNA, 323 bp, Oryza sativa
  Clone ID: uC-osflM202095e09b1
tgttttcctcaccgagctaaccacgggacatacgtagccgtggtacttctacgcttaacaaatcacaacagactgacatacacctaagagacactattgttcttgatggtacatctgacagatcgagccgaggttgtgctgagctgagctatcgcagagacagggggatgaacattttgaaccaggcgatcaagcctggtggtcactcggcgttctcgggggcaagggagaccggacagctggtgcgggcgtaagtgcgttatgacggactggagactgaaaagagcacggacgctcgccgtgggcggtcgcacgccgggcag

SEQ ID NO: 26621 - DNA, 345 bp, Oryza sativa
  Clone ID: uC-osflM202095e12b1
tgatttaggccgggaccgcgaccgcgacgagcagcgccaccaaacaagggcagtacgtgcccatgtacgcgcaggactctgttgagaaggcgacggagatgagcgtgtcgtcgccggtcaccgtctacccgtcgacgtcgaacgccgtggtagcgcacccgccggacgtgccgtacggcgtgccgtacggaggagggttcccaccgtatcagcagcagtacggttacgcgggtcagtcgtcgtacgcgtacaacggctgctcaccgtcgacggtgacgtacagctacgcggtggcacaacagatggtggccaggaaaggtggacgaatgggcatgggccttggac

SEQ ID NO: 26622 - DNA, 398 bp, Oryza sativa
  Clone ID: uC-osflM202095f01b1
gcctggtcgtgctcaaacgagagagatcttttccgaatccgaggaggagaagccacagaaacgatgacctcgctgtcgtcctccgccgccgcggcgcgcgccaccttcgtcatgccgtcgtcggttcgtgggggcatgagccgcggcaggaggatggcgaggctggtgacgcgcgcggcggcgtcgagcccgaagctcccgagcgggcggcggctgcgggtggcggtggtcggaggcggacccgcgggcggcgcggcggcggaggcgctggccaagggcggcgtggagacggtgctcatcgaacggaagctggacaactgcaagccctgcggcggggccatcccgctgtgcatggtgtcggagttcgacctgccgctggacctcgtcgcaggaagggg

SEQ ID NO: 26623 - DNA, 272 bp, Oryza sativa
  Clone ID: uC-osflM202095f03b1
gcaaaatgttcctttgcacaccatggtacatatgagatgagtgcatcagagccttggaggggatgcactcatctcatatgtaccatgaatgacaaagttcctttgcacaccaatggagcgatcttttcaaagatggaggtagaccttccagctatgatggtacagaaagacatggttgaggttcgtctgactaaggggatctgaaggtctatccaagacgaacaaactgacgtatgtcaaaggctttgggaaacttgcttccctctaaaggt

SEQ ID NO: 26624 - DNA, 504 bp, Oryza sativa
  Clone ID: uC-osflM202095f05b1
ctttgtttctcctctcccccccgtgatctgaccgccggcgacgaccctcttccaccacccgccgccgtcgtcgcgcccccgcccccgccggcgacgaccaccatgttgtacgatcgcgtcacgacctttgaggactcggagaaggagagcgagtacggctactttcgcaaggtttctggacctgtggtcgcggctgatggaatgggtggtgctgccatgtatgaacttgttcgagttggtcatgataaccttattggggaaattattcgtcttgagggtgattcagccaccatctcaagtttatgaggaaacagctgggttgatggtcaatgatccagtgttgagaacaagaaagccttttttagttgaattgggacctggtatcctcggaaatatttttggtggaattcagcgcccttataaactattgctttaagtctggagatgtgttcttaccacgtggtgtatcagttcctgcttttgacaaaaatagttgtgggattt

SEQ ID NO: 26625 - DNA, 254 bp, Oryza sativa
  Clone ID: uC-osflM202095f06b1
catgattctcctctcccttgccgcttccaacaccaagtctcgccgtggccaggactgagctagggtttgcgtgatcttcgggaggagggagcaggagagagttcgaggaggaggaggaggaggagaacatgatcgaggtggtgcttgaacgaccggctggggaagatggtgtggttgaagtgcatcgaggactacaccattttgcgatcttaagaagccggtggaggttcacaccggttcgaggcctcagaaga

SEQ ID NO: 26626 - DNA, 386 bp, Oryza sativa
  Clone ID: uC-osflM202095f08b1
gttctctcgcctttggcagttgaaggccatcagactggatctatgggagattcactaggtgctgttcgtaatgccgcccaagctgctgcccggatataccaagtttttaggatgcaatccttccagagaaaacaagcagttcagtatgaggatgaaaatggtgcgatatcagatgagcgtgccatgtcactcttgtctgctaaaccatccaaacctgcacagcttgatcctctgcatgctgctgggactcgaatacaaaacaagttcccgggatggaagggaagaaaagaatttctgcttattagacagtgaaatgtcaagaaccaagcgcatgtgcgagggtaccaagtgggaaaggattatcgcaaaataatttggtctgttgg

SEQ ID NO: 26627 - DNA, 380 bp, Oryza sativa
  Clone ID: uC-osflM202095g04b1
cattaataccaatccccaactcgccctccccttgcctgggaaaatcttctactactccccccgcgggttcctgagccccgcgcgcgcgcgatcaggaaccctcggggtactcggattccgcccgcacgggggtcgacgaattccgcaacccgttgattcttttttttttcttttcctcgattggattttctgcgcgattccgattccggcggaattttttttctttttggtctccctgttccatctgaactgcgcagctgttcgtagagaaattgttcttgggggcttttctccccaattctgcagggatttcccgcagaaaccttttaccatctattaaaaatacccctcttgtgcttttcttttctcatcggggggaa

SEQ ID NO: 26628 - DNA, 436 bp, Oryza sativa
  Clone ID: uC-osflM202095g05b1
ccctttttcctcctctctcctcttcccctctccaagggtcccggtctccttcctcctctcttcccggccgcctcgcctcgcctccgccttcccgatcgcaattcgcctcctcctcctcccacccatggcgcggcgatccgcccccctcctccgccgcatcctctcctccccggcccccgccccggcgcaccatggcggcgccggcgcgcgccgcacggtgacctacatgcccaggccaggggacgggaacccgcgcgccgtgacgctgatcccgggggacgggatcgggccgctcgtgacgggggccgtgcagcacgtgatggaggtgatgcacgcgccggtctacttcgagacctacgaggtccgcggcgacatgcccaccgtgccggccgccgtcatcgagttcattcgccgcaacaaggtgtgccttaagggc

SEQ ID NO: 26629 - DNA, 475 bp, Oryza sativa
  Clone ID: uC-osflM202095g06b1
cctatcatccaggctcctcctcttggtggtccagatagagccgaacagtcatgacagaagtcctatcaagacctcttgaacaccgtctaagctctccaaccttagatggtcactatgaagagaagaggaaatccaatgttgaatactcagaggatgagaagaaagccaaaatcatatcgctgaagaagaaggcaatgagtgcttcacaaaagttaaggcattcaatgaagaaggggaggcaggagtagcaaggtcatatccatctcaattgcggatgaacgtgatcctgaggaggtgcaggctgtagatgccttccgtcagctccttgtacttgaagagttgctaccatctcaccatgatgactaccacatgatgctaaggcttttgaaggcaagaaagtttgatgtgcagaaggcaaagcaaatgtgggttgatatgctgcagtggagaaaggaattcgctgcagataccattc

SEQ ID NO: 26630 - DNA, 577 bp, Oryza sativa
  Clone ID: uC-osflM202095g08b1
catacttgattcgtgcgctcctgagctaccccgatggccgcccaatcttccactccctcgccgcaagatggttctggtagaggtgaattctcagacaatttggtacttcaaaccccacagccaatgcgggaggattacatacagaatgctgttaactttcttggacatccaaaagtgaagggttctccagtattttacaggcgctcttttctggaaaagaaaggccttacaaaggaagaaatcgacgaggccttccgtcgggttcctgatccacagccaaacagtacagatgttgcagctgttgcttcacaacaagccggcatcgcaaatcaatctgctggagtacaaccttacgagacagttcaagcaccacaagccattaacactggtcctatcgttccacatgcgcagtcgcaacttagctggtcccgtactctcattggtgtaggtgttctactcggagttggggctagcgctgctgtcatcctcaagaaattgtttgttcctaggatcaaatcttggatccaaggagcccatgttgaagggatgaaatttctgggatgaccttaaatccagt

SEQ ID NO: 26631 - DNA, 482 bp, Oryza sativa
  Clone ID: uC-osflM202095g11b1
aatcagccactgcacttcttgttcttgttctctttctcctcccgaatccgatccatccattggccgccgccgccgccgtcgtctcgtgcgtcgcgtgttcgtgtccagagacgatgggcagcctcgccgacgagaagaccgtcaccgggtgggccgccagggacgcctccggccacctcaccccctacaactacaccctcaggaagactgggcctgaagatgtggtggtgaaggttttgtattgtggtatctgccatactgacatccaccaggccaagaaccaccttggtgcttccaagtaccccatggtccctggccatgaggtggacggtgaggtggtggaggtcgggccggaggtgaccaagtacagcgccggcgacgttgtcggcgtctgcgttatacttggctgctgtcgcgagtgccatccgtgcaaggccaatgtggagcagtactgcaccagaggatttggtctacaacacctt

SEQ ID NO: 26632 - DNA, 396 bp, Oryza sativa
  Clone ID: uC-osflM202095h01b1
gtttattttatcggcatccaactagcttggaaggccatgcagcccacgatttgagcaatacacaagttttccatgcaacagagtcaagaaatcatgacaatgaccaccgctatatgagcaatcttcctgtgtcaggcattcctgatcattctgtagctccatttggtataggattgccgagatatgacagcagcagccaacagagaacaaggccatatgcacatcaccgtcccctagttcacaggcccacacctcgcaacggaagcaatatggttacaccattagggtctgtgccagctggtatggctgagactagaggccatggtcatggtgcgaggggacacatggattaaccagcaatgcacttattgcagaggaagccatttccccctacat

SEQ ID NO: 26633 - DNA, 191 bp, Oryza sativa
  Clone ID: uC-osflM202095h05b1
gtgttttccacggctacaagtgggcatttgccatctggaatgttcatctggatggtcagccttgtgctgtgctgctgtctgaaatttctgtcctgtccaccattactgaagaatgagagcgtgtgggtcttgaatttccaataaaacgcaatgccttacagatgtgtaaaagaaaatataaaccaacaaag

SEQ ID NO: 26634 - DNA, 484 bp, Oryza sativa
  Clone ID: uC-osflM202095h06b1
atttctatccaaggcttattaatctgttgtgtgatgaaggctcattagatgggagaaaagcgatttatatagaacacaagttgtgcacatgatgtgaccatgaggtagaaaattgagccacatagatcattgttgaaactattttctattgcccattaacatattgtatagtgtttattcatgtctgcaaggtcaaatttgccatatcagaccttctttgttaatattttacagtttaaagtcagttgccactctttgatgtttgttattcacacctgagcactacgattaaatatgctctgcctgctatatgttttattgatttcttcttattttcaggttttctacaacactgctcagtactatagggcatactatggtcataaaacggtacagcttttctacaatgaaatggttgagtatgaagcgtatattctctatactgctttagctaaatgcttcaactatttgtgataggatcctc

SEQ ID NO: 26635 - DNA, 406 bp, Oryza sativa
  Clone ID: uC-osflM202095h07b1
gttttgtctcaagactatgaggacttcaagagagtgctgacatcgctatggctcgacttgtatggaagaggtggcagttctagcagctcttctgcatttgagcatgtgttcgttggtgagatcaagggacgaccaggacagggagagaatgaggtctcaggattccataattggattcagttttacctggaagaagccaatgggaatgtggattaccaaggttacatattcccaaggaggcgtggggaatcgcctgattcagagacacagctattgactattcagtttgagtggcacggagttctgaaatcggtatccagcactctgattggtgtcagccctgagtctgaggctgcactctacacgctctgctttttatgggagggaaagataccgcgttgagatt

SEQ ID NO: 26636 - DNA, 198 bp, Oryza sativa
  Clone ID: uC-osflM202095h09b1
gtttcacaaacacggtgggctctgatggcgggtgatcgtccatgcggcgacggggcccatgcaagcagaccccagggactggctgctctgcattgaccataggctcctacgtcgatacatcgcgactctcggacttataaggagcgatgcacaggcgaggtactacactaggcaagttgcacatggtattccaacatg

SEQ ID NO: 26637 - DNA, 123 bp, Oryza sativa
  Clone ID: uC-osflM202096a02b1
acccgttggatgtacaacgaccaaggagcagcacggtgtgggggacctccgggaggttcacttgaaacctgcaatagcccacagccaggggcttttgaaacattggctggtggaaaatttttg

SEQ ID NO: 26638 - DNA, 396 bp, Oryza sativa
  Clone ID: uC-osflM202096a07b1
ctggaaaactataagattgatccaaaatgtattggacgtttggaagttggcagtgaaacagtaatagacaagagcaagtctataaaaacatggctgatgcaaatatttgaggaatgcggtaatactgacattgaaggagttgactcctcaaatgcatgctacggtggaacagctgctttatttaattgtgttaattgggtcgagagcaactcatgggatggacgttatgggcttgttgtttgcacagacagctgcggtttacgctgaaggtccggctcgtccaaccggtggtgcagctgctattgcaatgttgattggaccaaaatgctccagtttttttcgaaagcaagtatagaggatctcatatggcacatgtctatgactttttccagcctg

SEQ ID NO: 26639 - DNA, 96 bp, Oryza sativa
  Clone ID: uC-osflM202096a12b1
tcggtagaggagatcagggggaggaaggtcggatcctatccgcggatgccgctgccgctttcccacccatgtccagcatcttcgtttttcacggtt

SEQ ID NO: 26640 - DNA, 247 bp, Oryza sativa
  Clone ID: uC-osflM202096b01b1
ctcgtgaaggagaagaaggagaggagcagccatggcgtcgccggcggcagcggcggcgagcacgttcctggggacgaggctggcggacccggcgccgcagagcgggaggatcgtggcgaggttcgggttcggcggcgggaagaaggcggcggcgaagaaggcggcgaggccgtcggcgccgacgacggacagaccgctgggtcttccaggcccgctgggaggtgctctctttcttgcttacctacct

SEQ ID NO: 26641 - DNA, 502 bp, Oryza sativa
  Clone ID: uC-osflM202096b02b1
ctttcttgcttttcttctcctcctcctccgcaaccagatcaaaccctagatcagatctcatccccccaccttcgtcatcccatacgaggaggttattatggattcttcgtcttcatcgtcgtccacccaggcgcagagccagccggattttgattacctctttaagctgctcctcatcggcgactcgggcgtcggcaagagcagtctcctcctccgcttcacctccgactctttcgaggatctctcgcccaccataggtgtcgacttcaaggtcaagatggttaacaccggtggcaaaaaactcaagcttgccatctgggacacagctggacaggagcgatttagaaccttgaccagctcatactacagaggtgcacagggtattattatggtgtacgatgtcactcgacgggaaacattcaccaatctttctgacatatgggctaaggaaattgacctctattctacaaaccaggattgtattaagatgcttgtcggaaac

SEQ ID NO: 26642 - DNA, 274 bp, Oryza sativa
  Clone ID: uC-osflM202096b05b1
gtctccggccaccgttaaatacctcgccgccgaccaccaccaccgcggcggccctgaccccaccctgcgagccctagccatggacggcgacgacgaggatatgcgcgacgtctcgtccacgtcgtcctcctcctgcggcggaggggagggcgcggggttcgaggaggggatggtgggaagacacctgaatggctatctcaaatggctgtcatcgattctacgctgggggcagtttgcacatgcatgactggtctcagagaggatccagactgag

SEQ ID NO: 26643 - DNA, 323 bp, Oryza sativa
  Clone ID: uC-osflM202096b12b1
gtctcctcgttccccgcacccaaaccctaatcctagccgccgctgccgctgccggtgccgccgccatggccagcatcaacgtctccacggtctatatctccgtcatcgactacttcatctccaaggtcctcgacgacttcatctcgtacggcgtcggcgacactgtcctcaacgagctccaggcgctctgggagatgaagatgctgcactgcggcgcaatctccgggaccatcgaccgctccaaggcggctcccgcgccgtccgcaggcacccccggcgctggaaccaccccgccggtacacgacctaaacgtgccctacgag

SEQ ID NO: 26644 - DNA, 178 bp, Oryza sativa
  Clone ID: uC-osflM202096c01b1
ttcacttggagcttcatctgcgccggcaagtacccgatcgaccacccgtacgcgaacccgttcgcgctcccggcgtcgtcgtggcagcgcctcggctgctcccgcgtgctggtcaccgtgttggagcaggaccgcctgagcccatggcagcacgcctactacgcaacgttctggagca

SEQ ID NO: 26645 - DNA, 429 bp, Oryza sativa
  Clone ID: uC-osflM202096c04b1
gtcgtcttctccccttcttctcctcctcctcctcgattcggagctccacccgcagccatggctaagaactaccccgtcgtgagcgccgagtaccaggaggccgtcgagaaggccaggcagaagctgcgcgccctcatcgccgagaagagctgcgcccctctcatgctccgcctcgcgtggcactcggcggggacgttcgacgtgtcgtcgaagaccgggggcccgttcgggacgatgaagaccccggcggagctgtcgcacgccgccaacgcggggctggacatcgcggtgcggatgctcgagcccatcaaggaggagatacccaccatctcctacgccgatttctaccagcttgccggagttgtggccgtcgaggtgtccggtggacctgccgtccccttccacccaggaagggaggacaaacctgca

SEQ ID NO: 26646 - DNA, 58 bp, Oryza sativa
  Clone ID: uC-osflM202096c06b1
ctaacgggagggaaggcaggcccgcagggacggggaccgggaacggactggaccggac

SEQ ID NO: 26647 - DNA, 88 bp, Oryza sativa
  Clone ID: uC-osflM202096c07b1
gttgagtccactaagaataggaaatctgaagagactaccttgaggtctggttaacaaaagtctaagaatgtggttagattgcagcaag

SEQ ID NO: 26648 - DNA, 218 bp, Oryza sativa
  Clone ID: uC-osflM202096c08b1
tcggtagtgtgcactatgaagaccacgacaggagtgactaccctgagcactgcatgaactatattcaatagtgctgtgtgtctaagagtatatgcccctggtgagctttaaattaaggtattgtatacctacacataacatttgaactaacctacttaaatgaatattcttattttgaaacagctactatcagggatcctatttaagattaagttctt

SEQ ID NO: 26649 - DNA, 109 bp, Oryza sativa
  Clone ID: uC-osflM202096d07b1
tcggtcgtctcacttcctagggactaccaaggggggttataatttacccaccccaacccttatttttcactctatcttatcgtcagcttaaaaaatagccgccccaacc

SEQ ID NO: 26650 - DNA, 356 bp, Oryza sativa
  Clone ID: uC-osflM202096d12b1
tcggtagaaacaagccccaaggcaatcagtcagcacgcatgaagatgttttgatgccatctctgcaaaatctgctaaaaaagacgaatcttcccacactagagatcgaccttacaaacggatcctgctcgccctcatcatcgataagagctgctcccctcttatgctccgcctctcgtggcactcgtcggataccatctacttgtctccaaataccgttggcccgttcgcaaccatcaacaccccgcatgagctgttgcacgccgccaacgcattgctgtacatctcggcgcggatgctctatcccatcatggaggatatacccaccatcttctactccgatttctaccaccttgc

SEQ ID NO: 26651 - DNA, 301 bp, Oryza sativa
  Clone ID: uC-osflM202096e01b1
atgattcttctcttcttcttcttccactagctagtaagctttactccttcagcttgcttgttgcatgtatggcatgggaagatctggactcgcatcgtacgtcgtttagcatcgagcggccaggatggggcggaggaaggtgcagctgaagcggatagagcacaacatgaacagggcggtgagcgagtccaagaggaggcacggctgtgataaaaactgccacgagatcgtcgctcgtgtgaagggcatggtggtcctgatgcgcctcgcggagacgggggagctctacgagctctccatt

SEQ ID NO: 26652 - DNA, 198 bp, Oryza sativa
  Clone ID: uC-osflM202096e03b1
ctacctgcgactgcgagcgaggcgagtagggcggcttcgtcgttcgtcctgctgcttccgccgcatccatcctgatatgacttgttgagtggaaagaatcaatatagtacaatctattttctttctcaatgcgaagaagaaacagttctgctacacatacataccttattaatcacctcttgcgacatactagacatt

SEQ ID NO: 26653 - DNA, 152 bp, Oryza sativa
  Clone ID: uC-osflM202096e10b1
tttgcaaattgtacccatatgttaagtagtgtatgctatattaactgaaacctttcctgttctatggatgtttataaaatagaatttgttgtttaagattcagatagttttttattttaatttgtacttggatggcattacaaggtaaagtg

SEQ ID NO: 26654 - DNA, 407 bp, Oryza sativa
  Clone ID: uC-osflM202096f01b1
tttactcgtgggtttgagtcgggatctggggttcgtgatcccctcttcccccaactatgggttcgatctagatcacggcaaggagattagagagggagcgaaagatctttccttatttttttttgtatcaaaaatctcagaagagcatgaggaaagaggaataaatcgggagcgagggagaaggcatgatgctggaaggcaactcctgcctcatctcgcgctccctgccgagctcctgcgagccggagttccagtgggcgtacctctcccacgaggtgctcaacggcaagcgcccggcgccggatgatgcggcagccgaggacatggacgaggatgacttctgcggtggtaagcgcatcaagccttcatagacgaagccgtacactccggacatatatgagggtcat

SEQ ID NO: 26655 - DNA, 428 bp, Oryza sativa
  Clone ID: uC-osflM202096f04b1
gtcgctatgtctcgcgtgccgaggtgcgtcggcgggcggcggcggcggcgtcgacgtgctcgatcgggcgaggcggccggagttcgcggcgtggatggcgggcgtcaggtgggccatccacgagcggccagagctggcgttcgaggagatcgagaccagcaggctggtgagggcggagctcgacgccatgggcgtcgcgtacaggcacccggtcgccggcacgggcgtcgtcgcgaccgtaggcaccgggcgcccgccgttcgtcgcgctgcgcgccgacatggatgcactcccgatgcaggaggaggttgcagttgggagcacaagagtaaggtggccatgaagatgcacgcctgcggtcacgacgcacacaccaccatgctcctcggtgccgccaggatcctccaggagcgacgccatgagctgca

SEQ ID NO: 26656 - DNA, 347 bp, Oryza sativa
  unsure (1)..(347): unsure at all n locations
  Clone ID: uC-osflM202096f10b1
gaagcgtcgacagccagtaggaagaggagttgctcgcagcagcagctccagcctctcgagcctccacgtcacatcgccggcgccggctcatgtctctcctcacctcgcccacgccgttcggcggcgcggccgtccgccgccgcgcccctcccgcttccgccgccgcggcgacccggctcgacctcccgctggtgggcagccgggccgcgctgcacgtggcgcgcgccgcanagggcggcgtctcgtcccgcacgcagcggcgcctggaggagcgcggcaagaataagcgccggggaggcggtagcgtcacggcgcccgcgccgcccgacatggacgaggacgccgcc

SEQ ID NO: 26657 - DNA, 135 bp, Oryza sativa
  Clone ID: uC-osflM202096g01b1
cgaatggaattctcgacccaagcgacccgtttggttatagacataggcttaccccgcgtggcctcgccgatggattgagctcacgccgccgctgtcgcctcgtcgcggattccaaggttcaatgagaggaggagg

SEQ ID NO: 26658 - DNA, 341 bp, Oryza sativa
  Clone ID: uC-osflM202096g07b1
gtgtaaataaaaaggggaagattttttttgcatctcatcctctcgctctcgccgtctctcgccgctcccccccctttccaggctccaatcccgccgccgcgtaggatggccaagacgcggcagccgcagaagcgggtgctggagtcgttcaccatcaaggggcccgacggggtcatcaagcctggggatactgtgctaatgatggcacctgactcatcaaagaaaccatatgtggcaagggttgaggaaattgaggcaacaggacctcaagcctctcaagtgaagatcaagttgcggcggtactaccgtcccgaagagtccatcggtggccggcggccatt

SEQ ID NO: 26659 - DNA, 281 bp, Oryza sativa
  Clone ID: uC-osflM202096g08b1
cccgtgcgacccgttttggtatgtgagctaatgagccacaacatctatctccttcttgcttagttaagtccttcgccctcccaagaagaagaagatgtcttgctgcggcggcaactgcggctgcggccgcggctgccagcgcggcggcggctgcggcggatgcaagatgccccctgatgtggaggccacagtcaccaccacgacctttcgtcctcgctgctccatccatcagggaacgctcttgatgtatggagatggcggtggagagcggccagaaccgc

SEQ ID NO: 26660 - DNA, 281 bp, Oryza sativa
  Clone ID: uC-osflM202096h07b1
tcggtattagagcgcgagcgaacaaccattggccggagcgtttgaggcgaatcgcgaattctacattccgagattccacgcgcgccacctgttcgacgaaccgcctgcctgcgcggcaacgaggctccacgcgcgccacctgtatgacaaaacgcctctgcccgcgtgctcggccgcaatgtagggctcaccctctaagagcaggggggtcacgggccccacgcacaccgacgacggggactggatcagcgacgacccggacgaaatcattctcaaaaaca

SEQ ID NO: 26661 - DNA, 531 bp, Oryza sativa
  Clone ID: uC-osflM202096h08b1
tcggctctctttggtgtcgctggttctaacaacgatataaatgtgctgaatcagtcccctttattccttgaacaagtgagaggggaggctcctcgggttcatttttctgtaaatgggaatgagtacaacaatgggtactaccttgctgatggtttattccctgaacgggccagtttcattattactttttcactttcataaatagcgatgctttatttgttattctgttttattttatttttttttttattatttttttttttcttttattctttttatttatattatcttaattattcttttttttctatttttattttaaattttttttatcctatatctttttttttatttctattatacatcttatctctaattttatttatttattttactatccttctttcttaatcttttttttatttcctgttatttatatttatgtttactacttttattcttatacttgttatttattttatctaatttctattttatatattttccatttattactttttttcttttttt

SEQ ID NO: 26662 - DNA, 291 bp, Oryza sativa
  Clone ID: uC-osflM202096h12b1
tcgctacgaccgcgcccgcgcggcgctgcagcgcatcctcggcgccggcgccgacgttgacgccgagctcaaggacatcgtccgcgccgtggacgaggcgcgccagaacgaggccggcgcgttgcggcggctgttcagcaggcggtacaggcactgcctggcggtggggctcggcataccggtgttctacgagttcaccggcatgatcgccattttcatcttctcgcccgtgctgttccgtacggtggggtctatcgatttgtacgccttctttttgtcctttgacttaat

SEQ ID NO: 26663 - DNA, 345 bp, Oryza sativa
  Clone ID: uC-osflM202098a01b1
ttagcttaaccccgtctccttcctccattgctccggcgctagaaccttctagaagctctcctcctcctcccatggcggcgacgatcgtgtccgtcaaggcgcgccagatcttcgacagcaggggcaaccccaccgtcgaggtcgatgtgtgctgctcagatggaacctttgcaagggctgcagttcccagtggtgcatcaactggtgtctatgaagctctcgaattgagggacggtggatctgattacttgggaaagggtgatttcaaggctgtcgacaatgagaactcgggttttgccccagctctgattggcaaggacccttccttacagggctgagcttgat

SEQ ID NO: 26664 - DNA, 189 bp, Oryza sativa
  Clone ID: uC-osflM202098a02b1
atattatatagagaatctgttgtccagacactgaaagagttgtctggtaagcctgctgagcaagtctttgtaaacagggtaaaactaccaagtgattccattgttgaattcttcactgctctttgtggagtttctgccgatgaactgatacagacatcttgcttgtgtattttgcttacaaaagtttgt

SEQ ID NO: 26665 - DNA, 380 bp, Oryza sativa
  Clone ID: uC-osflM202098a03b1
ttcccgtttccacccgtctttctccaacccggagccgagctagagctccacctgcgccgccgccgccgccgcctccggcgaggccccaccgccacagatccccccgcgacggcgctgcgccggctgctgtacgccgcagagcgccgtcactccgccgccgcggcggcggtagcggggcccggcaatgcgcgcgaggcatccatcgcggtcgtcgccgtggggcccggcgtcatcgaacccgacgcggacccggaccagcccccaatgatggtggacgaccgcatcgacgaggccgttaacgccaggctccgtcagttcttgcagccggacccccgcttgctccggtacgcgagaccagtccccgtccacgccgaccacac

SEQ ID NO: 26666 - DNA, 252 bp, Oryza sativa
  Clone ID: uC-osflM202098a06b1
tatatagtaaagcccctgcacctgccggtaccgaatcccaagtgtcgacccacacccaccctttcgcttgtacctagccgcctgcctcacacgggcggccacgccgaggcagatggcggccgagtcgtcaacaacgccgtcataagggagtaccacttcgtgatgcacgtcctcaagaaccggtccaactccggtgtgcccgcggctgtagtatagcagtcgatctgggctcagactcatcaaggcatcttt

SEQ ID NO: 26667 - DNA, 170 bp, Oryza sativa
  Clone ID: uC-osflM202098a07b1
ttagagatagggaggaaagctgaactgaagcggccggccccgccggggagaagggaagcccgtcgatctaccccaccgtggagagggagcacctcgtctgtgagcagagggggaggatccactcaatctgccctgccacgaaatgatgtgtggacctcgcagccggggat

SEQ ID NO: 26668 - DNA, 183 bp, Oryza sativa
  Clone ID: uC-osflM202098a08b1
ttgaggcgtggacggacacccctgccgacgggtggagactctacaggtcggggggctagcctaccccgaaacccaaatccgccgcacggcggacgcgcccggaaagggtcgagcgcgctcatggctcgcgtgtacgcggtgaacctcagatccacaccatacggaccgtgataacgctcacca

SEQ ID NO: 26669 - DNA, 179 bp, Oryza sativa
  Clone ID: uC-osflM202098a09b1
tcgatcgctcgacggttcgagctgggaaccctagagccgctcctggtgctcctcctcgcctaccccgaaacccaaatcccccccaaggcggacgcgcccgcaaagggtcgagcgcgctcatggctcgcgtgtacgtggggaacctggatccgtgcgtgacggcgcgggagatcgaggac

SEQ ID NO: 26670 - DNA, 350 bp, Oryza sativa
  unsure (1)..(350): unsure at all n locations
  Clone ID: uC-osflM202098a10b1
gttgatagtgctcgcttttccacagcagatgtttagcgagctcaagagaaagatatagactgcccaatggataatgcacagaaggaagtgcaagacactcgaaaacaagataagcgtgaagctatgaagggcatagggtcttcagagactgatgagagtggaaaaggagaagcgtcgctccacactgagttaaagatagtcttcagcagataaggccgacaccaaacctgccgcaggagctgaaacaagtgacgtttttggaaataagaaaaagcaggatcgctcttcatgtggntccagcacaccgtcatgaggtgatatagaagcaagataatgctcctgagaatcaa

SEQ ID NO: 26671 - DNA, 362 bp, Oryza sativa
  Clone ID: uC-osflM202098a11b1
gcaattccgggctacgacccacgcttccgtttaaaggagggggagaacttcaagtagcagtctagattgtgaagatgcgccatgtatggttcgaactggcagtttcaagatcagcagaattgatagtactgacaggggtagacatgtagagactatagtatagtgctattcgagaacccttcagctgatcttagctaacgcaatcagattgttatgaatgagcacagtgatgttgctagagatgccgcgagcataaagataggatctattaacaaaaacgggaattatctcaatcaacaatacctgtctgtaccaaagaaagctagagagttgcttgtagctgggagccatgctagcaattt

SEQ ID NO: 26672 - DNA, 266 bp, Oryza sativa
  Clone ID: uC-osflM202098b04b1
tgttagaacatgccagccctccccgaggggctttcaataattgccggtcatggctgcaaagctctacttgctacttaccgtgacctgcttcatgcttttagttctgcatgctgaacatgcggaggcgcgtcccaaacctgccgctataggcgactccgacaacggcatctacacgctgctcgtgttcggggatcagaacggcgacaccggccatctacgcaagcaccgactgagagagcagtgagccgaatggtactacacttacg

SEQ ID NO: 26673 - DNA, 197 bp, Oryza sativa
  Clone ID: uC-osflM202098b05b1
atttttatggaaaattccagctgcaatatagctgattagactgattgcagatccagtcttggtctggcgaaagcgaggtcagtgcggaaataggacacatgtaaaacggggctaagaggaccactttagaaagcattagcaacaggtgtttcaaagctaaacagacctgaactcgaagccgcttgtgaggacttcag

SEQ ID NO: 26674 - DNA, 251 bp, Oryza sativa
  Clone ID: uC-osflM202098b07b1
ttttggagctgaagaggatggtgaacatgatcaacaggctcgtgacggtcgcaaagcggaggaatgggctgctcaagaaggcgtacgagctctccatgctctgcgacgccgaggactgacctcatcattttctccagccgcggcaggctctacgagctctgcagcggccaaagcatgaccagaactttggaaagataccaaaaattgagatatggcgggccagatactgccatacagaacatggaaaatga

SEQ ID NO: 26675 - DNA, 232 bp, Oryza sativa
  Clone ID: uC-osflM202098b11b1
tgtacgcgtgggccttcctacaaccacaattggttgattcccacagactgtggagctcaggagagtccgccgtgagtacaaggcaaaatagatctctgaggaggagtacatcagtgccatcaaggaggaaatcagcaaggttgttaagatccaggaagagcttgacattgatgttcttgttcacggggagcctgagagaaacgatatggttgaggacttacgtgagcagctt

SEQ ID NO: 26676 - DNA, 326 bp, Oryza sativa
  Clone ID: uC-osflM202098b12b1
cgcaggttcgagcccagacccacgtttgcgtttgcgcgtggacctacacttaagagcgaatcctgcgttgtgagagggcgaaatgggaagacttatcagagcggggagaggaactagctcacagtgaattagggactaagaagacaatcacagaaggtgaacaccagacccatctttttttgctggattttgtgcacatgacattcatagactcaaagacaggccttcagaggacaatagcttggattgatgagaatgggaagcatgacttgccagaattttttattgaagataagacactgtataggaaaaaagaattgggaaat

SEQ ID NO: 26677 - DNA, 119 bp, Oryza sativa
  Clone ID: uC-osflM202098c01b1
tacactctacgcgagccgatcctactcatcgggctacgtcgacgtcgacgggtaccctcggagcccccctctccgacggacgacgatccggtcccgcgagttgaaggaatccttgataa

SEQ ID NO: 26678 - DNA, 276 bp, Oryza sativa
  Clone ID: uC-osflM202098c02b1
ttagcttttacaccagcaccagcgtcgatccgggggttcggcggagaggcagttcaagttcttggccaagcacttttgctgatagctttcggctcgggagaaaacagacgcgaagagcaagtactgttcgacgtcgttgacatcccgtacaactacaatgccatcctcggccgtgcgaccctgaacaagttcgaagccatttcccaccacaactattctcaagctcaagaatggcccggcccagcgggagtgatagtgggttaaaggggctttcaa

SEQ ID NO: 26679 - DNA, 229 bp, Oryza sativa
  Clone ID: uC-osflM202098c03b1
gtaatttctgtcacttttgtaggtgggccgggtgctctttattcactgctttgcaggcatgcgaaacttagttttcttccaaatcaacaatcagcagatgaagagctatcgacatactacagaaatggttttacttcacgtcatggatctttaccttggctaagaaggttcatggagaagcacaagaatggcagaaccgggcttctcctcatagctttgggcggtgctt

SEQ ID NO: 26680 - DNA, 315 bp, Oryza sativa
  Clone ID: uC-osflM202098c05b1
ttttcattcattgttggaaggaagcaaacaggtgcatacacctgcaggggctggggcgtaaatcacatacagtggaccataataggcacaagcaaagggagaagactgtcctatgtgaagcaatggctattccttctgcctagctaatcgcgaaggggaactgctggacaagggtgagcatcagcatatattcaacttcgacatggatatcatgagcttatatggcaaagagagggtaacatctggtggctcacccgatgttcatcactgtgacgacactagcatgatcatatatttgactagaggacctttact

SEQ ID NO: 26681 - DNA, 148 bp, Oryza sativa
  Clone ID: uC-osflM202098c08b1
ttaacgtgtcgagcggattgtttatgtgcgcgtaaaactcaagaggcggacccccaaccccactccgcgatggcaaacgacatctactcaccctttctgctgttctcatactatattactatgttttttatcttttctctttcatcca

SEQ ID NO: 26682 - DNA, 234 bp, Oryza sativa
  Clone ID: uC-osflM202098c10b1
gtagcctcgagctgaactgaagcaggggaggggaggagagtcaagctcaacatgctttcttcactgcctactgttgaactcaactacatccatttctgctgcctgttctctatgctatcatgtcttattcttctccgttgctatcctgcctagcaacaagcagttgcctgaggctaacgatcattttgatctacaaaagaagagaacatgcattcgtccattactcaactgtaa

SEQ ID NO: 26683 - DNA, 504 bp, Oryza sativa
  Clone ID: uC-osflM202098d04b1
ttccattgttggggccaaaagatctaccgctgtgcatcaataagctgcccccgatgatcgatcgtgagcctgcgggtagtagtaggcacggaagtaatatggatccatccatcaacataccggtcaacagagatgccatcaccgaagaagtcgccgccgcgttcgcggaatccgaggtgatccccgagaggtattgccgacctgatgaggtccatgacggcatcgtcgttggccatgacgatgacgaggcctacgagctgccggtggtggacatggagaagctgcttgacccggagcttgcggaggcagagattgcaaagcttggttctgcatgtcaagattggggttttctttcagttagtaaaccatttagtcgaccaacaagtggtgaatgaaatgaaagacaggacggtcaaattctttaacttgccacttggaagcaaaaggacagtggaaattcaagacaatgggtttggagggtttggccaccatttcaaaagggca

SEQ ID NO: 26684 - DNA, 324 bp, Oryza sativa
  Clone ID: uC-osflM202098d06b1
tttacgtcctcgccaccgaccccgccgccggacgcgaggaagagacggggggagccccggaggcaggagcggcgggaggggatggcgatgcagacggtgttcgccacctccaaggtcctcatcctcgtcggcgcagggttgacgagctcgatcgtgctgcggaatggccggctatctgacgtgttggcggagcttcaggagcttatgaaaggtgtaaaccaaggagaaggttcgagtgcctatgacatcgcccttcttcaatctcagaattcgaatttagcacaagaagtctgagattttgactttttcaagggccttttacca

SEQ ID NO: 26685 - DNA, 73 bp, Oryza sativa
  Clone ID: uC-osflM202098d08b1
tgattatctctctctttctctcggggtgctgggaaactttaacagagacaaccctattttcactctgagatgg

SEQ ID NO: 26686 - DNA, 175 bp, Oryza sativa
  unsure (1)..(175): unsure at all n locations
  Clone ID: uC-osflM202098e02b1
gtttcctgatgcagtagcgacagaaaatggcgtgtgacggtggacaacgtcatcaggttcatgttcatccttagcngtcgctacggcgccgcatatgccaaaaagtctgaggccaaggccgctagtgctcctggcctagcagcggcggtcaacacggtcttcgacatcacccagc

SEQ ID NO: 26687 - DNA, 460 bp, Oryza sativa
  Clone ID: uC-osflM202098e04b1
tatagaagtaaaaccaaatgggtatcttagctgaagaagccatatttggactgatactgacaacaaccgctcagggatgcttccttttgtgttcgatgactcatttggatttgagcgatatgtggactacgcattagatatcccgatgtattttgtctatcgtaataagaagtacattgactgtactggaatgtcatttcgggattttatggtaggaaaactcccacaagctccgggggagctgcctactttgaatgactgggagaaccatctaacaacaatatttcctgaggttaggctgaagcgatatctagagatgagaggtgctgatggtggccattgaggagattgtgtgctttgccagattttgggttgggctgttgatgatgaggaatcactgcaaagtatttcggacatgacctttttttggaccaattggggaagagaaatgcttatgcaa

SEQ ID NO: 26688 - DNA, 514 bp, Oryza sativa
  Clone ID: uC-osflM202098e05b1
taaagagtagctgcaagcaaacccattacttggagaccctagtaaagttttactgcttgcatgtcatggttcaatggctagctcagagcagaaactaatatttgatagacctgagcctggtgtaaggaaaattgttcttgcaaccaatttggctgaaacaagtattactatcaatgatgtagtttttgtggttgattgtggcaaagcaaaagagacatcttatgatgcattgaacaacactccatgtttgcttccaacctggatctccaaggcttctgccagacagagacgaggaagagctggtcgagtccaaccaggggagtgttaccatctatatccacaatgcgtgtatgaagcatttgctgactatcagttgccagaactcctgagaactcctctgcaatccctctgtttgcaaataaaaagcttgcgccttgggagcatctctgaatttttatccagagctttgcaatcacctgagtctctatcggtagaaaatgccattgaatatctc

SEQ ID NO: 26689 - DNA, 91 bp, Oryza sativa
  Clone ID: uC-osflM202098e07b1
ttccgagcagccacgcacgcggtatgaattggtacgcttgccgagatgatctccctccactccgcccccttaaccctcctcgtaaagcttc

SEQ ID NO: 26690 - DNA, 64 bp, Oryza sativa
  unsure (1)..(64): unsure at all n locations
  Clone ID: uC-osflM202098e08b1
tgcagcgacctcggaaggtatatgggtantgggtaactttaacacggcgtaacgtgaaccccac

SEQ ID NO: 26691 - DNA, 347 bp, Oryza sativa
  Clone ID: uC-osflM202098e12b1
tcgacctcgtcgacgccgggcgctagcgctgctactatcctacgccgccgcctactacccgatacgacccgcgcgccctcccccgcggcgccacctcgcctgcgcctgcccctccgccgctcgccgccccccgcgcgcgccaagttcggcaagttcgaggcctccgacgccgcccccacggaggcctccgccgaggaggcggaatcggcggcagcaggcgggagatggggcggcagaacagaaagcggaggaggacgacagctgattgccgtcagacttggagggcgcgatatggcaaactgggaaggcgagcgaagacttcgaaaactatggaggaacgcgagcca

SEQ ID NO: 26692 - DNA, 249 bp, Oryza sativa
  Clone ID: uC-osflM202098f02b1
ctcagtctcgtgagaaggaagtgaagatcttggaacaagaaaaaaaccatcttcaggagaagtatctaacagagtgcaagaggtttgatgaggcagacagccggtgcaaggaagctgaaagggaggctaaacgagcaacggaattggctgacgtagctcgtgcagaagctgttgcttcccagaaggataagggtgaagcgcataggctatgcaatggagagatcttggttattgaaagcatgtagtgac

SEQ ID NO: 26693 - DNA, 173 bp, Oryza sativa
  Clone ID: uC-osflM202098f06b1
tggttatattcgacccaaatagcctttttgagatacaaattaaacgcattcatgagtacaagagacagctgctaaacattttgggagctgtttacagatacaagaagttaaagggaatgagtgcagaggagagacaaaaagttaccccacgcactgttatgatagggggaaaa

SEQ ID NO: 26694 - DNA, 83 bp, Oryza sativa
  unsure (1)..(83): unsure at all n locations
  Clone ID: uC-osflM202098g01b1
acctacgttcacccttacaagctgngcgaccaggtgtcggacgcggtgatttacaagtgccttgcccatgaccccgactcaag

SEQ ID NO: 26695 - DNA, 93 bp, Oryza sativa
  unsure (1)..(93): unsure at all n locations
  Clone ID: uC-osflM202098g03b1
taaataatatgaaggttctacagggaagttgggctggttctttttcattagcctctccttaggatgctaggncagatctcaaagagttcccta

SEQ ID NO: 26696 - DNA, 403 bp, Oryza sativa
  Clone ID: uC-osflM202098g12b1
gaagctgtggcgtccgcgtaggagcagctgtttcttttttggatccaatccaatcggataagcagccatggctgtgaaggcgagttctgcagataacaggaccagaagcaccgtgtcactatgcatagtgattggcatgtgctgcttcttctacatccttggggcatggcagaagagcggatttggaaagggggacagcattgcgctggagatcacgaagcgaacggactgcacaatcttgcctaaccttagcttcgacacgcaccttgctaagcaggcaaggcttcgcgatctcgtttcgccggcgaagaagttaaagccgtgccccgatcgctacacggattataccccttgccaagatcagaacagagcgatgaagttcctcgggagaatatgaattaca

SEQ ID NO: 26697 - DNA, 306 bp, Oryza sativa
  Clone ID: uC-osflM202098h01b1
ttcgagtcaaaaagagggggaagcttctcccgccatagtcctcctcctcctcctgctactcccatcaacgactagtcgcggcgaccaagagccaaaccctacgcctcctcccctccccctccacctcgtcctccccgcgagcggcggcggccatggattcctcctccggcggcgcgggcggcggcggcggcgcgcagatcaaggggatggggacgcacgggggccgctacgtgctgtacaacgtgtacgggaacttcttcgaggtctcctccaagtacgcccctcccatccgccctattgggccgg

SEQ ID NO: 26698 - DNA, 558 bp, Oryza sativa
  unsure (1)..(558): unsure at all n locations
  Clone ID: uC-osflM202098h02b1
gtccccatttccctgttcgtcccactcgtccgctcatccttccgatccaagcaaatcaagcaaggacaagttatttttttgagagagttggccgatctaacagagaagaggaggaggcaanntcctctccctcccttcttccttcttctcttctccttcttctctctccctctctccactttcctttcccctccccttcttcctctctccctttttcttcctttccctctctttcctccctttctctcctctctcctcccctttctcttttctccttcctctttcttccttccttttcctcctcctctctcttccttttccttttttctctctctcttccctttctctttctctttccttctttcctctttccttcctcttttcttctcctttcctcttctcttcccccttttccctttttttttctttttcctatttctttcccttttttcttttttttccacctttttcctctcttttcttctctcttctttcttcttctttcctttctcctctattttttttccctctttctcctctcttcttttctttcctctt

SEQ ID NO: 26699 - DNA, 462 bp, Oryza sativa
  Clone ID: uC-osflM202098h04b1
tttcaatatagagcgaaagctttggaagcgattcaacatttaaaggagacataccacaatggagtgtgtgatgttgcgattgttgatgatggaaaattgcaagcagaatcagattctggtgaattctgggttctttttggaggttttgcaccaatagggaagaaagctatatgtgacgatgatgttgttcttgaaaccacagcccccaagctttacagcatcaataatggtcaattaaagttagaagacacagttctgacaaaatcaattcttgagaacaataagtgctttttggtcgactgtgggtctgatttatttatatgggttggtcgactaacacaagtggaggagagaaaagctgcaagtgcagcagttgaggaattcattgctactcaaaataggccaaagacaacaagagtaaccctgagtgatttaagggtacgagaatcttacattcaagtc

SEQ ID NO: 26700 - DNA, 168 bp, Oryza sativa
  Clone ID: uC-osflM202098h09b1
gtagtcgcagcagcggtggtgtgcgagtgcgaggcgaatccgagagcgttttgcgtgtttggcgactcgatggtggacagcggcaacaacaactacctgatgacgacagcgcgggcggactccccgacctaccgtgtggactacccgacccaccgagccaaggggcgc

SEQ ID NO: 26701 - DNA, 180 bp, Oryza sativa
  Clone ID: uC-osflM202098h10b1
ctactactgaggttgtaagagtacagcgcacctgcacccccagttgcgtgtgtctcgtagtggcacgcgtgtgccaatgcgaagacctgatggtggaggctcagtatcgaaagccaaggtcaaattgttggtgaaccattctatagttaagcacctacaggcatttatctgtcttctact

SEQ ID NO: 26702 - DNA, 77 bp, Oryza sativa
  Clone ID: uC-osflM202098h12b1
tgtaaccaacaatggccaccatggctgcaaggttgctcatttgaagcgcaatccaaaaattccaacaaatcaaaaat

SEQ ID NO: 26703 - DNA, 353 bp, Oryza sativa
  Clone ID: uC-osflM202021a06a1
cttaggctacttaagcatgttacagggcacacgcttgtctgtatacaaatctccattattactttaaaacttatacaagtcatgtaaaacctgcaagtacacataaatgtcaccatactcatctcacatcaatacaacataagttcactctgttgcatcttacatcagcttttcaccagactcatcgacactgttatcaacttaaaagacaacagattttgtgagggcagatggacaggtaattgcattctaccccagctagataacctagatttttttccatatagagaaccttatttcttagaaccaatatataggatgcagtctcggttgctcactgatcatgatcaaag

SEQ ID NO: 26704 - DNA, 178 bp, Oryza sativa
  Clone ID: uC-osflM202021b01a1
gtgctggccaaaacattttgtgaatgtgatgatgatgatgatgatgatttcaccaaacaatttttcaccccaactgaaaaggaaacgtcgatgaccagttttcttattttaaattgcccactaaactctttggatatttattggccactagctggcctgtttttgccaccacccaaac

SEQ ID NO: 26705 - DNA, 63 bp, Oryza sativa
  Clone ID: uC-osflM202021b03a1
attattctttttttttggtttttttgatattttccgtcttttacctctttcccttttttcttt

SEQ ID NO: 26706 - DNA, 447 bp, Oryza sativa
  Clone ID: uC-osflM202021b06a1
gtggaaaaccccaaataatcttccaagatctacccgttgggcttcaatattaaaaataagacaagtcccttctaatgcttcagcctggcaactgacaataggtgatgtttctatctgaaatcagccattgtgctcagtttgggacaacatacaaaatgatcatcttaatggtatctttcttccatctcaaatgtcagacaatggggggatctttgggatcataataaaaacagggatgaacaaaaaaattctttcaattttgaacagtgcccctgtgcaagctattatgcaggaacaaatagttcagtaagacactgaagacaagctttgcttgaaacattcctttttaccaaactgcatccacgacaaacccaggtaaatactttaactgttaatattctgatttagcttggaaacacaaatttgttttttctagggtgcacacat

SEQ ID NO: 26707 - DNA, 411 bp, Oryza sativa
  Clone ID: uC-osflM202021b07a1
aaggggggcctagcccaatttttttaacccttttggctttggcttactggagggaaacatttatttttaccccaggtcctaatttttttgggaggtgggcactgaaaagatggggcagttacatgcattctggcattttgatgattctggggaactgggttggtaccaagcagcacattttgctttgaaactgggacagagatagacattcaccttatccatatatatgccttgaaacgggagggttggataaggttctggtaatcctaggggaaatttttcctttttaatggcacatgatcacccgggggaatttggtggtgcactggcattggggggttttttagaaaccatattttggttcaggacaaaccttagggtggaacctttttaaagctcccattggtttgg

SEQ ID NO: 26708 - DNA, 416 bp, Oryza sativa
  Clone ID: uC-osflM202021b08a1
agcaataatcaaacactaggtctcgtatggatcattacaaagtacacaaatgtacaaattaaaacatcaaaagagttaactaagcttaaagcagcagctgacacataagttgcaaaccccaacttttttcagtttctgaattctggatggatcatatcagattcatcacagcatcgtacaatctgtgcaagcattggtacatcgagcgatggagagagagagtagtctacaatggcggctgggccattcacgagcccggcgtgaacttggtggcgtagacccaggcgttgttggcgacggggtcggcgaggtggtcgagcaggttctccaaggggcccttgccggtgacgatggcctggacgaataagcctaacatggagaacatggctaggcggtcattcttgaacttcttgacc

SEQ ID NO: 26709 - DNA, 108 bp, Oryza sativa
  Clone ID: uC-osflM202021b09a1
ggggatagaaccttaggtattgacagcaaggacttggtaatcagttaatgcgaattacatttcaaacccattataatggaatgcaaatccacatggagaaacgaaacc

SEQ ID NO: 26710 - DNA, 102 bp, Oryza sativa
  Clone ID: uC-osflM202021b11a1
acccaaattggcccaggttaacaaccttttttcggggaggggcaaaagaataattttcttacatggttccacttttctatttcaaatcctaatcactaacgg

SEQ ID NO: 26711 - DNA, 351 bp, Oryza sativa
  Clone ID: uC-osflM202021c01a1
gaaatacgtattattcatcatattttcaacgagcaaaacctcacttgtaccggcacatacacacaaaaaaaaaccccaaatttacacgcacgcctcccattttttttaaacaaaatggaaaaaaaaatcaaacgtacaaaaataattccatctggagattacaccaatcaacggccgaaaacgcacgcacacggccgtgcaatctcccgaagccacgtggacctcacgtgagcgcgccttccccggcttcacttcactcctgcggcagcggctggtgggccccaccggcgtcctccacgtccatgaacaggagttcgtaggccaccaccgcgaggggcccacctgccagcg

SEQ ID NO: 26712 - DNA, 407 bp, Oryza sativa
  Clone ID: uC-osflM202021c03a1
cacaaaaggagcccccacacacatgcaagatggaaacagggggcaccctccaaatcccaaagggtgttcccatttttttaaaaaggcacaaaaacaagtttatatcttttcagtattatttttaccgataggaacattttcctcaaaaatgctacttctggttcacaacataaaagtatactggaggatgcttgcttccaatgaaccgacacttagacaatatgaaccctcattggatgtaacaagaaaaaaaaattaccgaactacaacctggaggggattgtccagaaaagaaaataaaaaagggtcaagacgcactgtcgcgcaaccacactactgagaaaagggctagtatagtaacaaaccggctaccgttaagaataggttggtcatgcttgaccaacaag

SEQ ID NO: 26713 - DNA, 440 bp, Oryza sativa
  Clone ID: uC-osflM202021c04a1
aaaaagccctaattctcatcgtgctcatttgctcattacatctgcattgcaccatccaagatccatatctgcatatccatagctgatacagctccatcgtgaaaacgtttattcctctacaaggttttgcatgctactactaatgcactatacctttagacattcccaggttacaataccgagtaaacaagctgcctaacaaacattacaatacttgatatgttgtatgatcctgaaggccctagccaagcaattcaagcagactcggcgaacccaatcctgtttttgccaaagtcgaagacagtgtggtatgcagccatgaacacgtctccaagaatccagagtgggccccgtggaggtggcacgtcgaacgccatgaacccgctgatgcaaacagtttgaccttgctgctccagcttcactacgtactgctctggtgt

SEQ ID NO: 26714 - DNA, 365 bp, Oryza sativa
  Clone ID: uC-osflM202021c05a1
gaaaagatgtccaatttatgtatgaacatactgaacaaactggattaatacttccctctccccatgtgatctcacatgtttagggcaatgttcattttgggagggattttacagatcattaatacaagctaccagagatcattttagaatcaacaaatggaatccgtcctacaaatacaacacttgtagttttagataggacaccagcaaaccggttgcaacttcccagcagtttttgtttaaacaattgcactttggcacaagaactacttctggttaccacccattacccaaaagatgaacaacgaagaacaccgtgaaggcgtttcgctgatggcacattgcctttggtcaccccaaaaatt

SEQ ID NO: 26715 - DNA, 128 bp, Oryza sativa
  Clone ID: uC-osflM202021c06a1
ttttttattgttttatttggttttttttttttttttttttttatttatttttaaattttttttttttccatggaaccatagaggaaacattaatattgagttcttcttaaaaaacaaaaatattattt

SEQ ID NO: 26716 - DNA, 351 bp, Oryza sativa
  Clone ID: uC-osflM202021c07a1
ggggaaaaaagggtagggggaaccatttttttcccaatttgggggttttttaccaaagaaagggccaaaaacccccaaaaaaaagggggggggttttttaactggggggggtttttttgttttttaaaaccaaaatttaaaagggggaaaaaatgtttgaacaaaaaaattttttttaaaaaacccttttcgggggaatttcccccggggttttgccccgggggaaaaaaaaggggtgggtgcccaaacccccaaaaaaaaagccccccggcctgtttttggggggaaaggggaaaaaaaattggggaaaaaaggaggctcctcaattaaaccccccccccctgggggggg

SEQ ID NO: 26717 - DNA, 480 bp, Oryza sativa
  Clone ID: uC-osflM202021c08a1
gaatgaaagttgcaagttggtattccaatatggacagtaacgcgccgtttcagatgactcattacacatgcaagatgcaaagatgttccataagaaacgaactgtatatatatgcaacacattatcatggctaactattcgaagtctatatctttgaagtcttatttgtactgataggaacattttcctcagttttgctactcctatttcacaacataaaagtatacttgatgatgttttcttccaatgaaccgacacttagacaatatgaagtttcattggatgtaacaagaaaaaaaaattacagaactacaactaggaggttatagtccagaaaagaaaaaaaaacacctccactacgcactgacgccttcccacactactgagaaaagggcttgtatagtaacaaaccgactaccgttaagaatggttgatcaatgctagaccaacaagaagctacagctgtaccccataacgcct

SEQ ID NO: 26718 - DNA, 175 bp, Oryza sativa
  Clone ID: uC-osflM202021c09a1
aaaaaaaaaaaaaaataaaaaaaaaaaaaaaaaaaaaaaaaaaaaaaaaaaaaaaaaaaaaaaataaaaaaaaaaaaaaaaaaaaaaataaataaaaaaaaataaaatataaaaaaaaaaaaataatataataaaccataaaaataataaaaaaaaataaaaaaaaaaaattaaa

SEQ ID NO: 26719 - DNA, 304 bp, Oryza sativa
  Clone ID: uC-osflM202021c11a1
gtgtgtggcgtatctgcatacgctcattgctacgtaaatgttcggtatacgtatcagtcgggcggatagtaaactttgcccattctcattacaacctcaagcagcatatgcggacaggattacactagcagaccatttgcagcgcacgagattaaccagggttgacgtcccaaccatgtagagttgctttgctagctcgatcatacttattcatcagcaagtgcagggtatatgctagcacacttaagcaacagtattataggagttgtttgctgtaagcgatcttgatgtagcttttttatgg

SEQ ID NO: 26720 - DNA, 340 bp, Oryza sativa
  Clone ID: uC-osflM202021c12a1
gattggcacggaagaataattgcatggacccaggaggaatagtgccactgatgatctatacagggaagaaccatgttgcaagggacataaaaattttattcgggagctatttacaatctgaataaggatatctctggtcgagttgtcccctttttccttaggacaaaattttgggcaaaaagataactgtgtccaactttgaacagggtttactactgggcacaatttaacatgtgccagccggaagaagcaaagcccaagtttatttaccttacatttctattttctatagtccccgtccagaggataaggtttttagcattactgttccccggggaag

SEQ ID NO: 26721 - DNA, 110 bp, Oryza sativa
  Clone ID: uC-osflM202021d01a1
ttttggccgcgttttcgcgagcgaccgaaggggacgttcgggccagattcgagcgcatgcctgccccaccgtcgacgaccgcggcagtgccccgcccggagggtttctac

SEQ ID NO: 26722 - DNA, 147 bp, Oryza sativa
  Clone ID: uC-osflM202021d02a1
ttttttttggttttttttttttttttgttttttttttttttttttttttttttttttgatgattttttttttttttttataacgtacattcacatttttttctctaaaaaaaaaccattaataaaaaaagaacaccgaattatcccg

SEQ ID NO: 26723 - DNA, 165 bp, Oryza sativa
  Clone ID: uC-osflM202021d03a1
aatgaaacatatagcaacataatattattggatcatttacatgaagcaggtgattacaatacattgaggggggcttcatcaccacatataggtagatgagtcagcaaaagatttttagatttaaagctaaggtacaaaatatgcttgatgggggtttcttaacaa

SEQ ID NO: 26724 - DNA, 384 bp, Oryza sativa
  Clone ID: uC-osflM202021d04a1
aaggagttgaggagaattacaacagcgtacatccgcaagaggatcaaatcagagccctatacaaaaggaaggatatgcagcgcacacatccgtccgtacagtcaagctaaccaaaagccactggggattcattcacttgtcgaagtagccctcggtcctgcccttgaacccgatctggccgaaggtgagcgccaggaacagcccaaggtgccacgtcaccaaccacagccagaacggcgagtcgagcgccggcggcgaggggaagtgggagagctcctggccgatgctggagaagaagagccccgtgaggctgttgccgttgatcgccgggacgctcgacggcgcgatccacccgatcagcccgaacccgattcacgttcaggt

SEQ ID NO: 26725 - DNA, 159 bp, Oryza sativa
  Clone ID: uC-osflM202021d05a1
ggcacaagcaacgaattatgtatgtatatagacagcatctgatactccaaaacaacgaagatcatatgttattacaaaagagacgaaaaagaaagagccctgccgtgacaatgttctagtcgatggaacacgaagaaaagaatcactttctaggacagt

SEQ ID NO: 26726 - DNA, 364 bp, Oryza sativa
  Clone ID: uC-osflM202021d06a1
atacaaagtccttcctggagactggaacgtgtcttctacagggatgttttatgaggcttcaggattcgtcatcgctgttggagcccaccgaagaggatgatgacagtgaacttggagcctgatactgcacctgagcctgagactgttgctgcgcctggttcctgaagctttgaggatgaagcgggggacgatgtcgaggcgggtgcgaggagctcttctggttgtgactcatgttgatgactgctgttatgatgtccattattgtggggagaaacccagatgtaatagtcagaagacctgagagcgtgccatggcgaaaataggctgtgatgtcatattgcaaccatgcagcataggatactac

SEQ ID NO: 26727 - DNA, 447 bp, Oryza sativa
  Clone ID: uC-osflM202021d08a1
aatctaacatacgcaaactgatattatcacaatgttagccgatgacaatggaaagagtaatctaggtacaagcggatcattgacggtggagacaagacattggctgcaccacaacacccaccagtggcgccaacaaggagcgctatccgttataggacgagagaaaaagtaaaacatcacgatgtgaagtgaaactgaataattctagtagacgatgatgatgatgatggataggctccttaggacgcccgccgcccttagcgtcttgctgctcccatcttgtccactggaaggctcactcgtcatcgtcttcatcctcttcgctgccctcgtcgtcatcctcatcattgacctcggacttggacttgtcagattcctcctcgtcgtcctcctcttcctccttggcgggtgccttcttggcagtgctttcgcccttgttgtaggcag

SEQ ID NO: 26728 - DNA, 470 bp, Oryza sativa
  Clone ID: uC-osflM202021d09a1
atgtatgcaatgctcctcacatagtcaaatgaataatgtaatttacagtttacaatgttgtttacatctacatggttgccgggggcgaaagagaagcagaaaaaccgtcgtgattcctttttttccttccattctactttctagatagatttcatttttggtgtagtctgctattgactttgactcgattcatttggtacagtaggggggctcctcctaaatgcgtgctttctgcaccgttggaaaatgccatcatacagcaaatcaaactgcactccggctctttcacgatttacaatgaaaagaatgtgatcagcctcaattatcttgtaataccatatcccaggctgcaaaggatggcaatcagaatcatccactaccaaacggtttggatgctctgtaggaatgcgagggtgcgtcatggagattgtgttcaaagccccatcattatcttcccaaacttcatccct

SEQ ID NO: 26729 - DNA, 296 bp, Oryza sativa
  Clone ID: uC-osflM202021d11a1
accggtatcggaaattttagcagcacatgacaaagttcgcccatatacaacaattttcagttccaaatctaagttaagacctttaacaaaagttggtcatgcaggcagctaggcatcagagtttcatatagctctgaggtctatgtctatttataacttacaaatttcatgggacttacctattgaagacaaggatttttgcgtaaaggcaataaaaatggatacattttaacacaaagcgaaaactagcacctacaaaggtccaattttaatttcaagatgttgctttcagagac

SEQ ID NO: 26730 - DNA, 424 bp, Oryza sativa
  Clone ID: uC-osflM202021e04a1
gacagaaaagaaccacaaaactgtcaagctttggatgacgtgttttaacatttcatgtttcccgttgcaagacaacgcagagatacaagagattcatgcgtgaataaacatgccatgtatttttaacaaatgctggctactgttacactacagattcaattcaacaggtgataactggtggcagcggctacaaccgtgttgactgctccgacggtttttgattctgcaaagaggattcatcaccaccagtaccagtgtcatgcgatgaagttgattcgcttgaggaaggctttgcgccattcgaaatgatgttcttgaaccaagtcccctggaaagttgggccatttctgcttttggttacttggggactttggttgtgggttttgattttttcgatgccaggcctgccataaaattggttgct

SEQ ID NO: 26731 - DNA, 376 bp, Oryza sativa
  Clone ID: uC-osflM202021e05a1
catggaccagtaggtccggttgatgtacgtcattaatacgcagtataaaagaccaaaagtagtatcacatcatcatatgcctaacatggaaaacttgatagtattatcgcccctagagcggaaagaaacaatttgtcgccgccgtcaaagccgtgcagatatgtatgcacggcgctgcttgctgcttactgctgcgcgcactgcacgcgctgggcgccgccgccgtgcatgtcctcgtcctcgtcgtatgcctcctgctgctgctgttgctgccgcctcctcatctcctcctcgatgttcacgtcgtacggcatggtcttctcgcactcgtcgagctccatgtcggtgtactgcgacaccggccttggcgggagga

SEQ ID NO: 26732 - DNA, 478 bp, Oryza sativa
  Clone ID: uC-osflM202021e06a1
aatgaatgttttcggatcaaaccaacagaggttacatggattcgaattcaatggcaaagccagcatctagcatcgtttgccacaagactaatgttgtaattgtttacagctaaagcttggactggtacagctattacagctaaaagcctaaaacttctgaggtgttatgtactgcagtagtaggaaatcctagtacatgcttgttacaatgaaattttatacttcaaaacgtgagccttcactagagtgaaggggcactatggatagctcatagcttgtacaactggcggaccaactccagggacttatggtcctctgcacaaagggcaataatttagtcaaatttccaagggaaccatatgaagctggagttccttatgctgggacctgtgaacctgtgagaagtccattgccaccaagtactatcagcttctgagttggctccattgcgacgttctacatttatgaatgctggtca

SEQ ID NO: 26733 - DNA, 307 bp, Oryza sativa
  Clone ID: uC-osflM202021e07a1
gcacacctgcatgaacgtcagaagatgtctctgtcgtatacattggtcaacccctcaaccccttgaaatggtacagaagattctcagctctacaaacccagaagccgaaaacggcgggctactcaagcgagagcccagtttgatcaaaatatatatgtacactatgtgataatacatgcaaaatatcgtgccactttttaatggcgacctggtgggcttctatgcgccccgaacaggttgtccatgtacgtctgcttcaggttcgtcatgatgttgggcagcttcatcagccttccgtccttctgtg

SEQ ID NO: 26734 - DNA, 320 bp, Oryza sativa
  Clone ID: uC-osflM202021e08a1
gtaattcgatcatcacgtacgtttgcgtataaggagtgcagattattgtatcacaattctatcgtcgtatcgagaaacccatgtataaacctattagtgatgtcatggctcatcacaacggggggccgtaaaatacaatgttaacatacaaagtgaaaccaaaatttgtttatgtaatctctgaagaatcacttctactatgtgatgtacctagcattattaaggtgccacaaaaatgcaactgttaactaagttgactgtattctttttttttttgtattacttctgtgccccctgatgtctcttgttacgtatttcac

SEQ ID NO: 26735 - DNA, 454 bp, Oryza sativa
  Clone ID: uC-osflM202021e09a1
gggagaccaatatttcagtgttttcagcaagtaacaagttcacggactgccggactggccgcacatcacacaaaaagagaactcaattcttccttgaagggcagtaagccaaacaaataggtcactgcaaatccttatttggaaaaaagtggaggggaaaaacatcgatcagcagggccgggcctcctgcatgtaagtacatgtcctggctaacaaacataaaaggcacaacatgttgacctccaaatgttaaaaattgcatcgcttatgaagcggactccttggcaatcttctctgccttggcaatgacctcatcgattcctccaaccatgtagaatgactgctcaggaaggtcatcatacttcccgtccaatacaccctggaaactttgaacgctctccttcagctcaacatactttccaggtgcacccgtgaaaacttcggcaacgtggaa

SEQ ID NO: 26736 - DNA, 443 bp, Oryza sativa
  Clone ID: uC-osflM202021e11a1
gctggagtaattctatcgcttgattcaattctcttctcatctcgttctggcatatttaggagtacagattacatcaagattctaagagaaaaggggaatggtggttatgtcctacaccaagtaattgaagctatcaacttatcatacaacaagtgtatatgacgatttctcatacaacaacacaacacgggaatctgaatatttgctcagaattcagacacgacagaatatccagatgaagtaggcgcatctgctaatcgcactcacaagtcctgaatcccatgggatggagaaaactgctagaaacagagttgctgtggttcgacaacctgatggcatcatttgcccaataaccggcgtccccgttggtttgcccctttaactctgaagttcagttcatcaacatcatcaccgaaagcatccagtgatttattttgcctttc

SEQ ID NO: 26737 - DNA, 472 bp, Oryza sativa
  Clone ID: uC-osflM202021f02a1
gctagtatgcatatatatttatactttggggtacacatatgcgtctgacttttacatgctctttccgactagggtgtattcttatgccgaatgagaattcaccctttctcttatttgtcactcgttatcctattgactggtgtgaattaagcaagacaagaaaccatatggatttactatcggcatacgaagaactattatatctaggagcctccagctcaccttcaggatcatcaacattgatctgtagcttggaatgacaacgtcatgctgtcgaggtcatgaagaaagacggaagttggcctgcatgatgttgccgatgatcgacacgtccgacgagctcattatcgccatgcagaccaaaccctcgttggggaaggtcgtgaggtagttgcctccgttcaggctcatgtccgccccgtcatcgaagtgcagcacgagcggcggcatctgcgccaccgcctgttgattt

SEQ ID NO: 26738 - DNA, 237 bp, Oryza sativa
  Clone ID: uC-osflM202021f03a1
gtgtaaattggtagtattaggtaactatattttgagacggaagtagtaccatgcaagctaaatatagttgcattaatccgatcctgctatcacaaatggagtagagctaggaaaaatattatacaagagagtatgacctattgtttgtaggaatacacattagcaagttagcatcatttttcccttatagtttcaaaaagattcactcaagtttcaccaaaaagtgtgaaaagaaaa

SEQ ID NO: 26739 - DNA, 457 bp, Oryza sativa
  Clone ID: uC-osflM202021f06a1
ggagcaacaacttcctaacttcaagcttatttacattacacataggttaaagaggataacagtgaggatagctgtttgcaagaatctccttggatataagtacactgttgaaactagaataggatgaaatggtgaaaatttctaacaggaaaacgggttactttgaccttaataatgtaatttctccccaaaacgaatttcagaatacatacctagtcctagctgagaaatataaagccgcggcgatttgacgcacctctatatgatgaataatttacacatgtatcagccttagatcggtcattcttgattcgcaggtctttggcctgtatgtgccgctgccagaagccccactggagaatttgacttgacagtagcttggtaagatacttgctacacaatgtgttgcgtcttcagatttcagtaatgtattagccgttagtcacctttgtcacag

SEQ ID NO: 26740 - DNA, 400 bp, Oryza sativa
  Clone ID: uC-osflM202021f09a1
ggcaagcagttgttctaggctgtatactgcatataacgtgtagaatataccatatttatagaccttcagaagaacactcacttgattttatggtttactgtttaggtatccaggtgtttacactagctaaatcatgccttttttttttgaagtaaaaggtagagagtctctaccttatggcattagaggaacacatctatgtcattagaggaacacatctatgtcaaaagggattttttttaaagataatggatagaaaaactggtggatatagatggccaactgaaagcaacacatacagtatcagagacggggaaggcagaagtctcttatcctgatatggcttcaagctctttaattggaggacactatcttccatctttacgtcaaaaaagccctt

SEQ ID NO: 26741 - DNA, 380 bp, Oryza sativa
  Clone ID: uC-osflM202021f11a1
cgtagaatgattggtccatattttattttggatcgggctgcaaaagccaaataagtccccccttgacatttacatcaagtacacaaccaaaagaaaacgtgcgagcaaaaaaaagtctccagaattcactagcatcggcgaacgtactagttaaacatattcaccatctcatcatggaaggagttattgatgattgattgattgcacctgctggaagcattcttgtggacaatctagcctgtgttctgcatgccggcagcaatgcccttcatcgtcaggatgagggtgtcctccaggccaggtgcgtactcgctcgcagcgttcagttggaccagctcggcaggctggttgctgtcgacgaactcctttcgacagggccg

SEQ ID NO: 26742 - DNA, 104 bp, Oryza sativa
  Clone ID: uC-osflM202021g02a1
ctccctttttgggtgattttggttttttggggtttttactgagcacaacccaagggttttctcagtaaatatcttttgttaatttacagcttccagtcaaagcc

SEQ ID NO: 26743 - DNA, 142 bp, Oryza sativa
  Clone ID: uC-osflM202021g03a1
aaaaggaaaaggaatggacatatgtaacagacagcaagttacaattaaactggagtgcaaacttggtaaaatctggatctacatactataagccagcacagaaaactagagaattgccatttatggacgcttacaaaacagc

SEQ ID NO: 26744 - DNA, 267 bp, Oryza sativa
  Clone ID: uC-osflM202021g07a1
gcacgcgtttttaagcttgtattctctaccatttgccgcccttttttttgttttttttgattttttgagggtgttatccgcacacaaaccaagggtttttacaagaaaatattattcttgtaaaattacatatcttccaatcaaaggctaccactcctttttatacatatccactttcttggcaaattatttaccaccttctattaatttatcttatttttataatctcctctatatttcattccttattacaaattcttttcttat

SEQ ID NO: 26745 - DNA, 115 bp, Oryza sativa
  Clone ID: uC-osflM202021g08a1
gcaatccaatacattaaagtgaagggatgaacataatatattgcaatgattttatttccctacatagccttttatttttatttaccactctatgaccttcctatcccgtttgctc

SEQ ID NO: 26746 - DNA, 190 bp, Oryza sativa
  Clone ID: uC-osflM202021h05a1
ctgggcaggaacgtattacagacaatttgcaggtcctacaatgactcagccaaagcaaacaaaattggacttgatcacgacgtctactgaatggatccttgtccatccaaagaatgcttgctaatctaacaaaatttactttcctttcgaacgtttaggccttccaaattcttcttcattagaaagaaaa

SEQ ID NO: 26747 - DNA, 295 bp, Oryza sativa
  unsure (1)..(295): unsure at all n locations
  Clone ID: uC-osflM202021h06a1
tcctctattttggcccccttttttaacccccccnctgaaaattttgaaagtttaagtattatgcgatggacggagcatcttttttatattcgcagccagggcctcgtagccctaatatttgacgtaagaatgctcgattgtgtacgaaagatgctcattaatttcccagattctggcaatgttgaactgccagggcaaccatttgccatgcaattccatgtcccggcatgtcccctatccaaatacctcccatgccacaattgcaaattgcatctttatcaaacttgacaataac

SEQ ID NO: 26748 - DNA, 422 bp, Oryza sativa
  Clone ID: uC-osflM202022a01b1
ttttgttttctgaggtggggccagttcatgcccccaggtacccaaagcccaaggaagaaggctggtggctggtaattggtgatagctctaccaatcagttgcttgcaatcaagagggttgcacttcagaagagggctcgagtgaagcttgagttcaccgctgcttcagaagctgggagaaaggagtacatgatctacctgatgtccgattcttatctgggctgcgatcaggagtacgagtttcaccgtcgatgtcatggatgctggaggggattgatcccaaggtcagaaagaggatgaaagctttgcccagcccccaagtgtgtatggagctgggtggttgcttgtaccctcgtagcaaattctaatggtctattccacttttatgggtttggacctcgttttattttttaccattttttt

SEQ ID NO: 26749 - DNA, 317 bp, Oryza sativa
  Clone ID: uC-osflM202039a03b1
ctgctaaagcgaagcagaccacttgctgaacaccaactactctccgccgccgccgaggaggaggaggagggagcaagcttgaccccggcgccatggcgggcggggtaggcgttccaccatcagcgcggccatcacccgaggccgcagggaggacacggtggccgcctgccgcgagcagctggagggctgctacctcctcgccgggatccgctacgagggcctcacggtgaagcagctgcagggcatccgcgacaccctcccggagacctgccggctgctggtggcgattaccacgctggtggggaaggcctcttttg

SEQ ID NO: 26750 - DNA, 342 bp, Oryza sativa
  Clone ID: uC-osflM202039a07b1
ctttcatgttcttgatcctgctactttttcatggagcccatgcggctttgaaagatccagtacagaaatggcagactcttggaggtcagcgtcctcttgccattgctcgtggagggttctccggcttgcttcctgattcaagccagttctcgtaccagtttgcaatgtcgagtagcttgcatgatgtggttctgtactgggaccggcaatagaccagtgctggattgggcttctgcaaaactggtttgtcattagagaactcgacgctgatcggcgaagccttccctaagagggccaagacataccaggcgaatggagaggaaatccatgggttgttagctt

SEQ ID NO: 26751 - DNA, 307 bp, Oryza sativa
  Clone ID: uC-osflM202039a08b1
catgaagcagcagcagcagccatgcgtccgtccttcctcctcctcctcgtcgtgtttgccggcgtcttggccggcggggcgcgcgcggggccgccgttggcggacgagaatctgccggggcagctgttgccggtcgagaagccgccggggcagccgttgccggggcagccgttgccggggcaaccgttgccagggcaatcgttgccggggcagccgttgccggtgcagccgttgccagtgcaatcgttgccgatgcagtctttggtgggcgagaagtcatcgtgacaacagttgtctatgcagctta

SEQ ID NO: 26752 - DNA, 296 bp, Oryza sativa
  Clone ID: uC-osflM202039a11b1
acccttccggctgcttccgatcaaatcgatccccaaattcccggatccccgcagccgctcctgcgactcgtaggtctcgtcaagtcggcggcgacgactttgatctctattcaagatgcagatctttgtgaagactctcactggcaagaccataacccttgaggttgagtcctcggataccattgacaatgtaaaggccaagatccaggacaaggagggaatcccaccggaccagcagcgtctcatcttcgctggcaagcagcttgaagatgggcgcacgcttgctgactacaaca

SEQ ID NO: 26753 - DNA, 369 bp, Oryza sativa
  unsure (1)..(369): unsure at all n locations
  Clone ID: uC-osflM202039a12b1
gatccggttcagataggctcttcttgacaggatcaccatgtctgcctttgtgggaaaatacgcagatgagctgatcaagacggccaagtacatcgcgacgccggggaagggcatcctcgccgccgacgagtcgacgggcaccatcggcaagcgcctggccagcatcaacgtggagaacgtggagcccaaccgccaggcgctccgggagctcctcttcacgacgcccggcgcgttccagtacctctccggcgtcatcctcttcgaggagacgctctaccagagcacggcncgccggcacgccgttcgtcgacgtgctcaaggccggcggcgtcgtgccggggatcaaggtggacatgggcaccggggaca

SEQ ID NO: 26754 - DNA, 509 bp, Oryza sativa
  unsure (1)..(509): unsure at all n locations
  Clone ID: uC-osflM202039b01b1
catttgttaagccaaaaccccaacttaatgagggaaataatgaatatgccaatgatgcagaatctcatgaataaccctgatttaattcgtaacatgatcatgaacaatcctcaaatgcgtgatatcatcgaccggaatccagatcttgctcatgttctcaatgatccaagtgttctctgccagacccttgaagcagccagaaaccctgaaatcatgagggagatgatgcggaacacagacagagcaatgagcaacattgagtcttctcctgaagggtttaatatgctccgacgcatgtatgaaactgtccaggagcctttcctaaatgcgacaacaatgggtggagaaggcaacacagctccaaacccattctcagctcttcttggaaatcagggttctaaccaaccaaaggatcctgctacaaatgctccaaatactggctcagagtctacaacaggaacccctgctccaacactaatccacttccaaatccttggagctncaatgct

SEQ ID NO: 26755 - DNA, 513 bp, Oryza sativa
  unsure (1)..(513): unsure at all n locations
  Clone ID: uC-osflM202039b02b1
ngcttatgatggaaatgtgttccaccacctggaaatttgattttctcacctgcatcaatcatccaattctggtctgacttctcatgtgcaagccaccgacacgcagcagtgtgatggtcgacggtgaagtccatagattcccacggagacgtaaaagtcccccatatgccaatgccgcccagagacagggacacgtgggcccgcccagttttctttggcacgattagatccaaggagttaaggcgcattcataaagacaaaccaattttggttcacaaggatgcagatctttcagcagtgatagggctcatcatttcagctgcgccgtgtttagccaaaggctacttcggaatcctagatgatctcacatcattacagcaagaaacctgaagctttgtgtgctctctctctctctcaccaatgcagagagaggataatgggttcaagtacagtatgatgggtaccgttgacaccagcacgtggatgcttaagggttaagcgactcctatcttt

SEQ ID NO: 26756 - DNA, 504 bp, Oryza sativa
  Clone ID: uC-osflM202039b04b1
gtgtgagagagcacaaaggaaaatagtgtaagaagaaaccttgaggatgctgtacaaaagttgtcaagaggtgttagtgccaacagatagacagagtctgttgagaatatggaggctaccacaggcaataaatggccatctttgcgaagaaggaaacacattgtagtgattgctatagattctgtgcaagatgctaacctggttgagattatcaaaaatatttttgtggcttcaagcaatgagagattatctggttctgttggttttgttttgtcaacatcccgagcaatatcagaggtacattctttgctaacatctgggggcatagaagctactgattctgatgccttcatatgcaacagtggtagcgatctttgctatccatcctcaaattctgaagacatgcttagccctgcagagctcccatttatgattgatcttgattatcacactcaaattgagtaccgttggggtgagaggttcaaggaagacactaattcgttg

SEQ ID NO: 26757 - DNA, 409 bp, Oryza sativa
  Clone ID: uC-osflM202039b07b1
gcttctcgtctccgtcgagggccgcaccaccctcgcctctgtctcctcctcttctctgtctagcctagctcaggtctctcaacgtctctctctccagctgcaccttctgcgaggccgccattcccaaggctaccaccaccaccaccaccacgcagcagcggcctaggagtacttgcggcggctgcttgatcggctttcttggctcgtcagttgcagtattccctcctcaaaatatataaaaaggaaggagctccctgaggctagctggattggatgacgtctcgtgaaagttgcaagcgatggtgctctgactggtcttttgcctctgatgtctctgctggcgatgggataagttggcgcactatctatcttggctgtgtgtcctgttgaaccttgcctagctgtgggt

SEQ ID NO: 26758 - DNA, 486 bp, Oryza sativa
  unsure (1)..(486): unsure at all n locations
  Clone ID: uC-osflM202039b10b1
gatgtgagagagagagagccacagccaatttcataggatagctctctgttcttgcattggttttgcttccctctgcgccttgggtgataacaaggatctctttctattgccctgtgattctttctttcatcgtcgtttgatattccccacaccactcttttctctctgttcttttctgtttgggtttgatcgcttgctcgttgagaacctctgcacgattcccgtgtcacaagcagttgaatcatgactgctcagccaaagaagaggagtgtaatagaaagtggagagggaggtncttggtcttggccttgctttatttatctcaaatggtgaagatttgggccctatcattcggcatggatttgattctggtaaacctgaagctctcatgcaaaacctcaggagtattgcaaagaaaaaggaagttgagatcgaagagctttgtagacttcattacgaggatttcatcctggccgtcgatgaact

SEQ ID NO: 26759 - DNA, 98 bp, Oryza sativa
  Clone ID: uC-osflM202039b11b1
actccccacccatgtcggacgcctacaagaaagcgaagcccggccgcctcgtcttcaaggtcgcgaggagcacggctcgctgctggagacagatcaac

SEQ ID NO: 26760 - DNA, 492 bp, Oryza sativa
  Clone ID: uC-osflM202039c03b1
gaaaagaatgctttggtacttatcttatgaagtagcaacttaatcaggaaaaatagcatttgaatggtccttctctatatgcacaaattgcacttttatatacatggtccgttcttgtcattactgaaaggtttataaaacaccccagtgatagtgctggcagccttgatatgtccacatggacggaaaaagaaaaaaaaattgcagtggtttagaacccaaagctaaaatatcgattaggtgtagagtcagtttcagacttgtgaacttgaaatgttaaccaatcttgtaaaaagtagatgatcatttagaggttttacatatgtcttttttaacctagaaagagatactttggcatatcttttcaaattttgtgaatactaatttacagttcatcattgaaatatttattgttacaaagaactaaggtctcaattcaaagtatcaagtcattcattgcattgcaatgatacggtactttgcatatgtcat

SEQ ID NO: 26761 - DNA, 563 bp, Oryza sativa
  Clone ID: uC-osflM202039c04b1
gattatttcattgaggatgcttcatatcagtaaggagccatggtttggaaggcctttcatcaaatcattccaaagtctgctacggtaactcagaatttcatagtttgttgcgggatccacatacttgttacctccttgttacaatcccttttctggtttttaggaatactgttattgggaagctgttcttcagcgctgttgctacaccagaatctgtgaaaaatattctctgtcaggtgtatatttatttaatcctctcatcttggaaaataatcaaagcataagcagattattgggcatatacaaaaatctatggtaacacaacattcaggcttaacgtcccaaattaagtaaaagccacatgaccttgctccaatggctgcattctgtgaaaagaaaatctttaattcatcatcttaagtatagaacctgttcttttccctttatttagtttgtaacataactgtaacctttgttccacaatgttgtttctcctagttctgatggaattcatttcagtgctaccatgacacatccgcagtgacagatgagcctagtcagtt

SEQ ID NO: 26762 - DNA, 270 bp, Oryza sativa
  Clone ID: uC-osflM202039c05b1
gtctcatgagacgcactcctcacgcacgggagcaggagcgatgggttctcctcctgcccatcgcctgctcctcctcctcgcgggcgacggcgtgctccaccgctcggcggcggcggcggagggggtcatacggctgccgagggggagggcgggtgccgtttaccaagaaccacgtcaacttggaccaggcaaaggcacttatggatgcttaggttaagagggatgagacaaagcgggtccgcatggaatgtgcggttcaccctagacgca

SEQ ID NO: 26763 - DNA, 372 bp, Oryza sativa
  Clone ID: uC-osflM202039c08b1
atttctttcagcttcccatgctcctgcttcactgtccgcgttgtcgccgggcgcgtttattcatatgcctcaatcgaagcatccagcgcgtacaccgagagaggagcggggaggaggaaaggctcacattgcgccatgactctaaaggtcataatgttggcattggttgatatgataacgtgcgatgccgcgagatgcaaacccccgttatgggggatgaacgaatgaagtaccaagctgatcaataacccactcggtgccatcatcgacaatggacggaagatcaccgatgccatgatttacacgtgcgcggggacctgggatgatgtaacggggggttacaagaagatgttgaacacactgagtaagctt

SEQ ID NO: 26764 - DNA, 342 bp, Oryza sativa
  Clone ID: uC-osflM202039c09b1
tataggatggatttgtgagtgtgcgaactgaaaagggaagcactaaggatgacctgaggctgcctactgatgataacctgcttagagagatcaaggatggattcggagaagggcaggactctgtggcgacagctatgcctgccatggcatatatgctcccctgcgatggcgccgacttttctcggaagttaagctaccctgaaccatgggcacagtactcgtactaggacttttgacacctgttaccctgtgaaatcacatatctagcattgctgcatttcttaacggatcatatcttggtggaactgatcataaatattctcaagaggattgcatggtcaa

SEQ ID NO: 26765 - DNA, 526 bp, Oryza sativa
  unsure (1)..(526): unsure at all n locations
  Clone ID: uC-osflM202039c11b1
ggatcgatggcaaaagcctattctgcggcgtttgcagccgcctccaccagtgaatgatacaaacccttataatgtattcagaccaagagagaaggcacatcgacttcatacaagaaggatgcaaaggcgagaaaataatattcaatcattcgaaaaacttcgcatggtacggcgcaacttggaccaggcaaaggcacttatggatgctttggttaagagggaagagacaaaacgggaggccatggaatgcgaggtcaaccttcgacgcattcagatgaaatataagcatgaagcccagcttgttgatgaagggactgcactgtcaggttttcagcaagcttctagtatatttgcatcgagtgtagattctttcttttacataatttatttattttcttacattcatatattttacattctcttttctatttatcatactttcaatttattcactattcattcttttcttctatttttatatttcttctttatttattttatcttactctatttnatctttttttct

SEQ ID NO: 26766 - DNA, 508 bp, Oryza sativa
  Clone ID: uC-osflM202039d02b1
gttttgagtcgtttgactaatgatagcgtttatgaacgagttacaaaaaactctgtgcgtggaatatgggcacgcaggtcgaaacttgaccttgttggtgcccatataaatgtatttactggtgaatggacacagaaggatgcaggaattggcacaagcattgactcattctatgagtatcttctaaaggcgtatttattatttggagatgaagaatatttgtatatatttcaggaggcttacaaggctgccatgcattatctccatcatgatccctggtatgtggaggtaaatatgaattctggtgctactgattggccactattcaacagtctccaggcattctggccaggacttcaggtgttagctggagatgttgatcctgccattcgaacttatgctgccttcttaagtgtatggaaaaattatgtgctcaccccagaagggattaatcttgctacatccacttgtgatattggcaaaggagctacccattgtggcctgaatt

SEQ ID NO: 26767 - DNA, 93 bp, Oryza sativa
  Clone ID: uC-osflM202039d04b1
cgctgcgagcgtgagctctcccctctcctctctggcaatccaagaagccaagaaaccccaatgcatctccgcctcctcctcctcctcgtcggc

SEQ ID NO: 26768 - DNA, 485 bp, Oryza sativa
  Clone ID: uC-osflM202039d05b1
gcctaccgcttccgccgccgccgcgccgccgccagcttcctcgttgcggaacagtgtgctcgcaccgctggcgccatgagtaagttgcagagtgatgctcttagggaggcaatctcacaaattactagtgaatcccgcgagaagcagcgcaagttcgtggaaaccattgaactgcagattggactgaagaactatgaccctcaaaaggataagcgtttcagtggatctgttaagttgccttacatcccccgccctaagatgaaggtgtgcatgtttggtgatgcccagcatgttgaagaggcagagataatgggcctagactatattgaagttggaagttttttatgatgttttattatacacctgttactcttatattatttcttaatataatattttatttttcttgtatcttattttctaaattcttactatacactattattttattaatttatgttttaacctctctttcatatttacaa

SEQ ID NO: 26769 - DNA, 142 bp, Oryza sativa
  Clone ID: uC-osflM202039d07b1
gtgtgctctcctgcgcgtacgagctctccaaggacccctccgtcagcgtcgccgtcatcgagcagtcggtgtcccccggcggcggcgcgtggctcggcgggcagctgtttttcgccatggtggatggtaacctttgtttttc

SEQ ID NO: 26770 - DNA, 321 bp, Oryza sativa
  Clone ID: uC-osflM202039d08b1
cataccccagcagcagcagcagcagcagctgagcttgaagcagcagagcgaggtagacatggccgccgccaccatggccctctcgtccccggcgctggccggcaaggccgccgcgaaggtgttcggcgaggggcgcatcaccatgcgcaagtcggaggctatgcctcagtctatgaggatcttctaaaggcgtatttattatttggagaagaactatttcttattcctttttcacttttatgatttcagcctcttctcactcttatatcctttcttattctcctgctaagacgaggttaaattctttctataattctctca

SEQ ID NO: 26771 - DNA, 157 bp, Oryza sativa
  Clone ID: uC-osflM202039d09b1
gatcaaaggagcaaaagccatagccatggcggcggcggcgtcgtctgttctggcctacctgctcgtcgttgctctccttgccatcgtgcctctcgtctacttcggctgggtggcgcgctttctctgtctttgactttccttctttatcttttactct

SEQ ID NO: 26772 - DNA, 101 bp, Oryza sativa
  Clone ID: uC-osflM202039d10b1
taacaaaccaatgacaaaggatcaatgggatcatgtaaaaaattcaatgggttctgcgctcgaaagaaatcctagcgtggatgtaatgataactatattat

SEQ ID NO: 26773 - DNA, 229 bp, Oryza sativa
  Clone ID: uC-osflM202039d11b1
cgtcccattcgcagtagctgcgagctctgagcgacggctaggtgtccgacatggcgtctgggcagaaggtggtgaagccgatggaggtgactttgtaattttgacaaaaaaacaaatttatagaattttttgatggatttaaagagcatttgttctttaaaagctttttagcttggttaatgttctactttagaagtcacaagcagaattggatcacttcccattattt

SEQ ID NO: 26774 - DNA, 507 bp, Oryza sativa
  Clone ID: uC-osflM202039e07b1
gttaagtccatcttactctccaaatatggcaaaggcaaagaaaaagaagaagaaaaaaaaccccaaagcttacttttgaataattggattggacagtcataggaaagaaaaaataaatgagaacatgagcacttctgaaagatcatatggttctaaggatggctactacagtgaggaggaggactcctttctggacatgttggttgcggctttgaaggcaaagctatgtgtgagggcagcacgttgggtatcgcaacaatctggaatggaatgggtgatggagacaatggaaaacccatctcaatgccaagcaattttccgtctgatgccagatcaaatccatgctctgtttgggttacttactaatcgatacaatcttcatggatcaattgaggtatgcccaatggaagcacttggaatatttttgtacatcatggcggtgggcaattcaaatagggccactaataataggatgaatgatgaagaatttcagtcatttgctggtgc

SEQ ID NO: 26775 - DNA, 310 bp, Oryza sativa
  Clone ID: uC-osflM202039e09b1
catggcttacgccgttgtccgcaggccgatgcccgatggcgagcgagttcatcgccgtgtacgcccatccggacaccgtttgacttccacctcatgtattgctgccacaatcagggtaaggtgatcttccagatcatcaaggctgtagactcgcaatggcgtgagattgctgcagatcgcctcgtgatatctgggatcgattttgataagcatgggattaggtctgtactgctacacggccgacctccgtcgtatttgctaaaaaatttagtacaactgtttagggtgacaacatttattgagaattgtt

SEQ ID NO: 26776 - DNA, 561 bp, Oryza sativa
  unsure (1)..(561): unsure at all n locations
  Clone ID: uC-osflM202039e10b1
aataaattcgaagccatccaccaacgaagaaaaaaaaaagggagaaaaaaaaatccacgcacactttgcgtgcgaggcgaggcggttcgattcgagaggagagagagagagagagagagagagagagatggacnccttctactcgacctcgtcggcgtacggagcggcggcgagcggttggaggtacgactcgctgaagaactttcgacagatctgccgcgccgtccagtcccacctcaagctcgtttacctgacactatgtggtngccctggctgcttctgtggaggttgcatacctgttcgtctacttgtttatatagatacttgttttaattttctgtttgctttctattctattttctttttgctttgaaaactgtgaaaaaatcacttcttcatatatctatctatttcttttatgattatctttgtccttttggattgtaaaacctaattgcgaggtgaatgatggcgtgtcaaatatgatcttttctttttctttctaatattgtatggcccttgccttactatttatgagaattgaaaagaactttaggaaat

SEQ ID NO: 26777 - DNA, 351 bp, Oryza sativa
  Clone ID: uC-osflM202039e12b1
ttcataactgcgtagcaggcagatctcgtcggcatcttgttccagtttgacagttacagtacagatcgacgtgtagaataactgggagaaggaagaagacgatggcgactatgaagttgggctccaagccggaaatctttgttctggaaggcctcacatggagatgcatgacggagctggagagtgatgtcgtcgtggaagtaggagaaatgtcattttacctccacaagttcccgctgctgagcctgagcggtgtgctgcagcggatgatcagcgagtaccaagcgccgcaggaggacggcggcggctgcggattgcatgtgcacgctgcagctggacaacattccgggg

SEQ ID NO: 26778 - DNA, 372 bp, Oryza sativa
  Clone ID: uC-osflM202039f01b1
cgtttcttcgtgggggaaataatagaagattgtgctacttgtatgacaccttttcttttacacgatgccttgttcacaatggaattaatagcaagggcgagaagcatagaggtgctatcacaacgcaccctcctggctacggccagtttgcactgtacacttcttgcttgagatactcagaagatacaataagagtgccaagataagagttttggggatcatctggtacaaaatatataggacatcaatcatggggaaacataggttccaacttccaagtgcatcggcgaggtgattgctcgtaacatgttgatctcctggatttggatttggttttcgactataatctggtgtaggacatagaaggctacc

SEQ ID NO: 26779 - DNA, 419 bp, Oryza sativa
  Clone ID: uC-osflM202039f05b1
ggctagggccccctcgagaacctcgccgaccatggagccgaccccgtcaacaacaacgcctgggcctacgccaccaacttcgtccccggcaagtgagcgccgccgccgccgtgctgccatggcgacgcatcgccttcagctaagctagctaggttgacgacgatgcgcgtttctgcaggagagtgtgcgtgcgtgtacgcggtgcagtagatgtacgtacgggtaccgcatatatgcacttattcacttggtcccagttcatggttgttctcttccatgttttgtattattacttcctctttcttttcctttttttacatctttctatattttatttatcttaattcctttatttatatcttctctatttcctttcgattttttttttccttactctggcatgattttcatctttttct

SEQ ID NO: 26780 - DNA, 509 bp, Oryza sativa
  Clone ID: uC-osflM202039f06b1
attgttaccatccacctgctgcttctcctcatggtggagctggatttgggggaagctgttcacctcaagataacagttcagaggctctgaaaacagactccaactgcaaggtgaagtcaaattcagatgctgctgaaataaagcatggctccaatggtagtagcaacaacaatgacatgggctccagtactaagaatgccatcacaaaaccttcttcaaacaggggaaaagtgatatcaccatcagctgtcaaagctacccaacatacatcagcattccatcctgtgcagcgtcaaacgtcacctgctaatgttgtagggaaagacaaagttgatgaaggaattgctaatggagttaatgtgggccaccctgtagatgtacaaaatagctttatgcagcaccatcatcatgttcattactacgtccatgttatgacacagcagcagcagcagccatccattgagcgaggatcaataaatgcttaaggtggttcatccaatgtatttgat

SEQ ID NO: 26781 - DNA, 234 bp, Oryza sativa
  Clone ID: uC-osflM202039f08b1
ggtaatcatgagtacctgaccagacttattgaggggctgctttaggggtcatccggggttccctaccaattcctgctacagagtcgtccagtatgttcaagagactgtgcgacagtagaccatgttattgaccttaagaccggagatgagtcattctaagctgatgttgctaactgcattaacttagggcctgtccatacattacatgaatcttataatattgatgatagattt

SEQ ID NO: 26782 - DNA, 435 bp, Oryza sativa
  Clone ID: uC-osflM202039f09b1
gttcttcaaaagcaccagttcaaagttcttcagggactgcaagtgccagcaaccaatctaccttagcacttcctgctccagcatcatccagtagtccaaaagctcctgcagcaccagtaccggttatcgaccttcttagtggagatgattacatcaaacctgaacctgcaaactcccttgcacttgttcctgtcacagaatattcagcagctgatcagaatgtgctagctcttgcagacatgtttgagcaaaataatgccaacagaagcaacaataaccttactaactcttttaatacatcggcaccaaattcaaatttccctgcatcacaagcatatcctgctccagtgcaacctgctctgcctcagcatcctgttgcttattcaaatggggtttcatccaatgccatcgtaccttactatgatgatcaaaatg

SEQ ID NO: 26783 - DNA, 296 bp, Oryza sativa
  Clone ID: uC-osflM202039f10b1
cttcccccgagatagagagagagagagagagagagatccacagcctcacagcatcaaatcacctcccctttctcccagatccaagccgccgccaccaccccctcgccgtcgccgtcgccccctccggccgatctgatgcccgcgcacgcggcggtggtggtcagcgccgatgcggtggaagcttaagtcgtcggcgtacaagcgcgtgccgtccagggacgccgccatggatctcgacgtcgagacgccagcgtaaatggcggacggcggggccccgtcgtgccgcatgttgctgt

SEQ ID NO: 26784 - DNA, 426 bp, Oryza sativa
  Clone ID: uC-osflM202039f11b1
tttataatgaacgaagaacttccttctgtatctgaggcatcagataaacagcaagaggagcaagtcctagttaatttaatgtcatcagctaaattgcatgacttcaacgggcaagttcaattgccaatagaaatgccgcctcatttttcggtggcaccctcccctttacttgcaccagcagcttttcccccaaaacattttgctggaattccaccaactagcttaattggggctccatggtccaatatgcatttgatccatggatatgtttcaccacccatggcccattatgtccaaaaccatactttcgcaccaaacatcgaagaaggtaacgagagtgagaaacctattacaccagatgcgagtcgtgatgatggcaacaattggcatgagtatggtgttgggatttcctagatattttaatca

SEQ ID NO: 26785 - DNA, 475 bp, Oryza sativa
  Clone ID: uC-osflM202039g01b1
aactgccgccgcatcgccctcgttagaacgatggccgcgtcggcgctgcaccagaccaccagcttcctcggcaccgcccctcgccgggatgagctcgtccgccgcgtcggcgactccggtggccgcatcaccatgcgccgcaccgtcaagagcgcgccccagagcatctggtatggacctgaccgtcccaagtacctgggcccgttctcggagcagacgccatcgtacctgaccggagagttcccgggagactacgggtgggacacggcggggctatcggccgacccggagacgttcgcgaggaacagggagctggaggtgatccactcgcggtgggcgatgctgggggcgctgggctgcgtcttcccggagatcctgtccaagaacggtgtgaaggtcggtgaggcggtgtggtataaggtcggtgcgcctattttttccttggtggggccttaatcaccggggacccctcaac

SEQ ID NO: 26786 - DNA, 152 bp, Oryza sativa
  Clone ID: uC-osflM202039g05b1
ccatgctgtgatagaatcaggagtgctcccaaggcttgtggaacttctcatgcatccttcggcttcagtgctcattccagctttgcgcacggtgggtaacatcgtcactggggatgacacgcatactcagagtgtcatttattatcctcgct

SEQ ID NO: 26787 - DNA, 184 bp, Oryza sativa
  Clone ID: uC-osflM202039g08b1
ccggacccgaattacccgtaccaacccacccccccgaataaaacacaacccaaacacatacggagaaggggaacattgaaaaaaacccgccggatcaaccccccacaccacccacaacgaccaagacaccaaccgacacatcaccaccaacaccacccgcaaacaacaccaacaagagaacgca

SEQ ID NO: 26788 - DNA, 202 bp, Oryza sativa
  Clone ID: uC-osflM202039g10b1
ccctcgcgtccgtcgcaattcatgtatagcccttgcaaatgtaattgttcctgaccatgctacttcacttcagtctatagcagaagccgtctcgatgatgaaatcatgtctgatttttcgtttggtttgtactctgtctttaacttattcttttacatatattttttcgtttttactctatttttttacgttttttcttttt

SEQ ID NO: 26789 - DNA, 375 bp, Oryza sativa
  Clone ID: uC-osflM202039h01b1
cgtacaccagtgaggttgtttgcgaggtggccgagggggatataaccaaagtggagtaccagttccaggataagcttggaaattttgttgaggggaatacccaaattcctatcatagacagggagctcccacagcagcttcgacctggccatatttttaacattggttcatgtaagcaagctctgtagaatataaattcacttgctttatttctccaatatagaagtgtattccttccttcatcattctcttcattttttcttcttattctctcttatattatacactttctatctcttatttctcttttctttttctatctattatatttaattcttttatctaaatttcttcttctcactttcattatttctt

SEQ ID NO: 26790 - DNA, 156 bp, Oryza sativa
  Clone ID: uC-osflM202039h02b1
gagtacccaaaaacgcctagcgccgccgacgcgcgcacgatggaagaagcgtggccgcctctcgcccccgccccggaagctgcggctcctcccggaggaggaggaggctcccgaactttatccgcgaggggctcatcaccatgggcaagacgatta

SEQ ID NO: 26791 - DNA, 145 bp, Oryza sativa
  Clone ID: uC-osflM202039h08b1
cggtgagtggggagctcgtcggggcgaggtgggagaggacatccggcggaccggcgatgtgaccaccacagcagttatagatacgactgtgaaaaaggtaaagctacacaatctaaccgacagtgtaaccaagatttcaagtatt

SEQ ID NO: 26792 - DNA, 369 bp, Oryza sativa
  Clone ID: uC-osflM202039h09b1
gaatgattgcatcttcactcaatacgttcgtatacagtactttcattcagaatggtggaagcagcagcaaaccacttatagatgtgactgtgagatgtcttaatctactgtatgaaagggacagcagacacaagttttgtcctatttctctgtggctggcacctgctaggaatggccgaattccaatcgcagcggctgccagagcccatgatgcagcatttgctacattgccaggaaatcagttttttggaattcctatccggagctctgtacttactacaataccacatgtatatccatttgaggaaagagtgcagatgtttagagaatttattgagttggacaaagcatcccgaagagttactggag

SEQ ID NO: 26793 - DNA, 53 bp, Oryza sativa
  Clone ID: uC-osflM202039h10b1
ggttaccacaccactcctcccgccatggccgaggtggcccttaaaaaccaaaa

SEQ ID NO: 26794 - DNA, 374 bp, Oryza sativa
  Clone ID: uC-osflM202056a02a1
gagaactgcaataatgtggattcatttgatcacagctaccagcatatcaaaatcgcgagccaaagccatgtcaaagatcgattgagttgttctccaggaaggatcaatagagcacaattcaggaaggatcttcctcaaaaaatcaggaaggatcaatgttaatgttccttctcctcacagggaaacagaagatctcctattcttcatcgatcctagttactatgagcttcatcagctcaagactgtttcttcttggaaccacctgagcaggagtggaaccagctcgctctcgctgccccttgactagatacacttatgctactgacctcctccttctcgttcttcttgttgttgcgacagccgttgcagatttg

SEQ ID NO: 26795 - DNA, 437 bp, Oryza sativa
  Clone ID: uC-osflM202056a03a1
agtaataattaagctttgttacttccaatttaactcaaattgatcttttacaagtactttttttttcgccgggccttttacaacacgtacacaaatttgtcggtacgtcgtgtcatcctcctccagacgagtgagtgctagctcaggcttcttcttcacagagagtgacgcatttgcttcgcagtgatatgtacacaagaaggtcgttcatgcagacttagcccacacgtgtgcatttaccaaatctttagcgagatccttccaggttcccttgcttcatgcactgggcgtatatcttgtccgagcctgaagattatttctgaaaatgttgggccttgctataccctgagtatcccagcattcttcgatcagcgctttgaaaaactggaggaatattccctgagcttgttcttcagcgatggacgcattccatcata

SEQ ID NO: 26796 - DNA, 162 bp, Oryza sativa
  Clone ID: uC-osflM202056a04a1
gggtggttaagattttttagggggtttacctttttttttcaacaatggacagtacggtaggggcgtgcgcgcccgcggggccacggacccgagctgatcgaaaaaaaaagcgccaaggaaggggcgccccccccgccagaggggggacccgggggggagggg

SEQ ID NO: 26797 - DNA, 186 bp, Oryza sativa
  Clone ID: uC-osflM202056a05a1
aactataacgcgggctcttgctatcatataggtagagggcccgggacaaaaataaccccggccaaaaaaagggaacggccacacccaagcgccacaaaataccagggcacaacaacagggcagcacatcccaccgaaggccagaagggaagcacacgcgcccaaagaaccaaccccccggcagagg

SEQ ID NO: 26798 - DNA, 407 bp, Oryza sativa
  Clone ID: uC-osflM202056a06a1
aaaggcaagaatattattcataaatgacgcatgatttttatcaaaacgcttgcaaatgatatcagataagtagagtcaacaagacaaaactgtatctgccaaagcacaccttcccaactccacccaattacgccattatttctgggcaaaagcaaacggcttcccattcctccccttcaccagtctcaaaccataaaccccacaacaaatcctcctaagtgacggcatataagatgatgaaaacaaagcaggatactccagagtcgtcatggcgaacttcaagttgacacttctcatgccacagccgctagtcgtgctgggcagcctagtaccggtagtgcgcgggcttgtagggaccctcaactggaacgctgatgtagtcagcctgcgactggagagcttggtca

SEQ ID NO: 26799 - DNA, 494 bp, Oryza sativa
  unsure (1)..(494): unsure at all n locations
  Clone ID: uC-osflM202056a08a1
aataattagtgttctcatttattattgccccaagccatcatataaaagggacttcagaaaggtagatcaacagctcataataattcacagtgtatgtctattttcaaaaccatttacaacgaaaaggccggtctaatggcgtcccttccccccaacctacgcccagccgacctctccaatctcctttgctttcttccttccattggaccattcacggtacaggggaagtataatcaagagttctccaatagattgtaactggtactaattaagcagcagtggcaactggagtgtcaggatgggctccccattcagtccatgatccatcatatacaggaacgtcggttttgccaaggcggtggaggcccagagctaatatacatgctgncacaccagtacccatgaggacaccaggggttgatcaagcgataaccttcttgtcaaatcgttacggagctcttctggaggaatagcttttgcgaactgcaagcaac

SEQ ID NO: 26800 - DNA, 433 bp, Oryza sativa
  Clone ID: uC-osflM202056a09a1
aacaaaattctcattcacattcatgattgatcgatcataatgtttcaaaaaaacaacagttgtgcatgccatacactgcaacagggtaaacaaacataaacctgaaacagatcaagaaatctgcctacaaaaacatcatactctcgagtcagccaaaactccactctgtgggggcatgcaaaaccggatgcctatatcctctttttttgatccataagtcacaccatcagtaacagcagctgctgtgatgtatggtatggttggtatccaccgcctatgtgccactaaacctgtgcctaaacaagaagaaaattatccagtcgccccatcaccaccgggtgtatctactctcactttccagtaaacacaacactaactacagctccacctggcgaatcgccacgtcttaaaccaagagggcccctgctaggga

SEQ ID NO: 26801 - DNA, 331 bp, Oryza sativa
  Clone ID: uC-osflM202056a10a1
acgaatgaattacaaactggtcccagattgatttaaggctaaaagagaagagtcgaagatgttcaaagaaatttcacaggtccctaacaagccttattataagggcaaagggaactgttttatttatcgaacaaacagatgtggggggggatgatacttttcagaaaaaaaaaactaatgggcggaaatctgaaaaacaattatgatgttgggaacactgaacttaggctcatggttcaggtagacacttttcacaatctttttttattgactgaaaaaggatagatcaaagggacctctcaccaaagcttgtgaactcaacccctaccaa

SEQ ID NO: 26802 - DNA, 473 bp, Oryza sativa
  Clone ID: uC-osflM202056a11a1
gaacatgatatgataatatcagagtctgtcctgcagaatccccacaacagatcgcccaaaacgaactattttttctgtttacatactactaactaatataaccccggttctcaatcaactccggttctcaatcaactccaagttagtacattccaacatcaacatcacatcacatctcaccgaagcaagggagggatgctcctgagaacaattaacaatcacacgtaaagggccaaacggccctgcacagacaaaatccattacatcctactactactctccgccgtcaaagacggcgaacggcagccatagcttttgacctgctaatctctgaacatgttagacacgacggggtcgagatgacatcgggcatcacaccagtcactggcatcaggttttgatccagatactccattcatctacctgctggaatcacccaacaaaagatagcctgcattttagcgatcttgggg

SEQ ID NO: 26803 - DNA, 442 bp, Oryza sativa
  Clone ID: uC-osflM202056a12a1
gatcaccaacagctcacctttctgctattattttcctttgcttttgataaacaatgtgtaacaatttacaggtttatggctacaaattaatggaatacaaccccaccccaccagacctgaccaacctagcatttcctatatctacatgacagtataaaaattatcttgttttacccaccaaaaaattataactcagtaaaccgaccatcaggttagcctaaactcacaccatgtcagccctaagcgacacccctctgcaccacccttatttacctgtgtgctatgctacacttcaagcctgactcttgtcttgattggctttagttttactcccatgctttcgggtgacaggagatcgggtgatatacagaatgggctgagggggctgcgcgggctacagtccaatggttggtctgtacaggccatacccatgaagagtact

SEQ ID NO: 26804 - DNA, 312 bp, Oryza sativa
  Clone ID: uC-osflM202056b01a1
aaccaaaaccaaagccccccctggaaagaaaaaaaaaaagggggccggggaaaaaaaaaaaaaaagacccaaaaaaaaaaaatccccccttggggggaaaaattccccgaactgggaaaaaaacaaacggggggaaaaaaggggaaaaaaaaaccccaaacccaaatggatatttttggggaaaaaaaaaaaactattccaaaaacccctgggaaaattttttgggggggaaggaaggggctccccaaaaaaaaaaaacccggggggggaacaaaaaatggcaggggaaaagaaccccaaaagggctttttg

SEQ ID NO: 26805 - DNA, 471 bp, Oryza sativa
  Clone ID: uC-osflM202056b02a1
aacatactcaaactgtttttattacaatgttagccgatgacaatggaaagagtaatttaggtacaagcggatcattgacgggggagacaagacattggctgcaccacaacacccaccagtggcgccaacaaggagcgctatccgttataggacgagagaaaaagtaaaacatcacgatgggaagggaaactgaataattctagtagacgatgatgatgatgatggataggctccttaggacgcccgccgcccttagcgtcttgctgctcccatcttggccactggaaggctcactcgtcatcgtcttgatcctcttcgctgccctcgtcggcatcctcatcattgacctcggacttggacttgacagattcctcctcgaagacctcctctttctccttggcgggtgccttcttggcagggctctcgcccttgttgtaggcagcaatggccttgttggactcggccctgagc

SEQ ID NO: 26806 - DNA, 437 bp, Oryza sativa
  Clone ID: uC-osflM202056b03a1
gttccaagtatgaagtaacttttttgtatggctttacatcattattaaaaggttcaagtatccttaaatggaagacgaatgaaaatgaaagatagctcaagtatccttataaggaagacaaataaaagcgaaagacaagtatatatcctagagtacgagtctacgcctttggcatccagccatttatagtaagacttggcagaaacaatctggattttgaagctttcacctaacattaagaattattttgtctttctcaagcgctgctttcatttgttgtcaaccttcatttcatgactgtcatcttggggattatgtactgcggttgaaggcctctaccggaggtgcagttcctcctgaggcttttgactttgagtcattaagctcctttggaaatgtctttttctgtgtccagctgcacagcttgttctgtgctt

SEQ ID NO: 26807 - DNA, 332 bp, Oryza sativa
  Clone ID: uC-osflM202056b04a1
aaacccatagatattttaattattttaccaaaaagatacaacagtgcacagcacggcaggtacgtacacgaccgattattaactgaacttatgtgtctgaaaaaaaatgcaattcaaagttgagtactatagctagctaggcatcgtttgcttcacgacgacgacgaggaggaggaggctgtaatggctacggcggcgcggacggcggcgccggcgcgcttgtagttgtcgatgtagtaggcagggttgggcagcttgaaggttccggagggccttcggcgagcccagcagggcggtccactggtctccgatgttgccgatgatcaccattc

SEQ ID NO: 26808 - DNA, 380 bp, Oryza sativa
  Clone ID: uC-osflM202056b05a1
aacattaccatatattcattcctatcaaaggcctcgctttaccttacaacaaggtacaaaggacgggggctaaatccaagttcacatggctggggcatcaattatcataatttacaaacaacactctgaccccacttatttctatgcttttcaggagattaactagcgacacaccctcgagcttaattgtgtttaacgcatgcatgcatggattaaaagatcacaaggacggaacacaaaacccatgtataacagcaaacaccacattacacagtatcacatggtcttttctgagttgaacctagcatttgagctcagggcccaagtgcatccatcatatccacaggtgattgcttccatgcttctttacctttgtggaa

SEQ ID NO: 26809 - DNA, 432 bp, Oryza sativa
  Clone ID: uC-osflM202056b07a1
aaacaaatgaatgattttttttttttggatttgaagggaaaatatgtaactgcagttccgtcgacctcccagataaccaaaaatgggaggataatttacactcagatgagactaaaatttctatcatttcaatgagcaattgagtggggggagtaagaacaaatttgatctacactgaaagatttctacaaaagggacaagctaccgggcctgccacgaacaaccactgatgtagagatctcaaaggacccctggtttgattatgtacaacgctggtccatgtccaattcagggggggccccaagcatgggatggcttggaccaagtaaccacacgctgggccagaataactgggtgcccgggtgcttttcttgaggccatgtgaggggccaatgctgcgtttacttccatccaatgctcaaactattcact

SEQ ID NO: 26810 - DNA, 461 bp, Oryza sativa
  unsure (1)..(461): unsure at all n locations
  Clone ID: uC-osflM202056b08a1
acgaaaacattcctgatactttttccactactaaattatgggagcttatacaaagtcaagtaaggctacaaagagagagaatccttaggcaaagaaagatattagcacatatgcttgctaagggtggaaggcggaggggaatgataaattacatatcnggatgtcatctgacatggaaaaaaagggagggaaaactttttttccgggtaaggagtaacaccgtaccataaaggattgggggcagatgcaaggtcaaggcctctaatccttttaactcctatctttcaaggaagacaaactgaaagcaggcaagcaaatatgccattagttgccacaattacacaaagcatttaaacgaaacagttacaacattacatttgaccagggctcaaatgctttgctgtcgcgaaagattcctttttccatgacagcattattgcaaagaccaaatgctttgacac

SEQ ID NO: 26811 - DNA, 421 bp, Oryza sativa
  Clone ID: uC-osflM202056b09a1
gcaacgaaaaggcaatatatataatctatcaacaaagatacccgacaattttccaacagcaaagcagcaaggcaaatcactgacaatacaaataaacacgaagtcccaagattacatgaattctgacagaagggcagttcaacgacatcaactacaatagcacggaagacagaaagcccggtactccacgctttacgagctccttatttatatatagcacacgggggagggccataacaacaaatccaagcatcacaagaacatctggggaaatgggaaaacactagtttttcccgtccgtcacagcacaaacttttggaaacagatcaaaactgcgagccaccaattttttgaagagaatctcactcccatgtcatcatggtagaagggcgccattctttgagttacctgcattcgcatg

SEQ ID NO: 26812 - DNA, 447 bp, Oryza sativa
  Clone ID: uC-osflM202056b10a1
agaaaacgtcaggtccaattgctcttaattcataaatgggtcactagtctacaacatgaataacgtgtgttatacacactgcagataaaacatgtacagtttgcttaaccaaccattcaaaccagagaggcctagaaaccctcagctgcaattgctcttgattcctaaatgggttactagtctacaacatgaataacgtgtaatatccacgctacacagaggcgctcctttttcacatagccggtgaatgatctgtgaagagggaaccactcaatctctcctgtgcaatataaacgcaaagctttggttttcacggacaaaaggtagcaggtcattctctgtcgtctcctcaatggttggcatcgacttcgcaatgtctttaagtgaaaaaggtatgctggaatcgtcatccaacaggacagaaaagctggtggcattatttgattc

SEQ ID NO: 26813 - DNA, 446 bp, Oryza sativa
  Clone ID: uC-osflM202056b11a1
acaactctaaacttgatgatgtctttaatcatatataaacacactgtccaatctcattgaccactatcattacaaaatgatcaccacaaacccaataaacaaaagaaaatgaaaaactctagaatcacacctctaattaagtttcttcttttttgtttcaattttttccctgggaactgcagcgataaatatatagatataaaaataaatagcccttcttattttttgcaccaacgagggacacgaattggacaaaagaagaagagggagaggagctgaagaactcaacacaaaatgcactaagctcaaaccaccacctcaagctgccaacgccaacgccgtggagaccgtggcggcggcggtaacccacctggcgagcacggaccgggcggcggcggccttgtccgcgacgtcgtccggggggtgccgtcgggcgagtcggcggg

SEQ ID NO: 26814 - DNA, 193 bp, Oryza sativa
  Clone ID: uC-osflM202056b12a1
gagaaaaacaaccttgaaccttattgaacatcttggcctctgctcatgaacactagagagttacagtttacagggaaatggctccaaaattaaggaatacaacgccggtcaactacacgtgcggaacctagcgtactctaagtcgacatgacagtacaaaaactaacttgcactaccgaccaaaaaatgataa

SEQ ID NO: 26815 - DNA, 419 bp, Oryza sativa
  Clone ID: uC-osflM202056c01a1
gacatcaccagcttcatcgctggattgatcgtcttgcatacattgaatgattgattgctatactagtacatatacatacacgaagaacatagtatatattgtagctgctgccgtacccatctgctacctgttggagaagatggcctcaagatccttgtagagtcccttggacttggagctccactgcgaatgcgagttctcgggttcccttcgccttggagttccgacgacgacgccaccgacgacatgctccggctcccaccctttgctctgctccccgacgcctccgcctcccctccctgtccctccttgctgaagctcgcctttggccatttccctcagcttgccccagccacgaccctttcgtgccaccaccaccaccaaccaattgccactgcctccggctgctcctgctgctt

SEQ ID NO: 26816 - DNA, 493 bp, Oryza sativa
  unsure (1)..(493): unsure at all n locations
  Clone ID: uC-osflM202056c02a1
gaaaattaatatagattatcttattcaattccagagcctacaagtaaaatcaacataacatataataatccaaacttgttccccgtaaaagttactcgtaatttagcacatcaagtaacaaacaaaatttgaacaggtacatccctgtgacggtatgacggtcaggctcattagccctggactttcctcacttgaatgtggtgagtagactcctctctccagatcgacttcactccactctgaacaagggtcacgtagtccccttctttcacgaattgggcgttcagcaagctactaattgctctagagaaagtttcctctgcatcatcagaaaacttcatgtaaatgggaaccacaccctggtagagtgccagacgttgcttcactcgttcctcatttgtaaatgcaaaaattgtanaccagggccnntagtggctgagaaggactgccatggagccggttcgtgtaaacacaataattggggtgcaagggt

SEQ ID NO: 26817 - DNA, 496 bp, Oryza sativa
  unsure (1)..(496): unsure at all n locations
  Clone ID: uC-osflM202056c03a1
ggctcaaagtcatataaaccttttctattcatgcaggcagaaatttctgactcattttctacaccttctacacattttatcgccgtaaaatgtttactattgcatggtacaatcaatacacatcttcctatcatatacatgaacaacttcttcagtttttacatgtctatgnactcctcgatgggcatcttgatgcccttgatctcgcgtgccagaagatcgcaacttcttcgacctcgtcgccggtgaggcttccagccgagcgcgccggcgaactcctgcgcctggccggcgttcttggctccggggattggcaccacattgccttggcatgtcagccagttcagtgaaacctgggttgggtttcttcccatagctttcttccaatctccttgatcctgttcatgagtggttgaagcttggtgaggaactcaggggtatatgggtttgctcgaggaccggtaggaggtttttctggagtgtattttcctgacag

SEQ ID NO: 26818 - DNA, 324 bp, Oryza sativa
  Clone ID: uC-osflM202056c04a1
cggccccccaaaggggggttttttaaagaacaagtaaacggccacccaaaaccccagggggggaacaaccaaaacaggaggggcagacccaaaacccaaaatttttccccccccaaaaccctaaaatttggggggggaaaaaaaaggggaaaagcttggggggttttaaaacccaaaacggggggaaaaaaagggggtttttgacccccaaatttccaaccccccaagaaagaaacctggcgggggggaaaacccaaatttttagaaaaaaaaatctggggccgggggccttaaaagggggggataacccccaaaaatcccccc

SEQ ID NO: 26819 - DNA, 368 bp, Oryza sativa
  Clone ID: uC-osflM202056c05a1
agaagataaccagggcttaattaacataatgatatgggtcaaggattacaagttgagcacaagccacttcacaggtgaagataactaggagcaaacacccttcctttctttacaaaaagaaagctctaaaacctggaagggaaggtgaagaaaagtagaaaacatacaccaaagggggggagggggggtcacctatactaggccggacattatactcaggcagctaacacccagtgcacactataaaccaagccaattctttgatctgggacagttaacaactgaccctgcacaagaggctctctatgtgatgcaccattaggcgcatggcaccttccatggcgagaaactatggcaggaactggggc

SEQ ID NO: 26820 - DNA, 129 bp, Oryza sativa
  Clone ID: uC-osflM202056c06a1
gggggacaattggaacactccgggtgataaatgaagcttgtcagttctccagtccacttaaatgcactcaatcaacgactgaaatcacattagttctgtcccactactaggctcacagttcaaacccta

SEQ ID NO: 26821 - DNA, 383 bp, Oryza sativa
  Clone ID: uC-osflM202056c07a1
acttcgcaacattcatccattggtagcctgagacagttagtagtacgatctaagcctcggtaccttctaattaagcaacactagacgatagatagcataatagcatccctaagcaaacattgactataggcatcagtgatcagtggagttggccgttgacgtagtggcggtgggggtcatcggcgcggacacggtcatggagtcgcgggcgaggtcgtcgacgcggcgggggcgggggcggtcgatggggcgagggcggcgccgatcgtcgcaggggcgggcggcggcggggcgtcgtcggcggctggcgtgtcggtgggcatttttgccttgaccttggcgaagatcttagccatcgcagccttcctcttctcggaaaaaca

SEQ ID NO: 26822 - DNA, 319 bp, Oryza sativa
  Clone ID: uC-osflM202056c08a1
aatgtaagcctgtggttttattgcatgatttgtcgggtaaaaaaaaattactaattgtacatcacttgacaggcctttttcactgaaagctgaaaacccctaaaccccgaagaaattaacagtttgaaacgaatgggtaaataataaactcagacgaggccgacgagctttctcgctgaggtccccaggagactttcctggcccttctccgggttcgccttggccttcctcgcgagagcttgggttctcgaaacggaccgccgaggtcctttgtttccagcttccagttacaacgccggaccttgggtcaggcctcggg

SEQ ID NO: 26823 - DNA, 473 bp, Oryza sativa
  Clone ID: uC-osflM202056c09a1
ggccatatgaagcagtaacttgactaaaactgttcgacaacattcaagacaaacaaaaaaacaaataaaattcagtcctattagaacggaaaatcaaatgtagagaaacaaaaaataatgaccaaaactatgagacaacactccaactaatctttgagcaacaattaagtatggtacaaaacaggcgttagttaaaagttaacaaaatctagtgaggcatcataacactgtagtccgtaatcacttggaagcccatatacaaaaaaaatgcctctgcttcttgtctaagcacatgagggcgttggctttaaggtcctggagaacagcactgacaaatagagaactcattcccttttttggggtttctgaatcttgacataaggcaagaacccgaaaaggggggtaattttgggctcccacccaccctgttgagctcggcaaaacattaaaaatgtgtttgcaaagtatgagtt

SEQ ID NO: 26824 - DNA, 495 bp, Oryza sativa
  Clone ID: uC-osflM202056c10a1
acgtaacaatacgctatgcccaagacaagtcaatactacaacatctgtggcgagtacagaggtacaaaagtcaggcaccgtaagcctttcgattaaaaaccaaactgaaacacgcacgattttttaacaccccacgaaaaacaatctgatagctagctcctttggtggtggaacctaaagagctttatcttcccaaaacatccacatcattatctgtcatgactatatagtttcgatacgtaaaaaggcagcgttcactcagggatatccgccatgtcttcctttcatttaagcccggccaagatgcttcaagccttgttggcaatgctgttggaaagccagtcaagcccctcatacaaccccttaccagaggtagcacatgtgctctggatgtaccagtgccgctggcgcaaggagtgcagaccaagcttgtcggtgatctcagcagcgttcatggcattaggaagatcttgtttgttgaaacaccagcagcac

SEQ ID NO: 26825 - DNA, 416 bp, Oryza sativa
  Clone ID: uC-osflM202056c11a1
agcaaatcgatccatgcgaccatgcgtgcaaatcagttggagcacaaatttacatgttacacccacaccctacacccatgcataataatacatcgtatatacgtacgtacatacatacccctctcgatcacacgcaccatcgatcgtacaaagttgcgtacatacatacgtacacacatatacgcatacgcacgtacatacatacataattaaaaactcgtaattaattaaatacgtagttgatggcatctctaatggaacttgaggctggtgaggatgttgttgtggacgggatcagcgaggtgatcaagcaggttctgcacggggccaaccccggtgaagagcgcctggacggagaagccgaggaaggcgagcatggcgagcctgccattcttgatctccttgagcttgagctc

SEQ ID NO: 26826 - DNA, 491 bp, Oryza sativa
  Clone ID: uC-osflM202056c12a1
accgccacctccggtgccatgaacaagtacccgctcctccgccgacgccgcaggctgttcgtcatagccgtggactgctacggcgacgatggcagcgccagcaagaggatgctgcaggtgatccaggaggtgttcagggctgtccggtcggactcccagatgtccaggatctccgggttcgcgctgtcgacggcgatgccgctgccggagacgctcaagcttctgcagctgggcaagatcccaccgaccgacttcgacgcgctcatctgcggcagcggcagcgaggtgtactaccccagcacggcgcagtgtgtggacgccggggggaggctgcgccccgaccaggactacctgctgcacatcaaccaccggtggtctcacgacggcgccaagcagaccattgccaagctcgcgcacgacggatccggcccaatgtcgaaccggacgtggagtcctgcaaccccactgtgcttcttcttcatcaagacccc

SEQ ID NO: 26827 - DNA, 421 bp, Oryza sativa
  Clone ID: uC-osflM202056d01a1
aaaaggccgatgacaaagtaatcccactacacgggttttttatgaaaacattaacaagggcgcacatattcggacttattctctgaatgcatcacaaaaacggattcagggctacgtaggggtcccggatcgtacccaaccgcgcgcgggggcgatgggagaacatcacgaaataaacccgcaaaaaacatcacgatcgaaacagacaacacacacgcccaaatggcatatcacaacagggggtaatttggctttttgatcgatcgatcgatcgagcttaaatttccatgaccgttttgagcagctggtccatggcctcgggggcggcgtaggatttgggggagttgggcttgagcctccacttcttgaaagggtggaagaggatttcccccccccaagggaacggcttcctcgggctggg

SEQ ID NO: 26828 - DNA, 485 bp, Oryza sativa
  Clone ID: uC-osflM202056d02a1
acaagaaacatcatcacattttactatgttctcctcccctatctttctggaatcaacttttactactacaatcttacagtcagggcggcaaaaatggtaaaaaaaaaaaacagagctgcaaagtgacagggagcacactcaggtcactcactcacaccgagtcacacaaacggggggggctctacctgtttcagaagtagtactacacaacaacagcacacggcagaaaaacgtgtttatatagaacaaacaacaaaagggggcacgcttccaaggacagacttgtaaaaaagacaagtctttcaaccgcatctttttctatcaacatgaccaacagcaacattgcgtgtttcgagtttcaaggttcgctaccggatgatgcgctgggtgtcgccgtagatgtttgcggcttccctctgcccatggcgaacccgcgtgttccgtcaggcatgcgtggccctggaggctgcttggttgctcctgct

SEQ ID NO: 26829 - DNA, 515 bp, Oryza sativa
  Clone ID: uC-osflM202056d03a1
gtagcatgctcaccccccataagatttattgcaataccatgttctgagtacaatacacataaactacaaaactctatatgaatcttaactgctccttgcacataaaaagcaatatggtcggaaaaaaataatgctaggtaaatttaacaaacagaaaacaaaagaatgtcaattaagaaataaaaagtgagtagatcaacccatacctcatcaatggattgtgtcctgcggttacgatgtagaaacaagtttgacctgagaagtgcaaagtttggttctccagaagctttcgagtttgatccatcgccattagcttcatcagcagaagcatctgaaagcccaagctctgcattgatctcatcatctgtcttctcttgtggtatagagcaattggcaaatgtcttatcttcgttttccttacaagtccatctgagattttcttttgagattttatctgccagttcagttggtatgcagcgccatttttcgcaatcatcacaacaaacccaagcagg

SEQ ID NO: 26830 - DNA, 490 bp, Oryza sativa
  unsure (1)..(490): unsure at all n locations
  Clone ID: uC-osflM202056d04a1
atctcccgctccatccgccacgcgctcgaccagccgctcaactacgcgcgcatctacctcgccgacacgctcccgcccgacgtgcgccgcgtcatctacctcgactccgacgtggtggtcgtcgacgacatccgcgcgctggcgtccgtcgacctcggcggccacgtcgtcggcgcgcccgagtactgccacgccaacttcaccaactacttcaccgacgcgttctggtcggacccggcgctcaacggcacgttcgccggccgccgcccgtgctacttcaacaccggcgtcatggtcatggacgtcggcaagtggcgcgccggcggctacacccgccgcgtcgagcggtggatggaggtgcagaagcagacgcggatctaccacctnggctcgctgccgccggtcctcctcgttctcgccggtgacatccaggccgtcgaccaccgctggaaccagcacggccccggcggcgacaacgtcaaggggcggg

SEQ ID NO: 26831 - DNA, 399 bp, Oryza sativa
  Clone ID: uC-osflM202056d05a1
agagcaaaaggcaaaatatggaattgcatacgagctttgaaaacgcgtatggttgttacaactttatatatatacccacactgccctgcagcaacgggggaaggaacccctagtaattaactattcgacactaacaacaacaaagattaacacaaaacatcaatcaatcaaatggaacaaattagtgaactcagtacaaaatgataaaccgtaaaaggccctcttcttccacgttaaaagacctacacaacaaacgcaggtcggggtcgtgataattaacaaatttagacactgtcaagaaaataaaacacaaaattagtcaaatgaaatttctgtaaaagaaggaaaaaccaaacccagggtcctccccaaaaccgtggacatcctgaacgaatgacg

SEQ ID NO: 26832 - DNA, 92 bp, Oryza sativa
  Clone ID: uC-osflM202056d06a1
gaccaaacatttataatgttttaagtgcttcaaacaaccgttagttccagacacattgaagatgattgctcgacacattactaaaccgagtt

SEQ ID NO: 26833 - DNA, 512 bp, Oryza sativa
  Clone ID: uC-osflM202056d07a1
aacatcaccatatatccattcctatcaaaggccttgcttcaccttacaacagggtacaaagtacgccgactaattccaagttccatcgactgggtcattaattatcatcatctacaaacaataatctgcccccacttatttttttgcttttcagcagattaattagcgacacaacctcgcgcttaattttgcttcgcgcatgcatgcatggattaaaagattacaagtacagaacacaaaacccagctataacaacaaaaaacacattacaaagtatcacattgttttttctcagctgaacctagtatttcagttcagtccccatctgcatccatcatatccacagctgcttccttccattcttctttacctttgtggaagaaaccagctgaaatagtagtagtagtagtaaaaccttcaatcttgtactgctgctacgtgatttcgattgctgctacttacttacttcttcttctccatttgaggcttgttcatcagtagctcatgacgat

SEQ ID NO: 26834 - DNA, 337 bp, Oryza sativa
  Clone ID: uC-osflM202056d08a1
agtcaaatgtaaatattaccaaaaccagtccccaattgaatcaggctcaacttgatgaatcatctaaggagtgatccaacaaaacaaacgtaaatggaaaagcagtgcttattaccaggcctaaaataccactcacgctccaatgcaggcatcccctctcccttcattattccaagcttttgggcacaagacccttcatggccttcatgtatactgtttccttggcaatcaacgatgaccaaaaacttcaaaacgcgcggtttttgaattcttacaggcttctttgctgtttgcgattgacgtttctccgcggtggatgcccatacctcctgggtag

SEQ ID NO: 26835 - DNA, 503 bp, Oryza sativa
  Clone ID: uC-osflM202056d09a1
aacagcactaaatcaacattttatttcgtctctcagacagtaccatgctgatgatgcgcacgaccaacacacaacacatgcttacatattcacaaaatgtatgtaggtaatgcacttgaaggtttgagatgctacaaacaaatgaaatcatttagtccattgaagagtggcttgtcaacatacttacaccaaactgactggatacagctgaacaactagatcagttattctgggtttctaagcgaacttcttgtcgaggtgacggtctatgatttcagatacggtttctaagaagattacttcacttgaccctgggagaacatggccctcggcttcctggacgatgtcctcaatctcagagtctctattcacagtttccctgcacagtatacgcccgatgtcatacggtgtgaggcctcgtgctgcacctttttttaaaagcatggtgctgatgcacaggacacgagcacatcttgcagacagctcccacccatggaacttga

SEQ ID NO: 26836 - DNA, 216 bp, Oryza sativa
  Clone ID: uC-osflM202056d10a1
gaaccgaactccaataggaggaggatagcttaatttgcacatagtaaaagagggatacacaactgagtactgaaattccaaggctgggttcagataaaaacagtattacaacaaacttgaaaaggaacgtcgactccacaataattactaacaaagcaggcacgcggaaaacagaccggggcccattcaaaaacaagcttggcttctggaatatgg

SEQ ID NO: 26837 - DNA, 514 bp, Oryza sativa
  Clone ID: uC-osflM202056d12a1
acataagctactgaatttccaacatgtaacaagggattacagcttaattctcgaccggccgcgccgtgaaaaaaacaaccggcagctcaaccaggagatcagatcactgagtacaccaacgacacttgcacgacgacgtaataccaacgaccttactactactgagtactgactagttactgctactcgcagcagccatggccgacgtctaaaatgccaccgagccatggaagccacggaattcagagaagattacacagctagttgagttgagtgactctagcttgacgaagactactactagtactagtaatagactagtagtagctgcttctgcttgtttatgagaggattgagtcccagtcgatctcccaggacgggtacttgcgcaggtggaatgtctccgactcgtcccatggcgcctccgtgaagtccagcttctccatctcggcaccgggggcgacagcggcgtgggcggaggaggggagccggcggacaccgagtccttcccttc

SEQ ID NO: 26838 - DNA, 498 bp, Oryza sativa
  Clone ID: uC-osflM202056e01a1
aagcaaattggaggacagcgattgaaccccaacaacaaataatatgtcatcattctgtggtcacagtatttaagatcattcacgcacgagttcccaaagcaaacaggtgatgcttgagctgagaaaagcttgacgtcctgtgattgtaaaatttgaccatagaaggccaggcagagaacctaagcaagccagccaatgcaaaatggtttacagattaagctttcaacaccgccttatggatcatcgtctccttgtgtatttggtgacagctcttctcaacaagatcgaggagtttctcgaggttcgccgcccaggaattgagtataccattactgtcttgtgctgtgcggaagcatacaacacccattggcctgtcaatcttcgcaatcagcgactttgagtttaccatgtccgaaaggtgtttctctgcctcctgcaagctcaagcaaagaagatctgcgagcctcttagggtaatccttgaatagtacttcgaaac

SEQ ID NO: 26839 - DNA, 368 bp, Oryza sativa
  Clone ID: uC-osflM202056e02a1
ggaggaaagccgagggagattattttaaaaagcctggcccccctgaggagatggagccggagtccctgatgggaccaccctgatgatagatgatccctccaagctagctagggatccatccaacattgatcgacacacgcccacactgacaacgacgacgacggttttatttaggggtcaaaaaaaaaggcaaggcctgcctacatataagctggggcctaatgcaagcaaattaagggctcgatcaaagctctgatcgacagtagcagcatccataccataaaacctcatgcagccgggcgacgaccaccattgattcagttgcaggagcaccaggagcagccccggcagctggggcccccttgcag

SEQ ID NO: 26840 - DNA, 460 bp, Oryza sativa
  Clone ID: uC-osflM202056e03a1
acgacaaaccacgaacttggatattaaagatgccacaaagaaggttcacataaacaacacaggtcacagcagcgaaagctacaagcaaaccctgcataatcgaaaagcaaatgtttttcaaaaccagacacacaaactgatagatagaagcccacacggacagatcataggatagcagcagtaatcaagcattgccaaggcaccaggcaagaaccctgaacctctctagtactcgtcaccctcatcaccctcgtcaccatcgtcgaactcggagccgacctcctcgtagtccttctccagcgcgggcgaggttcctcgcgggccttggagaaactccccctcctccatgccctcgccgacgtaccagtggacgaaggcgcgcttggagtacatgaggtcgaacttgatgtcgatgcgggagaacaccttgacgacgctggtggagtggagatcatgcaca

SEQ ID NO: 26841 - DNA, 407 bp, Oryza sativa
  Clone ID: uC-osflM202056e04a1
aaactctccctaataaactaaggcccaaagaaaaaagctaaacaaaaaccacaaagctggccgagccccccccaccaggacgggggccccaaaaagggaggggcgaacaacacagggccggccaaaaaacccaaaaaacaggggaaatcccggggaaacctatagaggaccacggggggatttgggggggccacccaggcccctggggaaaaataaactcaagggggggaagacacactaaaggggggggggaagcccaaaaccagctctggaggcaccaagccgagccgcggggccccacccaggagggggaacccgcggaacaacggcggccccaggggccacgggggcccccgggggaacccaacctccggggggaaaccccggggtggcaaaaaaaaggggga

SEQ ID NO: 26842 - DNA, 172 bp, Oryza sativa
  Clone ID: uC-osflM202056e05a1
agcaaatcgatccatgcgaccatgcgtgcaaatcagttggagcacaaatttacatgttacacccacaccctacacccatgcataataatacatcgtatatacgtacgtacatacatacccctctcgatcacacgcaccatcgatcgtacaaagttgcgtacatacatacgta

SEQ ID NO: 26843 - DNA, 156 bp, Oryza sativa
  Clone ID: uC-osflM202056e07a1
aatgtaagcctgtggttttattgcatgatttgtcgggtaaaaaaaaattactaattggacatcacttgacaggccttttttactgaaagctgaaaaaccccctaaacccccgaagaaattaacagtttgaacacgaatgggctaaaataattaaac

SEQ ID NO: 26844 - DNA, 436 bp, Oryza sativa
  Clone ID: uC-osflM202056e08a1
acaggtacaacagtgcagcgtttatcttactgctaccaaaagaataaatacacgtacttgaaggagtaaagcttctgacatccttttaaaaataaaagcaactcaagatctagcatacagtttgtttgctaaatgcatctctgttgattcatttccataacattcctactgcctctgttggaaaaaaaagaggaaaagtgaaagcacctaaatgaagggagaatttatgccatctagttttaccatcatgagcgccccagctgagagaagagaaaaggccataattccagaacgacgatattatccttcaattagacactcagagcaggtgccagtggttccggaacaccactaccaccgttaagaactatcaccttgccctctgaatccacatcaacaatagcagagtcaccttccttgacctcgccagccaaca

SEQ ID NO: 26845 - DNA, 469 bp, Oryza sativa
  Clone ID: uC-osflM202056e09a1
ccgtcggaacatgaaaccaccattcttttattccattacaccttgttgctacaagataagtgaattaactgtacagaaaaactaatgtacaggcaccgcaggggaagaaatatttatcagctgcttgacgtgatgtatctacacagatttcactggtcccgatcacgatcacgataaattggctgcggcgtccacttgaagtgcaagttcagctttccggatttagcaccttgcaaaacaaactcatcctgaaactcgccttcgagtattactctcgtaagtgtcaagaagcatttccctatgtaatcctttccaaacgtatcatgatccccatacttccaccatgagtaaattatgcaaggcatttttaacaacaaaatcaaacgtttgattccatattggatttagtgtcttaattacaacccttgtttttttttggttttcccttttcaaggactgactacaaatg

SEQ ID NO: 26846 - DNA, 268 bp, Oryza sativa
  Clone ID: uC-osflM202056e11a1
acacaatcaggtccattgtacttctttcatcaaccaaccagataacattgttttacacaatctgaacgaacgaagcaaatattcgggtacgcggaaagaggagaacgtcgcgcgtcttaccgcagcctgcatgaaagcaatggacctcaccgccgttgctcgccggagatccacactcacttgccggggacgaagttggtggcgtaggcccatgcgttgttgttgacggggtcggcgaggtggccggtcaggttttttcagtggccct

SEQ ID NO: 26847 - DNA, 499 bp, Oryza sativa
  Clone ID: uC-osflM202056e12a1
ggggagactaaagtagaattttccatatgttttttttctccccagagcagctcactcgactcttaacctagctaagcttgtttgactgatattgacctgtgcgcatcacattttttagcattaagctgaacactatatctcttgattgcgaccatggcatttaagcagcaggctgcggggaagagaagattaggctcatcagaagcccaaccaagagacctatgagcccaacaaaagcagcaaacgttaaggagaaacccgtatcgcttttgcggcttctacgcctcctaatcacatccaattcacgttgcatttgctgattttgctgcagcatgttatctctttcatctttcaagcgttgcattgtctgtatctcttcaatgcttgcattcttcagcatcgtgaaatcgtcagacaacgatttgaagctcctgctttctaaagatgtaataccagagtcgtcggaacttccactaggcactgataaacaaccttaagc

SEQ ID NO: 26848 - DNA, 443 bp, Oryza sativa
  Clone ID: uC-osflM202056f01a1
gaagtcgatcaaattgtgcccttattactgacactttgaatagtacttttgataatgtttgatttgctatcggaatataccgataacatacacaatcagacaagatgttagcactacaaaaacttgtttaggttttgacatcactaacattttgacatggtagcaaaccaaacaaacccgtattgcattgcatctattacttcctctagtccattcatctcatttcatctgagagatttaagattgaattgcaaccacaaaagcaccttaacacctcagtgaatgtctattgtacactatgtacattttcatctattcaccgcatctacatatacagttatcgtacaccgatggctatgctacaacgtgtaggggatctaaaatttggaccgaaagaaacaaaaaacggggaagatatatagccgctgggatgacaccaaaaa

SEQ ID NO: 26849 - DNA, 499 bp, Oryza sativa
  Clone ID: uC-osflM202056f02a1
gattcatcagaaaaagattttattagcaaagaacaggggataaattattccacatgccgacttgatgaatgatactaattatttccagtgttaaatggaattaagttggcgtaaaaaaaattctagctgaaacaacaccagctgaactggcatgccaattggcagtacgctgccttattctatttacttttgaccgtgatacccttcggctgttcttgggataattttctatggtttaccattcaactggactttagctagcttctctccgctttcttcggcgccatccaccttaccaggaaatgacctcccactacttgtgacaagttccttgatggttgcttggatgtccttatcgtccaacagcgaatccaatgtcacatgtagccggaatctccataatgctttgggttgttgggtcattgattgtttcctctttgctggtcttgggtgtacttgttttaagtgcaagcaggtcctgtagtgggagattgccaca

SEQ ID NO: 26850 - DNA, 432 bp, Oryza sativa
  Clone ID: uC-osflM202056f03a1
aagggccggacttcagcatgaaaaccatacagaaatcagagaactaatcgtcatgggtacagaagatcagcacagccggggatctaataaacatgagatgacctaattaggactaatcatgcatgcatgaactgggtcagcacgtaaaggaattttcgatctaccagaaaaaataaagggaaaaaccccctggctggaccaaggatggatcaacgccagcgcctaaaaatcaccatgaatcgatcagctcatgcgagggcgtcccaacttgaaagggcctgccgaccgaccgacgccgttgaggtagaagccagcttgccaatgatgtttctgaggcctgaggacgattaccccgccgggccggccgttgtggggggggaccatggcccatgggcgtccctgtgaattgccccaccagcccatgcttgatgc

SEQ ID NO: 26851 - DNA, 467 bp, Oryza sativa
  Clone ID: uC-osflM202056f04a1
cagggcagaaatttttctgaaacaaaatgagtacatcatcctcctctatcatctccctccttaattaaatcatcacagaataatcatatatttactccgtgatgcagtagtatagtgtgtgacgaaaagtcggagcagtaaataaataaatccaaaaggcgaatttacgaagcaagcaagcattagtggttattaatctccttcaattaaggcctcctcctccttaatcaacggcgagggtggtagtgctgcggcttggcggcggcgccgtcgccggcgggcttggcgtccatgacggtctcgaaggcgccgacgagcgccttcaccctgctgcactgccgcttctccaggagcttgctccgcgcctcctcgatcacgtcgttgctccgccgcgccatctcccgccggcgaggctgctcctcctccgacctcttctcatcgccgtcttaccctgctccccttgacct

SEQ ID NO: 26852 - DNA, 478 bp, Oryza sativa
  Clone ID: uC-osflM202056f05a1
gacgcctcgcattatcgcatatagcggatgaaaaaacgtcaggtcagcctgcgcgacaacgtttagttacagataagagcagaactgcaagtcaaatacactcttttctctccatagtagagtttgagcagcgagcgggcaaacataaattattcaattattaaatgatatgatcactcttgatcatctcaacactttaggaacaaaacttcgctaccgggattttactattttagttggccacaacttcaatgagggttggttcgtagtcagcaggagcctcgaaaccatggaagttcattacggttgcagcaacattggcgagcccaggggtctgaatgtcagaccggaatttcacaccagggtgaagaccgggacctccaatagcaaccgggaccggttgaagagtatgcgagggaagaatctggatccaccgttctgtcgagaagtggctggccagatttgttcttttaccata

SEQ ID NO: 26853 - DNA, 274 bp, Oryza sativa
  Clone ID: uC-osflM202056f06a1
ctcagccacaaatccaaacacttggtccttcctatcaaaagatcaaaatgaacaggttttaaaattcatttcccaactcgacgataatttacacgtacatttaacacatttttccacccttttaaaacttctcccttttttttcccgggtaagattaaaattaacttgaggccagccagcgtctgccgtgcggccaagatgttttacaggctgggcgttccttttcggcggaccccggaaaattgacggtggagcaggtttgtttgccaaaggg

SEQ ID NO: 26854 - DNA, 70 bp, Oryza sativa
  Clone ID: uC-osflM202056f07a1
gggtggagattagaatttaacgataaacagaaaataacagtttgattagtaggcacgtctacttttagca

SEQ ID NO: 26855 - DNA, 78 bp, Oryza sativa
  Clone ID: uC-osflM202056f08a1
cgacggacaaacaacggattatttgtcctaagataaatgctcttaccgtaagcctggccttgctaagagattttatgt

SEQ ID NO: 26856 - DNA, 357 bp, Oryza sativa
  Clone ID: uC-osflM202056f09a1
aattcacaacaccatatttcattgatcaggttcagaacctgcacagaaatacacactaccggtacagatctcaccttctctccaatactcgtacatccatccacgcggtccacacgaatacgtacatctatacggtacacgtacgtacatctactgcaccgcgtacacacacgcacactctcctgcagagacgcgcatcgtcgtcaacctagctagcttagctgaaggcgatgcgtcgccatggcagcacggcggcggcggcgctcacttgccggggacgaagttggtggcgtaggcccaggcgttgttgttgacggggtcggcaaggcggtctgccaggttctcgagggggcccct

SEQ ID NO: 26857 - DNA, 480 bp, Oryza sativa
  Clone ID: uC-osflM202056f10a1
gaaatctctgcatccatatcatctttccatacagcgttgggtttcagcattaccaagtactgctagggcaagcaacatttcagagaatcggcgatgagacaagaaatacaatacaatcagccattatttgttttttccttttacaacaaaacctacaggctagtccccctaaacacgattctactgataaattttattcttctgttagaacgaacattacctacatatgattggaacaaataaacaaaattgtaaatgtgcttctgatcatttctattattttgttagaactgtacagcttgtctccaggaacatttcttaagtatcaatcgctctgttagatgaataaccattcactttgcgactttcttgccacagctggttcacttcaatccatcatccagcgcaacatatccagctgacatcagctagagagggtgactgataggagcaggcaccatgaacaggtttcctttattg

SEQ ID NO: 26858 - DNA, 500 bp, Oryza sativa
  Clone ID: uC-osflM202056f11a1
gctcaagacttaactgaattttttagataagataaaaattacatcttcaacgtctgcatcataagatgcacacagccaacagttttgcaggatattactgagaacaataaagcatggggagggaattagctagtaacaatgaagcaatagagctagaggaaacaaggatactaggacctagtactactacagtactacacaaaggtttattgttcagcttaaagtaaaaacaagctgaggggcacgaggggaacaatgaattattggaagatatctagactgagcactctaagaataaatacatcaaactgagcaacaagatggctaataatgcgcgtgagctcacagcattcttggcacccaatcagtgaccgtttgcaatgccgttgcagcccttgatttttccctcggcggctttcttgtcatagaacctcctgtacatcgaatcaacttttgtaagatagaatgttcctggtggcaacaagctggcatctttgctt

SEQ ID NO: 26859 - DNA, 192 bp, Oryza sativa
  unsure (1)..(192): unsure at all n locations
  Clone ID: uC-osflM202056f12a1
ggtagagactagagagagatagtattaacaaggagataaagcttgcaagctctgcgcagtgaatggcaaggcgctaccagcaaaaagtctacgacgctacataaaccagttaactgtcagcagcccaagtttttctgctactttgtacataaaccatggatgatcagaggaagatcgnggttggttctcttt

SEQ ID NO: 26860 - DNA, 323 bp, Oryza sativa
  Clone ID: uC-osflM202056g01a1
cttaatctgatctgaaagcaaaatttagacccgatccaaaatcccttggtcctcctcatttgccatggccttgtcccctttcttgtactccccatagacgtaggacgagaaggcccagaggcagagcagcatggccaccgccttctccggcccgaactcgtcgccgaacaccaccacgccgccggccacgtttcaccgctcaacatgcgccgttcatgcaacatgcctgccgtgcaggggaccgtcgtcaggaaacaccgtttccggccgggtgcccaagaaagcacagcctgcccagctaagccaccgtccgtacccgacca

SEQ ID NO: 26861 - DNA, 471 bp, Oryza sativa
  Clone ID: uC-osflM202056g02a1
gcaaaacatgagattatccattaacttagcaacataaaaaagcagcatcacgaaagttagctccacttctggatattttacatggtcaggatgctaagtttttctacaaaacagcacttccattctccaaaataaagatactagacctagagctaatttcagaataaatttcagtggtaagattttacaacatgcaggcttctgatggaattctgtcttcatgttccagcaattgttttacacggcatcagcgcctccaagcatgtggccaccatcaacagccatagcgtctgcatagtttgcttgatgctggctcccagcatatggtgcattccttcgcacacgattgtgctcatcactttcaccatcagatgcctcagcaagccttgcgatggcatcaatcaacgattgctcttgctccttcagcactttctttgccttctctaccttaggggaactgattattaatac

SEQ ID NO: 26862 - DNA, 163 bp, Oryza sativa
  Clone ID: uC-osflM202056g03a1
caaaaaaaaattcaagattaaaaaaaatttaatttcgacaacatgattgggaatgggccattgaaaagagtccttgcctccatgcacttattgctccccccaggtttttaaaattttgggccataaccatgaaagattggatcaaccgatgtggttaccttac

SEQ ID NO: 26863 - DNA, 433 bp, Oryza sativa
  Clone ID: uC-osflM202056g07a1
cgtccaactcataatatacctttccagaacagagaactaaacgcttgattccctcctcaaggtccttatggttgttctgatctttaattagacgcttaaaccgggttccttgcttgtcaaatccagggtgaccagcaaggtcatcaaattcagaaagattcgatttgcagtccttgtgtcgaaggagattctttggagacataacaatcaaaggctttctgaagtcccggtgaatctggcgacgcaggacatggaaatagtttgcaggagttgtgacattcacaacttgccagttgcactgctggatttgcttcctcagagttggatccatctcaggaataacataagggttgccatcactcatctgaaggaaacgctccaaccttgccctggaatgtcaggcccctgaccctcattccgtgaggaaggcaaa

SEQ ID NO: 26864 - DNA, 192 bp, Oryza sativa
  Clone ID: uC-osflM202056g08a1
tctttttgttgacgtaataccatccattttttttattgtcgacgaacttatcaaataagctctagatacatatcttgtgcgtatatagccggagatcctatctcacatatcctcacccaacgtacattgtcgtacttttacaatcataaccgttcggcttagggcagggaagaaaatttcaccggtaaggat

SEQ ID NO: 26865 - DNA, 343 bp, Oryza sativa
  Clone ID: uC-osflM202056g09a1
gtcccgtaacataattattacgttggtacaagaaaccaatgcttctaaacatagaagcgctacaaacacaaccgcgatctgctacgtgtatcgtatgctgatcgcggattgttatggaactggagatacagattacagaccggctacaataacacttaagatgcccccgtgcccacatcaactctgcaccttacgggaggaaacgacgcctggtgcccgcagaagcgtgcctatctgccatggatattaccttcagcaatttgaccgggcacttatctatgcaaatatgcaccaggatttacccatgcatctatcgactacttaggctcatcttgatttatta

SEQ ID NO: 26866 - DNA, 467 bp, Oryza sativa
  Clone ID: uC-osflM202056g10a1
agcggcgtcaaaggaattttctcatgttaattacatttgttgttacatttccaaactccaatggaaatcgaaatgaccacgtcagaaagaaatacaaaaagttattagccaaaaacggcatgaagaaatgggatcaaacaaaatatggcagaacgtccaagaggtgatccagaacatgccttgcggaggtggacaaggaaaagaggacgaggaaaaattaaaccacaattccccatgcatgcaatgcacggtggctaggaaaaatgcataggcatagagatcctactatgtgctgcgtgtgtcctctcatttcgtctccgtttaaattttggttgctgaccgaatttgaaactgtggcaaaccgacgacgaatgatggccgacggttgatctacaggcccctgcttctaccagggtagtcgccgagcctttggaccaccatgttgcactgccctggggtcatcggct

SEQ ID NO: 26867 - DNA, 494 bp, Oryza sativa
  Clone ID: uC-osflM202056g12a1
ttcttttcgccatattggtgtacaatagtagaagctacaaactaacatcttggaagcacatcatcaacctctaaatcaacataaccaaaaaaaaaatctcaaaattggcgccttggctttgattctgcaactgtaactcggatctgcctgccgtccaggtcaacgccgtcaagatttgatatggcattgttgacttcttcagcggagcccataggtgacaaaaccaaaacccctcgacctgccgctctccctgtcgtagatgaccttggcatcgagcacggttccctgctcactgaacaggtttctcgagtgtcgagttgtccgacaccccaagcaaggttccctacatagagcttgttggatgaatcaaagttgctcccaccacccctaggtgatcttggcgcgaaatcatcccgaggcggaagcggccctgagtttaccctcagaggtcttccttggaatgtgtatccattgaattgttcgacggcagcacc

SEQ ID NO: 26868 - DNA, 424 bp, Oryza sativa
  Clone ID: uC-osflM202056h01a1
aaacatcaatcaatcaaatggaacaaattagtgaactcagtacaaaatgataaacgtaaaaggccctcttcttccacgttaaaagacctacacaacaaacgcaggtcgggtcgtgataattaacaaatttagacactgtcaagaaaataaaacacaaaattagtaaatgaatttctgtaaaagaaggaaaaaccaaacccaggtcctccccaaatccgtggacatcctgatcgaatgacgtgacatctcatattctcatcgattcagtccttcatgagtctcatatcatgctggccagtgtcatgcagttttgtgccatctggttgagctctacgtcgatcttctccaaggggttgttgatcccggactgcttgaagggccgatcgcacgactcaaagtcctgcacagcgagctgcagcatgat

SEQ ID NO: 26869 - DNA, 390 bp, Oryza sativa
  Clone ID: uC-osflM202056h02a1
gaaccaagtgatccaattattattcactaattaagcaaaaaaggaaataaaaacaagtccaaaattgtttgacaaaaaaaaatcgagcacgctagcacgaggacaatgtacgtgtcacactctcctagaccttaatgttgaccaggcgctccgacgccaacgacgcggggtccaccgtcatggcgcggacggtggcgttcgttcccagggacgggtggctcactgtcaggttgtagtcgccgtgtgggaggtcgagctcgacggcgccgtcggcgccggtcgtcgccgccgtcttgtgcgttttccactcggggatcagcttgtcgacgagggtcccaacgggcaggttcttgaaactgttgtccgtcaggcacatcacgtagcaaccct

SEQ ID NO: 26870 - DNA, 441 bp, Oryza sativa
  Clone ID: uC-osflM202056h03a1
ggacaacatgcaattcataaaacgtataggattacacgtacgcacagatcgtgtacatactgaagaaaattaagatggaacatgcacacagggagcgtgcaacataaagtatacagctgatacagagagagaatggagcgctgcatgtctgccgcagctgttattttaattactttgttcatatatgctgtagcaagtacgtgcttaattactagctgatcaactccgattgagctagcatgttaagctcgatcgatcgatccaagcaggattgatttaactgaccttgttgcagtcggtggagaggctgatggggaagccaacgttgacgccgcatttgccggggacgccggcgacggtgccgaggttgagcgacttgatgctgccggcgaggcttttgaggcagcggcaggccgcctggcggcggcggtggtgcgggcg

SEQ ID NO: 26871 - DNA, 455 bp, Oryza sativa
  Clone ID: uC-osflM202056h04a1
ggaaaaacgggaccaaggccgtttttattattcatagggaacatcccaataacaaggggggacagagcaccaaccacacaccacattccactgaactcacccccaactaaatcaaactagaaaactcccaaattcaatcgaccttacttttttaaggaaaaagagcagggcctaggaatgcaaagcatcctgaaaaatctctcttctcttttcatctctgaaaccagagaatggaaacaaagcaaagaaactccaatgctctcctttttcaaaggctcagcctgagatgttggccagctcacttgttcgacgggtcgcccttgacggccaacgggacggggctagccatggggcgggacttgggggcatacaggatctcaagggagcggggggtttcacgcctttccaggttcgagacgtactttcaaaatccgtaaacgccggtgaggggcatc

SEQ ID NO: 26872 - DNA, 485 bp, Oryza sativa
  Clone ID: uC-osflM202056h05a1
gggcaacaccggataaataaataccagctcgatgatacaaatagtttaagcataaccatagaagtaacacagcagtgttaaaaaagagccaacaaattcatggcagcaacatgtaacaccacacatcaaaagttttcaacccatcaggcacgcaggaaacgtccacattccacagacaagctaacactagcatgcattggcctaattcagactcttatgaagagactcaggctgaagcatgatagactcatgatcctctctactcgatcagatcgtcatcgtcatctgggagaggttgtgctgctgcagccgcaagctcagcctcatgctgttgctgcattgccaggtcaatgggaacttccggaggtttaagagcaacagcttcaacgaaatgcaggttcgggtcaccagcaagcttccttgcaagataaaggaagggcttctcaaagttgtagttgctcttggcagaaatttcatagtactgg

SEQ ID NO: 26873 - DNA, 403 bp, Oryza sativa
  Clone ID: uC-osflM202056h06a1
caaggggtattttgaccttttcccatgtaaatacgatgataattccaaatctgacaatgatcatttatatggacaagtgattttcattgcaccggaaggccataatacaaaatctggggcaactctaatgtaattaattgggtgaggttccgaaaagctctataccagattgatgttataacgccaaaacttgagatttgtgaatcaatcccgttgaatataaatgtttcccagcaaaggcacaaactgtttggtgaccagcttaattacttcttgggatgctactccgccaatgaaggcagccacgggatgaatcctctgcacccccaaaccggcacatttcagtaatcaggtcttcagacaaaggtgccccgttcatacccatcttacttattactgaaac

SEQ ID NO: 26874 - DNA, 309 bp, Oryza sativa
  Clone ID: uC-osflM202056h07a1
gagaagagttcaaaacaagccttgtttgttaaacattccgattcattacatgaatcccaagcttcctcttttttctttccctgagcagcaatcgaagatggcctccatactctttagcatttcttaacctacacaagttgaaccctcctcctcctgaccgaccaacgcaccgagctggggaccaaacttttggctaacttccggcctttgttgggcatatgtttctgaaatcttttttcatcaggatgcaaaagcaaaaaaaaaaggccgtcgcgatcgggatcaccacttggccttgaaggggacctc

SEQ ID NO: 26875 - DNA, 406 bp, Oryza sativa
  Clone ID: uC-osflM202056h08a1
gtaataatgaattattatacattacaaatcaaattaacacatatgctctcacatactgagaataaccaaagaaaaaacaactgccagaggaatcacattcacatcaatgctttaatattgaattgaaaccgtaaaatgttgtgatatacatggatactaattgctcaaaccaaggaattctgtgaagcttggatacttcggttgccacccaatctcagcacgagttttggaattcttcatcctcttccctaaaggaccatcagtccctgtgaagccttgaaacttcgtatcaaatttcccacttctattaacaaggtccattatttattgcctagatagaggctgattgtcacaaccaacaaaaacacgagccacgagtctcctttcataatggcaattgcaagaa

SEQ ID NO: 26876 - DNA, 255 bp, Oryza sativa
  Clone ID: uC-osflM202056h09a1
tttttttggttttttttttttttttttttttttttttttttttttttttttttttttttttttttttttttttttttttttttttttttttttttttttttttgttttaaaaaaaatgcagcctaattcaaaaagagaatggaacgctgcatgtctgccccaggggaaattttaatcccaaaaaaacaaattatgctgggggcgaggaccccgcataattaactaatattaagaaaggagaaaaaagttcctccc

SEQ ID NO: 26877 - DNA, 438 bp, Oryza sativa
  Clone ID: uC-osflM202056h11a1
ccaaaaaaagggattataattaaataattaatttactgtatataaattattgataaaaggtgtgcttacaataatgatgaagtatcaggagaaacgtgtcttcaggttacagattattacatgatggtggtacacgaattgtgcggtgatagaaatcatatatgtcctctttccaaaatagactcgatcgatcggtattgctagagtatgagtagcaattattatccgatagagtgaggctgaggccttccgtgactgaagcagattgcaacgctgatcgatctccttacatgctcggcttcgcgctgagacggctcgccagtttctgacccagagacctgtcagcctgagaccagtaggagagccagatgctcctgatctcgtgggtgaggcgagggtcagagagtgcgtcgatccatcttttgatgaaccggcttg

SEQ ID NO: 26878 - DNA, 501 bp, Oryza sativa
  unsure (1)..(501): unsure at all n locations
  Clone ID: uC-osflM202056h12a1
gttccatctttattcattcacaaaagtagatacagccagtgccttggagagttggaggttcgagcatcttggcctacaatgctcttgctaacaattcttggcaatgaaaaccaaaaagagctcaagtgtgaaagtttaaagatacatggcacaatattacagaagttgccgtgacaaagtgatctacgaacgaattatgctcacccgacagaaagaataggaccggactatatataactacagcaaaaaggnccacaagttcaaacatttcaatttatttaagctgcacttgagagaaaacatttgattttttctgaacattagatcagtgggtagcatcctctgctgtagtactgatccaatgtcttcgcagggatacgatggagaagctcacgagggaatatgcgaagcaatgtccatgctaggtcaagntgctgaaagatgtttcttgtatcataagctccttgtgtaacaaatttcctttaaatttgtcaaggaatt

SEQ ID NO: 26879 - DNA, 530 bp, Oryza sativa
  Clone ID: uC-osflM202058a01a1
ggcacaaataaccactgcatcaaagggcatacaatgtatttttgcgtatatagacttgcagttgcaaaccgaattacatgcgtggtgtcgcatagacgtacaaattccacaggctgaggctttcctttctgcatccaaccaagccctgcggtaatacatctggtcgacacgacaaaaccatgttcaactcaaaatatgtcagatttcactccggttacacaaatggaacacttacaggttacaacaagtctcccagcgaacaggttgaacttgattctaatacactatgtaagctacaatggcacacatacagtggtacaagcaattgcccgtgccttgcggttgcgagataccagcaattgccagtgccttgcggttgagagtttaccaggttggttgcacggcagctggagaactcaggcctctttcatttgctcttcctcttcctggaggaggttctctttgttgtcgtgggcccagaagccgggcacatttataagcatgcttggcatagtcccgccttgcttgca

SEQ ID NO: 26880 - DNA, 341 bp, Oryza sativa
  Clone ID: uC-osflM202058a02a1
tattttttttggggttttttttttttttttttttttttattttttttttttttttttttttttttgcacaaaagacaggccattaagtttattggacccttccaaatttccaggggttaagtaaaactttttttacccaagaagtcctttagctttgtgaatttacaagggtcaagcaaagtttctatttctttgggaattcataaaatccattaggcaaaattactccctcagccattagggtttttcatttttaaggattacaggcttgaaagctttatttcaccattccttcacatgcccattctttttggcttaatttgcagggggttttaaaaagg

SEQ ID NO: 26881 - DNA, 386 bp, Oryza sativa
  Clone ID: uC-osflM202058a05a1
gggggttgataaccagaacagtcgtgacatatcttcaaatactattttgctcattggccttcaattgaaaaataacagaaaccacatgagcagtgaaacagctaaaagaaaagggaaaataatagttgaaagagggaaacgagctttttccaacaaataattgccatcccatgacaaaaattttggaaccaaacaaaaagaatacactctatgtaccctatgaacctcctttgaaaaaaaaataaaggagactaaccaaagccccaacaaatttgtgacgaatgcgtcttgcaaatgtataatacatcacaatcaaccaaaatgcatcatgaaatgcctttggatgctctcgaagggggccctggcaatctttgatgtccaaaagg

SEQ ID NO: 26882 - DNA, 158 bp, Oryza sativa
  Clone ID: uC-osflM202058a09a1
actattatatgacgccctttatttatattttttctgggggaaaactttatcataaccaacttgttgaatatgccaaatttacttatacactttcctctcgtggtgctagtattatatcctttgaccaacatgttatcttgaacttaatttacaattgt

SEQ ID NO: 26883 - DNA, 149 bp, Oryza sativa
  Clone ID: uC-osflM202058b04a1
ttgtccgccgccgtcggtgtgctgctggtgggggcttcgctggccggtgtggctcgcggtaaggacccgtacgtgttctttgagtggaaggtgacgtacggtaccaagacccttctggacgcgccgtataaggtgtatcctgatccaac

SEQ ID NO: 26884 - DNA, 93 bp, Oryza sativa
  Clone ID: uC-osflM202058b06a1
ccttttctttttttcgggggcatcttggcacgaagcggataaacacacccttatgcggacagggttctaacaattgttaaaaaggaaaaatga

SEQ ID NO: 26885 - DNA, 61 bp, Oryza sativa
  Clone ID: uC-osflM202058b09a1
ttatttggccgccctatttttttatttattttgttacacaaaaagtaatgttaaacctacg

SEQ ID NO: 26886 - DNA, 339 bp, Oryza sativa
  Clone ID: uC-osflM202058b10a1
tattttgttggtttttttttttattggccattaaatattccattcataaattgctatacaaagcaaaagagaaaattcaacatatcagtaggtcttatctagccatatggctcgaacaacgcctctttcagccagtgtgaccaagtcattagcaagactaaaactatagggaaaaacccggctattacatgaagtatcgtgatgccactcattacatttggcggtggttgtggtagcatatgctacattttattgatggatggataagaccaggtgttgtttgctaaagcgataggacaagcggctgctctgaatgtttcatccattactttaaacttg

SEQ ID NO: 26887 - DNA, 56 bp, Oryza sativa
  Clone ID: uC-osflM202058c01a1
cgcaccttataattactactcaagggggtactatgcgacagaacagcaagaatcca

SEQ ID NO: 26888 - DNA, 466 bp, Oryza sativa
  Clone ID: uC-osflM202058c02a1
acaggataaaccattcattagcctttccagaggacttttagactctagaattgcagttcgcaaatgcttaaaggttcaatcatccagtccattctagaattgcagttctcaaattgctgccattggcaatattagcacgctttagaaaacaagataaaaacttatccaattttgcttacaagcaacagaaaacacgggcttgcataagtaaagttgttacctccatacaagtgatacatgtgcttttaaatagggaaactaccaaacagaaactccatattcagatttttcctggctgcagaaggaaaccgcctcaggtcaattggcaacttcattcttccataatcaatatatttacctctacaagatagtttcacgcctcattaacagaaaatggaaaaaaaattggcccttgccatgaagaggaaccttttcagaccaactgttagatatgatattatctggc

SEQ ID NO: 26889 - DNA, 406 bp, Oryza sativa
  Clone ID: uC-osflM202058c12a1
aggtaggggtgctcaatcatagcagtagcacatgggggccaaaccatttacacgaatagcattaacacacgtacaaagacttgggcacaatcaaatagagtttatgtccctaggagatttggcgaagctaacataacaagacacctttttttttaactttcacaatagcaaaccatgtagtacagaccataagggagactccattttaaaactgttagacttcttggttttcagaaaattccctacagtcatttgatctccatcttgcttttgactggggggcagaaaccattctagttgcggattttggacttatcaaactggccttggagcaagtccaattgcatctgaacctttcatgatcctgagtctgcgacaagagttggcaaacatctcccatggaaca

SEQ ID NO: 26890 - DNA, 118 bp, Oryza sativa
  Clone ID: uC-osflM202058d01a1
cttttatgagggggaccaactccaatatatttacaaacacaaacaacgtacccaatttttactgttaaaattcaggcacactgcctggcttcacacgatcttaagtaagacagacctc

SEQ ID NO: 26891 - DNA, 137 bp, Oryza sativa
  Clone ID: uC-osflM202058d02a1
tttttcgccctcaataacaaatttaacgagggctcaagaacataatgtgcagaacaaaacaatgacactgcggcatcactaataaggggaaaaagagagaaaaggaagacaaaaaaaactatcgttcatacaaaaga

SEQ ID NO: 26892 - DNA, 396 bp, Oryza sativa
  Clone ID: uC-osflM202058d06a1
atctagggtcatacacgcataaataaatgaatacttgtccatgcccaaggtaccatgtctgaaaatatacacttcatgtatatagaggcttttgagagtattgctcccgctggactagagggctaaactactagtccctggatttttactctatctggattttgggctaagcatacaaacacaaaaggcaggtacctgatacctccacacactggaaaccattgggaaagggaaaatcccagcgctaaatggaagaaaaataagcatttgagctcattgttcaaaagttctaatgctcatctgtgatcatctcgtccaccttatttttgtcagctgtctgcgctgccgaaacctggattttgccgcacctgaatttttcgctctcaatagggggcg

SEQ ID NO: 26893 - DNA, 448 bp, Oryza sativa
  Clone ID: uC-osflM202058d09a1
atagcccatatctttatattatattattattaacaaaaacttgtcatgcccagctatggcttgggcgcgatctgatacacagaacaaagagaaaacataaaaaggagaaataattaatagcaagcgttaagccggtctgcttaaaaggtgtaaaggcagctgtcgtcgtcgctcctcgccgttgggtcgaagatcttggcaacagggtcggtgcaaccttccggcacaggcaggttacctgcttgctgtgctccttgccctccttctcctatgcaggccgcctacgatgcatcgatgggatgcgaatagctagagatcttttattcagctggatggcgcataacccgtagaaggaaccagtcttcatggcgtcggagttagcgtcaccaagagcagccttgctcaagaacttgctcagcagctgcaccacgcttgacgctctcctgct

SEQ ID NO: 26894 - DNA, 330 bp, Oryza sativa
  Clone ID: uC-osflM202058d10a1
ccgaaaaaaataaaataaaataaaaatctcccatttggggccacatgccatctctcctatatgggcctcatttcttgatccgaaataatcctcataaaccatactaatattttttcccttttccccatacaccattgtaataattatgtcaatggattttctacgtaggcttaatgatcaaccccatcataatcttcgctagtgtcaacggatttattcaaagaagactggacaaaaagaaatggtgatatgaagaaggaaaaatctgtgtagccatgcatgcgccgaacgtcgctcagaacctcttggaatccggtgcgctggctccgg

SEQ ID NO: 26895 - DNA, 483 bp, Oryza sativa
  Clone ID: uC-osflM202058d11a1
gcagaattatactataatcacattccagccataattaattttctagcccatacaaaagcaagtttcagaatacagtttccaacatgttccatacaaaagaacgaaacatgaatacaaaatgttccatccaccatccaactacacaagtcccagccgactacgaagttcctacaggaagtgtcaagttcctgcaccaaaaaaattccacctagcagccactactaagtttcggcgttcatcttgccagcagccaggaaaaaaattccaccaagcagccaccgcacttccggcctgcatcctgccagctgccagcaactagtgccaaaaaatcctgtttttcagcaaccaacgcaaaaaaaactccggccaccaaaagcgccaaccctgcaagcaaccagtagctagcaccaagttctagcagccacatacaccatacaatagcagccacatacaccaagttctgaagtaccaaaagcgatcaca

SEQ ID NO: 26896 - DNA, 208 bp, Oryza sativa
  Clone ID: uC-osflM202058d12a1
gagactaaacttatacacttaattacttaaagcgtatggtacatgaggagaaaaaagggagtaaaacttaatgttgaaattgtcataattatacatgattttgaaatttgaaacactacctgaatgacacaatgccacatatttgagtgtggagggagcaattttatgaaagccagtggcagttttggactacagaatacttacattt

SEQ ID NO: 26897 - DNA, 118 bp, Oryza sativa
  Clone ID: uC-osflM202058e01a1
atttttcctagggggtacaacagtcaaacagcggcctaaaaagctgggccgatggcaagcaacaaagagacagcccgaaacaccctataacaccacatagacacatatctagagctgg

SEQ ID NO: 26898 - DNA, 315 bp, Oryza sativa
  Clone ID: uC-osflM202058e02a1
tttttccgccctttctttttttttttttttttgtgatttggacttcaaaaggcaccgcccaggtattattatttataccaaactcagcctcaaggatttttgtgtagtaccaaacagggtggaaagtttcgaacaccccacaaaaaattaaattaaattaatgactacaaaggtgaaacaacaaaaaaaatgtttttttttcaaaagtctataacttgaatggggtaaacttaacaggtaaacccaatggttaaaagttaaacaacttaaacaaagaatggaaacaaccgaagtaccatgaaaaaaacccttttg

SEQ ID NO: 26899 - DNA, 456 bp, Oryza sativa
  Clone ID: uC-osflM202058e05a1
gggaggataacttcgatgttattcatttcatagaataatcgcaactcaaaaacaaccagaacacgtattttttctggtaccctcatcaggcatctgattaaatttgaataaaccgaacatatgtgtccaaaatcacaagtgagaaccacaggtagcaataggtattacagtctttgaatagaagaaaatgataacagataggccggctgaaaactttgtccacgctaatgaagaaacagcaacaaaaagagagaaacaagcaggaggacggcgataacagctcctcttggcttagcattcttgggtccgaagaattagaagcatttcctgtgcaccaatggatgggcccgactcgtcgtacttagccttggcaatccacatttgctggaatgtgctgagagatgtcaagaaggatccttcaattcagaacactgcacttcctttcaggaggggcga

SEQ ID NO: 26900 - DNA, 394 bp, Oryza sativa
  Clone ID: uC-osflM202058e06a1
cgggatcaactcccgtttccgatgcttattgacatgaaaattccaggggtttttactcccagcaacgaacataaatgaaaatgaaaggggatgaagctaccaaataccatcagcccaaatcgccagtttttcccggggggttacaaaactggaccttattttttacaacgctcatttgaaatggtagagcggaagttcggctttgagcgggtgcgacatcaccgtcagcacgctggcacccgcacagtatcgagctatattgccttttcaaaactttccgggggcatcccggttttcaccatttgcctcaccttggtgagacagtttttcagtatcttaagtgcgccccatgagttctggttttcacaggccattgggatgggttttgcattgc

SEQ ID NO: 26901 - DNA, 401 bp, Oryza sativa
  Clone ID: uC-osflM202058e08a1
ggagaaaaataaggaattccattttcaccaaccaaacagtatcatttaccatggatatttgtcagtttcaccatgggatgatgagtgaaaaaaaaaacaaacacatattatgcttattttgacataagctctggctggctggctggctggccatcctaaactgcagtgttacatacaccaagaaggattataactgacggcaaaaatctacaggaactatatggttgaaatgaaatgaagaaatcaggactatttatacaatcaaatctaacaggctggaaaaatcgttactggttggaactttacagggctaccaatcttggtgtcgaattgcggtgaaaacttttcgctaggggaatcttttttgcttggtcagtagtgcactattggtttgataaggg

SEQ ID NO: 26902 - DNA, 517 bp, Oryza sativa
  Clone ID: uC-osflM202058e10a1
ggtataaaatggtaatgaattagtcttgaaatattatgttagcatcagttgcaatggcagatcgacggagtttgacatccacaaacattttagcacggttataaaaatatgttatccagcttggccactacgcccaatggatggttaacacttctcaaagttgggattgcaagaacatggttccataacaaagctcattaaccccacagaaagaaagctcaccaaggaaccttctatttgtcctcaagctctggaaggtctaaacattaaatgttgagctcccagcaggtggaacagtaacaacttttcctacagcaactgtcttaccttcagtccggagcgtaaatttttcaagctgaggaaacttagagaagtttttgaaccaattaaattattgacctgaacacggcaaacgacgacagcttcatttttcacaaaaagagggtttctctttgatttttttcttttaaggccactttttttctcctttaaaacatttctttttgaggtcacaatt

SEQ ID NO: 26903 - DNA, 332 bp, Oryza sativa
  Clone ID: uC-osflM202058e11a1
aaaaaaaaaaaacagagatggccatgcccgcgcggggggtattaatttcatagcctcacgaaaaacacggggagctccgggcagtcgccgccgggcgggctgatcatgtagagggactccgagttcctggagcccatgatgggctcgaagctcccacgcatggaccccattttgccgtttttcccgtccatggccgaaatcccgggggggacgccgtcgcccatggacaccgcccacagagtcttcagcacggggatgtcctcgccgggcgggttttgccgcaccgggtaccccacctttttgccgttgcaggacatggtccacatggactt

SEQ ID NO: 26904 - DNA, 292 bp, Oryza sativa
  Clone ID: uC-osflM202058f06a1
aaaggggaactcaatgggagcttcgggtctttatttctctgtaccaactcaataggctgagtagcaacaaagaataataaaaccacagaagctcaaaagtgcaaagatgagcttctgagcgccaacacttcggcttacaatattactgcaaatgcaaaaggagctaaacctgcaatatatcatcctaattcgagaaacccttatcttcatgccatcaagctttctttagctttggcctttccatctctgtcctatcttcttacaaagtgcgcttccaaaggcttggggtcct

SEQ ID NO: 26905 - DNA, 364 bp, Oryza sativa
  Clone ID: uC-osflM202058f07a1
aaaagcatccttaagctattacttttatgataagctcaagtttttagtggatgatgaatcatttgtaaaggactggaaattaggccaggatgattttcacaacacaaatacaggatacacaaatttttgtttagtaaaaacatacggagatgggcagggagaggtccttcttgccttcgtaagctctttctgtgcagtctgtatcctaattacttgtccagtatgcccctgtaatcagtaactgccagaagaacagctcagaactttagacccaaaaggtatcctgaaacatcaaacatgataagctaggaatagcagtctgcatacattcaacttccactttttattccaactgtacttccca

SEQ ID NO: 26906 - DNA, 134 bp, Oryza sativa
  Clone ID: uC-osflM202058f08a1
gttaagatattcaacatcctcatgattctacctaatgcttaattaaccaattaacaagttagcaaccagcaggtcacaaaacacaaataaaccgaaaaattttaaggataagtcaccttaaccaaaattatttt

SEQ ID NO: 26907 - DNA, 464 bp, Oryza sativa
  Clone ID: uC-osflM202058f10a1
gtggggaaaggatcatcatcaatcaccaaaaggcaaacaaattagtcgcaaatgaagatgtgttttcacgtttcgatcaacgcgaccaccattacagaaagatccgtgtcatgtagcatgctagtatttgcaaagctactacgacgacaaacctgagaagattcacaccgtatcaacaaaatgcaaaagaacttgtattcaccataaaacccagttgaagtgcggttctgtcataatacgtagaggcaatagccgcggtggttttttcttatgtgcaaagcgggaagagaagctctcaagaccttttcttcctcttcttctcctccgacttgttagacgcgttcttgagcctgatgactaggatccggtcaaggatggccactaagtcagtgcaaagggtgagtgcttgcttgatgtctccatgtcaccgtggcgagccctttgatgtcttctgcgcgtcaata

SEQ ID NO: 26908 - DNA, 495 bp, Oryza sativa
  Clone ID: uC-osflM202058f11a1
ggggaacaattttagtacacaggaaatcattctatttgatcacagtgcacgcttattataattgagagttggttgaggaacggtctaagcccacactcgcacaacagattggagaaaccaaaaacaacacatatgggggtaaacaccatcttgcgcatgtcctgctagcaatgtagcatgcaagattagtgctcaggcttgctctgccttcgggggacccctccacttgaagttctctgcataagatttggccttcaaaagaggtgtatggcgtttcctaaccacataatcccatccatgcttttcagcaaatgcctttgctgaatctgcactgtcaaacgtaagccctgctttaccaacattagcatatggatctccagtagatgtccatcccattaatgggtcctcccactttttgggctgacacaaagttgatttttcacctcccgactttgcctgaaccctgctgagatgcagccctagcgggtgaatata

SEQ ID NO: 26909 - DNA, 101 bp, Oryza sativa
  Clone ID: uC-osflM202058f12a1
aaaacccggtgcgcgaggccatatggagcggccgggggtgcccaacttggaggtacgagcaaacattcatatgagaactctggaggccaaacaagcaaaag

SEQ ID NO: 26910 - DNA, 362 bp, Oryza sativa
  Clone ID: uC-osflM202058g02a1
accaagggcaagaattactggttcacataaaacacaagaaatctgaaaacacactttaaaggaacatttccggaaaatccttttttgcgacttccggtagtaggaagcttcactggaaaaggaaaaaacaagggttgcactttaactaggactatgcaacacacaatcttttttgccttaaagtttggttccatggcttacttggccatcaagacctttacaaacttctaaaagtttatttgaccatcaccattaacattagtcttacgggatattttatccaccctcttgttagttagtttctcgccaagatttgtatcacatgggggagcttcactcgcggagaagaaagcccttttggt

SEQ ID NO: 26911 - DNA, 428 bp, Oryza sativa
  Clone ID: uC-osflM202058g03a1
gtgggtataaaacacaatcttaacaacaatttaagtactcagtccgtttaaaaacaaaggacaaacagatccattttgtcaatggactattaccgatgaaatgacaacagaaaaatattttttggctcgctcgcaggcggtccaatctgtcttaaaatagaattatttagaggctaaaaattctcatgcgactcaacaaaaaaaaagcatacgtgtatgttacttagagctggataccactcttgtagacagagccggccgtaaagctttcggggatgacatacgcgacgacgcggtacccgtcattcttgactaggaagcggacggagaaggggcccttgagtggcgagccgcttttgatcgtccaggtgttagacgatgatttctttagcgcccgccaagcgttgcacccttttcttgatttcacc

SEQ ID NO: 26912 - DNA, 177 bp, Oryza sativa
  Clone ID: uC-osflM202058g04a1
tcgtttcgcccattttttttttttttttttgagcgttgtttaatcatattcccagtcgcaggcacaacgacatgattaaacttattaaagaaattttacatattgcactttaacacttgatgatcgtggtcgaaaagggtaaattcttaaacacgtaccaacccccctcttaccaaa

SEQ ID NO: 26913 - DNA, 377 bp, Oryza sativa
  Clone ID: uC-osflM202058g05a1
ccgcaagaaccaagcaaaactgattcacacgaaaattttatacaaaattcatgctttccaaacaggtctttttggggggggaatgccatacttgggttcttcctcgagatcacaaacttgcctaatttggcaatctccatatttccccagcgctatatgggagcaaagcagccaggtccgattggaaactatgcggccacaggataatccagaaatttacaaggggctaaatttgttaaacaaaagaccctcagaggggtactcccacacatatcgccaggctgggggttcatttgcagctaatgatctccagtttttaacctgttttcatcccatttgagcaacctggggggaaagcgcatggtttcccccctctt

SEQ ID NO: 26914 - DNA, 476 bp, Oryza sativa
  Clone ID: uC-osflM202058g06a1
attaggaaatgtcttgtattatatggccaacattaaagtttgatattcggatacattttgctcactgtggcagacaaagcagaccacctagagcccttttattcagaatatatgcaagataataaagaacattggtcatagcatatactagtactatatgaatagtctggctggctgcttcacaaagtaacagagtgatcgctactggagttttgagtattctttaatcttcagtgcgcttccctcatcagcagctcctcatcttcttaccctctgtgccatctatctcctcgacagcatcgtcttcccagtagagagcctccattttaccagctttctccgtgttttcatcagcaaagcaatgcagaacagatcgtggcgacccggtggcgatttcagcagcagcagtgaagctctggtaaatgagcaaacccccagaaggcagctcctgctcaccatgttgctgcaagaatagg

SEQ ID NO: 26915 - DNA, 427 bp, Oryza sativa
  Clone ID: uC-osflM202058g07a1
atgggatcaaaacatttctattaccacaactttttaaggatggaatcgagtagcaatactttcaccccaaaatacagtttagcgacaatatcttaggaaagccgcttgctttgccgccatggctggcaagctgagcagagcagctaacacaaagaacacgagatcactataaaccaaacggcaacgaacgaagaaaatacagggtcttttttgtctgaagatacacgaagcggctcgttttcttttatttttagtctcctctcctcctcgatgatgggtgtatggcaatggcaatggcgatgggaccttggcttagttgatgggaaggggctcgccgttccacttcttgaggcagtcgagcatggggtcgatgagcttgccctggctgatgccgaggaacaccttgttgcactcctccgcgggggac

SEQ ID NO: 26916 - DNA, 408 bp, Oryza sativa
  Clone ID: uC-osflM202058g08a1
ggagcatcctcgtccatgcgtccggccatgtcagctccggcgccctggtacatcttggcgatgatggggttgcagacgccctccagctccttcatcttgtcctcgaactcctcggcctcggcgagctggttgctgtcgagccagctgatggcaccgtcgatggcgtcctcgatcttcttcttgtcggcctccggcagcttggacgcgatcttgtcgtccttgatggtgttccgcatgttgtaggcgtagttctcgagcgagttcttggcgtcgaccttcttcttgtgctcctcgtcctccgccttgtacttctccgccttctgcaccatcttctcgatatcctccttgctcagacggcccttgtcgctggtgatggcgatcttgttcttctgcccggcggccttgccc

SEQ ID NO: 26917 - DNA, 250 bp, Oryza sativa
  Clone ID: uC-osflM202058g09a1
gggggctaaaaggccctggggggaaagctcccccaggttatcaacaaaaaagggttatgccctttggggggaattttttttttagggaaaatccaaacccgggggctaaaaaggggctcaccctcattcctaaaaaaccccacgcccactttacccttaggaagcccccaataaaaaacattggggacctggggccacaaaaaaaaggcccggggtttgggttcgggaaccggagttttgtcccaaaggg

SEQ ID NO: 26918 - DNA, 523 bp, Oryza sativa
  Clone ID: uC-osflM202058g11a1
gggccaaatttaaacgaagaaatttatttgactgcacggcagatcaaatacgttaaacaacttctgtgaaaaaaaggtaaacaactgatacctcttcagaagggactaattcggtgtgccagctttatttgccactcagaaaccagccggcctgggataggtgccaatgcatccttctcacgtgcatctgcatcatcagcatggataacagaaataacgtcttcaaccagtttgtccctgccaccccttagtggatcctgtaaaaatacatcagtatgtgttttcccttcatagagtagtaacttggctttagcaccagcttgtttaaggacacccgcaaaagtttcactagcagaaaatggtatagaataatcatccgttccatgcaaaagcacaatctgaggaagaagagctattgtttcaggacataatttcttggcaacagtttctggagagaaatgtggcaatgatttctttcccttcattatgctgagaaaaatttgacggtaaagaccacgttcat

SEQ ID NO: 26919 - DNA, 362 bp, Oryza sativa
  Clone ID: uC-osflM202058h03a1
acctgttaattgactgcgctctcggtattatgttgtgtctacaaagaactgcagtgcaccaagtacacgacattattaagtttaggggaaaaacaatgtatctttaacctcaacatttctggtgtaaaacggaataaatagtttagtatcaagcaacagtgtttaaactaaggaagttttgcctcgttaagttctgttctaactgcataaataaggtaatccttattttttttctctatgttttttatctaaagctcccggttgagtctgacctggtgtccaaaacttgatgatagttttaccgatgccattgctgtcttgtgcagcctttttttatttactgacgctattagatttttctt

SEQ ID NO: 26920 - DNA, 400 bp, Oryza sativa
  Clone ID: uC-osflM202058h04a1
ggggttctgaacccacggccaggcattgcctgccaacagtgaaagtgtttacaatatacagggtcccccgaaaaccaatcaaatggactgggccaggcaaaatgatttttacttgttacaaaactgcttgatagcctccgtctatggtgaaaccctcagtagcataagaactaattcaacacgagcggtataaatagggagcataaacaagctgctagggggacaggtttgttacagcacagcccgatcagtccaaggggagcaaaacgcatcctagccgactgggctagagataagaacaatccctaactgtcattatccaagatattccgattcgcttggtggggacccccttcttcctggaagacgacgatactacatttggtaaaccgcatggaaa

SEQ ID NO: 26921 - DNA, 450 bp, Oryza sativa
  Clone ID: uC-osflM202058h05a1
aagggaccctacaaaacttgaacccattagcagcacaaacaccattggatatatacacaaactaggggggctaaaattttgctcataacccactgacatggttttttgaaaacatggatagggtctacaccaacaaatagttttatttttccaaaaaaaaaacaaagatttaagttttttccattggggaaggaaaaacccttttaggtaaggggacaaacccccgaattaatcttagggggaaaatacccaacaacatgccccatttacgcaacccctcttttaaaaggataaatcccaaccgtggattggttttccgaaaagccaagggctcgatttgggaccacccttccgacttggccggacaatgcctaggtgctttaacaaatttggtgctttaattaattatccccttacattgattatctaccctggaaggaacccaattaa

SEQ ID NO: 26922 - DNA, 403 bp, Oryza sativa
  Clone ID: uC-osflM202058h06a1
gggggaagttaaaaacagacaatgtattcaagaagagtttacaagctgtttttacaactacatcatcattaagcaaacgtagaaaggcatgaaatatgatggcaggatacagtgagacaggttgaaagagccgcagtaactagtcggaatcagagtcatgcctcctcttgggcttgactttgcgggggggcttcgacctgttgaccgactcaagccgactccttttttcttggttggcacgcctcctatcctttccttccgagggcctttctcgcttccgctctttatcccctcccgaattctaacggccgcttttgctccaacgattattatcggaaggctttacggtccggtatggtttccgggggagggttgtcagcctgctcagcgggcaccatttttg

SEQ ID NO: 26923 - DNA, 355 bp, Oryza sativa
  Clone ID: uC-osflM202058h07a1
aaacaatatttaagacatttttaagttgacgtggaagataatttacaggctcacacaattatcagatgtatcatctggtgattaagttcctggaaactatcttctgcacagatgatgcgggcaaatctggaagcgggaaaaaaaaaggaaagtttgctatatacacaatgttagataaaattggttattgtttttcatgcatcattacacaggtatgaatcatctgtgcaaaaacaataacgcatgcgtgacatttggccatagaagactatgcacatgttaatcaacagacaacacaatcttgaagtatttttcaagcattgcatcctttgagaagtcagtgaagtaccccttt

SEQ ID NO: 26924 - DNA, 225 bp, Oryza sativa
  Clone ID: uC-osflM202058h08a1
aatcattaataatataaatatatcgaaaacagttggttaaacagagtagtcaagagtcgatcgatcgatgtacacggagacaaaatcaaagacctctctcatcacttggattaattaatactagtaatatttagagactcttgggcaagcatagaaataattagcaaatgaggatggtgatgcaggaggtgtagaggctaggcagcaagggaggggtggtggtgg

SEQ ID NO: 26925 - DNA, 465 bp, Oryza sativa
  Clone ID: uC-osflM202058h10a1
ggttggagcaagtatagagagatttgattacatcgatcgccaagaaaagaaatggcgggaacggagcagattacaccgattagtgacgacgacgacgacgacgatggcggcggcgtgacgtcatgaggtcagatcgcctcgtcgcgcgcggggaagaagagcttccagtagagcagctcgttccacgcgtcggggacgccggggaggcaccagtgggtgcagtcggcgtagctcctcgggtcggcggcgagctgctccgccgtcggcttcgcccaccgctgctccctgtacacctgcgtgtgcgcgtcgcggcggagctccgacatccgggtgacgttcaccaccccgacgggcacccgcgatgcccccagcacctcgccggtgacctgcaccatccgccggttcgtgctcccgcagtacgacgccgcgttggccgtgcccaccggcgtcgtctggtcgtagcac

SEQ ID NO: 26926 - DNA, 425 bp, Oryza sativa
  Clone ID: uC-osflM202058h11a1
gtgggggcaatcatatcaggcaagcaaaacttcgcctcttgaagcaaatgagagtgatatctttacagagatcttgccttgaaggtatattataatcaagttactgaaattctacgcataactatttgatctgggatcacatttcctccgatcatacacaaaacggaagctaactgagagctcaatatacttgtaaacctattagcacttctactatacaccagggaaacatggcagggaaaagctttgatcctagaattactagaaggcagggggtaaaaaaaacaaaaagaggacaggaagaatgggtgagggaattatacatggtcgaatagctcaacttcgcaggattttcgaaaaggagctttaatatctgtgtgagacgctctgcttattcctgtcccaggcagccctaagagcgtcgt

SEQ ID NO: 26927 - DNA, 467 bp, Oryza sativa
  Clone ID: uC-osflM202058h12a1
ggcatctgaacacagtatcaaaaatcaacgtgcatataatatccattcaacagaatcgcatctattacaagccttccattataggacgccgatagtgcagtgctgcataagacaatttacactgtccacatgcgttgacattactacagacagtaagactcaaaacgacaacacgcatacattacggtacagagcacaaatataaaaaggttacgtttattcgccttaatttatcttaagatggtaggattatataatatatggcaaacacaaacggtgactgggcaaaccattgcacctataccctgacgagaattcaacagggagaaaccacaccacgttctgatatccatggcccttgattttttccatcaatgttggaccatgcgtaaccagggttatgatgggcacatccccattgaatttttgccacggttctttagccttccttggattccccgtgcacg

SEQ ID NO: 26928 - DNA, 514 bp, Oryza sativa
  Clone ID: uC-osflM202061a01b1
cactgaggtagcataggcatagctagcttacttcatggtctctaccttgaacgccatgtcttcctcggttctcttcctcgccgcgctgctgctgctctcgtgcagctccatgagcagcgcggcacggtggctcgaggaggagtacccgccgcaccccgccgtgccggagctgcccaagcatgaggagccgccgcaccccgtcgtgccggagttgcccaagcacgaagagccgccgcaccccgccgtcgtgccggagttgcccaagcacgaggagccgccacaccccgtcgtgccggagctgccaaagccggaggtgccacacgccgccgtgccggagttgcccaaaccttgagctgccgccacaccccgccgtgccggagctttccaagcacgaggagccgccgcaccccgtcgtgccggagcttccaagcacgaggaaccgccgcacccgtcgtgccgagcttctaaagacaggagcccgcgaccccgcgtgccgagctttccagcacgagag

SEQ ID NO: 26929 - DNA, 491 bp, Oryza sativa
  unsure (1)..(491): unsure at all n locations
  Clone ID: uC-osflM202061a04b1
acatgtccggaaaagagcttcagattaattagttagcaatggtgtccttccatgcagccatcgtcttcttcctcgtcgccgcgtcgtcgctcctctcatacggtgaggcggcgccgaagatgacggcggtggcggcggactacgggtacccggcggactacgggtacgcggcggggagcaagctggggccggagaactgggggaagctgagcccggcgtacaagctgtgcggcgacggcaagaagcagtcgcccatcgacatcgtcaccaagcaggccatctccaaccccaacctcgactcactcaaccgcacctacaccgnctccgacggcaccctcgtcaacaacggcaaggacatcttgatggagttcgagccagacaaggtggggacggtgacggtgaacggaaggtgtacagcttcaggcgggtgcactggcacgcgccgtcggagcacaccatcaacggggagaagcacccgctggagcttcaga

SEQ ID NO: 26930 - DNA, 437 bp, Oryza sativa
  unsure (1)..(437): unsure at all n locations
  Clone ID: uC-osflM202061a10b1
ccgacacggctctcatcttcacgcagcttaacttttagcagcagctcaagctaagctaagctaaagtactacgtgttctttcgtcttcgtcggcgccggagtttgattcgtcggagctagctagcaagaggaagaagaaaatgttggccatattccagaagcaggtggcgcacgcgccggcggagctgaacagcccgcggagcagcgcggcgaagcccaagaaccccgacgagatcctcagggacttccacgccctccaccccatcgaggccttctccacctccttcggcgggcggcgccgccctcgcctgcgtcgccggccacgcccgcaatggcctctctggctacgagaggatgttctgtgggctggatgacatctactgcgtgttcatgcngaggctggacaacctgagcagtctgatccggcagtacgggct

SEQ ID NO: 26931 - DNA, 420 bp, Oryza sativa
  Clone ID: uC-osflM202061a12b1
aaaaaaaaaagaagcagagaaaaaagctctttcggcatggattcgcacgtaggcaagttattcgattcggtgggctcgatcttccgcggcagcgacaccctcccctggtgcgaccgcgacatcatcgctggttgtgagaacgaggttgcggaggctgcgaatgaagaacagaagaatgagagccttatgaggctttcgtgggcgcttgttcactccagacagcctgaggatgtgaaccgcggcattggaatgcttcaagcttctttggacaggtctaccagtccactgcagacaagggagaagctctacttactggctgttggacactacagaactggtgattatacaaggagtcggcagcttttggaaagatgcttagagatttcaacctgactggaggcaagctctcactttacaaag

SEQ ID NO: 26932 - DNA, 403 bp, Oryza sativa
  Clone ID: uC-osflM202061b02b1
ccaaccgccgccgcatcgccctcgttagttcgatggccgcgtcggcgctgcaccacaccaccagcttcctcggcaccgcccctcgccgggatgagctcgtccgccgcgtcggcgactccggtggccgcatcaccatgcgccgcaccgtcaagagcgcgccccagagcatctggtatggacctgaccgtcccaagtacctgggcccgttctcggagcagacgccatcgtacctgaccggagagttcccgggagactacgggtgggacacggcggggctatcggccgacccggagacgttcgcgaggaacagggagctggaggtgatccactcgcggtgggcgatgctgggggcgctgggctgcgtcttccggagatcctgtccaagacggggtgaagttcggga

SEQ ID NO: 26933 - DNA, 125 bp, Oryza sativa
  Clone ID: uC-osflM202061b03b1
gatcgcaaatactctcttttgccgatgcatcagcagtagttatgtgttcgccctcgccgccgcatccaccgccttcgccgccaagccgcgcctggcgcgcgcgccgtcgtccccggccgagcggt

SEQ ID NO: 26934 - DNA, 236 bp, Oryza sativa
  unsure (1)..(236): unsure at all n locations
  Clone ID: uC-osflM202061b07b1
tcgtcggcgccgagatggctctcctgtgttgtattaccggcggcctctcgtgacttcctcggnggcctcccccctgccatggctgtgaatggccacagggtcatggtgatctctcctcggtacgaccagtacaaggacgcttgggataccagcgttgtggctgagatcaaggttgcagacaggtacgagagggtgagtgtttttcattgctacatgcgtggagtctaccgtgtgtt

SEQ ID NO: 26935 - DNA, 507 bp, Oryza sativa
  unsure (1)..(507): unsure at all n locations
  Clone ID: uC-osflM202061b11b1
cgccaccgccgccgccgccgccgccgaatccgttacccccatctcggattcacctctcccgcctccggcctccgtcaccgtctccccacgcgcgtcagtcatggcgggaatggcaccagagggatcccagtttgatgctaagcactatgattctaaaatgcaggagcttctgaaccaaggtgaaaccgaggagttcttcacatcttatgatgaagttcatgagagttttgatgacatgggtctccaagagaaccttctcagaggcatctatgcctatggtttcgagaagccttcagccattcagcaaaggggtattgtccctttctgcaagggtcttgatgtgattcagcaagctcagtcaggaacaggaaagactgccaccttctgttctggaattttgcagcaacttgactatgctgtggttgagtgccaggccttggtccttgctcctactcgtgagcttgcacagcanattgagaaagtcatgcgcgcacttggtgactatct

SEQ ID NO: 26936 - DNA, 273 bp, Oryza sativa
  Clone ID: uC-osflM202061b12b1
ccgcttcccaccctccactgcttggttcgatttacccggatgaccttttaatcacagataggtcctcggatcgagcgggctgagatattcgagggggtctgctggaatgtgtcgagttcgacggcggcgagcgagagagagagagatggggatctccagcatggcggcgccgaaggatagcctcgtgctgtacgtgctgtacaacgcggtggtgtcggtggcggcccttgcccgcgttgtgccggacgccctttcgttcctggggctccccac

SEQ ID NO: 26937 - DNA, 394 bp, Oryza sativa
  unsure (1)..(394): unsure at all n locations
  Clone ID: uC-osflM202061c03b1
catagctcctcctcctttgttcagtttctttttcagngtgctttgcatctctccattgagcaagaggagaagggaggctcggctagctagctagctaccatctatactagtatcaagtttttttgttcagatttttttgttggaggaagagttctagggagatcgatatggccttcatgtccatggaacgcagcacttgggccttcacctttggcatcttaggtaacttaatctcactaatggtattcctttcgccactgccgacgttctaccgggtgtaccggaagaagtcgacggaggggttccagtcgaccgccgtacgtggtgacgctcttcagctgcatgcctgggatgtactacgcgttcgtctagtccggcgccgagctgctggtca

SEQ ID NO: 26938 - DNA, 186 bp, Oryza sativa
  unsure (1)..(186): unsure at all n locations
  Clone ID: uC-osflM202061c05b1
ccgtccgttgggaagggagcttcgaggttgctgtacgaggcgcgccttttcgtgccggcttggncggtggcacgggcccttgggggcttgcgcccctaacgtgggtcggggcgcgcggcgtccacacagcgccgctagcttgcttgaataatgacttatacgcgctcaattatagtcaggcacacg

SEQ ID NO: 26939 - DNA, 498 bp, Oryza sativa
  Clone ID: uC-osflM202061c11b1
aaaaaaggattatctcttcttttatcgactcgtcttcttctcccccgattcccgagcagcttctcgaaaccctcgcggcctcgattcctggctgatggcggatcccaacccgcaagtggagagggaggtgtaggtttttttttttttcctctttcttccttccttattatttccttttttccctcccttctccttctcttatttttcctttttcccctcctttttttttctttctctcttcacccttttttcttcctctatttctctctctccttttcttcttcttatctcttttttttttccttttctttttatctcacttcttttatctctttttttctttcttctttcttttttcttctatttcctttttttttcttttctttttcctctttttatctttcttcccttttttctttttttctttattcttcttcttcttttctttctcttctttcctttattctttctatttctttttaccacttttctcttttt

SEQ ID NO: 26940 - DNA, 324 bp, Oryza sativa
  unsure (1)..(324): unsure at all n locations
  Clone ID: uC-osflM202061d01b1
ccgacgacacatagaaggttttcatggagaatgtactggtgctctccttgatatcgcctnncactctgccaaggatgggtggtgcaatctttagaatatgatcatacagcaagtattgagtgccttcgcgatccgatgaagccgctgtacaacggcggcatcatccagaacggcgagttcaacagcggcctcatgggctggtccacgcaccgcgacatcaaggccggcctgagcagctcgccgtccggcaacaagttcgcccgtggtgcagcgcgccgacttcctcttcggcgccgtcgtgccgtcgggcagcgtttaccagaa

SEQ ID NO: 26941 - DNA, 348 bp, Oryza sativa
  Clone ID: uC-osflM202061d05b1
ccgaccggggtccagaaccgtaaccttaatcttagcgaggaagcattgccttggcggcggccggaggggggagatgtccaattcttcgccttctagtccggaacggtgaggttttccctccctttatatggacatcacccgtttgtattttctgttgcgcatgcttcaaatcttggatggacttgctcatccttcggcgggcatggatctatcggcggaagctgttgctgttgctcgttcatcccttcggatagtcagatattgggccgtcttgacttcttaaagggccggttggggcattgcttcgtacgagcttggcctgtattaaatcctcactgccaggtatga

SEQ ID NO: 26942 - DNA, 257 bp, Oryza sativa
  unsure (1)..(257): unsure at all n locations
  Clone ID: uC-osflM202061d08b1
tgggtgctaagaaggagaggcttttgaagttggaccaggctgccgctgattgcaaaaccgntgaggnaaagaaaccaattgttgtgaagtatggtcttaaccatgttacatacctcattgagcagagcaaggcccaacctggtggcattgcttatgatgtcgatcccattgagctggttgtgtgggtttcaaccctgtgcaggaagatggaggacccttactgcattgtgaaaggaaaagacccgcttggatcaatt

SEQ ID NO: 26943 - DNA, 508 bp, Oryza sativa
  Clone ID: uC-osflM202061d11b1
ttttccccatctcctcctcccagagctggattttttgcaccccgcatcctttccatggtaggacttccgtttgattccgggtcgaatccggcgcctccgatgccggaacggtgaggttttccctccctttatatggacaacacgcgtttgttttttctgttgcgcaggtttcagatcttggatggacttgctcatccttcggcggccatggatctatcggcggaagctgctgctgctgctcgtcctcgcgttcggcgagtcagatctggagccgatctgacctcttaaaggtccggttggggcatgctccgtacgagctggcgtggatgaagcggcggggcgagggaggaggctggtcgtcgcctggatcctttccatcggggcctcgcgcgatgatgtctcttttgtattgataattattcgatgaacttttgtaattattaatctaagagatgttttcgagggacccggggctgagatgaaggcgcaaggaagagaactgtacaag

SEQ ID NO: 26944 - DNA, 337 bp, Oryza sativa
  Clone ID: uC-osflM202061d12b1
aaagcagcagcagtagtcagtagacgctttttaagacaagctcaagcttaagcaagagacaccaaccggcggcgaggaggcaggaatcgcggcggcggggtcgccggagatggggagggaacggggtggcggcgaggggatgacgatgctgcagcggtggtcgtcgtcggtgtggagcgtgagcgggagcgggcggctgctgtgggcggacaaggcgtggcgcgcgcacgccgccatggcgttcacccagctcgcctacggcggctaccacgtcctcaccaagtccgtcctcaacgtcggcatgaaccagatcgtcttctgcgtctaccgcgacctc

SEQ ID NO: 26945 - DNA, 93 bp, Oryza sativa
  Clone ID: uC-osflM202061e03b1
aggcgcggcgctcctcctgctggtcttgatccgatccccatggcgttcatgccctcccactccaatgcattcttcggtatgggggttggttct

SEQ ID NO: 26946 - DNA, 438 bp, Oryza sativa
  Clone ID: uC-osflM202061e05b1
tcaatttgtcgggtaaactacttggagctcacttagcccatgcaggattaatcgcattctgggccggagcaatgaacctatttgaagtggcccatttcgtaccagaaaaacccatgtatgaacaagggttgattttacttccgcacttagctactctaggttggggagtagggcccggggcagaagttctagatacttttccgtactttggatctggagtacttcatctaatttcctccgcagtcttaggcttcggtggcatttattacgcgcttctgggaccggagactcttgaagaatcttttccattctttggttatgtgcggaaagatagaaatacaatgactacaattttgggtacttacctaaatttgtaaggtaatggagcttttcttttatttactcaaagctctttattttggcggtttatttatacct

SEQ ID NO: 26947 - DNA, 244 bp, Oryza sativa
  unsure (1)..(244): unsure at all n locations
  Clone ID: uC-osflM202061e08b1
agcagagcaagcaaccaagcagcagcagctattttcgccgcagccacgacatcctcccacctgctcctgctctcccgccagcaggcggcggncttgcttcaatgcggcctctcctttcggaggcaggccggcaggctcgccggtgggttcgttgcccccagcgtgcggtgcatggtggtcgttgacaccgtcttggtgccccgcgtgaccgaggcttgcaagaagagcagctactagatcacca

SEQ ID NO: 26948 - DNA, 474 bp, Oryza sativa
  Clone ID: uC-osflM202061e10b1
gctggcgcggaggcggaggaggagggactctgtttgctggtggagggagttgcggcggagaggaagaggaaggtggcggcggtgatcgaggacgtggagcacgcgctgtcgaccccgacggcgctgctgcggggcatctcggacgccatggtcaccgagatggagcgaggcctgcgcggggacagccacgccatggttaagatgctcatcacctacgtcgacaacctccccaccggaaatgaacaggggttgttttatgcattggatcttggaggaaccaacttccgcgtcctgcgagtccaactcggtggcaaggagaaacgtgtcgtccaacaacagtacgaggaagtctcaattccaccacatctgatggttggaacttccatggaactgtttgattttattgcttctgcattggcaaaatttgttgatactgaaggtgatgatttccacctcccagagggagacagagag

SEQ ID NO: 26949 - DNA, 448 bp, Oryza sativa
  Clone ID: uC-osflM202061e11b1
ggcgctcaaggtcgtctctttccccgggtacttggccgcggtctcatttctcgactccaacagaggaggagctttcaaccagctcaaagtggacctcccgtttcaaacgagggacagaagagcagtttccctgagaaggacttgctgttcaatgcaacaggctccaccaccagcatggcctggtcgagccgttgttgaacctgggaggaggtcatgggatggccccaagcctatctcaattgttggctcaaccggttctattggcacacagacattggacatagttgcggagaatccagataaattccgggttgttgctcttgctgctggctccaatgtgactcttctagctgatcaggtgaaaacattcaaaccaaagcttgttgctgtaagaaatgagtcattagttgatgagctaaaggaagccttagctgattgtgattggaag

SEQ ID NO: 26950 - DNA, 311 bp, Oryza sativa
  Clone ID: uC-osflM202061f02b1
agaagcgcgcgagaagttgggaagcaatttagggactgaccggtgacccctaaagggggtgaccaccgcaagcagtgatgtaccatccaacaaggtcatcttatgcagtggaggcaccagagcattggcatccactgagggacaacactccagggagagccttgtatggccatctaagccatgctttgtacctgaagatgaggggagccactgtagacgacacatgcttaagggcgctggtatgcaagctgactggaatgctatagtggcacgctgatgagatgaagctccccgaagatgcacagcacctt

SEQ ID NO: 26951 - DNA, 451 bp, Oryza sativa
  Clone ID: uC-osflM202061f03b1
tttgtgtggttggtgacccgacccttatttcctcctccgactccgatgcgctcctccgccgccgacgcgccgccccccgccaccgcgagtgagatcggagacctccccgtggagatcgtcagcgacgaggagatggcgctcatcgaggccgcgctctccgccgccgcggcagcatcccgcccggtcctctcctccgccgccgcccgccgagcggtccagctctcctcctgcgcggcctactcggccgcctccggcggcgacatcgaggactccccacctctcccgacgccgcggagggggtctctgctcgcgcggttccgcgaccgccgtgcgctcgccgtcaccgacatcaccgccacggaatggtgcgataagcagcaggagttcgtgctggagcacggcaagccggagatgacccaggccatgaaggccgggttcgagcgccatgccc

SEQ ID NO: 26952 - DNA, 529 bp, Oryza sativa
  unsure (1)..(529): unsure at all n locations
  Clone ID: uC-osflM202061f06b1
aaacaaacaagattactccagctaactagctaccttggcaatggcctccttatcctccttcctgctcgccgcagcagtggcgacactgtttgtcgttggctcatacgccaccgagcttaccttcaaggttaatgagggctctagcgcaactagcctggaactcatcaccaacgtcgccatctctgaggtggagatcaaggagaagggtgccagcgactggacggcgctgaaggaatcatcgtctaacacctggacgatcaaaagcggctcgccactcaagggccccttctccgtccgcttcctcgtcaagaatggcgggtaccgcgtcgtcgacgatgtcatccccgaaagctttacggccggctctgtctacaagagtggtatccagctctaagtaacatacacgtatgctttttttttggtgagtcgcatgagaatttttagcctctaaataattctattttaagacagattgggccgcctgcgagcgagccaaaaaatatttntctggtgtcatttcatcggaata

SEQ ID NO: 26953 - DNA, 542 bp, Oryza sativa
  unsure (1)..(542): unsure at all n locations
  Clone ID: uC-osflM202061f10b1
ctccagccacacgagcctagttcaggttgatactatggcgtccaccgcctctttcatgctcgccgtcttgctggcggtggccgtcgcggcggcgccggcgagggcggtgcgatgcccgccgagcgacaagcaggcgctgatgagagtgaagcagtcgctgggaaacccggcgacgctgtcgacgtggtccctggcgtcggcggactgctgcgagtgggaccacgtccggtgcgacgaggccgggcgcgtgaacaacgtcttcatcgacggcgccaacgacgtccgcggccagatcccgtccgccgtggcggggctgacggcgctcatgttcgctgtcgcttgtcccgctcccgggcctctccggccccatcccggcgtgcctcaccgcgctcttcaacctccagttcctcaccatctcccacaccaacgtctccggcgtcatcccggactcgctcgcgcggatccgcagcctcgactccctcgacctctnccacaacagcctgaccgccccatcccgactccttttcgcctcccgaccttcg

SEQ ID NO: 26954 - DNA, 242 bp, Oryza sativa
  Clone ID: uC-osflM202061g02b1
tgcattccgaagctaaaccttgtggggtttcttttggccttacttccgttcttttctctgagaagatttgactacggattattaatccatattattacgagagacaatgtggtcgaatttacatggagggaggctggttcagaggagccaagtgttacatttcggcggatgcaggcttaaggttcttgttagggctgcttaacacaaattcgctggtggccttattataccttaggtgatgg

SEQ ID NO: 26955 - DNA, 438 bp, Oryza sativa
  Clone ID: uC-osflM202061g05b1
tccctctcgtcttcccccagatccccccattccctaaccctaccatcgccatggcctcccgcatcaaggaccgcggcaaggccgcacccgccgccgcgggatcccgcccgctcacccccaaggccttctccgcctcgtcgtccgctcgccgcacccccgccgccgccgctgccgggaaggagaactcggcgtccaagccctccaagcccaccgccgcggtgcggtggtccacgtcgtcgatcccgagggccagcaggatcccgagctccgtggagtcctccaagctcgtctccaccctcagggcgtcctcggtgatgccggggagggcatctgtcgggaaggaaatggaggcggaggcggccttgcggcggagcgtgagcggcgggatcagggccgctgccccggagagagcgaggaggctcgttgggtggcgttggg

SEQ ID NO: 26956 - DNA, 400 bp, Oryza sativa
  Clone ID: uC-osflM202061g06b1
caagaagagacgagacgagggagagaaggagatgagggggccgtgccgtttgtcgtcgtcgtgttcctccccccctctctctcctctcctctcctctcgatctccatccttccttccatccattcctccccgcacccttcgcattgctctcgtcgtctcgattcggtcgaggatctccaggaaaagaggaggaagcgatatgggttgcttttcatgctgcggagcggatgatgtcggcatgaagaagaagcgcgacgatccttacgtcccgatccctgatccaggtggcaactatggacgtagcaagcccgggcccccagccccttcgtgttctcccgccaccagcagaaatgtgccaattgcagtaccggcaattccccttgatgaaataaagggaatc

SEQ ID NO: 26957 - DNA, 453 bp, Oryza sativa
  unsure (1)..(453): unsure at all n locations
  Clone ID: uC-osflM202061g08b1
gtatcctgaagttgcttgactcacaccttgtgttctcatctactgctgcagaatctaaggngntttacctcaagatgaagggtgattaccacaggtaccttgcggaatttaagactggtgccgagagaaaggaagctgctgagagcacaatggtggcttacaaggctgctcaggatattgctctggcggatcttgctcccacccatcccataaggcttggactggcacttaacttctctgtgttctactacgagattctaaactctccagacaaggcttgcaaccttgctaagcaggcgtttgacgaagccatctccgagttggataccctcgnggagggagtcttacaaggacagcactttgatcatgcagctcctgagggacaacttgaccctctggacctttgacctacggaggccgtgtatgatgagtgaaagaaaccttcagggcgac

SEQ ID NO: 26958 - DNA, 516 bp, Oryza sativa
  unsure (1)..(516): unsure at all n locations
  Clone ID: uC-osflM202061g10b1
ctctctttctgaggaaactgaagatttgaggaagcagcgtcagaaatttgaagaagagtgggagcagctggatgaaaaaagaactcacttggaagaggaagccaagaaactgaacaatgaaaagaagaatctagaaaggtggcatgacaatgaagaaaaaaggctaaaggatagagaggatgagttggacataaaatacaaggagcagggggaaaatctcgcacttaaggaaaaatccttgatcgataatatagaccatcagcgtttggaaaatgaggaattgctaaagagagagcgtgctgatcttcaacaaaatttgcagctccatcggcatgaattggagatggagatggagaaaaaacaagcgagcaaagagagagaactttgagagaaggaaatgagttaaatggaagatggactttgtagaanatgagctcaaacgtgcagccgaattgaatgaatcanagattcagaagatactattggagaaaaaacagctgcagagggaaagggaag

SEQ ID NO: 26959 - DNA, 497 bp, Oryza sativa
  Clone ID: uC-osflM202061h03b1
tatgttgtgaagttagtataatgttttgatgtttctagatgtaactttatactgactgctcctctatatattagtttgttacttagtggaggatataggatataggacggatctaggacgccggtggaatgaccgatgaaccagctgtacatcagcctaggttgaaagagacctattgctggatttgctggttcagattatgatagcaaacgtcgtacccctccaccttctgttcatggaacttgattcaattagttttacgaacaattgagtccatgcccaataagctcaggtcttcggcgttttccacacttgctgcttgcttgattctacatgctcgacacaaggaatttcactgcgggaactgaggaaatggacaatcaacttaataaacattatttaaattttgtctacttatggtgctttgacctaaattccttatctgtagtgacaaaatgtgtgcaagctttctgagcttgtactccatattattatcg

SEQ ID NO: 26960 - DNA, 486 bp, Oryza sativa
  unsure (1)..(486): unsure at all n locations
  Clone ID: uC-osflM202061h07b1
gcaccaaaccggagccaatccgagcgctccgtgttgcggaggcggtggctgccggacctactcgctgccgtgggtgggggctgggagggagcgggctggtggctcgtcccgtccgcgatggactgggcggcggcggggtacccggcggcggcgctggtgtgcgccgcggcggccaccgtcatcgcgctcgtgcacatttaccggcacctcctccactacgcggagcccatctaccagcgattcatacggcgcctcatcttcatggtcccggtctatgccgtgatgacgttcctttcccttatcttaccagataattcaatatattttaattctattcgagagatttatgatgcttgcgtcatttaccaatttcttttcactttgcttgcatgggtnggggggtactggtgctgggggggacagtttgattgggcgaaccctgagtccttcgtggtttctggggacatggcggttttaaccttttct

SEQ ID NO: 26961 - DNA, 198 bp, Oryza sativa
  Clone ID: uC-osflM202061h08b1
ggccaccgacgaccggtttattgaggacgacttctccacctacggagagatcctagactccaagacaatcaacgacagggagacggggaggtcacgctggcaagctgtgggacgcacacctaaaggtagttgacgggccaccctaggacaggcatgaacgggaaggagctccacatacgtaaccaaccgtcaatgagg

SEQ ID NO: 26962 - DNA, 315 bp, Oryza sativa
  Clone ID: uC-osflM202061h09b1
ctcgcctagcgcccgccacctaggccgttgtctcatcccccccacctcttctgctcctctccccaataaaattccccgcacgaatcgatccccccctcggatccggatcgcctcgcccaccccctctccgccgctcgtcgatcgcgattttttttttcttcgccggatttttttttctcccgatcggtggggagggctctctctctctctctctcttcaccctagggttagggggagcgccgccgcatttcggtccgccgccgccgccggagtcgaggagctagggttttcgtcggtcggcgagaagagggactt

SEQ ID NO: 26963 - DNA, 522 bp, Oryza sativa
  Clone ID: uC-osflM202061h12b1
cccaacaagcaaccctaatccatccatggcggttaatacttcgcgcgcatagatactaatcccatccgcgcgcggcctcaacatctcaacctccggccagcctcgcaatcctgctgctatctcggcggcggggaggaggtgatgagatcttcgggagcgcgtctcgcccggtcctaagatgcttgccggcggaggaagcagagttagcggcggcggcggcggcttcaacctcgcctcctacaagtacaaggaccccctcctcggacgcggcggccggagcttcctgttcggcaacacctggttcctcctctccacctacccggcgcgcctcctccacacagcggaccgccgcgcccccgccgccttcttcgcagccatcaaccggactccctgcgtgcgcacgcactgcacggggcagagcttgctgcagaggggcattgttatggctgcctgcggctatgcgtttcgacgagctgagctgggcgccgccaagcgccaacctgagaaggattcatctgtagg

SEQ ID NO: 26964 - DNA, 425 bp, Oryza sativa
  Clone ID: uC-osflM202062a04b1
gctgcatgcttttgtggagtatgagaccctttatagatgctgagaacgctattctggagcttaatgatgagaagaactggagaaatgggcttagagttaggttattgaatacttgcatgacaaagggggcaggcaaagggaaaaagggagtgcatgaagctgatggaaatggcgaggaggatgtctccacttcaaaccaatcaaatgagaagcaactcgaagaaccctctcaattgtcagatatgttgccagatcacttgtttgatgacagttccaatgataaggaaggtccacgacgtgccagaggtcgtggacatggtggcagagggcgagggcgtggctaccatcagcataacaacaaccatttcaacaaccagaactaccacagcggttagcaccacaattgccacgcctacaaccaccac

SEQ ID NO: 26965 - DNA, 466 bp, Oryza sativa
  Clone ID: uC-osflM202062a05b1
tgacctgaaggaaaaggtggttgttctttttggtagaatcagacatttagaaactcaagagaaggatttgaataaccaaaatatgctgttatttactgctataagtgaagcaaaaaatcctgttggcacttccagaaagggtactgttggttctgaagatggtcaacattatgctatgcgaaagagcattcgagcttcccatagtttacattatagtaagaacagcttcttgtggcctgatgacacggatatatcagattctgagaaatcggaaggatctgatgcacattgggaagcatttgatgcagactacggagcatctgatgcagattgtgaatgctccgagaaggtcagaagacgtttgcacacagtgtccagccatatgaatcctaacccgagtagcggtactacacacaaaagtgcaaaatcagaaatggtcagtcaagaaaagatactttactggacc

SEQ ID NO: 26966 - DNA, 267 bp, Oryza sativa
  Clone ID: uC-osflM202062a12b1
ccgtgttagctaaggcggtggtcggcgttttatttaagggggcggttcgttctgctacggaaccacgagaccaggtgttgtaatcgtcgctaccaccacgctggtggctcctggggtgcgcagactaatgcctggtgtcgttcaagagcgtccgacgtggtaatggaggatgggctacctgtacacaggtgtgaaggacgttgaaggcacttcaggcatcactctggactaccagcgagacgtgccagccatggagctggggacagg

SEQ ID NO: 26967 - DNA, 335 bp, Oryza sativa
  Clone ID: uC-osflM202062b05b1
cagcagctcagccgccgcctatggtttccattatcatggccccaacctcccgcgtcctcgccgacaagacccccttcctcggccatccccgcccctccaatgcccccgtccgcgacatcgtcggcgtcgccaccggccgcatcaccatgagcaaggagctgtggtacgggccggatagggtgaagtacctggggccattctcggcgcagacgccgtcgtacctgaggggcgagttcccgggcgactacgggtgggacacggtggggctcttcgcggacccggaggcgttcgcgaggaacagggcgctggaggtgatccacggccggtgggcgatg

SEQ ID NO: 26968 - DNA, 395 bp, Oryza sativa
  Clone ID: uC-osflM202062b06b1
ctcgtggagatcttcgcgagtttggtttgcttatctctgcatctggtcgcagctccatactgaactatgaatgcgggagcaaggagatgatccagctgtacgagatcctcctcaaggcacccggcgtcctcggcgcgcggttcagcggcgccggcttcagaggctgctgcctcgccgccgtggagagcgcccacgcggaggcggcggcggcgttcgtccgggccgagtacgagaaggcgcagccggagctggtgagcaagatcccgccgggccgccgcgtgctggtctgcgagcccggtgacggcgcccgcgtcatatagctcaccgcccaccgccgttctgcccgtctcgccggagcagcctcgcattgccgtgccccggccgccgcgaggcgg

SEQ ID NO: 26969 - DNA, 421 bp, Oryza sativa
  Clone ID: uC-osflM202062b10b1
ctcactcaccctcattcatggcctctccacttcatacatgtcaaggaccagcagcatagcttaggagagatcgtcgtcttccgcccatggcaatcccgtgaagcctcgccattccccatgccgaagcaaccccgccgccgtagtactcgctataaatccacctcgccgctgcttcttctcggtgtctcgcattgccggacggccggcgtcgacatgaggctcgtggtggtgtggctcgccgcggtggcggttcttggtctggccagccatgggcgccccgcggcggcggcggagtcgacgacgctgtcgacggcgtcgaggtggatcgtagacgagggcgggaacagggtgaagctggcgtgcgtgaactggccgtctcacctggagccgaagctgccggaagggctggtcaagcaccctg

SEQ ID NO: 26970 - DNA, 487 bp, Oryza sativa
  unsure (1)..(487): unsure at all n locations
  Clone ID: uC-osflM202062b11b1
tctgttgtagcagacgccaaaaaaatgttttattttgatgggccgacccatgcccatccgcnntgaagacccctctagcgacatctggaaacctaggatctgacctacaaaaggcggaatccagaagttggagccattctaacatgcagcatgtctctctgctaaggtcttcctgacctttcaaatcataaggcccttgcctcactgaacaaaatattcaagtcactagaggatctaattcgcttgcaatccttatggtttccactcatcacagtgataaggcaccatattcttatggccagtgcttatatgttctgagcttactgtagtaacagcagggtggaagctggtgaacacgatctcagggaaggacacactggcggcttcgtacgatcttacatatgacaattctattattgccctagattttaccagccaaagatgcaaggggtactcattctgttgattttggacagatggacagcta

SEQ ID NO: 26971 - DNA, 416 bp, Oryza sativa
  Clone ID: uC-osflM202062c01b1
cgttttggtattcccatacactttgttttttttccccgtctcgtggtcgagagaaaccgagaggagagagagggagaggagcgctgccgattttccggagggggagatctttttcttctccctgaaggttcgagatcgatctgcgacgaggaggagcggggaatcgtaactttatttccgaggaaatttcaacaaattgatgcactaatggagtccaagggtggcaaaaagaagtctagcagtagtcgttcctccctgatgtacgaagctcccctcggctacagcattgaggacctccgacctgccggcggcatcaagaagttccgctctgctgcttactccaactgcgcgaggaagccctcttgatagcccccttggctaccttgacctaatagtttagttactcctctgaattc

SEQ ID NO: 26972 - DNA, 463 bp, Oryza sativa
  Clone ID: uC-osflM202062c03b1
ggccgtcgacatgcagtaagaatgaagaactttattgctcaaggccgtcatttccattctactagacaatacgcaaactccagagtaaagacaagctcaattagagaacgaatgtgagcatgtctactgctgttgccataatatcgtcagtctcggcaaccgcggctgcagtagtgatgctcgctctgatcaagcgatgccgccgctacaggaggaagatgaagaagaagatgctagctaggatcgcccacgaggcgaccgaacagcaccgcgagatggaagcccgcgacgcggcggacagcgtgatgatcgagatcggccccgggcagaagttcctcaacgagatcctcagcgagaagccgatgcgcttcacctccgagcagctggcggcgtgcacccgggaactactcgtcggagctcggctccggcgggttcggcgtggtctacggggggagctgcccaa

SEQ ID NO: 26973 - DNA, 457 bp, Oryza sativa
  Clone ID: uC-osflM202062c08b1
ctagctagctagctagctactcctattgatgatatcgccggccggacatatgcgcaggatgctcggggactgccaggtcctgtcgtccatggccgccatggccggggccgcctcctccgccgacgcgctcttcgcctcgccgctcatccccaaccccgctctcgccggcttcatgtcctcctccgccgccatgcccttccaccacttctccaacgccgccgccaccttaatacctaaggaggaggggttgatgggcggcctccatgtggccaaggacgaggggatggacctcgagatggacatggagctcagtggcggctccggcagcgcccacctcgacggccttctcagcttcgccgacgtcgacgacgaccacaagccgcagcacagcggccatgaccagccgcccgacgccgcccagcccagcggcgccgtggggggcaacgccaagaagaag

SEQ ID NO: 26974 - DNA, 506 bp, Oryza sativa
  unsure (1)..(506): unsure at all n locations
  Clone ID: uC-osflM202062c11b1
aacactgcaacctcaacccattattgcagcaacaaattctgcagcaagcaagccagcaacagataattaatcctgatgcccaaaatatccaaacgatgttgagcccaagtgctatacaacagcaactccagcaactacagcaaatgcagcaagttcagaatgatcagaagcagaagattcaaccagatcaaagctaccaagttcctacaagtgcagttctcccaagtccaacatcattaccgagtcatttgcgagaaaaatttggcttctctgatcctaatgcgaattcttcaagcttcatcacctctagcagtagtgataacatgttggattcgagcttccttcaggaagttcgaaagctgtggacttatctcgatttaatcagcctgtagctagtgagcagcagcagcagcagcaacaggcatggaagcagaagtttatgggttcacagtcagtgtcttttgggggctcggttntgcataactcacccacaagcaaagatggtt

SEQ ID NO: 26975 - DNA, 497 bp, Oryza sativa
  Clone ID: uC-osflM202062c12b1
ttccctgtgcgcccattcctcctctccatttgctttccatccgcgcccgctaggaggagggagccggacgccgccgaggggagagcaggggagagaaggagaggaggagatcgccgacgccgtcgccgtccccgtcgccgatctcgagcgggagcggagatggcgctcacgtccacgaagctgttcagccgcctcttcgccacgaaggagatgaggatcctcatggccggtctcgatgcggccggcaaaaccaccatcctatacaagctcacgctcggtgagatcgtcaccactatccccaccatcggttttaatgtcgacactgctgcgtacaagaacattagcttcaccgtctgggatgctggtggtcaggacaagagcaggcccctgtggaggcactatttccagaacacccagggccttatttttgttgtggacagcactgacagagagcgtgttgttgaggccagggatgagcttcacccgctgctgaatga

SEQ ID NO: 26976 - DNA, 494 bp, Oryza sativa
  Clone ID: uC-osflM202062d03b1
caaatttgtcgcaatcttcaggaagtccatgaaaatccttgctatctagagaaggctgcttgaatgatacggaatacaggatgggtgagacaaattcacagattgatcttgtaactcatcctgtggatgatgcagaagatctggacaaggttttccgcagattcaatggagagacagagcagccagttactacagctacaatgggtaaggaacctgttgaaaggttaccctcacttgcatctattttttcagataagattgatttggcatggactggatctagtgagatacaagatgaccttctacaaggttttaccaaaattgatgagtatggatcgtttaatttcccagacaatccaagctatgggaattctgtaacccctgtcagaattcattcatttgattctaaatttgctatacaccagcgagaacgcaatggattggctcctacttcattgcatctgtcgtcattcagatctgctgaatactttggg

SEQ ID NO: 26977 - DNA, 410 bp, Oryza sativa
  Clone ID: uC-osflM202062d04b1
gaaaaaaaaacaaaacacaccaagccttatttaagcgacaatggcatcgctcaccaccaacatcgtcctcgccgtcgccgtggtggcagcgctggtcggcggcgggtcgtgcggcccgcccaaggtgccacccggcccgaacatcacgaccaactacaacgccccgtggctccccgccagggccacctggtacggccagccctacggctccggctccaccgacaatggtggcgcgtgcgggatcaagaacgtcaacctgcctccctacaacggcatgatctcctgcggcaaacgtcccaatcttcaaggacggcaggggatgcggctcatgctacgaggtgaagtgtgagcagccggcggcgtgctcgaagcagccggtgacgggggtcattacggacatgaactacgag

SEQ ID NO: 26978 - DNA, 380 bp, Oryza sativa
  Clone ID: uC-osflM202062d07b1
cggtgacctggttcccctgtcctacattgcctgtctcatcaccggccgccccaacgcgcaggccatctcgcccgacggcaggaaggtggacgccgccgaggcgttcaagctcgccggcatcgagggtggcttcttcacgctgaaccccaaggaaggtctcgccatcgtcaatggcacgtccgtggggtcggagctcgcggccaccgtgatgttcgacgccaacatcctcgacgtcctgtccgaggtgctctcggcggtgttctgcgaggtgatgaacggcaagccggagtacaccgaccacctgacccacaagttgaagcaccaccctgggtcgatcgaggccgtcgccatcatggagcacatccttgtcgggagctcgt

SEQ ID NO: 26979 - DNA, 454 bp, Oryza sativa
  Clone ID: uC-osflM202062d08b1
acgttaagtttttaaacaaacaaagtatattaatttgcctattccatgttaagaaacattgcagagaaaagacaggaagcacattttcagataaaacaaagaaggatctgcacaaagattttgaggacattgtgaacaattgtttaacaagagaggaatttgaaagcttatggcctcaaatgattgaaaaatatagcttgcacaatgtcaaatattttgaacacatgtggaaaactagagaacaatttgtgcctgtatatttcaagactgacttctgccccttcattcaaagcacagcattaagtgagggcacaaatgcaaggtttaaaagaagtgtaggaccaaagcatagtgtgatgagctttatgaatgagtatgaaagcatatatgacactatatttagcactgagtacagcaaagatcatgaatcaagaactaaaagaccagatttcta

SEQ ID NO: 26980 - DNA, 258 bp, Oryza sativa
  Clone ID: uC-osflM202062d09b1
actctctctgtttgaagccacggggaaattgtttgtttgattgcttgccagcgaatagcgaggggagaagaagaagaagaagaagaacaagaggggggaggaggaggatcttccaacttatttctgtggatgatgcagaatatctggacaaggttttcccgaaattcaatggacagtcacagcagtcagcctactacagctacaatgggcaaggaacttgttgaaaggtttccttcacttgcatttattttttcagat

SEQ ID NO: 26981 - DNA, 330 bp, Oryza sativa
  Clone ID: uC-osflM202062d12b1
actgcatcaatggccagttgaagttttttttgataagctcaggcgttcgcccgagagacgaaccggaggctatgaggtttctttggcgaggcgcggatcaccatgcacaagaccgcaacgaagtcgaagccaggggattactatgctagaccgtggtacggcgccgaccgggagctgtagctggagccgtctcctgtagccggcgacaatagctgaccgggcggatgccgcatggtactgatgagataccgtagggctgttagcagatcctgagaaagtcggtaataaccgggagcttgaggcaaaccacttctggtgtgtaacgctagc

SEQ ID NO: 26982 - DNA, 381 bp, Oryza sativa
  Clone ID: uC-osflM202062e05b1
cacaagttaggtgcatgccatggcgttttttatggagtgcgcctcgccaccggcactcacgctggccctgttcgcgttgtgcggtgcccttctcgccacctccatgctcccggcgcgtgcgacggcgggcagttgcttggacgtcggcgacatggtgatgatggacaggttccgcgcttggcagggagctcacaaccggtcgtacccgagcgcagaagaggcgctgcagcggttcgatgtgtaccgccgcaacgcggagttcatcgacgccgtcaacctgcgcggcgaccttacttaccagctcgcccagaacgagttcgcagacctcaccgaggaggagttcctggccacgtacaccgggtactacgccggcgatggccc

SEQ ID NO: 26983 - DNA, 466 bp, Oryza sativa
  unsure (1)..(466): unsure at all n locations
  Clone ID: uC-osflM202062e10b1
atcatggtccaagaattcttgctcatatcgccgtgcaacgtctgaagaggtgttcaatccggacgaacaagatgcagcagagccggcaggacgtggacgagcatgtcgccgagctccgcggcgagctgcgcaaggcgcgcgaggagcgagaccgcgcgtaccgcgtcctggaggtgagcgagtggaaggcgctggcgtcggccaacgaccgcaccaccatagagacgctcgaggcggagctcgacgcgtccagggagtccgagaagcggatgctcgagtccctggcgatgcagacgaagcagctcgagatgaccaagatcgagctcgaggaggccaggctggagaacgcgtcgctgcgtgagaccatccagaggctcgaggcctaagcggtgcccgtcgcgacgacgccgaagggaagtacgatcgcgactaccgagggttcacgcnagctgccgatgggcttgtg

SEQ ID NO: 26984 - DNA, 434 bp, Oryza sativa
  Clone ID: uC-osflM202062f01b1
tttcgccaagtggcgcactgttgtgagtattttttttcggcccatctgacctcgccgcgaaggaggctgcctggggccttgcccgctacgccgccatttctcaggacaacgggctggtgccgattgtcgagcctgagatcctcctcgacggtgagcatggcatcgacaggaccttcgaggtggcgcagaaggtgtgggcggagaccttcttctacatggccgagaacaatgtgatgttcgagggcatcctcctcaagccaagcatggtgacacccggggccgagtgcaaggacagggccacccctgagcaagtatctgactacaccctcaagctcctccacagaaggatcccccctgccgaccccggcatcatgttcttgccgggtgggcagtctgaggtggaggcgacccaaaacctgaacgcgatgaaccag

SEQ ID NO: 26985 - DNA, 305 bp, Oryza sativa
  Clone ID: uC-osflM202062f02b1
atcgcgcaggaggagatatttgggtctttgttttccatcctcaagctcagcacggtggaggaggtggtgcggagggcgaacgcgacgccatacgggctggcggcgggggtgttcacccagaggctggacgcggcgaacaccctggcgcgggcattgagggtcgggacggtgtgggtgaacacctacgacgtgttcgacgcggccgtcccgttcggaggctaccagatgagcggcgttggcagggagaagggcgtttacagccttcgcaactaccttcagaccaaggccgtcgtaacgcccatcaa

SEQ ID NO: 26986 - DNA, 401 bp, Oryza sativa
  Clone ID: uC-osflM202062f04b1
tcccatacactggctctcctggtttggtcaacttgtagctttctggaatgttgcaggcgcgcttgcgctgacgatcttgatcccatcggttgccaaggaaagggcgagcccagagttcatctttacccatttcaacacagaaaacggcatgggcatccaccagaaggcctacattctagctgtggggttgctgatgagccagtactctgtaatcggctacgatacatctgcacacatgatagaggagacgaagaacgcggattggagtgggccgatggggatcatcacgtccgtaggcctatcaaccatgttcgggtggatctacctgattgccctgacatcgatcatgacccacataccttacctcctgaaccccagcaacgacgccggcgggtacgcca

SEQ ID NO: 26987 - DNA, 448 bp, Oryza sativa
  Clone ID: uC-osflM202062f05b1
gagagagagagagagagagagagtttgatagaggagtgagagagttcgctgccacccagctaacccactcggacggcaccaactgcggccatttccgacgacgccgacgccggggcgcgcccgtcggtgctcccaagtccgccttctctgcggatgagaagctgctccaccgcggcggcgacagtgtggtcggccaccgcctgagaccggagagccacagctgacggctcgggggaagattcaggtgggctcgcactagaacgaaagacagtccccatgggttctttggagacgacaaacacgcggttccggtcggccggagcagcggatgccacagctaagagaaggcccctgcaaagcagaagtttcaaagaggtcgacaaatttgatgtctttgtcctagagaaacgctctgggtggcagttccgggccttacaacttctgctct

SEQ ID NO: 26988 - DNA, 391 bp, Oryza sativa
  unsure (1)..(391): unsure at all n locations
  Clone ID: uC-osflM202062f10b1
ctaggactgccagcaatgaagccgtttaggtaattattggcaagaaatggaaggagattgttgactacaatgataagatggtctacagcttccatgatgacgccaagagggagaaaccaagcagaggtggacggtacaacgtgtaagtcaccgcaaaacgttgcagcttggatagtggccatcgagtggtgtgccgataccggcgcctgttctttacagcctcagctagtgttgttgtccgaggcaatttttccgacctattgtgttgctttcctctctgatagcttatggtaaaagatacaaagatgttgaggagtttgtacgccacttaattttgctcgtaacatacattgacaatcaagaggagccatggcattgcgatcaaannaaa

SEQ ID NO: 26989 - DNA, 492 bp, Oryza sativa
  unsure (1)..(492): unsure at all n locations
  Clone ID: uC-osflM202062f12b1
gtgggcaaaaagcgagagagatctgttttgatgttcgatccggtccaccgcgacacgaagacgaccatggcgatggctcgctcccagcttgccgccgtgttcctcgccgtcctcgtctcggtggcgccgctcgccggcgcggcggacaacctccaggacgcgtgcaaccggacgctgttccccaaggtgtgcatccaggcgctgacgacgaacccggagagccggacggcgaacgcgcggcggctggcggagctgtcggtgtacgtggcggcggaggtgggcacggcggtggcggcgttcgcgcaccacgagctgaacggcgtgaaggaggacgccctgttcaagtgcgtggacagctgctccgacgacatcgaggaggcggtggcgcacctcagcgcgctcacccgcgagctcaccgacgccaagttcttcgaggtcaaggcctggctctccgncacgctcggcggcttctccacctgcgaggacacctgc

SEQ ID NO: 26990 - DNA, 386 bp, Oryza sativa
  Clone ID: uC-osflM202062g02b1
ctccaagtccatccccttccccgatctatatgtatttatccgatccaggccatggcggccaccatccagagcgtgaaggcccgccagatcttcgacagccgtggcaaccccaccgtcgaggttgatatttgctgctcggatggaacatttgcgagggctgctgtgcctagcggtgcatctactggtgtatatgaagctttggaattgagggatggtggctctgattacttgggaaagggtgtcctcaaggctgttgacaatgtgaactctattattggaccagcattgattggcaaggaccctacagaacagactgtcattgacaacttcatggttcagcaaactggatggaaccaaaaacgagtggggctggtgcaagcaaaagc

SEQ ID NO: 26991 - DNA, 403 bp, Oryza sativa
  Clone ID: uC-osflM202062g03b1
atctagctagggagagaaaggaagagattatttgagagagatggccattgcttatgctcccatggcgagccagctgatgaagagcagcttggtgtgctccaagccgagggggctgtctggtgcttcgctgacaaggaggccccgcttcacagtcaaggccatccagtctgagaagccaacgtaccaggtggtgcagcccatcaatggcgaccccttcatcggcagcctggagacgccggtgacctccagcccgctggtcgcctggtacctctccaacctcccggcgtaccgcaccgccgtcagcccgctgctccgcggcattgaggtcgggctcgcccacggcttaccttctcgtcgggccctttgcgcttaccggcccgttcgaacacgccggtgcaccggc

SEQ ID NO: 26992 - DNA, 490 bp, Oryza sativa
  Clone ID: uC-osflM202062g05b1
tgtcttttcaattagttatttatgatatgattatttgatagcactgttgctggcctaatcagtatttacttatcatcttccttgcggcaaggcagtctgagttctttttaatacattacacatcagctttgctatcctttttcttttgtaggacatatctagatgccttctttgggttcaacgtcgtcattgcacatggccaaacttccaaactgatccagtgaacaagcctatagatatgctaatgctcaacaaactaaaagagtcatacagccagataagaagtggaagttttgatgctgtcagtgttgttcattcatatgagcatgaaaaatcagttggtcatcagaaaacaaaagctatcggctttgaatgtacctcctatggggctactttatccaaaggttcttgtcccagaagaatacccttcacctcctcatcttgggtccaagattatgatgacatgttagaagaatcatggcaaacaagt

SEQ ID NO: 26993 - DNA, 367 bp, Oryza sativa
  Clone ID: uC-osflM202062g07b1
ccgccgccggagcaggagcagagaatggttgttttgtgcggcgacaactgcacctgcaacccctgcaactgcggcaagtgaagcaagcaacctcctgacgaaaccaaggagatggaagggcctagtactgctaagctagtagtttgatccagttacaagtgatgagttattgtcactgtaactttgtgtttcctgagtttgtgatctaagacctgagactgaagaaatgcatcctagttaaataagtgctaagaataaagatgttttgagacatctatggcgtgtgtacgatgatgtagtccttcctctccagtcttgtggtgtgtacgtaattaagaatgcagtgctgtgtcatgtggtatgcttt

SEQ ID NO: 26994 - DNA, 494 bp, Oryza sativa
  Clone ID: uC-osflM202062g08b1
aaaatgggggagatcaccaatgtcatgttgtttcaggccatcgcgcagcagaagcttccgaagatgatctacgactactacgcctctggagctgaggatgagtggactctcaaggagaacagggaggcattctccaggatcttgtttcgtccccgcatcctgatcgatgtctcaaagatcgacatgtccgcaactgttcttgggttcaagatatcaatgcccataatgattgctcccagtgccatgcagaagatggctcaccctgacggagagtatgcaacagccagggcagcttcagcagcaggaactataatgacactgtcatcttgggctacttcaagtgttgaggaggtcgcctcaactggaccaggaatccgtttcttccagctatacgtgtacaaggacaggaatgtggttgagcagcttgtcagaagagccgagagagctgtgttcaaggcgatcgactgaccgtggacactccgcgactgggacgc

SEQ ID NO: 26995 - DNA, 482 bp, Oryza sativa
  unsure (1)..(482): unsure at all n locations
  Clone ID: uC-osflM202062g11b1
tcctctcttctcctcgtgcccaccaccacttactttagcaatggcgggcaacgggccgatcaacaaggaggacccgctcaactggggcgcggcggcggccgagatggccggcagccacctcgacgaggtgaagcgcatggtggcgcagttccgcgagccgctggtcaagatccagggcgccaccctccgcgtcggccaggtggccgccgtcgcccaggccaaggacgccgccggcgtcgccgtcgagctcgacgaggaggcccgcccccgcgtcaaggccagcagcgagtggatcctcaactgcatcgcccacggcggcgacatctacggcgtcaccaccggcttcggcggcacctcccaccgacgcaccaaggacggtccccgcctccaagtcgagctcctcaggcatctcaacgccggaatcttcggcactggctccgatggccacacgctgccgtcggagacggtgcgggcggncatgc

SEQ ID NO: 26996 - DNA, 388 bp, Oryza sativa
  Clone ID: uC-osflM202062h01b1
aaatctcccctcgaagcgaagcgttgttatcttcttctcaagatgcagatctttgcgaagaccctcaccggcaagaccatcaccctcgaggttgagtcctcggacaccattgacaatgtcaaggccaagatccaggacaaggagggcatccccccggaccagcagcgtctcatctttgctggcaagcagcttgaggatggccgcaccctggccgactacaacatccagaaggagtccaccctccaccttgtgctcaggctcaggggaggcatgcagatcttcgtcaagaccttgactggcaagaccatcacccttgaggtcgagttcgtctgacacccattgacaatgtcaaggccaagaaccaggaccaggaggggattccccccga

SEQ ID NO: 26997 - DNA, 394 bp, Oryza sativa
  Clone ID: uC-osflM202062h03b1
accttgactttggcttccccactgtttttttttcttgggaggctgggagctaccagcacaacacaccaaggaagctgagcaggtgcgttgatttcttgatatcatggccaagaggcacctcttgttggtgacaacttgtttgtgggctctgtcatgtgccttgctgcttcatgcttcctctgatgggttcctgagagtcaacctcaacaagaagagattggacaaggaagatctcactgccgtcaagttggcgcagcaaggcaaccgttttctgaagaccggcagttcagacagtgatcctgtccctttggtggactaccttaacacccagtactatggggtgattggcctcggctcaccgccgcagaactttacggtgatatttgacacttga

SEQ ID NO: 26998 - DNA, 408 bp, Oryza sativa
  unsure (1)..(408): unsure at all n locations
  Clone ID: uC-osflM202062h07b1
caggagacgccaccacgcgcgccgtgtttgctattccaatccccgcacgcctcctccgccaccgccgtctnggcctccgccgccgccgcgaccaggatcacagttgcgatggaacacaaggaggctggctgccagcagcccgagggcccaatcctttgcatcaataactgcggcttctttggcagcgcggcgaccatgaacatgtgctccaagtgccacaaggagatgatcatgaaggaggagcaggccaagcttgctgcctcctccatcgatagcattgtcaatggttgtgacggtgggaaggagcatattgttgctgccagtggtagcacggcggtggcggtggcttatgtcgaggcgaagacccttcgttgtgcagcctaccgatgtcgcgggcaccaaccagga

SEQ ID NO: 26999 - DNA, 494 bp, Oryza sativa
  Clone ID: uC-osflM202062h11b1
cccgagtcggttgctcgatcagtctgggcttggttttcgccggtgctgcagagcgcttccacagccggaccgtgctcatcacgggcgccaccggattcatagcgaaactacttgtggagaagatcctgcggctgcagccggcggtgaagaggctctaccttctcgtgcgcgctgcggatcaggtttccgcgaacaggagagtcgaatccgagatcatgcaacttccgatatttcaacccttgcgggagaagtatcaaacgcacttcagttcatggttctgggacaaggtttttcctctagcaggagatgtgtccttgaagaatttcggtataggagacgctagactggctgaagatataaggaaagaaacaaatattattgttcacatggctgcgacagtaaacttcgcagaaagatatgatacagcgttggcaataaacactatgggtgtgaagcatatgatagattttgcatcaaaatgcacaaacctagag

SEQ ID NO: 27000 - DNA, 170 bp, Oryza sativa
  Clone ID: uC-osflM202070a02a1
agaaagcgaagccttccaaaggagcaccattgactcaaagcggcactattaccgcgtcaaaatcccgggataaccagcacaggttcataactacgcaatcctactgccccaggaccaagcataaatcacacaagccctttgtaccctcctctactagctgcactacctat

SEQ ID NO: 27001 - DNA, 167 bp, Oryza sativa
  Clone ID: uC-osflM202070a03a1
atgggggcaaaacattcctatggcgacaccttttttaggatggaatctattaccaatactataaccccaaattacaagttaaggacaatatcttcgaaatgccacttgcttaggccccatggcatggcacgcatgacctattagtacctatactaaatagtaacact

SEQ ID NO: 27002 - DNA, 183 bp, Oryza sativa
  unsure (1)..(183): unsure at all n locations
  Clone ID: uC-osflM202070a04a1
ataggatcaaaacatttctattaccacaactttttaaggatggaatcgagtagcaatactttcaccccaaaatacagtttagcgacaatatcttagaaaagccgcttgctttgccgccatggctggcaagnctgagtcagaagcagcttaacacaaagtaacaccgagatcacttattaaacc

SEQ ID NO: 27003 - DNA, 116 bp, Oryza sativa
  Clone ID: uC-osflM202070a05a1
atcaatgatccggcttccattttcttgagagaaaaggcgcacaattttacaacaaaacgcagggcattcctactataacaaaggaggaaagcgtataaagcaggggacggatccca

SEQ ID NO: 27004 - DNA, 304 bp, Oryza sativa
  Clone ID: uC-osflM202070a06a1
gcccaatcgctggcaaaacaggttatccatgatcgtactgaatcaccatacagttatacattacacatgactctgcgaagggagtcagggtgagcatccaccagacaaccacacccaaggctacataatagctatgaaaagaacaataacaatggtcatcaacgtacagtctttgatcagacagctgcacaattatgaacctccagtttcaagtttcaccaggtctgaggctatatgccttcctcgaggagggaaaagggttgttcgatggtagttctatgaataggggctagagggcatcgat

SEQ ID NO: 27005 - DNA, 347 bp, Oryza sativa
  Clone ID: uC-osflM202070a07a1
gtaaaataaaattaagcagttgagctcagatcttatgtacatcatgccatcaccatcccttcaagattacaaactgattccataatctcaagcataaagccctcccaaaaacagttatcatgaagaaaacaacacaaaatctcaatatgacatctgaatctttatatcgttgcataaccacacatacactacgggcatttgctccagaactactgacaggccagaattagagaaatcttgcttccaaagatatccaatgttacagctcaaggatacctgagatacagcactttcatagtagatgcatagtttaattttactggtcttgatcttagcacaaacccatt

SEQ ID NO: 27006 - DNA, 140 bp, Oryza sativa
  Clone ID: uC-osflM202070a08a1
ggatgataaagaagggcaaagattgccactggcacttcatattataaggattattagtacatacactgggaattagcatcttagggaaggggggaaatgctatgtgcatttacagaacacccttgtagccatttattgtc

SEQ ID NO: 27007 - DNA, 138 bp, Oryza sativa
  Clone ID: uC-osflM202070a09a1
ggaaggttaaaaagaagcgaacacattagaaatttcactatgggccaaaaagaatgcaacgtcttaaatagctttaaataaaaaagggagacctgctcctgtgactaggcaccctatggggtggtacaaacaacacac

SEQ ID NO: 27008 - DNA, 361 bp, Oryza sativa
  Clone ID: uC-osflM202070a10a1
cggatgatgatttgtattaaaagcagacgatttggagcacggtaaacataaattcagaggttcaaattttgctcatatctccctggctcgcacttgaaaagaattcttatctcctagcaagccctagaaccaagcataaattaaaacaaaaggtacagaatgtcgagcacacgttctggatataagaaggctatatctagggcgatttgacatagtcctgcactatgttaaggcccttagactcttcaccatagtccttgacaacgacgcaggagcagcccacaaccttccttgccttgccctcagagtcaatcttggaaagccctgcccacttgccaagggtcttaacactaggcacggt

SEQ ID NO: 27009 - DNA, 241 bp, Oryza sativa
  Clone ID: uC-osflM202070a11a1
atgatatccaggatccagcttccatttccttgattcagattgcactgtatattacaacatagataatacagctaccaataaaaaaacagtcttctacagaagacatacgagtatgaagcgctgccacattagcaaaacatcaggaaaaaaaataaacataatactccaccagattaaccagaacatggtttcctattgtagtttgtggcagatgtaagatattacattacaaggatgtgtt

SEQ ID NO: 27010 - DNA, 182 bp, Oryza sativa
  unsure (1)..(182): unsure at all n locations
  Clone ID: uC-osflM202070b01a1
ggagaaatatgtttatatacaatagtagcaatggtagtacacccgagcaaagaattgtaaactcaacacaagcaaccaaaatcgaaaccaggatgatgaccaacaaaagactcaccgtctgtgccattttccttcaanccagaaacctaccgctacaagtccattgccaaacaaaagattca

SEQ ID NO: 27011 - DNA, 118 bp, Oryza sativa
  Clone ID: uC-osflM202070b02a1
aaggcaaaaccagtaacacaactgtgatagaccactagttccagggagaagaattccaaagaaacacaaatggaaaatgaccaaaccaaatggaacagaagatccacataatcctaag

SEQ ID NO: 27012 - DNA, 358 bp, Oryza sativa
  Clone ID: uC-osflM202070b04a1
aattgaacctttttcctttttaattttgtttgagtcaattccttttgggtatctatatatcaaaagtgatttttataacataccggtatgcagaaaaaaaaggccgttaatatatttagtccagaaaagcaaaatatactggacacgacagaagaggaggggcataggctctgttgaggcaccccaattggggggactcaaaccaccagtttgaaaaacctggcaaccacgtagcagggttattcaaaatggacccaaatattgttacaaaatgggaattccatagcaaggcccggttgcctcagtttagcgtttcgaattccttttgagttggggagaccttttaaccaaaacaaag

SEQ ID NO: 27013 - DNA, 407 bp, Oryza sativa
  unsure (1)..(407): unsure at all n locations
  Clone ID: uC-osflM202070b07a1
actcaggaaaccttacttcagagtgccatatagtgcatcctttacatttttttagataatggattaaaccggcctctacacccaaaaaaggatgtacacagtccccaacgaaacttacaagagtacataaatctcacactccttatcacaaggttttaacatccattcacaaggcatactatgaccccgagtcacttatggcttcttagcaaccagaatnattcttaaaaaggtttaataccaaagttttcaacccattacccactactaaggaataacccacgagagcatttannatctcccaaatcttttccctttaagtttccattccctttcattgggcgaannnaagccagaaaacttctctttctctagnaattccaagcaaaccttcttctcaccttttt

SEQ ID NO: 27014 - DNA, 354 bp, Oryza sativa
  Clone ID: uC-osflM202070b08a1
gatagactgcaaatttgcaatgggaacaataacattgccaaaaaaaccggtttaaagccaaaatgttacaaaaaacttgactatactcaaaagtgcaccacctgttgtatcgggaactattccctgttaacaaaatacaaagaagggaagaaacatctatgtcaaaacacaagtcgaaacccccatttccaaataacttgcagatggggaggagcaaaacacaggtatgaacaacaacaacaacacatcgatggcatgctgtatgttacacggagtagctctgttggattgtgttgatgtcgagccccttgagcttcaccaccgactctacgtgccccttgagacgtgggcaac

SEQ ID NO: 27015 - DNA, 371 bp, Oryza sativa
  Clone ID: uC-osflM202070b09a1
gaaggtaaaaaagaagccatttcattagatatttttctatggtacaaaatgattgcaacgttataaatagctctaaataaaaaagggagacctcctcctgtgactaggcagcctattggtgttacaaatcacaacatgggtttgaagtaattcacttagtacacgatgttgtactacagttatgttcagattgctcgaaccccaaaaaggctgattcttcgtccttgcttgccaacctttcatccattacttgtttcgtttccattttttctttaatttcgtttcattgctcgttcgcattcattacggaaacagaaccgggcttaccctttggctttttggctttgaattgaaaatcatccaagtcctaa

SEQ ID NO: 27016 - DNA, 265 bp, Oryza sativa
  Clone ID: uC-osflM202070b10a1
gtctccgtgccccttttgcggggccaccaccaccaccgctgactcctccgccactcctcctcgccgcgccgctacccagccggcttctcgcgagggctcagctgcggctcgttcggctctgccgagcagcaccaccaccggtcgcgcgctccaccgggctcgcacctaaggcgctcgtcggacgagcgggcggtacgaggctcacgagatggcgggatatccgaaccagggcgaggattcccgacggctagggagggtatgggca

SEQ ID NO: 27017 - DNA, 145 bp, Oryza sativa
  Clone ID: uC-osflM202070b11a1
gatactaaataaaagggaactctcattcacggccaaggaatacagtccaacatatcacctaaacttcctaaactcaaatgcggcaaggaagcttggggcttgacattgcagttattatattgttcatatgactgactcctttttg

SEQ ID NO: 27018 - DNA, 169 bp, Oryza sativa
  Clone ID: uC-osflM202070c01a1
ttcgttgctccaacctttgcgaggacatgaagtttttcgccaccccttccgtccacggatccctcgccaaccagatcgtgcaccctggtgatctgtgcttcaagctgccggagaacgtgagcctggaggaaggcgccatgtgcgagccgctgagccgtgggcagtgcac

SEQ ID NO: 27019 - DNA, 55 bp, Oryza sativa
  Clone ID: uC-osflM202070c03a1
aaaagggaatatatggggtgaatattaaacctttttctagtccttatgcatctca

SEQ ID NO: 27020 - DNA, 404 bp, Oryza sativa
  unsure (1)..(404): unsure at all n locations
  Clone ID: uC-osflM202070c05a1
aaaccggaacaagattatacattcaaatgctacaacagcggatgatcaagccacgtggggaaaaaaatgtgtaacaatgacacaagagattttagacctcttcacactttttttttaatactgcattatgattggtttctcattaagtccttgtatctgcctttgtattatggcatatgctatagaagtagctccacaactagcttggtcctccagggcttacgatggctctgccccagtggaagattgactgatcgaagggtgtttgctacgagttagggcgaggctgtttcaatccccatgtatagagactgtacatgcatgngagagggccatacattttttctgggtagaggttcaattcagtaccagcggtaagtatgtttgggcctccctctggctgt

SEQ ID NO: 27021 - DNA, 269 bp, Oryza sativa
  Clone ID: uC-osflM202070c06a1
aggacaaaagtagaaagcttaacatataccacacatcttgccgagctcaccctcacagcattgttgttcgaaatagggacggacaaacaacacaggttcagctagaaattcctaaaaacagctgaagttcatggctgtatgctacagtatgatccactattggatttattgggtgtctcatttcactgcctacgaggaaattattcaaccttaaggcttgcggcaagcacactctgtaagagggatctgccttagtctctaactcccag

SEQ ID NO: 27022 - DNA, 397 bp, Oryza sativa
  unsure (1)..(397): unsure at all n locations
  Clone ID: uC-osflM202070c08a1
cagcccatcatattatattcatttatattagtatcaaataacaagtgtgctaagcccatataggcccaacaatcaaacacaataacaacccatatagcacaacccgacaaacattccaatacaacacaatttcttacatacctataactaggttcacgtccgggtggagcaataacattaacatgttaccacccattatcctagtataggcaataacccaaagtttctaccattcactgaccatnattctaccaagagtccaattcattatctttgccctttcttgttgcacggatttatcaattgaactttccattcttcagcaattaacatttcttttacagnngctcattaaaactcgtatttgctgtcttgcaatggccacattctttgaaaa

SEQ ID NO: 27023 - DNA, 159 bp, Oryza sativa
  Clone ID: uC-osflM202070c09a1
agcagaaaagcaggtgacttctttcccaactcatgcatttgacgagatgtactgtttatggttctgccacaagcaataaactaagaacatggtattctccccaataatacaacaaataagaggaaataactacacccgatccacataaagtccttacca

SEQ ID NO: 27024 - DNA, 392 bp, Oryza sativa
  Clone ID: uC-osflM202070c10a1
gacagaaattaattaagctagaaatctcctcgatcgatcacacacacacacacaattaaggtacatacatacatgcactgctgcaactgcaactgcagggtcggtgcgtggctactacaagtgtacacatggtaccgttggtttggcacccactctcagatcggtgtccgttgtgcctcactttttgccggggaccgaacgttggctgggcgctatgggcccacggcgttgtttcggcgaacggggttcggccgaccgtggttcgacagagggtttctcgatggggcgcccctttgccggttgacgaatgtgccttggaccgaaggaagtccgaaccatgggagaaccattggcgaggggcggccgtttcttgagcttcctttcacctttga

SEQ ID NO: 27025 - DNA, 359 bp, Oryza sativa
  Clone ID: uC-osflM202070c11a1
acggcaaaaacatgaacatttcattgcatgctaattgcaaagtctaattcagtacgatgatttctccacaaaaagggaacagaatataaaccatcttttagcaacagtttcttgaaacgggtcaatgaactttggacgcctactttagaacacagcactatcctcaataatcttctgttttctccttgatgagtactccactatatccccatgctagtctttctttagcatccaacctgccgatcaacagaagttgctattagtgcactgcttatactgacatgaactcaaatagaaatttcaatgggctagtttgaataggcagggagaagaaacaagtagacatcctcttctaatga

SEQ ID NO: 27026 - DNA, 365 bp, Oryza sativa
  Clone ID: uC-osflM202070c12a1
aaccaaacaaacccgtattgcattgcatctattacttcctctagtccattcatctcatttcatctgagagatttaagattgaattgcaaccacaaaagcaccttaacacctcagtgaatgtctattgtacactatgtacacttttcattctatttcacccgctatctacattatacagttttatcgtacacccgagtggctattgctacaaacgttgtagggggatcctaaaattttggacacgaagagaaaccaaataaacggggaagaatatattagccgcctggtggattgacaccccaaaataaatcacgggttcaagcttctcaccagtttttatgcccgggactcaagcagtgcccggt

SEQ ID NO: 27027 - DNA, 200 bp, Oryza sativa
  Clone ID: uC-osflM202070d01a1
atcaaagatcccttatattaggagacggagagagtactaattaatgtacactggtttgcttccttactggtagcaatagattcaaaactgcacataggagtataggtcaataccccaactgtaacctgcacaattcggttcttgcctatggaattctacaggttattcaaaataggtttaattaccacaaatcagtatcg

SEQ ID NO: 27028 - DNA, 195 bp, Oryza sativa
  Clone ID: uC-osflM202070d03a1
cttagatgatcacaaaattgatgcgaaccacatgaagccagaaacagttttaccatactatctttaacctgaaggctcaggcagtcaggctagtaagctaacaaaaacaaaagatacaatcttttgaagacacctcctagttgcacacaataatgtagaacatttctgcggttagatttggatgatcctttataa

SEQ ID NO: 27029 - DNA, 77 bp, Oryza sativa
  Clone ID: uC-osflM202070d04a1
gggagcacgtaccttgggttataacagcacgcccagagggctctatgtacaggcagagaggtcaataatacaaatgt

SEQ ID NO: 27030 - DNA, 259 bp, Oryza sativa
  Clone ID: uC-osflM202070d05a1
ttcgtttcggcctttctttttttttttttgtggcttattattttggcattatagagatcaacataatctttcaacaatggatcatctttattcatgtagaacggagatgaacacaaaaacaataaaacataaactttttaagggtcaacccctctagaaaatgaaggaggttccatacacaaggcaaaattcagtttgggaactgcagctacgggaccgacaatgggtagaaatcagttttgggggagttttaaaacag

SEQ ID NO: 27031 - DNA, 133 bp, Oryza sativa
  Clone ID: uC-osflM202070d06a1
gcataattatattataatcacattccagccataattaattttccagcccatacaaaagcaagttccagaatatagtttccaacattgttccatacaaaagcacagaacatgaatacaaaatgattccattcca

SEQ ID NO: 27032 - DNA, 410 bp, Oryza sativa
  unsure (1)..(410): unsure at all n locations
  Clone ID: uC-osflM202070d07a1
attcacacccgtaccatattattattagcaaaaatacaaaaagaatctaatcctgatatcaaattgttcccttgaacactcgactgaattttcaaaattctctacatcatctccaagaaaattccgaatgcattacctccttcacanttatgcatacggacgagacacgatgatgtacggtaaccatatttagaaccgatagaatacaccctttaatccttagtattgcaattgggcgacngatcttccggccatttttggagtcgctattcaccctgcttnnatgatcttttgccattttttccacgctcccggttagccttccttcttttatacaccaatgttccgccgtttcacgttcccaccacccgtctttgacacacgttcgaccgatgttcgggcgtttcacg

SEQ ID NO: 27033 - DNA, 386 bp, Oryza sativa
  unsure (1)..(386): unsure at all n locations
  Clone ID: uC-osflM202070d09a1
gagaaggttaatacatccgtcaaatggtttaccacagacgatgagtttaaaccgtgtccaatttctctttcgctgtatccatacagattaaacggtggtttttggatgattaatgttctactctacatcacataacacaaggtgtccagatacaatatccaaataaatataatccccacttaacttttaagcttagcanttataatacaccnnctgagccacatcttctttccggggaaggtctttactttccaatccttatcctctttttgtccttccattcgatgctannaccagttatgttaccaaaacgaggaattattcccaacaaccagcgnncagcaaagccttttttctcagccaaggttttcgcccctcttgaggaa

SEQ ID NO: 27034 - DNA, 417 bp, Oryza sativa
  unsure (1)..(417): unsure at all n locations
  Clone ID: uC-osflM202070d11a1
acacaaattatctcggcattatagagatcaacataatctttcaacaattgatcatctttattcatgtagaacggagatgaacacaaaaacaataaaacataaacttcttaagggtcaanccctctagaaaatgaangagggtccaatcacaagggcaaattcacgttgggaaccctgcagcacggtaccgacactgggttagaatccaggtttcggggaggtttataaccacggctcccattccaccatggttattgggaaacccacnnctattgttgccgataggttggaattccccttataaccatacacttcctgggaccacannagacaaaatttatttaaacttctttccaaggaaaggggaaacaaaaggagtttccttccacttcttcagttaagcccccagtttgttcg

SEQ ID NO: 27035 - DNA, 397 bp, Oryza sativa
  unsure (1)..(397): unsure at all n locations
  Clone ID: uC-osflM202070d12a1
gcataattatattataatcacattccagccataattaattttccagcccatacaaaagcaagttccagaatatagtttccaacatgttccatacaaaagcacagaacatgaataccaaaatgantccattccatccattttatacttacacatagttcccagtccgtacttaccataatgttacctaccacggtatgtgtccatagtttccggtcacccaatataatattcccaccttatgcagcccactactttaagatctcaagcctgtcattctttgcccaattatgccagncnataaaaaannttccaccaagtcatcccactttacacttttctggacttgcaattccctgccagcaggccaacaaacttagtgccaaanaaattcctatgt

SEQ ID NO: 27036 - DNA, 412 bp, Oryza sativa
  unsure (1)..(412): unsure at all n locations
  Clone ID: uC-osflM202070e01a1
aacaccaacaaaagacagcaactcaataatctttcgatatttcaccgagggtaatgtatggtaggaaaatcgccagacataacagagccggccagactcaactcaaactcaaccctatgatggtaaanctggtttgcgattatacagccttccgcgcttatgacaatgtgttgggaagattaaaccgttttccacccaaaaaaccaatatggtgggggaagtggttcttccccttaccaggaaattaattaattggcttttcacatggttaaacaaaggggcaaatatttcactcacgattccccgtttaggtgcagggaccccaggaattaaacactttttgtttcgtcattcatttttctgcccagttttagggcacccgcccgagcccgtaccttcttttccaaaggaa

SEQ ID NO: 27037 - DNA, 404 bp, Oryza sativa
  unsure (1)..(404): unsure at all n locations
  Clone ID: uC-osflM202070e02a1
gggaattgtgggctatgccaatatcaaatcttctctggaattggcacaccagttacatctcattggccactggaatgatctgcataatccagcttgcctgaataatctgcatcaaactagagatgttctagaccttccagngttcctgntattatctccnaattcgagtnngatgcattcctcctcttggtttgtctcctgatgttacactaccaatnatccatacattanntagtgatattataccctccaaagttgaatcatacctttacctacttgattccttagctcagacctgcantcctcagatacccatcaaatgcttctttcacttggcccaattgactcgaaaggttgaagcccttttttcttngcacttttcacttggcttcaatgacttcaaa

SEQ ID NO: 27038 - DNA, 183 bp, Oryza sativa
  Clone ID: uC-osflM202070e03a1
ggcgccgacgaggtcgcgcaggcgccagcgccgcgatgacgacgacgactctccgccggtggacgcgctcttggggaacctgtcgcggccgggcgagcccggcgccgagcgcggcgtccacgcgcagtaggtgtcggcggagggcgccgccgtggaggcagtacgccggtccgagaggttcga

SEQ ID NO: 27039 - DNA, 80 bp, Oryza sativa
  Clone ID: uC-osflM202070e04a1
actaagcttaccattcactttttatttattctttttcttgatggaagaaagatccagcatacttgagggggatacaaagg

SEQ ID NO: 27040 - DNA, 260 bp, Oryza sativa
  Clone ID: uC-osflM202070e05a1
aggcaaataccaagatcgatcgatcgatgtacaagtggatgcattaattcatcatcttgggtgttcttatattacaaatcaccaccatgcaagtcgtcattaaccaccaacccagctttcctaatttaagtagtaaatccaacataaaggtatgaaccttctccttctctccatagcccttgccagcatcgcatcgttcatcacaacaactaatacagacgcgctgcgtaacgtcacatccaagcgcatttgtatcccgt

SEQ ID NO: 27041 - DNA, 94 bp, Oryza sativa
  Clone ID: uC-osflM202070e06a1
aaatgtaacgggggaaggggttagcagatttgcgagaacaatatgggcattttaaaggcccttctaatctctggccagtatattaccaacatta

SEQ ID NO: 27042 - DNA, 197 bp, Oryza sativa
  Clone ID: uC-osflM202070e08a1
atggggaagaaatgtaccggcaacatagaagccaagaaatgatacagcctatggattaacacagcgctcaggcctgagaatacatgctagagcgactacttacatggaagctggagacagtaccgaaaaacattaatgagactagaacacaacctgaaccaaatggtaggattaccacagtgagtccagagggaatc

SEQ ID NO: 27043 - DNA, 395 bp, Oryza sativa
  unsure (1)..(395): unsure at all n locations
  Clone ID: uC-osflM202070e09a1
cagtcaaagattcaataattatttattttcagaaaaactcttgagttttagggcaattgcatcccagtctctgaactcgtagtaatctccaatttaccaagcttgtgggactcaagtgcaaaagcaccaaacatgttagaactttacannaaacttctattgatttgggcacaattacgtaaatactagctttagaattatcccacccgaaccccagcttttgttgacggtggccacgcaaggccctttatctcaaccccggcatgccgagcctcggtgaggtcacttttagctttcatttaaaaatttcaccacatattatttagccttncggtttggttcgttgccagatcaaccaccaggcagccaagcagtttgccagtagttagttagca

SEQ ID NO: 27044 - DNA, 97 bp, Oryza sativa
  Clone ID: uC-osflM202070e10a1
agagaaaaaaaggcgcactaccaggcacgaaggaacttgttttggagggcaatcaggcccatgggatacatgtgccttcccttggaggttttgacaa

SEQ ID NO: 27045 - DNA, 342 bp, Oryza sativa
  unsure (1)..(342): unsure at all n locations
  Clone ID: uC-osflM202070e11a1
attcaagagtttatttgcaggccatttggccttagtttgcaacttttacatgcctctaaaatgatgtgattcgtctattgtatctctatcactctcgttctaaaaagaatcaagagtgcaaatattttctttttcctcttatangctnacactttagccttgccggcatttgcatcatcaatagttaccgagttaccgtgttattagtatttgcctacccgatatanttatcaagacntgaattagcgttaattctggcattccaagaagaaacacacagctgctttgtaacgttaatcggggcgaggcgtaagtcccattctgccggccggccgcccggag

SEQ ID NO: 27046 - DNA, 238 bp, Oryza sativa
  Clone ID: uC-osflM202070e12a1
aaaagtaacgggggaaggggttagcagatttgcgagaacaatatgtgcattttaaaggcccttctaatctctgtccagtatattaccaacattagtatcattttgccaaagcaaaggtgacacgtatatatatgggaccactatcacaaatgggcccagtcacggtgattcttcctttaaatacgggcacaaattaaaccccccaaagctatggcgaattcaattacattcccacttc

SEQ ID NO: 27047 - DNA, 377 bp, Oryza sativa
  Clone ID: uC-osflM202070f01a1
ggagatgagcaccacgacgcacttgatgctcttgcacaccgtctggatcaccgtcggcccgggctccgggatcgtcaggttcaggttgtcgccgaacccctccgcgtacggcggctcgccgaccaccacgatcgcgtagtcgtacttgtcgccggtgaccacgctgctgtccgggttctccgagtacaccaccgtcgtgctgggatcaacggtggccttgatcgccgacaggatcgtcgtgccagcagtgatgttgttgccggggctgtccttgccaggtgatggtccattctccacactgtctgcccaaatcatcagcatggctttccgcgacgagaattttaccggctttctttgggaggggaagcaccggagag

SEQ ID NO: 27048 - DNA, 355 bp, Oryza sativa
  unsure (1)..(355): unsure at all n locations
  Clone ID: uC-osflM202070f02a1
ggcaaacgccaaggccatccactttatttgtattgctgtcatactgttcatcacaacattctcaacaaagcattgacaattgacaaccccaatatacaaatcatctttatctccctcatcagccatantcttcaggaggctctgctcacgtgatgtcaacccatctaataacccctatgtttatactgcctcatgagttccgtggcactccgcttactatgccacgccaccctcggttcacttgtacgtggctctaagagccacgcattttnnggcagcattcattgtgaaaccttcagcactatttgaacccacctattagattccatggcgcttccattatttggtccttcaa

SEQ ID NO: 27049 - DNA, 86 bp, Oryza sativa
  Clone ID: uC-osflM202070f03a1
aaaggggggaaaaaaaaaattggattgaattctgaacgaaaaacaccaggaaccggggtttatttgggggaaggcccctgcccaaa

SEQ ID NO: 27050 - DNA, 399 bp, Oryza sativa
  Clone ID: uC-osflM202070f04a1
tatgctttagattgttcggcctttcttttttttttttttttttacgaaatagctacatttttgagtattaagtggaaaatgatatacatgtatatataggtaagatccaaatatattttgattcgtttgatcggatgactatgtgtaaaatcgtgtgctaagcaaaagcagctctcataccaagagacatagccctacacactatggagtatattagataactttacatgtttgtcacaacgatcattgaaaaagtaaaaataaataaactaccatggaacactaaaaaggacatcattttttgttcacatagctttccctttctgaattatggacactatatgggacctgcattgtaaggatgttttagagttaatgaaaacagagcaaagtatacaa

SEQ ID NO: 27051 - DNA, 93 bp, Oryza sativa
  Clone ID: uC-osflM202070f05a1
ccacaggtgataatttcaggtggtataaaatccttctatggttgtacaatacaggaaaactcaacactgaacgaaattgcggcaaaacgctaa

SEQ ID NO: 27052 - DNA, 148 bp, Oryza sativa
  Clone ID: uC-osflM202070f07a1
cttcttctcaaagtagtgtagcatctttccttctttcaccattacataagcttaagcaataacagataacaaatcctcctcctcctctaggtaaaatattcaaacacaatatcccttataatgtacttattatttaggaaaggtagcg

SEQ ID NO: 27053 - DNA, 55 bp, Oryza sativa
  Clone ID: uC-osflM202070f08a1
gggggaagaaaacaaaggaaaagggatatctctgaactttcgcttacacaaagat

SEQ ID NO: 27054 - DNA, 239 bp, Oryza sativa
  Clone ID: uC-osflM202070f09a1
acgcgcgcagcatgcattttatttaggcacggtccacaattcatacatgtatagtggatacgtctcgtcggcagacactcacggtatagtagggtagtcgtgtgtccagtgatatagttcatattctgcggcgtactatttcattgccgttgcgtttggacttcgtttcacaggggtccacgggttcggtgtagggcgtctgatgggagggttgatcgccacaccaggcccgggtgcca

SEQ ID NO: 27055 - DNA, 392 bp, Oryza sativa
  unsure (1)..(392): unsure at all n locations
  Clone ID: uC-osflM202070f10a1
acgaaatagctacaattctcagcattaagtggaaaatgatatacatgtatatataggtaagatccaaatatattttgattcgtttgatcggatgactatgtgtaaaatcgtgtgctaagcaaaagcagcttctcatacccaaggagacatagtccctacancacttattggagtatatnntagataactttacactgtttgttcaccacacgatcacttnngaaaaagtntaaaaattaaataaacttaccattggaaacaccttataaaaggacacttcatttttttgttccacatagctttttccctttccttgaaattatcgacacttatattnggcaccctgcattgtaagggatgttttcagagtttaatgaaaaacagaggcaaag

SEQ ID NO: 27056 - DNA, 350 bp, Oryza sativa
  unsure (1)..(350): unsure at all n locations
  Clone ID: uC-osflM202070f11a1
cttgggctagtcatattccctttgctgatacatacatggaacggaatgcaaagtagtatatagctgtgtaaagttgcaaatgaaatcccctggaatgccagtgctgcatctgcatgtatataaattaaccggggtgtccttcacgaggcgcacccaccgttggggaaagggacgtcgttcctagccattccacctctttcttgggcgcgtctcgcanncgtagcaagcatacactgctttgccccggcgttccggtcaccgtcgtagccgcgaaggttcgttcgaccgcagtccggtccaccccgcttcgaaagccctctggtccattctggtttcggccgtgattgagg

SEQ ID NO: 27057 - DNA, 144 bp, Oryza sativa
  Clone ID: uC-osflM202070f12a1
aacaaatctaaacataaggtgggctatatttattataataggatgggccgtattcacgagattaggttattttgtgatggagggagtatgacattattcatcagtacacctcccgaagggtactaggcatcacactgaaatata

SEQ ID NO: 27058 - DNA, 370 bp, Oryza sativa
  Clone ID: uC-osflM202070g02a1
aagaacagcatttggcctcacaaaaaaacgccaacattatctgcttaaacttaattacaatgatggtgcataaaagggggaataaacatctcattcggctgtacaaagcacaagccgacagatctcatccctcctggcaaccaaattacaaccatgattactaataaacaaaaaaaaaaaggaccgagccatatcagtaggaccaagagttgaactcacgggctttgttgagcagcaaaaaaatcagccttgtgtccaaaaacacaagtttccccacaaaggcaactgtactttaccagtataatgggaaacaatgaggcctgtcgaagcagccactttcattcccatattaactcatgcaacactatag

SEQ ID NO: 27059 - DNA, 417 bp, Oryza sativa
  Clone ID: uC-osflM202070g03a1
cactaaaaattagataaagcgatcggattgcatgatctttatacaatatcgctcataagaaatgcctctacgagaagcgacatcacggccacatcagccacgcagccaaggtgaccaaagaatgtagttgcctccctgttaacccctaacccctcttcactatacaccagaagaaacaaacacatggtaggctaagattattaatagatactacacatgacccctatagagaaagtacataaaatcctttaaaaactttaccgaagtaattcaaaaccgatgccactatatataaaaccctttgttggtgcgttgaactaacaatacaagagcaagggaatacaccaaggatgccatgccaattcacttttgggcaaccagaccattctgttgtaggaacaagtttctgcagtttct

SEQ ID NO: 27060 - DNA, 298 bp, Oryza sativa
  Clone ID: uC-osflM202070g04a1
agcatatataaataaacgcaggaaaccaggcacttgacacaagattctcagttacacggcagctacattaactgggcgatatagttagtatatatctagctgttcaagcaataagagaaaccgctaatcaacctccgtgagcaattaccccccaaacttataatttgttttggtagaacacggacatattgcctctggctcatgacaagaaccttttgttcagaacctgacaggttgttgaacgttatccattcgttcgaaagcgaagcccacctggcccacttgggcaagacttttg

SEQ ID NO: 27061 - DNA, 135 bp, Oryza sativa
  Clone ID: uC-osflM202070g05a1
gcaaaggtagacccatattctatgcggtaagatccgataatttcatatgtatgtacatcaacccaaatagtcaaatacaacacggtaaaaacaaaggcatgatcgaccatgtatggaaaagctaatggtcggggg

SEQ ID NO: 27062 - DNA, 278 bp, Oryza sativa
  Clone ID: uC-osflM202070g06a1
gggattcgggaacaggaaaaaaaaatttccttgaaaaagggccaatttattattacaagggtacaaaattattacaaaaaccaaattaattgggggggcaaaattggtaaaaccggcttcttccataaaaaaacccaagggttacaaaaattgaaaaaaaggtttacaaaggggaaacccaatgaaaataaggggggcttaaaggaaaccggcagggggtaaaaaaaatggggaaagacccgggggtttttagcccttgccaaagaatgggtgaaaaa

SEQ ID NO: 27063 - DNA, 384 bp, Oryza sativa
  unsure (1)..(384): unsure at all n locations
  Clone ID: uC-osflM202070g07a1
aatacagaccattcaaaagattggtaatagtaaaaatacaagttcgtgaatggcgataatacttaaagctacctccaaatagcgtgtagcattgcgtagcaaaccaagcatataacttaggacaaacattcagttgcagctttcacaatcatcgctgctttatcataaactcgcaataacagtcgcacgatgggagcatanaacttaagtatattttcgttagtttctaggctttatatatnacatatcagaattaaccaacttgtgataccatccacanggatggtccgggggcactacctgatnncagaatctacttccttttgaggttgtgggatggccagacacggtttggagaccattagaatccacgccacattttgt

SEQ ID NO: 27064 - DNA, 388 bp, Oryza sativa
  unsure (1)..(388): unsure at all n locations
  Clone ID: uC-osflM202070g08a1
agcatcaaaatgtatctattttattattacaatctgtgtttattcagtttttggtgcaagaatattatgaattatgtacaacaagtccatgcatgatatctctttatacaatcaatgaatacatgaatggtcactgctcggtatgcaactcctgcgtgtataaantcacaactaggttagtagctagggttagcaatgactcacaggcatcttcgatatactaggcgacctcaatttgatcaagacggcggcatgcccacagagattcctttgaacccactgccactgaattctttgggttattcttcttccggtttcttgtagtcctacgttagtattaaatccgaatctcgaggtgtatccagcggcccacttcccagttgtcaag

SEQ ID NO: 27065 - DNA, 265 bp, Oryza sativa
  Clone ID: uC-osflM202070g09a1
aaaggaaacacaactcattttttattgatatatgttggatgaatccaataaaaccgatacaagtcacgaaaaatcagactagatgaatccttcgagatcacatgagcaaaagctttcgacgaaaggctgtccctatagatcgtggaagtcaattaacacttgatatacagatagggaatttcagaacaccgagaggtttgcacgacttataagaatgtcattcaaattcttcctttgaaaccgccgccgaaggaggatcacccgt

SEQ ID NO: 27066 - DNA, 222 bp, Oryza sativa
  Clone ID: uC-osflM202070g10a1
aatctaacatacgcaaactgatattatcacaatgttagccgatgacaatggaaagagtaatctaggtacaagcggatcattgacgggggagacaagacattggctggaccacaacatcccaccatggtggcgccaacaagggagcgctattccgtttatagggacgaggaggaaaaagtaaaaccatcaccgatgttgaaagtgaaaacttgaataaattct

SEQ ID NO: 27067 - DNA, 406 bp, Oryza sativa
  unsure (1)..(406): unsure at all n locations
  Clone ID: uC-osflM202070g12a1
ggttcaatgtcaatggcagccacacccgcatcaacaaagacacactcgatggtggtgggcgtagccacaaacaactgcctacgatgccaaacggcacctgtagcgaagggaatcgaaacatnctccaagatattcttaaattgggngccgcaagggaagaaaaattacaattattactgcttgactcaagcgaatgtcaccaatatctcnatacggttttggtcccatcacggttccacttctaggctgtgtcaagttaggtccgtctaacacggttggttatggtctttcccagctgttatttaactggacaatttttcgaggagggccctttctttggaaggaaaatggattcatttctgaagcaaaatgattgattccactttccttccaaaaaaccctgata

SEQ ID NO: 27068 - DNA, 110 bp, Oryza sativa
  Clone ID: uC-osflM202070h01a1
ggaacgcatacaagtacacgggacatcaaattatttattatggaggaatgccacagggtatccatcagaatttttttttccgccggccccagcatcaaagaaatggcccc

SEQ ID NO: 27069 - DNA, 339 bp, Oryza sativa
  Clone ID: uC-osflM202070h03a1
atactcgtcacttcgtcagttgcaaatgccggaaaattattagcaacgtgtgtttaagtgaaaatgttaatgttcacatagcgtcatttagcgccgcatttcccgtggcagcgtacaactgcaagtgtagtatgctcacaaaattttctgaagttctttcgcggatattctcagaaagggttactttcgaaagggtatttccctaaaaaaatggggtttgcgcttaattcaaggcttgtttacaatcaaattatcgatttcgccctcattcggcaattcttctttgagccgtttcattcctacctgcttcgggcgattctttcttgaatgaccatacgg

SEQ ID NO: 27070 - DNA, 146 bp, Oryza sativa
  Clone ID: uC-osflM202070h04a1
ggggggaacaaaagagtctcatgctcccattgcattacgaattatttgcttattcaccagattacatcactgtctagccagacccaaaaaaactgggcataaataagattcagcaccgccgctcaggcaccacctatagcgaaaaa

SEQ ID NO: 27071 - DNA, 154 bp, Oryza sativa
  Clone ID: uC-osflM202070h05a1
ccaaaactgggttctgcaaatttatcttgttaagttgccagatgcgtgcacattcccccatggagaaagtcctttatctgatgctaaaacatctttcagaataggaacagttttagatacatacacatgccatgttaccgttcctccctcaaat

SEQ ID NO: 27072 - DNA, 310 bp, Oryza sativa
  unsure (1)..(310): unsure at all n locations
  Clone ID: uC-osflM202070h06a1
agaataaccaaaacataggaggtttcatttcttcttctcaaagtagtgtagcatctttccttctttcaccattacataagcttaagcaataacagataacaaatncctcctcctcctctagggtaaaatanttcaaaccacacatacccttataangtacttnnattattaggaaagggtagcgctgcactgggcccactaaatggcagccgggcggggcaggtcctatagaatcaccacatgctgacgcacgcgagggaaaccaaatacacccattatatgggacacgagtcaataaagcctctcgaaa

SEQ ID NO: 27073 - DNA, 114 bp, Oryza sativa
  Clone ID: uC-osflM202070h07a1
ggatgggagaccaatatttcagagttttcagcaagtaacatgctcacggactgccgtgactggccgtacatcacacaaaaagagaactcaattatatccttgaagggtcagtaa

SEQ ID NO: 27074 - DNA, 373 bp, Oryza sativa
  Clone ID: uC-osflM202070h08a1
atggcaaatctgtcgaacttgtcttcaatgtgaaatatatgtaaaatttattacaaatatgtcaaaatatttgaatatatacatgatatgaaataatagtgtcaaacaaacaagatataaaagggtcaaataagcaagggcataaagagaactatttagcccctaaccttaacacccgtttaatttcacccacggatgtttcgtttttttgtaaaagggagggatcacaatacagcaaccttacataaaaggtatgggtcaaatttggttagtttagactttcaaaaaacagggttcaaaataagtcaaattgccccctttttgtagggcataaaaagcatttagatggcaattgaaaaatttctaaatagta

SEQ ID NO: 27075 - DNA, 240 bp, Oryza sativa
  Clone ID: uC-osflM202070h10a1
cctggaacttgcaatctgttataagtgatataccaaccagtactataatatatgtctgacaaatggtttagcgcaactcatgaaagtcttaacaaccatctactcatctagtaggctaacaagtataagtatccacaatcttaaaggagagatttgccatgcgttgttagaccctaaaaatattacttccaacttataccattagtcttgtaaccattttaattcttcaccacgattatg

SEQ ID NO: 27076 - DNA, 372 bp, Oryza sativa
  unsure (1)..(372): unsure at all n locations
  Clone ID: uC-osflM202070h11a1
cagcaaacccgtgccgtgaatatcaacaactatggatatgaaccaagcatctacaatcaacagcgcagccaactaatcctcaagaaattattcgtctaatgccacttgaactttcaaattcaaaaaccacgatttataaangtgccggagatgatagtcacaccaaattacatcattcacatcggagtgtttaataaaanncatcatgcgaaaaagtccagtcaataaacaaaaagggcagctataccagcttaagtgatagctctttactggnnagtagcctcgcgaaaagggtgccgactttattttttcagntnnagcacttctactcccattttctttccgaaaaggagttggacacatcttcctact

SEQ ID NO: 27077 - DNA, 166 bp, Oryza sativa
  Clone ID: uC-osflM202070h12a1
gggagagccaagcacatgaagccaaaaccatttgattatctgattctgatgtaactgtcattgtatcacattactctcagtgattcgaatttccaaaaacaagcattgacgcaatgaacatatagcagcattttgacaaaaacttgaatgcatacttaaattaaca

SEQ ID NO: 27078 - DNA, 218 bp, Oryza sativa
  unsure (1)..(218): unsure at all n locations
  Clone ID: uC-osflM202071a01a1
ccgcacgcaacaataacgcttgataatgaaccaatactccaatagtatctgaagcagctcagatgacaaaccagtatgcaggacagattttattatatgagcactgctatgcagactagctcacttgtatcattcagaaacaacaaaatagaacacagtttctatgcagattcttatttttccgattcaaaacaagngaggggatcagacnnagacga

SEQ ID NO: 27079 - DNA, 134 bp, Oryza sativa
  Clone ID: uC-osflM202071a01b1
ttgctatccaatcactaaggatcttaaagctgatcctaaggacgagttccttggtacactaagggcgaacataagatgctttatttgtcttgacagtttctttgagaaagcaccttttcttttattctaagtac

SEQ ID NO: 27080 - DNA, 314 bp, Oryza sativa
  Clone ID: uC-osflM202071a09b1
tcttttactatcctaccctcctcgacgcggggctagggttacagacccctactcctcctactcataaatctaacagagtgggaacaaggaccgaagcgatatcgacaaataacaagaagctaaatctatacaacacaaaaaaacataaaaacaaaaaaaaataaataataatatatataaaactaaaaaataaaacaaacaaatattaatacatcaactcaaaaaattaatcatcaataaaaaaaaatcattaataacaaaagaacataaaaaaaaaaaaataaaaaattaaataataaataaaaaatacacaa

SEQ ID NO: 27081 - DNA, 436 bp, Oryza sativa
  Clone ID: uC-osflM202071a11b1
atacgtcttcgcctactattccccacttacaccatctgcgtctttaactacgcctcgccgacaaaaaaaaaaaaaaaaaaaaaaatataaaaataaagaattaataactaaattaatataaaatatataaaataaaaattcattaatactttaaaaaaaaaaaaataaatttttcatacaaaaaataaacataataaataataaaacaaacataaaataaaaattaaataaatcaaataaatttaataaatacataaaaaataaaatataaattatataaaaaaaaaaaattaataattaaaaaaacaatattataaaacatattaatattaaaataatatataatactcaataaattttaaagaaaatatactaaaaaaattaaaaaaataattaataattattattaaataaatatactaaaattaaaatacta

SEQ ID NO: 27082 - DNA, 161 bp, Oryza sativa
  Clone ID: uC-osflM202071b03b1
ttcgtctcctccacccgctcttcgactcctaccgattcttcgggatttctcacgataaatcgactaacttagcaaacaaaaaaaaatataactactcaaaatataaaatactcaaacaaacaaaaaatacaaaatcaataaaaaaaatatataatttataa

SEQ ID NO: 27083 - DNA, 70 bp, Oryza sativa
  Clone ID: uC-osflM202071b04b1
atgcctaggagtttgataatgagactccttacactattatgtttggaccagacaaatgtggatcaactaa

SEQ ID NO: 27084 - DNA, 408 bp, Oryza sativa
  Clone ID: uC-osflM202071b06b1
tgtatgctgtgatcggaaccaaacgggtgggagcaatgtactgtcactagagagcagagaacgagcattgaggaaccgattgattatcgagctgaaacaactggatggccaggtactcgtagcacacaatatactgggatatgactagcacgggctttggcaccgggcacagactagcactggaccaaggaatatgtggtggatgattgcacggcttacgctctcattgatgcccagactcacgaaagggaacacactgtatggacttggagcgagaacaggattgatgacctgcattgctggacgaatactgtgtgatacctacttatgctctagcgatctgctgaaggatgcgaggcattcttagacacaacttgcagaaacacaattgaaaaaagagaggaaaga

SEQ ID NO: 27085 - DNA, 255 bp, Oryza sativa
  Clone ID: uC-osflM202071b08b1
tcgtccatggcggcgaccatccagagcgtgaaggcccgccagatcttcgacagccgtggcaaccccaccgtcgaggttgatatttgctgcttggatggaacatttgcgagggctgctgtgcctagtggttcatttacttttgtatttgtattcttttgttttttttgtatttttttttttttcttttttcattttttctttactataactttccttttttttcttctttatcttctttctttttttttccttttt

SEQ ID NO: 27086 - DNA, 133 bp, Oryza sativa
  Clone ID: uC-osflM202071b09b1
tcgtgaaaaccctcctcctccgcccaaccccattccttctgacccactctcttctcccgccgccgacggcggaggaggcggctcctcgtcgtaggcctcgacgaccatggcacggatcgcgttacgcgccctt

SEQ ID NO: 27087 - DNA, 157 bp, Oryza sativa
  Clone ID: uC-osflM202071c02b1
taactctcctctcctcccctcctcgtcgcggggctaggtttattcacacttctcctcctactaaaacaattatacttaattaatatatttttcttattatcattactaatacattacacaaacaatatattattcttcttcaaaataaataatttat

SEQ ID NO: 27088 - DNA, 90 bp, Oryza sativa
  Clone ID: uC-osflM202071c07b1
tttcgtaaattcctccccacgggcggcgactaggacggctagttaacaacaaataacttttaacaaaaacaaatttaatttaaataaata

SEQ ID NO: 27089 - DNA, 279 bp, Oryza sativa
  Clone ID: uC-osflM202071c10b1
cttttggaaggtttatctgaagctaagacgttggggctgataagtgaacatggatcgtttattttgaaaagggatttgaaatggtgcccaacatttaccaagctaaagactttgttactcaatgaatactggtgtgtgcccgatgatttcagtgcactaagttgcattcttttacgtgcaccggttctggggaatctcattcttcagatctattccctgggacttatatcttagaatgaatatcaaaggaaactgcctttcttcgtatcgattactttt

SEQ ID NO: 27090 - DNA, 259 bp, Oryza sativa
  Clone ID: uC-osflM202071d03b1
tctcactccttgcgcggaggcatagatctccctctaccttcgtcctccgcttcaggactcaattcgtcttctgatagcttagcttgattggggtgggtgacaatgggaggtggcaaggacaagcatgacgagagcgacaaggggctcttgtctaacatgatgcacggcgttgccggcggccatgggtattcttctcaccagggataccctcctcagggctacccgccgtcgacgggagcgtacctgtcttctccgggtg

SEQ ID NO: 27091 - DNA, 182 bp, Oryza sativa
  Clone ID: uC-osflM202071d04b1
gcttatatgaacacaagtacaagaagctatcagaaatcagaaacgctagctagcagtaggaacaaacaatgaggtcgtccccgatcatcttcctgctcctggccgccgccgccgccatcgccgctccgtggcaggttgcgcacgccgcgggcaagtgcggcaagacgccggcggagaaggtg

SEQ ID NO: 27092 - DNA, 286 bp, Oryza sativa
  Clone ID: uC-osflM202071d06b1
ttttgttggtcatatctttcgatggttcttatgtcaattacagacatctggccattctttgtgatacaatgacatacagagggcatctgatggctattacaaggcatggtatcaaccgtaatgacacagggcctcttatgagatgttcctttgaagagacggtggatatcttgcttgatgctgctgtatatgctgaatctgactacctgagaggtgtcactgagaacattatgcttggccagcttgcacctattcggacaggaggctgtgcattgcatctttatga

SEQ ID NO: 27093 - DNA, 60 bp, Oryza sativa
  Clone ID: uC-osflM202071d07b1
tcgtaactaatttagctgatcctgtggggaagaagtaatggtactgtcaggctctaagga

SEQ ID NO: 27094 - DNA, 199 bp, Oryza sativa
  Clone ID: uC-osflM202071e08b1
tcgtacggtgctcacgccgccgccggccaccgccgccccccgtccgtacaccgcgtggcccgcccccgcgcaggtgagggagctagcggccttcgtctgccggcgccggaggcggagccagattgttgggaaacgagttttccgcccgcttctctggtttctcggcggtgtcttttacttctggggcggtgatcccgac

SEQ ID NO: 27095 - DNA, 624 bp, Oryza sativa
  Clone ID: uC-osflM202071f04b1
tacgtatcgaaatgaccaaactatactaatgctcgacacggttcgatttttttcaccgacccaagaagtatagaaagaaaggaagaattatatatttatcaattaaatatcatattttatttttaattctattttaattatttatttaatattattttttttatttatttatatctaatcttataaatattatattttatatattaataaatatttatttttacaatttattttacttttttttcattttaatactataatatttatattttatatattattattttttattattaaaacaaatatgatactaataattataatttataataaattataattttataattttttttttatattttatattattatgattattatattttatatatctaatattatataaattattaatttaattatatttaaaattattataaataattatgttatttttactcttcaatttttataattataataatttattattttattattactataatttaaattattatataaataatataataacaatattataataattatttataatttatatttattaattaatattttttaaaattataataaaatatactatatttatttatt

SEQ ID NO: 27096 - DNA, 470 bp, Oryza sativa
  Clone ID: uC-osflM202071f06b1
tttgtatcgcgcgcgcgcgcctgcctcgtcgccggcggccatggcgctcctcctccgccactctcccaaggtgcgaagagcgcatgctatcctcggatgcgagcgtgggactgttgttcgtcacttctcatccagcacttgctcctctcttgtaaaggaagatactgtatcaagttccaaccttcatccagagtatgcaaaaaaaattggaggatcagatttttcccatgacaggcagtctggaaaagagcttcagaatttcaaggtctcaccgcaagaagcaagtagagcctccaatttcatgagagcatccaaatatggaatgccaattactgctaatggggtacatagtttgttcttatgtgggcaggtagtaccgtctagggtgttttcaagtggagcagatttgcctccacatcaggaaatcggaatgccttcactcttccctaccatgactgagggaacattgc

SEQ ID NO: 27097 - DNA, 218 bp, Oryza sativa
  Clone ID: uC-osflM202071f08b1
tcgtatttggtattcccatacactttgtttctcttcctcgtatcgtggtcgagagaaacctatatgagagagaggaagtagccttaatttaaaatatacatattctaaaattaatatatcgtaagcaatatattaaaatatctaaatattaattaaataacactattaaaataataataaaaatctaaatataatatataatattaataattaatata

SEQ ID NO: 27098 - DNA, 634 bp, Oryza sativa
  Clone ID: uC-osflM202071h01b1
ctaacagtgtagtggagcaatgggcgcagacaccaatgctttatcctacctggcgtaataaaaaaaatatactcatatttaaaatatatttatatattatagataattatatttatatatatacaatttatttttctaataaaattaatcactaatattattcacattatattatatttaatattatactattatatttatatactaattttaataaaataatactaattataaattaataatttataattataattatatatattttatatattattatattaattattttatattatatttttttataacatataaaatatatatttatacattttcattcaatttatattttaatattaatcatttcatttatacaaagctatattaactatttatattttttatttcttatacataatatctctataaatcatataaatcttcactttactataatttaacttatatattatttatttaatatttatatatactaaaaaaacttattaatcatactttttattatacttatattcctttaatttatttatttaatattttaattattttatattataatattataataatattatttattatataaatataataatatatatataaatat

SEQ ID NO: 27099 - DNA, 71 bp, Oryza sativa
  Clone ID: uC-osflM202071h03b1
tttcatatttaacattaccggaagcagcaagggacaggtttagaaatcaccgtcgccctgagaggacaacc

SEQ ID NO: 27100 - DNA, 95 bp, Oryza sativa
  Clone ID: uC-osflM202071h04b1
cataagacaaatgccgccacgccggccggcggcgcagtttttttaatatatgccgttctaacaaacaaatctttaaaattacaatcattactttt

SEQ ID NO: 27101 - DNA, 399 bp, Oryza sativa
  Clone ID: uC-osflM202071h09b1
tcgtttccgatgcctaaactgttccctgatgttcatgactggagctccacctggagacttttcactgcagctccagttcttgtgaccgcctacatttgccattacaacgtgcacccaattcacaacgagctcaaggaccactcccagatcaggccaatagtgcgggcgtcgctgctgctctgcttggccgtgtacaccaccaccagcttcttcggcttcctcctcttcggcgaggcaacgctggacgacgtgctcgcaaacttcgaactccgaccttggcattccctacagattggtgctcgacgaccccgtcagggtcagctccgtgttccacccttagctcggttttcccattggattccatcccctgtggtttaacatggacggcctctttttttc

SEQ ID NO: 27102 - DNA, 344 bp, Oryza sativa
  Clone ID: uC-osflM202071h10b1
tcgtcatcttctccgcacacgctacactcctgtcgatcgatcttctcctcccgtctcgatcagctgattcgcccagcctccggtagcttgcttgtgcttcgtatccatggatcctcaccacagctcccacgtccatgccggagccgccactcctaactgcatgtgcaggttgcccaaggaggaggatctagccgccgccgtcgtcgtcgacgacgtcgaggcggctcctcactacacgtcgttgaaggcggccgaggccgacgtcgtcccgagaggagtcggctgcggctgctgctgcggctaaggggactgaggctaggaggtgaactacatggtccgcccgc

SEQ ID NO: 27103 - DNA, 59 bp, Oryza sativa
  Clone ID: uC-osflM202073a03a1
gaaaaaaaaagaaaagtttaaatgggaaaataatttttaaaaagaaaattttttaaaaa

SEQ ID NO: 27104 - DNA, 195 bp, Oryza sativa
  Clone ID: uC-osflM202073a04a1
ggaagtagtagggaaaccaataccattatcaattgtagcatgcacatgagagcagctggacaaatcaaagcatgatcgagttaaaaatgaatgggaaacaggcaacattactacagtagtattattactccatgcgctgatgcagagagcagatgctgcgaaattgattctgcgcagggctctttcacagttcgt

SEQ ID NO: 27105 - DNA, 118 bp, Oryza sativa
  Clone ID: uC-osflM202073a05a1
atgagaagcaccatctaccataagcttttcaaacagagagccaagataagcagaaagggggatagtccattatgattggtcaacagcttgatgaacagatgctacatacacgtagagt

SEQ ID NO: 27106 - DNA, 129 bp, Oryza sativa
  Clone ID: uC-osflM202073a07a1
catcacattaaaactttcctacacacatgaacttccaactttttcgttacatcgttcactttcaattaaactttcaatttttgggggaactaaacacacccctaagttttcttttccttcgcaggaaaa

SEQ ID NO: 27107 - DNA, 146 bp, Oryza sativa
  Clone ID: uC-osflM202073a08a1
acgaaatgcaaataatcacttttgaatttaccaagttgtaggtgaagcaattacaggggtacacttgatccttctgaatttagaaagcatggaccgtgcaaagaaaatatacagcccgggatccaggtattttggaatcaaaatac

SEQ ID NO: 27108 - DNA, 121 bp, Oryza sativa
  Clone ID: uC-osflM202073a09a1
gggaaatgctgcccattacaatgggagctaaaactatgctcttattgcactctttataatcgatcaaagaatgaaacactgatcggtacacatgcgagatatgcttccataatcgttacaa

SEQ ID NO: 27109 - DNA, 109 bp, Oryza sativa
  Clone ID: uC-osflM202073a10a1
ggggggtaccaaataccatgtgttttccaagctgacagagtgtaaagctcctaattaatttaaacagttatgagaatacaacagtttttatgaacaaaggtttcataca

SEQ ID NO: 27110 - DNA, 348 bp, Oryza sativa
  unsure (1)..(348): unsure at all n locations
  Clone ID: uC-osflM202073a11a1
cattgttgcagtcaccaaatccctttcaaggtcaaaaggaatagggtccaatattacacctttgacatactcaaatccccgtagcttgttctttgctgcaacatgattgcagcntctttcaggatatgcctctttagaggccttcagcactttgcatantttcagcaaaaagaaacccctttgcagcccatttatgattttctgccccactttcagntggtgttctcctttcatgttggnatttaacttacttgcccacttaaccnattgatncnntgaagctgttcccccattataccnncagacatctttcnnaacggttgganngggaaaaccatatactttttc

SEQ ID NO: 27111 - DNA, 200 bp, Oryza sativa
  Clone ID: uC-osflM202073a12a1
aaatgaaacacaacaaaactttatttgcggaaagtcaatgtgtccacataactgcaatttcgatcatatgagcaatgtgtgacccaacaaaggctatggcaaaacttgaccatgaatgtaaataaaatgtctaaattgaagcaaagtacttcttgctgtacttggggtcaggctttaattgactttttcccaaggtttgc

SEQ ID NO: 27112 - DNA, 291 bp, Oryza sativa
  unsure (1)..(291): unsure at all n locations
  Clone ID: uC-osflM202073b02a1
gtcagtaatgtcaatttctccggggaaaaaatgtcacttccactgtagtacattacgcaggtacataacctttgctcaactcttggcaatgcctaccatctactgtctatttgtattctttcctcactctagtgtattcatgttatacantctttcaacangaatttgacttaccttagtaacccttcanntcatgcttacctttttaatntttttcctggtttcctgaaatttacttcccagcactttttaagacttgccaaacccaattccccggaaaaaaaagaaaaa

SEQ ID NO: 27113 - DNA, 150 bp, Oryza sativa
  Clone ID: uC-osflM202073b03a1
gggaactatcatacatgaatgcattattcacaactcgcctttcatatactctttgaactatacagggattgcctatcatttgcagatttaaatgaacaggctactgggatagtgaggggccacaaaaaattaaagagtgaatattaatta

SEQ ID NO: 27114 - DNA, 258 bp, Oryza sativa
  Clone ID: uC-osflM202073b04a1
gacagcaactcaataatctttcgatatttcaccgagggtaatgtatggtaggaaaatcgccagacataacagagccggccagactcaactcaaactcaaccctatgatggtaaactgtttgcgattaacgcctccgcctatgacaatgtgttgggaaataaacgccttccaccccacaaaaacgaatgttcgcgggaggtgttcctccccctacaaggaaattatttattggtttttcaatggttaaaaaggcgaaaa

SEQ ID NO: 27115 - DNA, 300 bp, Oryza sativa
  unsure (1)..(300): unsure at all n locations
  Clone ID: uC-osflM202073b05a1
caatacaaaaagggcatccaacataactgaaatattggagtctacgcatacatgtactgaagtactgaacgaactactgaccaaagattaagaaaagggcatcactgagacttgaaagacagcatcaggcatgcaagtaactgaaagctcaactctgcatgattgacttcgcatttgcatcttatgngctatcctgcctgtctacttaccatggtttaggaccngtcgacggatttcaccaggctgggcctggccccgtccatggtcggaattattcacttcttttcagaatcaaggaca

SEQ ID NO: 27116 - DNA, 69 bp, Oryza sativa
  Clone ID: uC-osflM202073b06a1
aaaggcaaaaatattattcaaaaaagaccccggacattaataaaaccccttgcacaaagatagtcacaa

SEQ ID NO: 27117 - DNA, 339 bp, Oryza sativa
  Clone ID: uC-osflM202073b07a1
ggaaggaataaaatttccttagatttgcaataaatatcagcagtagctcaattcaggcaatcaagacaacatgtaaggagccgaacacatcggcaacctgaataacaagtggcaacctgaataataacaagttaagtttatgtagtataagaactgaaccttggatctaataacaacaacaacatggccatgggacacgaaaaggtttcacctttgcggccacagctcacaccgcggagggctcctcgacatctctgccccttccgccgacgccagcggcgctgtggtgcggcaggtcaacgccagtggcgccctcgggtatcagggacgcggggcggt

SEQ ID NO: 27118 - DNA, 176 bp, Oryza sativa
  Clone ID: uC-osflM202073b08a1
acaaaatgcaaataagcacttttgcattcaccaagttgtagttgaagcaattacagggttacactttatcctcctgattctagaaagcatggaccttgcatctgaaaatatacagtccgggccccaggaattttggaatcacgaatcccaaccaaaaaaggaaactgaagtttttg

SEQ ID NO: 27119 - DNA, 402 bp, Oryza sativa
  unsure (1)..(402): unsure at all n locations
  Clone ID: uC-osflM202073b09a1
ggccaataattggaacaagatcttgcgcaggactcgtacggttttggaggacaggttaaattataatcacattcctgatacagacaaacagtactactagtggtaancctcttacatcaacacttttcttccgtttcgttctgcangttctctcccttcacatcaggaggtaccccnttcttgccactttaacttgacagnanngttgtacagnncaaccatttcaaaattttaattcccaaaaatttaaccagattaagttgtttttttaaggttgnngaggcaattccccggcttcctacttnactttcagnnattctttnnggaacacggtccaaaacgaccgagnngtgggngattttgacccgacttatttccggacccgttcgcgcccgggagttc

SEQ ID NO: 27120 - DNA, 383 bp, Oryza sativa
  unsure (1)..(383): unsure at all n locations
  Clone ID: uC-osflM202073b10a1
cttagctgtaagcagcaaatatgatattaatccaccagcgaatagtacttccaacttccacgtacaattattgaagtttaaatatggtacgcttgcaaatggatgctgcaagcaagatatattaggnccctaccacaccacagtaagaaatgcttaagccagctagggtggaatcatttttcttagagggtatcttggtaaaatgggcctggtgtgccagcgccgctttttcgtcgattggcttcgccgcccgattgacccgtccggctacccacccttttgtccacccttcaccagcccgttnngcagagggggcgacaaccaaggggccggcaagtttgggaagcattctccttttattcggtttttttccatttcgccta

SEQ ID NO: 27121 - DNA, 329 bp, Oryza sativa
  Clone ID: uC-osflM202073b11a1
ccgatctgatatccgtatataccttccctacctaagtaaaaggggtaacagacacaggaaaaaaagagagaggaagagtgtacatggattagttacaccaacatttactgtattttgacccaagcggccctcgctgggcacgttccttggatacgcacgtagacgagggtagttaccccccggccggcgctgaggcttccgggctttctcgcgggcgtgttcgaaccggtggagcgtctgtacattctggccccctggcgcccgagaaagcccggcggaacggggcagccaccgagccaaagcgcctggtttcattggagttagcccgt

SEQ ID NO: 27122 - DNA, 165 bp, Oryza sativa
  unsure (1)..(165): unsure at all n locations
  Clone ID: uC-osflM202073b12a1
gcaaccattgcatgcatatgggcaaaaaattctgattccagctcagtggctatgtgaatcaagcagcgtccattatcttctctcattcaactaatagggtacaaaacttgggatggcagntccaccatcatattataattatatgattctactctcgtatttctc

SEQ ID NO: 27123 - DNA, 234 bp, Oryza sativa
  unsure (1)..(234): unsure at all n locations
  Clone ID: uC-osflM202073c01a1
ccccataatcatcgaacttcatatgattatatcaacacaggccatcatcaatttacagctttcaggtggcactatcaccggacaatcaaaggcgcctccgaaacatagcaacgcaggcacacaaagaaacccatggnggaaggcaaactttcccctacgtgacttattttcaaagaaanntagaaaagaatggttttttggtgccgccccttttccaacattttccaaggaata

SEQ ID NO: 27124 - DNA, 155 bp, Oryza sativa
  Clone ID: uC-osflM202073c02a1
ggcaacaaaacaactttattttgaattttatccacaaggacagaaaaaatgcaaattattacaatctaccaatatccaagagtttaaagcccacatagaaagttatgaaatacagatggttcaataagaatttacgcggaaaaacaaacccccta

SEQ ID NO: 27125 - DNA, 213 bp, Oryza sativa
  Clone ID: uC-osflM202073c03a1
acccaacattaaaacttttagcaatgccttcattatcaacacgaaaaaaggggatatgatggactattacgaaaaaggggttctgggcaatttacaaccacctgttctctcgggggtaacgagaaagggattaagaattaaagaaggggaaaaaggaaaaaggaaaagggaaaaaaaaggaattggggttttgctataggggaaataatctaa

SEQ ID NO: 27126 - DNA, 357 bp, Oryza sativa
  unsure (1)..(357): unsure at all n locations
  Clone ID: uC-osflM202073c04a1
aggcaacttctatcagtatatatcaagcagagaaggaacagcgcaagacatgtttcgtacaatcacatcttgaaccacacaaatatataaaacggtagtgttacaaacaaacaattttggacggagcgtttccttagngcctaataacctctctcggaagagattaagcgtaataantttaaacccttggacttctttttnntggcttgcacttttgttatgaatccctttcatttggaaaatccttccgtgttggtcacccttcctgttagcattcctcggccgttaggggcaagggcaatgccctgcctttctaccacaaaccggcccttcagtttgttgcaccccattgaaggt

SEQ ID NO: 27127 - DNA, 110 bp, Oryza sativa
  Clone ID: uC-osflM202073c05a1
acatgaaacaggcaggtatcagatattcacattggaccgtctcctttcgaaagcatatgtacatggcgcacgcatgcaggtggcccgggtgttctgcacaaatatttttt

SEQ ID NO: 27128 - DNA, 298 bp, Oryza sativa
  unsure (1)..(298): unsure at all n locations
  Clone ID: uC-osflM202073c06a1
acaacacaacaccgattggctctgcggcgatataatgtcagcagcaatcaaagaccggcggcggctgggcagaaacatgcacgaggccggcaacacaaagggcgcaaacggacgccaccatcaattttgtgcttcctaaaatcctatggacaanntcagaacatngcagatacaccccaagatcgaaaaagggggaaaaaaaaaaaaggggggcggccgtcttcgccgccggaccgccngtgggtcgaccccgngagaattcgcggacccggttaccctgcnnaggcgtaccagcctt

SEQ ID NO: 27129 - DNA, 155 bp, Oryza sativa
  Clone ID: uC-osflM202073c07a1
gggcaacaataagactcagagcatccaagtttttaaccgaatagaaataaacgagttttaaacgactaacatagtgcacattgcgagcagatattaacggtgccatgcaacgaggtcccatggcccgggggccaaaatcttaacgcaaccgctaa

SEQ ID NO: 27130 - DNA, 333 bp, Oryza sativa
  unsure (1)..(333): unsure at all n locations
  Clone ID: uC-osflM202073c08a1
aaatccgggaaaaaaacacatcacaattattaccgagcacctctatgtacattgtacaggatgggttccgttccatatggacataactctccattgaaggaaaacctcaatctacangttgccctaagaaaggttcgaaagaaaggtgaaacattctcaaangactcgccagaaatcccgcattaaattaaacagcttttcaaaggacttggaacaaactccttgccaccctcttaacgccaattaaaacccggttttacagttaggggccggctttaagccccaaaggcgaaccaaacacagctcagcaaaaaccataaaccatttttgtgc

SEQ ID NO: 27131 - DNA, 374 bp, Oryza sativa
  unsure (1)..(374): unsure at all n locations
  Clone ID: uC-osflM202073c09a1
aaagtgtaatcctccctcctctataaaatcaagccccaaattaccaaccccccccttctcttcccagctctagctagctagaaataaataaacacatacatatatatagttacacactagagataaattaattactaatccagaaaatatttatagctggcctctaattgaaatttaagctagccatgcatcctaatngctttactacnttcttatgngcaaggctaaccctagaggnnnagctagnnagctagttggtnagcttagttagcttagatccacccctgagcgcatgcttttgaaacccagcatgtcaaatgggnagtatttatgcatcatgaatcttttgagccctcgttcgtccggcccatggc

SEQ ID NO: 27132 - DNA, 117 bp, Oryza sativa
  Clone ID: uC-osflM202073c10a1
aatacttatcgaaaaaaaattaaaaatgccggaaaaactggactggactataaccttaaaaattattatctactctaaaaaaaaaaccccaactttttttatggtaataccctggaa

SEQ ID NO: 27133 - DNA, 204 bp, Oryza sativa
  Clone ID: uC-osflM202073c11a1
gattacaaaaccaggtaccttgattggcatggtatggcataccgggcctatcaataattataaggatcatttcgcattgaagcatgtagtctattgaccatggaatcgggcaaaatgaaacaacgctcctaacatgcctattactttaatatattcactcttcacttttctgcacaggacgggacatagagtagaggggtagca

SEQ ID NO: 27134 - DNA, 176 bp, Oryza sativa
  unsure (1)..(176): unsure at all n locations
  Clone ID: uC-osflM202073c12a1
ggggaaaaaaatcaatattcatccatccaatgctgaatacaacaccttactggaacaaaccacactaaaaaaaatagtggtggtggcaggaggcaagtatttcatcaagtagatgcattgtccctacggggttacattccaaacctgttgagggttntccagccactataatcatt

SEQ ID NO: 27135 - DNA, 187 bp, Oryza sativa
  Clone ID: uC-osflM202073d01a1
gaattaaagccgctgctccaatttaccatacgcagcatttgattacaggaataccaaaaaactactaccgatgacaggtattaattattaaaaagcacaggttcagattattgcgacaaaagtttttgatacccgtaagattggacgcttgatagccaaaccacacttcagaaccctaaatatgcat

SEQ ID NO: 27136 - DNA, 331 bp, Oryza sativa
  Clone ID: uC-osflM202073d02a1
ggcatagcattcttcatttactcgccctatttgcaacttccgactctgaagaaaaacactgaaaatgcaggttgcttagcctgctacatctgcatccttctcaatcaccgtctgcttagcgacaacaaaagagcaagggcacagacgcagcagctggcatagatacacacaaaacacacacgagttttacaggacaagcctattttagaaattttacatgtactctctcttattgatccaaagggttcgcttcatctatctccttcttgtacgctaccttatgctgctgtcagccttcttcttcttcttcttcttcttcagtaactggtga

SEQ ID NO: 27137 - DNA, 330 bp, Oryza sativa
  Clone ID: uC-osflM202073d03a1
atccagctcaagtatatttaggattttcctagaaaatcataggtccagattgtggccacaaacaattggcagagtcaacctagtccatcaatgtataccgacatggtctgatattcagatgtcttctgctgacacaatttagatcccacagagttttggcaggtaataacattcataagttacaacacttgtgcacaaatattagttatccccttcaaggtgttgtctaatcaaaatgcaaccttgctattaaatggctaaaatctattaatagatcacacacgtgtgcactggatgatggcagcggctctactttgaacaaaaaactac

SEQ ID NO: 27138 - DNA, 150 bp, Oryza sativa
  Clone ID: uC-osflM202073d04a1
tttttttttttttttttttttttttttttttttttttttttttttttttttttttttttttttttttttttttttttttttttttttttttttttttttttttttttttggaaaaaaaaaaaaaaagtgtaaaaaatttaatttttttcc

SEQ ID NO: 27139 - DNA, 92 bp, Oryza sativa
  Clone ID: uC-osflM202073d05a1
tttttttttttttttttttttttttttttttttttttttttttttttttttttttttttttttttttttttttttatattttatatattttt

SEQ ID NO: 27140 - DNA, 377 bp, Oryza sativa
  unsure (1)..(377): unsure at all n locations
  Clone ID: uC-osflM202073d06a1
gataaaaagagcggggtcttttccccagctcattagctttagtattattctgcttaactgaccagcaatggctttacatagcgttaaagttaaacagatactgtcctgtcctactgtacaaaatacattacaaattgacgaagggggcgacantcacccctgacggnagccccgcccctttgagaatatcaccagtatccatcatncttggtctatttaaaccggtncnnaggataaatataaggggggtcaccccataanntctggcacaaccctcttcctcctaccattttaccannagtcatcaaaatgggaatcccagcaataaaatttgcccagtttcttcatgggctatcccaatcattctcgttgcccgt

SEQ ID NO: 27141 - DNA, 378 bp, Oryza sativa
  unsure (1)..(378): unsure at all n locations
  Clone ID: uC-osflM202073d07a1
cgtagcacagtttgcaagtggaaccattaatcgaataaagtcgaacatcgatgccacttgaaacatagaaatatgaacaggcagttaaaacaggcccacagcatctgccgcttcgttacagttagggngaccagacttttttccaataaatatccgacacanngaacacatcagagcttttgtgatagtaccttaatagatcttannatttcacaggngtatagagncnnaaccaattannagtgttgctttgggtngcaccaaaccaagcacactttattggtgnnatctagattggataattcaagaaagcagcnagctgccttttgcttgggcaaacaggtttggcccttcggcatttgccacggtttggcaggc

SEQ ID NO: 27142 - DNA, 336 bp, Oryza sativa
  Clone ID: uC-osflM202073d08a1
gccgccgttcctctcatctcggatcgccccaagcatgccgccatcgtcagaagcgggacggagtggacggcggcggcgcacgtgatcacggcggtgatcgggtccggggtgctgtcgctggcgtggagcgtggcgcagctggggtggctggcggggccggggatgatgctcgtgttcgcggccgtgacggcgctgcagttcggcgctgtttcgccgactggctaccgctcgccggacccggagggtcggccccgcaccggaaccggcacctacccccaacgccgtcgaagcgcaaccctaggtagctttgagcgcgtggggtctggcttgttgctg

SEQ ID NO: 27143 - DNA, 329 bp, Oryza sativa
  unsure (1)..(329): unsure at all n locations
  Clone ID: uC-osflM202073d09a1
agatacaacagcagaaaaggatatacctctgcttccccggttaccatatggaaagatttttacgttacagacatacaagttacagcacaagcagttttcatatggcttgaacactctaatgtgcagcggtaggcacaatnntaaccaaaagtnnaaagtaaaaatcacatcttgggggagcaagggccccgtatcatggcnnttgggaacccatcagncnttaatatcagnntcttaannatcacatcctncnnaggaaactgnnaccggcaagggtcatccttttcccttactcgcnnttgatcctttacagccagctgcctttgcag

SEQ ID NO: 27144 - DNA, 195 bp, Oryza sativa
  Clone ID: uC-osflM202073d10a1
aggacaagagaagaatgaaatgtgcatttcaccttaaggcttggcacattacatctctatatcagcatgctttaggcacatgcttatcgatacagaccaacagtgttaaccacacctcttttaccatatgcactccacaccattaggtgtcttggcctttcccgtaatttaccaaaacgggaattacacaccacc

SEQ ID NO: 27145 - DNA, 60 bp, Oryza sativa
  Clone ID: uC-osflM202073d11a1
tttttttttttttttttttttttttttttttttttatttttttttaattttttttttttt

SEQ ID NO: 27146 - DNA, 340 bp, Oryza sativa
  unsure (1)..(340): unsure at all n locations
  Clone ID: uC-osflM202073d12a1
ggtagaaaatgtggctcggcttcgccaagcagatgcgacttgggacttctgaagtctgaactctgaacacatgcgtctctagctgttttcctctacacaaatggaggcgttgacatgggnttctttaggtgacataacccacaccctatggttaacctaagagagccacacccataccatatcacattacactgtaataatgctatttaaccaccgtgggaatgtggagaagttgaccatgccatccaggaactgtaccgccagtccgtcatcctggcccggccggagaagccttctgatggcctttccttggtttgaaagatggggagtcccttcgccc

SEQ ID NO: 27147 - DNA, 209 bp, Oryza sativa
  unsure (1)..(209): unsure at all n locations
  Clone ID: uC-osflM202073e02a1
gcagtaaccaaatcgattcacaggccacacatacaggtagtatacagattcgtctacacacaaggttattgcagaggcaaaacacgaggtatgtatatcaaacgctctagaaaagattcatgtgatgaaatacatngatgaaccaccgtatggttctcaaggggtaaaattannattaatgcagttatttagtttttaaccttttgttc

SEQ ID NO: 27148 - DNA, 352 bp, Oryza sativa
  unsure (1)..(352): unsure at all n locations
  Clone ID: uC-osflM202073e04a1
aaaggaagaaatgcatatttagatgcacaactctacgagtctcacggtgcaagcatagccatctgaccacaaaaaatgttgagccactgcacacggtgcagtgtcagttgtagcattcacaacataccgagtttctttttaggaggtaaaactctacgagtctcacagcatagtaaaacgtagccagctatttactagnatacgagtagcatttttttaangtcgcaaacaaaaggggatacangtcccggcttaaggggttgtaaaatcagcttcactatcttcatgttcgccgcaacgggaaacagagcacaatcatttttgggttccaaaaatttacggcaaacctttg

SEQ ID NO: 27149 - DNA, 310 bp, Oryza sativa
  unsure (1)..(310): unsure at all n locations
  Clone ID: uC-osflM202073e06a1
ggaggacaggttaaattataatcacattcctgatacagacaaacagtactactagtggtaacctcttacatcaacactttcttccgttcgttctgcagttctctccctcacatcagaggtacttctcttgccacttaactgacagagttgacagcaaccatcaaaannttaattccaaannaataacagataagttggtttttaggngtgggaggcatttccggcttcttacttactttcagatttctttggggacacggttccaaacgactgaaggttggggaattttgaacccgacctattttcggac

SEQ ID NO: 27150 - DNA, 51 bp, Oryza sativa
  Clone ID: uC-osflM202073e07a1
gggaaaaaaaaaaaaattaaaaaaaaatatttataataaattaaataaaaa

SEQ ID NO: 27151 - DNA, 154 bp, Oryza sativa
  unsure (1)..(154): unsure at all n locations
  Clone ID: uC-osflM202073e08a1
ctagcaacatttgtgcaagactatagtgaatagcaaactaacacactgagaggagatgactttagggagaacggaatattgtagctggactatagtcaaatgtaaatattaccaaaanccagtccccaatgtgaatcaggctcaaacttggatg

SEQ ID NO: 27152 - DNA, 145 bp, Oryza sativa
  Clone ID: uC-osflM202073e09a1
caagttcaccgaagaaaaccttttctttccccctcttttttctacaagtatgattaaacggatttaacggtgccctctcatagtttcagcggcttcaacatcaaaactttcttatactcacagcacaagtaaccaataccaatga

SEQ ID NO: 27153 - DNA, 119 bp, Oryza sativa
  Clone ID: uC-osflM202073e10a1
gcaaatagaacttcatacaatattatcttccactattcgtatcatatcccgcaacctgctgggtcaggccgtggtgcggaaatatatcccgtcccgttttttcaccccttaaatttcat

SEQ ID NO: 27154 - DNA, 147 bp, Oryza sativa
  Clone ID: uC-osflM202073e11a1
cagaaacggaagagcgcaatcactaccaaagggccaaaatgacgttatagcacattaactccagcagggcatttgctaaaaaaaaaaggaaaaaaggaagtcaacaggggttagcacccgttctccccatggcgcagaaaaatccct

SEQ ID NO: 27155 - DNA, 137 bp, Oryza sativa
  Clone ID: uC-osflM202073e12a1
agaacaaacccaaaataaataatttatagaaaatgtgtcccacatgtagaaccatacatagatacatcattcacttgatgtaaaaattgttagcctttcaacaataatacctatttggttagtatggcttgtgtctc

SEQ ID NO: 27156 - DNA, 139 bp, Oryza sativa
  Clone ID: uC-osflM202073f01a1
agggcaaagcttaaactatttcagagcaagttcaggtaaaaccatacggcgatacacacttccaaaagcttcatcgcacgaaactctcggcgggtaaaaaacacaggggattcacacgaacgccaggcacaattacacg

SEQ ID NO: 27157 - DNA, 236 bp, Oryza sativa
  unsure (1)..(236): unsure at all n locations
  Clone ID: uC-osflM202073f02a1
gggaaacgaataaaatcattattgcaaaaacatcatcttcttcttcatcttcttagtgtacacaacaccaactcgatcatcatctcgtcgcactaaacccatcttccccaacccaaagacaacgaacctcgctggccacaaantccattccaacccaccaattaacccacctgcctaagctaccggtcccccccacctttcacctttgcccgggggaccgaagtttgggtggccgt

SEQ ID NO: 27158 - DNA, 91 bp, Oryza sativa
  Clone ID: uC-osflM202073f03a1
aacaaatcccccaaaaatggacattgcacgtaacacccaagatgattaccaaaaagtgaaaagaaatccaaggccttaacacctttccaaa

SEQ ID NO: 27159 - DNA, 221 bp, Oryza sativa
  unsure (1)..(221): unsure at all n locations
  Clone ID: uC-osflM202073f04a1
gatgggttcaacgataagtatttgctgctagcaactcccagtacatgagaaatcatatgtacaacaacaggatggatgctacagtgaaacaccagaagttgatagctctgccctaagacctgcaagttgcggttatacctcaccaccgcatcaccaatcanattggtcccaatggtcaagttgcatttaaccgatctgggccccaagataccacgcccttg

SEQ ID NO: 27160 - DNA, 393 bp, Oryza sativa
  unsure (1)..(393): unsure at all n locations
  Clone ID: uC-osflM202073f06a1
aaaacaaattagttcgatacaaacaatgcaactacaaagtcgtgaagtcgaagcctttgaggcattaactttgacagcatgccatagagaccataatactgctatacagcgattagaagctatggatcacctttctgctggntcctatangcatctagntccattacggaaatccttaacacctcatcttttgggccgttcaaaccaaatggnnagaaaatttttnnnagcaacctaaaatttttgcccttctgacccaaagtggcctttcttggggagtattcagttattcattcccaaaccaaatcctttaacggggtggccaagggtttcaacgctaaataattccacaaacttcatccatggagctttcaggttttctaaattcgttca

SEQ ID NO: 27161 - DNA, 310 bp, Oryza sativa
  unsure (1)..(310): unsure at all n locations
  Clone ID: uC-osflM202073f08a1
aacatagaacatgtcttgccactttttttcgccgggaaggccaaaggaggccatccgaatgcattaaggagaaaaagttacaagaaaaaacacaacagaaagctgtcgaggacggatgcgcaccacaggngtcacgtcctaaaannccacacgcttaaccnatcaaaagcaccaaacccactganngtgaagcctttagcacccaaaanccgacccttcgccttanntgcgtggcnttgatcgccccgctaggnnncccacgacaaccccaccacaaaggaccgagaactttcggaaaaacgattgccca

SEQ ID NO: 27162 - DNA, 358 bp, Oryza sativa
  Clone ID: uC-osflM202073f10a1
gatccgcgccgccccgccgtgctacggtgatccgcgccgccgccgtctcctacgccgacgagctcgtctccaccgcgaaatctgttgcttccccagggcgtggtatcctggcaattgatgagtcgaatgccacatgcggaaagagattagcatccattggtttggacaacacagaagttaaccgccaggcttacaggcagcttttactgaccactgctggtcttggtgaatatatttctggtgctatcctttttgaggaaactctttatcagtcaaccactgatggtaagaagtttgttgactgcttgaaggatcagaatatcatgcccggtatcaaggtcgacaagggcttggttcc

SEQ ID NO: 27163 - DNA, 320 bp, Oryza sativa
  unsure (1)..(320): unsure at all n locations
  Clone ID: uC-osflM202073f12a1
agttcaatgtaaacgacgctggggtaaataatctacaagtcatataaggattaagagtgcatgttttcgtccaaaatgcatgcctcagatggtttgtttccacatgatcatagcggtagcaggtatagatagcaagggaagttccgaggcccccagggtctgacacanacgacttaacacccacgacataccatttattcanaggtggcgcttacattcttgcaccagcaggaagtattccaccaggtctttatacctatgtgtaggtttaagtttctggggaccacactttttggctttcagggggagcaacgcaccga

SEQ ID NO: 27164 - DNA, 141 bp, Oryza sativa
  Clone ID: uC-osflM202073g01a1
aaggaacagtgtaggaacccagaacccgactgatacaactcaaattttgcctagcacaaacattcatccaaaagaaaacacaatgaaaatttgtgaaaggaagaactttgaccacacaaatgagatgaaattgaccgctca

SEQ ID NO: 27165 - DNA, 285 bp, Oryza sativa
  Clone ID: uC-osflM202073g02a1
ggcgccggcgcggcggactcctgttgtctcctcttccgtgcgcgcgcgcgccgccgtggccacggccatgtggccaggtttgcggcgtccgcttcgggggccggcggcgaggaggccggggagccgtcggaggacgaggcgcagagggagtgggaggcggagatggcgcggcggctgaaggaggccgaggagatggaggagctcgagcgcaccgccgaggagcctgcagagcccaggccggccgccgagggcccccgaccagtcccgaggaggagaaagcgcgag

SEQ ID NO: 27166 - DNA, 58 bp, Oryza sativa
  Clone ID: uC-osflM202073g03a1
gagcaggcgaggaccatctggtcagctatacttaaagtaggatgaactttacaccatt

SEQ ID NO: 27167 - DNA, 137 bp, Oryza sativa
  Clone ID: uC-osflM202073g04a1
cttccttcattctttgtttgtaaatgaaattttagcactcattttaaagtttttacaatcagtggtagagtatacagatgctggtctggggtatcaaacatggttatgtactggctatcccttacacaaaatactag

SEQ ID NO: 27168 - DNA, 97 bp, Oryza sativa
  Clone ID: uC-osflM202073g05a1
gcaggaagatcaaggttcatgaggctagctagctcagtgcctgaagtgcctgacgccggtgaagaggagggagaccccgcacttgttgcagcagtcc

SEQ ID NO: 27169 - DNA, 124 bp, Oryza sativa
  Clone ID: uC-osflM202073g06a1
acggcgcatgcagcatcgaatgggatcctttacaacttatatagccataggaataggacaattatatcaacatcataaacagggggaaattaataccatgggcgaaccgggccatggggggact

SEQ ID NO: 27170 - DNA, 194 bp, Oryza sativa
  Clone ID: uC-osflM202073g07a1
aataaaaaggtccttttctctgaacacaagctagtagggctcatcatcaacacaagctagtaggggtcaacatcacaactaaacgcagcaggcaaaattgtttgttcctcacaccaagatctccaggtgtggcctccttgtctcctgcggctttattttcggttttttttttatttatatgggtgaaccaaagg

SEQ ID NO: 27171 - DNA, 326 bp, Oryza sativa
  Clone ID: uC-osflM202073g08a1
gaaaaaaatattgagccatcatccaatataccagccataaatattcagttgaatgcagagcgacagattccagggattatttactgcaggagggggcagtttgcagggaccagttcttttacctttttttttaatcaaatttgtaggtcaatggcaaaaaaaatttctaatcaaaaaacggcacggtaatatgaatcactaaacgatcttgcgatcgaacaagcacacagtgtttactgccctgtgctttttctaagacttcagagcagtatttttgcatatgggacaggggttcttcacaaccagccattgcctgacgcatccaa

SEQ ID NO: 27172 - DNA, 156 bp, Oryza sativa
  Clone ID: uC-osflM202073g09a1
cgcattccacaacagtcgaagggcaataataagtcttaacatccaagtttaaaccgaacagaaaatagagttttaaatgactgacatagtgcacaaagcgagcagatattaacggtacaatgcaacaacttgaaatgcacccgtcgaccaaaactt

SEQ ID NO: 27173 - DNA, 144 bp, Oryza sativa
  Clone ID: uC-osflM202073g10a1
aggttgaaaaacaaactttattcagcagcaaggaaataagggaacacaaagcgaatatctgatcctcagtagcgcgccaggctagacaaggtcggatcatagaagcatccgccactcgagaaactaggcccaaacccctttaaa

SEQ ID NO: 27174 - DNA, 376 bp, Oryza sativa
  unsure (1)..(376): unsure at all n locations
  Clone ID: uC-osflM202073g11a1
gggaaacgaataaaatcattattgcaaaaacatcatcttcttcttcatcttcttagtgtacacaacaccaactcgatcatcatctcgtcgcactaaacccatcttccccaacccaaagacaacgaactcgctggccacaaantccattccaaccacaattaacccccactgctaagctacggttccccccacttttcacttnngccggggaccgannagttggtgnngcgtaccgcccaggncnngttgttgtttgaaccgggnngtcggcgagggtggtttcggcgagggttcctcgagggggccccttgccccggtgaccgatggcccctggacgaaagaagcccgaaccatggnagaacatggccgaggccgg

SEQ ID NO: 27175 - DNA, 73 bp, Oryza sativa
  Clone ID: uC-osflM202073g12a1
gagaaaaaaaaaacttttatttaaaattgaaaaggtaaactaggagggaggcaaaagaaccaagtttttaaaa

SEQ ID NO: 27176 - DNA, 96 bp, Oryza sativa
  Clone ID: uC-osflM202073h01a1
tttttttttttttttttttttttttttttttttttttttttttttttttttttttttttttattttttttttttttcttttatttatttatatttt

SEQ ID NO: 27177 - DNA, 222 bp, Oryza sativa
  Clone ID: uC-osflM202073h03a1
cccttctcttctcccccggggtttttttaccgactccctctcctctcccacccgctttctctccccaacacctcgaatccggtcacaactcccccccaccagttctaaccctaccttcccaacccccccccccccccaaccccaacccccccccaccccacaacaaccacccccccccccccttccccccaaccacccccccactccccccccccaactccc

SEQ ID NO: 27178 - DNA, 153 bp, Oryza sativa
  Clone ID: uC-osflM202073h04a1
aggcttgcaaactgtgcaattgattttattttcaccatgcatacctcaaataatcacagccataataacaaaagccatactctctggattaaagatccaacagggttcaggagaacaccgcaaggctcagaaactacaccactcacccaaaat

SEQ ID NO: 27179 - DNA, 162 bp, Oryza sativa
  Clone ID: uC-osflM202073h05a1
gatcaagcatatataaataaacgcaggaaaccaggcacttgacacaagattctcagttacacggcagctacattaactgggcgatatagttagtatatatctagctgttcaagcaataagagaaccggtaatcaaactccgtagcaaataccccccaaaact

SEQ ID NO: 27180 - DNA, 169 bp, Oryza sativa
  Clone ID: uC-osflM202073h06a1
gctatggctacttccatattttttttaatgcaatgagcctatcctataccctctcttttctgtttatatttcaatataccgaaacccatataagactagataaatattaagaggacatcttcacgcctaagataataaattctatctgtggggcagctaaagattgtgt

SEQ ID NO: 27181 - DNA, 154 bp, Oryza sativa
  Clone ID: uC-osflM202073h07a1
gaaacaaagacctgaatagagccacagacgaagtcaaaaccagactatgcattgtatcatttgccaaggacccgacaaagacttgaccgccacccaaaagctcataaactgtacaagcaaaagcccaaaccatcctcctgcttcgcggggtcta

SEQ ID NO: 27182 - DNA, 160 bp, Oryza sativa
  Clone ID: uC-osflM202073h08a1
cgctatattatgcattaaacaaaggaatacgatacaaaacattgctcattttaggtacaaggctagtctagctctactttagtttcacaacaaaagctattacaaaaagaaaaacaaaaacacgaatttcataggagcgaattcatcctagtagcctcag

SEQ ID NO: 27183 - DNA, 227 bp, Oryza sativa
  Clone ID: uC-osflM202073h09a1
aaaaataactcacggaaactattttaaatatgaatgctcactctggagagctaaattaatcacggcagggtgcatgcatgcagtaaactcaaattgtcacaacaaaaagtcaccgagtctaatcacgatcacaacgacaaactgtagaatgtaatgaggctacgaaaggacttcctcgatcagaagttgaaaagaagggcgagccagaggggagcttgccacggccg

SEQ ID NO: 27184 - DNA, 214 bp, Oryza sativa
  unsure (1)..(214): unsure at all n locations
  Clone ID: uC-osflM202073h10a1
ccttgccaaagtttattgacaaaaaaaaagggtgctatggtacaacgaaaaagagcttttacactatgatcttgcgaagggcttgctgtaaatgggaaggcatcaaaacttttgtcgaaccaaacaangaagnnaagaaattctagtattgaaagctccaggnnaggatgaagcnnaggaggggtnnttggtggnngtgatgnnagggccaaag

SEQ ID NO: 27185 - DNA, 93 bp, Oryza sativa
  Clone ID: uC-osflM202073h12a1
ggggcaaaacaatatgattgattatgttttatttcagttgctagtaatatgtcatagttgtagtttgacataaataaggaagcaaaaaagata

SEQ ID NO: 27186 - DNA, 219 bp, Oryza sativa
  unsure (1)..(219): unsure at all n locations
  Clone ID: uC-osflM202074a01a1
actcttattgaatcgcggtaaagtattctaattcaataaaaatttcgcgggcgaatatttactctttcctgtcttatttgttaattcataacccttatcaaataangacacattttttttggttttgtttccgcccattcccaccccaaatgaagttatttgggcatttcttttttcaaggaaaaatccctatcccagtccattagggttcctgttcgt

SEQ ID NO: 27187 - DNA, 74 bp, Oryza sativa
  Clone ID: uC-osflM202077a01b1
taacactgcgttcttcttctcgatttatctggcttggtttatagatctgtagcttattagcagacatgtgcggt

SEQ ID NO: 27188 - DNA, 331 bp, Oryza sativa
  Clone ID: uC-osflM202077a02b1
ttgatataagcaagcaagaagagacgagacgagggtgtgtttaataataattgcgacgttttttttttaaattatttattattttttttattttttatttttatattttatttatattttttaatttcttattttttttaatttttatatttatttttatacttttttatttattattttttttttattatttatattatttatttatttactatatttctttattttatttattatattttttccattatttttatctttatttctttattttttattaaattatttttttctattatatttataaatatattctttttttttttctatt

SEQ ID NO: 27189 - DNA, 430 bp, Oryza sativa
  Clone ID: uC-osflM202077a04b1
tgttgttgctgctgctgctcctcccgttttccgatcgcagccatgggaacccgcagcgtggccttggtgctcctcgcggccgtgctgctccaagccctcctccccgcttcggcggcggagggtttggtgcggatcgcgctgaagaagcgcccgatcgacgagaacagccgcgtcgccgcgcgactctccggcgaggaaggggcgcgccggctgggcctccgcggcgccaactcccttggcggcggcgggggtgagggcgacatcgtggcgctgaagaactacatgaacgcgcagtacttcggggagattgggcgtcggcacttcgccgcagaaattcaccgtcatcttcgacactggcagctccaacctctgggtgccgtcggccaagtgctacttctcgattgcgtgcttcttccactctcgctacaag

SEQ ID NO: 27190 - DNA, 262 bp, Oryza sativa
  Clone ID: uC-osflM202077a05b1
ttaggaggaaattgtcacaggaatcattagaggcacttggggatgggaacccgaaatatggcactaaggtgctcctcgtggacgggctgctacaagccctactgccggcataggcggaaggagggaaaggagcggatcgcgctgaagaagcgcccgatcgacgagaacagacgcgtagccgcgcgactctccggcgaggaaggggcgcgccggctgggccttcgcggcgccaactcccttggcggcggcggtggtgagggcg

SEQ ID NO: 27191 - DNA, 330 bp, Oryza sativa
  Clone ID: uC-osflM202077a09b1
tgctcacccaaacccgccccctcgtctccgtcaaggccctggagggcgacatggccaccgacaacagcagcagcctcgccctcgccgaggtgttccgcgcgccgctccgccccgacgtggtccgttttccttctcaggcctgcttctcctttctccttgctctagccctactccatcgttcccgctcctcctgctcctccttctcttctttcttcctttctctctcttttttccacgttcttctctttcttccttattttctcttcttcttctcctttcttcactttttctttcttctcttctctctccttactcctttccctctttttc

SEQ ID NO: 27192 - DNA, 272 bp, Oryza sativa
  Clone ID: uC-osflM202077b01b1
ttatttttttttttttaagggaaattatgtgcccctctttattctgaaatctgaatgacaaaaggctacacgcgaaaccgctgtgattggtttgcgacatcgcatcacaatacaaacttacagggaaagggggaaaataattcgcaggaaaagaacggcatcattcaagcctcccgtttatacttccctgcagttgcaaatgcttgttcatgtgctaactgaaaattctttgtcgccatactagctacatacctgctgcacattcttttgtt

SEQ ID NO: 27193 - DNA, 90 bp, Oryza sativa
  unsure (1)..(90): unsure at all n locations
  Clone ID: uC-osflM202077b05b1
tcnatcctatcgatgtgaagatgacataaagggtttttttaaacatatcccaggaagctgccagaccattctgatgtttgaaacgtcaag

SEQ ID NO: 27194 - DNA, 434 bp, Oryza sativa
  Clone ID: uC-osflM202077b09b1
tgcggaatgagaaatcggtgtgctatcacatggttgttactcactactcaacagaagcaagtgacattgatcaacctacagaggctgtagtggagctgtattttaatatagttataatttcttgatgtcgatatttatttcattttttatttttttttattttcttcttccttttttattttatcttttaattttttccttctaatatttttttctaatttttttatcttcatttattatttctctttattataatcatatttttttattctatatattatttctcctttattatttttttaatttatttatctttatttacattcacttaaattttttattttttttttttacatttatttatactatatttttttacacttttattattctatctttttattatatatactttattttttttctttattttt

SEQ ID NO: 27195 - DNA, 272 bp, Oryza sativa
  Clone ID: uC-osflM202077b11b1
tctggatgacacaaatgtctatcgagttaccatgggacaaaatattcgagggtaacttgaccactaaaccaatcaatggtgctatttttatttttaatccaagatctgttcaattatttttttaggttattcattcatgttttttgtctgtattttttttttcttcattttttttactttgttttttattcttttatcttttttactttatttatcattctttccttatttgtattcatatcctcttttttttttttttttttttttctctt

SEQ ID NO: 27196 - DNA, 133 bp, Oryza sativa
  Clone ID: uC-osflM202077c02b1
tgcctcagcttgcaagaaattcatgcaagatcctatcgaaattgatgttgatgaggattcgaccaccaccgtccacgcactcactgaaacttataagaccgttgatggacccttgagcaaggtactgaggggt

SEQ ID NO: 27197 - DNA, 262 bp, Oryza sativa
  Clone ID: uC-osflM202077c03b1
ttctcgtgccccaccttcgtctacaacaagtacatactagaccccaagatgtacaactgggccttaccgatctgcctcaccatggtccacatggccttctgctcctccctcgccgtcgccctcgtccgcctcctccgcgtcgtcgagccgtcctcgtcgcccgccatgaccccgcagctctacacctccttcgttgttcccatcggcgcgctctacgccatgtctctgaggttttccaacctcggctcccatttacctcttc

SEQ ID NO: 27198 - DNA, 293 bp, Oryza sativa
  Clone ID: uC-osflM202077c05b1
tatactacatccgcttcgcttgctcctctggggaagtcgggaaagctacgcgcgggaccatggcggcagtggcaggaggcgcagcgcggtcgctgatgcaggcggagcaggacgtgcagatgatgcttgtcgccgacgtcttactctggcaccaagaactgtgactttcagatggagcgctacgtctacaagcgccgctccgatggtatctacatcatcaacctcggcaagacatggggagaagctgcagctcgcggcgagggtgattgttgccattgagaacccccaggaca

SEQ ID NO: 27199 - DNA, 52 bp, Oryza sativa
  Clone ID: uC-osflM202077c07b1
cctggtgaagaagaacctcgtacacgacgagcaggcgtctacggtcaccggt

SEQ ID NO: 27200 - DNA, 306 bp, Oryza sativa
  Clone ID: uC-osflM202077c08b1
tctctgccttgctccacttgccaaggttatcaatgacaggtttggtattgttgagggtttgatgaccactgtccatgcaatcactgcaactcagaagaccgttgatggaccctcgagcaaggactggaggggtggaagggctgccagtttcaacatcatccctagcagcactggagctgcaaaggctgtcggcaaggtgcttcctgctctcaatggaaagttgactggtatggctttccgtgttccaaccgtggatgtctctgtcgttgattcgactgtcaggctttgagaagccagcttcctatg

SEQ ID NO: 27201 - DNA, 467 bp, Oryza sativa
  Clone ID: uC-osflM202077c11b1
ttttcgcctctcctcctcccccgtcttcccttcgcgcgcgccacccccacacacgcgaccatggcggcagtggcaggaggcgcagcgcgggcgctgtcgcaggcggagcaggacgtgcagatgatgctcgccgccgacgtccacctcggcaccaagaactgcgacttccagatggagcgctacgtctacaagcgccgctccgatggtatctacatcatcaacctcggcaagacatgggagaagctgcagctcgcggcgagggtgatttgttgccattgagaacccccaggacatcattgtccagtcggcccgcccctacggccagcgcgccgtcctcaagttcgcgcagtacactggcgcgcacgccattgttggaaggcatacgcctggtacatttaccaatcagctccagaccttcttcagcgagccccgtctgctcatccttaatgacccaggaccgatcacca

SEQ ID NO: 27202 - DNA, 94 bp, Oryza sativa
  Clone ID: uC-osflM202077d03b1
tcggtgctctgcctccctctcacattccccacgcggtctttttctaaatacgacgctcggtacccctcctataccgccgcgagacactaatagc

SEQ ID NO: 27203 - DNA, 333 bp, Oryza sativa
  Clone ID: uC-osflM202077d05b1
tatgaacatcgccgacaacccaaccaacgtgcagctcctcgggatgtacaacagggaggacaacccccgtgtccccatcatcgtcaccggcaacgacttttccacgctgtacgcgccgctcatacttgacggtcgtttggagtcgttttctcttttctttcttctttctactttttttttctttttttcttttctttttctatattccttttttccctttctctttttctctttattcttctttttttttttttcctcattcttttctttactttttttttatatcttcttttttttttatttctctttctttttttatttattctttttttt

SEQ ID NO: 27204 - DNA, 167 bp, Oryza sativa
  Clone ID: uC-osflM202077e04b1
tctttatgagcaagaaaatggacaggaagagggtgggcatcattagcgccggtgcgagcttcatatccaaatgcaaacactcactgtacaaattatttaacccaaattaattaaaagtaacctacatcatacattttgtttataataattccattaagtaatattct

SEQ ID NO: 27205 - DNA, 339 bp, Oryza sativa
  Clone ID: uC-osflM202077e07b1
tcttaactttgctactgcagagcactttgcaaggatgctgctggagaacaaccctaatgagagccaagcaaagagggcccgacaggtgcagcaacagtgcagtggaaagaaggatagctgtgagctgaactatgactacagaaatccatttgtcgtctgtggtgccacatatgttccaatttaccgtggccagaaggatgtttcctgcccgtactgtggatcccggatttgttccttccatcgaagggcagctttgtaccatatgtgagcttgctgtggttggtgcagatgcttcaggccttctctgctcccctacgcagttgagataagtggcgcttg

SEQ ID NO: 27206 - DNA, 88 bp, Oryza sativa
  Clone ID: uC-osflM202077e12b1
tcacgtattacgtgcgaaaaaaaaaaatcagtgagcactttatcgaggagggggtatcttaacaagggagatggcttgtctacttcta

SEQ ID NO: 27207 - DNA, 533 bp, Oryza sativa
  Clone ID: uC-osflM202077f03b1
ctgaattagcaccaaccacgaatcttgctaagatcagtcatgggctagaaccccgtagaggctctactcctcctcccacggcggctagccagtgctgcgctcgagggcgccatgcgcatactacttcagcaggcagcgaccaacacccgacgaggttcgccataatccgacccccaacatcattgaacattggagcgccatgtttcctccaagacgatacgacatccaaggctgtgccattcatactggttgcataaccataactgtttataatcgtctgctggggaagaaaggtacgccagtgagtacataatccaatgtgtgcattcgatcactcgccttggtttcgagtgcatagggtaccgctaccaagtgactgcacccgaccgtccgtgagacgatgtgctaaggtacatacgttctacccagttgcactacgacaggctgcccgccaccgcctttcgtcagtcgtgtaacgactcccatgtaagccccagggcaccgggcgacgaacgtccgtcaaggtcccccgt

SEQ ID NO: 27208 - DNA, 57 bp, Oryza sativa
  Clone ID: uC-osflM202077f04b1
ttttgtgcagccgcagcgcgaggtggaggtggggtttttttttctttttctggccca

SEQ ID NO: 27209 - DNA, 482 bp, Oryza sativa
  Clone ID: uC-osflM202077f09b1
ttctattcatctccatcgacaaagctagctaagcccagtcatggccgcctctcccgcaatgccgtcactcctcctcctcctcctcctagccgttctcgtctcggcggccgatgcctacgactccgccgccagcgccaacaccaacgccggcgccatccccgaccccaacatcttgaacatggaggccatgtgccccaagacgacggacgtgaaggcgtgccagcaactggtgaagaacatgccgtccaacatcgtcgcggggaagaaggacgccaggagcatcgcccgggggtgcatcgccaccgcctggttcgtggcgagggacggcgccaaggactgcaccgccgccgtggacgagtgcaaggacaaggtcgaccagtgcctcgacagctgccgccacgccttcgccgccgtgaacgacgccctggagccccagggcaccggcgacgacgccgtcaggtccccgaggacgagaagctcct

SEQ ID NO: 27210 - DNA, 472 bp, Oryza sativa
  Clone ID: uC-osflM202077f10b1
tttttactctttcccctcgagttcttcaccggcttctttcccctcctctccggaccagggaagcagctaactgtctgcgcaagaaaggtggttcaagcacgatgggacggaaccatctttgcctggtcacttgcttgtggattctgtcatgcgcagttctgcttcatgcttctcctgatggattgctgagaattagcctgaataagaagagattggacaagaagaccttggacggtgcaaaattggcaagggaggaaagccatcgtctgagagccgacggtttaggtgatgacatagttcctttggacaactacctggacacgcagtactttggagagatcggcatcggcactccaccacagaacttcactgtgatattcgacactggaagctccaacttgtgggttccatcagtgaaatgttatttttcgatagcatgctacttacaccacaggtacaagttcaaagggtc

SEQ ID NO: 27211 - DNA, 220 bp, Oryza sativa
  Clone ID: uC-osflM202077g01b1
tctatgcttcttgctcgcttgctctctactatgggtccttttgactcgtggccaagctgcagaggaaacccaaaattccaagaaaagcaacaggtcaagaaagagggaaagcctaggtgagaggagatgggaggaatcatgaaatgtatgactttaacctttcaatctcagactcactttacacccatgttcctactcttgcttacagcacttaaatatt

SEQ ID NO: 27212 - DNA, 139 bp, Oryza sativa
  Clone ID: uC-osflM202077g03b1
tcctgctgcagccgccgcggcgttattgcctggaccaaccacgccgatacacacctctgttcttctttcattgcttggggggcttactaattaatcaaccactttcacctctacatggcctatgaagccatcatcttct

SEQ ID NO: 27213 - DNA, 138 bp, Oryza sativa
  Clone ID: uC-osflM202077g06b1
ttcctccacctgtaccactaccaacatgtggggcaatttctaatactgggcagacgaaccgaaccataccaatgagcaatgatccagctgactcgcaatgtaccagagaatccaatcatcttcatctgaaccggccac

SEQ ID NO: 27214 - DNA, 99 bp, Oryza sativa
  Clone ID: uC-osflM202077h03b1
caagcacccccccggcaccaccgcgcacagaaccgccgcgacgaacccccccgtcttatgacggccgccccccacacccacccgggggggaaacaaaaa

SEQ ID NO: 27215 - DNA, 89 bp, Oryza sativa
  Clone ID: uC-osflM202077h08b1
tcgtactctctctccccccccaccctcccttggcctatagctgaggcggcggctcgtcggcagcggccggcggctgaggaggaggagga

SEQ ID NO: 27216 - DNA, 140 bp, Oryza sativa
  Clone ID: uC-osflM202077h10b1
cctgcggatctgtagcaaagagcgaagagcgaagctgcagtctgcagctacgcttgttcgcttgagacctagggtacgagcaacaataatagagagtgactgagtgagcgagcactgagtagcaagggctcggtacaaac

SEQ ID NO: 27217 - DNA, 95 bp, Oryza sativa
  Clone ID: uC-osflM202077h11b1
tgaagctttgctccgccatggcaggcgacgcgctgcgtgcggacgatctccccggccgaggactagggcatctcgacaagcgcaacaatcgggaa

SEQ ID NO: 27218 - DNA, 373 bp, Oryza sativa
  Clone ID: uC-osflM202080a01b1
ttgtcgtggctcaaaattcttcgcctcccaggggaaaaagaacaaggaaaatacactcgaactttctgttcacccagcacaaattggtgtcatccttccctcgtccttgcttgcgtcaaacgattctgcgtcagtttaccgactcacgcgagttcgttcgtgttcgtctccgtttgttgtcgtgtttcgtggaggccaggagataatagttcttgtagttgtatccgatcagcatggagattgaagaagaagaaggctttcgcttctatcgccgaaaggttgctctctttttccttcgattcgagctgtcgaggttaaggccattggagaatagcaccaccagccgacctgaatccccccctctccatgctta

SEQ ID NO: 27219 - DNA, 226 bp, Oryza sativa
  Clone ID: uC-osflM202080a02b1
ccggcacgcgccgggacggaatggccggaccgacccagcgcgttctggttcgactctcacataaccattttgccttatatactgcagtcataaaaccctaccacggaaccacccactctgctctacaccagccagcctccatggcatcggattccgcccccaccggctacgccgactgaatggtggagaagatgctcataaacgcggtttacaacgtggacttctt

SEQ ID NO: 27220 - DNA, 65 bp, Oryza sativa
  Clone ID: uC-osflM202080a08b1
tctatggtctgaaaattggggaaggactacactggtatttttcaagtactcaagatctacaaaaa

SEQ ID NO: 27221 - DNA, 209 bp, Oryza sativa
  Clone ID: uC-osflM202080b11b1
tcgctcacttgccggtgtcgacacctggatctcatgagttctgtggcttagctcagatagaaatcacaaatggcgaagattaagaccgggatcaatggttttggcaggattttgagttatttttctcctcatctttttttttattattgtatatttttattttttttttctcactatttctttttcactttctattaaatacattgatt

SEQ ID NO: 27222 - DNA, 167 bp, Oryza sativa
  Clone ID: uC-osflM202080c01b1
atacatcctccccaaccactgcatccgggtcggcgaccttctcctcctcctcctccaagcagaaagcaataggcaaaaacaagcctataggctcacaaggaacttccctaaagccagctgatctagcgacacataagttaaccataactatatattttactcttacc

SEQ ID NO: 27223 - DNA, 86 bp, Oryza sativa
  Clone ID: uC-osflM202080c02b1
gtcatataaacccccacaccactgctcgatcgatcgtcttagtcggagtaactaaggcagagatcagatcaggtcacttaggagca

SEQ ID NO: 27224 - DNA, 77 bp, Oryza sativa
  Clone ID: uC-osflM202080c12b1
atgaaagcaaacccccacgggaccgacccggaattcaccccccgacttacccaacctttctttatacacccacgaac

SEQ ID NO: 27225 - DNA, 342 bp, Oryza sativa
  Clone ID: uC-osflM202080d04b1
ttcgtttctgaccaccattggttcctgaaattgaggcatggctgccaagctagctcgcctccacagtctccgcgaacgcctcggtgccaccttctcgtctcatcccaatgagttgattgcactcttctctaggtatgttaaccagggaaagggaatgctccagcgtcaccagctgcttgcggagttcgatgccttgatcgaagctgacaaagagaaatatgctccctttgaagacattctccgggctgctcaggaagccattgtgctgccgccctgggttgcactggtcactcaggccaaggcctggcgtctgtcactccttttctctgatactttgtaact

SEQ ID NO: 27226 - DNA, 156 bp, Oryza sativa
  Clone ID: uC-osflM202080d09b1
tggcggcggcggcagagaagcccttctcatccccaagatgtacagccatatcttatcacctccctagattgctgttgtgagaatggacatcctattatcctacttctgttgcatcctgctttcatcgctcgcagtgattctactttaactcttatc

SEQ ID NO: 27227 - DNA, 515 bp, Oryza sativa
  Clone ID: uC-osflM202080d12b1
tcgatgtttaccagaatgctcgtgcctgcattaggctccgtgtggcttgtgagaagctcaagaaggtgctgagtgctaaccctgagtcaccaatgcacattgaatgcttgatggatgtgcaggattcttgatgtttttttactaatttctgttcctcattattacttttaatttatatcttattattatttctcatttttttatattctttatatatttttttctatgtacttttttattttctacttctctataaattctcttattatacatctttacttttacaatctattattactttttctcatttatatatctttaacctcttttaactctctcacttttttactatattcattattttttattctttctttctctactattttttcattaatctctatactcattattttatcttatacttctttttttcctctaccttaatttctttattaatttactatttacttattatataatctttttgaattttacctaatactatatttatc

SEQ ID NO: 27228 - DNA, 77 bp, Oryza sativa
  Clone ID: uC-osflM202080e05b1
ttatgatctttccattcttcccaacccagcagggctggctagctagctatctagatcattatccccatccaacgagc

SEQ ID NO: 27229 - DNA, 440 bp, Oryza sativa
  Clone ID: uC-osflM202080e08b1
ttttcactacggggttccagctttgcctcggcattggtatcctgacggacaacctgactaactacagggcggtgcgcatcccgctgcgggggggggagctctccctcggtctggctgcggcgccagggcacgtcatactactcgatgcactggtcatcttggacaccccaagcagtctgctcgagcgcgggcgggtggagcacgcccacggaggccaagctgaaggtggcgatcaacgggttcgggcgcatcgggcgcaacttgctgcggtgctggcacgggcgcggcgacagctcgcccctcgacgtcatcgccatcaacgacaccggaggcgtgaagcaggcgtcgcacctcctcaagtacgacttcacgctcggcatctttgacgccgacgtttagcccgtgggcgacaacgccatcttcgtcgactgtaaggtgat

SEQ ID NO: 27230 - DNA, 281 bp, Oryza sativa
  unsure (1)..(281): unsure at all n locations
  Clone ID: uC-osflM202080f03b1
atcncttttgttcttagccaccaaggagagaccatccatacacgaggggttctattataccctctctgccacgcgatgtggctgcctcgtcgctctctacgccacctgccaatctcctctaccaatcctaatcctaatccccatccccacaccacaagcaccaccaccaccaccaaaccattcgggcccccaagcccaagcccaagccccagtcaccgccgacgcaatcaccgcgatctcagcctccgccgccgccgcggcaccagacccagcaggcgccc

SEQ ID NO: 27231 - DNA, 378 bp, Oryza sativa
  Clone ID: uC-osflM202080f09b1
tcgttcctccccccaatccaaacccccaaaaccaaagccaaaacccctctcgccaccgatgggcgcccgcgcctctcgccaccgccaatcccccgaccaatcccaatcccaatccccatccccacaccacaagcaccaccaccaccaccaaaccacccgggcccccaagcccaagcccaagccccagccaccgccgccgcagcagccgcgatctcagcctccgccgccgccgcggcaccagccccagcaggcgccccagcaggcggcggcggaggatggggtggttctcttccttttcttcttcttctcatttccttttttctttctaaccttttatactttaatttcattattttttacctctacatctactctctt

SEQ ID NO: 27232 - DNA, 414 bp, Oryza sativa
  Clone ID: uC-osflM202080f10b1
tcggttcgggttcatcgcatcccacatcgcgaggcgcctcaagagcgagggccactacatcattgcttctgactggaagaaaaatgagcacatgactgaggatatgttctgccatgagttccatcttgttgatttgagggtgatggacaactgcctcaaggtgaccaccggggttgaccatgttttcaaccttgccgctgatatgggagggatgggattcattcaatccaatcactctgttatcatgtacaacaacaccatgatcagctttaacatgcttgaggccgctaggattaatggtgtcaaaaggttcttttatgcttcaagtgcttgtatctaccctgaatttaagctgctggacactgaagctagcttgaaggagtcagatgcttgcccgcagagccttaagatgcc

SEQ ID NO: 27233 - DNA, 58 bp, Oryza sativa
  Clone ID: uC-osflM202080g01b1
aaataaagaagcatctccaactattacaggaggatggcttgtttaaccgtagcttaac

SEQ ID NO: 27234 - DNA, 178 bp, Oryza sativa
  Clone ID: uC-osflM202080g04b1
ttttctccgagaggcggcgaaatccccaaatccgaacaagccaaagccatcgtcgagctccttcacccaccgatcgattcgatctgaccgcgccgccgcaagggaggaggaggaggaggacgacgagcagcagccatgtgggcggcgtcttgccttggcgtcacgctgcgccgtgtgc

SEQ ID NO: 27235 - DNA, 183 bp, Oryza sativa
  Clone ID: uC-osflM202080g06b1
ttcgcttatcgacatggaagctgctaaacgccgtgtgagtatttaattaccccctcggtattaaaacagtaatctactttctataaattctaaaaactcttggtaaaaagtatgcctgatatttcaaagaaaaaatcctaacttggatatcctaatatccgatatgaaagcttgaaatagaaa

SEQ ID NO: 27236 - DNA, 330 bp, Oryza sativa
  Clone ID: uC-osflM202080g11b1
tcgataaagtgttagaaacttcagaaggctctctgaaggatgtaatttcctctcacgtttctgaaaaggctatccttacatcagatctagaaactcttggtaaaagttatgctgatatttcagagaaaaattctaacttggatatcttaatatctgatatgaaagctgagattgaaattttgagaacaaagctgacagattctgaagaaacctgccaggctcaccttgcaaataactcatttctttctgatgaaaagaacaatgtgttctcttacatgtagagctttacataggtttcttaagtctttcaattctttcacctcttttttt

SEQ ID NO: 27237 - DNA, 109 bp, Oryza sativa
  Clone ID: uC-osflM202080h06b1
gtggataacatgagcttgccggcgagtcagtactcggtgctcgacgcggagcgcatcgagcgcgtcgacaagtccaccttacgctgctacctgttccgcttgcgtcttt

SEQ ID NO: 27238 - DNA, 270 bp, Oryza sativa
  Clone ID: uC-osflM202080h07b1
tcggtagccgcgcggacggaaggggttgtgttttcgtgggccaaatggcggaggtgtgcacccctggcgccgccgaggcggagttgtggctccccgacgagttcttggacgatgatttcttcaccgtggaggagaaggcggcggttgcggccaagagcgagagcgacgaggaggacgggttggatggcctcgagcgacgcatggccgacctcctcgccggcgagggtggaaagggaacgggttccaaggtggaggtgatggctgggtcgt

SEQ ID NO: 27239 - DNA, 419 bp, Oryza sativa
  Clone ID: uC-osflM202086a02a1
agggaagaaaggtgcattttatttcttattaaattggaaatatacaaagtcatgacaaatcttggacaaattatcagatataggacatcagggacgatgtgtacaaattgtccaaatcatgctcacctccccaagttatacatatcagatacctggcttccaaaataatagtttcactcctctttgaagagctcgcggccaattatcattcttcttatctcactagtaccggctccaatctcaaacagttttgcatctctcagcaatcggccagttgggtactcatttatgtatccgttgccaccaagacactgtattgcctgaagtgcaacctgagttgccctttcagcagcaaagagaatcacaccagcacaatccttgcggtcaactttaccattgtcacagtccctagcaaccga

SEQ ID NO: 27240 - DNA, 387 bp, Oryza sativa
  Clone ID: uC-osflM202086a03a1
ggatacgaaaaagagctatatatctatgtataatccacaacgtacacgcacgtagtacaaggagtactccatgtacatgcagaagtacatatgcatatgggacaaaaactgatctctagctctcaggtacgtatagtcgatcgacgaataaattaaggaaacagatagcgtagtgaccggccgggcgatcaaccatgtatgcatggcgatggatcgacctagctagctagctctcattttattcagcataaacccagataacacaagatacaaagcgtgagacgacagctgcatctcggccggcgctgcatgtcatcctccggtagcgatcgatcggattagttcacgctggagcagtcgatggaggggctgatggtgtaggggatg

SEQ ID NO: 27241 - DNA, 426 bp, Oryza sativa
  Clone ID: uC-osflM202086a04a1
agttgaatcaattagacgattgaaacaacctcttccacacttcaaaacctgtcttatctccacaggggttaaaaacaaaaaagaaaaaaaaaagcgaacaaagaatcaagaaataatagatgtagcaggtacagtaggcaagcaccaacacctgccctccaacctgacactatggaaactactaattttttacagaatgcaactcacacttcaagatcagcttcagggcaacagaggcaagggaagtttgatattctccctaccacagattttcgtcggtttgtttgtttacgcgttctcagctgctgcatgcgatcgctttggtcgccactctgtgtgtgccttcacaatgtcagccttcacaagatggtcgcactggatggcagaagcctgcttgtcggcgccaatgctggtgcattcccctga

SEQ ID NO: 27242 - DNA, 396 bp, Oryza sativa
  Clone ID: uC-osflM202086a05a1
aacacgacgtccatgtctatgtttctttactgattttatgcggcccaaatcagtggtattaggcttgaaaaagtcctgcaaaaattcactgcgcacacgacgttgaagttggagaagttgaagctttttcaattcaatgacactctttgttaaagcagaaagatcctccgatgaactaacattttccttcagcttctcataggatgctgaaattctcctgtgtgccttctgtaactctaatgccttccttttgttttcttcatatcttatgttctgatgatccaaaatccatttatcagtcattgggtacttcggaggagataatggtaaatcatcttgctcagaaagatcttcgtctccttcatctgcagatcgctcaaatatcatctcttccat

SEQ ID NO: 27243 - DNA, 325 bp, Oryza sativa
  Clone ID: uC-osflM202086a06a1
attgcaaaaacattatcttcttctccatcttcttagggtacacaacaccaactggatcattatttcgtcgcactaaacccattttccccaacccaaagacaacgaactcgttggccacaaatccatccaaccacaattaaccactgttaagctacggacccccactttacttgccggggaccaagttggtggcgtacccccaggcgttgttgttgacggggtcggcgagggggtcggcgaggttctcgagggggcccttgccggtgacgatggcctggacgaagaagcccaacatggagaacatggcgaggcggcccgtcttgat

SEQ ID NO: 27244 - DNA, 421 bp, Oryza sativa
  Clone ID: uC-osflM202086a07a1
ggatagcaataccaacttgtaaaccaccagaggcaccaaaattagggatatatagacaggggaacatgaagcgagtctttagtaccagctacgccattgtcgggaccatatgaagccgggaaaatccagctgaagttaaacgaccgacaacatgtataacaaacaacaaatggaatcagcttttatcgcttgttggtgaggaatcaccgtccatcttgtcatgttgaaatttcacgacaatgcatgtgatattgtcaccactcccttgggaaaatgcagcctctgtcagcttccgagctgctgcctcaggttcctcctcaatcttcacgagtgaaacagcattctcattcggaaccacattccacagcccatcactagctaaaatcagaaactccaattcatcatctatttcttgttcctg

SEQ ID NO: 27245 - DNA, 397 bp, Oryza sativa
  Clone ID: uC-osflM202086a08a1
caaaaaccacgatttataaagtgccggagatgaagtacacaaattaacattacatcgagttttaataaaacatcatgcgaaaagccagcaaaaacaaaaggcagcatacagttaatgaagctctactggagtagctcgcaaagggcccgacttattttcagtagcactttactgcatttcttccgaaagagggaccatcttctactgggtgttgtacatgtgacggatcaggtcaacaacgcgggagctgtatccccattcggggtcataccaagacacaagcttaacaaagttgtcattgagagcaataccggcctttgcatcaaagaggcttgccctgttggcaccctggaagtctggggaaacatggtcctcctcaacgaaacccagaataccc

SEQ ID NO: 27246 - DNA, 365 bp, Oryza sativa
  Clone ID: uC-osflM202086a09a1
aggggaaaacacatttttttgggaccatatttttgcaaccaaaacacacgttagggatttaggggaaaacacattattttgcgtccatatttttggaactgaaacacacttagggggaagcacactttttatcaaacatttttataggggaaaacacatttttttggggatatacacattcttggaactcaaacccactttaaaccactaatggattccctccggttcaaaaaaaaacaacctaaaactggatgtgattggttagattcactgtattgggacatgtcacatcccgttctagaatcactttttttgggccagaggaagtagaacccgttgttttggacatttataaccctccaggt

SEQ ID NO: 27247 - DNA, 357 bp, Oryza sativa
  Clone ID: uC-osflM202086a10a1
gacctgaaactctgtgagccctaggacccttttaggaacttgattgccttgtgagtggcccaaggggcaataaccagctgtttaacaaggctcagcatccaagaagaacagagcacataatgtgttttggatgctaacttggcttgatgcatgggctggtgtttgaatgcatgggcaggtagggccctcctgctacggctggccttgctgcgaagtgaatgaagcggcttcaccacgatggtcatgtttggacggaaacctgcctcgtattgcacgcacaacgtcgatgccgccgccatcatggcaactgcttttggaggatagtcatcccccaggttcggatgcacccactgcctc

SEQ ID NO: 27248 - DNA, 310 bp, Oryza sativa
  Clone ID: uC-osflM202086a11a1
gggaacaaaactacatttaaatgatcccagacggcctggagttcattcctggttgaacaacaaagggacagagatcatcctaaacccccagaacactgaagcacttgccctgccggccgcactttacctttatgaaaagatgatacacaccattactagccgtggtccaccaccaccgtgtacaaccaccgggcaccgaaacattatcctatggcaaagctgtgaggattgcaagggggctctcaaccctgaaggggggcccccaaaactttttttcaattgggggaacaagggccaccctggtctttgg

SEQ ID NO: 27249 - DNA, 316 bp, Oryza sativa
  Clone ID: uC-osflM202086a12a1
gtatcaaaccaaaaaataacttccaacggaggggatgagatttatatttcctacaggcaaaaaaggaaaacgctttggccgaccaccggtaaccttgaacaacaaaactggcggggggtaaaatggtttttccaaagggcacaagagctctattgcgctaacgggaaaccaccccccaggggaaaccccggaaactgaaaaataagcccacggggacatgggaaacctttccacgggggggggaaccccgggggaaacgccaaaggcccccacttttttcaggggacggtagaaaacatccaaagtggggcccggg

SEQ ID NO: 27250 - DNA, 412 bp, Oryza sativa
  Clone ID: uC-osflM202086b01a1
atgatctcatggttactttaatggtcattaccaagatgacatttgcattttacaaaacctcaacaatggaactgaacaaaaatcccccactatgtgatcaagcatatataatataaacgcaggaaaccaggcacttgacacaagattctcagttacacggcagatacattaactgggcgatatagttagtatatatgtagctgttcaagcgataagagaaccgataatcaactccgtatcaatacccccaaacttataagtgaatgtagaacaggacatatgcttggtcatgcaagaccttgtttagactgacaggtgtgacgttatcatggtccgagcgaatacactgtccactggcagactttgcatcggcagtgaaaaggcccctggactgttttgccccaagatgcgt

SEQ ID NO: 27251 - DNA, 412 bp, Oryza sativa
  Clone ID: uC-osflM202086b02a1
atcaaaacgcttgcaaatgatatcagataagtagagtcaacaagacaaaactgtatctgccaaagcacacctccccaactccacccaattacgccattatttctgggcaaaagcaaacggcttcccattcctccccttcaccagtctcaaaccataaaccccacaacaaatcctcctaagtgacggcatataagatgatgaaaacaaagcaggatactccagagtcgtcatggcgaacttcaagttgacacttctcatgccacagccgctagtcgtgctgggcagcctagtaccggtagtgcgcgggcttgtagggaccctcaactggaacgctgatgtagtcagcctgcgacttggagagcttggtcagcctggcaccaagcttgcccaagtggagggcggccaccttctc

SEQ ID NO: 27252 - DNA, 343 bp, Oryza sativa
  Clone ID: uC-osflM202086b03a1
gggattaccttttttttttggttgttttttattttttttaccttccccaaccaaagggaaaaacttctaggaaaaaaaaagggcccatgatccgccgccaagaatggcacgcttaacaaaacaaccaacaaaaaaaacactagatcccccgggaccaaacggcaacgaacggagaaaaaacaggggctctttaaaaaaaaaaaacacaaaggggaacgacccaaaaaaggaggagtcagggggaagaaagccccaaaaaaaaagggcccggccacgaaaaaaaaaaggaggggggaaaggagggggcgaaggaaggaaccccccccccggggggaacgggcaa

SEQ ID NO: 27253 - DNA, 351 bp, Oryza sativa
  Clone ID: uC-osflM202086b04a1
ttttttttttttttttttttttttttttttttttttttttttttttttttttttttttttttttttttttttttttttttttttttttttttttttttttttttttttttttttttggggaaaagggcccaaaaagggtttttccaaaaggaaaacccgggggggttaaaaaccataatttttaaaaaaaaaaaaaaaaacaggcaatggtttccctaaaaggggggaaaaaaaaggggggggtacttttcaccccccgggaactttttttaaaaaggaaaatattcccccccttttttggataaaaaacttaaaaaagtcccaaggtgggaaaagccccggggcttttat

SEQ ID NO: 27254 - DNA, 406 bp, Oryza sativa
  Clone ID: uC-osflM202086b05a1
caaaatactacaacataaccgaattctgatctgctgtatactgcatacaaggttggttatacacaagctgagaagctttcagtgtgacagcaatccgcggataaaatgaggagaatgataacgatcaccaagaagatagccaagcaaaaattacatcaatcaaggaaaaaacaatttggggataaatggactccaggaaaaggtaactgcagttcgagagggccgaactgatcaataaacatcatgcagcatacattaattcccaccagaatttattcagcaggtagcttttctttgagatacttcagaattgctttcgttcctcgctccagcagagtccgccgtatgctcctgaggggatttccatcaagtttcaagacttgcaggttaggctcaagcaaaccca

SEQ ID NO: 27255 - DNA, 373 bp, Oryza sativa
  Clone ID: uC-osflM202086b06a1
attagcaaggcaaaatttcttgaaagaataccatcgactcacttgggtctacaagccttgggttatacttcttgcaacacagacaacactacagataccatacattcattttacctgtttcactcgcttttaggacgttctataacctcacatttggcgctaccatgctgaccggaccaaaaccttgttttccattggagggaatggaatgaagctctctctctctctctcttctctagctcactagctgctgactgccatagacagggtaggcttcatatgcagcagcatacatgttagggtgcgggacgggggaggcataaccgtatccaccgtagaatggcgccccatagtacatattggttcttcggct

SEQ ID NO: 27256 - DNA, 176 bp, Oryza sativa
  Clone ID: uC-osflM202086b07a1
atcaaaacgctgggtattgaaaaaagataagccacaggaacaaggcaaaactgtgtttgccaaaaaacaaccttcccaactggacccaaaaacgccattttttatgggcaaaaggaaacgggtttcccaatccctcccctttaccagggttaaaaaccataaacccgcacaaacaa

SEQ ID NO: 27257 - DNA, 312 bp, Oryza sativa
  Clone ID: uC-osflM202086b08a1
attaaatagaaaggaaaagcaagcaacttaattaaagaatacaagacaaatactgactccactaaattgcgcgtgcaatgaggcagccgggcaccaccattataacctgggtttaatgcaaatgacctttctccacaatcctaatcatcccacataagtagacacacgtatatagctgcattaactacagatgtatctaaagttgtacaggctataagtccagtctgatggacaatacagagagctacgagtgacgtgcctaggacgctgcttcctggacgaaattctcaaaggtgcgcacatagaggagtg

SEQ ID NO: 27258 - DNA, 417 bp, Oryza sativa
  Clone ID: uC-osflM202086b09a1
ataggatcaaaacatttctattaccacaactttttaaggatggaatcgagtagcaatactttcaccccaaaatacagtttagcgacaatatcttagaaaagccgcttgctttgccgccatggctggcaagctgagcagagcagctaacacaaagaacacgagatcactataaaccaaacggcaacgaacgaagaaaatacagggtcttttttgtctgaagatacacgaagcggttcgttttcttttatttttagtctcctctcctcctcgatgatgggtgtatggcaatggcaatggcgatgggatcttggcttagttgatgggaaggggctcgccgttccactccttgaggcagtcgagcatggggtcgatgagcttgccctggctgatgccgaggaacaccttgttgcactcctc

SEQ ID NO: 27259 - DNA, 402 bp, Oryza sativa
  Clone ID: uC-osflM202086b10a1
aaaggtcaatcaatccctatgtatgtatggctgtatagttaatcttaccgaaaagaatcgaaagaatcaatagtctatggtccaggttccagcttgatggacatgccaaacaaatttgtaagtaaacatgcatgtatagggattaatcccccagaaaaaaattaagaagaagaagtgaaaaaaatgatcaattgatcagtgttaatcacgaaaagaattcttgagcttagctttgctcatgtcatgtcaataatggcagccgaccagcgcggcggaggcggtgagctgcaaaattggcttcttgccgtcgttgaactgcccgccgagagccaggagcaccggcggcggcggctgcgggggaagagacacggactcctcgccggacggccccggcaggttgag

SEQ ID NO: 27260 - DNA, 325 bp, Oryza sativa
  Clone ID: uC-osflM202086b11a1
acatatagaattgttttttgaacgaaagtacgtatagaattcatccataggagtaggcatgcatatgctgatatgccaggtttacagatagatcacttgacaattaccgggcatatgccatctatacaatagttaatttgcagcaatgagacgtcgccctggctggatttactctgtaaattctttgatctcaaattaatcatatggataatttaggtatgaagggtgatcagttgttcttgtcgtcgaccgccgacgacgacccgtcagtgccggggggacacggcggcttcgggaatggtataggccaccagggctgcggcgg

SEQ ID NO: 27261 - DNA, 200 bp, Oryza sativa
  Clone ID: uC-osflM202086b12a1
agagataccccgtcatgcgcacgcgcacgtgcgcttgtcccctatattgcgcgcgcccttttttttttttttttttttagttgaatcaatttgactatttgaaacaaccttttttcacacttttaaaaccttgttttattttcacagggggggtaagactataaccgcacaaagggagtcgaacaagagtttcccaaaaa

SEQ ID NO: 27262 - DNA, 360 bp, Oryza sativa
  Clone ID: uC-osflM202086c01a1
attcagagagtttgtctgcaggccgaacgaatgatgtcccgcccgcttatttggatcagaaaaacgcagaaggtttactctctgaacaggctgatatgcagaaaccttatttcaatcaaggatacattggctcctttttaccggtccaggtagaatccctaacgggaaattaccagatgcaaaccagaggacactttgccacaaaatttaaattaaaacgggtatataggggtactttatccaaaattactcatcttgcctacaaggttggctttggcttggatgaagggctcacgcgcctggccaaggccccgattgggacaaactttttagcagcaaacgggtgaataccaacagtgc

SEQ ID NO: 27263 - DNA, 386 bp, Oryza sativa
  Clone ID: uC-osflM202086c02a1
gcagcgaaagctacaagcaaaccctgcataatcgaaaagcaaatgtttttcaaaaccagacacacaaactgatagatagaagcccacacgggcagatcataggatagcaggagtcatcaagcattgccaaggcaccaggcaagaaccctgaacctctttaggactcgtcaccctcatcaccctcgtcaccatcgccgaactcggagccgacctcctcgtagtccttctccagcgcggcgaggtcctcgcgggcctcggagaactcccccttctccatgccctcgccgacgtaccagtggcccaaggcgcgcttggagcacatggggccgaacttgatgtcgatgcgggagaacaccttcactaccctgggggagttggagatcatg

SEQ ID NO: 27264 - DNA, 183 bp, Oryza sativa
  Clone ID: uC-osflM202086c03a1
catggaatatgtgcatcacaatcaccttttaccaatgataccagcatcagaaagcccccaaaaaactacaaaatattaacacccacaacctgccacgaaaggaattcacaagcccgtgtcatataaaagaggactcatgacatgcatccaaggccgagccggcacaccagactgagttaaacc

SEQ ID NO: 27265 - DNA, 387 bp, Oryza sativa
  Clone ID: uC-osflM202086c04a1
catgaataatgtcttacacccttccccatatataacttgggtccaaaatggtagtagtggtagccaacttaaccatgcaactcaccaagtctgtaccaaccagaacaacaatgtttggcttcaaaacacatgacaataccataacagacggttccaaaacacttggcctaggcacacacccatcaaaatcaagtaaaccatgttccgaaaagagaagacctccaaccatctttatcaacaccagcactcgccgccgcataccctatcgtgacgatgaatagggttcaaggctcgacggctgcacacagaaccggtagcaacggttgcggcttccctctgcccaaggtgaaaccccgcgtgccatctggcatgcgagggccgggaggc

SEQ ID NO: 27266 - DNA, 420 bp, Oryza sativa
  Clone ID: uC-osflM202086c05a1
acagaaaagacttaattaaacactcgaacaagttttcactgaaagttcagatcctcaaaagtccacgtaaactagtagaacttgttcggccacatttttatacaagcacgccgtttagaacaagtagacacagctcaactgaagactgaagacgacgatcgaagcaggctgcctagtgatggtgtcctccattgccgccgctcccttctttcggattgcccggcggcttgggccttagccgcgctggccgcacccgagtgggcgcctcactgctcttcatggcctcttctccttcttgagacgggtcggcagctgcaggttcaggttcagggacaagaacagagcttgcctttgggtcgcagaaagaatcgctgaggccgaggcagcaggcgcagacccgggctatgtacttgagcagcg

SEQ ID NO: 27267 - DNA, 409 bp, Oryza sativa
  Clone ID: uC-osflM202086c06a1
caaatactaactcccggagttttatatgatttcgttcggaattaattaccgagaaaagaatgctgtacatgacaaaactctttgctcccaccacatctctttgctcccgatttctctctcttcctgaatcagacaaggttatgtaattatcttcacttcatcagatgtaaaactccacattaattaatcttccttccttttaatgcttcgacagcatatgctgatcacttgttcttgcagattctgcttccagtgtcacctcgccggagattagcattgtccggcgatgatatcgccattgccggtcatcagttgcagatttcacctacggaacggtggcggcttcttctggaatgttccgggagcaaacaccgggaaggactcgccgccgcgggccctcgtccccgcc

SEQ ID NO: 27268 - DNA, 425 bp, Oryza sativa
  Clone ID: uC-osflM202086c07a1
actctatataagagctaacccgtcatgcgcacgcacacgagagcgtggaccctatagtgtgcgccctgtggcggcggcggtggtgtcctgcatgctcttgtgcccccgagacagacgtttagtcgactcgccgacaacgacaacgccaaggtttctgacaacgacattgaccctccttctagaatgatctcgaaacttggcgaccatatgcttgcagggcgcatacttggtcaagctggatggctcgaaggcgcacggatccgtcctgaaatactcagaggcgagggcttcggtggcggcgccacgggcggagggctcgactgagaggagcttggagaggagcgcgaacgcataggggcccatcatgaccccgaacgtttccatgagccggctctcgtacagttgatgagggcggaacccggagc

SEQ ID NO: 27269 - DNA, 464 bp, Oryza sativa
  Clone ID: uC-osflM202086c08a1
gtcatgtgcacgcgcgcgtgcgcgtggcctctctagttttgggcgccctttttttttttttttttgttttttttgagctaatttcccttccaatcaattacacttgcggaaatttctttttccaaagattacagttgcaaatcgaccctccaaataaatcaaatgttaacacccacagcaaaagacccacccccgaggatccaattctctccaacgggggagtccgtccttattacaccccccattaaccaattctgatttctgacggccactcgtaatgcaaattcccttgacgaatccaattccaaactccgtgtatcaatcagatcagaggcccttcctcactagcaaatctcccgtttaattccaactcctaatcaatttaaaccctcaggttgagcgtgtgcttgaggtcgccgacgtgcagcgtgtggctgcccagcgccaccttccggttgccgagc

SEQ ID NO: 27270 - DNA, 421 bp, Oryza sativa
  Clone ID: uC-osflM202086c09a1
aatgtaatcctggcttccttgtatttttctggagtatgtgcatcacattcacaatctaacactctcacaagcatttgaaagcagtcaaattactccattttattcactctcacaacctgccatgaaaggaattcacaagccgtgtcatataaaaatcactcatgacatgcatcaaggcgagcggcaacagaatggttaaacctagatcgctcgtgcctatgatatccccaatcttcttgcaacaccttctaccctgtggaaaatatggcaatccggtggagatagaagcctcatcgttttcctaaaaactgtcaacattggaacgcaaggtccgttccgtctaatgctgccattttttaatcagtccaggaatctcaacaccattaggacctattttgttgcgagctatgaaatttagtat

SEQ ID NO: 27271 - DNA, 211 bp, Oryza sativa
  Clone ID: uC-osflM202086c10a1
ataaaaaaaagggtgcacgaccctcaagggcttttaatccactgctgtttacatgtccactcaagtgtccaatgcgcaaaaagtttataactcatgtacactagaacaacactttgcctgtgccccttttaattagcatttagcttggctcctttttaattgacgcttattctattatatgaatcatgagtcagaggcgagtggccaactc

SEQ ID NO: 27272 - DNA, 397 bp, Oryza sativa
  Clone ID: uC-osflM202086c11a1
accaaaattaacactggatataatcattcgctgactcacaaaatagtttttagtttatatcccatctgcgtcctcagggagagcaacgggtatcaacattgacagggattcaggaaagcaggtaaaagctctacagaaaactcgttgggagaatttcttaatttatcaaattgattgctttgttgttgaggcccgttcgtgccaacaagccgggacctgagatacctgcgagattacactacaaatatagccataaaagctcttccttcttcatcaccattcaaccaccattcatctgctcatcggaatggaaaagcatagccctccttactaagattggtggtttgggtaggagtagccgggcccccttcccatatatccataccccctccccata

SEQ ID NO: 27273 - DNA, 161 bp, Oryza sativa
  Clone ID: uC-osflM202086c12a1
gcatgtgcagcgcacgcgagcgcgtgtcctctatatttggggcgcgccctttttttttttttttgggtctttttttttttagtgggtatttatttttttttggaattaatttccttgaaaagaatgctgaacatgacaaaactttatcgctcccaccacat

SEQ ID NO: 27274 - DNA, 195 bp, Oryza sativa
  Clone ID: uC-osflM202086d02a1
aaaggcaagaatattattcataaatgacgcatgatttttatcaaaacgcttgcaaatgatatcagataagtagagtcaacaagacaaaactgtattctgccaaagcacaccttcctcaactccactccaattacgccatttattttctgggcacaaagcacaactggctttcccatttcctcccccttacaccag

SEQ ID NO: 27275 - DNA, 416 bp, Oryza sativa
  Clone ID: uC-osflM202086d03a1
aaaggcaagaatattattcataaatgacgcatgatttttatcaaaacgcttgcaaatgatatcagataagtagagtcaacaagacaaaactgtatctgccaaagcacaccttcccaactccacccaattacgccattatttctgggcaaaagcaaacgggttcccattcctccccttcaccagttcttaaaccataaaccccacaacaaatccctcctaagtgacggcatataagatgatgaaaacaaagcaggatactccagagtcgtcatggcgaacttcaagttgacacttctcatgccacagccgctagtcgcgctgggcagcctagtaccggtagtgcgcgggcttgtagggaccctcaactggaacgctgatgtagtcagcctgcgacttggagagcttggccagcctgg

SEQ ID NO: 27276 - DNA, 380 bp, Oryza sativa
  Clone ID: uC-osflM202086d04a1
aatactgaatgattttctttgaaatggagcgttgccaaatttctggaagctgaaccatcctgttcgagcagccagtactgtacaagtcatacaacaaagcgttcattgagtctgttagactgaatatccatccgcaccacctcggctaaacttcaataagaggaaatgcgatgtaataaagctacaggtccgaaaaaattagcctctcaagtctgaaccaatcacggtaactactgatctcggggatattctaccaggttgctcgcttgtaagtgcacttgcaaccacacctatagagcccaatggctgctgcccttagttcttctgtgggggtgactttggcctgaggccctcaatctcaggtgtcgtcacaactagat

SEQ ID NO: 27277 - DNA, 402 bp, Oryza sativa
  Clone ID: uC-osflM202086d05a1
atgtgcacgcgcacgagcgcgtgtcctctatagtgggcgccccctttttttttttttttttttttttttttttttagactaattccccttcataaatattacatcataaaatacacaaaaagagatatatggtacaggaatcagtcaaagttctgtaacagataatgcagcctcaattagcagtgaaagaatcgaaatcacctggttggctaaatgtcacatatcctacaacaaattttgaaagaaaaataatacacctcaaaggtagggagataaattatattacccacagggcaggtgggatttttttcagccaaacgatgtaacaatgtaaaggaatattattttaaagcttcgaccattgtttcgtgtggaccctgccaaatccaatcgtttggacct

SEQ ID NO: 27278 - DNA, 421 bp, Oryza sativa
  Clone ID: uC-osflM202086d06a1
gagaaggcaattatacaatccatttacattaacagacatacaactagcacattgctaattcatggagcaacagaggagggtttacttacaagagcaataggtaccatacatatagacttacaagagcactaggtacgtaaatacagctagaatacatattacttcacgcaaaggagctaaataacatatatgctcagatgctctacaaagacgaatgggagcattgactggagtccactcaaatacaaattgctagatactgatgctggcaaactatgattgccagtagaatgctgttgttacttgttaacatgatcttatttgcaggatagggggccagatcttgacacagcaaatctctgtagtgagcccgagccagccccatggcttccagaacttgaacctccacaaacttcacttt

SEQ ID NO: 27279 - DNA, 136 bp, Oryza sativa
  Clone ID: uC-osflM202086d07a1
ttttttggggtttttttttttttttgggtttttttttttggagtaatccataagtacaggcaacattttaagacaaccaaaaatctttataacataatcaaattttcaagaccccttagtaaacagcccctatggg

SEQ ID NO: 27280 - DNA, 414 bp, Oryza sativa
  Clone ID: uC-osflM202086d08a1
aaaggcaagaatattattcataaatgacgcatgatttttatcaaaacgcttgcaaatgatatcagataagtagagtcaacaagacaaaactgtatctgccaaagcacacctccccaactccacccaattacgccattatttctgggcaaaagcaaacgggttcccattcctccccttcaccagtctcaaaccataaaccccacaacaaatcctcctaagtgacggcatataagatgatgaaaacaaagcaggatactccagagtcgtcatggcgaacttcaagttgacacttctcatgccacagccgctagtcgcgctgggcagcctagtaccggtagtgcgcgggcttgtagggaccctcaactggaacgctgatgtagtcagcctgcgacttggagagcttggacagcctgg

SEQ ID NO: 27281 - DNA, 187 bp, Oryza sativa
  Clone ID: uC-osflM202086d09a1
attcaaagagtttgtttgcaggcaaaacgaatgatgtcccgcccgcttatttggatcagaaaaacgcagaagttttactttctgtacaggctgatatgcaaaaaacccttattttaatcaagttatacattggtctcctttttacccgttccaggtaagaattccctaacggtgaaatttaccatga

SEQ ID NO: 27282 - DNA, 413 bp, Oryza sativa
  Clone ID: uC-osflM202086d10a1
agactaattccccttcataaatattacatcataaaatacacaaaaagagatatatggtacaggaatcagtcaaagctctgtaacagataatgcagctcaattagcagtgaaagaatcgaatcagctggttggctaaatgtcacattcctacaacaaatctgaaagaaaaataatacacttaaagtaggagataaatatatacccacaggcagtgggattcttcagccaacgatgaacaatgaaagaatattatctaagctcgaccatgttcgtgtgacctgccaatccattgttgacctgcaacgatctcggatcatcgtttcgatacatcgcatgtacaaggagcccacaggccaactcaaggctgaagcatggccaggggaagtggccgttgcccttatgcttggcagagt

SEQ ID NO: 27283 - DNA, 151 bp, Oryza sativa
  Clone ID: uC-osflM202086d12a1
catgcattctgtttgtctctttatccgccaaggaaccagggaccaaggggcacccacaggtagacccccgcccccagaggttagacttatacataaaactccccccaaaaagaaccaaacggaagcttaaaaggggccctgcaaaagagaa

SEQ ID NO: 27284 - DNA, 90 bp, Oryza sativa
  Clone ID: uC-osflM202086e01a1
gggggcccatacatatacgtatgctttttctgtgaaaatccaaaagtgaccgctggtactcgccgccaaagttaaaatggggccaaaagg

SEQ ID NO: 27285 - DNA, 191 bp, Oryza sativa
  Clone ID: uC-osflM202086e02a1
actctatatgagagctgtcgcggcatgcgcgcgcgcgcgtgcgcggggcctctatagtgggcgccctctttttttttttttttttttttatcaatgatcactgtgaaactattggttatcacaccctccattctaccgcaaaaaatgagtatggtggagattttcaaaagatacatacagggtttcagtta

SEQ ID NO: 27286 - DNA, 103 bp, Oryza sativa
  Clone ID: uC-osflM202086e03a1
tttttgtgggaagattaaagaacacttagaaactatagaaaaactgaggtcaagaacaatattaattacatgaccagtgacattcaacacaaaagcagtaagg

SEQ ID NO: 27287 - DNA, 388 bp, Oryza sativa
  Clone ID: uC-osflM202086e04a1
agcaatgtaaatactcgcattccaaaacagccgatggacaataatcggactcagagcatcagttttaaccgaacagaaataaacgagttttaaacgactgacatagtgcacattgggagcagatattaacgggccatgaaacgagagccatggccgggggcaaaacttaacaaattctagaactagatatctcaactgcagacatgcaaaccaccatttgaacgaggctcacttttttttggggggagccttggtcaccttggcaccgggtgggtccttcttttccacgtttttgatgaccccaacagccaccgtttgccccatggcacgccccggaaaacgaccaagaggggggtactcagagaagggctccccaaccctgggcttg

SEQ ID NO: 27288 - DNA, 345 bp, Oryza sativa
  Clone ID: uC-osflM202086e05a1
gatataatgacatagtttataacattacataacacaaacaacataattaacccttacaaaacaccacatggacacagacaaaagaccatcacttattcagacacaaaatcatcatcagaagagtagtagaagaagaccatagagcagcagcagattaaagccttgaaattctcaaagcagccaagagaagaaaaaagatgaagacttcttgatgccaaccacagcttagctgagagctcactctcccatggcgcggcgttcgttcagtactggagcatgtgcgcggcggcggggcaggggatctgccatggccggagcagcgggtcgtcgggggggcactccttc

SEQ ID NO: 27289 - DNA, 116 bp, Oryza sativa
  Clone ID: uC-osflM202086e06a1
ggaaggagaatgtgcacatattcatcttttacattccgaatgcttaactattgacgtttgtattctacaggatattgcaatcagctatatattacaactgtaaaaatgaggaattt

SEQ ID NO: 27290 - DNA, 411 bp, Oryza sativa
  Clone ID: uC-osflM202086e08a1
agatcaaagaacactttcatactatagatgaactcacatactgaacaattccacatgcacagcatgtcacatttaacaaaaaaacaataaggatctcgttactgcacaggttcaactaaaacacagctctgtttagctcattggctgttaacaatcagctactgtccacttctctcatcatttacaccatgcgtactcttaactggtttagctcacgcccgtcagaaatcagcagcaggtcacttcttctccttatcaatttacaccattgtatgctcaagttgtaagtcagcataatacgtggcaatgaacatcgcttcaaaaaattcatcaagaagcccagaaaattgttcgttgaccatattcccgaaatctttttcagagaagagtagttttctgccctttaccacc

SEQ ID NO: 27291 - DNA, 237 bp, Oryza sativa
  Clone ID: uC-osflM202086e09a1
aaaaagccattatttttccgaccaggagcttgaaaattacattagctgggcgaacgagtttactactccggggaacatttgaagatttggaattgccgggcgctcattgggttacatggcggatgcatccttcggggcgaaaagcatccatatttcggtgaccctgccggtgaactcgaacggggaggtgtactgggccaccgggtaccacgacgttgggtcggccctgggcccgtc

SEQ ID NO: 27292 - DNA, 244 bp, Oryza sativa
  Clone ID: uC-osflM202086e10a1
acagagtgaacttattcctcatgcatatactcttcagagattttgatccaaaagaaacatatgatccatgacaccatccatccacaaacacagaagcagttttccccagtccatcgtaagcaatcctggggttttaatttacatcttcctcaaatccgagctgttctagtttctacaagagggagcttgctagtaggcatggttggagaggatggcccctcccatggcggtgcgggtggccgag

SEQ ID NO: 27293 - DNA, 426 bp, Oryza sativa
  Clone ID: uC-osflM202086e12a1
gagcggacagggtgaaccaaatttatattaagagatgcagggttctttacatttaaggtctatgagaaactgcatataccacaaatcaattgacaggtacactgagctctgttctgtattaattgacaaaagaaagttgatgatccaaccattctcatctacgaccagcccttgagccactgggatgcttatgcaccccaggacccatgcatgaaaagagtgatggtttctttggcttcgtgccgaacaggaaagttctaaggggaactccagctttcgttgacaggttacggaagttttgctgagctcggttgcttcttgctatagataattcaagattttctcggagcttcaagagcaccctgccaacctccacttggagacctcttacatggtccagcccagcttctagctctttagcgactt

SEQ ID NO: 27294 - DNA, 410 bp, Oryza sativa
  Clone ID: uC-osflM202086f01a1
gaccttacaatacaagcatttcacacgtaagaaataatagtcatgcccatgagcatttcgcacgtactccagacacgaacatgcaacatattgctaatagattgctaatgctaccgaataaaacacaataccaatagccagtttgaacatgaacacaaggtttatgtaggagcattcattacacaactcaattcaggcgctgctcaatttagtacatatttctgaattttcatccatcaaattaaattggatcaaaagggaatccagagtcagcgttgccctcctcgtagccaccgtctgaaggatgcttaagatcaattccagagttttggcattcgtgacaatgaccgtcgtcatcaggttgtaggggacagcaaaaatagtggttctttccatccacaactttaact

SEQ ID NO: 27295 - DNA, 372 bp, Oryza sativa
  Clone ID: uC-osflM202086f02a1
agcaagtagcaaacccactttcctttccagtcgatgcatcaatacatcaaaaatgaaaagttgaaaatttgttaattgaaatctgaagggcaagaagcccatatgtttttgctatgacagatcaatctgcaacagatcggtgatcgaatcagatgtcgaacaagacctcatcgtgtataaggtaatcttgtggtgaaaagcttcgagcgaacaatgcttcaggctttggccaagataaagttactcccacggcctttgaagcttccgtgaagaaatgctacaaaaacagatctaaatgcgctgtttacttgaattttgccaaggtaatgtgagctgggcttcttgaacttgatgtgcatgctcaagaattaa

SEQ ID NO: 27296 - DNA, 392 bp, Oryza sativa
  Clone ID: uC-osflM202086f03a1
gggcaatacaggtcgttgaaagaacaaccaacaaagcgaatgcaccttttttgggttcttttttaattgctaggcggccttgcaactacatcaaccaatttaccaccactatatgctcatgctattggctccatagagactacgcttcttatcaactcacacttgcttggaataaataccaactaaatgaattgacttgatctcttctcatacaaggcacagacccgaattgggtagtgaagaatgaatggccaagagaagagaacaaaatctattcattcgggcatcaatgttcttgaggggggttttttaatggtacattcaaaatggtttccattgtttgccaccctagtccaacgttgctgccttgcataatggctacaaattcgggg

SEQ ID NO: 27297 - DNA, 415 bp, Oryza sativa
  Clone ID: uC-osflM202086f04a1
acagagaaatcgattggtctgtgccattcattttgtacagtctacaaaaataagcgaaaaataaataaatcattacaagggtcgaaacaaatacaatcagcgaggaaactgtgaagagtacatcatctctctctccatggtatagcacctagagacaacctgagattctggattagcaacaaggcccatttcaacattcttggtgctgttcagggaagtacatttgtacttcggagttaataacggctttatttcgctgctcctttgtaagtcttccttgtatgcccttgatcttgcagctcttaggagttgcagtcttatctccacttctttcattttaggtctctttgctcctttagtctttaagcacatctctgcaactgaggccatttcatcaatctctctatggctagct

SEQ ID NO: 27298 - DNA, 413 bp, Oryza sativa
  Clone ID: uC-osflM202086f05a1
gccgaaaactatcaactttatttgtaataacacactcgtccatatccatggacaaacgtttgtgctgaacttccattattcagctcataaactaagaagcccggaagctggtggaaggcttagccaagtggtgaaaaaaaacatcgatcttgcagagtgcacacacttttcatgatccaaagtactaaaagcacaaataactggccaattctgctttgtaataggcacagataatcgcttatggtaaacagatgaaaacttttgtctcctcaatcagaaaggtcgtgtagatggttggcattatcagtcccgatcaaacgattgtacatgcacaatcacttgcccgatgctttcaaactggcgtcttcccttcaggattgcctttgcacaattaagggcacgtcgctcacacg

SEQ ID NO: 27299 - DNA, 276 bp, Oryza sativa
  Clone ID: uC-osflM202086f06a1
gaaaagcactagtaacattcacttgggttcaagaatattttcacaaacatacggaattaatctacagcatacacacttcgttctcttgtgatttgtctctttggcgtactaattaattataatcaacaataccaatattacaacacaatcaataatcggtggccaacagtactaataataatggctaatgcaattttcaatgatgatgaatgaatatttcaataggcccagagggacgcgtcgtgatgatccatgcgttgctgccgcgacgacgac

SEQ ID NO: 27300 - DNA, 104 bp, Oryza sativa
  Clone ID: uC-osflM202086f07a1
tttttaggaggtatcaaacccacttttttttcttttttatttatttattctttctaaaattgaaaggtttgaaatttttgtaaattggaaattttgaagggcta

SEQ ID NO: 27301 - DNA, 184 bp, Oryza sativa
  Clone ID: uC-osflM202086f08a1
tctatatgagcgactgtcccggcgcgcgcacgcgcgcgagcgcggggcccctcgagttcgggcgcccttttttttttttttgggggttttttttcttttttggttttcagctgttgtttttattgattcaatcatgaaatggtgtgcaccctgttttggggtactctgaaggtgcacagaagcc

SEQ ID NO: 27302 - DNA, 405 bp, Oryza sativa
  Clone ID: uC-osflM202086f09a1
gtacaacaaaaattataatccattattaaaaagccgaaaatgacccctcatcgcacctcaaatagtactactgtacaatcatatacactccagaaaagaaaaatgcaagaacacccctttaatcaagatctgttactggacttgaaaaatgagccttgccccgtgcccgaaacacaaggaaaacatcctatctagcactaccagtgaaaaccactatcctgcaacatgcatatgctatgtagcaagcacaaaacattggaagtttggaacagaagctgtgtgctttctgagcaacgagcagtgcagcaaactataaaaccaccgtgagccatttaaaagccctccatgaacaaatacatatgcagttactttacaaaagatcaactggcaggatgatcaatactt

SEQ ID NO: 27303 - DNA, 128 bp, Oryza sativa
  Clone ID: uC-osflM202086f10a1
aaaataattatgcaaaaacaaaaatattaatacaaggggaagaaaaaaaacaatgagcacaggaaactagtgaaaaggaacaaaaagggaacactaaatggaatagcaacctagagaacaaccctgag

SEQ ID NO: 27304 - DNA, 88 bp, Oryza sativa
  Clone ID: uC-osflM202086f11a1
gttaaaaagaaaccctaaaatatgggaggggcaaaacttatgtgcgggaaattgcattgatcaaccccaataaactagcgaaagtccc

SEQ ID NO: 27305 - DNA, 427 bp, Oryza sativa
  Clone ID: uC-osflM202086f12a1
aaaatcaacgtgcatataatatccattcaacagaatcgcatctattacaagccttccattataggacgccgatagtgcagtgctgcataagacaatttacactgtccacatgcgttgacattactacagacagtaagactcaaaacgacaacacgcatacattacggtacagagcacaaatataaaaaggttacgtttattcgccttaatttatcttaagatggtaggattatataatatatggcaaacacaaacggtgactgggcaaaccattgcacctataccctgacgagaattcaacagggagaaaccacaccacgttctgatatccatggcccttgattttttccatcaatgttggaccatgcgtaaccagggttatgatgggcacatccccattgaatttttgccacggttctttagcctt

SEQ ID NO: 27306 - DNA, 420 bp, Oryza sativa
  Clone ID: uC-osflM202086g01a1
aaataccagctggatgatacaaatagtttaagcataaccatagaagtaacacagcagtgttaaaaaagagccaacaaattcatggcagcaacatgtaacaccacacatcaaaagttttcaacccatcaggcacgcaggaaacgtccacattccacagacaagctaacactagcatgcattggcctaattcagactcttatgaagagactcaggctgaagcatgatagactcatgatcctctctactcgatcagatcgtcatcgtcatctgggagaggttgtgctgctgcagccgcaagctcagcctcatgctgttgctgcattgccaggtcaatgggaacttccggaggtttaagagcaacagcttcaacgaaatgcaggttcgggtcaccagcaagctttcttgcaagataaaggaagg

SEQ ID NO: 27307 - DNA, 417 bp, Oryza sativa
  Clone ID: uC-osflM202086g02a1
ataagcacaagcaccaaaatggcattccagttttattcagaggagcagtaaaaaggatttccaagggaacatgatgctgctgatcaagcactttattacataggacagaggagctcgagagcactgaaccaccaaacattaaatatgcgtaaatttgctaatacaattaatgttcaataagcgagattggcactgacggaactcctaaatttccccgtcccagagctcctaatggggtcttgtaaacgctctgtggattgacaatgaagttgcccctgagcagcctaacctgcttaatctccgagaacttagcaagcaagtcctttggaatagaccagtcataaacatttaagtttctgctttatcctttcttgactcacactttttgggagtccactgggacccatctgaatgttc

SEQ ID NO: 27308 - DNA, 331 bp, Oryza sativa
  Clone ID: uC-osflM202086g03a1
gatcagatcaaagaaatatcaaatggtaactttataacaccgagggcaatggtgtactgacaaatgatgcacacccagatccaaggttatggaagtgacctcaatgggccatatcatatgtactgctatttctttaaagccacagcttgtataatcgagaatagaataatagaacaaactaacaccttacattaggatgattgcccataccagaaatatcaaatggtaactttataacaacgagggcaatggacaggaggaggagccccagaggaaagaactctaagcacaggagcaacagggacttttgtgctgaaaagaatagcattaa

SEQ ID NO: 27309 - DNA, 410 bp, Oryza sativa
  Clone ID: uC-osflM202086g06a1
aatgaagcattggaaaatagtaacaccaacaaaagacagcaactcaataatctttcgatatttcaccgagggtaatgtatggtaggaaaatcgccagacataacagagccggccagactcaactcaaactcaaccctatgatggtaaactgtttgcgattaacgccttcgcctatgacaatgtttggagataaacgcttccaccaaaaaacgaatgtcggggagtgttctcccctacaagaattattattggtttcaatgttaaaaaggcaaaattcaccagatcccgttagtgcaggaccaggaataaacacttgttcgtcatcattttctgccagtttaggcaccgcccgagccgtacttctttccaaagaagaggatctgcaactggtcatagcctgagagcacacc

SEQ ID NO: 27310 - DNA, 190 bp, Oryza sativa
  Clone ID: uC-osflM202086g07a1
aaggcattaaaacacgggcgggggtttgcatagtgtttaagcatcaccatcaaagtttcacagcccaagggaaaaagagcacaggaattcagtggaaggaacttgtaacaccacaacatcaaagggttttctagcccatacaggcaccacagggaaacgttccagatgtccgacagacaaagactataca

SEQ ID NO: 27311 - DNA, 328 bp, Oryza sativa
  Clone ID: uC-osflM202086g08a1
acataattgtatggagaactcttgatagctttaagccagggaaaaacctgccaaatggcgcaaaaaaatcttgtccatactacaacaattgattacggtagcattgcaatgtagcccagtttttgcaacaactgataaatagaagaatattgtacacgatggagagactgaaatcatttttttctaaacagatataaattaaggcctcctgccctccttgttcttggtcttgttcataataacccttgccaacaagcagagatgcaattaactcggatggttccatcactttcgggacctcctgggattcataaccaacctggaatat

SEQ ID NO: 27312 - DNA, 418 bp, Oryza sativa
  Clone ID: uC-osflM202086g09a1
ctggagtacaatctgtgtgttcgattgctgtctacttcagccgtcattggtacttttctcccacaacccctttctaggatattggagcctgacgcaccacattgtcgtaaaatcagagcttggctaccgccgccgacagcccatgccttcgggatccaagcctccacgtcctcgagcagctcttttggcttctccatggcggcaaagtgaccgcctccatcggggcgcttgtagcgaaccaagttggccaaacatccagcccagctgccagggaccgggaacagctctttcgggaagaaagagtagccaagaggcttgacgatgtacggtggaggaggcctttcgctcgcgaaaagcttgatatcacaacggcgaggcgactctttgctgctgccttgacccctgtacgggtagatgc

SEQ ID NO: 27313 - DNA, 423 bp, Oryza sativa
  Clone ID: uC-osflM202086g11a1
aattaaaatttacttatgtttcttcttcttcttcacagttcacatggaaatcagaaggaagtagcaaaaggaagagctgttctacactcgacagagtaacaaactaagagagcaacacaagtaacaagaggagagatttagtctcttttctggtgttctgcaaataaaactctcccctcttgctacccctaaaccccaacccaaggtagtagtaagtcaccccactaaaagtaaccggccatctcttacaaaaattggctgtctcctttgaatcaatcgaatcagatcatcatcatcatcatctacagctcgtcatgctcgtcgtcgacgccgccctcgccgtcggcgccgccacccggggcgccaccggtcctctggtagacggcggagatgatggggttgcagacggcctcgacctccttg

SEQ ID NO: 27314 - DNA, 418 bp, Oryza sativa
  Clone ID: uC-osflM202086g12a1
gtaacaacccaaaccactgccaataaatcaacgaaaatatacacttctgtaagtaatgacaccacacaactgaacaagagaaccttgacaagatgaactggacaatgaagatgaaaaaaaaaaacgtactgtactgggactttcacgaaggcttaaatcttcagattgagcattcgtctcatagatgcaccggcgtttgttgtaccggatgtacctcttgccatcggtgctggtgatccgaaccttggggatctgctgaacgatgctccagttcttgccaccgtccaggcagctcctgagcaatgagaggctgcactgaagctcgaaatggcacagcccatcgcgcttacggatcaacagctccagccaccgtgggaatgcaatactccagaagatgatcagctcatcaaaataaaat

SEQ ID NO: 27315 - DNA, 182 bp, Oryza sativa
  Clone ID: uC-osflM202086h01a1
ttgttgtccgcccttcttttttttttttgatcgggaattaatttggattcatagggttggtattacatgtacaaactgtatttggtacaactgctacaatgaattttccagggactagtgcgttatgctctccatgattgggaatttggttgacttatatatgatcagaagttattttgttt

SEQ ID NO: 27316 - DNA, 432 bp, Oryza sativa
  Clone ID: uC-osflM202086h02a1
gggaagaatcggacaatctaatacatgaagaacaggtagacaattgaagcataaacccacttttcagctgcaaagacaagacacttgccaacacgaaaaatccgatccaactccaacgggtaaaggtaaaaagatcaatctccctacacaattaagaagcattgaggcgattgcatgcacacaagcagttgccttaggctccaattcattcatgagtgttcacagcttgccaaaccaaattctttggggcagcaccactaggggctttcctgggctgcaatgcagcagcccttaatggtttccatgggaacacaatagcctgtcagaacgaggcgggggcataaggcaagccatgctttttgcaaaggtcacgaacaatggggaaacctttctaagggggcacccccggaggcgaggaaacagatggggctc

SEQ ID NO: 27317 - DNA, 365 bp, Oryza sativa
  Clone ID: uC-osflM202086h03a1
caaaaacccgggcctaattttattcgggaaaaaaatgctcaggcccgttccaggacccctggggggaggctaacaggttaaaacgggcacgcccacacatacaattctttgggccaaactggaacagggggcaggccccctggggattatctaagcccactttacgatgcctgccggggctctgggggccaaaaaatggtattggcaggcccggaaataatccccggggggccgcaatttaggggccacctagatgggcccagggacgggggcggacatgaagttggtggtggggccccggttgatgggagcaatcttgtcccctgtcacaaaagcttgcggggtcaggatttacttgaagcggg

SEQ ID NO: 27318 - DNA, 387 bp, Oryza sativa
  Clone ID: uC-osflM202086h04a1
aaaccaaatttgccatcatgcatcacaaatcagggggcatcatgcaacaatcaagtattggtggtcactacaaaagacatggggggccactaccaccttaacaaggagctaaccaatatcctacaaaaaacatacgggggccactacccccttaaccaggaaatattatacaaaagccccattggggccactaccaacttaaccaatagttaaccaatattccataaacagatgaaaaaaaaaagggaaactaagccttttctggggggatcagtccaatagcttgggcaaaggttatcttctttttgatggagtcatcatagaaccgcggtttatccctcagctttttaactgggtttgcaattagccccagaacttgatcctttg

SEQ ID NO: 27319 - DNA, 106 bp, Oryza sativa
  Clone ID: uC-osflM202086h05a1
aggggaatgatatatatttatgacaaattaatggagtgaaggatgaatttctacatgaaaaggcactgccataaggcgtgatcttttgagtgatctctgagttccg

SEQ ID NO: 27320 - DNA, 380 bp, Oryza sativa
  Clone ID: uC-osflM202086h06a1
acatatctgaagctttcattgagctttatttatcagaacacgagagatagacctaaaccacaacgtggcttcatcagattacataagtatgagtatgcagaactatgacggagaaagatagcaatgctttgaatgtcagcagaagagttgtacggacgcctgaaagtaaaacctagcgcgtcgtctaaggagtggttttcgagtactgcagcatcagacatacagggcagaggccacaactggaaatgcctaaatgggaaaatggaagccatctcaatggcatctatgccttacaaatggtgggaccagtcggcggtgctgccgacccgagggatccgggagacctttttggcctcgatgactaccttggagctggagcc

SEQ ID NO: 27321 - DNA, 331 bp, Oryza sativa
  Clone ID: uC-osflM202086h07a1
aaataaaattattgtgtataaatgtaaaagtctgcctttttctctcttgggtgcagtacataaaacatgcatgctgatatgcaatttacaagaaggtttctgtttatgttttcttgagcctcccctagctagctacttgtacaaaaggttgtaagctggtatgtcacggattccattgacgtcctccagagataggtctctctccagctgctgctttgttgcttccagcacgtctttgaactgcatgtaggatgctcgcattgccagccactgggcattcatcatctcgaaagcttttcagtacaggacgtcaaatgcctcttcgtgttct

SEQ ID NO: 27322 - DNA, 165 bp, Oryza sativa
  Clone ID: uC-osflM202086h08a1
gagctacgccgtatgctgcacgccttcggcaggtaggctcctgtttttcggccgtccttttttttttttttggggataatttgtcgagaagaaagaaacaataacattgtaatactaacaactaacaaggcactctttttagaataggatttacagagacacatt

SEQ ID NO: 27323 - DNA, 101 bp, Oryza sativa
  Clone ID: uC-osflM202086h09a1
ccaaaaaggaacatgcttacatacaaaaaccccctcccaaaggaatatgggaaaaaaattctaatgcccggaccaagaaccaccgaagggtaaaaagtctt

SEQ ID NO: 27324 - DNA, 423 bp, Oryza sativa
  Clone ID: uC-osflM202086h10a1
ggccattgcagcacacaactttattgacttatatgcttgatgctgataaatacttatttcctcccagaacattatttcttcgatatactacgatgtcgacctatgtccaacagtcttctccaggctgagataatgagattctcatcataattctttctacaggacggttaaaatttaatggcatttacagaaaaatcttatgaccaagagaagggccttcatggattcatccactctgtgcttcagagaacatcagatgtgtgaagggcatgtcaaaaagcagagcttcaggcactcacagtctcaaacacgcgacctaatcatggcactaacatcatcgagcaattgggactccttgcagctgggataagatttgattcttgataataagatgagatcctttttattaccaaagagctggga

SEQ ID NO: 27325 - DNA, 403 bp, Oryza sativa
  Clone ID: uC-osflM202086h11a1
gatggccatgggggtccagatgcagcagcctacatgaaaaggcatgctataaggctgttctttgaggattctgagttcccacaggcattagaagaagatgaatcattttatgaatcagttgagaaatctatccacaatgcattcttgagcgcagaccttgctctcgctgacgatttggctatcagccgatcatcaggaacaacagctcttgctgctttgatatttggaaggcagctgttggtcgcgaatgctggggactgccgcgcggtcctgtgtcggaaaggtgtagctgtggagatgtctcgtgatcacaggccaacatatgatgcagagcatgaaaggattaccgagtgtgggggatacattgaggatggctacctcaatggagtactatctgtgacca

SEQ ID NO: 27326 - DNA, 147 bp, Oryza sativa
  Clone ID: uC-osflM202086h12a1
tttttgttttttattattattttatttttttttattttattgaattttagtattaaaattttgtgggtaaaaacaaatgatcttattgttacagggtcagtttcgatgggcagagggaaacagccattatatgtgctggcaaagaaa

SEQ ID NO: 27327 - DNA, 538 bp, Oryza sativa
  Clone ID: uC-osflM202091h10b1
ttcaaaacatatatatcccatgatggattagtggcaaccaatggtgtatggaaaggacaccgtgacgtgatggaaaatcacccactcggagtatattcttcaagccatgccaggcatccacaaatggagctgcccatgacatgtacttctcatgttctactgcctcctccaaacctgtccaacaaccccaactcatcatttgtcagaggaacagagcttaagaaggccgagctaatgggagcatacagcactacagagaattacttggatcttgataattctgaaaggaagggcatcatctgccctaaatcttctgaacaaaatgttgccgagaatatttgtaataaagcagctgaataccaatgtaatgattatagccaaattgtttgtaatcagcacacagttctactcccactgaataaagcttcacatttcggtggtttgccaacgaagaagtttgatggtaagctggtttcacggcaataacagcggaaaagggcaacatgtcttctattgtggcatgcacaagttatgtctg

SEQ ID NO: 27328 - DNA, 203 bp, Oryza sativa
  Clone ID: uC-osflM202091h11b1
ttgttttaattattcacaaagccttcttctatcttgcattctattctcttatccatgatagaaacatagaaaaaccgaaatgtcaaagcctttcagcctggcatgatattacagagcatatatataccaactgaaacgttacaccagaaaataaagctccgcataatataggatttcaccatgagcatctccaccaacaaatg

SEQ ID NO: 27329 - DNA, 258 bp, Oryza sativa
  Clone ID: uC-osflM202094a03b1
gtcttttcccccattccatcgcatccgcatacaaaccccaaccctagccgtctccgtgctagggccgccgccgccgacgcgcgccgcgacccgagcgtcgacgtatcgttagtttaccacccaatcccccgagatcggtggcgtacctggtgattggcggaggaaactgaagaggcggcggtggcgcggagggcatatggagctccatggctgaggatgtctgtgctgcgtattgcggagaggagggcccgtaaggcg

SEQ ID NO: 27330 - DNA, 384 bp, Oryza sativa
  Clone ID: uC-osflM202094a11b1
caactgactggagtatgggaagcgccctctgcccatgcacagagcctgaacataatgtatccacacccctgacaagctggaaagactactataggtggagatcgcttcctatgcaatcacctgttgctgttttacttcactggccacttactttatatcattgcgttcaactatcgcaccttcaaaccttaaaatatgatggccaagacactctatgtattcactatttaggacctgagaaagaactacatcagcttgcggggtttggggaactacgtgcactatttccaggtgtccatatttacattgaacttgtgggaccagcagttccaaaatctaaggaaggagagccttgaactatttcaaactatgcacaatgttgtg

SEQ ID NO: 27331 - DNA, 272 bp, Oryza sativa
  Clone ID: uC-osflM202094a12b1
ggttcgtcgccgctgtacgtctactccagcacgttccccgacggcatcggccaccgcgacgacctcgtcggcgtcctctccctcatcctctacaccctcatcatcatccccatgctcaagtacgtcttcatcgtcctctacgccaacgacaatggcgacggtggcacgttcgcgctctactcgctgatctcccggtacgccaagatcaggatgatcccgaaccagcaggcgggggacgccatggtgtccaactacagcatcgaggcgcccag

SEQ ID NO: 27332 - DNA, 254 bp, Oryza sativa
  Clone ID: uC-osflM202094b02b1
ggccctcaccgggggacttccatttcctgctcctcgtgttctcccacctccaatctcaggatggagcgcgcacgccgcctcgccaaccgcgccctgctgcgccgcctcctcgcggcggcggcgtccaccacgtccccggccccgtcccgcggcatctcgaccctggccaaggcgcccgggggcggggtcgtgcccacgcgccccgtgcccggcgccccaccagtacaccacggggtggtccgtgtcggcgtcgg

SEQ ID NO: 27333 - DNA, 491 bp, Oryza sativa
  Clone ID: uC-osflM202094b08b1
tccacgcgtccgcccacgcgtccgcagcacactgcaacttaagtttttctatagctcctagcaagctagaaatggctccctcggtgatggcttcgtcggccacctccgtggctcccttccaggggctcaagtccactgcgggcctcccggtgaaccgccgctccagcagctcgagctttggcaacgtcagcaatggcggaaggatcagatgcatgcaggtgtggccgattgagggcattaagaagttcgagactctgtcgtacttgccgccattgacagtggaggaccttttgaagcagatcgaggacctgctccgatctaagtgggtgccttgcttggagttcagcaaggtcggattcgtctaccgggagaatcacagaacacccggatactatgaccgtaggtactggaccatgtggaaactgcccatgtttggatgcaccgatgccaccccagtgcttcaggggctcgaggaggcaaagaaggcatac

SEQ ID NO: 27334 - DNA, 494 bp, Oryza sativa
  Clone ID: uC-osflM202094b09b1
taaacagatatttcccttcccgttccggccggcctcgccgcaccgcctcttctcccccctcaccgccggcctccgcgccgcctcgctgccgccgcccccgcgtctcctccctcccggccgactagccggcggccatccccgcttcctacctacgcgttgcataccccgatacccgccatcccccaagaagaggcttccatctgatttctgattcgatctgaccccccgtgtggggcggggctggagttgatggagaagggaagtccggtggtcgcagagctcgcggcgtcgctgagagatgtcgaggtcacgccgcgccggaagccagcgagttcgttaccggcagcttcgttctattctccaacaaacaaagctagacctcggaaattggttagtttgtgccttggcatcctcggacagcatcttgaagatatcataactgatatttccgaattttctaccttctttccaccccacataaagctgggcatttt

SEQ ID NO: 27335 - DNA, 516 bp, Oryza sativa
  Clone ID: uC-osflM202094b11b1
tacatctgggcaaacaaatgtagtgccacagaaagatgttaacctgtacaaagatacattcattactagtttagcagaggttcctggcctgattttatctgctgttcttgttgattggtttggccgaaaagcttcgatgtggttcatgttattcacatgctgtgctttcatcggaccacttgtgcttcagcagaatgagctgttgacaactgtccttctatttggtgcccgcgccgttgccatgggtagcttcacagttttatgtttatatgccccagaggtttatccaacatctgcgcgctcaaccggtgttggcatcgctaccgctattggcagaatcggtggggttgattgccctcttgtcgtcgttggcatgttgagaagctgccaccagatggaagccatccttgtttttgaggctgttttatttcttgctggagttgcctgctttctcttcctattgagactaaggggcgtggaatggattgatgttcatgctgcactttttttttaaag

SEQ ID NO: 27336 - DNA, 463 bp, Oryza sativa
  Clone ID: uC-osflM202094c01b1
gtctggaattcagatgccaccaccgttgccccaatatcaacctggggccagtttaccgtcatggaactcatcacctatgccatcatctgcaaatggtgctggccttactatgccaccaatgtactggccaggattttatacaccaccaagtgggtttcctcatttgcaacaaccgccctttcttcgtccaccacatggcttgacaattccacaggccttgcagcagcccatacagtatcctggacttaatgcacctttaccaccttttcctagaatgccagagtttgctttaccacaacctggtagtggtaataacttgacccagaatctaggtgtatccacatcaatgccggtccctgccttatcaagtactccagcaactgaatcatctgcaaaccagcttccaaatatgctgtcatctgtttctgctagtgtattctctctgggtttaactcccccatct

SEQ ID NO: 27337 - DNA, 426 bp, Oryza sativa
  Clone ID: uC-osflM202094c02b1
ctccgttgcgcagccagcttcgctcgcccgctacctcactcactctcgggtgagcgcggccaccgctgccggcgacgaggtagggaggaggaggagggcaagatgttcgggcgggacccgtggggcgggccgctggagatctcgaatgcggactcggcgacggacgacgaccggagccgggacctggacaggggggcgctgatgcggcagctggacgagacgcagcagagctggctcctggccgggccgggcgaccaggccggcaagaagaagaagaagtacgtcgacctcggctgcatggtcctcgaccgcaagatcttcatgtggaccgtcggcaccattcttggcgtcggcctcttatcggcttcgcatgatgatcgcaggtttcgtcctcacaagcgcccccctcttcttcccccgaccagt

SEQ ID NO: 27338 - DNA, 397 bp, Oryza sativa
  Clone ID: uC-osflM202094c05b1
cttctctgctctcttctcccctttcttctcgattctccacgccagagggggaggggcgggcatggcgcgcggcggggtgccggcctagcacggcggggtgccggcctggcgcggcgggcgagacggccggcgccctccccctcccaaatccagcggcggcgggctggggaggggccggtcgtggccgggagcggcggcggcggcgggcgggagcggcgcggcgcggtgtgagcggcgtggcagcggcgggggatctccggcggctccgacaacaacgatgggaggggcagctttggtggcggcgacggcgaccactaggacaaggacggctgtggaggcttttagcgacgtcgatagcgacaacaaggaaggcgttcccggcggtgtcttgcaaagc

SEQ ID NO: 27339 - DNA, 384 bp, Oryza sativa
  Clone ID: uC-osflM202094c08b1
ggaaaacaaaataatttactttagtcccccaacttatacaaatttacagcaccaaaagtttcagaaagctgcgtgccaggccatgcggaactgcaggttatggcaaccgcagaagctgaaacagcaacagtaacatcaagttaactacaaagaaccgtaaaatagtatcatcaccatgttcatctagacatagtagaaaacattcacactctcgaaatgctctctatctttcagttttgggttgctatacgtcttcttgttttgcattttttttagtattccatttctgttcagcagagtggcagtggcgcgccattccattccttgaggcattcgagcagcgggtcgatgtgcttgcgctcgttgatggcgaagagcaccttg

SEQ ID NO: 27340 - DNA, 241 bp, Oryza sativa
  Clone ID: uC-osflM202094c11b1
ttgttttatcaaaatatgaagcagcagaaattacaaaaatagaaaaagtatgtgagaataataaaaaatgatgaaagggttgaattggggaagagctgaaagatttaatggggggggtggttttaggggatctaggtttaatcagacgggcttgcgacttaatagtttttttttggggcaacttaaattaaagttatgggccgagagtttaaaaggggtagattgggaaaaccttggggtt

SEQ ID NO: 27341 - DNA, 520 bp, Oryza sativa
  Clone ID: uC-osflM202094d01b1
ggcggccgtgagcaccaacactcacgcattccttcctactccgcgagatctccggattcgtttcggtgttttgcgagtcgcgcccggagaagaggagaggaaatccggtcaatcgcggcgtcggcgtgccgtcgcttggggtggtgttggtggttctgaattttgattgcttcgtgcttttcgtttgggggagggcagtggtcgccatgggattggggaacgaggcgagctcgtcgtcgtcgcggctgctggatccggcgcctctgctgccgcaccacggtggagatggcgccgggaagctgtcgtcgcagcccaagaccttcgcgaacgttttcatcgtggtggtcggcgccggcgtgctggggctgtcgtacacgttcttgcggaccgggtgggcggcggggtccatcctactgctctccgtcgcggcgctcaccttctactgcatgatgctggtcgttcgctggcggcgccgtcttgtcgaccagcacccggggaacgccttctttggggactgggg

SEQ ID NO: 27342 - DNA, 466 bp, Oryza sativa
  Clone ID: uC-osflM202094d04b1
cccagctcgcgcgcgcgcgctcggactgacccccacccccaccgaggcaaagcctcgtactacttccctacaccaccaccgcgcgccgtacgcgcggctgcggctgcggctgagggcgaagccctccacctgctggcataactagtcggagagataactaaccaccaaactaataaacccgtcctccctctccacccgatgggctcaatccggagtatgctacgcctgaaatgagaccgtccaattctggacgagccgaggtgacgcatgaaggacatcgacatgaggatcacaagcatgggctgatggaagacgatggacatataaggcatcccacaggccatcctcaaggccctcgtcggctactaccagaagtacgtcgtaagttttttggattaaagggggcatggccatttttggccgataggagcgtactttacttatggccgaccccaggcgctgcgag

SEQ ID NO: 27343 - DNA, 485 bp, Oryza sativa
  Clone ID: uC-osflM202094d12b1
ttgtccatcccactcccacgcgcacacagcaaagcaaaccaaagcaaagcttcgtttccgctgccccccacaggccactggacgaggaagagcacgcagcttcgcctctaccggcggcgcatggcataggcatccccaagaatgagagcttgggcctccactacaagagagagaggcagacccaccaccattaacaacatcaggaggagtagatagatgggcaactgcgggacgcgagaggagaatgccgtcgttgcggcgcacgcccaagttcagcagctccatttgttacaacatcctgtcaagaatgctgttgcagagaggaagcatacccgcatctcatcagatatgagtgatccttcaacacctaggaaaattgaagatgcccagaacatcttcatattcaacgatgtgattgatttacattgtctggacctgagacctcacaaagagctctcgtgctgactaacctcttggtgaaggag

SEQ ID NO: 27344 - DNA, 102 bp, Oryza sativa
  Clone ID: uC-osflM202094e04b1
agtcttgctcggttgcttgttaatttcctccgggttgtatataccacgatgatgatgatgaaaacttctgttacttgagtaaaaggcacaggtgtggttctt

SEQ ID NO: 27345 - DNA, 299 bp, Oryza sativa
  Clone ID: uC-osflM202094e08b1
agcccccacactccttcggcgcgcgcgtccgtcctcgatcgcgcgcgcgtcgacgagctaagccggcccgggaaacccaaggcctctctcccttcctcaagcgcgccggcgggcctcgccggcgcgcgacattgagctcaacccccccgtcgtagtcgcacgttgagcgccaccaccaccgccagcgcgtcgcatcgtacgttctccacgcgcggcgccgtgctaggcaaccctctctgctgatcgcccgccttcctatgagcgtgtgacctgctgtcgaatggtgcggtggggccctg

SEQ ID NO: 27346 - DNA, 374 bp, Oryza sativa
  Clone ID: uC-osflM202094f02b1
cgccgtgccgccgccgaacacaccccccccaccccccctccccacacgcctccgcctcctcgcaccgaaccgcctcggcgcgagcgcgagggagagagctcctcttctccttcacggcggttgcgcggtgtggtcccgatccaccggggacgcgtctggatctgatctaggagcggtcgcttcttcctcttccggaagccctttttatcagtcatgtacggacgcatgccaaagaagagtaacaataccatgtattatgaggtgcttggtgtatttaagacagcaacccacgatgagctgaagaaagcgtaccgtaaagctgccattaaaaaccaccctgaaagggtggagaccctgggaaggttaaaggattg

SEQ ID NO: 27347 - DNA, 111 bp, Oryza sativa
  Clone ID: uC-osflM202094f03b1
attgtttgcaaagctggtcgtgtcactcctcccgttaagcttcccgcggcggcgagagcaagctaagctaggtcgggcatggggaaggacgaggtgatggagagcggcgga

SEQ ID NO: 27348 - DNA, 393 bp, Oryza sativa
  Clone ID: uC-osflM202094f05b1
ctcgcttccacgcaagattaaaagctgcccctcttgctgctgcagactgcagtcctgcaagatcagcgcctgaagcaagaagcgaagaatcaaacgagagcctagcagcgtagcagatcgatcgatcgatcgatattatggaggcgcgaggaagcagaggaatgcggctgtggctcctgtccgtggcggtgatggccatggcgatggcgacgaggtcgcaggcgcagctgcaggtcgggtactacgacacgctgtgcccggcggcggagatcatcgtgcaggaggaggtcagcaaggcggtgtccgggaaccccggcatggccgtcggcctcgtccgtcttcactttcacgactgctttcgtagggggtgcgacgcgtccgtgctgctggact

SEQ ID NO: 27349 - DNA, 236 bp, Oryza sativa
  Clone ID: uC-osflM202094f07b1
ccttatactcggcgtcgcgccgcctcaaccgaagcaaggagcaaagcggggattcagaacgggaaggagaaggtccggttcgtccgctctcgagctcaagtgtcagttgaagtgttttgaaagtcatggcggagcatttggcttcaatatttgggactgagaaggatagggttaactgccccttttacttcaagattggggcttgccgtcatggggatcgttgcttccgtctgcac

SEQ ID NO: 27350 - DNA, 432 bp, Oryza sativa
  Clone ID: uC-osflM202094f09b1
ttttgcttctccattcgccggcgccgcccgaaccaatcgccccgaggaggaggagacctagggtttcctcgtcctcgtcgtcgtcgtcttcccccgcgccgccgcccgctcctcccttcgtctatccccggaggtttgagaagagttgcttgtcctaaaatgaggccagttttctgtggaaaccttgactatgatgctcgccaatctgagattgagcgcctcttcagcaaatatggacgtgtggagcgtgttgacatgaagtcgggatatcatggagcatttttgctcttcctggatgatggactgggctctacctttcctgcctgagccccgctcattttttgtccatttccaggagctcagagtccctcctggcatctgttcacttggaaacaaccaccttgtgaatgatgcccttcttttaccatcagc

SEQ ID NO: 27351 - DNA, 510 bp, Oryza sativa
  Clone ID: uC-osflM202094f10b1
gcttctcgctcgctctcctgccctgtttcttggagaagtgagcttaagtgagagcctctgtccctcgcacacgctattggccatggtggttctcgctggcccgcccgccgtcgatcacatcccgctgctgaggtcgccggaccccggcgacgtcttctccggcgtgccggtcgtcgacctcggcagccccggcgcggcgagggccgtggtggacgcctgcgagcggtacgggttcttcaaggtcgtcaaccacggcgtggccacggacacgatggacaaggccgagtcggaggccgtcaggttcttttcccagacgcagcccgacaaggaccgcttccgtccgggctacccgttcgggtacggcagcaagcggatcgggttcaatggcgacatggggtggctcgagtacctccttctcggcttgacgacgcgttgctcgccgacgctgcaccgttccgtcctggcggctttcgggccgtttgaacgagacatttggggtgccgaagtggc

SEQ ID NO: 27352 - DNA, 479 bp, Oryza sativa
  unsure (1)..(479): unsure at all n locations
  Clone ID: uC-osflM202094f12b1
cttcaccatccatccatccgcgcgcggtgcgtagtagcgagaagagaagggggggagggcaaagcgatggctccgatgaagctgtacgggtcgacgctgtcgtggaacgtgacgaggtgcgtggcggtgctggaggaggccggcgccgagtacgagatcgtgccgctcgatttctccaaaggcgagcacaaggcccccgaccacctcgccaggaacccctttggtcaggtgccggctttgcaagatggtgacttgttcctctgggaatcacgtgcaatttgcaagtatgtatgccgcaggaacaaaccaaagctgttgaaggatggcgacctcaaggagtcagcaatggtggatgtgtggcttgaagtggagtccaaccagtacactcctgcactgaaccccattcttttcagtgcctaatccgttcgatgatgtttggngcaccccccgacgagaaagttgttgaggagaaccttgag

SEQ ID NO: 27353 - DNA, 321 bp, Oryza sativa
  Clone ID: uC-osflM202094g02b1
ggttcttgttggcctgcaggtggtgggcggctgggtggcggcgcatgaagcaggtgatgccccggcgagcatcgtggggccatgctcgcgtacaggagacaagaaggcgtgcgtggagttgttgtcgggcatcccggaggcccggaaggcgacgacggtgggccctctcgcggagctgtacctgcgggcaatcgccaaccagacgacggaggccaaggcgatggctaccaagctgctagccaccatgaaggggaagggcgtgccacccgtgtgccttcagcagtgcaccgccagcgttgacaccctcttcaacgccccttg

SEQ ID NO: 27354 - DNA, 379 bp, Oryza sativa
  Clone ID: uC-osflM202094g06b1
ccttttgctgccctcttcattcgctcgctcccctgctcgccgcgccgccatctagggtttcgtcttctcctccgccgccgaccgccatggctcgccgcagctcagcaaggtctcgccctgcaccacgtgctgctcccgtgaggaaccctccgcagccagcaaggcaggctcctcctccagctcctgcccagaacggaggtggctctatcctgggaggaattggttccactattgctcaaggcatggcttttggtactggtagtgccatggcacatagggctgctgatgctgtaatggggccccgtaccattcagcatgagactgttgtctccgaggctggtgcctctgccacccccatggccaacgccactccatttga

SEQ ID NO: 27355 - DNA, 505 bp, Oryza sativa
  Clone ID: uC-osflM202094g07b1
cgacagctcgcccctcgacgtcatcgccatcaacgacaccggaggcgtgaagcaggcgtcgcacctcctcaagtacgactccacgctcggcatcttcgacgccgacgtcaagcccgtgggcgacaacgccatctacgtcgacggcaaggtgatcaaggtcgtctacgaccgcaacccgtccaacctgccgtggggcgagctcggcatcgacctcgtcatcgagggcaccggtgtgttcgtcgaccgcgacggcgcgggcaagcacatccaggccggcgccaagaaggtgctcatcacccgccccgggaagggtgacatccccacctacgtcgtcggcgtcaatgccgaccagtacagccccgacgagcccatcatcagcaacgcctgctgaccaccaactgccttgcccccttcgtgaagatgcttgaccagaagttcggcatcatcaaagggacgatgaccaccacccactcctacaccggcgaccagaggctgctcgacgcga

SEQ ID NO: 27356 - DNA, 436 bp, Oryza sativa
  unsure (1)..(436): unsure at all n locations
  Clone ID: uC-osflM202094g11b1
tgatttggcagtacatactcaaacaaaagagcccctttctcctagtaggcaatttccatgcaaactgaactgtcttgaagtttgatagtcgaatactacaatttgttggcttaattcaaacatgttttgagtgggaagcattagccaatgcctatgatatacttgtagtgcataacaagggtagacatgaacaggagtaaggtcggatagcagtggtttgaggagcaagagctgcaatagctcatccaatgggagagccaagcatgaaaacgagttgagacttgagacaatacttgatactgcatcattatttatgtgtgcaactcgtgttataatatcttcttatataggtgatacctagtaaagggcatttacttttataaagcangacatgcaagaagccacatcattaacaattttaagacattagatcaca

SEQ ID NO: 27357 - DNA, 515 bp, Oryza sativa
  Clone ID: uC-osflM202094h04b1
cccgtgtctctactcgctccgccgcgccgtcgtctctcccgacttcggcgacaagcgagcgacgcaggccaccgtgcgcggttcgttttcgcgagggaggccgccgccgaccagccgccatggtctcgccggacaccatccgcacggtcatcggcgtcgtaggcaatggaaccgccctcgtgctcttcctctccccagtgccgacgttcatacggatctggaagaaggggtcggtggagcagtactcggcggtgccgtacgtggcgacgctgctcaactgcatgatgtgggtgctgtacggcctccccgcggtgcacccgcacagcatgctggtcatcaccatcaacggcaccggcatggccatcgagctcacctacatcgccccttttctcgccttctcccttggagccgttcgtcgacgtgttcttcttcttctcgccgccgaggtcgcctttgtcgccgccgtcgccgccctcgttcttaaccttgcccacacccacgagcgacgcttcatg

SEQ ID NO: 27358 - DNA, 377 bp, Oryza sativa
  Clone ID: uC-osflM202094h08b1
atttttgcctcctccgatgttgacagtccaatggctagcttcactcactttatctcgctttcgttgggtatccacccacaacttgctgataagctgaatgaattcaagaggtcaatcctgacttctaatgaatataaagctgcaggtttccgcatcgacgagtcaatatttgctattgccgaatcacttcacctaacggatcttatgttggagctaaagggtgagaacattgctaaggcttacagtgtgcttcagtcagtatcggacaaactaatggaagccttgaaaaacagacctatctccatacaggttagaggtctggcatgcatgaaaggcttacccaataaggtctgggtagtatatgctcctgtgctgga

SEQ ID NO: 27359 - DNA, 366 bp, Oryza sativa
  Clone ID: uC-osflM202094h10b1
agatgtgcctgtgggactgggtctacggtgtgctcgtgtcgctggggctgtggcagaaggaggccaagatcctcttcactcggcctcgacaacgccggcaagaccaccctcctccacatgctcaaggactagaggttggtgcagcaccagccgacgcagaacccgacgtgggaggagctcagcatcgggaagatcaagctcaaggccttcgatctcgggggacaccagatcgcccgccgcgtctggaaggactactaccccaaggctgatgctgtggtatattttggagatgcttatgataaggaaacgtttgctgagtcaaaaaaggggcttgatgcactcctatctgatgaatcattggcagct

SEQ ID NO: 27360 - DNA, 328 bp, Oryza sativa
  Clone ID: uC-osflM202134a03a1
gggggaaaaattgggaagattttgtttaaaacacaattttaacaacaatttaaggccccagcccgtttaaaaacaaagggcaaaccggccccttttggcaaggggcttttcccgtttaattgccccccgaaaaatttttttggggccgcccggagggggcccaatttggcttaaaaaagaattttttagggggtaaaaatttttaggggacttaacaaaaaaaaagcctcccggtttggtacttaagggggggtccccctcttgtaaacagagccggcccaaaagctttgggggatgacattgtcaaccacccgggtccccccttttt

SEQ ID NO: 27361 - DNA, 374 bp, Oryza sativa
  Clone ID: uC-osflM202134a04a1
cagacgagggttgatattagatcaaacagtctgactaactgatgcttcagttaatcagttacactttttttaagaaaaaagaaacatagttttctcacactttggctaataactgactgcatggcccatccactcatccagtgccaagttagctcaaagaattgacaaggcatccaacctatccccaaataatagccagtgcatgtcactgccttgcccaatactgaactaattggagtttgttgtgccctacttttttatgttgaagtgtaggcatcaatggagattcaagtactacaaatataaccaccacttcaaattcttccctataaagttaaagcatcccctatatctttatagagttggtatacata

SEQ ID NO: 27362 - DNA, 67 bp, Oryza sativa
  Clone ID: uC-osflM202134a05a1
aaaaaattaattgagttcttctctacaccaacagtgtaaggcttactatacggtatacctgcattct

SEQ ID NO: 27363 - DNA, 200 bp, Oryza sativa
  Clone ID: uC-osflM202134a07a1
ttttacccggacccaacctaccatgaagaaatgaatacaccaaaatatacgcgaaaagaagcaattggtgtacaaccatggcagctgaagctgctacacctattagggacttggggggcaaactttcctaaactagaaacacgaaataatcattttacctgcaacatgcatgaacgtaccatattccttattgtctcaag

SEQ ID NO: 27364 - DNA, 52 bp, Oryza sativa
  Clone ID: uC-osflM202134a08a1
cacaaagaaggggcacataaacaacacaggtttcagcagccgaaagcttcaa

SEQ ID NO: 27365 - DNA, 90 bp, Oryza sativa
  Clone ID: uC-osflM202134a09a1
ttttcccccgcgggaggaagggtcaagctctaatggggtgatgttaatcctgtaaccggtgattgactcgacttgctgactaccgaactg

SEQ ID NO: 27366 - DNA, 213 bp, Oryza sativa
  Clone ID: uC-osflM202134a10a1
gtggcatagcgacaacattttggacccccacccttttttggccaaccccaaaaatagggggggtttgggacaatggtatttttagggggctgactttattgtcatcaggaattgttttggggggtggcctcccttttgggggaaaaaaaaaaccggggggggccgagaaccaaggccaggggggggaaaaaagcgcgggtttggtccccgggg

SEQ ID NO: 27367 - DNA, 102 bp, Oryza sativa
  Clone ID: uC-osflM202134b03a1
tttttcccccggggggaatggggctaatatttttgcttcaacgaacaccggctttgccgaaactaacagcgcccacttggtttccttccaagaaaaagggcg

SEQ ID NO: 27368 - DNA, 93 bp, Oryza sativa
  Clone ID: uC-osflM202134b04a1
tttttctgtttttcccctccggggttatatttttatttttgttctggtctgcttatattcttcattgctttttttggtgactcatgcccccat

SEQ ID NO: 27369 - DNA, 375 bp, Oryza sativa
  Clone ID: uC-osflM202134b05a1
actttgccgtactcccaagcaacacaagtaacagcgacactatttgaatcaacgaacatcatcaatattcagcaggacatcatctctagttcactgaataaacgactactagaacacaagccatcgtctaatcttatgtaaacaggcacctaaatacttgcaaatcctatggatggcccagaatgacagtatatgcaatgcaatcccgattgttagacaccgtctgcaaaaattaagtatgttattgggctcgggatcgtgttccttcaaaaggcaaaacacattctccatgcagtttgcctgaattccgagaagcaataagcaagtagctccattctgtggtatgctatgcaaaatgaccaagcaggaaaaaca

SEQ ID NO: 27370 - DNA, 83 bp, Oryza sativa
  Clone ID: uC-osflM202134b06a1
aaaaaaattgtgatgaaccacttatgatctaaaaaacatttttttactacaccggcccacaaaataagaacgaggcaaaggtt

SEQ ID NO: 27371 - DNA, 92 bp, Oryza sativa
  Clone ID: uC-osflM202134b07a1
ttttcccgccacgggaatttcataattaaaattgttctgatcagcttatgttccacctagcttttattgtataaccaagcccccaaaggggt

SEQ ID NO: 27372 - DNA, 223 bp, Oryza sativa
  Clone ID: uC-osflM202134b08a1
ctttctggttttccccgcagcgaaaaatactactagaatgttacaacttgcgggcttggattattgcgttataagacccctacgctatagccgaggcacagcaacttatctgatattctactggcccctaccttcacaatgacctgatgatatcctagtttacaacaacgcatgaagcctttttagtgtcttttactatacaatgtgaaagcctgcactgacc

SEQ ID NO: 27373 - DNA, 381 bp, Oryza sativa
  Clone ID: uC-osflM202134b09a1
tgaactttgacgcattggaaatgcccaaaactgtgtcaagaatcaagtcacaatgaacacacggtccaccaggttaaaccacgctatacatgactgcaaagcacaatcctgccaattacttagttgtccccatctttcaatcttacaaacggtattacaccttcacaagcatcatggctttcccgatcttattgccaactcaaccatgcacagtatactgcacttattactttatgattcacaactgtaacaactgatatcactgcagaaatgctgagcaacgtgcataccatctcgccaccaaactgaagaagcccagatggactgccaggagaagaccgcatatagtactgcagggtttgctaccgtatgaggcagagg

SEQ ID NO: 27374 - DNA, 323 bp, Oryza sativa
  Clone ID: uC-osflM202134b10a1
acaacttacggtcggcaggtttgttatgcactgaggtaatgccaatctcctttgcagtggtgtatccctgttgctgacgaccaacctgggcacgcccttcctcatgggaattctttccgggaagacctcgtcagggatgtctgcaagcataggcgatgtccaaaatctagggctgccctggtaaaccatgtttaggtcctagcttgctaagacatatccaatggatcaagatccttcactagtcagatccttccaagctcttgtccagtagatactttataagaactttttccgaaacttgagcagcctgctgcctgggtagg

SEQ ID NO: 27375 - DNA, 107 bp, Oryza sativa
  Clone ID: uC-osflM202134b11a1
atttatgaaacttctacaataggactagaggaacaccttacatggagggattgacacttttcacagtaacaggagtctggagatcgaggcacgaacaaggacaggca

SEQ ID NO: 27376 - DNA, 373 bp, Oryza sativa
  Clone ID: uC-osflM202134c01a1
accccagacttggggccctcataacaggttttaaaatgtaacttgtatagatcttttctgaaccaggacatacaaggtaaaatgtattccagatatgttaaaggcatataacagatgagccttgggcccacagtttaaaacacgctactctgaatgatcggtcaaaaagacccactgaacgggtacatctggggtgagagtcgcaacgagaagaatgaagggtttagcattgcgtccttacacgagtaagacagcattgttacagccatcattctctgggttgtttgaaacttgggcatttttaccccaaacaacttttccagcaggggttaccagaccaagttcacttacgttcactaaatgatagttcccc

SEQ ID NO: 27377 - DNA, 116 bp, Oryza sativa
  Clone ID: uC-osflM202134c02a1
tttcgcgtttttcccccagggggccaaattattctccataacggattcggccctgattttcaacacaattttaaaagggggaggccggatgcatcccggggaccatctaaatgcac

SEQ ID NO: 27378 - DNA, 141 bp, Oryza sativa
  Clone ID: uC-osflM202134c03a1
tttttgcgtttttcccctccgggtttatataaagctgggtttggtattatgcccacaaaggtcattaatctctttaaggaggggaacacccgggtggatttacacaggggagaagttttacacacaaacgacacttatttg

SEQ ID NO: 27379 - DNA, 375 bp, Oryza sativa
  Clone ID: uC-osflM202134c04a1
ttttcccaaacaagattataatatgatttcttctgtccatagcaaatttccgacattcattttgttttacacataaaaacgtaattaactcatctacactattgttaaagggaacatcaacattgcaagcttaattgctatgctaagttaaagagaattactagtttttttaggtctcaatagcataacatcttgctattattcttgaaagggaagagcccatactaacgtagacaaagtgaaaatccaagttcagacatcttctcatgcaaaaatgtaccgatctaaaaattctaaacactgcatccttttgggatccgggcatggtataattccccagttacttctcacttcatacaaatcttcatgaaaatg

SEQ ID NO: 27380 - DNA, 375 bp, Oryza sativa
  Clone ID: uC-osflM202134c05a1
tccccaaaggaaaatggggcagacactaggtctctccatgaacctacactatcctttttctttgtacagggtaagcactaaggggtacaaaaggaaaacactcattaacactcaccatgctgacaaaaagaagaggttgaaaaaaaaaaaggaatacataatcacacaaagagaaaaagaagggcaggagctcgatacacaaggggctttgtttatactatacacatgcacaaacaaatgaaacccaaaaatgcacccctgccaaacaggtattcatacagaacacaaataataaccgggcgttgtgttgcacctcaggccattggttagcattaatcggagcgccagaccttgcttgtgaaatccggtttgcgt

SEQ ID NO: 27381 - DNA, 117 bp, Oryza sativa
  Clone ID: uC-osflM202134c06a1
ttttccccacgggggaaaaacatttttaattggtcaggtcaacatccgtcccaaaaagccttttttcgggaccaaagctcacattttgttcaaaactcgaccatccatacggggggc

SEQ ID NO: 27382 - DNA, 165 bp, Oryza sativa
  Clone ID: uC-osflM202134c07a1
ttttccggtttttcccggaaacggaattagagttttaacagtactaggctctgcctatacgacaaacaccttttgcacgggcctgaagtagaaataggacgccacgtttaggtcggacatgccggtgccagacccgaatatgcaaacgcttgaagaacctttagt

SEQ ID NO: 27383 - DNA, 118 bp, Oryza sativa
  Clone ID: uC-osflM202134c08a1
agggggataaaagactgcaaaagaggatattggaccgatgctacaccatttttatgtttgatacggacactctcatcctaaattacggcactgccaagtgcgatacactttgtccccc

SEQ ID NO: 27384 - DNA, 125 bp, Oryza sativa
  Clone ID: uC-osflM202134c09a1
tttttcccacgggggtttttgtatcttgttttcttttttgatgtacacccggttatcttttttttttttctttgatcagtcttgcatggggcggcccttcctttttttttttggtgccaaaaggc

SEQ ID NO: 27385 - DNA, 305 bp, Oryza sativa
  Clone ID: uC-osflM202134c10a1
tttttgccgtttttcccttttcggttttttttttttttctcttttttttttttttgtccaataattttttatcccatcccatgaccggaccatttacacgaagcggtttaagattttgataaaccgcctatgtgaagagtctcagcactcttgatgctcttccctatcccgggagagacaaaatcaacgtggaacaagggggctttggtcccatgctgtggtctcagggggccatgtccccctggaagaaaatgccacgggggcacgtgaacttgcactatatgatggccaaggggtccatagaa

SEQ ID NO: 27386 - DNA, 386 bp, Oryza sativa
  Clone ID: uC-osflM202134c12a1
aatctttcgctggttcccatggaaaaaaaaaagttccgccaagtgccaaggatcgacattttgaactagaaatgttagatggcaccggattattttttttccacctggtgctcttacaaatggagagaatggaatgagtagaattgattgcacgacatttattacataaataaccgttgatactcggtacgtgtccggtcgtctaccaatgtcggcggtgtagcagtagacctttattgaaggttggcgtgtggctcatgatgcgattacctccatagcagccactttgaaggattcatccatcaacttaaacttgtcagctggggcggcatcgaggacagctttagctgctttcttgtaggcaagtgaagttgcagcaactttct

SEQ ID NO: 27387 - DNA, 149 bp, Oryza sativa
  Clone ID: uC-osflM202134d01a1
aaaaagtagtcgacccaaatcacggcctcacgtgctgtaaacattgaagccagatgtcttcagctgggaggagaacgtacttgctttgcgcgtaaacattcttgtggttctagtcctcttactagtaataactttcaagctagcaaggc

SEQ ID NO: 27388 - DNA, 115 bp, Oryza sativa
  Clone ID: uC-osflM202134d03a1
tttccccccccgggggtatagaatcataacaggcaccatatgcttatgttccaccaagctttatttgggtaccagagctcccaggtggcttgtggctcctctaatgaagattggg

SEQ ID NO: 27389 - DNA, 248 bp, Oryza sativa
  Clone ID: uC-osflM202134d04a1
taaaatttcccctttttccccaaaggggttaacaacatttaatttactttccactgattcatcccactactgttctgtaacgcaaaaaccttcaaaaaagcagcacttgtgcatgaaatcccttggaattgcaatatggatgcaaaactgcatctttagatgctagcatatctgacatagtgcggcaaacagtttagtaccagagcgctgaccagtagcaatgtcgctgagacagaatgaccgaggct

SEQ ID NO: 27390 - DNA, 176 bp, Oryza sativa
  Clone ID: uC-osflM202134d05a1
ggacaggaacaaaaccacggtaggtagtgcccagtttcatctatcatcatcgcttatgagtttatgaccaagagggagttggatccctttgctcgagctaactgactgactgactccaagctagtaacatgcagacgaacgctccggacgaccattgcaaacgattgcataaaaga

SEQ ID NO: 27391 - DNA, 117 bp, Oryza sativa
  Clone ID: uC-osflM202134d06a1
gggggagaaagaccatgaaaggcacactaagcctgcgggggtagtaacttaactttggcaaaagataaccggctgcaaggagacctgctccatggtcagggggtaacagcacctttg

SEQ ID NO: 27392 - DNA, 193 bp, Oryza sativa
  Clone ID: uC-osflM202134d07a1
tttacccggagcatgaaggtgccaaaggattacatgatagtttatttttttgggtgcttgtttcattggttctgaacagaattacattatgcagtacagtctcaatggtagcgtacataatttacatacaggtttcttagggggtagtacaaagtacgtgatactagtgcatgtagataaccctaacacactg

SEQ ID NO: 27393 - DNA, 368 bp, Oryza sativa
  Clone ID: uC-osflM202134d08a1
tgcattgaatcaacaagggacatatataaaaccaatgtctgaaaagcattaactaacaaagactaacaaaagaagtcagggaaggaactccaagcatggttccgaaattagctactccacaagccatatatatacttctaattgatggagaagaagcagataagtattgttggacagatgaagtgtgcacatgaagaaatccaaacaaaaggctaattttttccaatgcatgatctttggtccagtcgagcttcaactccaaaccttaacttgcagatattgaatgacagcaaatccaatgagggaaccactattgataaataacacggacttcccatgaactaaccaaacatagatcccttttcaac

SEQ ID NO: 27394 - DNA, 272 bp, Oryza sativa
  Clone ID: uC-osflM202134d09a1
ttttgttttttgatttttttctttttttttttttttttttttttttttttttttcttttcttttctttttttttttcggggcgccgatttatgggggggttaaatttgggggcccggaagcatcaaattttgccctttaagggggggtttggaagcttttggggatctttgacccctggaaaggggggtaaaaaagtgttaagggtgaaaacgtaaaggaggatacgatcgggaggccccaaaatgcccgggtgggcttactagggggcccc

SEQ ID NO: 27395 - DNA, 369 bp, Oryza sativa
  Clone ID: uC-osflM202134d10a1
gtttgcattaaggtttagtactcaatcaaagttaacaaccgaccacaaatacagtgttccaatgactgaagcatttcgaggaaaccattacacagatggattgctgatttatgaaaagcttgactaaaacctacacggtaactaggactcatcacacaaaagtccagtttaaactaaggatgctcctgtcctaatcttcactctttggaggacttgttgatcagggacttgtggatgtgaggaatgacacctccaccagcgatggtacccttgatgagagtggcgagctcctaatctccacggatggcaagctgcagatggcgaggggtgatacgcttgaccttcagatccttgctagcgttcccagcc

SEQ ID NO: 27396 - DNA, 411 bp, Oryza sativa
  Clone ID: uC-osflM202134d11a1
ggggggacgacggtccttgcccgtacgaatatcccggttgcaccgatctgcctgctctcctagatcctgtacactcttaatgaagacctccagcttttgcttgaactgctcaaccccaaactatgaccgcctcctcatactcgctcagcgaagctctacgcagaacgatcatgggggctagatctaccaactggcacaccgggtgagtgaggcactcctgtatacgtgtaccaatatcctctgagggcaagtgtaatcgtgccccgacctgtcgttgccgccttacacaccctgccttcctgtacctacgtgagaggcgcctctgataacccctttcagttagaagaattcgatccactggccccataagaatcccaccggaaatggaagcaggctgcggccaatgccggc

SEQ ID NO: 27397 - DNA, 72 bp, Oryza sativa
  unsure (1)..(72): unsure at all n locations
  Clone ID: uC-osflM202134d12a1
aaaaatncctttttttttccttttttcttttttttggccttggaatttggccccccccatggggggttttcc

SEQ ID NO: 27398 - DNA, 100 bp, Oryza sativa
  Clone ID: uC-osflM202134e02a1
aggggggggaagaatatgaggagacccataatgtatttagggtggggagaggactaaaatgttagattagccccaatgacagttacaactgaaaatgaac

SEQ ID NO: 27399 - DNA, 362 bp, Oryza sativa
  Clone ID: uC-osflM202134e04a1
ttttactgggagaggaacgatcaacagatactattaagcatccatgttgcgaaatccatgtgatacaagaacgactgcctcaggctcgaagatgacaaaaagggtgacatggatgcgatactgacacttcagctgcaacttgcagcgacctacaacggggtcagcccaacaacaccgcatgcaagtcgcccaccagcatttccagtactgagactaagctcatggccacccttccccaaatcatcttcaagctcatgaacaacgaatgctctcccaacaacagaatttgggccactcagaggaatctgcttcctaactccaccaacatcatcgtaaccaacttcatcaagactttccttcat

SEQ ID NO: 27400 - DNA, 219 bp, Oryza sativa
  Clone ID: uC-osflM202134e05a1
attttgccctttttcccaccaagggtaattaaaatacgtacaccccgaattctatctagacaagaaaaaggtgttcaaacattcataagaaaaccgtacaactaggctgacatctgacaaagcatgctaaataagcataccggtttgagaaaaataataatttagactatccctgacagtgccacagccatgcgcctggagctactctaattagattcc

SEQ ID NO: 27401 - DNA, 374 bp, Oryza sativa
  Clone ID: uC-osflM202134e06a1
tttccccctccagggttggattgaccgtattgcatacattgaatgatggactgctatacttgtacatattcatacaccaagaacatagtttatattgcagctgctgccatacccatctggtacctgttggagatgatggtcctcaagatccttgaagaggtcccttggcacttggagctgcactgcgaacgcgagattctcgggtacccttcggacttggagatccgacgcacgacatccgccggcgacatagctccgggtaacgacgcctttgctcctgcgtccccgacgccttcgctcttccggtgcctgtaacctgcctttgctgaagtctgagtgttggccatctccccttagctgccccagtcacgacc

SEQ ID NO: 27402 - DNA, 397 bp, Oryza sativa
  Clone ID: uC-osflM202134e07a1
tataacttcgccagctaaaagatgatccaggttccacatccgttacatcacgacagagtaaaaatagtttctcagtagcacgcgaacataggattgttgatgtgaaacacatgcattcgacaaaagggaaatgaaatacgacaacgaaagcagttctcttagcagtagaccaactagaacatgtaagggtaacggcacaacacatgcggcggccaaaaatttagagcttgtcctcgaaatcggagaggggagtcatctgctccttgagacccttcctcttgcggatatcctgcaccagggttgaagcctgcgagccagcttcaagaggatcagaggtcatcatgtcccaatggtcgaacacacactgggggaaggcctggccagatgtcgcagccct

SEQ ID NO: 27403 - DNA, 209 bp, Oryza sativa
  Clone ID: uC-osflM202134e08a1
tttcccctaggagggttattcaatgttcaggaaaaaaaggtttagtgctactaatgggtaatttgcatttaaagggcatttcacagagggggttgcacgtgtatatgatcccggggaaaatttcacctgtctctgagccctttatataagaaaattttcacatgtatgcataactttgtgtccttcatacacctcacttgttcatgaaa

SEQ ID NO: 27404 - DNA, 381 bp, Oryza sativa
  Clone ID: uC-osflM202134e09a1
tttttccccccagggaatttatcccagtgttcatgagacaaagcatctcttaaattcagagaatagaagggagaaggaacacaaaatctgaagaaaaaaattgacttatttggccatttcttttagccatgaactctgctctttctgcacactttgctgtaccccgaaaaataaattaaaagaaaaggaagaaaaaggtcttcacacttgtcgatggcatctcagcaaacggaaacaatggactcaattaaggtcgataagtggagcaagctcagccttatcgatcaatttgaactcccaggtgaacaatgtgaaatgcttgaagcaggcgttaaggtgggcttcttccttgaggctcacaatcttttgaaaatgtgtgtg

SEQ ID NO: 27405 - DNA, 379 bp, Oryza sativa
  Clone ID: uC-osflM202134e10a1
gtttaccccggactggtccgtcagctgctggcaccggaagtactccgggtcgaggtagccgaagctgcccttgacggcggtgctgacgtgcagctggttcatcccggggccgtccttggacagcccaaagtcggatacctttgcgacgaagttgtcgtcgaggaggatgttggtggtcttgacgtcgcggtggatgatcccctgcgccgtgccggtgtgcaggtagtggaggccgcgggcggcgccgatgcatatctccagccgctgcttccacgtcaacgccggcaggtccttgccgtagatgtggtcgcggaaggggccattgtgcatgtactcgtagaccagggtcatctcggcgttctcgtcgcagtagccgatg

SEQ ID NO: 27406 - DNA, 109 bp, Oryza sativa
  Clone ID: uC-osflM202134e11a1
ttttcccccggggggaaaaaggacctttggtgacaaatgcaccggttaccccgatcggggcagtttaccacagcctaaaagcttacctggaaaccgtcggcccgagggg

SEQ ID NO: 27407 - DNA, 378 bp, Oryza sativa
  Clone ID: uC-osflM202134e12a1
ttttcaatacggggattccaaaacagccgatggacaataatcggactcagagcatcagttttaaccgaacagaaataaacgagtattaaacgactgacatagtgcacattgcgagcagatattaacggtccatgaaacgagagccatggccgtgggcaaaacttaacaaatactagaactagatatctcaactgcagacatgcaaaccaccatttgaacgaggctcacttcttcttggcggcagccttggtcaccttggcaccggttgggtccttcttctccacgttcttgatgacgccaacagccaccgtttggctcatgtcacgcaccgcaaaacgatcaagaggagggtactcagagaaggtcttcacaaccatg

SEQ ID NO: 27408 - DNA, 248 bp, Oryza sativa
  unsure (1)..(248): unsure at all n locations
  Clone ID: uC-osflM202134f01a1
attgatcggntcaaactacaggatcatataagctgggtaaataaatcaagaaagaattgacgtatcacaatttttatatacaccgaaccattcgctggttttttgtttgccaaagtagtaattactccaaaacactgtgcttgcctggccacaggtagcaaggaacattaccgtgctcagataaaaattattgggaaggaaacataggggtgagcctcggttttaccttccagaccagttttcaccaa

SEQ ID NO: 27409 - DNA, 133 bp, Oryza sativa
  Clone ID: uC-osflM202134f02a1
gcaacaataagactcaaagcatccaatttttaacccaagagaattaaacggggtgtaaacgactaacatagtgcacattgagagcgaatatccacggaccatgcgacgaagtgccatggcccgtgggcaaaac

SEQ ID NO: 27410 - DNA, 363 bp, Oryza sativa
  Clone ID: uC-osflM202134f04a1
gctcgggggtaaatgtgccacaggatgacttatgcagctggagacaaaagcttttgaggaccagagaaaattctgggatcaaaacacaaggttggaacctggaactagaacaaaaatgggaaatcaagtagacaatggagtcatcaactcaaggagcaaatcatgacaaaataaggctacatatttttgctcataccccaacaaaactatgggcctttgttacacccaaggttgccggtttatgaacaacttgaagaggataccaccgtgggtggagaaaaagggggcgaaaacgagggattcgaccgccatgagcttgatgaggacgttgagagagggtcctgaagggtccttgagagggtc

SEQ ID NO: 27411 - DNA, 76 bp, Oryza sativa
  Clone ID: uC-osflM202134f06a1
agaatccagataatacatcaagcaaaatcacacaccagccataagtgcttccatctttagcatcacagcctgatag

SEQ ID NO: 27412 - DNA, 393 bp, Oryza sativa
  Clone ID: uC-osflM202134f07a1
ttcccaaggggaggagggttattacatcgatcaaatcacatctcttttatacggatcctcatttagcaatgtgccattggatctgtttcccttacatgtggcccagtcagtccctattaaggccactcactcccgtgataggccggaatgggccgaccgttcacgacgcgacatttctgaggcccatcttggtgccgccgaagaagctgcatacggttgactaatcaggcaacataaggtgacgatgccctcgaccattctcgccctgttgagacgaaactttgaccccaagcttcagccaatggaaagcgatgacccatctcttgagcattctccgaggtgatcacctgaacatctggaccacaccaagcaacctggacaaactgcaccatt

SEQ ID NO: 27413 - DNA, 399 bp, Oryza sativa
  Clone ID: uC-osflM202134f08a1
aagtactcccattccacaacaaccgaagggcaacaataagactcagagcatccaagtttttaacccaatagaaataaacgagttttaaacgactaacatagtgcacattgcgagcagatattaacggcccatgcaacgagtgccatggccgtgggcaaaacttaacgaacgctaagatatctcaaacgcaggcagcataaccaccacttcaacgatgctcatttcttcttggcggaagccttggtcaccttggcaccggttgggtccttcttctccacgttcttgatgacgccaacagccaccgattgcctcatgtgacgcacggcaaaacgaccaaaaggagggcactcaaagaagggctacacaaccatgggcttggtgggaatcatcttaaccata

SEQ ID NO: 27414 - DNA, 126 bp, Oryza sativa
  Clone ID: uC-osflM202134f09a1
tttacccggaggggggagcaaagtctacagcaaaaaactattggccgtacattgcaggtacctgttgcattaacttcccttcaaggctggggggacaaggctgtactttgcgcctaggttttgcca

SEQ ID NO: 27415 - DNA, 230 bp, Oryza sativa
  Clone ID: uC-osflM202134f10a1
tttttcgcctttttccttttacaacagaactggagaataaatgtttggccagctttatttgctcaagataagccaactttaagggaaagaacaatggagaagtcattagatgtgacataagatcttagaggaacagctaaattaatcataacaaacgaacagcaattttacaagtatttcatatagagatatgacaatatttataagaatctacatgagcaggaagaaag

SEQ ID NO: 27416 - DNA, 130 bp, Oryza sativa
  Clone ID: uC-osflM202134f11a1
ttcccgtttttcccaggcgaggaacatgaaacaataaaatcaacttatctggggatccgatttgttccagattccatatgcaaacttgcttacattgcaagggcgggctatggcttttgaaaggaaggac

SEQ ID NO: 27417 - DNA, 158 bp, Oryza sativa
  Clone ID: uC-osflM202134g01a1
ccccaagaggaagacagggggcttactgaagcagattgaaaaataaatacaacacctatctggttcaagctggacgctaatcatgaaagcatggaggttattggcccaaatgggcagactaagagggctttgtgctggggggattaaaaaccttgaca

SEQ ID NO: 27418 - DNA, 63 bp, Oryza sativa
  unsure (1)..(63): unsure at all n locations
  Clone ID: uC-osflM202134g02a1
ccccccagggggaantgtttctttttgaccaccctctgcttatgttcttccaagcttcattct

SEQ ID NO: 27419 - DNA, 332 bp, Oryza sativa
  Clone ID: uC-osflM202134g03a1
ttttcgcctttttaacgccatgaggtccgacatacaacagcatctagttagctgaagttaaaaagcgcatgataatgcacaaaaaggactagttgccaaaagactgatgacaacaaggaatatgcacaacatatttacaaactaccaaataccaacttatgacactcacattctgccttgctaatgggagcggaccaatgctgttggattcggaccaatcttttcccgagtttctcccaaggttttccgacaaggcttaccgatgttcttgctagcatttgcagtaggggcttttttgcctggaccagtggaggattcttgacgcctctctg

SEQ ID NO: 27420 - DNA, 121 bp, Oryza sativa
  Clone ID: uC-osflM202134g04a1
aaagatcgcgatatcattcagctccaaccatttagactgttacaagacctatcccaagagggatcggtgatccaacctgatataaatatgaaacgtgtctgaaggcttttgccaaaccaaa

SEQ ID NO: 27421 - DNA, 250 bp, Oryza sativa
  Clone ID: uC-osflM202134g06a1
acaggggggcagaatggcaatattgccacagatcaatttcatccctctaaggatgatgttaatctcatgaaaagtttgaacttttgaggcctaccggttttcaatctcatggcccaggatcattcccatatggtggagggacgagtttaaccacagaaggctgttccattatttacatacagatcttatacaatctagccttctgcagcaaagtgcatcaactccgttatggacaatgctttacgcacta

SEQ ID NO: 27422 - DNA, 333 bp, Oryza sativa
  Clone ID: uC-osflM202134g07a1
tttttcccatagaaggagggtaacgtgtgggaggaaaatcgcctggccttacagcaccgggcactctctactcaaaccctaccctgtgttggtaaaccgttcgcgattaacgcctcctcctatgacaatgtttggagattaacgcttgcaccaaaatacccatgttaggcagtgtattcccctacaagaattgtcatcggtttcaaggctaaaaaggcttaactcaccagatcccgttagtgccggaccaggaataatcacttgctcgccatgactttctgccagcttaggcaccggccgagccgtacttttttccaaagaagaggatctgct

SEQ ID NO: 27423 - DNA, 212 bp, Oryza sativa
  Clone ID: uC-osflM202134g08a1
atttaaccacagaaggtgggaaacattacaactctgaacattaaaccttttaaaccaggacacttgtgaaaaaacaaccctacaaggcttacataacttggctgtagaatgcaccgggcaatgcaacgagcccccaacacgaggcattcacataaggacctgtaacaaaaaatcaaccctgtatgacaccatccaccataccgaaaacatta

SEQ ID NO: 27424 - DNA, 383 bp, Oryza sativa
  Clone ID: uC-osflM202134g09a1
tttatcctgagaaggttgcaaagattacagtcctcaacaatatgccggtaaaaacagggatctggtgaaaaaacaaccatacaaggctgtcatgacaaggctctagtatgcgccttgcaatggccagatcccccaacaccaggcattcccaagagtacctgtaacaaaaaatcaaccctctatgacccttacacactaccgaaaacatcatcacacatgacctcaagacaccaacagactcattaaccatacacacagggtaagtctgcaggcactccagcgtcgtcggcagcctggaacaccggcgctgccgactactggtgacaccggcagttgagctgcggaactccatgacagcccccctgtgccgatgccggtgcctg

SEQ ID NO: 27425 - DNA, 377 bp, Oryza sativa
  Clone ID: uC-osflM202134g10a1
cccaccaacatggaaaacatcatagtttttctcagctccaacaatttagacttttacaagatttttaacacaagcatactgatagaaaacatgatatagatatgaaactgtagaaagtcttgcccagcaacagtctctaccaaaattttgcaactacacatggtatctaccttaaaaggaatatttctttctagcgatttaaattgggattacaaccccaccagaattacaggccaaaaggagtcaagcgacctacataacacctagggctggaagaaccatgggaatttccttttgcagcatcaccaaatcttcggttgcccctaggaagaacagcatcctctttttgggttaacagcagaatcagtaacattgat

SEQ ID NO: 27426 - DNA, 116 bp, Oryza sativa
  Clone ID: uC-osflM202134g11a1
cctgggggagaacgaaagactcaaagacaaattaattgttgtcaacatgcacccatgccttcattactccaagggactctaattttaaggggcaattgccagctgggggtacagtt

SEQ ID NO: 27427 - DNA, 141 bp, Oryza sativa
  Clone ID: uC-osflM202134g12a1
aaaaatttcttaaacttacaaacagcttagaactaactggatagtccggtaccactgcagacaatctgactatagagcagttcggatagttccgactgcattatgaacaataccaatctagatgcattcgccagatgaaaa

SEQ ID NO: 27428 - DNA, 67 bp, Oryza sativa
  Clone ID: uC-osflM202134h01a1
aagagggcgagaggaacacattatcgggggggatttgcctcaattttacagcatccaggagtcttgg

SEQ ID NO: 27429 - DNA, 78 bp, Oryza sativa
  Clone ID: uC-osflM202134h02a1
tttccccacagggggacccgactccttcatagctcccattgcctttggccccccccgacttaatatggccccagcgca

SEQ ID NO: 27430 - DNA, 317 bp, Oryza sativa
  Clone ID: uC-osflM202134h03a1
accaaaaagaggctattactgatgacaaaccaattcatgatgctctaaccaaggactaaatcactactccgtacggtacaataccctgaagaatcataggaaatcatgttcacctaactagcaactacgacccatcaaacgctcaaaccggggggaactaaacgaggctctccggtgcaccgcactgcctaatcctttccatggcacgccttgcgcgccctatgggtgctcattcgtcgtcgtcctccggggggctcgccgcccgaaccagctcgttggagacggaggccaagccctgcattagcctgacgacctcc

SEQ ID NO: 27431 - DNA, 177 bp, Oryza sativa
  Clone ID: uC-osflM202134h04a1
ccccataagggtacctgtaccacccaaaccctccacatgtgaataaaatgcttgggccgacctttccctagccgatctccttaataaaacactattggcttctccaggatcatgctcagtcccatgctaacctccgtcctatattgttctgcaaacttgactactacaattgagtgt

SEQ ID NO: 27432 - DNA, 68 bp, Oryza sativa
  Clone ID: uC-osflM202134h05a1
actcaatctttacttaaggggaaaaaaaaaaatactcccccttggataatcccaacacggccaactgg

SEQ ID NO: 27433 - DNA, 201 bp, Oryza sativa
  Clone ID: uC-osflM202134h06a1
tactgtttttttcaacacatgataagctaattgcttttcattcatccatgttttttttgggatggtctgaacaaggtttgaaatcactgatactaaactaacctagggatacaccgatacctgtcgggggggccttcttttcaaaaaagggcaatttttttgctgtccaaatatttggcccctactccaagcatcaaaact

SEQ ID NO: 27434 - DNA, 236 bp, Oryza sativa
  Clone ID: uC-osflM202134h07a1
ttttgcccttttccccaccagaagctttaacggttaataaagcttttattcctaaaagccgccaagttctaaaggaactttcgctcaaagggtgtgaaacagaaaatgaaaccttcaccattttactctaaatacaagggctaagcaggcatgtggcctttttgtatctgcagaactttccctttgccacatcggcatgagtgctagcccattgaggcaatatgtagaacctatga

SEQ ID NO: 27435 - DNA, 367 bp, Oryza sativa
  Clone ID: uC-osflM202134h08a1
aaatacggggttttccgcctgggaatgaaacaaggggaatgacatatatgacgttccagattcacaactcaaacggcagccggaatgaccaaaccggcagattagaacataatggccctcgattattagccgaaacgacccgaaaaaacgagagggactatggcactggagggggtgatctgcaacgggtggtgtggacaggggaaggtgggaaaaaaaaatcaaaccacagtgaacccgatgcatgcccggagggggctagaaaaattgcatatggatctaggaaagggactcggttgggtgagccaaatggtggatgaaatgtgggaacggtgcgcgacaatggatgtgaacgatcgatccacag

SEQ ID NO: 27436 - DNA, 352 bp, Oryza sativa
  Clone ID: uC-osflM202134h09a1
cgggatttatccagaaaaaaggacataattacatactttgaaggcatagctgatgagacaacctaaagatatattatgaggggatcctaaagaatggagctaaatacttagtagcaataaacttgaataggcaagttaaaacttcagtattcattggacacaagaatgttctgaagctatgtagcaattgcacaggaaggcatgaaagggcatttttcagttttcatgagaattagcttccttcctgtaccacaaaaaacttgatttgctagagcaatggctcacgtcatttggaaaaactctcgagccttctacggggaatcttcttaaccgatgggttcccatttccccc

SEQ ID NO: 27437 - DNA, 91 bp, Oryza sativa
  Clone ID: uC-osflM202134h10a1
ttttccccccacgggttttttctttttggttacaggcttgtaattcttttgtggaatttaagaaagggaatttcgaaaggccacttttttg

SEQ ID NO: 27438 - DNA, 390 bp, Oryza sativa
  Clone ID: uC-osflM202134h12a1
ccccttaggggggtttttttttttttttttttggaagggcaatggcattaaacaaattcttcccttcaggaaagcgcaatacagggcctccttgcccttttgggcccagaattcctggcaaaagatgtttttttatgggaaccccgggtagcataaatctcttcaataaggttccccaataaaaatctcccccaattttatgtccccctggtgtataaacaacatgccggaaatggcctcccattgacagcgttggcctgcccccgactaaaagggccaagtgccggaccgaacccaccgaaagggttttaacccctttttttggggaagcccaggagggcaaaaaccgaggcaaagaagctgccctttatcagccctctaaggaacttt

SEQ ID NO: 27439 - DNA, 54 bp, Oryza sativa
  Clone ID: uC-osflM202135a03a1
tttttttttttttttttccaaatttttttttaagttttgttttaatcctttttt

SEQ ID NO: 27440 - DNA, 289 bp, Oryza sativa
  Clone ID: uC-osflM202135a04a1
caccaacagcgggatcgagtttgcattactagatacacacattgcagccttccttccctctctccatgtatcgatatatcaacccggccacgcacaaaacatttgttcattccctactcgagctgcgcgtaccacaccccttggatcttgacatccttgggcaccttggcgccgaggtctgtgtccgacggctgcacgctcttgaagacgccaatcaccttgccggtctctggcttgctcttggtgacgctcaacgtgatgttgcccgtcgacgaccaggcgtttttga

SEQ ID NO: 27441 - DNA, 275 bp, Oryza sativa
  unsure (1)..(275): unsure at all n locations
  Clone ID: uC-osflM202135a05a1
acgtgtngaatgagtttttctttagaccaacaatgtaattcttactctacgatatacctgtatactccatctcgaaaaaaatgcaattcttactctaggcagcctatacattaccctgtagaaaccattcaagaagaaactggatgagagcctccttgccaagttcatgtctgccaaagtttcccaatgaccaggctctgaattgtacagctcggcagattttagcacctgtccattctttttacacccaccagcgacaatagcaattttattaa

SEQ ID NO: 27442 - DNA, 346 bp, Oryza sativa
  Clone ID: uC-osflM202135a07a1
cacatatattattatagcagagtggtgtcacagttcaaagtgcttctaagcgaaacgagcagaataattcaatttccaaggctggtagatctggattacaatttggcgtgacatagctcagaagcacagccaaaagcagatgaaccatcatcggttcatttatcagttgccagaacacaccgcaggcagccaccttcatgcagcaggtcaaacgccttgttgatgtcagtcaggttcatgctgtgagtaacgtactcgtccaccttgatttccttggtcaagtacttctcaacgagccatggaacttggctttggctcttgaaaccgcccaaaggtgtttcctttc

SEQ ID NO: 27443 - DNA, 119 bp, Oryza sativa
  Clone ID: uC-osflM202135a12a1
atgggcgtaacccacggggacccccattcatatcaatcttaagaaacggcttcccaggcaattaattggggctggtttcaacacgaaaaaccctggtttgggttcggtccccccacaaa

SEQ ID NO: 27444 - DNA, 86 bp, Oryza sativa
  Clone ID: uC-osflM202135b02a1
aaaaggccaaatttttttttaggccaaaacagggggaataaattcagggtccaaacctaatttttaccttaatctttaaaaccctt

SEQ ID NO: 27445 - DNA, 139 bp, Oryza sativa
  Clone ID: uC-osflM202135b03a1
tccagtgaaggaaaaggaaaatttgttcggggcccaaaacaggagtgaaaaacccctagcaagaaatttggcccacgctgccttggttggggctttgcttttaccgttattaccatcttctaaatcttcaaacttgaac

SEQ ID NO: 27446 - DNA, 90 bp, Oryza sativa
  Clone ID: uC-osflM202135b04a1
ccttcccaaaaattaaatgaagggagttttttaaaaacccctttttaccaaggccaaaattccaataaccgggggatttgtagaaacccc

SEQ ID NO: 27447 - DNA, 264 bp, Oryza sativa
  Clone ID: uC-osflM202135b05a1
caacagaagtaacagcgacactatttgaatcaacgaacatcatcaatattcagcagtacatcatctctagttcactgaataaacgactactagaacacaagccatcgtctaatcttctgtaaacaggcacctaaatacttgcaaatcctatggttggcccagaatgacagtatatgcaatgcaatcccgattgttagacaccgtctgcaaaaattaagtatgttattgtgctcggatcgtgttccttcaaaaggcaaaacacat

SEQ ID NO: 27448 - DNA, 180 bp, Oryza sativa
  Clone ID: uC-osflM202135b06a1
tttctcaagtcattttgatgtagcacttttgatatgagaaacatctctatacaacattggtaaaagaaaaaaaaaagaggaaaaggttagtgggccttcctttcccttttgttccctcaccctataaatacaattggcgcccaaaatatgctcagattacaagccactggactaccccct

SEQ ID NO: 27449 - DNA, 404 bp, Oryza sativa
  Clone ID: uC-osflM202135b08a1
ggggaaataatactagaatgttacaacttgtgggcttgcattattgcgttataagacccctacgctatagccgtcgcacagcaatttatctgagattctactggcccctaccttttcaatgacctgatgtatcctagttacaacaacgatgaacctttttagttctttactatacatgtgaagctgcctgacctttcaggacctcgccatcaatcaacgcaatatcacaaaaagaattgtggcagccaagccttcggttgcaatgcacaagaaatagcgatttgatccgatctcaacgcacgaggggtctaaaacagtatgtgccaacgcacaactgtcaacatttgtcttgaacaggatcatacaactcctagcttgaggagctagcttgatccctttcaaaa

SEQ ID NO: 27450 - DNA, 303 bp, Oryza sativa
  Clone ID: uC-osflM202135b09a1
gatggccatctcttgggcacaaagcatatgtgatcccagaagtaaaaaccaggcatgaatgacagcaacacatcagccacaaagaaagctcgctggcccgctacttcagtcttcaaccagctgatgatcgatcgatcgaatttggcatctatcggtcacaaggcgcacacgaagaccccgctgttctcgatggcaatgtcgccgatatcgacgatgtcgtcaagaaccatgctccccaggcaggcgacctgcccggcgccggcgagctttatggggtcgcccggtttccgggcctcctgaatg

SEQ ID NO: 27451 - DNA, 67 bp, Oryza sativa
  Clone ID: uC-osflM202135b10a1
ttttttttttttttttttttttttttttttttttttttttttattatttctttttttctcccccacg

SEQ ID NO: 27452 - DNA, 196 bp, Oryza sativa
  Clone ID: uC-osflM202135c01a1
ataacagggggtaaaatgtaaccaggaaagagcttttttgtaccccgacatacaaatgtaaaaatgtgtttccagaatttgttaaaggggattttataaaagattgagcccttggtgccccccacgttctaaaaaacaccagctccctcttgaaatggaaacgggtcaaaaaaagaaccccccctggaaacggggg

SEQ ID NO: 27453 - DNA, 317 bp, Oryza sativa
  Clone ID: uC-osflM202135c03a1
aaagctggttttggttttatcacatcaaagggaattaaaccctgaaaggggggaaacacacgggagtttttacacatgggagatgtttacacacaaacacacttttttgggttggcgctagcccttgataggagccagcagggtagctgacacgtaccgggctttgggaggtctaacagagaccggaagcttcttggaacagagttacaagattagattgccacctactagataattaaatacggttttgattaccacaagggcccgcaaacatggggtgaccgaaagattgacccgccttcggtcaatggggtttt

SEQ ID NO: 27454 - DNA, 433 bp, Oryza sativa
  Clone ID: uC-osflM202135c04a1
acaagagtatgatatgttttcttctgtccatagcgaagtaccggcattcagctagtattacacataaaaatgtaattaactcatctacactattgttaaagggaacatcaacattgcaagcttagttgctatgctaagttaaagagaattactagtttttttaggtatcaatagcataactcttgctattattcttgaaagggaagagctaatactaacgtagacaaagtgaaaaccaagttcagacatctttcatgcaaaatgtaccgatctaaaagtttaaacactgctcctttttgggatcagggcatggtataattccccagttcctccttactttatccaaatctttatgaaaatgcttctcatagtacacagacataagatctgtgcacttaagaccctgttttgaagcccatgggaaatatgctga

SEQ ID NO: 27455 - DNA, 366 bp, Oryza sativa
  Clone ID: uC-osflM202135c05a1
aaatgaaaatggggcagacactaggtctctccatgaacctacactatcctttttctttgtacagggtaagcactaagtggtacaaaaggaaaacactcattaacactcaccatgctgacaaaaagaagaggttgaaaaaaaaaaaggaatacataatcacacaaagagaaaaagaagggcaggagctcgatacacaaggggctttgtttatactatacacatgcacaaacaaatgaaacccaaaaatgcacccctgccaaacaggtttttatacagaacacaaataattacagggcgttgtgttgcaccccagggcattggttagcatcaatcggagcgccagaccttgcttgggaaatccggttt

SEQ ID NO: 27456 - DNA, 296 bp, Oryza sativa
  Clone ID: uC-osflM202135c06a1
tttttattgatcagggtcaaaacccgcccagaaataccccctaccgggccagatctcaccttttttccaatacttgtacatccatccacgggggccacacgaattcgtccatttatacggtacacgttcgtacattttctggaccgggtacacacacgcacacttttttggagagacccgcattgttgaaaaccctatttagctttatccgaaggcaatgcgttcccaggggagcccggtgggcggcgggccttacttgccggggacaaatttggcggggttggcccaagcgttgt

SEQ ID NO: 27457 - DNA, 260 bp, Oryza sativa
  Clone ID: uC-osflM202135c07a1
gtggttacggcgctcggcgcgtcgtcgacgacgaacccgccgtgcaccggcctgtcgttgaagtaggacgccacgtagaggtcggacatgccggcgccgccgccggcgttccacacgccgttgaagctgcagttccgggactcgcacggggcgttcaggcccagcgccgtcgccatcttctgggcgcacttgccgtggtccgaccctttcggcgacgccgtcgtgtcgtactcctatccgctgtacttgtatgtaccatt

SEQ ID NO: 27458 - DNA, 365 bp, Oryza sativa
  Clone ID: uC-osflM202135c11a1
gataagaacaaaggaaaggtacagggaacagtttgcaaatataattagccagatacatccgagatgcagatcaatgcatcatcattatccacatgacccggaaaacaatactttagtggtgctactgatcggtaagaaaacaatactttagtggtgctactaatcggtaatttagttcactgacggcagattttcccaagattaggatcgtttgttacttcagtgtctctctgctgcttcatacagaaagaaataagcattaaaatgtggaaatggtaagataatgaagtggaccggaagtagatgcttagatgcagcatcagcaccagattatataagggacattaagtgttcctgtacatggg

SEQ ID NO: 27459 - DNA, 206 bp, Oryza sativa
  Clone ID: uC-osflM202135d01a1
tgatttatgaaaataccccaaaacacaagaaggcatcaacatacatttttgaggattgggagccgacaattgcaaaggtggacccatattcttattgcggtaaagatccgattaatttcaaatgtaatgtaccattaaacccaaataagtcaaatttccaacacggttaaaaacacaaaggcttgtacgtacccatgttttggaaa

SEQ ID NO: 27460 - DNA, 297 bp, Oryza sativa
  Clone ID: uC-osflM202135d04a1
caagggggattcatcattttatttactttccactgattcatcccactactgcactgaaacgcagaatccttcagcaaagcaggactttgtgtttgaaatccctggtaattgcaatatggatgcaaaactgcatctttagatgcttgcaatttgacatggtggcaaacaattagtaccaggtgctgtcccgagcaagtccgttgagaagaatgaagtggctgtcctctcatggaaaaagcagcactgcaggcgccgaccgagaatgggaggaagatcatgtgtgggttcgagcctaaa

SEQ ID NO: 27461 - DNA, 395 bp, Oryza sativa
  Clone ID: uC-osflM202135d05a1
cccccccccttttgtagtttgaagaaaagggcttttttcccgacaagaacacaaccacggtaggtagtgcccagtttcatctatcatcatcgcttatgagtttatgaccaagagggagtttgatccctttgctcgagctaactgactgactgactccaagctagtacatgcgacgacgctacgacgaccatgcaaacgatgcaaaaagaaaacactggtaaatatgtccacagtacactggtcactggctgcaagcagccttgcacaggaagagaagagagaagatctagaggagtgatgaggctttgctccccacaaaattgttacatccactttggaggtattgagattttgtctccatggcattaccttcgccggtgtttggactgcacctt

SEQ ID NO: 27462 - DNA, 114 bp, Oryza sativa
  Clone ID: uC-osflM202135d06a1
ggggggtaaaaacaatgaaatggacttcaacccttcagggggtgctttttaactttttcccaagataaaagtactgacggggacatgcagctgtttcatttgcttaaacaattc

SEQ ID NO: 27463 - DNA, 345 bp, Oryza sativa
  Clone ID: uC-osflM202135d07a1
aaggtgccgaaggattacatgatagtttatttttttgggtgtttttttcattgtttctgaacagaattacataatgcagtacagtctcaatggtagcgtacataatttacatccaggtttcttagtggtagtacaaagtagtgatctaggcatgagataacctaacacaatgcagagtagagtgcatttagtagtagtggtaacttagtaagcacagataagatgagatacccaacctaccgtttgtagtcagtcactacaaaatatgagccattgtgcagattgagttgtcgtcgacatcattagttatttgtcatggtattcattaacgacttttctgactga

SEQ ID NO: 27464 - DNA, 387 bp, Oryza sativa
  Clone ID: uC-osflM202135d08a1
ctggatggaatcaacaagggacatatataaaaccaatgtctgaaaagcattaactaacaaagactaacaaaagaagtcagggaaggaactccaagcatggttccgaaattagctactccacaagccatatatatacttctaattgttggagaagaagcagataagtattgttggacagatgaagtgtgcacatgaagaaatccaaacaaaaggttaattttttccaatgcatgatctttggtccagtcgagcttcaactccaaaccttaacttgtagatattgaatgacagcaaatccaatgagggaaccactattgataaataacacggacttcccatgaactaaccaaacatagatccctttttaactccaacattcaccctttg

SEQ ID NO: 27465 - DNA, 83 bp, Oryza sativa
  Clone ID: uC-osflM202135d09a1
ttttcccctgggggttttggacaacatgcaatttataaaacgttttggattacacgtacccacagatcgggtacatactgaag

SEQ ID NO: 27466 - DNA, 307 bp, Oryza sativa
  Clone ID: uC-osflM202135d10a1
caacagggatgataacttaagaattaagatctccatcacataaaaacatacagtgactgagtactggattacacgattgagttgttcagggttcagataggaaaaacattttggggactagagatagagggaatcgacagatgcgcagcagttgtcgcgcgggaaacaggacatcacgattgcgttgcatgtcgtcggctgcgcagcggcggcgcggggcttaagaactgcttttgaatgggatcgccctgatgattcacctggtggtagatggcagccagggcagcgccaacgaagggaccaaccc

SEQ ID NO: 27467 - DNA, 269 bp, Oryza sativa
  Clone ID: uC-osflM202135d11a1
ttttatattttgcatagtttcccaacatgggccggtgaacagaaaatttatgaaactagactttagaaaaccacagcactggcgcatggggctaaccgaggtcctcggcaaaatcattaccctgaaaaatgaaacccccgggggagcttaacggcggggggcgaatataatttaggtcatccgctgggcgggctccttagcgagaagcttttccctggccttgggttttacctgggacttggggcccatgaagccgttttcccaatttt

SEQ ID NO: 27468 - DNA, 337 bp, Oryza sativa
  Clone ID: uC-osflM202135e04a1
agaggaacgatcaacagatactattaagcatccatgttgcgaaatccatgtgatacaagaacgactgcctcaggctcgaagatgacaaaaagggtgacatggatgcgatactgacacttcagctgcaacttgcagcgacctacaacggggtcagcccaacaacaccgtatgcaagtcgcccaccagcatttccagtactgagactaagctcatggccacccttccccaaatcatcttcaagctcatgaacaacgaatgctcttccaacaacagaatttgggccactcagaggaatctggttcctaacttcaccaacattattgtaaccaactttatt

SEQ ID NO: 27469 - DNA, 340 bp, Oryza sativa
  Clone ID: uC-osflM202135e05a1
tttaccccaaggggaattaagattcgtacacgccgaatactagcgagaaaagaaaaaggtgtacaaacattcataagaaaaccgtacaactaggctgacaactgacaaagcatgctaaataagctaccgattgagaaaaataaaaattagctacctgacaggccaagccatgcgctggggctacttatttgttcctgatctcttttgttcaggcattgtgatactgattactactagcgcaccggattattggccaacgctgccggtggtgtcggtgcaggaaacactgaatccctgatccctacactctactgggttaacagctaacagagcttaaaaa

SEQ ID NO: 27470 - DNA, 172 bp, Oryza sativa
  Clone ID: uC-osflM202135e06a1
tggattgatcgttttgcatacattgaatgattgattgctatactagtacatatacatacacgaagaacatagcatatattgtagctgctgccgtacccatctgctacctgttggagaagatggcctcaagaatccttgtagaggtcccttggactttggagcctccactgcg

SEQ ID NO: 27471 - DNA, 368 bp, Oryza sativa
  Clone ID: uC-osflM202135e07a1
acttggccggttaaaagatgaggcaggttccacattcgttacatcacgacagagtaaaaatagtttctcagtagcacgcgaacataggattgttgatgtgaaacacatgcattcgacaaaagggaaatgaaatacgacaacgaaagcagttctcttagcagtagaccaactagaacatgtaagggtaacggcacaacacatgcggcggccaaaaatttagagcttgtccttgaaatcggagaggggagtcatctgctccttgagacccttccttttgcggatatcctgcaccagggttgaagcctgcgagccagcttcaagaggatcagaggtcatcatgtcccaatggtcgaacacacactggggga

SEQ ID NO: 27472 - DNA, 348 bp, Oryza sativa
  Clone ID: uC-osflM202135e08a1
aggaggggtattccatgatcaggaaaaaaaggcttagtgcaactaaagggtaattagcatttcacggtcgttttacagaagtgattttacatgtatatgagcccggcgaaaattttacatgaatatgagcactatatataggacactgctttacatgtatgcataacctttgtccctttatacacctgacttgttcatgaaatcgatgcccttgtgaatgcttttcatcagcatttttttttgccatcttcaagccagcttttttaaaatcatttaacggacccagagggagaaccttttcggtttcagcacgacctaaccttaactttggtggcaagaacggcaacc

SEQ ID NO: 27473 - DNA, 203 bp, Oryza sativa
  unsure (1)..(203): unsure at all n locations
  Clone ID: uC-osflM202135e09a1
aaggggggtttgnagctcaatctgaattcacctcttctcaaacttctccccttccccagtgttcaggttataacaaaaataaaagaaaagaaaaaagaaaagcaaaaatttcgagctcaacaaggatggtaactggacaagcaatacgaaccggtatctcataccaataggttgcagtaagaggttagtaagtagtagataca

SEQ ID NO: 27474 - DNA, 167 bp, Oryza sativa
  Clone ID: uC-osflM202135e10a1
aacccccaagataccccgctttggtttggatatcaccggttggttttgaaaacggcccgaggtttggggggtcccccaacgagaaaattcccaagatacaggaaggcgggttattcagtttcaaaaccggggggactcgaacaaagatttgccccataacagattac

SEQ ID NO: 27475 - DNA, 181 bp, Oryza sativa
  unsure (1)..(181): unsure at all n locations
  Clone ID: uC-osflM202135e11a1
aagggggataanatcatcgggggatatgatcatcagttcacgagaacagaggaagaaacaaaagctaaaaattaaaaccatcaacagcccgatcgagtttgcattactagatacacacattgcagccttccttccctctactccatgtatctgatatatcaacccgggcacgcacaaaaca

SEQ ID NO: 27476 - DNA, 278 bp, Oryza sativa
  Clone ID: uC-osflM202135f03a1
ataacgggatattaaagatgtatcatctcatttatagtgaatgaacatcagtggtttataaactaagaactacgatataaattttcttgaaaatcggcaaaatacaaagtggattctgatcctcgtcttacaattctccacaataatcatacagaactattggaagccggatgtatagcaactctgcgcctagtcaatcttcacagatgagtaaatcaatctcgggaaccacaagcaggcacagaaaccaattgtgccagtgagcacgaagaaagaga

SEQ ID NO: 27477 - DNA, 331 bp, Oryza sativa
  Clone ID: uC-osflM202135f04a1
ctccggggtcactgtgccacaggatgacttatgcagctggagacaaaagctaaagaggaccagagaaaattctgggatcaaaacacaaggttggaacctggaactagaacaaaaatgggaaatcaagtagacaatggagtcatcaactcaaggagcaaatcatgacaaaatagtctacatattttgctcatccccaacaaaactatggcctttgttacacccaacgtttccggtttagaacaacttgaagaggataccaccgtgggtggcgaaaaagggggcgaaaacgagggatttgacccgccatgagcttgatgaggatgttgagaga

SEQ ID NO: 27478 - DNA, 115 bp, Oryza sativa
  Clone ID: uC-osflM202135f06a1
gaaaattcatttatacatcaagcaaaatcacacaccagccatcagggcttccatctttagcatcacagcctgaaagctcattccaccatccttccacattgcccatccatttgac

SEQ ID NO: 27479 - DNA, 303 bp, Oryza sativa
  Clone ID: uC-osflM202135f07a1
gtttttacatcgttcaattcacatctcttctctgcggatccttatatagcaatgtgccattggatctctctcccttacatgtggcccagtcagtcactattaggtccactcactcccgtgataggccggattgggccgccgttcacgacgcgactttctgagcccatcttggtgcgccgaagaagctttatcgcttgtctaatcaggaacagaaggtgacgatgccgtgacattcttcccccgttgagacgaagcttgtccccaagctttagccaatggaaagcgatgacctaatttttgagc

SEQ ID NO: 27480 - DNA, 287 bp, Oryza sativa
  Clone ID: uC-osflM202135f08a1
cttgaagagcatgctcctgctgctgctgtgtgctatttgcctgggccaagatcttctttatctgggctccggtgagagtctcgtgctcaagaagtgcttgggctagaacatggtgctccttgctgtgttttgtgaggatggtctttgcattgttgtaggcattcttcagcaggcttcttcaccttctgctcaatcagaagccttgtttctgtgctcatgctcttttcattatcctcattattgttagagacaaagccaacctgcttgttcatgccatatttcgtaac

SEQ ID NO: 27481 - DNA, 98 bp, Oryza sativa
  Clone ID: uC-osflM202135f11a1
aagtcacaaattaacattacatcgagttttaataaaacatcatgcgaaaagccagctaaaacaaaaggcagcatacagctaatgaagctctactggag

SEQ ID NO: 27482 - DNA, 127 bp, Oryza sativa
  unsure (1)..(127): unsure at all n locations
  Clone ID: uC-osflM202135g01a1
acatnntgcttactgaagcaaattgaaaaataaatacaacacctatctggttcaagctggacgcttatcatgaaagcctggggtttattgcagcagatggcagactaagaagggcctttctgctggg

SEQ ID NO: 27483 - DNA, 275 bp, Oryza sativa
  Clone ID: uC-osflM202135g03a1
caggagtttcgacatacaacagcatctagttagctgaagttaagaagctcatgataatgcacaaaaaggacttgttgccaaaagactgatgacaacaaggaatatgcacaacatatttacaaactaccaaataccaactaatgacactcacattctgccttgctaatgggagcggaccaatgctgttggattcggaccaatctttttccgagtttctcccaagctttttcgacgaggcttaccggtggttttgctagcatttgcagtaagggctt

SEQ ID NO: 27484 - DNA, 354 bp, Oryza sativa
  Clone ID: uC-osflM202135g04a1
tgattgatagcgatatcatagaagcagcgacacgaattaagatttaaaaccaaccccaagaaggatcgcagatccaactccaccgaatcgatccaagaactccgcctaatccaaccaaaccatgggcgatctcatctcaccaacacgacacgaactcataaaaagactaacaccaccaccacctcctccttatttagggactcgacgactcaagacgactgatactggcgaaaggcgaaggggaacagcacagatctaggagagctggccgcagtcggcgatgaccaccggcttggcggtgctcccgcccggggatcccaccttctcgatggccttgacgacgtccatgccctt

SEQ ID NO: 27485 - DNA, 140 bp, Oryza sativa
  Clone ID: uC-osflM202135g06a1
aggaggggagaatggagatgttgcgacagatcaatatcattcgctataaggaagatgttaatctcatgaaaagtttgaattttgatgcctaccggttttcaatcctcatggtcccaggatctttcccaagatggttgagg

SEQ ID NO: 27486 - DNA, 118 bp, Oryza sativa
  Clone ID: uC-osflM202135g07a1
ggatttacatgggtgagcacacaagcatggactgtttgcaaagtgaacctgtctagaagaacctgggaaggctgcaacattttcaaacaccaaaagaagttccatacaacgctttatt

SEQ ID NO: 27487 - DNA, 64 bp, Oryza sativa
  Clone ID: uC-osflM202135g08a1
gggaaaaccccgcacaccttttaaaaaaacatgggttttgggggaaaatgattttcccccaaac

SEQ ID NO: 27488 - DNA, 188 bp, Oryza sativa
  unsure (1)..(188): unsure at all n locations
  Clone ID: uC-osflM202135g09a1
gggggggtngaggatcataaaatcactcatcttactttgggacattcttacccctgtccatgccatgtgacaccaaatcgatcccagtgcatactaagcccaacagcagcatcgagatcatcatgcctgattgcctgacatcgcacccaagaggtggtcttttcctatttggagtattttggtaggta

SEQ ID NO: 27489 - DNA, 131 bp, Oryza sativa
  Clone ID: uC-osflM202135h03a1
gatattcccttataaatgggcaaaaaatttttaatccaatgggaaatatgccacatttttcatgtgtcaaatggtttggatgatacatatttcaattctttcttccctataccataccccgagttcacaaa

SEQ ID NO: 27490 - DNA, 166 bp, Oryza sativa
  Clone ID: uC-osflM202135h05a1
taacagagacttaacaaaaggggaataaaccccaggtgatctcatgtctaatactcccagtaacaactaataataataagcactagcacctccagcttccaggtcctatgtgctaagtgcagttttgcacatttcaatttacacaaaattatttgctgcaattggg

SEQ ID NO: 27491 - DNA, 327 bp, Oryza sativa
  Clone ID: uC-osflM202135h06a1
ttttccaacacaagagaagcaaattgcagtacatacaaccaagtttaaaataagatggtctggacgaggtaggaaatcactgatactaaactaacctaggtttacaatgatactgttagaggggttctcccttcaagaaaggcaatattttgctgtcgaatatttggcctactccaagcatcaaaactttagaacgcaacgaagaaaagaccagcaaatgttgcttgtccccatcagaatcaccaaacgtaatttttgttgatttaggagcaattgctttgattttctttgaaatgagatccctatttttgggatttcctttttttt

SEQ ID NO: 27492 - DNA, 336 bp, Oryza sativa
  Clone ID: uC-osflM202135h09a1
tatccagaaaaaaggacataattacatactttgaaggcatagctgatgagacaacctaaagatatattatgaggggatcctaaagaatggagctaaatacttagtagcaataaacttgaataggcaagttaaaacttcagtattcattggacacaagaatgttttgaagctatgtagcaatagcacaggaaggcatgaaagggcatttttcagttttcatgagaattagcttccttcctgtaccacaaaaaacttgatttgctagaacaatggttcacgtcatctggaaaatttcttgagccttctacggggaattttctcaaccgatgggttccc

SEQ ID NO: 27493 - DNA, 202 bp, Oryza sativa
  Clone ID: uC-osflM202135h12a1
attgcttttatttggtgaaatatagctaacaaattcaattttgcggttccataaaaaggctccagggtccactaagcaagaatttacagcagaatcaacaaaagcgggatgcttaatcagggtacaggaatccacggacattcgttttgtgccgggtagagactagccttgatgaactaggtatcagctgcccttaacactt

SEQ ID NO: 27494 - DNA, 52 bp, Oryza sativa
  Clone ID: uC-osflM202139a01b1
ggttggaattcccatacactttgattctcttaggggttttgtgatcgagaga

SEQ ID NO: 27495 - DNA, 498 bp, Oryza sativa
  Clone ID: uC-osflM202014a02b1
tttttcccgcctcggcagcgtcttcaccgtgcgcatcctcagccgcaagatcaccttcctcatcggccccgaggtgtcggcgcacttcttcaaggggaacgaggccgagatgagccagcaggaggtctacaagttcaacgtgcccaccttcggccccggcgtcgtcttcgacgtcgactactccgtcaggcaggagcagttcaggttcttcaccgaggcgctccgcgccaacaagctccgcagctatgtcgaccagatggttgtcgaggctgaggagtacttctctaagtggggagaaagtggaacggtggatctgaagtatgagctggagcatctcatcattctgactgctagtcggtgcttgctcgggagggaggtgcgagaaaagctctttgatgatgtttcttctctcttccatgatctggacaatgggatgcagccagtcagtgtcatctttccctacctcccaattcctgcacaaccgccgccgtgaccggg

SEQ ID NO: 27496 - DNA, 428 bp, Oryza sativa
  Clone ID: uC-osflM202014a03b1
ttatttcctcctcggttcggatccgtggttcgtctagggtttagtgggttgagatggcggcgccggatgtcgagtaccgctgcttcgtcggcggcctcgcctgggccaccgacgaccgctccctcgaggccgtcttctccacctacggcgagatcctcgactccaagatcatcaacgacagggagacggggaggtcacgtgggtttggcttcgtcaccttctcctccgagcagtcgatgcgcgacgccatcgagggcatgaacggcaaggagctcgacggccgcaacatcaccgtcaatgaggcccagtcccgccgctccggcggcggaggcggcggctacggcggcggcggtggcggctacggcggcggtcgtggaggcggcggctacggaggaggtggcggcggcggctaccggcgccgtgagggc

SEQ ID NO: 27497 - DNA, 305 bp, Oryza sativa
  Clone ID: uC-osflM202014a05b1
tgttggacataaatacgagccgctcgacggggaaccgccgcgccgcgtccaccacccaccacaagctcgccgtcggcgttgcggacggcggctcatcctggtccggcgtgcgatccggctgactggccggagacctaggagcttcgaccccccccccccccccccgcgatctgggcggcccatggtggggtcggtaccgctggggggcagccgcggcagcgagatctagggttttcggcgcctcgggggtggggagggagcgatggggcgtctgaaggtcgcccgcggcggcggctgcgacgccg

SEQ ID NO: 27498 - DNA, 470 bp, Oryza sativa
  Clone ID: uC-osflM202014a09b1
acttgtgggaggcttcctcctccttctcctaggggagactagacgccgacacctgcacctcccgtataggctccagaagcttctggaacaccctagcggctttaatacccccctgctcgggtcgggtagctcccttccatcatccatggccgacgccaccgacgccctctcagctcggagcaaggtgcaagcttttctcgaagcggctcgtgccggagatctcgactccctcaagaagctcgctgcggcgctcgacgaggagggcaagggcgtcgacgccgtcgctgctgccgtcaaggacgccaacaagcgcaccgacctgcacttcgccgaccgcgagggccgcacccacgtctgtcacttcctcatctgcgacctcgtcatccccgtggaccccaaggacgacgatggtgaaacttcactaatccatgctacgcgccaagcccatctacaaactgtaacctatctgc

SEQ ID NO: 27499 - DNA, 452 bp, Oryza sativa
  Clone ID: uC-osflM202014b03b1
tttttctccttgtcaccaacccaaccagggtggcaaaggcaatccaggagaagtcatgcaatgctcttctgctgaaggttaaccaaattggatctgtcactgagagtattgaggccgtgaagatgtcaaagcgtgctggctggggtgtgatgaccagccacaggagtggtgagactgaggataccttcattgctgatttggctgttggtttggccacgggtcagatcaagactggagcaccctgccgatcagagcgccttgccaaatacaaccagcttcttaggattgaggaggagcttggtgcggatgctgactacgctggtgccaagttccgcgcacccgtggagccctactaaacttgatggtgaatatcatgcggttcatgcccactgttgtgtgcatgggttctgtgaagacaggatgctcatttctatccgtaattgactttccgt

SEQ ID NO: 27500 - DNA, 253 bp, Oryza sativa
  Clone ID: uC-osflM202014b09b1
tttgaaaggagagagagagagtgagagagggagagagaatggccgcggcggcgcgggaggaggaggaggcgtcgacggcggcgaggagccggcaggagagcgagggggaggaggaggaggtgatggcggtgctggacttcgacatgctgtgcgcctcggtggcgctggcggcggataggaggaaggattcggccgcggtggcggcggctcacggtggaggccggtggtggaggaggtggacgaggaggtggca

SEQ ID NO: 27501 - DNA, 276 bp, Oryza sativa
  Clone ID: uC-osflM202014b10b1
cgggatgccgttgtggtcggtgtgtgtagtagttgcctgggaggccggatggcgacgacgacgaccgtgccgtcgttggagaagaaggccgtggaagcaccagttccagtacccgtatatgtcttctagccccttcttcgatctggtggtagtcgtgctcctcgtctgcgccgtcgtcgccgcagccgttctcctccccctcgtctgcgcccgccgatctatgcaccagaggcttcacgggctggaacaagtacacgtcgatgctcagggacgggt

SEQ ID NO: 27502 - DNA, 432 bp, Oryza sativa
  Clone ID: uC-osflM202014b11b1
tctatccgattcaactcggaccaccagattgcttccttccttccttgcagaatctttcattgttcttgttgggaggaaggagacgaggcgcgcgaggcggcgagagggaggaggcattctagcatatacagatacagagccaggggaggtatggaggagggccttgcacgagcacgacgatgccaatagaagctgtggcggtcgcttctttaccgatggcgtcgcgcagcgccgccctgtgcttctcctccgccgccgctgcccggagccggagcaggagccggcacggcaggatggccgtcagctgcgacgccggggcctcagatctgctctattcctctctggctgccaagctgcttggccctcccaccagcttcgatgcccgcaagctgacggtagagttcgcccacagccacgggaacagcagctccg

SEQ ID NO: 27503 - DNA, 468 bp, Oryza sativa
  Clone ID: uC-osflM202014c05b1
ttgtcgccgccgccgccgctctccatcccgcgagaagctcgtcgccggcgtcccgctgcatccatcctctccggcgatggcgattactttgtccaatgtcaactctgaggcaggcctccagaagcttgatgagtacctccttactcgcagctacatcagtgggtaccaggcttcaaaggatgacatgactgttttcacctcacttccttctgctcccgcagcaagctatgtcaatgtcacaaggtggtatgatcacatcagtgctctcctaagatccagtggagttaccgcagagggtgaaggtgtgaaggttgagtcaactgcttgttctgtgtctccaactgctgaccaaaaggcaccagcagctgatgaagaagatgatgacgatgttgatctgtttggtgaggagactgaagaggagaagaaagcagcagaagaacgggccgcagctgtcaaggcttctggaaa

SEQ ID NO: 27504 - DNA, 494 bp, Oryza sativa
  Clone ID: uC-osflM202014c06b1
ttgtcatcttccatataattcagtatcttgccttgctgccttttcaatggcaaaatttattccatgtccatgaattttaaggtttttgcattgtcttaaattacaaatgatgcatatgtttagtttcccatgaaaatgttgttcattcatggattaacaatatggaacatggtgtgcatgatcatcaatgttaactatgaatgaagttagaataaatgatttgactctgcaatggatagcttttgaggatttgtgagatatattcacgttgacataaaaagatagtttagtctcggtggcttgatagttcttcatagttcgtctagaagcagaacttacctttgtgtatgaagtgtgggttggactttagtacttgatcggtaaaccttggtgctgcacatgatcaatgaacaatactgtggtactagtttcatctttagtcggtagtctttgagttttggtactgttactgttgatgagatctgatatgtttc

SEQ ID NO: 27505 - DNA, 222 bp, Oryza sativa
  Clone ID: uC-osflM202014c07b1
atctcttgtgctgaaaagcttgatggtttaatggttgttttttgtgagcacctcaagtcatgtcaaactcctgggggtactaatttcattacagtgttgcttctcagcttgattagcaaaaggagttcaatttgaggaagggcaaataattacattatgatttgtttcttctgtgtttcctgtcattattgtatggccttatggctatctattcgtataatg

SEQ ID NO: 27506 - DNA, 494 bp, Oryza sativa
  Clone ID: uC-osflM202014c09b1
ttttggaaatttctgcaagcacatctgatggaaagccttcaaagagagcctctgccaactatggtgctcatgagaggcaagtgtgggttcaaaaatcaagctcggcgacgtgatcttgtccaatgatgatactcatcaaaacaaatattgcaagttgtggagttctggattttgcagcttgatcctgtgaagtactgttaacaaaatgcccccgatcatatgcttccatgaagtgcaatctcagatttgtcaatcgaaatctcagctttagctgaaaagggagcttatatgatttgattcacagcaatagtgaattaacataacccactttaggtagctcttgattgctttgggtgagacttgatttgggcccaaggttgctattctggagcaatggaaggatttaggttggcatcattacccttgtgacagtggtcacatatttctgagacccctggagaatatacacgaccttaactaatcagagatgggtg

SEQ ID NO: 27507 - DNA, 429 bp, Oryza sativa
  Clone ID: uC-osflM202014c10b1
tgttttggcgagcccgcagtgctgcgcgaacccaccgacgctgaacccggccggcggggaggggaaggtggtggagagcttcggcgggatcaaggcgtacgtcgccggcgccgcggagtccaaggccgccgtcgtcctcatctccgatgtcttcgggtttgaagcgccgaacctgaggtacagatctttgtgttatctgatagtactagtttttcgattccacctgtacaggatatgccactgttctgatatattttgggggaaatggattatcgattcccacctatacaggatatgccactgttcctatatagtttgggaaatgaattattcattattgcgtttgttagaaacttcgaaggtcttccgggcactttggggctgactgatgccataccgtgtgctgggatttttacatggttaataagt

SEQ ID NO: 27508 - DNA, 494 bp, Oryza sativa
  Clone ID: uC-osflM202014c12b1
ttttctcctctctcgttttctcgatctctccacaactcccccccccccctccagctctctccaaagtccaagtctctctcggtgctcacgccgccgccggccaccgccgccccccgtccgtacaccgcgtggcccgcccccgcgcaggtgagggagctagcggccttcgtctgccggcgccggaggcggagccagattgttgggaaacgagttttccgcccgcttctctggtttctcggcggtgtcttttactcctggggcggcgatcccgacgcggggatgcggcgggctgtggcgtgatgtgtggatcggagcatggacttgatcgcgtcgcacggtaggagctgcagcggtcggggtgggagcaggggtcgcgcgggggggtgcggccatgacgatttacatagcgcgggaggcttccaaggtatggaggaaggtgaccacggaaacgccggtggagctctcgctgctgcgcgagaagtggggattgctcc

SEQ ID NO: 27509 - DNA, 410 bp, Oryza sativa
  Clone ID: uC-osflM202014d01b1
aatcggccacctcatcgtagacccaatcggcggcgccgatggcgcctccgactactccctcccgcgccgccgccctccggttgtcttcctcgcggttgcggcttggcggctacatggggaagaagcgcggtggcacatggccatgggctcgcaggcgccgcccagggccgggaaccaggccgtgtcgctccgagaggagagctccgggaagacgcgcgccgactagtacttcatgcagagggagcgcaccctcgcacgtgacgcggcgtgggcgggcggggaggccagggctgggccccctcggcgccctggtggggcgacgcctgattggccctcccaaggtggccgtaattgcttacacgggagggttccttcaatggctctacttccaagattcctggaccacaggc

SEQ ID NO: 27510 - DNA, 493 bp, Oryza sativa
  Clone ID: uC-osflM202014d07b1
tgcccacagcgacccagacccactcgccgtcgccgccgccgcctccgcctactccctcccgcgccgccgccctccggttgtcttcctcgcggttgcggcttggcggctacatggggaagaagcgcggtggccatggccatgccccggcggcgccgcccagggccgggaaccaggccgtgtcgctccgcgaggagagctccgggaagacgcgcgccgacgcggcctccctgctgagggtccagcacctgcagcggctggcggcgtgggcgggcggggaggccagggtgggccccctcggcgccctgctggggcgacgcctcgccgccaacgccgaggcggccgggatacctctggccgcctccaccttcctatgccagaggtgtgaaacagtcttacagccaggcttcaactgcaccatccgcataaagaacaacacaagaaatgccaagcgacgcaagatgttaaacacttgccagaacagcatttcctacct

SEQ ID NO: 27511 - DNA, 431 bp, Oryza sativa
  Clone ID: uC-osflM202014d10b1
tctcttagaaaatgtcatttgctagggaacaggcctcttctgaaaattatctttcaaggaatgaagctgaagctgcatttgttaaacagcatggaacatcaaatgtgcaaggtgataatactgtcaggacagagcaaaatggaggtgaaaattctcaatcaggatacagccaacaggatgataatgttggatttcaaacagcgacaaccagtaatctttattcttcaaacttatgccaaaaccagaaagcaaattctgaagtactacacggagtttcttccaacttgatagagaattctaaagatgacaaaaagacttcccccaaagttccagtcgatggatcaaaagcaaagaggccaagagttggggctggtaaaaagaaaacatatgattgggatatgttgagaaaagaagttctttacagtcatggt

SEQ ID NO: 27512 - DNA, 339 bp, Oryza sativa
  Clone ID: uC-osflM202014e01b1
tttttcgacgccggcgatactggacctgccgggggcgctgatgctgcacatcctgagcttcctgacggacgtgaggtctcggcacagggtggcgctggcgtgcgggaggatgcgggcggtggaccggccaacaaggcccgagctctcggtgtggggcgacccgaggacgacgggggtactgttactcgcgcacgcgtttcgcttcccggcgctggaacacctcgacctctcgctcgtatagccgtgggggcatccgttaatcttctccgtgccgccctgcggcggcggcggtggcggcgcgccctcggtgtcgtcgtcgtcggggatgaacgtgtacca

SEQ ID NO: 27513 - DNA, 497 bp, Oryza sativa
  Clone ID: uC-osflM202014e06b1
tgttcgcctccggctcctccgaaccgtcgccggcctctccccgttctcgtcctccgcgccgccgcggcacagcccccgcatcctccgcgctatccctgtcggtgcgcctcacccgccgcgcgtctccgcagccgtctcgccgctggtccgtccggtcgccgccgggttcgcgctgttcagcatggccaccgccgcctcctccgccgcatccgtccacgacttcaccgtcaaggatgcaagtggcaaagatgtggacctgagcaccttcaaggggaaagtcctccttatcgtcaatgttgcatctcagtgtggcttgaccaattccaactacacggagctgagccagttgtatgagaagtacaaggaccagggctttgagatccttgctttcccatgcaaccagtttggtggacaggaacctggcactaatgaggagattgtccaatttgcttgcacccgcttcaggccgagtatccaatttttgatcaggttgatgt

SEQ ID NO: 27514 - DNA, 495 bp, Oryza sativa
  Clone ID: uC-osflM202014e09b1
ttggctagctcatcgtcgataccaatggcgactaccagggccacatcgacgctgctgctgctgctgctgctggtttcggcaacatgggcggcatcggcgccgacgacgagtcgggcgaggaacgtgataacacacgtgaaggggttccaagggaggctgccgttccacctggagacggggtatgtggaggtggacaacaccgataccgttgagctcttctactacttcatccagtcggagcgcagccccgccgatgaccccctcatcctctggatcaccggcggccccggctgctccgccctctccggcctcctcttcgagattggccctctcaagtttgacgtagctgggtacacggaagggttccctcaattgttctacttccaagattcctggaccaaggtgagcaacgtgatatttctggacgcgccggtggggacggggttctcctacgcccgtgaggaacaagggtacaacgtaaccctcacacagacg

SEQ ID NO: 27515 - DNA, 453 bp, Oryza sativa
  Clone ID: uC-osflM202014f06b1
tctttttttgagacctccacgagcccctcaggctgggcgtgtgcgcgcccatcccggggagggacattcttatgccgttccaggacaagtccagggcgtgctacgggtggatggtgcaccacggcgcgcgctaccgagacgccgacgccattctcgtcaactcgctcgacgccgtcgagcccgacgcctgcagggtgctccgacacccgaagcccggcgtcccgccggtgttccccatcggcccgctgatacagacacactgcgccggccacgacgacgccgcggcgcctccctcgccgtgcgccgtgtgcctcgactggctcgaccggcactcggacagggtcggtcattttcgttctccttcggcttcggaggtgcgctgcctatggtgcacatgcgccagcttgtgctcgggctggagctcagcgggcagcgattcctgtggatggtgcg

SEQ ID NO: 27516 - DNA, 57 bp, Oryza sativa
  Clone ID: uC-osflM202014g01b1
tttgggtccccccacccttcttaaaaaagtccaaccaccccaacttatgggggggtt

SEQ ID NO: 27517 - DNA, 302 bp, Oryza sativa
  Clone ID: uC-osflM202014g02b1
ttttattgcgtgcgatcacattcttttgaaatggatccttctcaggttgagaatgtgaagcagcgtggcttgccacatgcactgatcttgcccatgctgcaggagtacgattttagaaacgacacagtgaacccagatatggagatggaattaaagtcccttgctcgcccaaggccatatcaagaaaagagcctcagcaagatgtttgggaatggcagaacaaggtcaggcatgattgagttaacttgtggtgctggaaagttcttggttggtgtatatgctgcatgtacaatcaagaagag

SEQ ID NO: 27518 - DNA, 486 bp, Oryza sativa
  Clone ID: uC-osflM202014g06b1
ttctagttccaagaaaattccagttatggaatgggaagtctcgaaagttttggaggagcttgaactcactatggaccaattcattgacttgtgcatcctatctggatgtgactattgtgatagcattaaaggtattggaggtcaaacagctctgaaacttattcgtcaacatgggtccatagaaagcattctggaaaacataaataaagacagatatcagattcctgaggactggccttatcaagaagctcgacgcttgttcaaggaacccaatgttacattggatattcctgagctgaaatggaatgctcccgatgaggaaggtcttgtagagtttctggtgaaagaaaatggtttcaaccaagatagagtgacaaaggccatagagaagattaaatttgccaagaacaaatctttccaaggaaggctcgaatccttcttcaagccagttgttagcacatcagcgcctctgaaaagaaaggacac

SEQ ID NO: 27519 - DNA, 278 bp, Oryza sativa
  Clone ID: uC-osflM202014g09b1
ttttcttcttctccctccaataattctctcccctctcctcctcttcaccaccaccaccaccaccagcagcagcagagagcaccatctccatccaataatccccatgcttgcgcaccactcccggccacatcccgcgcgaggaggaggaggaggaggagggtgtgcttgatccgcgctcccgcctggttggtggtggtggggtgagggggggaggtatggtaggggaggctcttgtttgacatacaaccattgttgaggtatactttcgttgtgcctct

SEQ ID NO: 27520 - DNA, 323 bp, Oryza sativa
  Clone ID: uC-osflM202014g12b1
atgatttcttgcctgatcagctcctccgggagctctatgatttggctccgttcttgcacaaatcatgaatgaaatcagaaaattgaagcgcgggatcagcaccaaacgaggggatcaccctgtacaaaatggacaaagttcataccatgactgtgaggatccgcaaagggtcggtccagtggctggggatgaaccaggaagagtacgtggagaagaaggcgctgcaacaccatggccaccgcggaggagctcggcgggaagaagctggacgcgaacctgacggcggcggaggagggcaaggtgacctggggtgatcgaccccc

SEQ ID NO: 27521 - DNA, 288 bp, Oryza sativa
  Clone ID: uC-osflM202014h01b1
cgagaaaggcgttctcgtactggggtgggtccgagccgccgggcttttcctcctcctctcccctctctcccttctccggcggcgtcgcaagaataacccaaatccggcgccatgagggagtgcatctcgatccacaatggccaggccggtatccagggcgggaacgcgtgctgggagctctactgccccgagcatggcatccaggctgatggtcagatgcccagtgacaggactgttggtggaggtgatgatgctttgaacaccttcttcagtgagactggtgctggg

SEQ ID NO: 27522 - DNA, 496 bp, Oryza sativa
  Clone ID: uC-osflM202014h04b1
ttttattgcaagcaatttctccatcacagaagtcaccaatgggctccgccaagctcattgctgtagtcctcctcccggcccttctggccttccaagctccaatggccacggcagtaaactccaacctcttccgggactacatcggcgccatcttcaacggcgtgaagttcaccgacgtgccaatcaatccgaaagtccggttcgacttcatcctcgccttcatcatcgactacaccaccgagacgaacccgccgaccccgaccaacggcaagttcaacatcttctggcagaacacggtgctcaccccgtcggccgtcgcgtcgatcaagcagagcaaccccaacgtgagggtggccgtcagcatgggcggcgccaccgtgaacgaccgcccggtcttcttcaacatcacctccgtcgactcgtgggtaaacaacgctgtcgagtccctcaccggcatcatccaggacaacaacctggacggcatcgacatcgacta

SEQ ID NO: 27523 - DNA, 496 bp, Oryza sativa
  Clone ID: uC-osflM202014h05b1
ttctgtgacctagctagtcgatcggtcatgtggtcgcagcaatggcttggtgacggcacggcgcggaggtggagggagctccatggtgagagcgactgggacggcctcctggacccgttcgacctcgacctccgccgcaccgtcatccgctacggcgagatggcgcaggcgacgtacgacgccttcaaccacgagaagctctcgccgcacgcgggcctctcgaggttcgccgcgcgccgcttcttcgagcgggcgcagctgccgggccactccgcggtgtaccgcgtcgccaggttcgtgtacgcgacgtcgtgcgtcgccgtgccggagccgctcatcctccggtccgcgttgcgcgcgcgcaggtgcagggagagcaactggatcgggtacgtcgcggtggccaccgaccaaaggaaggctgcgctcgggcgccgcgacattcgtcgtcgcgtggcgcggcacggtgcaatcgcttgagtggaatcaaggacat

SEQ ID NO: 27524 - DNA, 219 bp, Oryza sativa
  Clone ID: uC-osflM202014h07b1
tgttcagagaaaggcgtcttcgtactcgcctgtgtccgcgcctccgcgcttttactcctcctctgccctctcttcctttttcgccggcgtcgcaagaatcaacccaaatccgccgccatgagggagtgcatctcgatccacaacggccaggccggtatccaggtcgggaacgcgtgctgggagctctactgccccgagcatgggatccaagctggaggt

SEQ ID NO: 27525 - DNA, 319 bp, Oryza sativa
  Clone ID: uC-osflM202014h08b1
ttttagttggacatatgcgagataccaaaacaaaaggtatatgggtctggggtactcccattgagttagatgtgaatggctccaaagtttctgtcctttacctggacactgagggatttgagagcatcggaaaatcaaatgtatatgatgataggatatttgctctggccactggtttaagttctattcttaattaccatctttccaagaccatttggggagcttatttatctagacttttatttggtggtggaaatggtgaagaaattttatgaaaaagggaagggccagaatgttgttttggagccaccaaacctcc

SEQ ID NO: 27526 - DNA, 527 bp, Oryza sativa
  Clone ID: uC-osflM202016a03b1
aattgaagcttggtcacagattattgaatgcaggcgggtactcaaatggacatatgcttatggctattatctggacgacaaggtcaagagcgaatttttcgagtacctgcaaggtgaagctgagtctggtctggagcgtcttcaccaatgtgctgagaaagacctgcaatcatttttgactgtgagatctgataatactgaacctgcaccatcaattgctgaattcggtgacttccgggtgaagcttgcggggctgacaagtgtgactcggaattattttgagaaccttgttcaagcactggaggctggcttggaggatgtacactctactgcccagggtaccacatcaagcaatgccaccaacatcccctccaagaaagcagtcactaaaggcaaaacaaagaagcagcttcctagaacatcttcggacaactcagatgaaggctggccttgtgagcgctgcacgtttattaacccttcatcggtggatgcatgcagcgtctgcgataagcatagatactagatga

SEQ ID NO: 27527 - DNA, 522 bp, Oryza sativa
  Clone ID: uC-osflM202016a05b1
ctttgtactcgcctctctccgcgccctcctccgccgccgctcgccgtcgttcgtctccgccgccaccgccgccgccatgagggagtgcatctcgatccacatcgggcaggccggtatccaggtcgggaacgcgtgctgggagctctattgcctcgagcatggcatccagcctgatggacagatgcccggcgacaagaccgttgggggaggtgatgatgcttttaacaccttcttcagtgagactggtgctgggaagcatgtcccccgtgctgtcttcgtcgatcttgagcctaccgtgattgatgaggtgaggactggtgactaccgccagctcttccaccctgagcagttcatgaggggctaggaggatgcagccaacaactctgcccgtggtcactacaccattggcaaggagattgttgatctgtgccttgaccgcatcaggaagcttgacgacatctgtactggtctacagggcttccttgtgttcaacgctgttggaggaggaacgggctccggtct

SEQ ID NO: 27528 - DNA, 522 bp, Oryza sativa
  Clone ID: uC-osflM202016a09b1
acgtcctccccagtggcggcgagcgcccccccccccccacccccacccccgaggaagaagaagaggaggaggaaggttttgcgcgccgttcgcggattcctctccgtcctcacgccccggattcggttcgtcccgcggtcccgattagactgaagaatgaggatggacaggaatgaggaagagatggtcacgaatgactcggaccctcttctcaagagggaaaacgaggaggcagagtcatcgtcgcagctgacaccgcctaagccagcaaccttgagcgcgctggagattgaggatgaggagaccgacggttcttctgcagggtgctgccgcatttgtctcgagactgattctgagttaggtgatgaactgatatcaccttgcatgtgcaagggaactcaacaatttgttcaccgctcatgccttgaccactggagatctgttaaggaaggatttgcattttcacattgcacaacatgcaaagctcaattccatctccgagtggaaacttgcgaggacaat

SEQ ID NO: 27529 - DNA, 534 bp, Oryza sativa
  Clone ID: uC-osflM202016a11b1
gttgcatactgcagcaactaataaacgatggatcgtcccaacctcgccgtggccgtggtggggctactggcggtggtggcggcgacgctgccggcgccgtcatggcagttcttcgacctattcctccccgccggccccagccaccgctcctccggcggagggtttggcaagtgggtgctgatgaaccacgaggagtacgtcgagaagaagtcgctgtacgccatgaaggccgccggcgacatcggcgggaagaccatcgacgcgagcctctcggcggcggaggaggccaaggtgacgtgggtggttgaccccaaggggacgccgggcgacaccaccttcaccaccatcgcggcggcgctcgagaaggtccccgaggggaacaccaagcgcgtcatcctcgacctcaagcccggcgccgagttccgggagaagctcctcctcaacatcactaagccctacatcaccttcaagtccgaccccgccaacccggcggtgatcgcctggaacgacattgctgccaccaggggcaaggac

SEQ ID NO: 27530 - DNA, 490 bp, Oryza sativa
  Clone ID: uC-osflM202016b04b1
gagttctcgaggtaaaccaaagttctttttccgatggctcgtactaagcaaactgctcgcaagtcaactggaggaaaggctcccaggaagcaacttgccaccaaggctgctcgtaagtctgctcccacaactggaggagtgaagaagcctcaccgttaccgccctggaactgttgctcttcgtgaaatccgcaagtaccagaagagcactgagctgctcataaggaagcttccattccagaggcttgttagggagattgcccaggattttaagactgatcttcgtttccagagccatgcggtgcttgcccttcaggaagctgccgaggcgtacctggtgggtctcttcgaggacaccaacctgtgcgccatccatgccaagcgtgtgaccatcatgcccaaggacattcagctggctaggaggatccgcggtgagagggcttaagctttctcatctctgggaggggctctgggtgttcatctgtgactac

SEQ ID NO: 27531 - DNA, 409 bp, Oryza sativa
  unsure (1)..(409): unsure at all n locations
  Clone ID: uC-osflM202016b05b1
ggctcagcttgacatcgtcggagcagcagaaaagtttgctcgatcgagctagctaactaggtcgtcggatcagtgataaatcgttcgccgatggatccgtggattagcacccagccttcgctgagcctggacctccgcgtcgggctgccggcgacggcggccgtcgccatggttaagcccaaggtgctcgtcgaggaggacttctttcaccagcagcctctcaagaaagacccagaggttgcggcgctggaggcggagctgaagcggatgggcgcggagaaccggcagctgagcgagatgctggcggcggtggcggccaagtacgaggcgctgcagagccagttcagcgacatggtcaccgccagcgccacagcgggggnngaattaaagatcagctatcacctcacct

SEQ ID NO: 27532 - DNA, 282 bp, Oryza sativa
  Clone ID: uC-osflM202016b08b1
cgccgccgtcgcgcgcaatggcggccccggcgctcctctccgccccgcccccgccccctccgatggacgaggacgccagcgcgggcgcgcaccacgcgttcccgggccccgcccctccgccgtccccggagggagcccctccgccgccgcggcggaggcggccggctgtccgcgtcacctcggagttcgacagcgacgcccggctcttctcccaccgcctctcctgccgcgtcatggacggcctcgccaagctccgggtccgggtccaccacggggtcggcg

SEQ ID NO: 27533 - DNA, 529 bp, Oryza sativa
  unsure (1)..(529): unsure at all n locations
  Clone ID: uC-osflM202016b10b1
gattgtttgaagttggcttgcattgctgtatttgattcttgaggctgattgtgtgctatttcaaatcataaacaggcatacacaaacctagatggggagaaatcacatatagtcaatactgcatgggcaatgttggcactcatgaaagctggacaggtattacttctctcagtaagaatttgaaatggtcaaattgcaaagaacggcaatagtaatgtgcagtcaatgtatgtttagcccagaataattcaaccaattgtgtagcttaaagactcatattatattggagtataattcaatgcatttaagtatttaaccaacttttcttctgagttcaggtagagagagaccccgctcctctgcacaaagcagcaagacttatcatgagcatgcagctcagtgatggtgactttccacangaggtgactgctacatgacatttgtattatacaatttgatgttaactcttgactttccatcgtataagaaatttaagcataatggaacaantattaaagagatctgagtg

SEQ ID NO: 27534 - DNA, 525 bp, Oryza sativa
  Clone ID: uC-osflM202016b11b1
tttctggattgcgtgcagatgtggtccgatttgtgcaaagttgtgacatctgtcagcgcgccaaatcagaacatgttcagtatccggggtttttacaaccattgccagtccctgatcagtattggcaagtggtttctttggatttcatcgaaggccttcctcgttccgcgtcattcaattgcatcttagttgtggttgacaagttctctaagtattcacactttgtggccttggcacatcctttcacagctcttgaggtggctgaatcttatgtgcaaaatatacatcgactgcatggtttacctcaagttatcatctctgatcgggatcgcattttcactagcacattgtggacaactctttttcgattggcaggttcccaattaaagatgagttatcaccttcagacggatggacaaaccgagcgagtcaatcagtgtttggagacgtttttgcgttgctttgtgcatgcttgcccttccaaatgcagccgctggctggccctcgctgagtactggtataata

SEQ ID NO: 27535 - DNA, 530 bp, Oryza sativa
  unsure (1)..(530): unsure at all n locations
  Clone ID: uC-osflM202016b12b1
ttttcacggacaagcaagtgaccccacaggtcagccatgatggccaagttctggaattcgctcctcctcgaagactgaaaacagaggagatcccaaacatcgtcgacgactttcgtattgctgccagaaatgccatcgaggccggtttcgacggggttgagatccacggcgccaatggttacctgatcgaccagttcatgaaggacagcgtcaacgaccggaccgacgcgtacggcggcggcatagagaaccggtgccgcttcgccgcggaggtgatcacggcggtggccggcgagatcggcgcgcaccgcctgggggtgcgcctctccccgttcgccgactacatggactgccacgactccgacccggaggtcctcgcgctgcgcgtgatcggtctcatgaacaacctcggcgttctctactgccacatgatcgagccgagaatgtgcgtcggcgccggcgaggacggcaacaagccggtgatcgcgcacgggcgnctgcttacgttcaggagggcgttccgggcacgt

SEQ ID NO: 27536 - DNA, 506 bp, Oryza sativa
  Clone ID: uC-osflM202016c02b1
ctcttttcggcaggagtggaggccctcaccgggggacttccatttcctgctcctcgtgttctcccacctccaatctcaggatggagcgcgcacgccgcctcgccaaccgcgccctgctgcgccgcctcctcgcggcggcggcgtccaccacgtccccggccccgtcccgcggcatctcgaccctggccaaggcgcccggggcggggtcgcgcccgcgcgccccgcgcccggcgccccaccagtacaccacggggcggcccgtgtcggcgtcggcgctgcagccgagcgacacgttcccgcggaggcacaactcggccacgccggcggagcaggcggcgatggcgtcggagtgcgggttcaacaccctcgacgcgctcatcgacgccaccgtcccggccgccatccgcgcgccgacgatgcactttttcgggaagttcgacgccgggtttaccgagtcccagatgattgaccacatgcagcgcctggcggccatgaacaaagcctac

SEQ ID NO: 27537 - DNA, 522 bp, Oryza sativa
  Clone ID: uC-osflM202016c03b1
caattgcaaagttagttctgccacagcttatgcaatgtctccatcttcattgaaagaggctgatgaggagtcatcagctgatcttggcctgaattttgagctttgccttggcaatgatatggtacattgtcaaaagaaatcccctgttggtgctgagaattcaccattgacaaactctcataaattggatcttcagctgagtttgtctactggatcacctgaatcagctgtcaccaacacaaatatggtgtcaccgattattcacggtggcttggagatacctgttaccaactgttcaccagctattataggggaaggatctgtaccctgtacttgggttttcgagaagtcagtgatttcatcttcgtatgcctctgaagcaacatataccttcccattttcgaaggtacccaaaacaggggatgctgctatgtcttctccagtcatatcgtcaaccttggtaacaagtatgaaaagcccagttgcctgtacttctgggtcaattaatccccaacaacgcaa

SEQ ID NO: 27538 - DNA, 527 bp, Oryza sativa
  unsure (1)..(527): unsure at all n locations
  Clone ID: uC-osflM202016c06b1
gtttcagcaaatctcctcctccgtctgcggccagaattgcaagagctacctggcgaactcgctgttcgtgttcggggagttcggcggcaacgactacaatgcgatgctgttcggagggtacagcgcggaccaggcgagcacgtacacgtcgcagatcgtggacaccatctccaacggcgtcgagaagctcatcgccatgggcgccgtcgacgtcgtcgtccccggcgtgctccccatcggctgcttccccatctacctcaccatctacggcacctcctgcagctccgactacgacagcctcggctgcctgaagaagttcaacgacctctccaccaaccacaacaatcagctcaagaccaagatctccgcgctccaatccaagtacaagtccgcccgcatcatgtacgccgacttctactccggcgtctacgacatggtccgcaaccccggcaactacggatttagcacggtgttcgagacgtgctgcgggtcaangcgcggcaagttcaactacaacaacaacgcga

SEQ ID NO: 27539 - DNA, 501 bp, Oryza sativa
  unsure (1)..(501): unsure at all n locations
  Clone ID: uC-osflM202016c11b1
tttctgccttcttattttcttttttgttgtgctttcttttgttacattatttgtttatatgtgtcagcatacattgctagggttttctgactgtcggcaataaacacaattttcgcttgcactaacaagtaccttatattttactaatgagttgagtagttcaaatccttagctatattttgtaggtctaccaaggaaatacctatctcatttatattgttagatgcgactcttgtcatcaacaaaacttgaaagcatggattacttaacactggagactactaaatgatactacaatacaacatgacagtaattctttcttgaataatcatgttttgtcttgtgccacatttgtttgcatgcccttgtccgtcagtcacacaatatcgttgatctttaaactaaatcttgcttgaatggcattagggggaggcaagtgacagtgggagcatacaacagatttnggaaaagtggtcaaccgatggcacagaaaagcaagta

SEQ ID NO: 27540 - DNA, 517 bp, Oryza sativa
  Clone ID: uC-osflM202016d07b1
ctttaatccattcattccaccctcttccgatccccaaccgccgctggtccgtatccattccactctcctccgacccctaccgctgccggagtgctagggcatcacacgatgagtgttgcaactgaagcatgcccttcaccaaagctacacacaagactaaggctgtgggagtttgcagaccgttacgtatttgaaccagttgacggtcttgctgatttgttcctgtcagttgatcggacaaatggatcaatgagtctagtggaagagttgccacctcgtggtccctctacaaatcctaaagttagaatagtttttggtgtgattggagtgctcaaacttgcagttcggtcgtactttcttgtgatcactggccgtgattgtgttggatcctacttggggcatgcaattttcaaattgacgggactaaaagttctgccatgcaataactcgttaaatacttcttctgctgagcagaagaaaatggaatcagaattttcggaacttctggatgcagcag

SEQ ID NO: 27541 - DNA, 465 bp, Oryza sativa
  Clone ID: uC-osflM202016d09b1
gcttcagttgcagcaactagtaactaataaagtgatgacgatggatcgtcccaacgtcgccgtggccgcggtggggctgctagtggcggcggtggcggcgacgctgccggcgccgtcgtgggggcagcagcagccagccaacaagctcatcaccagcacctccggctccggcaaagggttgtccaagtggctggcgatgaaccaggaggagtacgtggagaagaaggcgctgcacaccatggccaccgcggaggagctcggcgggaagaagctggacgcgaacctgacggcggcggaggaggccaaggtgacgtgggtgatcgaccccaaggggacgccgggcgacaccaccttcaccaccatcacggcggcgctggagaaggtccccgaggggaacaagaagcgcgtcatcctcgacctcaagcccggcgccgagttccgggagaagatcttcctcacctcagc

SEQ ID NO: 27542 - DNA, 505 bp, Oryza sativa
  Clone ID: uC-osflM202016d12b1
tttttcccttgaggaagcccggaaccaatgggagcgtcatggaatcaaggttgttgttgaaggagggcttgaagatgatgcatcagctggagtcacatgggccaatgctggcaaagaacatcaagttgacgaagcaattaaccgagctgggtctttgctggagaagctgaagtcaatgtctgctgagataaaagtccggtcttgccattccctggagagagtaatacagcatgtgaggtctttcatctcaattctaaagcagggagcagaagaagcaacgcagcgatttacagatctaggggctgctgcagctttgaaggcaaagaagttgtcatccgaagcacaggacaatgtctacgtgtttggttcaaccattggggataagtcgaagagggtggtggaggactgcaaagagggcctggagaagtttgtacacagattcaagacagactagccagtaactattagtgtctacaccaacagttgatagttcctgtcaaacttg

SEQ ID NO: 27543 - DNA, 512 bp, Oryza sativa
  Clone ID: uC-osflM202016e04b1
tgcttgcaaagctggtcgtgtcactcctcccgttaagcttcccgcggcggcgagagcaagctaagctaggtcgggcatggggaaggacgaggtgatggagagcggcggcgccgccggcgagttcgcggccaaggactacacggacccgccgccggcgccgctgatcgacgcggcggagctggggtcgtggtcgctgtaccgcgccgtcatcgccgagttcatcgccacgctgctgttcctgtacatcaccgtggccacggtgatcgggtacaagcaccagacggacgcgtcggcctccggcgccgacgcggcgtgcggcggcgtgggcgtgctcggcatcgcgtgggcgttcggcggcatgatcttcatcctggtctactgcaccgccggcatctccggcgggcacatcaacccggcggtgacgttcgggctcttcctgccgcgcaaggtgttcctggtccgcgccatcctctacatcgtggcgcagtgccttggcgccatctgcggcgtct

SEQ ID NO: 27544 - DNA, 524 bp, Oryza sativa
  Clone ID: uC-osflM202016e07b1
gagaaacatctagagtgaataagaaagatggggttcgtccgtgccctgttcctgctggcgatggtgtgcgtggcggcgcacgcgaaggactaccccaaggaggagggcgcgaaggcggaggggccggccgccgcctcggggggcggcggcggtagcacccacgacgtggtgaagctgggcggcaagggcgacggcaagacggacagcaccaaggcggtcaacgaggcgtggacggcggcgtgcgctggcaccggcaagcagacgatcgtcgtccccaagggcgacttcttgacgggtcccctcaacttcaccgggccatgcaagggcgacatcgtcatccagctcgacggaaacctgctcggctccaccgacctcgccttattcaagtcgaactggatcgagatcatgcgcctcgaaagcctcgaaatcagcggcaagggcaagctcgacggccagggcgccgccgtctggagcaagaactcctgcgccaagaaaacgactgcagatcctccccacactttggg

SEQ ID NO: 27545 - DNA, 432 bp, Oryza sativa
  Clone ID: uC-osflM202016e08b1
cgcttctacgctacacaccactactctcacaacaatggcgaggagcgtagccgtggtggtgttgctggcgatggcggcggtggcggcggcgcaggcgccgggtcccgctgcgacgccggcggcgggcgccacggggccgccgaacgtgacggcggtcctggagaagggagggcagtacacgacgttcatccggctgatgaaggagacgcagcaggacacgcagctgaacagccagctgaacaactccttcaacggcaacggctacaccgtgttcgcgcctaccgacaacgccttcaacaacctcaagccgggcaccctcaacagcctgacgcagcagcagcaggtggcgctcgtccagggccacgtcctcccgcagttctactccatggactccttccagacggccagcaaccccgtccgcacccaggcgtt

SEQ ID NO: 27546 - DNA, 483 bp, Oryza sativa
  Clone ID: uC-osflM202016e11b1
gtttgattcaagccgtgaccgtgggacacccttcaagtttaagttgggacaaggtacaattccttctccattctgccttcttactttttgatggcacatctcatagccaatgtgatcgcaacttgtgccaatcaccattttgtgcaaatttttgggcatggtttcagtcatctattcatatttctgtttacatgctactagttttgatgtttactaatcttttgatatgttattcttctcaaatagaaatgactgtattacagatacctctgagataagggctcttaatacctagttcgtttttcactgggaagtaaaaccgtgattgtttccagtcccggagcatgtttaatggccctgtggctgatatcacccagtgatgctcaactgtaacactgcactgatcactttagtctgtcaattgctggtgctattacaattttggggatcagctttttcttaggtagagaatgtaacagcagt

SEQ ID NO: 27547 - DNA, 495 bp, Oryza sativa
  Clone ID: uC-osflM202016f05b1
ctcatctcacctcacctcccgataaggcacgaggagactatctcctccccctcctcctcctctccccgccgacgaccccgccgagctacatctccgccgtgctgatcgcgtggagccgaggagaggagcggcggccaacgctacgaggagaggagagtgggggaggggaggggagcgagccttatcttacccgctccgccgaagcctatggactcggagcactggatctcgcgcctggccgccgacaagcggttctacgccgcgcagctcggccacgccgatcgagcggtgatggaggaggtggacatggacgaggaggtgaggccggagttcgcgtgcccctactgctacgaggaccacgacgtcgtgttcctctgtgcgcacctggaggaggagcaccccttcgagcccaatgcggagccttggcctatatgttctgataagagtgcgaaagatctgcttaatcatatcactgtgcaacatggggaccttgtc

SEQ ID NO: 27548 - DNA, 524 bp, Oryza sativa
  Clone ID: uC-osflM202016f06b1
gcctttgcggaggcgagaggcggaacacgaggaggccaccagaaaattcctccctcccccagggaggcgaggcgaagcggagctctcctcccaaattccccaaccctccaccgcctccaccgccaccgccatgcgcatccgccgctacgccgcgcgcctcctcgcctcctccaccgccaccgccccctcctccctcccgccgccccccgccgcctccgcggcctggtgccacgccgccgcggacgattgcgccatctgcgacctcacccgctccgcctccccgcaggtggtggcgccggacgcaatcaagcagaaggggcacattgccggccgggcgctggaacccgagctcaggagcgatccgcgcgtcggactagccgaacgaactcctgttccggaagatcaagggcgcgatatagatgacggtcctcccgcgaaaagatctctcacgtttactgatgctgcggcgaggctagaaggttcgggaaatgttggtgctggagttgctactgaaccagcagcta

SEQ ID NO: 27549 - DNA, 502 bp, Oryza sativa
  unsure (1)..(502): unsure at all n locations
  Clone ID: uC-osflM202016f08b1
ggcgcacacagcagatcggcgaggtctgagcgcatcgtcctcaacaccgagtagaccggccggccgcggcggccatcatcgctcctaccatggccaaggagctcctcgccttccccggtgtcgccgtaccgtacgtgcagcagtttcttgacaagaacgatggcatactgaagtgatgccaaattgccaactgccaagttttcttgtgcttcttttccaggtgccttagctccgggagcacgatccattctcgatgctaggcagttagctttttctcccctttagctcctttttgctttgtcaggcaggggaggcagttttgctttgcctctataagagacagtgcgattattaggctgggcaagtgttaaaccgttgctgggatttgttggatctatcaaagttggtcgggtggtatctcttgggtgaaatagtactactgccaggnactactctaattcttaattattcagngaatagatgatatccttggtttcttttt

SEQ ID NO: 27550 - DNA, 453 bp, Oryza sativa
  Clone ID: uC-osflM202016f09b1
gtcttcgccgcagcggagcagcaacagcaggcgagcgacatgggagggtttgtcaagacccagaagacccatgcctacttcaagcgtttccaagtcaagttcaagagacggaggcagggcaagactgactacagggccaggattaggctcaccaaccaagataagaacaagtacaacacaccgaagtaccgctttgttgtgagatttacaaacaaagatatcacagctcaaattgtctatgctaccattgcgggtgatatcgtgatggctgctgcctactcccatgagctgcctcgttatggtcttgaagttggtctcaccaactatgcggcagcttactgcactggcttgcttctggctcgccgtgtgctcacgctccgtggtttggaccaggagtacgagggcaatgttgaggccactggggaggactactatgttgaaccagctgatgaa

SEQ ID NO: 27551 - DNA, 518 bp, Oryza sativa
  unsure (1)..(518): unsure at all n locations
  Clone ID: uC-osflM202016g03b1
gcattttgcctcctcctctccacccctcgtcggcggcatctcgtcgcccccgcctcgaagctaacagaagcttctcctcctctctcctcccctccccatggcgcggcggggccaccaccaccacctggcggaggtggccctcctcgcgtcggcctccgaggacctcgccgccgtgggcgccggcgagagggaggggtggctcgacgaccccgccgtgctcccctccctcgcgccgcgcgcgcgcgccctcgccgtcgccagcgcggcgaggtccgtgctcgcggttgtcccggtcgccggagtaggcggtggggtcacggtgaggcccgcgctggggcccgacgacggccggatctccgcggtggagtgggtcccgctcgtcggggaggacgccgaggaggctggtggggagggagtggncgncgccgtgggcaccgacgccgggtggcttctgttctactctctcgcaggcgatctactgcacaagcagagtatttatccttaaaagaactgaaact

SEQ ID NO: 27552 - DNA, 509 bp, Oryza sativa
  Clone ID: uC-osflM202016g05b1
tgcctatcttcctttcccacatcctcctccgccgccggctgcttcccaccggctcccgatctccgaggcaagcagcgccgcacccggccgctgccgccgccgccatggcgttcgagaagatcaaggtcgccaaccccatcgtcgagatggacggtgatgagatgaccaggatattctggcagtctatcaaggacaagcttatctttccatttttggatctggacattaagtactatgacttgggagttctccaccgtgatgcaactgatgacaaggtcaccgtggaggctgcagaggctactctcaagtacaatgtggctattaagtgtgcgacgattactccagatgaggctcgggttaaggagttcaacctaaagcaaatgtggaagagccccaatggcacaattaggaatattatcaatggcactgtattcagagagccaattatatgcaaaaatgtcccaaggcttgttccaggatggactaagcccatttgcattggaaggcat

SEQ ID NO: 27553 - DNA, 435 bp, Oryza sativa
  unsure (1)..(435): unsure at all n locations
  Clone ID: uC-osflM202016g06b1
ctcatcacttcaccacgtcgccttcgtcttcctcctccccaacacaaacaaacacaaaaaaaccttcgccgactctcgctcaactcacctcaccaccggaggcagcttagcttccttccttcctcctccatccatggcggaggagcagtccaaggcccaggcgggggcgaaggccctgtcggagccggtgcgggtcggggggtccgcggcggaggccacgctctccggcggggagctggcgtggcgccccacgggaggcggcgggggaggaggggaggcggnngaggttgagctggagtccgaggtgctcggggtccgggtggacgggagggcgctcagggtcgcgaccttcgcgaggggcgacgacgcggcggcggcggcggcgcggccggcgacgtgcgggggcggtgagaggaggagggagagggaaaggga

SEQ ID NO: 27554 - DNA, 521 bp, Oryza sativa
  Clone ID: uC-osflM202016g07b1
gttctcttttcacatactagtaacatcttcttaaaaaagggctgcgcggcggcctcactcaccccatcgcaaggatgaatactaccacatcgcgcgcttagatctaagccatggagaaggccatcgatctccagctcgtacttctctaacacctactcccctacttctactacgaccaatcgctcctctccgagttggcgtgcgtcgccgggtacagcgccgtctaccagaggacttccgcctacatggacgacgtcgtcttcgtcggtgcctacaggacacccatatgcaaggccaagcgaggaggtttcaaggatacatacccagaggaccttattactgttgatctaaaggctgttctggacaacactaagatcaaccctggtgaaattggtgacattgaaattggcacggagctaggtccaggctcgcagcgtgcaatcgagtgcagggctgcgagtttctatgctggagttcccgaaaacgtttccgttagaactgtcaaccggcaatgttccttt

SEQ ID NO: 27555 - DNA, 523 bp, Oryza sativa
  Clone ID: uC-osflM202016g10b1
ctcttctctgaccaccattggttcctgaaattgagtcatggctgccaagctagctcgcctccacagtctccgcgaacgcctcggtgccaccttctcgtctcatcccaatgagttgattgcactcttctctaggtatgttaaccagggaaagggaatgctccagcgtcaccagctgcttgcggagttcgatgccttgatcgaagctgacaaagagaaatatgctccctttgaagacattctccgggctgctcaggaagccattgtgctgccgccctgggttgcactggccatcaggccaaggcctggtgtctgggactacattcgggtgaatgtaagtgagttggcagtggaagagctgagtgtttctgagtacttggcattcaaggaacagcttgttgatggacacaccaacagcaactttgttcttgagcttgattttgagcccttcaatgcctccttcccgcgcccgtccatgtccaagtccatcggaaatggggtgcagttccttaaccgtcacctgtcg

SEQ ID NO: 27556 - DNA, 321 bp, Oryza sativa
  Clone ID: uC-osflM202016h01b1
gcctactgtgccctagccgccgccgccgccgcgcgccaccaccgccgcaaccatggccgccgcgctcacccgcccgccgccaggcacggtccagtgcttcgggcgcaagaagacggcggtggccgtctcctactgcaagccggggcgcgggctgatcaaggtgaacggcgtcccgatcgagctgatcaggccggagatgctccgcctcaaggcgttcgagcccatcctgctcgcggggaggtcacgcttcaaggacatcgacatgaggatccgcgtccgcggcggagggaagacgtcgcatatctacgcgatccgccaggc

SEQ ID NO: 27557 - DNA, 493 bp, Oryza sativa
  Clone ID: uC-osflM202016h03b1
ggcttttgctcgccgtgaccaggggcgcctactacgccgtcacgtttagcgcggcgcgcacctgcgcccaggcggagcagctcaacgtgtcggtgagccccgagtggggggtgctccccatgcagaccatctacggcagcaacgggtgggactcgtacgcgtgggcgttcaaggcgaagatggacgaggtggcgctcgtcatccacaacccgggcgtggaggaggacccggcgtgcggcccgctcatcgacggcgtcgccatcagggcgctgtacccgccgacgctggccaaggggaacatgctcaagaacggcgggttcgaggagggcccctacttcctccccaacgcgtcgtggggggtgctcgtcccgcccaacatcgaggacgaccactcgccgctcccggcgtggatgatcatgtcgtccaaggccgtcaagtacgtcgacgccgcgcacttcgccgtgccgcagggcgcccgcgccgtggagctggt

SEQ ID NO: 27558 - DNA, 478 bp, Oryza sativa
  Clone ID: uC-osflM202016h05b1
aagcttgcaagaagagacgagacgagggagagaaggagaagagggggccggccgcgggcgtcgacgtgttcctccccccctatctgtcctctcctctcctatcgatctccatccttccttccatccattcctccccgcacccttcgcattgctctcgtcgcctcgattcggtcgaggatctccaggaaaagaggaggaagcgatatgggttgcttttcatgctgcggagcggatgatgccggcccgaagaagaagcgcgacgatccttacgtcccgatccctgatccaggtggtaactatggacgtagcaagcccgggcccccagccccttcgcgttctccccccaccagcagaaatctgccaatggcagtaccggcaattcccctcgatgaaataaagggaataaccaagaacttcagcagcgatgctctcatcggagaaggctcgtacgccagagacttctttggtgagctgagag

SEQ ID NO: 27559 - DNA, 509 bp, Oryza sativa
  Clone ID: uC-osflM202016h06b1
cgtttcccaacccgtcaacgctgccgctgaatctcactttctctctctgttcttggtgcttccgccgccatggctgctcccagcgtcgccgtcgacaacctcaaccccaaggttttgaattgtgagtatgcagtgcgtggagagattgtgatccatgctcagcgcctgcagcaacagctacagactcaaccagggtctcttccttttgatgagatcctatactgcaacattgggaatccccagtctcttggtcagaagccagttacattcttcagggaggttattgctctttgtgatcatccatgcttgttggaaaaggaggaaaccaaatcattgttcagtgctgatgccatttctcgagcaacaacaattcttgcctcgattcctggaagagcaactggagcatacagccacagccagggcatcaaagggctgcgtgatgcaattgctgctggaattgcatcacgtgacggataccctgcaaatgcagacgacattttccttactga

SEQ ID NO: 27560 - DNA, 437 bp, Oryza sativa
  Clone ID: uC-osflM202031a02a1
cacagcttacaactgttgtattcagaaaaaaaaaacagtatttcacagcttacaagaaaccatcattttttttttcacggctaatatgagtagccaaagttactaataaacatcatcaatacaacatcaaatgacagcacctctgtactgcaaagcatcctcactctcatcaactatgccaaatctagagaagggttctgaggtgaggcgaaaaaagaaaaaaaaattaccggcccaggtgggatacacaaagtcctcctagatgagataaacaaagtaataacataggccataggctacatcatattcttcttcacttgagaaaaaggaaatccaggacttttccagggatgtatttgcgatggtgatacaaaatgaaacttaggagtggtcatgccatggacatggcctttatggttttttactttcttcactct

SEQ ID NO: 27561 - DNA, 188 bp, Oryza sativa
  Clone ID: uC-osflM202031a03a1
agtgttgaaattatctgattattttaatacggcgagacaatgaaaaaataaaacaaaaaaataacatgagaacagaaacctttaagacctacataaagtttataaagctgggtataaaaaagaaaacggcaaaaacatcaggctatattgatgggtctgaaaggatgcaacacagtgtacagcggcga

SEQ ID NO: 27562 - DNA, 166 bp, Oryza sativa
  Clone ID: uC-osflM202031a04a1
ataggattagagaaaaaacagaatacattgacgtgggacaatatttaaatttcaaaaatttaaaaacgacggtcaaaagttttgaattatttagggaagctaaatttaaaagcattgtttatataacggggaccacgatatcaatcttaggaaaaaattaaagttg

SEQ ID NO: 27563 - DNA, 370 bp, Oryza sativa
  Clone ID: uC-osflM202031a05a1
ctccatatcatactaataatgtttaagcaaataaattcattaacatgcaaatcaagccctgaagaagagctgaactgagcacagtgatccatgacagattaaaccaagacactcactctcaccgacggtgtgaaatttgcaggaacatgtacattactaaggaagagacttaattattttattggcacataaaagatgatggatgtatcgatgtatttcagaggagcctgttgaggtagtcatcgacggtggtgtactggacgtccgggaagagctgggtggccttaacggcggtggctggatccaacggcgtcgtcgtctcccccctttatgtaccctgcgtgcgccaacgacagcacgatgtttaacg

SEQ ID NO: 27564 - DNA, 320 bp, Oryza sativa
  Clone ID: uC-osflM202031a06a1
agatcaacacatagttatatataggatcaaaggatcttggtatacattagggcattacagccttttttttaaaactcattacaaacttaggatacaagctaaaagatcattggatccactggggatgtacaggggtagcatctcttattggtactaccatatagtattacaaccatgccatgagatgcacacaccagaaacacttgcattacactaccttatcagcttggccggttcacttcacaagactaaaggggttcattgggccagtgcccgccccgggtccatggagctggtatgtctggcttggtacaacctga

SEQ ID NO: 27565 - DNA, 474 bp, Oryza sativa
  Clone ID: uC-osflM202031a07a1
agacaaacatgccaagaatgcttgtattgcaaaaccgtacactttttcttcaatgatttaaagcctcatcatacaatccttggataattttatagcctcatgggacaaaatatcgaatcataacttgtttattgctacagagctaagtgtagaagtttaaagtaaaatgcaccactctgtcggaacgctatcaccttcaaacattgactcacttctttccacctccagacacgttaaatttaaagaagatgatatccccgtcctgtaccacgtaggtcttcccttcctgcctgtattttccagcagccttcacagcagattcactacctagttcttttagatcgtcgaacttcattacctcagcgcatatgaagcctttttcaaaatcagtgtgaattgtaccagcagcttgaggtgctttagtttgacgtttgatctgccaacactttaccttgttagggccagcagtgaaaa

SEQ ID NO: 27566 - DNA, 446 bp, Oryza sativa
  Clone ID: uC-osflM202031a08a1
gaaagtagtacgacaccaaaaatatctccacatctaaatttacagtgtcatcatgatctgctagactacaattctacaaaacgctctcctctcaccagtattgattttccgaaagtccacaattcgagaggcccatcataacagataaactcatttgaaacaattagaggatacttttgaacctagtgctaatctagaataaatcagcattgaagttatacaatagataaaaaaagggttctgtatacagttcagtaattgtttacagggcatcagcatctccaaccatgtgaccatcgatagtcatatcatttgcatagtttccaccatgatggtttctccatccacggttgtgttgcaagggttgtgccctttcttttgcactttcgccatcagatgccttagcaagccttgcaattgcattaatcaaaagatggtcatgctcc

SEQ ID NO: 27567 - DNA, 466 bp, Oryza sativa
  Clone ID: uC-osflM202031a09a1
cccaattccaattcaatcgcacattaagtggttcacaaatcatctcaatggtaattaagtttgtaagatatgctatcacaatcaatggtatatttatgatttacaagacaataaacatcattgatctactgagtggcttgcccctgtcatcctgtgaggctcgcatgtatttgcaatgaggaaaaacacaacctgagaatggattacaccaaaacctgtccatgcatttggacttgagctagaaccgggaagttgttaacagttggttattggtgaagttagcatatggagaatcgggtctggccttcccaatcttctttgccctaaaatgtgtatcttcacgtcctatattctcctttggggttagatcatgcccctttctcttgtgtccaacaacactttgcagtgcattatcaatgctattgtgcttgaacacctcaattggtgcccccgaattttcttggtt

SEQ ID NO: 27568 - DNA, 342 bp, Oryza sativa
  Clone ID: uC-osflM202031a10a1
gcaacaaattactaagatttaattaattaattgcaccccataattaaatggcctcccaatctcatacatactacacaaatgtgcattacctaaaacaaaaacaaattaaccacccacaacgaaaatcaactaatcaccatcttattcatttcccagtcgatcgcaagatggcttcttcttccttttgctatccatttttcttcttttcttctgctaaacaaatcaaatcagcagcagtttgccggccatcctccggccgccgttgccgccgccggcgatgatctagggcatgatcggcgggtggcagtagggcccgttgacccacccgttggagatctgctt

SEQ ID NO: 27569 - DNA, 285 bp, Oryza sativa
  Clone ID: uC-osflM202031a11a1
atgactatgcaagaatattattaactatggcggccatggatacatcatacattgaatcgcaaagaaaattattatcatacaacttctgtacaaatctaaggtcaatgtttgatcctggtctataaatgaaggcaacacccgctgtcaatcaaactgagggtacattaaagggtatcattctgcaaattggaccagggaatcggtatgtatatatatgctttctatcatttcttcttctcaacatactactgccagtgccacgcagaagcagatatcagcttttct

SEQ ID NO: 27570 - DNA, 428 bp, Oryza sativa
  Clone ID: uC-osflM202031b01a1
gatgtatgaattatttaccacataaacaaagtagacagttggctttattccaacagttagggcgtgtgcacctagtgcaggggctggaaatgggatattttcaatcatctaataattcgaaggggacaattgcagctaactgaagtactttttgaatagtgagctggaaattgccaaagcatcacccgtagccttcacagcatagagctccttcccggactgccattcattcgagtaggcaatccaatctttcgtccattcctccagctgaaaactctggttctctggaaggccttttgttaatcgactgaagtatttcgatgcccttggtagatagtagcttttcagcagtccactccaaaatttattggcatagtcgtgtagtttactctgctcggtctttgtattgtcataccacattgttacct

SEQ ID NO: 27571 - DNA, 456 bp, Oryza sativa
  Clone ID: uC-osflM202031b02a1
aatccacaaatagccaagcaacatgtactgtactgtatataaatattttttatccactcttataagatgccgagataatcacatcatccaaatttacatgcatataacattctaagataaaaaatatttcctcttttcgattattaaggcattcatgaatgcgcagacttgcgaatttaactatgatccaccagcacctccactttgatcgaaaagacgagacgacaatttgattgtccgtctttccctgacgaagaacttgcaatatatttaccaaaaataacacagcatcttgatatatattgacctgcagcattagtaatcattccaaatgaatatatataatggttatcgatcgaccggccggttgccgcgcgccgtttgtggtggatcccttttgcctgcaatcaggagagatcgttgggcttatttttttaaaccatttgtaaggaacac

SEQ ID NO: 27572 - DNA, 136 bp, Oryza sativa
  unsure (1)..(136): unsure at all n locations
  Clone ID: uC-osflM202031b03a1
aattaatgggaaatcctttattaatccagataagggagagaacaataccagcntacatttaacccaaaacagtttgatgcagggcccccaccaacatggcttttcttaattaaacccataaaacaatgcaatccta

SEQ ID NO: 27573 - DNA, 403 bp, Oryza sativa
  Clone ID: uC-osflM202031b04a1
caacctaaatgatcatatatatatatatatatatagatacaagttttctgcagcaacctgaaagggcactgcaattgacaaaccaggagcagtactctcaaaagaggaagaagatgaatcacactaaacacataaatacaaatccaagggggggtttgaatcaattacataacttcaacgcataaacacccagacgattttcagtattgagtagatgatgccccagtgcattcattcttcactgatgatgatgattcaagggggtacatatttaggagatgtcttataaactgagcatgttggcgggacttggtgagcataatcaggttaatcgagcatgtccatggatagctggagctgggtgattgttggcaacaaggatgtccttgatgcgattaacggt

SEQ ID NO: 27574 - DNA, 422 bp, Oryza sativa
  Clone ID: uC-osflM202031b05a1
agaatgacaaacagaactgaaattgccctgattttattgcttgacacaggcgaagatgccaaacaaaactagggttcttcgctgaaacacagttcatgggagactacaactatgctatgacacactgattcgattgacatatggagtaatcaggataaacagttcaacaccaaacagcttacataatccagcaaacaagaaccatgacataacctattccatcagtacaatacaaatacatcaatggcacatttcttttgcctaccttgattcataactaggaaacaagagggaattgagcttagggacaggggaactgaattttctaaggtcagacattttgttcagctggtactggctcatccttgagattcttgctgagccactcctgagcagttaccaggatagggagcacagttgtt

SEQ ID NO: 27575 - DNA, 325 bp, Oryza sativa
  Clone ID: uC-osflM202031b06a1
aagccggaatgcattccaagagatttacatggtacctgataaaacagggggtttctcaacagaaggtgaatattcaggtatataaaggaggatctaaactttggacaagtgactgactacctagagctccgtactatgctgactttcgctgtacacgaaactggaatcacaggagaagggcaatttttaccctcaaaatgtcggaaaacacgattagggtttgtttccttgcatggcacaaaattgttagaactgatgagatgggacaagcactgtacttgtaacacgcttaaacgacagcagcagacgcgaagcacctcacccc

SEQ ID NO: 27576 - DNA, 502 bp, Oryza sativa
  Clone ID: uC-osflM202031b07a1
caccaaaaatttactatgccacaaccccttttgattctgtaatcctagccaccaacttcacaatatatccatttctgtttcagttctcaccaaaaaatttactatgccacaaccccactagataagaagagtacctaatatctaccacagccaaagaaaaggctgcatcacaatatccttacagatctcaccaaaaaatttacgaagtcacggacctaccagagtactagatatggtcaatcaaaaggacattagctgacatttcaaattccttaccacagccaaaaaaacaagcacaggcatagtagcagttggtcacatcgtttgacagactcttttatccataatacctcacggaggaagaacccgttcagaagcatcagaaaactccaatggataggtaatagatctagtagcatgtctaactgcatcatataccacaagctttaaacctacatttcaacttggatcgccacttgcaagtaattcccagccaagagag

SEQ ID NO: 27577 - DNA, 360 bp, Oryza sativa
  Clone ID: uC-osflM202031b08a1
aaaagcctatttccaagcgtggataagactccttgtttacgaatcctggaactcaatttatagacgtatggtactattctatagatacgggcctatgtaaaccgcagcacgtgcattttttttctccagaaacatgaaatatttaataaaacggaatccttacacaaatggaagggacggagcccgccaatgcaatccatatagtatgtataaacgggccaaagcccattgggccgggggttactagaccttgaaggagatggctctgttgggcgggttgaagaactgcaccgagcggtcgttgagctgttgaggagggctctcaccgcctgggggaagaagctcatggaggagggcaac

SEQ ID NO: 27578 - DNA, 384 bp, Oryza sativa
  Clone ID: uC-osflM202031b09a1
aagcaaaaaatgacattgaagcttggcccagtaatttgaagaacttgaatgaacagattctatctactgctataattttgtcactaattattacaggccattctctgactggactgcaatgttggaagaaacttttccaagagcaagaatgcgacaggattattaggtggttcttaacccaagctgaagcccaaagaaattgaggtgcccgccagttaacccttttaaagctaaagcttctctccgcgtatgcaacaaaaattagggggaaggaaaacaatcaagaggacgggaatacattggacgatcagatatgatcacagactgccttcgggaagtctgaagtcaaccctttccgccgagatcagcagtcctgaaattccc

SEQ ID NO: 27579 - DNA, 470 bp, Oryza sativa
  Clone ID: uC-osflM202031b11a1
gtagcaaaatttgccaaaaatctttggataaaataaggtaccgacatcacagtacaataaaaaaaaataccgattctacagcaaactgtactgcgctatcaatccgaatcctgatacagccacacataacaagagaaaaatcttattacaattgcaggaaaacgagttaggcagagagattatcaaagaacttcatgtagtcatcaaatgactctccacgccgaatcttagcaatggacccatcatcttctacccaatattcaggtggtcgcaacttcaagttgtaggttgaagccatgctcatgcagtaggctcctgcgtcatgaaccaccaaaccagctcccttatcaggtgttggaagttccctggttttgccaaggaaatctgcagattcacaaactggtccaacaaatatcgaatgttgctacttttgcattttggggaagggagaaacccgtttcgatatgctg

SEQ ID NO: 27580 - DNA, 501 bp, Oryza sativa
  Clone ID: uC-osflM202031c01a1
caagtgaaactacattttttataactgagatatacgtgtaagaaatgttagttctccttttatttattacagtagtcgatgttcgaaatcggtacttaagaactgtcaacaataccacataggtgattagatgatgagatggagataagtagagagatgatgaatctattgtgtatgttacctcttaatttgttgatatataatatgtatgaaaatagagataatagtcgcctctgctataaaaagtttgctcttggacagtaccagaataaattagaggtggaccatgctttaaaatgcgtggcaaatattggcaagaatcaagatggggcctcgggaggttggcttcaaggccctgtcccatagattttttttttcccgctgagacctgattaatgatccgatcatattcagatacgctgctgctcaaatccgccagttcgagaggactgattggccggtttgaaatgatcaagtgatcgttaaaacccccaaaacttt

SEQ ID NO: 27581 - DNA, 411 bp, Oryza sativa
  Clone ID: uC-osflM202031c02a1
ggttcagacagccgattagtttgataaataatgcatggcaaaaaatgttactaatcatgttgaggaaatacagctcgtttcctagcattagcggtctctcggatggcttctcctgtagcacaagctacagatgcatatacaaccatgcatccaatagattaagttgcaaaaagataagaaaaaaaataaggatgcctcaatagtacaagaccttatttctactcaacagtacacaagcgactctttccgaatgttgtgtggtatgtatgtttcttagggagacctgaatgcctccccagcatagcgcacattgcctagctccatttcgatccgcagaagctgattgtactttgccagtctcttgctccggcatggagcccctattttgatctgaccacttgttaaaccaac

SEQ ID NO: 27582 - DNA, 89 bp, Oryza sativa
  Clone ID: uC-osflM202031c03a1
ttttttttttttttttttttttttttttttttttttttttttttttttttttttttttttttttttttttttttttttttttttttttt

SEQ ID NO: 27583 - DNA, 380 bp, Oryza sativa
  Clone ID: uC-osflM202031c04a1
aacagaaccggtttttaaaactcacttcaattaaaggggaaccccaaatggcaggtctaaggttttgggcaaaaaaaaggccaatacaagggccaaaaaatcaacttaagttaaaaaaagctcacagggatagggaaaaaaaaattccatacccccaacccagcaacacaacttctgggtagcggggtcccccaagaaaattttccctagattttgggaaaagaaacatttttaaatggaccaaatttcccgtttttgggccaatttagggggaaaagcccccccaaaattttaaaaaggatgatcccccccaggacccaaaatcccaaaggccccctgaaaaaatggttggcacagctttggaagaaattttgggttgg

SEQ ID NO: 27584 - DNA, 131 bp, Oryza sativa
  Clone ID: uC-osflM202031c05a1
ggggaattgaaaacatgtttggcattgcactagttttccagtaattcaatcttagttcacataaaccaagactttggggtcaattaaatatttgagtcacccattggccaacagttaaacctaaggatcct

SEQ ID NO: 27585 - DNA, 522 bp, Oryza sativa
  Clone ID: uC-osflM202031c07a1
cgggaccaacgaaaacatcccatacacagctcctttctccaccacccacggggatactggactgtatcagtttacaaagtaaaccaacaaactcccctgatctaaagagtccaatacttcacgcaaaatgaaaagcagcttgctggtcaagccagtttatgatatccagtagatacagaagcaacaggccaacagctaaacagtagttgcattgttcaaatacacagatcgcctcgggcaagcctctcacgttttccttgcgctccagatgcattacctcagttttctttctgcacatcaggggcatcatgatacacaggttcatcctcaggcacagtgtgcagctcatctgttggccctgctgcctccccgtcggcacctgcagcatcatcggggtaacgaacaaccacaaccgggtagacacagtgatgcacgcactaatcactaacacttccaagcctccccttcccgcccttccgcgaggcacccaaaccgcggctttccatgatcatagcggacaag

SEQ ID NO: 27586 - DNA, 64 bp, Oryza sativa
  Clone ID: uC-osflM202031c08a1
tttttttttttttttttttttttttttttttttttttttttttttttttttttttttttttttt

SEQ ID NO: 27587 - DNA, 79 bp, Oryza sativa
  Clone ID: uC-osflM202031c09a1
ttggggctgctaacaaaaacacggcttcatacccacaacttacaaattaaccatatactatataacccaagtgagagag

SEQ ID NO: 27588 - DNA, 106 bp, Oryza sativa
  Clone ID: uC-osflM202031c10a1
tttgtgtttttagactaaaatgttactcgctcgctcacgaaaagattacaccgagcttgggccaattatccaaaataccaaaagccactccaactcagaaaaattg

SEQ ID NO: 27589 - DNA, 243 bp, Oryza sativa
  Clone ID: uC-osflM202031c11a1
agtagtatgtatattcaggtcaaatttccaacaaaacatgcctattatttcagtactcccatgaggaaaatcatgattcgtgcaaaagattagcattaaactgatcaaaccaaatttttgactatgaaataggtctggacacccctaattattgggactggaaaattaccattatctagaagctaccaacccatacagtgtgcaagggttttccaaattatgcaactacaatcttgaattttt

SEQ ID NO: 27590 - DNA, 479 bp, Oryza sativa
  Clone ID: uC-osflM202031d01a1
ggaagaatcatcaatttatagtccaaaaagaagaaaatttacatgctgtttaggtccttttggtgctgctctgtattcacaggttacatactcacatctatacatccagtactaaggatactaagttttcctactgccgtacctgacgtgtgtggaacatggtctgtgcaaaaaggtagtaaaaccactcaactggtaagatcatacaagtgaggaaacacagacctgaactacacaacgatcagagaagcaacagtagcagatgacaaaaaaatggttaagtggtaactaaaactggaatcagtgcagtggacggaacagtggatcgtaagatgctttgacttcggcataatcccactccaacgcatcccaccactcccttgtgcattgtaccgaattcagattaccgacagggagctcgagcttcttaagctttgggcagtcgacaatcttcaggttccccagcaaggggaaccgca

SEQ ID NO: 27591 - DNA, 395 bp, Oryza sativa
  Clone ID: uC-osflM202031d02a1
aagcaagaaatctgctaaagtaaagaaaaaggatggctgaatgactgaatgatattatgataatgttaaatgaacttgaactgttcaagataggatagataggaggaggggagccggccggagggtggaaggcggcggcccaccaaaccctaaattcctttcattttccttttttttttcccgcatccgacgcattgaggcaggggatattcttttcttatacttataagttttcgtgctggcattcaacttgaagcttgccattaggataatggcttgcttttcaacaacgagctaagacactgttgtcgacggacaacgtcaccacctgcgcccactgtttcagcctcatttttaccgtcttcggcgtgttttctggagagagtatggacatg

SEQ ID NO: 27592 - DNA, 405 bp, Oryza sativa
  Clone ID: uC-osflM202031d03a1
aacaacaaagaaaacggcaaagttcatttcatgagttagatggaagcgcctcacatctccagagacctaaccatttcttatactacaccatcaagggatacatagaacttcgcctactcaagagaactatctaaatagggagacatagccgaggcagcctttgtacagatcctaaacaccaaccatttcaaccaagaggggacctacatagctatcaaccaaactcccaactcaagctgcaggtgccttgcgggtacttcttcgcggccggcgaccggacggttcttgggtcttggccttcgccttcgccgccggagacttcttgggcttggcgaccaccttttttttccggcgccttgcgcttggtgccagcggcgggggccttcctgggttttggcagcggcg

SEQ ID NO: 27593 - DNA, 439 bp, Oryza sativa
  Clone ID: uC-osflM202031d05a1
tttttggggttttttttttttttttttttttatatttttttatttttttatttatttttattaaatttttttttaaaaactttttcgatttgaggggggaaacccaccgggaaaaaaacaagggggattgggaaaaaaaaaaataaagggttattcctcgggcaaaaaaaatggaaacaaaaaacggataaaaaaaattgagaaaataaaaaaaagggaaaatataaaacgaagggggaaagataaaaaggtaaccaacctaaaaaatggggggggggaaaaaacttataatctgggggagtaaaaccaaacaaaataaaaaacgattaaggaacaagggaaaaaacgaggggggtcaacaaggaaaaaatcaatatataaagaaactttttttttaaaaaaagggggttatatttaaaaaaggaaaaaaaaagggaaa

SEQ ID NO: 27594 - DNA, 57 bp, Oryza sativa
  Clone ID: uC-osflM202031d06a1
ccttaccactatgccaatataataaagcatccaaggggggccaagccccgaattaac

SEQ ID NO: 27595 - DNA, 411 bp, Oryza sativa
  Clone ID: uC-osflM202031d07a1
gatcccctcccccttccccggggaatcttttgatttagtactttaattacgtgcattacagtaccaaaaagggaatcccttgggcttggttttgccactagtatgctttactacagcagcggtagtagtactagtttgacaattcgcttcctggaagggacctcattgtcgcccgccacagcaaagcattttcgggccagggttcacagagagatgcatgcttgctggctgccaacatgaaacttcccctttgcatgcttgcttccttcacaaaaaatcacaattccattgctttcgtcttgggatagcacatgctactttaatctttcttcttttataaggggaacctccgaaaagggcaggaagttcctgtaatttcacagatatttactcaggccattttttcggagc

SEQ ID NO: 27596 - DNA, 528 bp, Oryza sativa
  Clone ID: uC-osflM202031d08a1
aaaggaaacacaactcattttttattgatatatgttggatgaatccaataaaaccgatacaagtcacgaaaaatcagactagatgaatccttcgagatcacatgagcaaaagctttcgacgaaagctgtcctatagtcgtggaagcaataacacttgataaagataggaattcagacacgagaggttgcagactataagatgtcatcaaatctccttgaacgccgcgaagagatcaccgttgatgtagtcgttgtccacaagactaaccaagaagtagctcttctggaccttgtctagtatctccctagatgagtcgccctcagggaacaggcaagcccaaccctttgaccaaatttcgaaagcttcgtctttccaaaccataaagctggctgagtcaacgacagttggctggactatttccttgccagggaaaataccccatgtgaccgcattcacagcgtttgtgggaatgtttgagaatgactctccgtccttgttcacggcaatgtatgtaagagaagggaatg

SEQ ID NO: 27597 - DNA, 462 bp, Oryza sativa
  Clone ID: uC-osflM202031d09a1
attgcaaaaacatcatcttcttcttcatcttcttagggtacacaacaccaactcgatcatcatctcgtcgcactaaacccatcttccccaacccaaagacaacgaactcgctggccacaaatccatccaaccacaattaaccactgctaagctacggtcccccacttcacttgccggggacgaagttggtggcgtacgcccaggcgttgttgttgacggggtcggcgaggtggtcggcgaggttctcgagggggcccttgccggtgacgatggcctggacgaagaagccgaacatggagaacatggcgaggcggccgttcttgatctccttcaccttgagctccgcgaacgcctcggggtcatcggcgaggccgagcggtcgaaggcgcccgcggggtagagcgggtcgacgacctcgccgagcggcccgccggcgatgcggtacccctcgacggcgcccat

SEQ ID NO: 27598 - DNA, 423 bp, Oryza sativa
  Clone ID: uC-osflM202031d10a1
caaattgaaaatttctgctccttttacagcaacattatcaaggcatattatacatcaataacaataaatacaataactagaatatgaatgacgatcaaacatgcacaaggaataaacaaacggttgtaaatacaatcgaccatttgtattctcttaaaacacccaacatttttttttaccatgatgaggcaatacccagaagctagatgaccagtcaaagaaagagatgccatatagcacaaaacaaagaaatgtcatcagaatttatgctaaggttgggttttcttcttcagcagaccaccaaatttctttagcaagggcttcttcttttgcggctgctgcttgggcggtgatgcgttgccattgctcgccgtcgtggagtgcaaaccattggcatcaacaatggaatctcccgtgttggac

SEQ ID NO: 27599 - DNA, 379 bp, Oryza sativa
  Clone ID: uC-osflM202031e01a1
cccacaaaaagggttttttttagaggcaacaaactaattccacaaccccttatggaagcctcccatacgggataaaatattatcagcacccatcccgttttttcccctttatacaccttaccaaatggggtcaactggcaggggtaatttttcacataataagggttaaatctctaacccaaaaattccccaaatcccagagtttccaagggtggctttttgctttaacaaataaggggggttaaccgatggtatttttacgggttaatggggcccttttgaggccccgccattttttttccaaaaggggggccccaatttggaaaggcacggcacccgggtttccacagacccgttggtttttttacccttgcctgaa

SEQ ID NO: 27600 - DNA, 144 bp, Oryza sativa
  Clone ID: uC-osflM202031e02a1
tttttgggggattttaacggttttatttccataatacatatgcaacccagagcaatgaaggcagatctagcatcctaggaaagtagaatgcacccactaccagaagatgtacaccacaacacccaagtgtcaccaacaaatatc

SEQ ID NO: 27601 - DNA, 327 bp, Oryza sativa
  Clone ID: uC-osflM202031e03a1
gagatacaaaatatgagccatgaccaggcccaaccaaccaccatgatacaaccaagtatagttttaggtttcgacggacataaaaccatacagaatttaaaatttattttcggtagaggcttcatctactcttctctggggcaaaacacaactccgctgtatctgcaggccttcatgaggagggctcgtctaggtggtgctgtgcatgtgacggatcaggccgatcacacgggtgctgtattcccattcgttgttgaccaggacacaagttttaggaacgtgtcgtttaaagccaaggcagttcttggctttaaagatgctggatct

SEQ ID NO: 27602 - DNA, 150 bp, Oryza sativa
  Clone ID: uC-osflM202031e04a1
ggggtcgatgaagaaaaaaaaacattcgaatgtagtaacccgaatttaataaggaagaacattatatataccgttctgggcgaacaaccctcccatgccacctggaggacaaatagaaggcccggaaccaaacaaacaaacacgacaacc

SEQ ID NO: 27603 - DNA, 490 bp, Oryza sativa
  Clone ID: uC-osflM202031e08a1
gccgaggacgacgacgacctctacggccgcctcaagtcgctccagcgccacatggagttcgtcgagatacaggaggagtacgtcaaggacgagcagaagaacctgaagcgcgagctgctgcgcgcgcaggaggaggtgaagcggatccagtccgttcccctcgtgatcggccagttcatggagatggtcgacggcaacaacggaatcgtcggatccaccaccgggagcaactattatgtgcggatcctgagcaccatcaaccgcgagctgctcaagccctcggcgtccgtggcgctgcaccgccactcgaatgcgctcgtcgacgtgctgccgcccgaggcggactccagcatctctctgctcggatcatcggagaagcccaacgtcacttatacggatattggaggatgtgacatccaaaaacaagaaattcgggaggctgttgaattacccgtggcacatcacgagctgtacaaagagattggttttg

SEQ ID NO: 27604 - DNA, 88 bp, Oryza sativa
  Clone ID: uC-osflM202031e09a1
tttgttttttttatctatttccttctgaggacaaataacttcacgaaaaaccaataaagccaacagtctgcctatacagtagcaacca

SEQ ID NO: 27605 - DNA, 137 bp, Oryza sativa
  Clone ID: uC-osflM202031e10a1
ggtcgatgaagaaaaaaaaacatttgtatgtagtaacttgtatttaataaggaagaacattatatataccttactggggggaacaacctcccatgcaactggatgcacaaaaaatatcccggactcaactaaccaac

SEQ ID NO: 27606 - DNA, 294 bp, Oryza sativa
  Clone ID: uC-osflM202031f01a1
cacacaaataaagaattcaattatattcagatgcatgactggacaattcagaattgcaaacttaacaaagggataataaagcaaacatccaccctgcaaaccatactacacacttaaagacctttttatggttttgataataaggcaagctccagcgatatatgaacaaatgaggggaaaaaacaagcaccacacactctacttcatatccagcgataaaaagatttgaatctgaagtcggtttggttgttctagatttcttgggctatgccaagatccattggcatttcactg

SEQ ID NO: 27607 - DNA, 114 bp, Oryza sativa
  Clone ID: uC-osflM202031f02a1
acatgaaaaaggcaggtatcaaatattcaaattggaccgttttcttttgaaaggatatgtacatggggcacgcatgcaggggcccgggtgtctgaaaaaaaatttttaacgccc

SEQ ID NO: 27608 - DNA, 338 bp, Oryza sativa
  Clone ID: uC-osflM202031f03a1
aacacgatccaaactttaaatactggacaagagcatgtttgacgcctcgcattatcgcatatagcggatgaaaaaacgtcaggtcagcctgcgcgacaacgtctagttacagataagagcagaactgcaagtcaaatacactcttttctctccatagtagagtttgagcagcgagcgggcaaacataaattattcaattattaaatgatatgatcactcttgatcatctcaacactataggaacaaaactttgctaccgcgattttactattttagttgtccacaacttcaatgagggttggttcgtagtcagcaggagcctcgaaaccatggaagtt

SEQ ID NO: 27609 - DNA, 448 bp, Oryza sativa
  Clone ID: uC-osflM202031f04a1
aggcaaaatatagatgaattcatacagctacccatacaaatccctggcattgctacatgcctacaaggctacaacacttgctgatactactgcttgctgctacgctacatgcagatgaacgggcaggcttcacaataaaaaatattagcctgcactcaaccataaggcacaacctgtacacatcaagaacaatcaagaaactgtacagaattgagggatgcgatcatacagaccagcatctcatctcatgtcatctcatctgcctgatgagaccaaggacctctcttcagagccctgcttgaccaatggttttgcgggtggagaaagctttgtgcttccacgatccaattcctgggcagctgcggaatgttcgctaggaaccagttctggtttcttggtgtagttgaactgcagatccttgttcgcagccagcgccaatagctccgac

SEQ ID NO: 27610 - DNA, 136 bp, Oryza sativa
  Clone ID: uC-osflM202031f05a1
cccgatgcacgctacgaagcttgatgcctcctagtggccgccctccttttttttttggtggttaagagaagttattagtattccccaaccaacaaacccgtccttccaggaagtagaatgggagaactcaactctc

SEQ ID NO: 27611 - DNA, 81 bp, Oryza sativa
  Clone ID: uC-osflM202031f06a1
tttttgtttgtccaaaaatcaaactgcattaaatattcaaaaaaacgggagggtgtacatgtcaataaggactttatacat

SEQ ID NO: 27612 - DNA, 515 bp, Oryza sativa
  Clone ID: uC-osflM202031f07a1
gcttctcaaatcagcttttctggcattacttggttgcccatatattggcagaaggaaaccatgcacaattataatatacatatggaacacattattactcagcaatcaacaaatgccgcagtaaggaaagttagtaaaaaccacatatttttacacgagcttcagtttcagatgtaagttcaatagaattgccatagcatataatttagccacagggagtgagcttcttgttgcctgcaccacgagggttatcgtccttccagtcatcccatcctctcgctttctcctcttcggcgtcctcgtcctcttgggctgaccgactgccatccttgtgccatgcggagtttgattcttgaatcatcttggcagttcttttcttgccatttctccatcattttcatctcacgtaagccagctttttctatgctcatcgttggcaacttataacttggctgaaaaacttgtgctgccattttttctctttcactgggtagacctccacaacaagaattgca

SEQ ID NO: 27613 - DNA, 490 bp, Oryza sativa
  Clone ID: uC-osflM202031f10a1
atgatgagatgtctagctcaagcaattaatggtacatgtacatagtataaagctttataaagctagcagctagctggctcatcaaatgccaaattaatcaattcggaaatgatcaatccacccctaatctacaccccattgattgtagtataatcaatcatcatgctactagacacaatcaggataccccgtacttagtagtagtaattgtatttacatcagatcaagacatgaagaaacctagctagctaggattaattaacaaggagtcctagctaatccctggaggtctggatggatgataaataatctgagcatccgaacccatcccgagaagaagccttcgatcggaaggaggaagagaaggatgcattaacaaactgccactaattaacccaagcatgaaacaccaaggtaattaatcaaatcaagtaattaatcaaccagcctgaagcaaaatcctgtagcgcaaggtcggtagggagctagc

SEQ ID NO: 27614 - DNA, 238 bp, Oryza sativa
  Clone ID: uC-osflM202031f11a1
aagagaagttattagtattcatcaatgatcaatcccgttctcccaggaagtagaatgggagaactcaactctataaaaaaaacacatgtagctgttacaggatgggtgcaccttttaaggaaaaaataagaaacattgctaccaaaaagggaaaaatgagaaaggggattaaacaatcccgttgttattactacaaaaagatacagcaactgagagaactggatcgaaccccattttc

SEQ ID NO: 27615 - DNA, 243 bp, Oryza sativa
  Clone ID: uC-osflM202031g01a1
actaataatcaaaccatattatcactcatatcagggtctaaaatacaaactagaggagcaaactaagtagaaaaaactatatacacatatcgaggttatagtagtttaataaaaccaactcatgatcatgttatcactagcactgatggaacacgccgtgcaaaacgatatggagatcaccatgaatggtggccatggtacttcgggagtggccaccgaagccgtggtgacacggcaaacaag

SEQ ID NO: 27616 - DNA, 433 bp, Oryza sativa
  Clone ID: uC-osflM202031g03a1
gccgcgaccctagagggggcgcctcgcttctgcttaccgaggatcgttagggtggatgaaaggtagcccggattcttcatcgacgagagaggagcagaggattgctgcttggctgctactcgtttcctgcgtcctcctatggctatggccattcctgctgctgctgctgctgctctgtgggtgttgccatgccacagatagttgcgtcgctagattccttttgccctctaagttatcttccttaatactgtatggaacaggccgtttccatgcgacagaccggagaggtgatatgccgcctgcacatgtggaaccgggatggactgtcaacagctgccaacagtcactacgaatgcatcaaccgaccccccctttcgatccggacaaatccaacccacttttgctcctgcccatgcgactcattagaaaggag

SEQ ID NO: 27617 - DNA, 437 bp, Oryza sativa
  Clone ID: uC-osflM202031g04a1
aataaaactattcatttgacaactttgtcacgtgattgctcaatatttcgtcattgcaaagataatatatatactgtccaatcattaatgatgaacaaactttttttaacatcgtattggagttggccgagataatgcaaactttataatttaatccttgcacccatgttcaatgtaaaccagtttttctgcaattcgaggcaggttctacagcaccaggtcagcagcagtccgagctatccttattagagtattagaatatcccgtggttaggttcttatggtaatgacagattgatactggacagatcatgaagttccaacgtctcaatctccagatgcaggagctgcccacactgggtgatggctcgagaccagagaccttcagagtgccttttaagtcacacatgcctaccattccaagaaggtatatgcaag

SEQ ID NO: 27618 - DNA, 468 bp, Oryza sativa
  Clone ID: uC-osflM202031g05a1
ggcagaatacattcatatttataaggaattcatggtttaactacaatagttaaccccctcatctacttttcatggggttaaatcagcaacataaagagtacaaaaattacaacacttgctcagtacacatagacacattgtaaattagactttggtatacgtgctaaactgtaaaatggaaaaggagaaaaaaatgatatacctgtattgtttagcattgaagctcattttctgatgatcttgaaccatggtaccagcttgcaagttaatggtcagactaaaaaaagtttgacctaagtgatgaaagcagtggccaattgaagctatctgcacttccgcagtatgagttcatactttccctgcagattcattcaactccaagacgatgggctgtatctgagttggacgggcagagctagagaaatcctcaagtcaattattgtttgtttctttgtcatctgcattacc

SEQ ID NO: 27619 - DNA, 94 bp, Oryza sativa
  Clone ID: uC-osflM202031g06a1
ctattgaaagagctatgcacgctcgcatggcaacgtgtacgtaaaggcttggtatcctactattagtctgagccgcaccttttttatttatttt

SEQ ID NO: 27620 - DNA, 666 bp, Oryza sativa
  Clone ID: uC-osflM202031g07a1
cgcatgcacgcggacgaaagcagggagccacctgattagcaacccgaaaaaaaaaaaaaggggggaaaaaaaaaacaacacccaaaacaacaaaagaaaaaaaaaaaaaaacaaacaaaaagagaaaacaaaaaacaacaaaaaaccagaacaaacaaaaaaaaacaaaaaaaaaaagaaaaaaaacaaaaaaaaaaaagacgaacaacaacaacaaaagaacagaccaacaaaaaaaaaaaaaaaaaaaacaaacaaaaacgaaaaccaccaaaaaaaacggacaccccacagaaaaaaaaacgacaaaacgaacaagaaaaaaacaccaaagacgaaccccgaaacaaaaaaaacaaacaaaaaaacacaacaaaaaacacaaagaaaagcaaaaacaaaaaaaaagacacaccacaaaccagacaaaacacacaaaacaaagaaaaaaacaagaaaaaaaaagaacaacaaaaaagccacaaaaaacacaaacaacaaaaaacaaacacacgaaacaaaaacaacacacaaaaaaaaaaacaaacaaaagagaaaaaaaaaacacaacaaaacaaaaaaagaaaaaaaaacaaccacaccaacacacacaaaaaaacaacaagagcaaaaaaaaaaaaacaaaaaacaaaacaaaccacacaa

SEQ ID NO: 27621 - DNA, 391 bp, Oryza sativa
  Clone ID: uC-osflM202031g08a1
attgtaactttgtaaatgcatctataaaattttgggacagtgagagtgcagtcacatacatatatgagatcaaacaagagcaattagattatgtccccttctttattacgaagagaaaatacagagcaaaaaaatcttggttctcaacatcaattaagggggaaaagaatctgacagaacaggaatggaaattgcctgtgcctccatttccctgttagtctgctactgccatccaacgttttatgccattagaaaacctccaaactcattggcgctatactagctatatcccgctgcagaggcacttatgtttgccctcagaatagccaaaaaaagatggttagatttcaaggggggagccaggagtattatgtggattttgaagggggaa

SEQ ID NO: 27622 - DNA, 294 bp, Oryza sativa
  Clone ID: uC-osflM202031g09a1
cagggcaaaatttttttggaaccaaaagggggccatcatcctcctttataatttccctccttaattaaatcatcccagaataatcatttatttcctccgggaggcagttgtttagggggggaccaaaggggggggccgtaaataaataaacccaaaggggcgaatttacaaagccaggcacgcttttaggggttattaaatctccttaaattaggggcctcctcctctttaatcaacggccaaggggggtagggcttgcggcttggcggtggcccccgtcgccggggggtcttg

SEQ ID NO: 27623 - DNA, 359 bp, Oryza sativa
  Clone ID: uC-osflM202031g11a1
gggcagtatagattaccaataattaagtttgaaccaacaagtataagaaaaaaaaaagttaagtaaacctacaacaacaggtgccttacagaacacacacataactaccaccccccccccccccccaaacaaaaatacaaccttttttaggataacgcagcacatgattgatttgagtaggttgatcgatcgacctaggcgtcgatgggcttgcagacgacggtggcgtgcttgaggatctggttgttgaactggccgggctttttggtggggtccaccttgtccattccgggcggcggaagcaggttgaagttttggacgaggcggtcgagcgtgatcccgatgatgggcagcgcgag

SEQ ID NO: 27624 - DNA, 128 bp, Oryza sativa
  Clone ID: uC-osflM202031h01a1
tttttggtggttttttttttttctctctttctttcatattttttttattataactttttttttagtattgattcaactaccaaccgagggacaccaacacacaaaccccccaaaaaaaagcaaacaaa

SEQ ID NO: 27625 - DNA, 168 bp, Oryza sativa
  Clone ID: uC-osflM202031h02a1
ggccgatcaaaagtttcattttttttaactacttgtatattgcacattgtgggcaggttttaacggttcatgaaacgagggccaaggccgcgaacaaaacttaacaagggcgagaactagacatcttaacggcagacatgcaaaaccaacatgggggacgaggcgtac

SEQ ID NO: 27626 - DNA, 404 bp, Oryza sativa
  Clone ID: uC-osflM202031h03a1
agaaaagcaacaataaatcttgtataataactcattgttcattgcgactacaaactattatagatacaaaattcacaggtaaatgatcttctcgatgactttattgaaaaagaaaacatatatctaatcaacactatgagaaaaagtaaagttgtggttccagccaatgtacagttgaacatacgatgattccatccctcaatcagaacccatgcactttcttatttgtcagttgactatggatgatgacttcagaatatcacaagtagatgtagatttgcgcttcggtttaacagcaaaactaggccagatccatgtcatgaatgtaattgccgttcaaactcacaggcatcaagaaccgaaactggcaactagatcaaagtatttgtttttagatttggatt

SEQ ID NO: 27627 - DNA, 124 bp, Oryza sativa
  Clone ID: uC-osflM202031h04a1
ggggctaaagaagagtgtatttttataaaaaggggtgatacagctgtttttcattgcaacagcagcaacaggttcggatttttggtccatttgaacactgtattctaccaagttcatatatggg

SEQ ID NO: 27628 - DNA, 461 bp, Oryza sativa
  Clone ID: uC-osflM202031h07a1
tttttgtttttttcacaaacgaaaccaaagctggcagcacgtaggaaacgctttgttggtaacagaagggagttcaataacagcctacaaaattctgaaacgtaacaagcaactccgatttacaaattccactgacatatcggggactcttgaccaaacgcgacaccattatttgtttgatcagatcagcacttgcacagtgatttacggatagacaaaattcaaagttgaccgaaaacataacttgatactgcaggcagtacatgcatttcacttccgaccaagagtggggaattgggattggtctttgatttctggagctggtggagctgcaaagcgatggccctcaccatatccacccctgaaaccgccacgatccccgcggcccctgccacgaccacggccgccatagtacctctctcctttagctggttttaggaacttgttgatgctcacagact

SEQ ID NO: 27629 - DNA, 414 bp, Oryza sativa
  Clone ID: uC-osflM202031h08a1
catctaattgatgaacagaaagaacagacgagcttgtttagtttgcaaatttacatttattatttattccgtgcacaagaacataataacatgatcttgatacactactaactatatattataaataagtttctaccaatgatttcatttccctctaattaactgtgactcgaggacagcagctttgcaatgctgctacctacgcgcgcccaatcttctccaccagccgcctctcaatctccatcctcttcctcatgagcaccgtgtacttctccaggagctccttgtcctccacaccctttccggttgagacggcgagcttttgacccaaggaggtcttcttcaggttaccctggtacatgcaggagatggggacgaagcttcctttctcattgcacagccagccatgggcag

SEQ ID NO: 27630 - DNA, 370 bp, Oryza sativa
  Clone ID: uC-osflM202031h09a1
gcattgaattctgaacgataaacaccaggaaccggcgtttatttgaggcaagcactgcccaaaatctcgcaaaagtactgaaaccttagacatagtacacatccatggaaaacatggatgccaaatgacaactacagaaaattatcaaattcgaatgcagctgacggcttctcctgctgaagatgcatattttcccctccattacttggatgtgctttctccatcgacagccaatgggacggcgctggccaggctgcggtatttcagagcatagaacatctcaatgtaacggcgagtctcgcgcctttcaaggttgcttacgtactttcagaatccggatacaccaatcaaggtcatcagcctcttagag

SEQ ID NO: 27631 - DNA, 60 bp, Oryza sativa
  Clone ID: uC-osflM202031h11a1
attaaaaattattaactttcaacaaaaaaagtgacaagcccccggggacgggcaaaacca

SEQ ID NO: 27632 - DNA, 185 bp, Oryza sativa
  Clone ID: uC-osflM202031h12a1
atttggtatggaaaccccaacttttttcagtattctgaattctggatggatcatatcagaatcaacacagcatcgtacaaactgggcaagcaattggaacaatcgagcgatggacagagagaagtagcctacaatgggcggctgggcccatttcacgagccccggcgctggaaccttggttggcc

SEQ ID NO: 27633 - DNA, 266 bp, Oryza sativa
  Clone ID: uC-osflM202046a02b1
ccctctctcatctcacttcactctctttctcttctcttcacttcaccaccgccacctctctcatcggatccctgcagaggaggagagggcagtggcggcgaaaggcgacatgggctcgctgtcctctctcgccgccgcggcggtgtttctctccctcctcgccgtcggccactgcgccgccgccgacttcaacgccaccgacgccgacgccgacttcgccggtaactgtgtggacttcaacttcagtgacgcccgtcgttattggg

SEQ ID NO: 27634 - DNA, 290 bp, Oryza sativa
  Clone ID: uC-osflM202046a06b1
gttagacagagcaccttaccctgctagcttcatgcgctcgcagctcgccggcagctacgcctttgtgctcttcgacaagtccacctccaccctacttgtggcctctgatccggagggaaaggtgtctctgtattgggggattactgctgatggatctgttgccttctctgacaacattgacctgcttaaaggaatcgtgtggcaggtctcttgcacctttcccacaaggctgcttctattccaatgctcttggaggtggaggcttgaagtgctatgagaacccaaagcac

SEQ ID NO: 27635 - DNA, 537 bp, Oryza sativa
  unsure (1)..(537): unsure at all n locations
  Clone ID: uC-osflM202046a09b1
aatggctaaaggaaaggcgaaggctgatgcttttccaacctctcatgagaggtccttgacttggcatgaggatcaaacaaaattcatgctagagtggtacatggaatacttgaaaaaacaacatgcaggttttaaggtaaaaaagagtcaccacatgttgtgtgctgatgctttaaacaagaagtttggtatgggggtgactgccgatcaagtggatcgtcactacaggtatcacaaagaaaattggaagtatattgcagcagcattgagcaagagtggcaacgcatttgaccatacaagattcttggtgactatttcagaatctgaaaaggcaacgctatgtgatagagcaagacgcctactctctaagcccatcagattctttaatgagatgcaggagctattcacgggatctagtgccgatggttctttggctatggatcaaaacacatgcatgaacgatagtgatggttcaaatagcgatgattcaagagatatgctngacctcaactgctacacacaacctgaagagcccac

SEQ ID NO: 27636 - DNA, 527 bp, Oryza sativa
  Clone ID: uC-osflM202046a10b1
tctcctcctcctctcttccatcgccgctgctcgcttcctccccctctcccacgaaagatggcgtctcacattgttgggtacccccgcatgggccccaagagggagctcaagtttgccctggagtctttctgggatgggaagagcagcgctgaggatttggagaaggttgcgaccgacctcagggccagcatctggaagcaaatggctgacgctgggatcaagtacatccccagcaacaccttctcgtactatgatcaggttcttgacacggctgccatgcttggtgctgtcccagagcgctactcatggactggtggagagattgggttcagcacctacttctcgatggctaggggcaatgccactgtccctgccatggagatgaccaagtggtttgacaccaactaccactttatcgtccctgaacttggtcccaacaccaagttctcctactcttccccacaggctgtgaatgaatacaaggagggctaggcgctcggcgttgacaccgtgccagtactttgtga

SEQ ID NO: 27637 - DNA, 530 bp, Oryza sativa
  unsure (1)..(530): unsure at all n locations
  Clone ID: uC-osflM202046a12b1
atgatctctcttattatgcctccacgtgaccagattgcgcgagtggctaagatgttgggtgatgaatatggtaccgcctcaaacatcaagagtagagtcaatcgtcagtctgttttggctgccattacctcagctcagcagaggctgaagctctataacaaagttcctccaaatggattggttctctacactggaaccattgttactgaagatgggaaggaaaagaaggttaccattgattttgaacccttcaagcctatcaatgtatcactgtatctttgtgataacaagttccacactgaagctttgaatgagctcttggaatctgatgacaagtttgggttcattgctatggatggtaatggtactctttttggcacactaagtggcaacacacgtgaggtgcttcacanattcactgttgatctcccaaagaagcatggtagaggaggacaatcttgcttgcgttctgctcgtcttcggatggagaaacgccataattatgttcggaaaacagctgagcttgctac

SEQ ID NO: 27638 - DNA, 445 bp, Oryza sativa
  Clone ID: uC-osflM202046b02b1
gttgtgtgatacgctcgcctaactttggctaattctgctgatatttgctcttcttctgtcatatcaccttgccgctgcttctgatcatctcccgttcttgcattcttcttcttcttcttcttctccggcgtggtgtgctgctgacggctgacgctggctggtcgtggacatgtcgaagaagattgtggtgaagctggatctccatgacaacaaggacaagcagaaggccatgaaggtcgtctccacgcttgccggcatcgacgccatttccatggacatggcgtcgcgcaagatgacggctgatcggcacggctgacccggtgaacgtggtgagcaagctgcgcaaggcgtcctggccggcctacatcgagtccctcggcccggccaaggagcccgagaagaagaaggagggcggcggcgatgccaagaaggatggcggcgatgg

SEQ ID NO: 27639 - DNA, 382 bp, Oryza sativa
  Clone ID: uC-osflM202046b11b1
tactcaccattgttcaaatcatatcagctccagtttttactcacaagtcgcaagtgagagccactgagccagcatccaaccagtgtacatcatgaggactcaacgaatcctcctcgccgtagtagtgtccatggttgtttcctcagcgatgctggccgttgtctcctgcgcgcgggagaggaagaactacgtggttcatctcgacccgagggaggacggcggcgtcgccgactcggtcgagctgtggcaccgctcgttcttgccggaggccacgccggaggcggcgggggatgatggcccgaggatcatttactcgtacagccacgtgctgtccgggttcgccgtgcaactcaccgacgacgaggctgaggcgatgaggaag

SEQ ID NO: 27640 - DNA, 504 bp, Oryza sativa
  Clone ID: uC-osflM202046c08b1
ctcggcgcggcgcagaactgctcggcgacgctcgccggcaaccaccggatgcgcgacgccgccgctctcccggagaccaaagactggagggaggatgggatcgtgagccccgtgaaagaccagggtcactgtggttcctgttggaccttcagcaccactggttctcttgaggcagcatatactcaggccactgggaagcctgtctctctttctgagcagcagctggttgattgtgctactgcatacaataatttcggatgcagtggaggcctaccatctcaggcctttgagtacatcaaatacaatggtggccttgacactgaagaggcttacccttacacgggtgtcaatggcatctgtcattacaagcctgaaaacgttggagtcaaggttttggactccgttaacatcaccctgggtgctgaggatgagctgaagaatgctgttggacttgttcgtccagttagtgttgcctttcaggtgatcaacgggttcaggatgtac

SEQ ID NO: 27641 - DNA, 337 bp, Oryza sativa
  Clone ID: uC-osflM202046c11b1
gtacggccctgacaggaggatcttcttgccggagggtctcctggaccgctcagaggtgccggactacctcaacggagaggtccccggagactacggctacgacccttttggcctcagcaagaagccagaggacttctccaagtaccaggcctatgagctgatccatgccaggtgggcgatgctcggcgccgctgggttcatcatccccgaggcctgcaacaagtttggcgcaaactgcggccccgaggccgtctggttcaagaccggcgccctcctcctggacggcaacaccctcaactacttcggcaacagcatccccatcaacctcatcgtcgcc

SEQ ID NO: 27642 - DNA, 396 bp, Oryza sativa
  Clone ID: uC-osflM202046c12b1
tccccccggctgctgctgctgcagctgagcctccgttcttggaagctacagagagggagggcggagggaggcacttggtgaggcttttggaggaggaaagggaagcttcgggccccagcatcctcctcctcctcttgctcactcaccacgctctcctctcaccaaactctctcttatctccttccaagatcccaaccccttttcttctttttttttgtttgttcttgttaggatcattttcttgatctttcaagctcagctccagcactccccccgttcgtttccagctgcagcagagatcttggttagttggatttttagcttccgtgttttttgagcgagttccttgttaattgctccaatccgagaaaaatcacccagtggtctttgctttcc

SEQ ID NO: 27643 - DNA, 523 bp, Oryza sativa
  Clone ID: uC-osflM202046d03b1
ctttctcataaagaaaccctaggtgctcattccaccgccatcgcctccggcgaactctccaccgccccctttcctacatcccaccactattttataagccagcccttcatctcatctggagatctggttctactcatccaggaaagccccaatctttatcatagcaaggaggtcatgtcggaatcggccctcgacaaacatatagtggtgaaaattcccgatcatgttctgccagatgctttcataggagaaagtgttggtaaaggtaaagaagatggagcaaccgtagataacatggacccgtcccgcccttttctagttatcaagaagtctgatttggataaggctgatgagtgggttaaaataaaatatgcttggatggccaagtccttaacaaatgatataatcatcccagaccctacccctcaggtggtgcgggatgccttctttgatatatcctcccgttggactccgtcttgagaaaggacagtgtccggtgcttctttcgtttgttcgcggaatg

SEQ ID NO: 27644 - DNA, 522 bp, Oryza sativa
  unsure (1)..(522): unsure at all n locations
  Clone ID: uC-osflM202046d06b1
cttattcttctaatctattgagtttattttttccatgctcttgttgtggatttgaagctgcaagaattaaaggccaatcctcatagaaatgcagagggtacagttattgaagcatgccttgacaaagctaaaggatctcttgccaccctagttgtacagaatggaaccctaaacaagggtgatattgttgtgtgtggtgaggcttttggaaagatccgtgcaatgtatgatgatggtggaaagcttatcgataaggctgggccatccaatgccgtgcaggttttccctttcctttattttcctcgttccttttaccatgatccttcctaacatttcctaatataccatatttcggatgaaaaagttactgaaattacagttggttctcctcatgagatggcccctctggccatgacgactctaaacaaaatactcatcacaggtctgatgcaatttgacatanagagaaagcatctgaaactataaatgnttatgtgcattagaacttgtagttacatgaca

SEQ ID NO: 27645 - DNA, 566 bp, Oryza sativa
  Clone ID: uC-osflM202046d08b1
ctagcttttggatgcaggctttcacactcacgaagcgatcgttcatcaacatgtcgcgggacttcgggtactactggctgaggcttatcatctacattgttgtgacagtctgcatcgggacaatctacctcaatgttggcaccagatacagctcaattctggcaagaggtgcatgcgcttctttcgtcttcggctttgtcacgttcatgtcgattggaggattcccatcttttgtggaagacatgaaggtgtttcagagagagaggctcaatgggcactatggcgtgctggcattcgtgataagcaacacgatctcggcgatgccattcttgatcttgatcaccttcatctccgggacaatgtgctacttcatggtgcgcctccacccgggcttcacgcactacctcttcttcgtcctctgcctctacgcaagcgtcaccgtcgtcgagagcttgatgatggccattgccagtgtcatccccaacttcctcatgggcatcattcatcgtgcaggaattcaggggatattcatgctggtttcaggatacttcaggcttccccatgac

SEQ ID NO: 27646 - DNA, 440 bp, Oryza sativa
  Clone ID: uC-osflM202046d09b1
ggagagccatagcctctctctctctctctctctctagatatctctctctttttctctctagatctctcttttttcttgtatctctataggttgttagagcggcgacggcgagaagaggaaggagcaacaaggagtagatcatcagtatagagagcagcagcaatttgggaaggttcattattacagctctgttgtttcatttctttgaggagacgaagttagcaagcagggattgctgtttctgaatttcaaggagaagataacaatagcaaatgatgatgtcatctgggttccgctcggtgtgatcgggtctctgcgctgtcggttgctcatcagttgccattgtcatctgcaacaaagctctcatcagtacccttggtttccctttcgctacaacattgacaagctggcatctcatgatgaccttctgcacccttcat

SEQ ID NO: 27647 - DNA, 474 bp, Oryza sativa
  unsure (1)..(474): unsure at all n locations
  Clone ID: uC-osflM202046d11b1
ttcggcgcccaatgcagcacaaaccctagccctccctccccttgatctcgcgcgagcatggggaactgctgccgctcgccggccgccgcggcgcgggaggacgtcaagtcgtctcacttccccgcatcggccgggaagaagaagccccaccaagcgcggaacggcggcgtggggggaggcggcggcgggggcggcggcggcggaggaggaggaggagcggggcagaagcggctccccgtgctcggggaggaagggtgcgagctgatcggagggatcgacgacaagtacgcgctggaccgggagctcgggcggngggagttcggggtgacgtacctgtgcatggatcgggacaccaaggagctgctcgcctgcaagtccatctccaagcggaagctgaggacggcggtcgacgtggaggacgtgcgccgggaggtcgccatcatgcgccacctacncagagcgccagcatcgtgt

SEQ ID NO: 27648 - DNA, 516 bp, Oryza sativa
  unsure (1)..(516): unsure at all n locations
  Clone ID: uC-osflM202046d12b1
ctcactgcgccgccgcggagaggcaaacccgaaggagactaggagaggaagagcttcaccgcctccgcctccggcaaggaaagccaaagccaatcgaggccaagagcgagggggaaggaagaagaggggggaagggagagatgccgacggtgacctgcaacgcgtgcaacgcggggttcgatgacgaggagcagcagcgcctccactaccgctccgagtggcaccgctacaacctcaagcgcaaggtggctggagttcctggagtgactgaggctctgtttttggctagacaaactgctttagcagaggggagcaactctgatagcactccaatgctctacagttgtgctctttgtggaaaggagtacaggagctcanaagctcatgcccaacatcttaattcacgatcacatctcatgaaagcttctcaagagcctaatgcatncattgctggaataccatagtcaagcctcgtcctgagcgaggtcaacgcagggctccatctgcagtagaaga

SEQ ID NO: 27649 - DNA, 503 bp, Oryza sativa
  Clone ID: uC-osflM202046e03b1
cctagcactattgttgagtggatccccaccagatacgagctttcaattgtccagttagttgacatgataagatgcaagctcatggagatgatgtacacacgcagggagtcttctaatgcgtgggctgagttattaacacctgcagctaatcagaaattgcaggaagaagtgagcaaagcccacaccctgaacgtcatcccttctgaaagtaatgaaaatggcaatgtgttcaaggtgtgtgatgattctgttaatgttgtcaatattgatgcatgggagtgtacctgccgaaagtggcatatttctgggttgccatgcatgcatgcaattgcagtaatagagcggattggacactgcccttacgattactgtgtgaagtatttcagaacagaatgctaccgcttgacctacttcatgtcgataaatccaatacccgatgttatgctggctcctgctatattaagtgaacaatcttaaagtccagttacacatgcaaccccaat

SEQ ID NO: 27650 - DNA, 577 bp, Oryza sativa
  unsure (1)..(577): unsure at all n locations
  Clone ID: uC-osflM202046e04b1
gcagcatgcaacttagatcgatatcgatctcatgcatccacacagagcacctgcatatgcttctctccttggcaatattatgctttaatttcagctagcttagctgcagggtgtactgctagctccttgctaacttctgttgaaaaatggaacaggatatgccgggcgttgttggtcgatcggatcgtggacagttaccatgtcgcactatgcatgcacctagctgttcgatcgatcaatctccggcgtttcctttctcacgtattctaaggttaaaatctcaattagttctctcgtacaattttatgagtaaagattctacgactacatatgagtaaaatctacaatttaacaatttttatatgtacgattctacgatcacaacaatcctaagcatgcttggcacaattttagctctagctntcacctctctgaagttgaagctcagctaaacaatttcagctctacttaaaatggaagcggngctgngtngagcgttttcacaaaatgaactaggaagtggaattgagtttaagcagctctacactttactccagacttacttctgaagtaaaat

SEQ ID NO: 27651 - DNA, 487 bp, Oryza sativa
  unsure (1)..(487): unsure at all n locations
  Clone ID: uC-osflM202046e07b1
catgaacctcaagaaccctagacaattggcgacctcgaaaagccctagagccgtctccaatggcggaccaccagcccgccgcctcctcccccaagaggaagaagaagcactccaagaagccggaggacagcaatgccaccgtcgacgactccctcgccgccgccgcctccccctcccccaagaagaaggagaagcactccaagaagaagcgggaagccatcgatgccaccatggccgctgcctcccccaagaagaaggagaagaagcactccaagaagcaggaagacaccaatgtccccgagaagaagcnggaaggtcgtccatgtcaccgtggacgcctccctcacggcgccgccgncgcgggcgcagcccccgtcgtcgcctacttcccgaccggctacgaccccctggccgccggcggcggcaggaagggtagagaggccccccgcacgaggctgttccgccacacgaagcacccatcccgcat

SEQ ID NO: 27652 - DNA, 441 bp, Oryza sativa
  Clone ID: uC-osflM202046e10b1
tgtggaaaggagggagtgaagaacaaatcttgattcgtcctcactgcgcactgcccccccgtccgtgtggttccagctgatcaccagcagcggccggcgtcttctcgtctcgatccctcctgcctctttggccgcggctcgatttgggcggtcaagatgaacaggatgatgttcatggcgtgctgctacaacgatccggacatgctcatcgatccggacacggtctaccccatccgccccgagtgccgcgaagacgccgccaagacgcgattcaagcccaggcctggcctcactctaagtccaaggagatggaagctgcttcacaatgaagaaggtgtcctagacatagctggaatgatcaaaagagtgcagcgtgggggtacccacccaaatatcaaaggagaagtttgggagctcttgctgggttgttatgaccctaaa

SEQ ID NO: 27653 - DNA, 482 bp, Oryza sativa
  Clone ID: uC-osflM202046f01b1
catgtaagagacgagacgagggagagaaggagaagagggggccggccgcgggcgtcgtggtgttcctccccccctctctctcctctcctctcctctcgatctccatccttccttccatccattcctccccgcacccttcgcattgctctcgtcgtctcgattcggtcgaggatctccaggaaaagaggaggaagcgatatgggttgcttttcatgctgcggagcggatgatgtcggcaagaagaagaagcgcgacgatccttacgtcccgatccctgatccaggtggtaactatggacgtagcaagcccgggcccccagccccttcgcgttctccccccaccagcagaaatctgccaattgcagtaccggcaattccccttgatgaaataaagggaataaccaagaacttcagcagtgatgctctcatcggagaaggctcgtacgccagagttttctttggtgtgctgagagatggcaggag

SEQ ID NO: 27654 - DNA, 487 bp, Oryza sativa
  unsure (1)..(487): unsure at all n locations
  Clone ID: uC-osflM202046f07b1
ctttaccgcctcaacccggacgcagcagccgcagcggaagagggaagcgaagcaagcgaagctcgaggggagatggcgcgcggcgtggcggcggcggcggggggcaagggcggcgccgggaagaagaagggctccgtcaccttcgtcatcgactgcgccaagcccgtcgacgacaagatcatggagatcgcgtcgctcgagaagttcctgcaggagcgcatcaaggtcgccggaggcaaggccggcaacctcggcgagtccgtcaccgtctcccgcgacaagaccaaggtcaccgtcacctccgacgggcccttctccaagaggtacctgaagtacttgacaaagaagtacctgaagaagcacaatgtgcgtgactggctccnggtgattgcatccaacaaggaccgcaacgtgtacgagctccggtacttcaacatcgccgagaacgagggcgaggaggaggattagatgcactggctttttctat

SEQ ID NO: 27655 - DNA, 389 bp, Oryza sativa
  unsure (1)..(389): unsure at all n locations
  Clone ID: uC-osflM202046g03b1
ctctcttcctatctccttcctccccacccacccccaaatccacctcgccgtcgccgccgcgaaaccctaggcagccatagccatggctgcggccatcctcctccgccgcgtcccccccgcgcgggcccaggccacggcgctcatcgcggcgcgctcgatctcggactccacggcgccgctcaccatcgagacctcggtccccttcacctcccacatcgtcgacccgccctcgcgcgacgtcaccaccaccccggccgagctcctcaccttcttccgcgacatgtccgtgatgcgccggatggagatcgncgcggattccctctataaggccaagctcatccgcgggttctgccactctacgacggccaggaggccgncgccgtcgggat

SEQ ID NO: 27656 - DNA, 261 bp, Oryza sativa
  unsure (1)..(261): unsure at all n locations
  Clone ID: uC-osflM202046g04b1
agaagaagaagaagaagaaagactagtgcaatctagaagccttccaacggggaggagagagagggtaatccggggagtaggactagactactactagtacatgagatcgatcgatcgatcggcatctgcatctccgcccccgcccccgtggatctgaagcggcggaagagggatgnncncnncgnncgactccgggcagctgctagcctctgcctccttcgccctcggcgtccccctccttctactagcctgtgctgagct

SEQ ID NO: 27657 - DNA, 405 bp, Oryza sativa
  Clone ID: uC-osflM202046g07b1
tactatccaggctacaatccaaggctttgaatggggggtattttcaaaagaacggggtgaagacttgctcgcaaagagtgttgagattgcacgtgaagcgcgtgacatgtttctgaaggaacattcaggatcgttccatacaacatcctatcctggttgcagcttccattggaagttatggggcctatcttgctgacggctctgagtacagtggggattatggcgaagctggcacgttagaattcctgaaagattttcataagcgaaggctggaggttcttgcggcagcaggtcctgatttgatcgtctatgaaacaattcccaacaaattggaagctcaggtatgttattcattactacttacgccagggatctcatggctgtcatttaacaatgtgttcttac

SEQ ID NO: 27658 - DNA, 424 bp, Oryza sativa
  Clone ID: uC-osflM202046g08b1
gtcataccaggctacaattcaaggctttgaatccaagggattttcaaaagaacaaagtgaagacttgctcgcaaagagtgttgagattgcacgtgaagcgcgtgacatgtttctgaaggaacattcagatcgtcccatacaacatcctatcctggttgcagcttccattggaagttatggggcctatcttgctgacggctctgagtacagtggggattatggcgaagctggcacgttagaattcctgaaagattttcataagcgaaggctggaggttcttgcggaagcaggtcctgatttgatcgcctttgaaacaattcccaacaaattggaagctcaggtatgttattcattactacttacaccagggatcttttgcctctcatttacaatgtgttcttacaaaataatctctattggttcg

SEQ ID NO: 27659 - DNA, 310 bp, Oryza sativa
  Clone ID: uC-osflM202046h05b1
cgctttggcgccgcgacatcgacgtcgcgtggcgcggcacagtcgcattcgctggagtggatcaaggacacgcacttcgttatggtgccacccaagggcctcctccgggacaaagcttccgacgccatggtgcatcgagggtggctgtccatgtacacctacagggactctgagtccagccacaacaaggacagtgctcgagatcaggtgttgagcgaggtggcgatgctggtgcgcatgtaccacgaccaggaactgagcatcacggcgacgggacacagactcggtgccgtactcgcgacgctgaacg

SEQ ID NO: 27660 - DNA, 429 bp, Oryza sativa
  Clone ID: uC-osflM202046h06b1
catttatagaaaaaggaaaaaaaacaaaacacaccaggccaaataaaagcgacattgggatcgctcaccaccaacatcgtcctcgccgtcgccgtggtggcagcgctggtcggcggcggttcgtgcggtccgcccaaggtgccaccctgcccgaacatcacgaccaactacatcgccccgtggctccccagcagggtcacctggtccggccagccctacggctccggttccaccgacactggtggcgcgtgcgggatcaagaacgttaacctgcctccttacgacggtatgatctcctgcggcagcgttcgaatcttcaaggacggcaggggatgcggctcatgctacgaggtgaagtgtgagcagccggcggcgtgctccaagcagcctgtgacggggttcatcacggtcatgaactacgagcccttc

SEQ ID NO: 27661 - DNA, 371 bp, Oryza sativa
  Clone ID: uC-osflM202046h08b1
gtgttctggccactcatgacatactatacccagtcagatattcaggccacggtgggattgtcacagatgaacatacccaactagtggtgcgagaagttctcatggctttaccatttcatatgcttatctctggaggcttgacatgagctacttgctcacgtcgtcttggagacccacagcttctagaggaggctcatgacttccatgctagcagacacagcgcatgtggaggcatcgaatgacatgatgatatgatacaacgtgaatacggcgttctatatcactacgatgttctacataagcgatgaactgtttacatgacatactactatcctgttatccgttgatacactatgtatactactagcatg

SEQ ID NO: 27662 - DNA, 436 bp, Oryza sativa
  Clone ID: uC-osflM202047a01b1
ccgttttcggcggcggcggcggaggggaggcgtggggggctgtgcatgagcgggaccgggtggcgcgggtgcccgggcaggacttcgacgtcgggttcgcgcagtacgccgggtacgtcgccgtcagcgaggagcgcggcgcctcgctcttctactggttcttcgaggccgccgacgacccggcgtccaagcccctcgtgctctggctcaacggagggccaggttgctcatcaattgcatatggcgttgcggaagaagtgggaccttttcatgttaatgcagatggacagggtgtacatctgaatccctattcgtggaaccaagtggcaaatatcttgttccttgattcaccagttggtgttgggtattcggactcaaacgcctctggtgatatattaaataatggggatgccaggactgccaatgattctttgac

SEQ ID NO: 27663 - DNA, 311 bp, Oryza sativa
  unsure (1)..(311): unsure at all n locations
  Clone ID: uC-osflM202047a03b1
cccttttttacgtccacacgtcccccgagcgtccgnggggtatctttaaatcttctcgggggttccaaaccaacaccagctgataagccagtccatgataaaagctggggagctggacaaaccccctcatgaaaacccccctgggttgtccaagcgaggcaggcatgagacattcaatcatgaacaaacacccagtggtaagaactcctgaacctgctctgacaaaaacattgataccacaacgggaagggagccgtgaataacatggagcatccggaacatacatggaccactcaacacctgttctgact

SEQ ID NO: 27664 - DNA, 511 bp, Oryza sativa
  Clone ID: uC-osflM202047a04b1
agaatttcctaggtgctcattccaccgccatcgcctggggcgaactctccaccgcccgcgttcctacatcccaccactattttataagccagcccttcatctcatctggagatctggttctactcatccaggaaagccccaatctttatcatagcaaggaggtcatgtcggaatcggccctcgacaaacatatagtggtgaaaattcccgatcatgttctgccagatgctttcataggagaaagtgttggtaaaggtaaagaagatggagcaaccgtagataacatggacccgtcccgcccttttctagttatcaagaagtctgatttggataaggctgatgagtgggttaaaataaaatatgcttggatggccaagtccttaacaaatgatataatcatcccagaccctacccctcaggtggtgcgggatgccttctttgatatatctccccgcttggactccgtcttgagaaaggacagtgtccggtgcttcttccgtttgttcgcgga

SEQ ID NO: 27665 - DNA, 501 bp, Oryza sativa
  Clone ID: uC-osflM202047a05b1
cccactcgtccgcaaccctagccgctttccccatggggtcctcccagaactagaatttggccaccccgaatcccttccatggtaggacttccgtttgattccgggtcgaatccgtcgcctccgatgccggaacggtgaggttttccctccctttatatggacaacacgcgtttgttttttctgttgcgcaggtttcagatcttggatggacttgctcatccttcggcggccatggatctatcggcggaagctgctgctgctgctcgtcctcgcgttcggcgagtcagatctggagccgatctgacctcttagaggtccggttggggcatgctccgtacgagctggcgtggatgaagcggcggggcgagggaagaggctggtcgtcgcctggatcctctccatcggggcctcgcgcgatgatgtctctttgtattgataattattcgatgaactttcgataattattagatctaagagatgttgttcgagggagccgtgtgc

SEQ ID NO: 27666 - DNA, 510 bp, Oryza sativa
  Clone ID: uC-osflM202047a09b1
gtcctctcggttcctccacaaagagggagggaaggggggaagggtgtcgcccggggggcaccccgatctgcctccgccgctccgctcctccgcgcctgcgaaatctaccaacgctaactcagcaagatgggtgccggcggcaggatgacggagaaggagcgggaggagcagcagaagctgctcggccgcgccggcaatggcgcggccgtgcagcggtcgccgacggacaagccgccgttcacgctggggcagatcaagaaggccatcccgcctcactgcttccagcgctcggtgatcaagtccttctcctacgtggtccatgacctcgtgatcgtcgccgcgctgctctacttcgcgctggtcatgatccccgtgctgccgagcgggatggagttcgcggcatggccgctctactggatcgcgcagggctgcgtgctcaccggcgtgtgggtcatcgcgcacgaatgcggccaccatgccttcttcgactactcggtgctcgacgacatc

SEQ ID NO: 27667 - DNA, 242 bp, Oryza sativa
  Clone ID: uC-osflM202047a10b1
cccgccacatatccagtcttacccaggggggctcattaaataatatgggggggcaccaacaaaccttatcatggaacgacatttcgtttgacttccggtcgaatacgtcacactccttactacgaccggactgttatccctacctttacgtggacaaccatcgatagtacttttccctcgacaaggtcacagtctaggatcgacttcacttagcctccctcagcgatgaacttatcggcctc

SEQ ID NO: 27668 - DNA, 555 bp, Oryza sativa
  unsure (1)..(555): unsure at all n locations
  Clone ID: uC-osflM202047b05b1
ctgtgagcaaccatgtccctaagtctgatggagtgaaaatccaggacggcacaagtagtggtcatcagatggcagaagtagaaccaaaacataccaatgagcacacatttgatcaaaatttggaccttgaagtagcacaggttgtttgtgagaatacaaagcaagctggttcatcggagcaaactgttaaaatgattagtgagcgctcggtaacaactgataagtacagtgtggaagaatcacagacatcatgtgatcgatccatttctgagcatactggtgctgctgacgaaagtgttacaaaaaaacctgttgaagtgcctgagaaaagtgattattcctctgcttctgtggagcaatcatcttcatataccaagaaggagaaaattatgcatcctcaagcatctgggcagtcatctccttctacaagcgcattcaactcaactgagtcttcacatgaacctccgagtagtgcataccctcctatcaattcatttncagaagttactancgcagggatgcttcaacagctcatagcaatgcataaggacttgc

SEQ ID NO: 27669 - DNA, 317 bp, Oryza sativa
  Clone ID: uC-osflM202047b06b1
ggcgcttggtgggcgcaggatcagcccggagcaggggccattcggtgcccacgaggagcggcgctgcacctatgctgctgctgcaagcggccgatgccgtaagcccaacaggagggatctggaccgacaacagacgtgcacctgtaccttaaaccgagggacgccggtagggacataatacacctgcgcgcgtgatatctctttctacggaactcatgcctatactcctggaacttcgaccgaaggggtgaggtctgggaggagggggtcggagtgaccaggcgtaggggattgctgaccaaagacacagggctcca

SEQ ID NO: 27670 - DNA, 535 bp, Oryza sativa
  unsure (1)..(535): unsure at all n locations
  Clone ID: uC-osflM202047b08b1
ctgtctggaaacccagatcgccttcttcgctgggggtggggcgacgaaacttgcgcgatctcccctctcctctcctccgctcgaatctgcgcaggcttcttctacaatctcaaacatggttgttgcaaatggtaatgtcgacacggaggaaggaactcttgagattgggatggagtacaggacagtctctggagttgctggtcctctagtcattcttgataaagtgaagggtcctaaataccaagaaattgtcaatatacgattaggagatggcacaactaggcgtggtcaagtgcttgaagtcgatggggagaaagctgttgttcaggttttcgaaggaacatctggtattgacaacaaatacacaactgtacaattcaccggtgaggttctaaaaactccagtgtcactggatatgcttggacgtgtcttcaatggttctgggaaacctatagataatggcccaccgattttaccagaggcttacttggatatntctggaagttctatcaatccagtgaacgaacataccctg

SEQ ID NO: 27671 - DNA, 546 bp, Oryza sativa
  Clone ID: uC-osflM202047b11b1
ggcctcgagacctatgttatgttcgctattggcggcgtaatgacgatggaagttacgttgtgctgtttcgatctacagagcatccaaactgtggacgtcaaaaaggatatgtgagggcttttattgaaagtggaggtttcaagatttctcctctcaagtgtcgcaacggaagaccccgcactcaagttcaacacctaatgcagattgatctcaggggatggctcgtcaactactctccttcctttcagtatcattctttgctgcagatacaaaactgtgtagccggcctacgagaatacttctcccaaacagacgaaacacatataactccaaggattcctgtgatggaaaacatggttgacacatctgcagtacagaaagatgacaagaagagtaccgaagaagtagactccaagactaaaacaccagatcgaggacatgcggacagtaaaaacatgggaatcattgatgaagaaacagacgaggatgaggactatcaggttcctgaagctacatagaggagatcctaacaaagatgctagcgtg

SEQ ID NO: 27672 - DNA, 427 bp, Oryza sativa
  Clone ID: uC-osflM202047c05b1
gggggatttgtccgaccaggataaagatgggatgctgtctttccgggaattttgtactgctgtgtacttaatggagaggcacagagagcagcgtcctcttcctgatgtactaccagatggtatctgggcagaaggaatttcactaccttctacggggcaatttgcagaaaaccctactggcccagctccccatccaagtgctggatttacaagtagagcaatgccaggacaacatcatgggatgcctccgtcatccatgaaaccaccacctcgaaggccgctttctttggatgctgatgatgcagtgcgaacagaaaaacagaagccaaagatcccagtcttggaggaacatcttactggccagctaagcaaggaggagcaaagtgcattagatgcaagtttaaagaagcttcagatgctgataaaa

SEQ ID NO: 27673 - DNA, 386 bp, Oryza sativa
  Clone ID: uC-osflM202047c11b1
gccttcgtcgcctgcgacggccgtgagctcatcgggggacgacgtctctagctagcagcgaccgttctttctctcctagggctctcggtgctgagatacggcaaatcaagagagcaaaattttggtggtacatgtggcgattctatgtcgacaaggcgtcatcttgcagtatttaccactgcaagccttccatggatgacaggaacggccatcaacccgttgatccgggcggtctatctcgcacaggatggcgatagggaggtcaccttggtaatcccctggctttttctgaaggaccaagacttggcttacccgaataacattgtgtgcggctcgcctttggagcatgccgcctatgctcgacgatggattgaggagaggaatag

SEQ ID NO: 27674 - DNA, 547 bp, Oryza sativa
  Clone ID: uC-osflM202047d04b1
gtctttcaacctagccaagcaggagaaggagaaggggacgctgggatgacaccaccacaaagccacaccggccttgagcttcgttctacccagtcagaaacccagtgttgttctagtctaagctcgtagctagtctgcaagaaccccgacagaaaaccggcaggaacgccggccgccgccgccgcacgcacgcacgtcgatcgggcggcgccggtgtgctcgtgatggggaactgcgccggcgtgcaggggaacgccgagatcaacccttcgttcagtgctcccaactcgtcagggacaggttccaagaacagcagcaagaacggggccgattccagcacgttcggcaccaaggcgtcggcgtcgtcgtcggtgccgccgactccccggagcgagacggagatcctgcagtcgtcgaacctccgcaggttcaccttcggcgagctcaagggctccacgaggaacttctcgccggacagcctgcttggggagggcgggttccgctcggtgttcaaggggtggatcgatgagcgaacgctgacgcccgt

SEQ ID NO: 27675 - DNA, 496 bp, Oryza sativa
  unsure (1)..(496): unsure at all n locations
  Clone ID: uC-osflM202047d05b1
gttgtttattccgaccaccatgggcatcatgcttcgccggcattagggggatgcatgtgcctcagatgttttactcagcagctcatcaatgcgtacactgttttattccgagctgggacagtgcacgcagtttctcagtctatagaagccactcctgttgattcatctgaaagttcatttgacacatatcgttcacccccaagaccacttccatatgatgatcctagattctcccctcctcagcgtgattggttagtgtcaaggcatggaccttcgtgccattccccagaggaatcagaaccactgagggcaaatgacgacgaggaaatggaaacaccaagttcaacaaataagtcaagtaaaacaaactatgacacanaaatgaaaagaagcagctctactcatggagagaagctgccagcaaaggaacctggaaattatttcacatactgttccccatccgctgaagatgagatgtcctgccaacatgtcttga

SEQ ID NO: 27676 - DNA, 430 bp, Oryza sativa
  Clone ID: uC-osflM202047d06b1
gcgcacttttgctgctgatgcgacggagtaccaaaggggggggacgaggaggaggaggagggatattcttagagtctactagactcacacactagctttagcttaactaaaagaagaaaaagaaaagagaggcacaataatagggtaggcatggcggagcagctgggcggcgtgggcagcccgcagctaagcctgagcagctgcagctccttcctttccatctccagcgccggtaccagcgccgccgatggtgctccccatctatccctcggcgtgggcggcgccgaggagctggatctgctgctgcaggtgggcataggctgtggcggtggcggctgctgctactaggaagaggaggagcgcaagaccatccggatgatgaagaacagggagtcggcgctgcgctccagggcaaggaaaagggcgtatg

SEQ ID NO: 27677 - DNA, 297 bp, Oryza sativa
  Clone ID: uC-osflM202047d07b1
gttttacgcaaaggaatcagatgcctgcccacggggggctttgtatttatcagggggggctgttgtgcctgtttctgctcactgcaagggtggctatgctcttcccaatcctggggccggtctgatgcgcatcgctaagtaccattctatggggctctagactatccaggcctctggtgagcatatcattgtacctgctggatagctacaccttagaaaacaggttgaaggatctgcattggagattacatgggttgcgctaaaatgaactgctccacacctggtgacctttgctat

SEQ ID NO: 27678 - DNA, 561 bp, Oryza sativa
  unsure (1)..(561): unsure at all n locations
  Clone ID: uC-osflM202047d10b1
gcttctcgcgctcaacgtgcccaccggcgagacgtggctcaccttcggcgaccgcgtcctggagaatgacctctccttcatccgcccggactcgccgctgctgctcacccgcaacagcatcaaccggagctgctccacgccctgcctctgcccggtgtccaaggacttcgagcacaaggatcgcagcggcctggtcgagatgctcggctgctcgatcagctgcgcccgcgtgaagcgcctcgtcgacgacgtggtcaccgccatcaggagcggcgtggatccggtccccattggcagtgggcttggtggctcctactacttcaggaacatctccggcgacagggttgccatcgtgaagccgacggatgaggagccctttgcacccaacaacccgaaggggttcgtcgggagagcgcttgggcagccgggactgaagaaatctgtcagggtgggagagacagggttcagggaggtggcggcgtacctgttggatcatgataacttcgcanatgttcctccacggcgttggtgaagacacacactcaattttcatatcaattg

SEQ ID NO: 27679 - DNA, 338 bp, Oryza sativa
  unsure (1)..(338): unsure at all n locations
  Clone ID: uC-osflM202047e02b1
aggtttcagaggaggcaatcccctgtttcttgctcggggcctgtgttcccggcggcggggatggggtgcgcggtgtccaagggcgcggcggtggcgtcgccggcgtacgaggcgaccacgacgtcgtcatcgtcggcgtctgcggcgtacagcgtgtcgaggagcgcgtcgactggcgcggcggcggcggatgtggcgtctatttggagcctgccggtgcggctcgactcgtacgaggatgatggcgacgggaagaagaaggcggcggctcgtgggggtggtgaagtgttcgtccgtcgttntcgtcagcggtggcgtgcggctcgggaacatccaca

SEQ ID NO: 27680 - DNA, 447 bp, Oryza sativa
  unsure (1)..(447): unsure at all n locations
  Clone ID: uC-osflM202047e04b1
cggtcgcgtggggccaccccctcactctcctcctctgctcttcaaccactggtgtgtggtgtgtgtggttctcttctcacaggtagaaggaagcaatggcgatgccgcccaagcccggcgatcagccctccccggggcggagccccaaccccaacctcaacctcccctgcccgctcccgcccatccctagctggggcggcgcgtcatcngccaccagtaccgccacctccggatcctcgtcatccgaggcaagacggtggccatgttcaagcgcgatccgagcaagaaccccggaatccaacctattcgaaagggtggtgtaagtcaccacttttatggtggaggagcttggtcgcccgattacttagccatggggaactgtatttcttgcgggattacaaatcgctggatcaaacaaagaaaggagagtatgcttgtggggacccc

SEQ ID NO: 27681 - DNA, 138 bp, Oryza sativa
  Clone ID: uC-osflM202047e05b1
cctatgcttgcggccatgcctccgcccacaggctggggggagtcttttcaatcttcgcgcggttttaggaacccaccgaacacgttccgatttcctcacccacactacagtgatacggcccctccaagctttggcttc

SEQ ID NO: 27682 - DNA, 563 bp, Oryza sativa
  Clone ID: uC-osflM202047e07b1
tcactatagggaaagctggcacccgggggggcccctccccaatttcccggtggacacccacgcgtgcggtctcttaaaaagtttcagcagctgtctccagagatagtacagattgaaggaaaggatgggactgctttatatggaactctttatctccctgatgagaaaaaatatggaccacccccatacaaaacactcgttaacgtttatggcggtcccagtgtccagcttgtaagtgactcatggataagtacagttgacatgagagctcagttcctgcgtagtaagggtatattagtttggaaggtaactattctttcctctatttttttttctttgctctttgtttaacaagatagattccgattgaggattttttttttctggtttcactttggtccataatgtcaccaatcttaaggtatgctgtgcaatgcattgcatgggtaaaattctaaactaaaaatgattttaataaacttatggccaagatagcaccatttaattctttttgtttacaagtatgctgtgcatgcatggcatctcatccattaatttttcca

SEQ ID NO: 27683 - DNA, 341 bp, Oryza sativa
  Clone ID: uC-osflM202047e09b1
gtgttgcgggcatgggcatgggagaggttgcagaggacatatacacctaagatgggaccgtggacctaaagggcggcccgggcaccaggatgaacaccggcacctggcatgcctgccgctacattctatgtaacgagtgctgcaagaggctgggctactatggcatgagcaccaacctggtgatctacatgaagacgcgggtcggtcaggagagcgccattgtcgacaacaatgtcaccaactggtcggtgactagatacatgactcgccttgacagtgccttgttggctgatgcctacatgggcaggttatggaccattgccagctctatgagcatctac

SEQ ID NO: 27684 - DNA, 453 bp, Oryza sativa
  Clone ID: uC-osflM202047f01b1
gtcttgtcgagccgagtcgagccaatctctcttcggggttttctcctctcctctccggggtccgatccccacgtatggcggctgctgcggcatctgcggcggcggcaacggccgcggaggacagggcgcggctgctgcggctggaggagcacgcggcgcacggcggcggcggcgcgtgggagtacctctgccttgcccgcaggctccgcgcgcgccgtccggagcccgtcctccgcctcggtctggccctcctgaacaactcctccgcccgctcccgtctcgcctaataacagtggacgctgtatgagcaggtggcatcggctgccatggattgccagcgtctcgatgtggcaaaggattgtattggagtgctttccaagcagttttctggcagcatgcgggttggtcgattggaagccctgatggttgaagcaaagggtgaatggactgatg

SEQ ID NO: 27685 - DNA, 398 bp, Oryza sativa
  Clone ID: uC-osflM202047f02b1
aaagtttcagagagagcagtagtagtagcgagctcgggggataacggacgatcaccggtgatgggggagagagatgagcggtggtcaggacctgctgctgccgccggggttccggttccacccgacggacgaggagctggtgatgcactacctctgccgacgctgcgccggtctccccatcgccgttcccatcatcgccgagatcgacctctacaagttcgatccatggcagcttccccggatggcgctgtacggagagaaggagtggtacttcttctccccgcgagaccgcaagtacccgaacgggtcgcggtcgaaccgctccgccgggtcggggtactggaaggcgaccggggccgacaaggccgggggctcgccgaagccggtggcgatcaaga

SEQ ID NO: 27686 - DNA, 358 bp, Oryza sativa
  Clone ID: uC-osflM202047f05b1
gactggccatttaaccaggcgccttggggggatgggggctggggaccagggacacatgttgggatatgcaactgatgagacccctgagttgatgcccctcagccatgtccttgctaccaagcttggcgctcgtcttacggaggttcgcaagaatgggacctgcgcatggctcaggcctgacgggaagacccaagtgactgttgagtaccgcaatgagagcggtgccagggtccctgtccgtgtccacaccgtcctcatctctacccagcatgatgagacagtcaccaacgatgagattgctgctgacctgaaggagcatgtcatcaagcctgtcattcccgagcagtaccttgatgag

SEQ ID NO: 27687 - DNA, 372 bp, Oryza sativa
  Clone ID: uC-osflM202047f06b1
atacttttcgatgcaatacctcccaggagacgctgggggttctttatgtcgcttccgggggggggagcctctctggtgttcctcctcatcaaggttttgcgaggagaagaaggcgagacagaaagaagttggttgtgacgaaggaaaccgcagaagccgcagccatggcgccatctcctgcagcagcggttggccccactttcgaggaccttgagcgcgacctgcaagccgcattgatggaccagaaccactcggccaccgacgatgagctcagcatgttccgtagcggcagtgctcctcccactgtacacggtgctcgcactgccagtggttccctatatcctgctgcacctgattcacgtcaacagcttt

SEQ ID NO: 27688 - DNA, 444 bp, Oryza sativa
  unsure (1)..(444): unsure at all n locations
  Clone ID: uC-osflM202047f08b1
acttgaagctgttagggatgattttgttttctcagtggaagataaagatgttacagaggtagattccgtattaaccactggtgaagtgttagatttgatacagtccagatctgttgatttcaagaccctagaggagtctcccatggacagattattaaccaatgttgatgatgacggtcaactatatggggtttctggtggctcagggggttatgcagaaacagtctttcgacatgcggcacatgttctcttcgatagaaaaattgaaggatcagttgatttcagaatcttacgaaattcagattttcgtgaggttacactggaggtggagggcaaacctgttcttaagtttgcactttgttatggattcagaaatctgcagaacattattaggaagattaagatgggaaaatgcgaatatcactttattngagttatggcatg

SEQ ID NO: 27689 - DNA, 479 bp, Oryza sativa
  unsure (1)..(479): unsure at all n locations
  Clone ID: uC-osflM202047f09b1
ctttattgcggttcatttaaaggaaagaagagggggggaggtgaacaaggaattgagcaaattaagagagaccgtgatcgtacccttaagactgatgacactgagcctggaaacctgaaaggagacaatatgaagtctgaaattgcaaagattacagaaaaaggtggacttgcttatgctgaagctggggagaagctagttcatctcatgcaacttgatcgaactgaacggaagttagattttgctggtcgagtaatgcttgcagatgttataacagctacagaaaaccctgattgccttggcagattggtgcaactaaggggccttgctgtatctgatgattggcttcaagaggctcacaaagggaagtctggtgaaagtggtagttctaaagaaactgatgagcctatggaagaacttctgctagcgctgcttcgtgcatggncgacattacctataaatcttaatgccttacaaag

SEQ ID NO: 27690 - DNA, 274 bp, Oryza sativa
  Clone ID: uC-osflM202047f10b1
ctctgcgtccagcctgctcaagacctccttcgggggggtgcgtctacccgccgacggccgcaaccccaccgtctgcgtcgcgccgcgcaccggcggcgccatctgcaacttcatctcgtcgtcgtcgtccactcccccctacgacctcaacgccatcaggttcagccccatcaaggagtccatcgtgtcccgcgagatgacccggcggcacatgaccgacatgatcacctacgccgacaccgatcgtagtcgtcgtcggagcccgctccgtggg

SEQ ID NO: 27691 - DNA, 320 bp, Oryza sativa
  Clone ID: uC-osflM202047f11b1
attttgtcgactctagagcaccaaacgataccgggggggatagtgcagcaactcagggaggctttccccccaccgtgcttctgatgctcgcgccgggattctaggctcgtgtgatctacgtggccggtgacgtgccatcagcaaccatggaaggacacaggagggcggtgaggactgtccgggtgcccaacatctcagatctggcatgggagcagaaggtgcgtgagttcttctgcttctacggcgaaaaccagcacgttgacaacagatgcgatggggtggccacggggaggactgtctactgcacgttaaaggatccc

SEQ ID NO: 27692 - DNA, 237 bp, Oryza sativa
  Clone ID: uC-osflM202047f12b1
gttttcaccgatgcaaccgtgcacaacataaggggggccatactaaaaggcatcgggggcgacatagacgcgcgccatcgccactacctaccacccaaggggaaggggtccaacgtaaacgaaagaaagtggactctactgatcacagaccaaaacatcctcaggctggtgattacggacaaatggctatgcaacgactcctagtccttgagaccgaccaacctgcatcgcgaaggc

SEQ ID NO: 27693 - DNA, 424 bp, Oryza sativa
  Clone ID: uC-osflM202047g10b1
gctgtagctactgccatatatgtattcttctcccggagaaagaaggataatactgtcatgccatgggctacagggctgagtggacagctaaagaaggcatttgtaacaggtgtgccttctcttgagaggacagaactggaggcggcatgcgagggtttcatcaatgtgatcggcactttacctgaatgcacattgtataagggaactctgtcaagtggagttgaaatagctgttctgtccacttcagttaactcttcacaacaatggtcagctcagtctgaggagcaattcaggaacaagatctcggtgctgtccagagtgaaccataagaacttcatgaacctgattggttactgcgcatgcgaggagccattcaccaggatgatggtgttcgagtatgctccatgtggttccccttttgagc

SEQ ID NO: 27694 - DNA, 516 bp, Oryza sativa
  Clone ID: uC-osflM202047g11b1
atgcttgcaagaagagacgagacgagggagagaaggagaagagggggccggccgcgggcgtcgtcgtgttcctccccccctctctctcctctcctctcctctcgatctccatccttccttccatccattcctccccgcacccttcgcattgctctcgtcgtctcgattcggtcgaggatctccaggaaaagaggaggaagcgatatgggttgcttttcatgctgcggagcggatgatgtcggcaagaagaagaagcgcgacgatccttacgtcccgatccctgatccaggtggtaactatggacgtagcaagcccgggcccccagccccttcgcgttctccccccaccagcagaaatctgccaattgcagtaccggcaattccccttgatgaaataaagggaataaccaagaacttcagcagtgatgctctcatcggagaaggctcgtacgccagagttttctttggtgtgctgagagatggcaggagatctgcggtgaagaagctcgactccagc

SEQ ID NO: 27695 - DNA, 458 bp, Oryza sativa
  Clone ID: uC-osflM202047g12b1
gtttattgtgctattattgtggccacaattagaggggttaaattgcatggtgggggcgctgatgttgtggctgggaagcctttggatcatgcatatgtgagtgaaaatgtggctcttgttgaagctggatgcgtcaatcttgctaaacatatcgcaaacacaaagaggtatggagttaatgttggagttgcaatcaacaagtttgcatcagatactgaagcataaatggacgtggtgcgaaatgcgtctttggctgctggtgcttttgatgctgctgtctgcactcaccatgcgcatggtggtaaaggagcggatgatcttggactcgcggttcaacgggcatgtgagagccaggcagaccctctgaaatttttgtatcctttagaatctggcataaaggagacgattgagtcaatagctaagttctatggtgctagcggcgttgaatactctgaaca

SEQ ID NO: 27696 - DNA, 496 bp, Oryza sativa
  Clone ID: uC-osflM202047h01b1
gcgctgttttttcctgcaatggggtggatatggagttgggggctcttccacggaaggttggatgggaccttccaaggtttgtgaagatagttgaagttggaccacgggacggtctgcaaaatgagaagaatactgtacccacatctgtaaagattgaactgatacacaaattggtggcttctggtctatcagtagttgaagccacaagttttgtgtccccaaaatgggtgccacagctagcagatgcaaaggatgtggttgaagggattaagcatgtgccagatgtgcggtttccagtgttaactcctaacctcagaggatttgaggctgctgttgcagctggtgcaaaagaagttgcagttttcgcatctgcctctgaatccttttctaagtcaaaccttaattgtaccatcaaggaaagccttgttcggtaccatgatgttgtaacttctgccaagaaacatggaatacgaattcgtgggtatggttcatgtgg

SEQ ID NO: 27697 - DNA, 364 bp, Oryza sativa
  Clone ID: uC-osflM202047h03b1
cgcgcgctttttgctgttctccctgcaatgcttcggtccggggccaatataagacaaccacttggggtgtgcacatgggctaagacgccataatcttgtattgacgtctgcatttgcacggcggtcgccagcgattgggcaccacaggcatggtgtcccgccggactggcctgattgctgcacttattatggctggggttctggagttcgtccacgcagacaaatacaagccaagtgagttcatacttgtgaactggggttcatacaaggaggtgcacgacatcgactgcttgaaatggcatcatgataaggacagtgagtggctcatccacggtcagaaggcatctatcatggcaaatgcaga

SEQ ID NO: 27698 - DNA, 405 bp, Oryza sativa
  Clone ID: uC-osflM202047h04b1
gatggaccgggggttctgcttattttggtctgtggtagtgattatatgcaactactccagctctgtcctatggtgtacactattcatattactagagaccactagactgcatatgtttccaaagagcagaaactggcgaatagagatatttagcgatatgatcttcagtatcatatagtcatggatcacgtattcaaccgataatattggggcacactcttaggctgaacctgggcctgtttgaaagcttggttcatagaatcaaaaaggggcttctaggacccaccgggaatacaagtgacatatacttacctgcgtaaagaatcttgatgctgtcaatctacaaagatagatactgttaagttagcaatacatacccacttacacggtggataccaaggtgac

SEQ ID NO: 27699 - DNA, 400 bp, Oryza sativa
  Clone ID: uC-osflM202047h05b1
gtgttttttttggcgctccggtgccgccgttttcggggagcgtggttgcctgatccaggaacaggatcggaggccaggtcccatgcatgcatgttaattagactgccactgatcacttgattccattagccattagctgtgtctcatgcagacggacacggcatacaacacacatagatcgatcggaggttgattgcccggtcatgacgacgacggccgccggccgagccaccctgtgcgcggcgagggaggagcacgagctcctggccacccggctgaatgtgaacggtatccggccgtcgcattgcgctcggggatccatcctcatgtacctgaccgtgccggggctctccatgatgcccatgcgggtgatggcctacgacttcatctgctgcgtcaa

SEQ ID NO: 27700 - DNA, 511 bp, Oryza sativa
  Clone ID: uC-osflM202047h09b1
atttatgcattccctgaggagaagaagcaaaaagagaaatgaacctcggggttccattgaggacataagggatgttcaagatcttcaagctgttgatgcatttcgacaatgtttagttgatgaggacctgttgccgcaacagcatgatgattatcacacaatgcttaggttcctcaaagcacggaaatttgatgttgagaaagcaaagagtatgtggtcagatatgcttaaatggagaaaggaatttggggctgacaatatagaggagtttgactacaccgaggcggatgaggttatgaaatattatccacaattttaccatggagtggataaagaaggaaggcctatctacatagagttaataggaaaagttgatgcgaataagctaatgcaagtaactactatagagcgatatgtgaaatatcatgtgaaggagtttgagagatgcttccaaatgagatttcctgcctgctcgattgctgcaaaaaggcccatagattcatttactact

SEQ ID NO: 27701 - DNA, 401 bp, Oryza sativa
  Clone ID: uC-osflM202047h11b1
ggctgaggagcatctttctggtctttcagcagacgggccttactcagaattccaccgcaggttccaggaacttggtctggagaagggttggggtgactgtgccaagcgttcccaggagaccattcacctccttttggaccttcttgaggcccctgatccgtccaccctcgagaagttccttggaacaatcccaatggtgttcaatgttgtcattatgtccccacacggttacttcgcgcaagccaatgtcttgggttaccctgacactggagggcaggttgtctacattttggaccaagtccgtgctatggagaatgagatgcttctgaggatcaagcagcaaggtctcaacattacaccacgcatgcttattgtcaccaggttgctccctgatgcaactg

SEQ ID NO: 27702 - DNA, 498 bp, Oryza sativa
  Clone ID: uC-osflM202048a02b1
ccctttctttctcaaaagagcagcgtcgcctctccggctgcgctctatcagctacgctgggggaacccaatagaagctcccgctcccccccccttccgctccaatggctaaggaacccatgcaccagctccacaccggagccgcaagacaaaacggatatgctcttgcccccatgattgctaggggagaagacgtctggacgcctgcccaagcctgttcttctacacatgcttgacattccacacacctacatgaagctcttaatggccttaagatggaactgggtgatgctgcatgcccccttttgaagggaatcgtcgcaacaaccgatgctgtggaggccagcactggtggaaacgttgcgggcatcgttggcagggagaccaggaaggagggaaagcaaaggaaggaccacatgacaaaaaacggctccatctacatatcccaagctgatgttcttagacgctcatgcagtctctaaccgcaaggttctggcaa

SEQ ID NO: 27703 - DNA, 509 bp, Oryza sativa
  unsure (1)..(509): unsure at all n locations
  Clone ID: uC-osflM202048a04b1
ctctttcttcccctttgccccgccctctcgtccggccgtttcgtggccgtttccgtgggtcccatccacttgtcctcccgtgcaatttacgaaattgcccctatcatcttcgggtggtccccacactccacgactttctcttgccccctcccttttctccctccctttgtttattccccaatcgctatcgccgagcgattccgtctcgtctcgtctcgtctcgccgctgctctgctggcgtggcggcacgggggccgtcgagatgtcgatctgcgcgagggcggagccgccacgtggcggcgggacgctcggcaagcggaaggagcgggaccgcccgtcgtcggaggagaanggggcgccgtcaccgtcgacgacgacgctgttcccggcgatgtccgctaggccccagccgcccaggccggctcaccccgctcggttcgtcaagcccatgccaccgncgccgccgncatttcccaagggtggcnggcgggagcagcttcaagctcatg

SEQ ID NO: 27704 - DNA, 303 bp, Oryza sativa
  Clone ID: uC-osflM202048a08b1
gtgttttctgcgacgaggcgcggccgttgccagtgggggccatccccgtccacacgctcttgatgggaaagaaatcggcgggcaccaaacaatatgatgatgcgactatggaggtgcagaaggtcctactcgctgcaagcgctgttacgttaaaggatataatgacgtggcggcctacaaggctaaggtacagtacaatcatgataagatgtaactaggtcacaagtcttaaatcggaggctacagcgagatagtgacgggcatccgtgttcactaaggcaacgactgctagttgctactagc

SEQ ID NO: 27705 - DNA, 524 bp, Oryza sativa
  Clone ID: uC-osflM202048a12b1
gtggtggagaggagaggagatcagggggaggaagggtggccggcgcagcagatcggggcgggcggatttaggggaggagcgcgctagccgggagcggcggcgatggatgaggagtacgacgtgatcgtgctggggacggggctcaaggagtgcatcatcagcggcctcctctccgtcgatggcctcaaggtccttcacatggacaggaacgattactatggaggagaatctacatcccttaatctcactaagctctggaagagattcaaaggcaacgagaccgctcctgaacatctgggtgtcagcaaggagtacaatgttgacatggttcccaagttcatgatggccaacggtgcactggtccgtgtactcatccacacgagtgtgacaaagtatctgaattttcaggctgtcgacggcagcttcgtgtacaacaatggcaagatccacaaagttcctgcaactgatgtcgaggccttgaaatctaatctaatgggccttttttgaaagcgccgtgctaggaa

SEQ ID NO: 27706 - DNA, 525 bp, Oryza sativa
  Clone ID: uC-osflM202048b02b1
ccgtgtgatgaagaagaaaaaggagaggaagatggtgtcgggttcggggctgtgcacgcggcgggtggtggtggacgcgcggcaccacatgctggggcggctggcgtcgctggtggcgaaggagctcctgaacgggcagcgggtggtggtggtgcggtgcgaggagatgtgcatctccggcgggctcgtccggcagaagatgaagtacctccggttcctccgcaagcggatgaacaccaagccctcccatggccccatccacttccgcgccccctcccgcatcttctggcgcaccgtccgcggcatgatcccccacaagaccccccgcggcgaggccgccctcgccaacctcaaggccttcgacggcgtcccccctgcctacgaccgcaccaagcgcatggtcgtccccgacgccctcaaggttcttcgccttcagcccggccacaagtactgccttctcggccagctcttcaggaggtcggctggaactaccacgacaccatcagggaattggaggagaagaga

SEQ ID NO: 27707 - DNA, 326 bp, Oryza sativa
  Clone ID: uC-osflM202048b09b1
ttatttgctacctgttgctacctctctctcacggggggaaactgtacatccatgggggcaatatcaatgctaattctttagctatgccaccaattaaatcattcggatctggttaaagcgtactaactcctcgcatctctcgctctgatactaccgaaaatgcttccaatgcgaaaacatagactccacttgagccatatccggagtcagagtacctgctccgatgtttacgacccactctaacggacgtgactctacgtgcttaccgatccaccgacactacacggtgctacatatactatcatacctaactctcgactctttct

SEQ ID NO: 27708 - DNA, 531 bp, Oryza sativa
  Clone ID: uC-osflM202048b10b1
ttcgttcacctccgtggctcccttccaggggcgggagtccactgagggcctccgggggaaccgccgctccagcagctcgagctttggcaacgtcagcaatggcggaaggatcagatgcatgcaggtgtggccgattgagggcattaagaagttcgagactctgtcgtacttgccgccattgacagtggaggaccttttgaagcagatcgagtacctgctccgatctaagtgggtgccttgcttggagttcagcaaggtcggattcgtctaccgtgagaatcacagatcacccggatactatgacggtaggtactggaccatgtggaaactgcccatgtttggatgcaccgatgccacccaagtgctcaaggagctcgaggaggcaaagaaggcataccctgatgccttcgttcgcatcattggctttgacacgttaggcaggtgcagttaatcagcttcaatccgtttaagccaccgggttgcgaggagtcaggcggcaacctagcgcttttcgttccttcgtgcatgttc

SEQ ID NO: 27709 - DNA, 481 bp, Oryza sativa
  unsure (1)..(481): unsure at all n locations
  Clone ID: uC-osflM202048c01b1
gtttgttttaagcccgccgcagtattacacaaatcggcggcctatctcttaccgaagggcgggcaccacagtgtgccatccaatgaggagcatggtggccacaggcgcgcccagcatggtcaatgtcaaggacgagttcgactcgatcctcccgggcaggtcaaggtccatgtgttcgacgagtacctcgataagagcactggcaacattgatctgaatgacaatataaggctggatacaagcgtgcccaattttttgatggcgtacaacgtccagttccgcagcttccagctcccctacaactgcatctgctgtcacgacctngtcaagaacaagaaagtgcaattcatactacatgatctcgagatcctacgcgacgctaaagagaattacaacgtgccaatccaacgtctttagaaatcgtgatgatctgatgatgatcatccatcgattgaccaaccattaaaacatttctgtacct

SEQ ID NO: 27710 - DNA, 490 bp, Oryza sativa
  Clone ID: uC-osflM202048c02b1
cccttcttagttccgccgggcctacctcggcctccgggcgtcgcgccgcgccttcctgcgggggctcggcgggtccgcccacgaggcgcccgtcctccccaccgacggcctccccgacgacttccactggagagaccacggcgccgtcggccccggcaagaaccagggatcgtgcgggtcgtgctggtcgttcagcgcgcagggggcgctagagggagcgaactacctggcgacgggcaagatggacgtgctctccgagcagcagatggtcgattgcgaccatgagtgtgattcatcagaacctgattcatgtgatgctggatgcaatggtggattgatgactaacgccttcagctatcttttggaatccggtggccttgatagtgagaaggattacccctacactgggagggatggcacctgcaaatttgacacgtcgaagattgttacttcagttgacgacttcagtgttgcctctgtcgatgaggat

SEQ ID NO: 27711 - DNA, 329 bp, Oryza sativa
  Clone ID: uC-osflM202048c07b1
ttttgggggttattttttttttttttgggtttattttttttttttttttttttttttttttttttttttttttttttttttttttttgtttttctttttactatgttactctctgatttcaagaagacgaggctgtttttttttttggcccagcccctgctatttttgggttttgcaggatccgtgaagaattttccccccctgacctccgaaattctttaaagggacggttgtccttttgggtcaacagccacctgctggacggcttcttcgggctgattttttttgcgcccacgggggccgcgtagggggcactcactttttttttc

SEQ ID NO: 27712 - DNA, 532 bp, Oryza sativa
  Clone ID: uC-osflM202048c12b1
ggtttctcggaaaggagtcgtgacaatacccggggcataacacaactcaccacagtgcacctttcctagatcataatcaccccctttaaaacaaggcatggactccccagcgacccccatggacttctcgccacttctcagtctggcgcactataatgaatcatgctatacaaaagataaagccgttgcccacgctggcttgtggttggcacgataaatgtttcacaacagtagctcgcgaaccggtccttaattgccatgagcacgaccttcaaaaccatgtgctcacaacccaccattaatcatattttaattaccaattaattatcataacacgattaaccatcgtgagctaccattaaatataaccataaataataacataaaataattatgtaatttaatttatatttaaccccttttagttagctaatgtttctaagcatggctaagcaaacctatatatagcatttagctgaaccaatccagtatataaggttcatgctaatcaaattataacccataggaaaat

SEQ ID NO: 27713 - DNA, 433 bp, Oryza sativa
  unsure (1)..(433): unsure at all n locations
  Clone ID: uC-osflM202048d04b1
gccttggtgtacgacgacgacccgttcgacggcgcgcccgcgagggccgccggtgggtacggtgacgaggagaggggcgagggtgatgcggaggaggaggaggaggaggaggagagggatttgttcggttntgacaacgaggattacgttaagacccccgcgcgtagcaactacctagtcctagtgctaccctcaatacggaacaccaacaatcattcttggggaggatatggggggcggaatggcttaggtccacctcttcttacaaggccaggaggtcattcaggacggcataactttggatatggtgggaggttttcgcatggaaatgggcgtaatgttgaaggttttgtttcagaaattaattttaataggagtgtataaactttatataggaagtttgttgcttttcatgagccttctgagattgtat

SEQ ID NO: 27714 - DNA, 504 bp, Oryza sativa
  unsure (1)..(504): unsure at all n locations
  Clone ID: uC-osflM202048d11b1
gtattatcgtcaccatcttggatccttagcaagaggagaaaggagggtgcttttttccttgacatgagaaaatgggggctctgttgcctgttggattctcttcacctttgttctctgtttgagaattagtaggtactagcttttatgatcagtgaggctaagctgatggttggttgcagcctttggctgggttcgtgcgtgctgatggcgacccggacacagatctggagacagatggggtggccactccatcctccaatgcctctgcagcattcgccgagccacacgacgaggaggagggggacgaggtgttgtgtggggggtggaanggggactggtcccagntgcangaaccaaccaagagtgcggcagaccgtaccaccggagaatgcctgtaccagcggcgccggtcagaagcttgtcttttgcagggtaggatggggttgaagcaacggccagcctttttggactttggcaacggcagccccgggttcaatggaaccc

SEQ ID NO: 27715 - DNA, 433 bp, Oryza sativa
  Clone ID: uC-osflM202048d12b1
tttctaaaattcccacgccacgcgcgccggaagggagggaaggcttttcctccgcggttcgcccacgcgccgtcatcgctgcccgtctttcttcctccgctttgtttgggccggagcggggggcgcaccggcgccggcgacgtctctcttccgaatcgggaggcgggagccagatcatggaatctggtggaattgatgctcaagtcagagcaatcgagcagcgcacaagattggagattcctatacgtgattgagattgcaaatgtggcgcctgttcaatgagttgtgggatgttctaggatctgggtttttctcatcgaggtttctttaatccagctcaaatctatttaccacctcatccgtttgcaccgagatcatctctgtgtgtgtggtcaccgtgagattaggatgatattgaccaagaagattactc

SEQ ID NO: 27716 - DNA, 525 bp, Oryza sativa
  unsure (1)..(525): unsure at all n locations
  Clone ID: uC-osflM202048e05b1
caaatggttcaccagaaacatagtacacttgagctcactcgaaactcaaacactcacaccaatggctctccaagttcaggccgcactcctgccctctgctctctctgtccccaagaagggtaacttgagcgcggtggtgaaggagccggggttccttagcgtgagccagaaggccaagaagccgtcgctggtggtgagggcggtggcgacgccggcggcgccggtggcgagccccggcgcgggcacgtcgaaggcggacgggaagaagacgctgcggcagggggtggtggtgatcaccggcgcgtcgtcggggctcgggctcgcggcggcgaaggcgctggcggagacgaggaagtggcacgtggtgatggcgtgccgcgacttcctgaaggcggcgacggcggcgaaggcggcggggatggcggcggtgagctacaccgtcatgcacctggacctcgcctccctcgacagcgtacgccagttcgtggacaacttccggcgctcncgcatgccgctcgacgcgct

SEQ ID NO: 27717 - DNA, 499 bp, Oryza sativa
  Clone ID: uC-osflM202048e10b1
tgcttagcctgctgcactcctcaccggctgctgattgtgactgtgagtcatgttggcctccacttgcttctccgccccgccgccctcctcctcctccccgtcaatcccgacccacctcgccactctctgctgctgcttcaggcctcccgctcgcccaccttggcctcgctctcttcttcttcttggtgccttcccaccgccgacccgccccctcccccgcgcctccgtctcgtcatcgaccgccccagcgaaagattacgagtttactgatggtggcggagaggtggagctgaggctggacataggaaagctcggcattgagaattcaagagatgtatttgttgacgtcgatgatacgtctctgttggtcagagccaagtcggatgggacactgcggactttgatcaatgttaaacaactctttgataggattaagtcttctgagactatatggttcattgatgaggatcaattggtagtgaatctaaagaaagttgag

SEQ ID NO: 27718 - DNA, 363 bp, Oryza sativa
  Clone ID: uC-osflM202048f03b1
ctttttcttaagaaggaaagagcttgcatagcttcagggattgccccctacatcatgggggggtcatccaccaccggggctcccttccatgggctcaagtgcaccgacgacatgccctgcggccgccgatccaggaactacagcttcggcaacttcagcaaacgcggcaggatcatgtgcatgcaagtgtggcctattgctggcatcaatgaaaatcgagaccctctcctacctgccaccggtcacaccctatgacctcctgaatcagatcgagtacctgctccgttgcaagggggtgccctgacttgagttcaacacgggctgatttgtctaccttgagaaccacaggacccctggatacta

SEQ ID NO: 27719 - DNA, 337 bp, Oryza sativa
  Clone ID: uC-osflM202048f08b1
tacttatccctgagaactttatttctggaagagtgccatattactgataagggtggtgaatggcttcatgaacttgctgtcaacaattctgttctggtgacactgaacttctacatgactgaactcaaagtggcgccagctgatctagagcttcttgcaaagaattgcaagtcattgatttcattgaagatgagtgagtgtgatctttcagatctgattagttttttccaaacagccaatgcgctgcaagactttgctggaggagcattctacgaggtaggagagctcaccaagtatgaaaaaagtaagttcccacccagattatgcttcttggggc

SEQ ID NO: 27720 - DNA, 339 bp, Oryza sativa
  Clone ID: uC-osflM202048f12b1
atccaagagctctcttcctttcttaggtgcttggttcaagaaggttgtctggttggttcacacggcaaggcagatgagatgaggaggaggaggagaggaattgatccattatgatgatggattcaagtgcaagtccaaggcgctgcgttcggatctgagcttccatcggtacctcttggctgccgccatggccaacaaatcgaaatcgggatccgtgtacccttcttttttcttctcaccgttagtctcccttggtcttgccggcaccacgcccaccaccttcacactaccactagcacctgcagctgcaggctctttctccaacactaatgccacgcc

SEQ ID NO: 27721 - DNA, 454 bp, Oryza sativa
  Clone ID: uC-osflM202048g10b1
ttttcctccacttgccgattacttttttgccccccggcgcgctgggcgccttggctttggccctggctttggctccgctgttcttatcttccccactcgtgcctggctctctctctctccctttctcctctcctccaaggtcatggcaaaggagaaataacagctagcgggcttggggaagggaaaacagcaagtgggagatcggcagggagaggtgaattactacttgagtagaagtggtacaagaagagtcgtcgtctacctgtgagcgaattatttcgaggttgtgcgttgcgatgatgggaggtggtctggtgatggaccagggcatgatgttccccggcgtgcacaacttcgtggatctcctgcagcagaacggcggcgacaagaacctcggcttcggcgcgctcgtgccgcagacgtcgtcgggggagcagtgcgtgatgggggaggg

SEQ ID NO: 27722 - DNA, 335 bp, Oryza sativa
  Clone ID: uC-osflM202048h01b1
cgcttctgcttgcgtgctcttttttctcgttgatcggtttgctcgatcagatcggttctttggagagatggagcagctcttcatcatgatcaagcctgacggcgttcagagaggctctgattggagacatcatcagccggatcgagaagaaaggattctacctgagggggatgaagttcatgaatgtcgagaggacctttgcacagcagcactatgacgaccttaccgacaaggcctttttacctgggatagaggagtacatcatctatggccccctcgatacgatggtttgggaagggaaagatgctgttgacactggccggaggatcattggg

SEQ ID NO: 27723 - DNA, 372 bp, Oryza sativa
  Clone ID: uC-osflM202048h02b1
cacttctttgcgcgagctcgattatttttttaatcgatgggctccgatttaatccgtagaagattccccactcctcctcctcctccaccgccgccgccgacgccgcactcctcactccgcagaagcaacaccaacgccgcactccaacgccaaccgcctacgcgcgcggcccgtcgccatcgtcgagcaccttcacgcttcctcctcccccgcacggaacggagacccctagcgccgctataagaaggagagaggtgggcgggactcatggcgcccgcggcagcgtcgctcacggtccccaacgcactcgcggcgacgtcgttgcccttcttgcacggaaagaaaaagcggccgcggcggcgtgttcgtgca

SEQ ID NO: 27724 - DNA, 366 bp, Oryza sativa
  Clone ID: uC-osflM202048h03b1
acattctgtagtgagagatggagtggcattgaatatgcgggatggcgctgctggtgctgatgttgggttactcgtgcaatgcatgtgaccacccgacctgcccggatgtgtgaatggcggcggtgtgggcggagctgttccacggtggcgtaggcggcggcaggcggtaaaagaggcgtgcatgcagtcactaggtgcgccacacacatcggtggccaggtacgggcaagaaggggaaccggtgcggttatgactgaacctgaagatcgtcgacgtggagttcttcctgcacgcggagttatgtgtgtggctgaacaatatagacgctaaattgactctgggaggtccatcgaccgcaggcaccag

SEQ ID NO: 27725 - DNA, 455 bp, Oryza sativa
  Clone ID: uC-osflM202048h08b1
tatttacctcctccacctcctcctcctccccccggggggatcggtccggctcctcctgctccgccgccgccaccgccggcgcagataggagaagatggccgcacttgataccttcctctatacctcggagtctgtgaacgagggccaccctgacaagctctgcgaccaagtctcagatgctgtgcttgatgcctgcctcgccgaggaccctgacagcaaggtcgcttgtgagacctgcaccaagacaaacatggtcatggtctttggtgagatcaccaccaaggctaacgttgactatgagaagattgtcagggagacatgccggaacatcggttttgtgtcagctgatgtcggtctcgatgctgaccactgcaaggtgcttgtgaacatcgagcagcagtcccctgacatttgacaaggtgtgcacggccacttcaccaagcgccctgaggaga

SEQ ID NO: 27726 - DNA, 183 bp, Oryza sativa
  Clone ID: uC-osflM202049a01b1
catcatgattcttgatccttgctgcttcttgctgcttgttgctgacgcccttgggtggatcttcgaccaaggcggcgaggggacctacgcccccatccttccccccccccccacctacccctgccccttcagccaccacaatggccacaccccccccgacctccaagaggcctcctcccacgc

SEQ ID NO: 27727 - DNA, 84 bp, Oryza sativa
  Clone ID: uC-osflM202049a04b1
caataatattaggatacaccatgcgtacacccatagtggtgtctacaactggggggggcaaattagcacaatccagaaggggag

SEQ ID NO: 27728 - DNA, 54 bp, Oryza sativa
  Clone ID: uC-osflM202049a05b1
aaattaattgaacctgctctgaagaagcagctcatgatcttcactgcttcgatg

SEQ ID NO: 27729 - DNA, 92 bp, Oryza sativa
  Clone ID: uC-osflM202049a06b1
catggtaaacacattgctgcattcacttgatagggacagttattatcgaatgaaaggacccaagcacggaccatacccagagatggaggagt

SEQ ID NO: 27730 - DNA, 204 bp, Oryza sativa
  Clone ID: uC-osflM202049a08b1
ctgacaggcaggccagagcggcgtgagtgaggggtacatgtaaggcagttagcccgtggccagcctaagaaggtgatagcatgggacttaatgggaaatggaggaaggccatgccatacatggcgatggtctacctacagttcggcttcgccgggctgttcctcatctttgtcgtgtctttacagcaaggtatgagctactact

SEQ ID NO: 27731 - DNA, 130 bp, Oryza sativa
  Clone ID: uC-osflM202049a09b1
tgtggtttttcagatgtcacaaagaatttcttggctgtttttgccaacaatgggggactgaagcacattgatcgcattgctgagagatatgttgatttgcccatggcacataaggggctgtttttgattt

SEQ ID NO: 27732 - DNA, 84 bp, Oryza sativa
  Clone ID: uC-osflM202049a10b1
actacagatgaacttggggagaaccaattattttgttgacataaaacagtgcaggtggttttactcctgctcgctctggtgtct

SEQ ID NO: 27733 - DNA, 485 bp, Oryza sativa
  Clone ID: uC-osflM202049b01b1
gataatacgaaacagccgagatggagaacgcaggggccaccaccacctcctccacccaagacggcggcggcggcgccggcggccatgtcttcctcctcgctttccccgaggcgcaaggccacgtcaacccgatcctgcagttcggccgccacctcgcggcgcaccacggcttcctccccacgctcgtcaccacccgccacgttctctccaccgtcccgccccctctcgcccccttccggcgtcgccgccatctcccgacgggttcgactcctgcggcatggcggcctgcggggacgccagggagtacaccccgcggctggccgatgtgggccctgagaccttgggtgtcctcctcttcttcatgggccctttagtaggccttaccttctttccgtctttattttcctcctctgctctctctttctttaacgcgtctccttctcccttttttctctcccattcccccccttttctcatattccctt

SEQ ID NO: 27734 - DNA, 426 bp, Oryza sativa
  Clone ID: uC-osflM202049b10b1
cttaagcgcacagaaaaaaaaatctcccctggaggggaatcgtcaaatcggcttgtcaagatgcagatctttgtggagaccctcaccggcaggaccatcaccctcgaggttgagtgctgggacaccattgacaatgtcaaggccaagatccaggacaaggagggcatcctcccggaccagcagcgtctcatctttgctggcaagcagctggaggatggccgcaccctggccgactacaacatccagaaggaggccacccttcaccttgggctcaggcttaggggaggcatgcagatcttcgtcaagaccttggctggcaagaccatcacccttgaggtcgagtcgtctgacaccattgacaatgtcaaggccaagatccaggacaaggagggcattcccccggaccagcagttgtttatcttcgct

SEQ ID NO: 27735 - DNA, 136 bp, Oryza sativa
  Clone ID: uC-osflM202049c04b1
aaatcatgacaaggaaatgaaagaaatgagacaacgaccttgttagccttcctgtggggatcctctcctctccactacttggtctatcttcttcttggagagctagcaggaggagcaaagcagtaggggagagaga

SEQ ID NO: 27736 - DNA, 195 bp, Oryza sativa
  Clone ID: uC-osflM202049c07b1
atatcctcctcctctcgtcttctccttcgaggtgttagctccctccttattcagaccatggctaaggagaagacccacatcaacattgtggacatttcctacttataatttcttttcgtctttcactccctcctcatcttcatccacaatatttgcaattttcttcattttaaacttacttcttctcttattcta

SEQ ID NO: 27737 - DNA, 198 bp, Oryza sativa
  Clone ID: uC-osflM202049c11b1
gtatggcctgtgtcaaggagagggtagtagcgccttgctctcctttgccttcagagaaaccggaagcaatggcgtctgctactctcctcaagtcatctttccttcccaagaagtctgaatggggtgccacccgccaggctgccgcccccaagccggtgactgtcttcatggatgtcctctcctgtgccaccactcttt

SEQ ID NO: 27738 - DNA, 383 bp, Oryza sativa
  Clone ID: uC-osflM202049d06b1
gttatagttcagaacaagctgcaacataaagcttggaacaacattcagagtagatgtgcaaaacccaggaaagttgttaacgctgcgaaatctgctgaagttagaaggtcagatactgtaagagttccttctcgtgctccatcagagctttctgaggaaacagacgatatagttagcgaggctggaaccgttgatgatagtaaaggcaatgaagaggccaaggagattgatgtgctagatgaagctccacattgtgatcagagcactggtactgacgatgaaattcctgaaattgaagaaaagatagttgatgatgagaaaccagttgtgtatcaaaggaatgaggagttacaatcaaagattgacacgttggaacaagaact

SEQ ID NO: 27739 - DNA, 484 bp, Oryza sativa
  Clone ID: uC-osflM202049d09b1
ttatccttcttcctcctccctcctctcctgggggctcctgcagcagcgcccagggccatcggagcctcgccctcgcgcggccatgcttggtctgaggggagccagggcggcgcagctcccgtacgcttccgccgccgtcgctcccacccccacgccctcgttttccggcttcgcgcgccgcctcccgctcctcgcctccgcggccctctcgcctctgccgccctccttctccttctcctccgcttccgccgtcaggagggatagggaccctcccatgcgtcccgtctccggcgccctctccaggtccaggccaaccaccaggggttttctgctctgcggctgctactgctcccagggagggcaaggagttgcttgtccagcatctgctcgtcggcaacaggatgtcaggcttttggtcgatcttgaaagaacatcattacaggaggtgcagacttgagcgattagctgtcgagtactctttatg

SEQ ID NO: 27740 - DNA, 372 bp, Oryza sativa
  Clone ID: uC-osflM202049d10b1
tattccgtcgccgtctcccctctgacgcgtggggggcacctgccatccacctggcggcgccgccgccgccgccgccgctcccggtcgccggccggcaggggctccgaggggggctctgcccgttgctcctcctccgcctcggcgccgccgccgccgctccggtcctgtaggcgcgctgatccgagggtgggagcccagtctcaggacgaggcctagggtttcgtacaccccctcggctgctcggcggtgaggaggggggccgcggcgtccctggagatccgatctccccgggctcggcggtgaaaggggggcgccgcgccgaggttggctgcgctcgatttgggcgggacccccggaattcgagctccctat

SEQ ID NO: 27741 - DNA, 302 bp, Oryza sativa
  Clone ID: uC-osflM202049e02b1
ttgtgtgtttttttttttttttttggggggtttttttttttttttttttttttttttttttttaaaaaaatacattaaaatccttaacaaagcccccccaactttaggcaaagttcccgctttaggaatatccccatttttcccattcctttggggggaaaacctccaattaaaaagggaggcagttttatttccaaaacccaaagggaaaaaaaaaaaaaaaacttctccaagagggtggggcctttccccaaaggtttgggtgaaaaaaccctcacaaaagccattgttgcccccaaaaa

SEQ ID NO: 27742 - DNA, 424 bp, Oryza sativa
  Clone ID: uC-osflM202049e04b1
tggactcgtgggctcctcccgccgccgccgcgggggccgccggcgcctctcggcgggagagacccagccgccgccgccgccgccgccgccatgtcgctgatcgccggggaggacttccagcacatcctgcgtctgctgaacaccaacgtcgatgggaagcagaagatcatgttcgcgctcacctccatcaagggtgtcggccgcaggttctccaacatcgcctggaagaaggccgacatcgacatgaacaagagggccggtgagcttactccggaggagctggagcggctgatgaccgtgggggcgaacccgcggcagttcaaggtgcccgactggttccttaacaggaagaaggactacaaggacgggaggttctcccaggatgtcttcaacgcgctcgacatgaggctcagggatgatcttg

SEQ ID NO: 27743 - DNA, 368 bp, Oryza sativa
  Clone ID: uC-osflM202049e08b1
tgtttccgctacgccctcaaggtgttcgacggggggtccgccgcggcgaccaggcacgacgccgagcgccgcgcgcggtgggagctgtccgtgctctcccgcctcgcgcacccgcacctcccgtgcctcctcggctccgccgagacgcccggcctcctcgcgtgggccgtcccctactgccccggcggcgacctcaacgagctccgctacgcgctccccgaccgcgtcttctccccggcggcgatacgcttctacgtcgccgagatcgtgtccgcgctgtgcgagctcacgcgtcgggcgtggcgtaccgcgacctcaagcccgagaacgtgctcctccgcgccgacgggcatgtcacccttaccgac

SEQ ID NO: 27744 - DNA, 336 bp, Oryza sativa
  Clone ID: uC-osflM202049e11b1
tttttggggttttttttatttttttgggggtttttttttttttttcttctttttttattggcttaaggtaatgccaccattcttggcattctcaacatatctatagttagctccaaaaacttgggactgcaaaaaaacaaacagtccttcgagctccaaaaacctgggaatgaatccttgccaacaaaccaagtccccatcaacatcgacttgttggtgttacaacccccccagggggggtccctttccccataaatttaagagaggctaccggcccggagcttcccccttccctggtagggtgtgacccccccatgggcacccgggcttgaattc

SEQ ID NO: 27745 - DNA, 504 bp, Oryza sativa
  Clone ID: uC-osflM202049e12b1
ttttcaaggccgccaagtctctcctctccgggagcgccgccgactcctccccgggcacctccctcctagccgaggggaggaacgcggcgctggccaccctcaccaacctggggaggaagaccctccccacagcttacgcctactcctaccaccacaactcctccgccgccgccgccggatggctcgctgccatccccgccgctgtttacatgctacaggatcaggaggcgcatgctgcagagatggagcgcacctttatcgccatcaagcctgacggcgtccaaaggggcctgatttctgagatactgtcccgatttgaaagaaaaggattcaagcttgttgccatcaagctggtggttccatccaaagaatatgctcagaagcactatcatgatttgaaagacagacctttcttcaatggattgtgtgacttccttagctctggccctgggcttgccatgggttgggaaggagagggtgttattaagtactggagaaaactga

SEQ ID NO: 27746 - DNA, 369 bp, Oryza sativa
  Clone ID: uC-osflM202049f12b1
ttgtataaagctagctaagcccactcctgcccgggggtcccgtaatgccgtcggtggcgactactcctcctcctagccgttctcgtctcggcggccgatgcctacgactccgccgccagcgccaacaccaacgccggcgccatccccgaccccaacatcttgaacatggaggccatgtgccccaagacgacggacgtgaaggcgtgccagcaactggtgaagaacatgccgtccaacatcgtcgcggggaagaaggacgccaggagcatcgcccgggggtgcatcgccaccgcctggttcgtggcgagggacggcgccaaggactgcaccgccgccgtggacgagtgcaaggacaaggtcgaccagtgc

SEQ ID NO: 27747 - DNA, 244 bp, Oryza sativa
  Clone ID: uC-osflM202049g02b1
tattctcatgggcggacgcgtaggcaccagccggcgcctccgactacggctggggcgccaacaacaagctcctcccgcgcgctccgagcccatcatggcagacgtcaaaatcgagactgatgtcaccttcggcgcacagccaaagaagaggacattccgcaagaacagctaccgcggcgtcgacctacacacgctcctcgacatgaccaccaatgaccttgaacagctctttcccgcgcgcgcc

SEQ ID NO: 27748 - DNA, 389 bp, Oryza sativa
  Clone ID: uC-osflM202049g08b1
tttagatcgcgagcgccgccctttttttttgtgtttttttttagcgacacgagagtcatctgatatatatttcagataaagatgttcaacacaagatagcttcagaccaggcaatatagcaccagacacttggtgattcagggttcaacaaagtgatatatgatcgagtctacaaacaaacaaaaaggtccgatatttcgtttcccacagatgataaggatagatatatctaagcggctgagaggaaggccttcccgggggcacgagcagagaggcgaccatggcaaccaagtagcttagcattgacaccatcaggcatgattctaccctcgctcttaagcctgacgtattcatcgcggctgaccttggggaaaccccactttctactc

SEQ ID NO: 27749 - DNA, 259 bp, Oryza sativa
  Clone ID: uC-osflM202049g09b1
tgtttaaagcgggaggccacctcttccatggggggaccaccaccctgacgccggcgccgacaccgactgactcacccgccggcgagcccacgccgcccaccgccggagacggccatgccccccgacgcaatccagctctacagactcctcttcaagctcattctgcgccgtcgcctatactccctgttcgactacggcggctactgctgctgctcattcgagagagtactcccgcgctgtcgccgaccaccaccacccc

SEQ ID NO: 27750 - DNA, 376 bp, Oryza sativa
  Clone ID: uC-osflM202049g11b1
tgttgttcacggatgtcacacataaactggaagggaaggatttctcaacacttgagagaggcccatgcctgtactgctgggttgaaggctgtgacaacatctgcgacagctgatggaattgaagaatgccgaaaactctgtggtggacatggttacctgaacagcagcgggcttcctgaattgtttgctatctatgttcctgcttgcacttatgaaggagacaatgttgttttgctattgcaggttgcaaggtttctaatgaagactgtatcccagttagcttctggaaaacagcctgttggtacaacggcttacatgggcaacatacagtacttgatgcaatgcaaatgtggtgtaaatacagctgaagattggc

SEQ ID NO: 27751 - DNA, 174 bp, Oryza sativa
  unsure (1)..(174): unsure at all n locations
  Clone ID: uC-osflM202049h01b1
ctttccgctctccggccgccggtcgctccgacggcccgaccctctcccgttagtggtggagccaaccttaaccatcctactccgggcggggcgaaggcgtccggcggttgcaggagcccgatggacagcggtggcactggcagtcctgtcggcgtanccggcgactgcgcttgt

SEQ ID NO: 27752 - DNA, 358 bp, Oryza sativa
  Clone ID: uC-osflM202049h05b1
cttgccgccgccgccgccgcagcctcctcaagggtgctcccatcctctccttcgagttagcttcctccttattcaaccatgggtaaggagaagacgcacatcaacattgtggtcattggccacgtcgactccggcaagtcgaccaccacgggccatctgatctacaagcttggaggtatcgacaagcgtgtgattgagaggttcgagaaggaagccgctgagatgaacaagaggtccttcaagtacgcgtgggtgcttgacaagctcaaggccgagcgtgagagaagtatcaccatcgatatcgccctgtggaaagttcgagaccaccaagtactactgcacggtcatcgatgcccct

SEQ ID NO: 27753 - DNA, 356 bp, Oryza sativa
  Clone ID: uC-osflM202049h07b1
acgcgcgcttgtctctctttatatagtgtcacagtgtattgaggcagaaattgatccaaaccgaaaccaaaagtgaaaaaagacagtcccaagacgaatataattaacacaagagtacagggctgtagtaatggctgcggcggtggccggcggcaagatcaagacggtggtggtgctggtgatggagaaccgctccttcgaccacatgctgggctggatgaagtctctcaacccggagatcgacggcgtcaccggcgacgagatcaaccaccttgacgcctgcgacccgacctccaaggccatccgcttcggcgacggcgccgagtacgtcgaccctgacccgggccactccatgc

SEQ ID NO: 27754 - DNA, 368 bp, Oryza sativa
  Clone ID: uC-osflM202049h11b1
ttggacgggaggcttcctcctcctcctcctgctggagactcgacgccgccacctccacctcccgtctcgtctccagaagcttctggaacacccttccggcttcaattcccccctgctcgggtcgggtagctcccttccatcatccatggccgacgccaccgccgccctctcagctcggagcaaggtgcaagctttcctcgaagcggctcgtgccggtgatctcgactccctcaagagtaggtgcccccatgccttcctctctctctcctttgctttccttgcgtttcttctcatctcctctcctcatgcgccattgcagagctcgctgcggcgctcgacgaggagggcaagggcgtcgccgccgtcgc

SEQ ID NO: 27755 - DNA, 79 bp, Oryza sativa
  Clone ID: uC-osflM202051a01b1
gatgccgcccgagatagcaccccactaactgcccggtacgtgttcacaacccggccatgggagcggacaagactcctga

SEQ ID NO: 27756 - DNA, 312 bp, Oryza sativa
  Clone ID: uC-osflM202051a03b1
gtaatataaaaagagaaaaaagaggagaggcctggcaactgcaaaccctcgctttctccgatcgaattgctcgcccgagcaccaccagttcgccgcccttgccaccaccagtcgcctgcctcccccgcgcagggtatctcctccggccgccccagtggcgattccccccgagctcccccgcgcggcgccgtggccatgtcgctcacctgaggatacggtcggtgggctgtttcttgcaagagtctctcccccgagccccccaagagaaacagcccgggggacgccgagttgttgattcgatcgccggagttg

SEQ ID NO: 27757 - DNA, 554 bp, Oryza sativa
  Clone ID: uC-osflM202051a05b1
gtgatttaatccgcagccatggcgcctgacgttcgaggcgtctatttttttttttcttttttaattattttactatcatctacttctttattttattttcttctaatgtatcttcttatttttttctttttttaacttctctcattttttttattttctataccattttttgagttgttttcatttatttttaatttttaatttttctattctcttacattttttatttttatcttttaatatattttttcattaattttttttatttcttttttatttcttttttctttcttttttttttttttttctttctttattttttttttttttttttttttttattttttttttttttttttctttttttttttttttttttatctttttatttttctttttatttctattttttatatttttatttcatctttttttttttttcttttttttttctttttttctttttatttttttttttcctttttttttttttttatacttattttttttttctttttttaatatcttctttttttttattttctttctttttt

SEQ ID NO: 27758 - DNA, 323 bp, Oryza sativa
  Clone ID: uC-osflM202051a10b1
ttcttttggcacgacgagaccagaccaggcagagagggagaataggccaccctcgcgtggcctccgacctgtgcttatcgaggtcatcatgatctgctgtgctgtagatcgagcttctctggtccattcagaagctgcggatccctatgactggagctggcggcttcatcgcatcccacatctcgaggcgcctcaagagcgagggccactacatgattgcttttgactggaagagaaatgagcacatgactgaggatatgttctgccacgagctccatcttgctgatttgagggtgatggacaactgccttaaggtgaccacc

SEQ ID NO: 27759 - DNA, 205 bp, Oryza sativa
  Clone ID: uC-osflM202051a12b1
tctttatgattatgttgatcccatgcgcatgagtggtcagcgacctaatgaagatctttactcgaacagaagagtataagttcagcaccggagaagcatctgattctgaattcggtttgctgctgcctggggagaggaaggttaggttcctggctcctcctgactgacttaatttcctttcgttgtctttctccaccaggggtgg

SEQ ID NO: 27760 - DNA, 399 bp, Oryza sativa
  unsure (1)..(399): unsure at all n locations
  Clone ID: uC-osflM202051b02b1
ttcctttcctcctcccctgcacagaccactcgtttcctccacaaagagggagggaacaagggaagggtgtcgcccgccccccaccccgatctgcctccgccgctccgctcctccgcgcctgcgaaatctaccaacgctaactcagcaagatgggtgccggcggcaggatgacggagaaggagcgggaggagcagcagaacgcctcgggncgcgccggcaatggcgcggccgtgcagcggacgccgacggacaagcccgccggtcacgctggggcagatcaagaaggccatcccgcctcactggttccagcgctcggtgatcaagcccttctgctacgtggtccatgaccttgtgatcgtcgcctggctgctgtacttcccgctggtgatgatccccgtg

SEQ ID NO: 27761 - DNA, 321 bp, Oryza sativa
  Clone ID: uC-osflM202051b04b1
gtgtttgtgacactacatatagcggaagggatgtagactgtattgaggaatacggaccccttgcactatataaggaggggtccgggtgccaataggggcacgatattgacccagatcatacaatcaataatacactcggccggatcaatccccggacaggagtggggcattacttgttgattaagaaggcctgaacctgcataaaaaaccttgtctctaaacccatctacttttctagcttgatagccaccccttttagtattgccgaaatcttgtctcgacaatagcccttaaatctttactatgcctaaaattctatac

SEQ ID NO: 27762 - DNA, 92 bp, Oryza sativa
  Clone ID: uC-osflM202051b06b1
gaccggaccggaaggcccggggcgacccacgcgaccggtgggtgccaagcaaccaaggaacacctcggggggggcggaaaaaaaagagaccc

SEQ ID NO: 27763 - DNA, 453 bp, Oryza sativa
  Clone ID: uC-osflM202051b09b1
tcgttccatggcgttcttctcccatcaccacctgcagcagccgcatcctcaggctccgccgccgccgccgccgcagcagcagcagcaaccggtgcccccttccttcaggaacgcgctgccggtgccggtagatgggcagatcccggcgcctcttcccttcttcaacccgccgccggccttccaggaccagcccgcgcagccaccactggtggacgcgatggggcttacggccgcggcggggctagggtggaggcagcctagggagcaggagctgctaggagagaacttccagatgtcgtccattcgatttcctgcagacgggctccgcggtgtccactgggctggcgctctctctggaggacagacgccagggcggtggcagcggcgctggggctgggaactcctccggcgattcgccgttgctcctgctcccgatgttggatgatgactttt

SEQ ID NO: 27764 - DNA, 114 bp, Oryza sativa
  unsure (1)..(114): unsure at all n locations
  Clone ID: uC-osflM202051b12b1
acctgaaggccatctatggaaggatcttccatggcgggttttgtgcnaaatcccccgggttccaacccagaatcagcatagtatgatacactactcctttcacacctatctttc

SEQ ID NO: 27765 - DNA, 354 bp, Oryza sativa
  Clone ID: uC-osflM202051c09b1
ttcgatccggcgatccccggcgagcgagagatcgaagcaagctgctacacagatctcacgacatggccgaggcggcgtcggcggcggcggcggcgacgacggagcaggcgaatgggagcagcggcggcgagcagaagacgcggcactcggaggtcggccacaagagcctcctcaagagcgacgatctgtaccagtacatcctggagacgagcgtgtacccgcgcgagcacgagtgcatgaaggagctccgtgaggtcaccggcaaccacccatggaacctgatgacgacttcggcggacgaggggcaatttcctgaacctgttgttgaagcttattggcgccaagaaaaccatg

SEQ ID NO: 27766 - DNA, 62 bp, Oryza sativa
  Clone ID: uC-osflM202051d02b1
cgtccactgtctccgggcccacttgcttcgcatgggcttgcctctcactcctccgcgcggcg

SEQ ID NO: 27767 - DNA, 401 bp, Oryza sativa
  Clone ID: uC-osflM202051d06b1
ttcgattaccagggccacatcgacgctgctgctgctgctgctgctggtttcggcaacatgggcggcatcggcgccgacgacgagtcgggcgaggaacgtgataacacacgtgaaggggttccaagggaggctgccgtccacctggagacggggtatgggaggtggacaacaccgataccgttgagctcttctactacttcatccagtcggagcgcagccccgacgatgaccccctcatcctctggatcaccggcggccccggctgctccgacctctccggccttctcttcgagattggccctcttaagtttgacgtatctgggtacacagaagggttcccttaattgatctacttccaagatttctggaccaaggtgagcaacgtgatatttgtggtcgcg

SEQ ID NO: 27768 - DNA, 188 bp, Oryza sativa
  unsure (1)..(188): unsure at all n locations
  Clone ID: uC-osflM202051d10b1
gtcgtcagactgcagagccaagaacacatccatcttgtccttctcccattgctccagatcccatcagatcctcaccgagatcatcagatcagagcaagaggaggtagctcgatgcgcggggcggcggcggcggggaggagatgatgaagnncgagnacggnnggatggnggggcatggaggaggaagg

SEQ ID NO: 27769 - DNA, 78 bp, Oryza sativa
  Clone ID: uC-osflM202051e02b1
gctgagggagggagagagtacgtgcggacgggcggggtttttaaaatacacccccccttctttcctcctatcaaaaat

SEQ ID NO: 27770 - DNA, 473 bp, Oryza sativa
  Clone ID: uC-osflM202051e05b1
ttcctcgctcgctacagctaccactcctcctccttttcctcgttgccgctgccataggcagctacgaccccaaggcgttctgctccaagacgacagacgtagcatcgtgccttagggtgttcccgacactcccagacatcgtcaccaaggcgcaggacaaccaagagttgtacaaacggctggtccgctactgctcattcaagacctacgaggccacgtcgctcgcggaatccatgattgccaccaccaccgctgccgaccccaagatcagcgcccccttcttcccgcagtggaaaagggacgaggcgatgacgacaaaaacacctccaggcaagtgcctcctgagctgcaacaagaccatcggcgaagttgacgccatcctaacctgcggacacacctacatgggagacaggccccccattattcaccagaaccttaccgttttgttccatggcgggcaccccgccgtactc

SEQ ID NO: 27771 - DNA, 237 bp, Oryza sativa
  Clone ID: uC-osflM202051e06b1
ttattataacacgctccagatcttcacatctccatccagggctccgctgcaaacgagggcagaagatccctccgacgagcacgatccatcgtcgtcgcgtgcgtcgtgcaccaatgccaggctcttcacggccgagccgtggttttccacgaccaggaggcaagtgtagtcgttgttcttcgcacctagcatagggcacactaatgaccgtactgttcgtcgtgctcgtgctcacct

SEQ ID NO: 27772 - DNA, 266 bp, Oryza sativa
  unsure (1)..(266): unsure at all n locations
  Clone ID: uC-osflM202051e08b1
accggaacccaacgaaaagagaaaaaccaaccctagttaaaaaccagaaaaaaaaaaaaaacggggggggataaaaaaaaaaaaacaccccccccaaacacaaacccaacanagaaagaaaaacaaagaaaacaacgaacccaaccacccacaacacaaaaagcccaacaaacaaacaacaaaaaagcacccaaagcacaagccaaccacaacaagccaaccaaaaccaacacccaacacaaccaacacaaaaccaaaccccccac

SEQ ID NO: 27773 - DNA, 341 bp, Oryza sativa
  Clone ID: uC-osflM202051f01b1
gcaggaccggccgacctcccggggcgacccaaccgttcttaccaaccaagaacaacaaacaagggggcgggcaaaaagaaaaaagcccccaaaccaaccaccaacaaggaccaagggcacaaccgccgcggcgacagccagcaacagccaaggggccggccgacacacaaggacaggacagagacgagaaagccccaaaggccacgaaagacagagcgcccgcaagaagcgcaccggaccccagcagccccaagacccccaaggacacagatggaagggaaggggaaaaccgcgaccaagccccgccacccaaaaaggcaacaaccagccgaaagcgaccc

SEQ ID NO: 27774 - DNA, 404 bp, Oryza sativa
  Clone ID: uC-osflM202051f04b1
ggtgagccggtgggtggagtcggggatgacgtcgacgagtgggagggcagcaggagcatcgagcgttgctccatagtgaaggacgccgtcagctgggagggcggacactcccttggctaccatacgtacagtatggcgattgaacagcttgatgaactggcacatgacaggagatattcctaggttgtagacagaccattgttgagagtaacgagacagtatccgagcccttcaacaatattaccattaagggctttttaaccttccctgcttacatttttagcattggggatctcctgtccaataggattaatgcaaggcccattggtgctttcatggcatacctctcgactgtcatcggagatgaaccaaattgtcccacgctttggttggataattagaca

SEQ ID NO: 27775 - DNA, 317 bp, Oryza sativa
  Clone ID: uC-osflM202051f08b1
ttcgtacgaactgctgggaggctagggttcccggcggctccccttgcgccaccgcgccgcggccgtcttctcgccgccgacgctgagacaggccgcgccgccgctcctgtccacgcgccggtccggtccggtccgtcgccgttcggtgctccgagctcgctcaaccagcggcgatggcgggcggcgacagggagagggatgtcgaggaggagacgaggaaccagatgatgcagaatctcttcggcgaccagtcggaggaggagggaggaggacgactacgagggccggcgattttcgtcgtcgagggacgaccaccc

SEQ ID NO: 27776 - DNA, 407 bp, Oryza sativa
  Clone ID: uC-osflM202051g01b1
tttttgtgataaaaaattgatggcggtctttattaataataaagccatttctaacccaagacactatacatagtttctataaacttcatatcatgtactagacactactcttccaatgcaaacaccactattccatacttaaatttaatactacttatctcacataatatcttggatgttgtgtagaaactatgtctcatgcaagacatggtttccttctcttttctcatttattcacttgccacatcattttttatcctaggtggcagcttatttaatactatagataccatcatagttattgggttgggaaatggcctaacatcgacgatccatataaacacaagacagttttttgaccagcacaatgatgcggatagagaactagtcgttgcccggctcagatc

SEQ ID NO: 27777 - DNA, 325 bp, Oryza sativa
  Clone ID: uC-osflM202051g02b1
tagttgttaatattattatcttcatcctgggtcccacacgcataggcagagagcaatcataacttgggtcaaagcgattaaccagccgaagcaaacaccaacaccaaaaaggggaaagcaagcaaatcgcaagcaatcgcgcggcgtcgccgactcgccggcggcgaatccaccgacgagcaatccagccccccaatcccgccgccgcaccaccgtgcatacgatccgccaggaaggaaggaatggcgtcgacttcggatccatgggtgagggagtacagcgaggcgtccaggctcgcggattgaacgcaccttcatgatccccg

SEQ ID NO: 27778 - DNA, 197 bp, Oryza sativa
  Clone ID: uC-osflM202051g03b1
atcagtgtcaaacaacgcaaagcagtagcagcagcgagaagcaagcaagaagcgatggggatggggatgaggagggagagggacgcggaggcggcgcccgacctgccgccggggatcaccgttccaccccacggacgacgagctggtggagccctccctgcgctggaaggctgcggggctgcgcctgccggtgccta

SEQ ID NO: 27779 - DNA, 402 bp, Oryza sativa
  Clone ID: uC-osflM202051g05b1
tcggtcgaaagcttttctcagcccgagagatccgctgcgagggcgcccccaacccgacggtcgccggagaagcagcagccgccgtccacccacccatccagtcgatggcgccgccggataccagccgcgcgccggcgcaaggcgaggaagccgcctccacatccccgtggcctctccggaagctccagagttttacaccagggttgtgttcgcagtacaaagcttatgagaatgcatttgtggatatggctaaaggaactatttcggatgcaatggttcttgtgaacgtggcctcagacagaggcaattggatgttcctcttgtggcaggatttatttttttgaggggggcttctgtgtatctctatccccctttactcttgtgttttcttatgtatttatc

SEQ ID NO: 27780 - DNA, 74 bp, Oryza sativa
  Clone ID: uC-osflM202051g08b1
accgacccgaacgaccgggtcgacgtaaccaaccgttcattagaaaccagaagaaaaaaacaaacagggggggg

SEQ ID NO: 27781 - DNA, 229 bp, Oryza sativa
  Clone ID: uC-osflM202051h08b1
ctgacgcgtgggcggacccgtggacggacgcgtgttggctcgacagttcgacttactcccctcaagcctgaaccccttcccctaccaggcgcggctgccgaggattgcttgatcccttcgccatcctgcctcgccgacgcgcgccaccttgccgtggaatcgaaggctataagccgtttgcggttttagataaattaggcccttttcaatccatcgagtctgaagtgcc

SEQ ID NO: 27782 - DNA, 327 bp, Oryza sativa
  Clone ID: uC-osflM202051h11b1
tcgtttagtatcgaatcctctcttctcctcgtgcccaccaccaccaccgtagcaatggcgggcaacgggccgatcaacaaggaggacccgctcaactggggcgcggcggcggccgagatggccggcagccacctcgacgaggtgaagcgcatggtggcgcagttccgcgagccgctggtcaagatccagggcgccaccctccgcgtcggccaggtggccgccgtcgcccaggccaaggacgccgccggcgtggccgtcgagctcgacgaggaggccctcccccgcgataaggccagtagggagtggatcctgaactgcatcggccac

SEQ ID NO: 27783 - DNA, 223 bp, Oryza sativa
  Clone ID: uC-osflM202123a05b1
cttgttttcaaacgagtgagaaatggacggagccgaaggagacatacagacctggggccggccgccctcctgaggttggcccctctgtccgtcgtgctctcgagcatgatcctgtccacaacaatctacgccacgcgaccctagaagttcctctgcggtggctcggcatccatcgcccccgtcaacaacaagaacaacaatatcgacataaacgcagaggatg

SEQ ID NO: 27784 - DNA, 536 bp, Oryza sativa
  Clone ID: uC-osflM202123a09b1
tcgttttgttgttacatggaatatcttatgctggcatggggaagacccagacgattaatcatttcttggttaacaaaagttggtaccttgtggatttgcctggttacgggtatgttgaccttttctaccctcaattcatatgtaacttgatttgcatgtgctactttctaggatgtatcacaatgacaaaatcatagatggcattgcaaatggagagaaacagagcgagaagtacaattttgcccttgtgttcatcggcttgtaagacaactcggtctggttagaaccagacccagtccattttcactgccctcgatacagtccattctcactctgatggtgtaggtctgattcaaactagacctggtcgagttaaaaagaaatatgtcgtatgggtacaacttgtttttttttttgaaaatttctctctccatttggatcagatataataaaataatacggccagtgtcaccatattcccacggtgttctgcagcaaatacacgttctttgggtgtccagtagcaaagagcgcaa

SEQ ID NO: 27785 - DNA, 393 bp, Oryza sativa
  Clone ID: uC-osflM202123a10b1
ttggttttcttcaactcttaccacaccacgccgggtgggcgaaaccctagccgcccgtcttccccctcaaagcggcggcggcggcggaggccgatgcatcgcctgctaagatgtccggcggcttcttccgggggacgaccgccgatcaggacacccgtttctccaacaagcaggcgaagctgctcaagacgcagaagttcgcgcccgagcttgaacacctggtggacatgactaaggtgaagatggatgtgatgaaaccatggatcgcgacccgtgtcaccgagctcctagggttcgaggacgaagggctcatcaacttcattcacggtcttctcgaagagaaagaggcggatggaaagaagatacagatacagctgacaggattttatggag

SEQ ID NO: 27786 - DNA, 375 bp, Oryza sativa
  Clone ID: uC-osflM202123a12b1
tcgcttatattaaaaccaggaggcggatcttgcagatgcacacatctaagatgacattggcagatgatgttaacctagaagagtttgtgatgaccaaggatgagttttctggtgctgacatcaaagcaatatgtacggaggccggattgctcgctttaagggagcgcagaatgaaggtgacacatgccgatttcaagaaggccaaagagaaggtcatgttcaagaagaaggaaggtgtaccgggagggctttatatgtgagacatgcaccactcatcagcaccagaattaccttcaggacacggtaagtgtaatagagaactggtagagctggtgtatggttcaatgttcggagaaatgtttgcttacacctttt

SEQ ID NO: 27787 - DNA, 542 bp, Oryza sativa
  Clone ID: uC-osflM202123b05b1
attatttccatttctcccgtatcctctctctccggtccgctcttctcgagcgcggcggcggtggtggggaggaggagggccagcggcagcaagcggcggcggcgacgcgatgatgatgacgcgggcgtcgatgggggcgatggaaggcgcggcggtggacgaggtggtgcggcgcctcgtggagggcgggcgcggggggaggcaggtgcagctgtcggaggcggagatccggcagctctgcgtcgaggcgaagcgggtgctcctgtcgcagccgaacctcctgcgcatccacgcccccgtcaagatctgcggtgatatccatgggcaatttgttgatcttctgaggctgtttgatttgggcggttatcctccaacttccacttatctttttcttggagattatgtggacagaggcaaacaaagcttggaaaccatatgcttgcttctggcatacaaagtgaagtatcctgataagattttctgtaaggggaaaccatgaagatgcgaaaattacagagtgtatggttctatgatgaatgtaa

SEQ ID NO: 27788 - DNA, 548 bp, Oryza sativa
  Clone ID: uC-osflM202123b08b1
gttgcgcacgacacgaccgagccagcaaagccgcccatccgccatcccgcctcaagtgcaacctctactactacaggacaaattacttcatcttgatcatgttcatccttgggataggcttcatttggaagccggttgctatacttgcagcctttatgactggaatcagcattgcatttcttaatgacagctttgcagtcactttcaatgagaaagtcacgaggactgtcagacaattttcaccacatttagctgcaaaaatgaggccaccaataacccctgttcttcgtggtagaccaagttcaaagaggtcgattcatatttgtgggcgacctcgctggctatttgtgctggtattttctgcagttagttgcatgctctggttgacttcctgcagtctcctcacagttctatgggcccttttaattgctatctttgcaactctgcttcatgctagcttcagaacacctaatctgaaagcacgtctgaatacattcagagaagaattccgagctgtttggaggaaatatagtgagccttaaggtcat

SEQ ID NO: 27789 - DNA, 497 bp, Oryza sativa
  Clone ID: uC-osflM202123b10b1
ttggttaccctagccgctttccccatctcctccgcccagaactagaatttcgccaccccgaatcccttccatggtaggacttccgtttgattccgggtcgaatccgtcgcctccgatgccggaacggtgaggttttccctccctttatatggacaacacgcgtttgttttttctgttgcgcaggtttcagatcttggatggacttgctcatccttcggcggccatggatctatcggcggaagctgctgctgctgctcgtcctcgcgttcggcgagtcagatctggagccgatctgacctcttagaggtccggttggggcatgctccgtacgagctggcgtggatgaagcggctgcgcgagggaagaagctggtcgtcgcctggatcctctccatcggggcctcgcgcgatgatgtctctttgtattgataattattccatgaactttcgatattattagatctaaagatgttgttcgaggagccgtgtgctgagatg

SEQ ID NO: 27790 - DNA, 444 bp, Oryza sativa
  Clone ID: uC-osflM202123c02b1
attcgtgagcctctagggttcgtgggatcccccggagggggatccgaaccctaggggggtcatcctactcgtcctcctcgcgttctccgccaccgtggcgggcgccgaggacggcgaatcgacggggggatcgaaggtctcgctggggcgccgtgcaggggggttcttgcacgggctgaataaggaagcagtggtggagggagaccatggggtggccctcgatgaggtcggccccgggctgttcgatgcgctcttcgcgagtctctcgatgatcttagtcagcgagattggagatgaaacctttattattgcggcgctaatggcaatgcggcaccccaaggcaatcgttctgtctggtgcggtattcgcgctctacgtgatgacggtactatcaactggactttgggaggatagccccaacttgatatcaagggagcacactaa

SEQ ID NO: 27791 - DNA, 122 bp, Oryza sativa
  Clone ID: uC-osflM202123c06b1
tttttatatcactggtcactgcatcaattaccgggggggagaatttgaaatcttccgcggttataatccaagcaggatccaatacctcctcctaactctatcgtgaatcactccattaacat

SEQ ID NO: 27792 - DNA, 505 bp, Oryza sativa
  Clone ID: uC-osflM202123c09b1
gttcgccaagaaccgggagctggaggtgatgcagtccatgtgggcgatgctcggggcgctgggctgcgtgttcccggagctcctcgcccgcaacggcgtcaagttcggcgaggcggtgtggttcaaggcggggtcgcagatcttcagcgagggcgggctcgactacctcggcaacccgagcctgatccacgcgcagagcatcctcgccatctgggcggtccaggtggtgctcatgggcgccgtcgaggggtaccgcatcgccggcgggccgctctgcgaggtcgtctacccgctctaccccggcggcagcttcgacccgctcgggctcgccgacgacccggaggccttcgcggagctcaaggtgaaggagatcaagaacggccgcctcgccatgttctccatgttcggcttcttcgtccaggccatcgtcaccggcaagggccccctcgagaacctcgccgaccaccttggcgaccccgtaacaacaacgcctgggcctacgcca

SEQ ID NO: 27793 - DNA, 515 bp, Oryza sativa
  unsure (1)..(515): unsure at all n locations
  Clone ID: uC-osflM202123c11b1
tcggttgacttgttacgcctgttggtgttcgagtggtaggagcccttgggcttttccaggttcagatcgacgcctccttcctctggacattgttgctagttggtgatggctgagcaggctaatcaaccgactgtccttcagaagttcggtggccagttccaccttggctccagcttttctgaaggtgtacgggctcgcaacatctgcccatctgtctcatcctatgacaggcgctttaccacaaggagctacatgacccagggccttgtcaatggtggcatcaacgtcccaatgatgtcgtcctctccaatttttgctaatgctccagctgagaaaggtggcaaaaacttcatgattgatttcctcatgggtggagtgtcagccgcagtttcaaagactgctgctgctccgatgagcgtgtgaagctgcttatccagaaccaggatgaaatgatcaaggctggtaggctctcagagccatacaagggtattggngactgcttcngacgcactatc

SEQ ID NO: 27794 - DNA, 418 bp, Oryza sativa
  unsure (1)..(418): unsure at all n locations
  Clone ID: uC-osflM202123d05b1
cttccttcctccgcctctctcgccatccgccggggcgccaaccgagtcgatccggcctcccgcccccnccgccatgggcctcctctcgaacaggattgggaaggagaccctgaaggggggggatcacatctattcgtggaggggcgcgtgggtctacgcgcatcacggaatatatgtgggcgatgataaggggatccattttactagaggaaggggccaggaggtcggaacaggaactttcattgacctcctccttatgagctctggtgctaatacaaacactccatggtcaatatgcaacaatgaaggtgccaccaccaatacggagacaaatgggtgtggtatcctcttgcctcaacttgcttctggcaggggggcgccctctaccgtttcgagtatgcgtgcaacccagcacttt

SEQ ID NO: 27795 - DNA, 260 bp, Oryza sativa
  unsure (1)..(260): unsure at all n locations
  Clone ID: uC-osflM202123d06b1
gttccgatagcttctctcctctctctcaactccggggagaggaggaggcggcggtggggcgttcgtcgggagagagaccagggccggggggctagggttcggccgttcagagaggcggcggctgaggaggaggaggaggaggaggagggggtgangatatatttctactcctgctaggaagcggctgatgcgggacttcaagcggctgcagcgtgagacccctattaaccaagggagtaccatcactattatctgctttt

SEQ ID NO: 27796 - DNA, 537 bp, Oryza sativa
  unsure (1)..(537): unsure at all n locations
  Clone ID: uC-osflM202123d07b1
tcgcctagtctccacccatcaagattgcagtaatgagatccaagctcaataaacgagccgagtccgtcgaagaaggaagcagcggcgatggcggcgaggtccggcgaggtgcgggcgacggtgctgggcatggcggtgctggcgctgcttctgctgctcggccaccacgcggcggccatcgaggccaacgtcggcgtcacccgccaggccagcttcagcctgaacggcggcgccggcgccggcgccggtgctcgcgctggcgctggtgctggcgctggcgctggcgtcggcgctggcatcggagctaacgtcggcgttggcgctcgcgccggcgtcggtgctggcgtcggcgctggcgtaggtgcgaaggtcggtgctggcgtcggtgcgaaggtcggtgctggcgccggcgttggagcacgcgctggcgttggtgcgaacgtcggtgctggcgtcggtgcgaaggttggtgcttgcgtcngcgttggcgctggtgctggcgtccgtgcgaaggtccgtgctggcgtcggcgttggc

SEQ ID NO: 27797 - DNA, 319 bp, Oryza sativa
  Clone ID: uC-osflM202123e04b1
cttattgtcgagagccggtcgttcccgctctaccgctgcgtccgcgaggagctcggctgcgtattcctcaccggcgagaagctcaagtcccccggcgaggagtgcaacaaggtgttcctcggcatcagccagggcaagctcatcgaccccatgctcgactgcctcaaggagtggaacggcgagccccttcccatcaactaagccaagatcccatcgccattgccattgccatacacccatcatcgaggaggagaggagactaaaaataaaagaaaacgaaccgcttcgtgtatcttcagacaaaaaagccctgtatttt

SEQ ID NO: 27798 - DNA, 457 bp, Oryza sativa
  Clone ID: uC-osflM202123e05b1
cttcggtgcgtagcgatggcccggccacgcctcgtcctcctccctctcctcgccggggccgcggcggtgctctcgtcgccgctcggccgcgcgctcgccaagacggccaagaagagcaacgacatcgtcaatggcccactgctcacctccaagatcaacgccaagcgcacgctgatcgtcggccccgaggacgagttcaagaccgtgcagtccgccatcgacgccgtgcccgtcggcaacaccgagtgggtcatcgtccacctccgctccggcatctacagggagaaagttatgatcccggaaaccaagccgttcatcttcgtgaggggcaacggcaagggccggacctcaatcaaccacgagtccgcttcctcccacaacgccgagtctgccggctcaccgtgcacgcggacaacgtcatcgtcttcggcctcagcatcaggaacagcgcgcgcgc

SEQ ID NO: 27799 - DNA, 493 bp, Oryza sativa
  Clone ID: uC-osflM202123e09b1
tcgttgaagaggaccaagaggacgatgatgaagagaatgaacagcaggaccagcagatacctgaggagttcatttttgatgctgaaggtggtatagtagatgagaagctccttttctttgctcagcaagctcaaagacggcgagggaaagctggacgagcaaagaatctcatattctcatctgataggggacgatacataggttctatgcttcccaagggtccaataaggaggttagctgttgatgccacacttcgagcagctgcaccataccagaaactgaggagagagaaagatcgtgacaagacaagaaaggtttttgttgaaaaaactgacatgagagccaaaagaatggctcgaaaagcaggcgcactggtcatatttgttgtggatgctagcggtagcatggctctgaatcgcatgcagaatgcgaaaggtgcagcattaaagttgcttgcagaaagctacacaagcagagatcaggtttcaatcat

SEQ ID NO: 27800 - DNA, 480 bp, Oryza sativa
  Clone ID: uC-osflM202123e12b1
tcggtaccgcaccgtcaaggtgtggaacctcacgaggggcaagctgcgctgcaacctcgagggccatggcggctacgtcaacgctgtcgcggtcagccccgacggttctctgtgcgcgtccggtggcaaagatggcgttaccctgctgtgggacttggctgagggcaagaggctgtactcgcttgacgcgggttccatcattcactcgctctgcttctcgcccaaccgctactggctctgcgcggcgacccaggactctatcaagatctgggatcttgagtcaaagcacattgtgcaggaccttaagcccgagatccctgtctccaagaaccagatgctctactgcacaagcttgaactggagcgcagatggaagcaccctctatgctggttacacagatggaaccatcaggatctacaagatctcaggtttcagctacgccggctagagatggggagtgttgttttagttatcgcgttc

SEQ ID NO: 27801 - DNA, 548 bp, Oryza sativa
  Clone ID: uC-osflM202123f03b1
ctcatgtccagccgcctcgtcgtgttcgcgttcggcgcgcggctccgacctccaaagccgccgctacccttcccgtcttcgtcgtcgccgcgcacgcagatcgcgaaccagcccgcgcgccgcgcagcagcgccgcggagaggaaaggagagctccgccgcgcaccccccgccaccatctcgtagggagagatggggctcacgttcacgaagctgttcagccgcctcttcgcgaagaaagagatgaggattctcatggtcgggctcgatgcagccggtaagaccaccatcctctacaagctcaagcttggcgagatcgtcacgaccatccccaccatcggatttaatgttgaaaccgtggaatacaagaacatcagcttcactgtttgggatgtcggtggccaggacaagatcaggcccctgtggaggcactatttccagaacacacagggactcatctttgttgtggacagcaatgatagggagcgtgtttgtgaggccagagacgagcttcacaggatgctgaacgaggatgagctgcgtgatgct

SEQ ID NO: 27802 - DNA, 475 bp, Oryza sativa
  unsure (1)..(475): unsure at all n locations
  Clone ID: uC-osflM202123f07b1
tgatagcttcacaaattacaaaacgcaatcaggaccaccacaacacggcggcggaaatggcagcgacggtgacccagaacgtcgactgcaaggctttcaacgacgcccttctgttcttcgacgccgccaagcaccccgcccttccgcataggtgacctacaagccgtcatccccgtccactgctagcgcaagacccccctccggtacctatactacgtgggccgctacctcctcatccgacgccggcctcttccgctcatcacgattcctccatcagtactcgcatggtcagtgggcagtggacgctctactgctcggcgcatggcaccatgacatgggcgctcttaaggactcgacaccactgcagacactggagcgtttccgacagcgccatgctcaacagcgctctgngncaactgcatgactgcttcatgcttgctcgctaccatggatggaggatcaggcacagaacaca

SEQ ID NO: 27803 - DNA, 446 bp, Oryza sativa
  Clone ID: uC-osflM202123f09b1
gtgttcttcttctcgatttatctttcttgggttcttgatctgtagcttattagcggccatgtgcggcggagcaatcatctccgggttcatcccgccgtcggccgctgcggcggcggcggctgcggcggccaagaagcagcagggcaggagggtcacggccgacgtgctgtggccggggatgctgcggaaggggaaggcggcggcggcggaggaggactttgaggccgacttccgcgagttcgagcgtggcatgagcgacgacgaggcggaggggggcggcggcgaggaggaggaggacgacgacgacgtggtcgtggtggtccccccgccggcggcggcgaggttcgtcgtccgtgccgcggccaaggcggcgcccccaactgcagatgggatgttgactacaaagcttggccaacatgatggacctactgctagatcagcaaagc

SEQ ID NO: 27804 - DNA, 94 bp, Oryza sativa
  Clone ID: uC-osflM202123g03b1
gttgatgaaggacctgaggtggtggtcgaggtggaggtttttaaatttgtgggggggttaaaaccctcaataacaactgcaagcccctgcacta

SEQ ID NO: 27805 - DNA, 410 bp, Oryza sativa
  Clone ID: uC-osflM202123g11b1
tcgaaaaataggcagccgtagcgatcgaccttcgccgacgagttctctctttcttctccttcccccggcaacgagcctgacgccgctcgcgcccgcggaggggaggggaggggaagatctagaaccgcggggaagacgacggctgatggctagctatagctgattgatttagcggctcaacatatataccaaggcggcgcggccggccggcacgccggcagggtggtcgccggcgaacctcgcgtagagctcaccctcccctcctccggtggtctgcctccccctgcattggcggatcgaggacgcacgcacgtacgactcgttcgttcgttcactgccatgccggcccgtgccctcgccgtcgaatcgtcgtcgtcgtcgtcgtccctgcgcgtttgggacggctggtg

SEQ ID NO: 27806 - DNA, 524 bp, Oryza sativa
  Clone ID: uC-osflM202123g12b1
tcgtttaggcctcgacctcccccctcccccacacacgtctccccgactcgatctccccctcctcctccgccgccgccgccaacgcctcctcctccgcctcctcccccaacgcatcgccccaccccatccatccagattcctccctcctcctcctcctcctcttcctcctcccccgatcccgccccgatgcgatgcccccgcggcgcgatcgcgtgacgccgccatgatgaatcccgacggcggcgacggcgaccgcctcgaggcggcgggggcgggctcgtcgtcggcgcagcaggggcatccgacgatggagtggcggttcgcgcaagtcttcggcgagcgcgcggccggggaggacgtgcaagaagttgacatcatctctgcaattgagtttgataaatctggtgatcatcttgccaccggagacagaagaggacgtgttgttttatttgaaaggacagatgctcgggataatgccagtcggagagaaatggaaagacaagatgctccgattactagacacc

SEQ ID NO: 27807 - DNA, 316 bp, Oryza sativa
  unsure (1)..(316): unsure at all n locations
  Clone ID: uC-osflM202123h01b1
tactttngatccatcacactcacacaacacaggcgctccttaaaacctcccggagagagcaagacgttcngctttnggcaccactgtcaccatggccaaaaccagccgccccagcaccacggtggtggtggcggttgcgcgcaccagcccaccttcaagatcttctgccgcgccgacgaggggtactgcgtcgccgtgcgcgaggggaacgttgttctcgccccgaccaacccgcgcgacgagcaccagcactggtacaaggacatgcgcttcagcgcccagatcaaggacgaggagggcaacccggcgttcgcgc

SEQ ID NO: 27808 - DNA, 502 bp, Oryza sativa
  Clone ID: uC-osflM202123h03b1
ctgggaagaggcctgtggggatcaagaagatgaggaggtgggtcttggccattgccattcttgctgctgctgtatgcttcttccttggagctcaggcccaggaggtgcggcagggccaccagacagagaggatctcaggaagtgctggtgatgtgttggaagatgaccctgttgggaggcttaaggtctatgtctatgatctcccaagcaagtacaacaagaagctgctgaagaaggatcctaggtgcctgaaccacatgtttgccgctgagattttcatgcaccggttcctgttgtcaagcgctgtccgaacttttaatcccgaggaagctgattggttctacacaccggggtacactacatgcgacctgactccctccggtcttcccttgcccttcaaatccccaagaatgatgcgcagcgcaattgagctgattgcaacaaattggccttactggaatagatcagagggggctgatcatttctttgtacaccacatgac

SEQ ID NO: 27809 - DNA, 530 bp, Oryza sativa
  Clone ID: uC-osflM202123h06b1
ctttcttctccccaaaccctagccgccgccgccggcgtactcgagagaaacatcagcatccatggcgggcaagggcgagggtccggccatcggcatcgaccttggcacgacctactcgtgcgtgggcgtttggcagcacgaccgcgtggagatcatcgccaacgaccagggcaaccgcaccaccccctcctacgtcggcttcaccgactccgagaggctcatcggagatgctgccaagaaccaggtcgccatgaaccccatcaacaccgtcttcgatgccaagcgtctcattggcaggaggtttagcgatgcttctgttcagagtgacattaagctctggcccttcaaggtgattgctggacctggtgacaagcctatgattggtgtccagtcaagggtgaggagaagcagtttgctgccgaagagatctcctccatggtcctcatcaagatgcgtgagattgctgaggcctaccttggcaccaccatcaaagatgccgttgtcactgttcctgcctacttcaatgactc

SEQ ID NO: 27810 - DNA, 455 bp, Oryza sativa
  unsure (1)..(455): unsure at all n locations
  Clone ID: uC-osflM202123h10b1
ctcttcctcttcttcttcttcttccctcttgttgtggtggtgggtttgacccaagaacggaggagggatagggcgggcggcgatgggggcagttcgggggattttggtcgtggcggtggttcttgcggtggcggcgattcttgctggggcggcggaggggaaggtgaacgggaaggcgaaggggaagtacagggcgctgttcaacttcggggactcgctggccgacgccggcaacctcctcgccaacggcgtcgacttccgcctcgctaccgcccagctcccctacggccagaccttccccggccaccccaccggccgctgttncgacggccgcctcgtcgtcgaccacctcgccgacgagttcggcctgccgctgctgccgccgtccaagctcaagaactccagcttcgctcacggcgccaacttcgccatcaccggcgccaccgcgctcgaca

SEQ ID NO: 27811 - DNA, 467 bp, Oryza sativa
  Clone ID: uC-osflm202108g01b1
ggcattttgttataaaggtgcgaaggcatacctatggcagcgtattctcttggttcaatgatgcgtaacaaggatgataatgcctggttatgggcaagggataaggaaatatgggaattgccaaaagtatttgctaatgggtttgagttacttgcaccattcagtgaaatatatcacagtatgccctcagctttaaaatcatgcttctcttacttgtcaatcttccccataggattcgtaatagatagagagaagctgattcaacagtggatagcacttgacatggctggttcaaagcacggggctttacctgcttatgtgcatggagagatgttcattcaggaactcttatcactattcttccttgaaatccaaaagataccctctgccactggaatcagtcctaccaatcgtcgtacattactccaggtgaatagcttggtgcatgcttttgcaaatatgttgct

SEQ ID NO: 27812 - DNA, 508 bp, Oryza sativa
  Clone ID: uC-osflm202108g04b1
ctctttctctctcctcctcctccacctgaatctccctctctctcctccaagaacaggggcggcgaagcagctaagccggatttcgtggttggtggcctctccccttccaccaccaggctcgccccgccgctgccgcgaggtgcccggccgcctgtttcttctctccggtgcatttcgatctgattcccccgtccgatttcgtgtccgtcctgcttcacacccggatggttcgaatcgattcttaaggagaaacatatgaatcgtggcgaatgaagagtttagcgatgtgccttagttgaatggttccattgccaccctgtctggctgattttgttcagacgaactcatcttcaagcttatatgggtacagttgctgcataggtaatgtgagcaagtcccagccacttccagattataaaccaaaaacatctgtaagaaagaagcctcgccatttatctattggaaaaagaggcaatgctcatcaggcctagaagcaatggagaacaat

SEQ ID NO: 27813 - DNA, 427 bp, Oryza sativa
  Clone ID: uC-osflm202108g05b1
gttttggtcggggttttagcgagcgcgtgggaggccggaggcgacgacgacgaccgcgccgccgtcggagaagaaggccgcggaagcaccagtaccagcacccgtatatgtcttctagccccttctccgatctggtggtagtcgtgctcctcgtctgcgccgtcgtcgccgcagccgtcctcctccccctcgtctgcgcccgccgatctatgcaccagaggctccacggctggaacaagtccacgtcgatgctcagggacgggttcggggtcaagtattccgggttcctccacataaggccgtgtggtttctgtcgaggagattgacggattcgatcgattcgtgttcgtctccgtcaaatttttgcacatgagaaaaaaaaagtttcccccttttagagtttttcccctcagttttgtcaagtttg

SEQ ID NO: 27814 - DNA, 511 bp, Oryza sativa
  Clone ID: uC-osflm202108g07b1
ggcgttttcgaggctgggctctacaaggatggccagacccgtgagcacgctcttgttgcttccactcttggagagacccagatgatctgctgctgcaacaagatggatgccaccactcccaagtactgcaaggcccgttacgatgaaatcgtgaaggaagtctcatactacctgaagaaggtcggctacaaccctgacaagattaccttcgttcccatctctgggtttgagggtgacaacatgattgagaggtccaccaaccttgactggtacaagggccccaccttgcttgaggctcttgaccagatcaacgagcccaagaggccatcagacaagcccctgcgtattccccttcaggacgtgtacaagatcggtggtattggcaccgtgcctgtgggtcgtgttgaaactggagtcctcaagcctggtatggtggtgacctttggttccagcggcctgaccactgaggtcaagtcggttgagatgcaccacgaggctctccaggaggctc

SEQ ID NO: 27815 - DNA, 505 bp, Oryza sativa
  Clone ID: uC-osflm202108g10b1
tggatgatccagctgaagctttagaagtgaaagagctggaaacttcaaaagaggttgctactttgacaaaagatttacctgaaactttggatgccgaagacccatcttctgatgtggctaaggatgaatcagtaacttctaaggatatagacccattaccagatgattcaaacacagctccatttactcctatgaagggagaaatggtgcttgcattgttccgctgcgacaattcatggaacagagccatgattataggtgagtgtcagggagttgaaggacctgagtttgaagtattttacattgactatggaaaccaagaacttgttcctcacagttgcctgagacctatcaatctatccatttcctctattcctccccttgcaaagctgtgcagccttgcctttgtgaaggtgcccagtctaaatgactatcttgggcaagaggcagctatgtatctgaacagtatcttgcttgacaatgggagagaatttgaggctattgt

SEQ ID NO: 27816 - DNA, 521 bp, Oryza sativa
  Clone ID: uC-osflm202108h04b1
ggaactcacattcccacacgcctcgctgcctcgattgattgattgattccttggagaagaagacggaggaggaggagatcgagcagccgctgacgctcgtcgtctacctcccgatctgatccgaggagcgaagcgaacaggggcaagatgcattcgacgaatctgctgctggaggagcccatcaggatggcatccatcctggagccatccaagccgagctttttcccggcgatgaccaagatcgtggggacgctgggtcccaagtcgcgcgccgtcgacaccatctcctcctgcctcaaggccggcatgtcggttgccaggttcgatttctcgtggggagacgctgagtaccaccaggaaaccctcgaaaacctcaagctcgccatcaagtccaccaagaagctctgtgctgtcatgctcgacactgtcggcccggagttgcaggtggtgaacaagagtgaggctgcaatctcccttgaagcgaatggcactgttgttctcacccctgaccaggggcagga

SEQ ID NO: 27817 - DNA, 465 bp, Oryza sativa
  Clone ID: uC-osflm202108h05b1
gttttcttttgtgacacatatagtgtaggtttactgacaggggcgtcgattaccagacggcaccggtgtcgcgcgagcgagcttgatcttgcgccttgtgcctgctagctgcttcggcggcggcggttatcttcttccgatctgtaacagccccgatcaagaaaggatccaacccacctaggaggactaacctgaacgtgctaatgagttcaaagctagtaacatcacctctgaaatccatggagcagggccatctagagcaacctctgcgcgatccgcaggcgccggcggagcagcatgacatggggttatctcccctgacgctcctcggcttcgccttcctgaccttcaactcgggaatggcagtgtacagatcagatagagacttggcaaccatcttcttcgtggtcttatgctacgttgacctcgtatcgctcttgtacttgctgcgattatttgagaaga

SEQ ID NO: 27818 - DNA, 322 bp, Oryza sativa
  Clone ID: uC-osflm202108h07b1
gcgtgagagatctctcccgagctcgatccggtccaccgcgacacgaagacgaccatggcgatggctcgctcccagcttgccgccgtgttcctcgccgtcctggtctcgggggcgccgctcgccggcgcggctgacaacctccaggacgcgtgcaaccggacgctgttccccaaggagtgcatccaggcgctgacgacgaacccggtgagcccgacggtgaacgcgcggcggctggcggagctgtcggtgtacgtggcggccgatgtgggcacggaggtggcggcgttcgcgcaccacgagctgaacggcgtggaggagggac

SEQ ID NO: 27819 - DNA, 415 bp, Oryza sativa
  Clone ID: uC-osflm202108h09b1
tctaccataccacctcagttccattgcgtaataattcccgttctaaaggaatcattccaaggaccacatcagcacccgggttatcaacaaaaagcagtgctcttttgtatgggtggcccttcttatcagcgagcattctctttttaaacatatcaaagtcatcaatccgccaaggacgttgcatattattgcggctcatgcgataaatttctattatagttcccttgtgataaaggtgcacacaagctcgagagccccaatcaaatatgttcgcagcaaggacaccctggatgagtgcaagcaatctagcttcctgattgatactatcacgttccatcagaagatcaggtgaaacagcctgtgaagcttcattgtacctttgctaatgctatcatatgcatcgacaaactggaat

SEQ ID NO: 27820 - DNA, 388 bp, Oryza sativa
  Clone ID: uC-osflm202108h11b1
tgtcggttacgcacgcgctgctgtaccggttcctgccgcgcgcgttcggggtgcgcgcatcgttcgtggacgctgacaacgaggcggcggtgcgcgccgcggtgcgcccggcggagacactggtggtgtacgtggagacgatgtcgaacccgacgctggccgtggccgacatcccgatgctggcccgcgtggcgcacgacgccgggaccaagctggtggtggacaacaggtgcactcccatggtcgtgtcgccggcccgcctctgagccgacgtagcctgtcacaggggatccaagttcattagaggcggggccgacagcatcgcaggggcgatctgtgggccggtgagcctggtgaacgcgatgatggacctgcaggagggggccct

SEQ ID NO: 27821 - DNA, 407 bp, Oryza sativa
  Clone ID: uC-osflm202108h12b1
tcgtcctcgcactcttctatgaaggttaattttcaggggagcggtgcatgaattggccactcgtacgccatcaaccaatccaaccaacagatcttatagctactaccgccatgctgcatgatcgttctatctgcatctgaattctgaagaagattagaacatgtgcaggattccttggctggcatctgaattctgaagaagatgattagaagatgtcgaggatttcttggatgaaaccggggcagagagggcagttgccgcggctgacccagagctcgcgggagcagaggcggcagaaggtgtggccgcacggaatgaatgcggcgcccttgtggagcaccatgtacacttcgcacacgcatgccacagggatcatgcgaagcctgaagaacgttgcctcctactac

SEQ ID NO: 27822 - DNA, 533 bp, Oryza sativa
  Clone ID: uC-osflm202109a03b1
ggctcttcagactttggttggggggatgacaccatgaccccagactacacttcagtcttcgttcctaatgctgccatgccagcatatggtgaacctgcttacctgacaggtggagcgccaaagagaatgaggaacaactatggtatcgccgtgccccagggaaatggcatgcctaatctcgcacaaaacatgcccaccttcgatcccgagatgaagtatttgccattaccttatgtttagagcagctcaaatgaatcaatggacaaccttctgcaaaatgatgctacacaagacggggcaagcaacgagggcatctggagccttgatgagctgctcatggcaactggtgcctactgaggagactaaatgttctggtcagtgtggtctgtcactagcaaaccatgttgaatgagtatggccaagatgaagagctggtgatgtctgctatgttatgcagagggatgctaccaaagtaatgctagaatattacaagctgctatcagctgtactctctatgacaactgttatactat

SEQ ID NO: 27823 - DNA, 361 bp, Oryza sativa
  Clone ID: uC-osflm202109a04b1
tcccttctcgacccacccatccgttttcattcatttcgctgattccatcccatacggggggggtatatttaaactctagcggggttctcaaaccccaccatatccactgcttgtcctacatgatgcttattatctatccgtgagagcttattctttcttctacacataccttcttactcatgatatcttgctctgtggcctgcccgtttctgatctatgtgatactatactctctacatataaaaaagttgcattacttaacagcctttttggaacccgtttctatgcacatttacagggctatcgggcgagtatcatgcatctttgtgaccttaagtctaattgttgatcctgatcactt

SEQ ID NO: 27824 - DNA, 291 bp, Oryza sativa
  Clone ID: uC-osflm202109b03b1
agttatatctatagagaaatccatctcctctcctatgttcccgtaaccttggtttgacgtcgacggcgtcggccgctgcctcgcgcgcgcgatggcagggggtggtgcgcggcgttgctcctgcctgcccgctgaaaccctagcaagcaagccgtagatctcgcgcggcggcgcggcgcggggcgggggcggtcggatccagggggtggcagggggggggacgcgcggtgggatgccaagcgcgcgggaatggaggagatcggggagctcgacgagaagctgagggacttc

SEQ ID NO: 27825 - DNA, 193 bp, Oryza sativa
  Clone ID: uC-osflm202109b05b1
catgttcccctcctcctcgcctcgcatcccctggctcttttcgtgagcagggaagagcatcccctctctcttttcgtgagcagggaagagggggggggggggggggttcacatataaccataaggagctcaagggctgacgggtcgttattcttggacactgaaagcaccaccgcacagggagagaggaagag

SEQ ID NO: 27826 - DNA, 444 bp, Oryza sativa
  Clone ID: uC-osflm202109b08b1
tttatcccatccactccagagctccccgcggcacttggcaccaccaccaccaccaccggcatccggcggcgcgggcggtgatggcgaccatcaccacgcagctccggtcggccctcctctcgccggcggcctcgccgagccgccgtgccaggcgcgccccgtcgtccgtgcggtgcgactcctcggcagcgtcgtccctgtccgcctccgcgtcgctcgacgccgacttcgacaagaagcagttccgccacaacctcacccgcagcgacaactacaaccgcaagggcttcggccacaagaaggagacgctcgagctcatgagccaggagtacactcagcgacgtgatcaagacgctcaaggagaacgggaaccacgacacgtggggccccgtgacggtgaagctggcggaggcgtacggcttctgctgggcgtcgagcgcgccg

SEQ ID NO: 27827 - DNA, 533 bp, Oryza sativa
  Clone ID: uC-osflm202109b10b1
tttgttcttgcctgtgcctgcttgcgttcgctggcctcctcctgctcctcctcctccctgcaggatcaatgactgcaggccaggacaccaccaaccacgacaccattcacatataaccataaggagctcaagggctgaggggtcgtttttcttggacactgaaagcacaagcagagagggagagggagagagagggaagaagaaggtgagggagctgggcaatggcgacttcctttcaggggacgacgaccaagtgcatggcgtgcgacaagacggtgtacctggtcgacaagctcaccgccgacaacagggtctaccacaaggcctgcttccggtgccaccattgcaagggcaccctcaagctcgcgaactacaactcgtttgaaggagtgctctactgcaggcctcactttgatcagctgttcaagaggactggaagtttagacaagagctttgaaggaactccaaggttgtcaagccagaaaaaccagtgagaatgagaatgctattaaagtctcgagcgcatttgctgg

SEQ ID NO: 27828 - DNA, 440 bp, Oryza sativa
  Clone ID: uC-osflm202109b12b1
tttgtttttagaaggtggatagagccaacacagattgggttaattccaacgtcaggggggtatagacccttcttcagctgagatctagtcgcaacttctgcattgatatcgtcctgctctgtgttattcttgggattgcggcttatctttacaatgttctaaaaaagtgagaccggactgtgccatggatctattttccacgtcttccggtgatggatggatgagtttctacttgtccaccagctgttccctttatttttatctcatctgtgtaatagtagtatggtgttcttccgggacttgcgaacattcttgttgaaagttgaaacagtgagcattggtgcgtgcgaaaacctgacgtcttctgtacatctgcgagtttaattcttagcaggagcgtatcaaacattctgttatgaactatgtaaaccttctcatgt

SEQ ID NO: 27829 - DNA, 420 bp, Oryza sativa
  Clone ID: uC-osflm202109c02b1
ttttgttttttttttttttttttatgggaatgtcatcattcttgtcattctcatcgtatctatagttagctccaataacttgggactgcaagagagcagacagtcctgcgagctccaataacctggtaatgaatcctgacgaacagaccaagtaccagtcaacatcgacttgttgctgttacatcctgcctaggtggtgtacattacacaagaaattcaagagagcagacagtcctgcagctcctcccttccctgctaggctgttactcctctatggtcacctgtgcttgatttcatcatctgccttgatctcagaaaccatgtctgtcttcctgggaggattgctacagtccctgtctctgctcttccgggcggcctgatccgggccatcttggggatgatacttctgctcggcaagaa

SEQ ID NO: 27830 - DNA, 441 bp, Oryza sativa
  Clone ID: uC-osflm202109c05b1
atttgtttgagggaaaaaaaaagagaaaaagaggaggggattaaagaagaagaagagagaactcgaactctcgcctaccatttcgccccccttcgcaagcaatccaccactgcatcggcggcgagggctcaccggcggcgagccatgtgcggcggcgccatcatccaccacctgaaggggcacccggaggggtcgcgccgggcgacggaggggctcctgtggcccgagaagaagaagcccacgtggggcggcggcgggaggcgccacttacgggggttcgtggaggaggacgacgaggacttctaggccgacttcgaggagttcgaggtggactccggggactcggatttggagctcgggaggaggacgacgatgacttcgtctagatcaagccggccgccttcaagagggccctctccagagataacttgagcaccatta

SEQ ID NO: 27831 - DNA, 368 bp, Oryza sativa
  Clone ID: uC-osflm202109c08b1
ttgatttgtcggacggcggcggcacccctgcgagggaactaactagataggccggccattgagacggcggccggggacaggtacacccgcgggggcgggacgcgctccacagcgtgctgcgcggacaggtccatgctcgcagcaactacaggcccaaggcctggagaccgtcgagcacgttctacggcaagtcgtggagggttaacacggggaggtgcgctgcgtgtgggaggcattgcaaggaagcaagccggacggggctagcacccgagcgagatctgggacagcatggaggagtttctgaccaaggagacgccggataacaacctcatcaggctgctgatcagcatgggggaggcgatgaggac

SEQ ID NO: 27832 - DNA, 415 bp, Oryza sativa
  Clone ID: uC-osflm202109d01b1
tttgatctacacatagtaaatcatgcgggccagggggacatgggcacagaggacgcttgcggccccagagaaggctaggagcagacgtgaataacaagcgggccaaacggtgaacaacaccccgcggcaggagatcgagacgcactacgacctgacgacagaagagcaccagactaacgaccaggcggggcaagaggaagccagcctgccctggaagcggctgcacaacaaggtgaccgggtccaccacccacctgatgcgaacgagacagcgcgggccggcgcggagcataaaacagaggctgcggacagaggagcgggagcgcaacatggactttgttaccaaaacctcaggactagactggaaggaaaccccaagggacgaggagaccatggagatgctaacagcgctgggc

SEQ ID NO: 27833 - DNA, 549 bp, Oryza sativa
  unsure (1)..(549): unsure at all n locations
  Clone ID: uC-osflm202109d04b1
gttttgttcgtggctcgtgcccaccgtgattggcgggggcatcgtggagttcatcggcgagatgtacgtcaacaactgccccaagcacggcagcgcgctcggcggctgcgtcgccggcttcctccgccgcttctccttccagccgctccgcgagaacccgctcctcggcccgtcttccgccactttgcagaaaatgggagctcttgactggaacaaagttgttcatcagcaccaaggatggcgtctcattagctgtatctggctccatgctggcctaatccatttggttgtgaacatgctgagtttactgtttattggaatccgccttgaacagcaatttgggttcgttcgcattggtgccatatacctgctatctggttttggcgggagtgtgttgtctgcgcttttccttcgtaataactacatctctgttggagcctctggagctntatttggactgcttggatcaatgctttctgagcttattatgaactggactatntattccaaccaggcagcagccataataactcttctatttataatcgc

SEQ ID NO: 27834 - DNA, 543 bp, Oryza sativa
  unsure (1)..(543): unsure at all n locations
  Clone ID: uC-osflm202109d05b1
aaacccaaagctaagcttcgagctccggcattgatcagtgagctagctagtagctggttggttaaaaggcctttttgttttgtttgagttggagcagaggagaagaatggcggctctgcttgtggtcgtgttggttgccatgtcggccatggtggcgacggccaactttaaccaggagttcgacatcacctggggcgatggccgtggcaagatcctcgaggatggccagctgctgacgctcacgctggacaggacgtccggctcagggttccagtccaagcacgagtacctctacggcaagatcgacatgcagctcaagctcgtccccggcaactacgacggcaccgtcaccgcctacttacttgtcgtcgcaggggccgacgcatgatgagatcgacttcgagttcctggggaatgtgaccggtgagccgtacacgctgcacaccacgtgttcacgcaggggcagggccagcgcgagatgcangttccgctatggtacgaccccaccaaggacttccacacctacttcatcctctggaaccc

SEQ ID NO: 27835 - DNA, 490 bp, Oryza sativa
  unsure (1)..(490): unsure at all n locations
  Clone ID: uC-osflm202109d09b1
cttcccccacccttccaatcccaatctcttctcttcccctctcgttagggttaggtttttattttctctctctcgatttctctcttcgcttccacttcccaaaattctcgagtcaaacctcgtggcgttcggccatggcgacggcggcggtgctcggatcccacgacgccctcgacaaccggatgcatctgggggccttcgccgtgtccccggcgtcgaagccgaggcggaggcggcacagcaaggcggcgtcgccgccccccaaggtggcggcggtgagctcgccgccggtggttaagtcggcggcgagggtggcgtcgcctcctcccaaggctgcggcggcggcggcggtgcctcaggggcgtcgctcgccggtggcgaggaagcaagggtcgccgacaaggagttgccgaagcagaggctcgtgatggnggagatcccgatcctcaagcgcggcgaggagcccgccgtttcctcgccgtcgcctgct

SEQ ID NO: 27836 - DNA, 363 bp, Oryza sativa
  Clone ID: uC-osflm202109e03b1
ctttatgatactaattactactaaccgtgaaaagaagccgtcggttaatattcgatcgatcgatcatgtggtgtacgtgggcgttggggcggttggtgttggcggtggtgttcctggttgcgttggctgccggctatgcaccgccgaacaaggttcaccggaaccactgaaaggtcacggcggggccatggaagcatgcgcacgcaacgttatacggagggcgcgactggtcccgcacgctggactgctcgtgcgggtacaaggacaccttcaaggaaggctacggcgtgcagaccgtggctgtgagcacgccgctgatcggggccggcgtcagctgctgcgcctgctacgaggtaagtgcgt

SEQ ID NO: 27837 - DNA, 537 bp, Oryza sativa
  Clone ID: uC-osflm202109e07b1
ctttgatcgatcgagacagctactgacatggacgtgaaaaagggaagaagaactaaccatgtccatgcaggagatgctccgcattggagacgacgacggccggagcgatgctctggaacgcgagctcaaggagaagctgaggttgcgcggcgatgcctcaccggcgaaatgcaccaggcaggagcagcggtggcggtctgatcatggcatcgtcgacgcccgcgagaggttcgtgcaggcgtacggccgcctcagggacgatctcgtcggcgacgactcgtgcgagctcaccgacgaagccaggcgctggcttgctcagatgatcgactacaatgtacctggaggaaagttgaaccgagggctgtcagtgatagacagttacctgctgttgaaacaaggaagtgaggttactgaagatgacttcttccttgcttgtgtgcttggttggtgtgtagaatggtttcaagcatgtgcactactacttgatgacatcatggacgattcacataccaggagagatcaagattgctggtaccg

SEQ ID NO: 27838 - DNA, 550 bp, Oryza sativa
  unsure (1)..(550): unsure at all n locations
  Clone ID: uC-osflm202109e09b1
tttttacccgacatctggtatggaagggggaaaataaatggcttgaagtgactgttggtgtagttggcaaacgtggagaaatgctgtcactaaatccaagtatcacagtcaaagaaagtggtgacattttatctcttgaggagaaatttcaaggtggaactggaatcaacttgacaccacctccttcaacaattatgagcgaggaagccctgcagaagtgcaaaagttgtatcgaaactttggcaaacactctcggattggaaggcttttcaagaatagacgcatttgttaatgtccagaatggggagatactgctgatagaggtaaacactgttcctgggatgactccatccactgtactgattcaccaggcactgacggagaaaccacccatctatcccacangtttttccggacgcttcttgatctggcgtttgcaagggcgaactagctaagctactactgtaactatgtttgtgatgtattttcatttcagtgcaaataaggtgctaccatgcatgtatcgatctgtattactgtatgcaatatg

SEQ ID NO: 27839 - DNA, 401 bp, Oryza sativa
  Clone ID: uC-osflm202109e12b1
tccctttcttatttttactaattttttttggggggagttttttaaaaataatttggggttataaaataaattttttttatttttttggggggagccaaaacacaaaaagctcacccatttaccacgagataaagctttaactctagccaacaaggggcactactaccaacaaagtgacactatccctagcaaaccgagcaaccagacataaaccgatcgcataggtcatcaacaaaacacttcattattgaacaatcaccacactggctgcaacaaaatattcaatctcggtaagacacacaacaataatgaatccgatggcatattgaaccaaacatcaggcaaacatgtctgctctgaacttaactacgaacaagaaactgctatactagaaaagaaaa

SEQ ID NO: 27840 - DNA, 544 bp, Oryza sativa
  Clone ID: uC-osflm202109f03b1
gggagagaatctcccccctgggtcttatgtagtattgcaattagagaaggaggcgatgttagcaccacatactcacttctgcttgatctgtggcaagggtttcaaaagagatgctaatcttaggatgcacatgaggggccatggagacgagtacaaaactgcggcagctcttgcgaaaccttcgaaagattctagctcagagtctgcaccagttacaaggtactcgtgcccatatgttggctgcaagcggaacaaagagcacaagaagttccagcctctcaagacaatcctgtgtgtgaagaaccactacaagagaagccactgtgacaagagctacacctgcagccgttgcaacaccaagaagttctcagttatcgcggacttggagactcatgaaaagcactgtggccgtgacaagtggctatgctcgtgtggaactaccttatgaagaaagacaagttatatgggcatgttgctctattccaagggcacacgcctgcactccctatggatgatatcaaagtaacaggagcatcagagcaac

SEQ ID NO: 27841 - DNA, 505 bp, Oryza sativa
  Clone ID: uC-osflm202109f04b1
cgtttctaacactactgctgcagacggtgatcagggggagatttagagtatggcggcgctggcacaagcgctggtgctcctgccggagtggggctccggccacctcatgtccatgctcgagtcctgcaagcgcgtgctcctcgccggcgccggcggcggcagggagttctccatcacgctgctcgtcatgcgcccgcccaccgacgaggcgggctccgaggtcgaggcgcacgtccgccgcgaggccgcgtcgggcctcgacatccgcttccaccgcctccccgccgtcgacccgcccgccgacgccgccggcgtggaggagttcatcgcgcggtacatacacctgcacgcgccgacgtagggacgccgtcgacgggatggggcgccccgtcgccgcgctcgtgctcgacatgttcgccgcgcccatggtcgacgtggcgcgcgacctcggcgtgccgtcctacgacttcatgtagtacaccggcgccatgctcgcgctcatgct

SEQ ID NO: 27842 - DNA, 498 bp, Oryza sativa
  Clone ID: uC-osflm202109f07b1
ttctcatcatcgtgtagttttaggccatctgagggcctttgaatggctctcggcctccttcatttttcatagcatttgtgtagtgtgtgcaaatccatcatcgcatcttcatatctgaagaaatgaaggtgaccactcagctcaagcccatggcctcctcgtcgacgtcgccgtcgccgtcgcggctgccgcggagcgcgagcggcaaggcgcccacctcgccgccgtccagctccaacgcctcgcgccgccaccaccagcagccgccgcgggcctcggcgtcgacgcccgccaccccggcgccgtcgcgccaccacctcaggtcgctgtccatcagctgcatgacgatcaggaccgacgacgactcgccgccgccggccgccacccacaaggacaaggcggcgacggccaagccgctgtcctactactcgtcgatgctgtcgccgaggaagctcatgcagcgcgcgtcccgcgcgttccgccgcagcaagtcgtctc

SEQ ID NO: 27843 - DNA, 564 bp, Oryza sativa
  Clone ID: uC-osflm202109f09b1
tgtttcggagccgagcgtcccggacaccatcagcatcctgcgaggcctcaaggagaagtacgaggggcaccacggtgtgaggatccaggaccgcgcgctcgtcgtcgccgcgcagctctcggcgaggtacatcatgggacgccacctgcctgacaaagcgatcgacctcgtcgacgaggcctgcgcgaacgtgagggtgcagctggacagccagccagaggagatcgacaacctcgagaggaagaggattcagctggaggtggagcaccacgcgctggagaaggagaaggacaaggcaagcaaggcccggcttgtcgaggtcaagaaagagctggacgatctgagggacaagctgcagccattgacgatgaagtacaggaaggagaaggagaggatcgacgagatcaggaagctgaagcagcgccgcgaggagctccagttcacgctgcaggaggccgtagcgccgatggacctcgcccgcgtcgccgacctcaagtacggcgcgcttcaggagatcgacgtcgccatcgcgaagctcgagagcgagacgggggagaacctgat

SEQ ID NO: 27844 - DNA, 392 bp, Oryza sativa
  Clone ID: uC-osflm202109f10b1
ttttagaaggggtcggctaactcctctgaacaggggggccttgaggggatcgccgggactgaggactagcacaggctgttccttcttggacttgagaagtacggcaaaggcgactggaggagtatctcaagaaactttgtgatctcaaggacacccacccaagtagctagtcatgcacagaagtattttattcgcctgaactcaatgaacagagagaggcggcgatcaagtatacatgacataaccagcgtgaacaatggagatacatctgctgctcaggggccaatcacaggtcagccaaatggcccatcagcaaatcctggaaaatcctctaagcagtctctacagccagcaaatgcgcctccaggcgtcgatgcttatggtacgacaat

SEQ ID NO: 27845 - DNA, 564 bp, Oryza sativa
  unsure (1)..(564): unsure at all n locations
  Clone ID: uC-osflm202109f12b1
gcctgctggaggcgccccggcataattgcctcgacccacgcctccgccttgttcactaacgtctaccaattggacgttggtggaatttttgagacatattgggggggggatgagaaatcgggcttagcccctgatctggagtcaaaacacatatggcttaaatatctaccatcagataaaggtctacctcttgtcaacaagggtaacttctaccaaaatggtgacactggtccttggggaccgtgcagtcaaatatattttgatcagattgggcatcatgatgttgcttcattattgaacaatgatgaccctggttgtattgagatatggaatcttgttttttttcagttcaataaggaagcaggtggcatattgatgccatcatcagccaaacatgtaggcactggactgaacttcgaacaattaacttctatacttcagaagaaaaagagcaaatttgacaccgacatattaatgccgacaattgactccatcncgcaatgtactggcaatgaaattcaaccattactctgtaaattggtcctgatgatataatgaagttga

SEQ ID NO: 27846 - DNA, 445 bp, Oryza sativa
  Clone ID: uC-osflm202109g02b1
attatatgttactagttatgcttaaaattttgatatgaattagcatacatcttactaattacagatgttattgcaagtaacaccagttaattgtaaaacactattactcaatacacacactgttgctaataatgaatgctggtattataacatctttaataaacaaaattcccaaaagtaagcacattaagtttgatactagcatgctcaactttcacattggttgctgctttctccattgaaaaatgtctggactactgatcattgctgatggaaatttgctgtacttccctccacatttactgtaggcttattaataagagtttaaaattttaagttagcatgcatttggtggttccagtgttgtgattttttgcttggaatcaaatggccacccaatcacagcctaatgcatttgtgtaccaattccacctttaactgatct

SEQ ID NO: 27847 - DNA, 502 bp, Oryza sativa
  Clone ID: uC-osflm202109g03b1
gtgttttagcttggagagagacaacaatggcggctcaggctcttctctctgggaggcagctgctggggaggccattgcaatcttcagtctccaggtcttcttcctccaggaaggcacccttcatggtcagggcagaggccactccccctgccaagcaaggtgctgacaggcagctgtggttcgcatccaagcagtccctgagctacctggatggcacgcttccgggagacttcgggttcgacccgctggggctatcggacccggaggggaccggtgggttcatcgagccacggtggctggactacggcgaggtgttcaacggccggacggcgatgatgggcgtcgtcggcatggtcgccccggagctcctcggcaagctgggcctcgtccccgccgagacggcgatcccgtggttccagaccggcgtgatcccccccgcgggcacctacacctactgggccgaccctacactctctgcgtcttcgagctcgccctcgtcggc

SEQ ID NO: 27848 - DNA, 440 bp, Oryza sativa
  Clone ID: uC-osflm202109g07b1
ttgtcggcgaacgcgcagcgcgcgaccaccgttgcttggagctagctcgcggggatctgcagatctcgcccatggcgtcctcgtcggacgagcagccgaagccgccggagccgcccgcggcggcggcggtggcggggacggccgtggccaccgccgccgcggcggtgccgacgcacgccgagtgggcggcttcgctgcaggcgtactacgccgccgcggggcacccctacgcgtggcccgcgcagcatctgatggcggcggcggctgcgggggcgccgtacggcgcgccggtgccgttcccgatgtaccacccgggcgccgccgcggcgtactacgcgcacgcgtccatggccgcgggtgttccttacccgacagctgaagccatggcggcggcggcggcggccgcggcgggggcggtgccagaagggaaggggaagggg

SEQ ID NO: 27849 - DNA, 531 bp, Oryza sativa
  Clone ID: uC-osflm202109g08b1
tttttcactacaggtcgctcatctacatgcggtgttgctgcaaacatgctgctccatggaatggagcatcaaggattcaccactgccgaaggaatttttattgctggttggtcagaagaaggatatgggtattggttccaaacaccggaaggctggaccatagacgggcactacaggtcgctcatctacatgcggcctctcgccatttgggcaatgcaatgggcacgttctccacccaaggcaatgcttgatgtcccgaaggtagacctgatggacaggatacacctatccccacaaatgatccgggcattgaacgagattaatgttagaaagatagcacccgacaatagatgtttccctagctctgatttcgttgtgaatgctgaccacaaaaaaaaaagagaagcaaaatgcaacaactgagtagtaacatacatatatatactctccttttcggcttttccttggccccttacaagtttcagtggggtttcatgggttttccttgaaatcagagggcatataaatcta

SEQ ID NO: 27850 - DNA, 482 bp, Oryza sativa
  Clone ID: uC-osflm202109g10b1
cgctcgccgccaccgccccacctcgccggcgccgccgctggacaacgacgacctcctctccgagatcctcctccgcctcccgccgctgccatcctccctcccccgcgcctccctcgtctgcacccgctggcgccgcctcgtctccgaccgcggcttcctccgccgcttccgcgcccgccaccgcaagcctcccctcctcggcgtcatccaggtctgcgcctaccccatcttcgcccccgcgctggacccgccggaccggatccccgccgcgcgcttctcctggcggctcgacaaccgccacgacctcaacgacttgctgggagtccgccacggccgcgcccttgtccacgtcaacacctgccgctattctcagcgcaggctcatcgtgtgggacccccgtcgtcggcgaccgtcgcgccgtggctattcccggcgggttccgtgacagggggtgggtcgtccgcgccgagaggtgcgctgcg

SEQ ID NO: 27851 - DNA, 360 bp, Oryza sativa
  Clone ID: uC-osflm202109h03b1
gtctttttgacctcaagacgggctacctgacgggggggtatgttagcaccgggttgatgatcaaagcgatctgcacggcgctgggatgcgtcgtcaaccccaccgtgttctgggtgttctacagggtgtacaagatgggcagcggcgacatgggcgacatgccctacgccaagctctaccgcggcttcgccatgctcagcgtcggcgacggcgagcaaggcctgcccaggcacagcatgctcctcttcaaggtcttcttcgtgctcgccctggcgctcagcgtgttccgggaggtggcgagcccgaaggagtggcgcatcctgcgctacatcccgagcaccatcggcatgggcatcacct

SEQ ID NO: 27852 - DNA, 434 bp, Oryza sativa
  Clone ID: uC-osflm202109h08b1
tattttcttctccagtgagactttccccacggggggttttcttgaatatgggtggggatataacacctttctttcgagctttcttgcaattttgggcttcttttcttttaatctgggtactttccctccaatatctgaatacgaggagcaatgtggttcaagggattatcggagggtggcatcccgtccatcatcactgggtgctctacgcacccgctctatttgattaaagtgaggatgcatcttcacggggaggcatcagcagcggcggctgctaccccgccagcgcatgccgctctacctccagcgcttgctttccactctgggcaagccgtggcgatcccgcatgacctgattgcgccagctaggaaacccgggcctatagccgtcggcgcgcagatcctacgggcagacggctcaccagcactcttctc

SEQ ID NO: 27853 - DNA, 330 bp, Oryza sativa
  Clone ID: uC-osflm202109h09b1
ggggggttatgccatcatagggaggggataaccgcatatcaaaatatcgatccatgagagtatgtatgtcagttcgaaccacttcactcgcggcagcgaggaagtcgaaaagcttattcacgactcatctagcaaaacttgacgataagcctatctcaagttcttcatacaagcattgacattgcaaagttacaccgagagggctgaaacaaaagtgcagactgctgatggagacaagccgaattagcttacgcttcatcaagggcaagaacacctgggagggtgttgccttccagcaactccaagctagcaccaccgccggtggagatg

SEQ ID NO: 27854 - DNA, 464 bp, Oryza sativa
  Clone ID: uC-osflm202109h10b1
tgttgtgttgattccggagtttacgatgatggggggactaggcttaaggctgggatcaaggacactaactcgctgctggaactctactattctgtgggagggttgctcagcatcaaggaacaaggccacaatgttgttttacctgatgcagataacacatttcacgcaattaaggcacttagccaaagcgacggaagatggcgttatgacactaacagcgctgaatcgagcacgtttgctgctggtatcgcactagaagcattgtctgcagttatttcactggcagattcggaagttgactcatccatgatagctgtggtgaaaaatgacattgtgaagctatttgacacgatcaagagctatgatgatgggacattttactttgacgagaagcatgttgatgctgccgaatacaagggccctataacaacatctgcttcagtagtaaggggtgtcacctcttt

SEQ ID NO: 27855 - DNA, 430 bp, Oryza sativa
  unsure (1)..(430): unsure at all n locations
  Clone ID: uC-osflm202109h12b1
tttttatttcgtcaagcaaaatctgaataagcggggtaaatcctatgaaaagggggcaaaactcgcctctcagccatcagtccaactggtcaaggcccctcctcttctttcttctctcctctgcttcctcctgaagcggatgacgtcagcaatggcgatgagcttcctctccaccaccggccgctcctcctcccaggcacccctacccggccgccggctccctgngccgaatccctccctccccttccctctcagaccaccacaccgcctgtctcccttctccgctccccctcccgagccccatcgcctcacctaccgaacccactccacctcctcctgttccaggacacccacacgcgccggcctcctctctccggtcatctccacctggagaaccctcatcttcctccttggcgcctccctcctctcc

SEQ ID NO: 27856 - DNA, 498 bp, Oryza sativa
  Clone ID: uC-osflm202110a02b1
acctcaccgagcgagcagctagctagctgcggggatggcctccagagcggcggggggcgccaacctcctcctcgccgtggcggcggcgccgctcttcgccgcggcgagcgcgcatggccgaggctaccttggtgccaagtcctggcctcctgacggcagcctgagctcatcaagctccggcgaggctgcagcggcggacgtcgacgacggccacacggactggaagtgctactcctcctgcatgagcaagtgctgtcaccgccacgacgacgacgacgacgacaaggccaatgccaaggccaacgccaccgccggcgccgccgccgtcgggctcgacgatgactacaagtgcaagaagcagtgcctcggcaactgcttcaaggacgtgccggccgtttgctaccacaagtgcgtccacgactggtgcgcgaagctgccaccatatagctccgcgaaggtgcagtgctacaagaagtgcggcgataaatgcttccacca

SEQ ID NO: 27857 - DNA, 458 bp, Oryza sativa
  Clone ID: uC-osflm202110a03b1
cttactcttgggggcggcggtcgcgcctgcgcggggggctctgaggacggcgctggcgttccacacggggcaggccgtggcgatcccgcatgacgtgattgcgccgccgaggaagcccgggccgatagccgtcggcgcgcagatcctgcgggcggagggcgcggcggggctcttctccggcgtgtcggccaccatgctgcgccagacgctctactccaccacccggatggggctctacgacatactgaagaagaagtggacccaggagaacggcggcgtgctgccgctccaccggaagatcgccgctgggctcatcgccggcggggtcggcgccgccgtggggaacccggccgacgtcgccatggtgcggatgcaggccgacgggcggctcccgctcgccgagcgccggaactaccgcagcgtcggggacgccatcggccggatggcgcgcgacaagg

SEQ ID NO: 27858 - DNA, 314 bp, Oryza sativa
  Clone ID: uC-osflm202110a05b1
cttacttgtcccttcccccaaaatgtgatgaatggggcggtttttggtgctccatggggccctatgaattcagaggagtctggagcaatgagatcttcagcgcagcagcatcagatgaacgggatccgggcagtcgcctcacctgaaagagaacgccctgcaaggggcagcaacatcatcaacaacaatggaggtccgccgacctccccagatgacaagaaggggtcgtcgtcagggagctaggggtcgacttggcccaaatttgcagtcgccctgacgaacaaagagacagaagaggacttctgggtgttcaa

SEQ ID NO: 27859 - DNA, 498 bp, Oryza sativa
  Clone ID: uC-osflm202110a09b1
tctttcttctcctccggctcttcttcagtatggggggcctcttttctcctcgtgcgcaccaccaccaccgtagcaatggcgggcaacgggccgatcaacaaggaggacccgctcaactggggcgcggcggcggccgagatggccggcagccacctcgactaggtgaagcgcatggtggcgcatttccgcgagccgctggtcaagatccagggcgccaccctccgcgtcggccaggtggccgccgtcgcccaggccaaggacgccgccggcgtcgccgtcgagctcgacgaggaggcccgcccccgcgtcaaggccagcagcgagtggatcctcaactgcatcgcccacggcggcgacatctacggcgtcaccaccggtttcggaggcacctaccaccgtcggccaaggacggccccgcccttcaagtcgagctcctcaggcatctcaacgccggaatcttcggcactggctccgatggccacacgctgccgtcggaga

SEQ ID NO: 27860 - DNA, 394 bp, Oryza sativa
  Clone ID: uC-osflm202110a11b1
tcctcagagctcttcttcttccacgcgccagggtggtccaaactcatcgacggggggctcctcctcctcctacccccacagggaaggatcgacgcaaccaagcaagaattgagaacttgtgttgttctatgtctcgttcttgctgcgatttgaagtaatcggggatcaaaaatcgttgtcaagactgaagaatcttgattttttttttcagtgcataggaggaagaagaggagaagctgggacgttgctcctcacgcgggtgatctcgcaccggcatggtctttgcctcgccgggaggaagaaggcgtcctcgcggcggggatggtccatagggcggcggacgtggtcatcggggtcaccgccggcgtcgccccggcggtggccccggcggcgc

SEQ ID NO: 27861 - DNA, 517 bp, Oryza sativa
  unsure (1)..(517): unsure at all n locations
  Clone ID: uC-osflm202110a12b1
gaaaaaactcactgcatcgcctccgcctctgggggccatcgccgcgatgaggcggggcgtctccgccatggagaacaacttcgtcgcccacgccgtcggcggcgaggacgactgctgcctcttcggcgccggcgcccacctgcccgccatggagctccccacctgccccgccgacttcgacgggttccataaggagaccaacgagatgctgaagcacaagaagggaacgaccacgctcgggttcatcttctacaagggcgtcatcgtctccgtcgactcctgcgccagcatgggcggatacatatcttcgcaaactgtgaggaaaattattgaaataaatccgtacatgcttggaacactggcaggaggtgctgctgattgtcaattttggcatangaacttgggcatcaagtgccgactccatgagctctcgaacaagcggaggatctctattgctggtgcttcaaagcttttggtcacattctgtactcctaccgtgggatgggactgtcaattg

SEQ ID NO: 27862 - DNA, 446 bp, Oryza sativa
  Clone ID: uC-osflm202110b01b1
gactgtgtataactggcaacttttcttgtgtgggggggttggtctttgggctggagctaatcatcggatttgtgacagagtattacacaagcaacgcctacagccctgtccaagacgttgctgattcctgcagaaccggagctgctactaatgtcatctttggccttgctctgggatacaaatctgtcattattcctatttttgctattgcttttagtattttcctcagcttcagccttgccgcaatgtacggtgtagctgtggctgcccttggaatgcttagcacaattgcaactggtcttgccattgatgcctatggccctatcagtgacaatgctggaggaattgctgagatggctggcatgagtcacagaattcgtgagagaactgaagctctggatgctgcaggaaacaccactggtgccatcgggaaggggttcgccatt

SEQ ID NO: 27863 - DNA, 285 bp, Oryza sativa
  Clone ID: uC-osflm202110b04b1
ctctaatacacacacactcaacttaactttcctttggggtctccttcacccctcctggggtttttaaacatccctttaacttcaatcctattacacaacaacaccttcctgtacttcttttgcatttttatccttaattaccgacaccaaattactacatttcaataacattcaaaatcatttttccaggtcaacatccttcataccattcttctttttcaacttttcccactgctcttaattcttctgcaactttcattcctcaaccaaccctccactacatta

SEQ ID NO: 27864 - DNA, 189 bp, Oryza sativa
  Clone ID: uC-osflm202110b06b1
ttctttttatctactacatcacttctaccaaagggggggcttttatataaaatacgagggggtctcccaccaaatctgaagatgcttcttcccgcccttcttaacgtcgccggaaactactttagccatctcgaattgcaactcccacgagaaccaccacatgtcaactaccaacccaatgacgaacaa

SEQ ID NO: 27865 - DNA, 302 bp, Oryza sativa
  Clone ID: uC-osflm202110b08b1
tcttttaaatacaacctaaaacaactcaaccgggggggtttttttaaaacaccggggggcacacacaaaacctacctatctaatccactcaacatggaaaaaccagccaacgtgatctaataagccaaaaacaccatcacgccaatccagataccactattctgaccagccataccacaccatttaaggctgcaaacccgctaaatgatcctcggaatgaacaccaggctacaacaagtaccgttaactatctagttcaatttaacaatactaccccttaaaactcgtttagaaactcttac

SEQ ID NO: 27866 - DNA, 498 bp, Oryza sativa
  unsure (1)..(498): unsure at all n locations
  Clone ID: uC-osflm202110c01b1
ccacatcccgcgcccctcgcctccgccgcctcggcggaatcgaagccgcctcctcccctctcccgctctcaccggacggcaccgatcctttccctgctcctgtctccaccgttctactcgcctcgaaagggaggggggaggatgtggtcgtcgagccaggccagcacgaggggcgtgattgaggtggggaggggtggaggcggngccttcccatttccccaagaggcccgcgccgcggaattcctccagggtcaatctgtcaaggacatatgcaattaaatcttgttcagtgagtagccgtacagggctttgccttggacaatgttatcataagaagtcttctgcttgcaaatgcaagttgggatggtcttctcaaccactgtctagcttgaggcatcacttaagagtacattcatcagcatcggaggcggttcttacttcccaatctgatttcacaaaacttcttgttgggaatgaaaaaattggtgttctcttgct

SEQ ID NO: 27867 - DNA, 351 bp, Oryza sativa
  Clone ID: uC-osflm202110c05b1
tatttaaagctgctcgcctgctggaccggcccggacttaacttgctcgacccacgcatccggtttgttagcatgccaatcatgccattaaaaacgggggattttttaaaacacaagggggttaaccacacaggatcaccctatgatgagtactggcaaaaactgaacatgccccagacagggatgtaaaagccctatcgccagtataggcggtgtacatcagattatttcaaacattaccctcagccagctatagatcttatagataatttgcttgcattacaaccagaaactcgtggaacagctgactcgacttttcatactgacttcttcagaagaaagccttgcttgc

SEQ ID NO: 27868 - DNA, 58 bp, Oryza sativa
  Clone ID: uC-osflm202110c07b1
tctatctcactcaccatcatcttactatacaggggcaatttaaaacatacacgggatt

SEQ ID NO: 27869 - DNA, 113 bp, Oryza sativa
  Clone ID: uC-osflm202110c09b1
tctttaacacaatgcaaaacaaccaaactggggggtcttttttaatatccggggtgatcaaacccataacatcactaacaagtgattctaatcacccaaaactactattcgcc

SEQ ID NO: 27870 - DNA, 511 bp, Oryza sativa
  Clone ID: uC-osflm202110c11b1
tattttcttcgccttcttcccacgcaacgccttgggggagaaacaggatacgaggagtataccactagtgcgagccaagggcatggcgcggcagcagcatcagcgggaggaggagagggccccaatgggctcggcccaacggcggctgcgcgccgtctactgccacctacagccgccgactgagtccggctggcgttgacctcgccgccaaccccaccgccggcgagtactctcacgtgcagggctacagtgctgtactccctgagaagttgcaaactggaaagtggaatgtgtacatatcctcatagtcacctcttaagttaataaatagattccctgataacccatacattggaacgcttcatgataactttgtgtgtgcagttgaaacctttagggactgtagatacctgggcacaaagtctgtgttgatggaacagttggggactactaatggatgacatatggagaagctagtacaaggccgactgcgatagttctggtcttatta

SEQ ID NO: 27871 - DNA, 213 bp, Oryza sativa
  Clone ID: uC-osflm202110d08b1
ttattattgtgcgtctacctcctcgctccggggagcttccattgaggcggacacggccaaccatgccagacaagctgcggatcacgtccaggctgcaaagaactgtcagaatgatccgaaggggcaaaagtaccataacggtatggaccattagctctgccagtacaaccggaatagtgcggtacgggacatcgcgaacctttcatgaggcca

SEQ ID NO: 27872 - DNA, 131 bp, Oryza sativa
  Clone ID: uC-osflm202110d09b1
tacttacacaatgcaacacaaccaaatcgggggatctttattaccacacgtgcgcaacacacccataacaggcctgaacaggcgattcaaatagtcaaaaactaccatgcgcacggcgccacatagagaac

SEQ ID NO: 27873 - DNA, 352 bp, Oryza sativa
  Clone ID: uC-osflm202110e03b1
gtttatctcacaaaaacttgcaacaactgtataatgctcatgaccccacacgtggtgcgctcgttgccattcattaaccgaggagaacattaatccttctgcactttaaacgggctagcaggcattagcaggcacaagagccaccatgataccaacaaggtaaattctgcagcaaaggggttgtacgaggccaaccatagtattataactacgccatatatacgtggagccactagactacataatgcatgaactacacgataacaccaggagcgccactgtggcactttgcttgaacgcagggatatccactaccaagacggagccgtacatgatgcaactaaagtggata

SEQ ID NO: 27874 - DNA, 138 bp, Oryza sativa
  unsure (1)..(138): unsure at all n locations
  Clone ID: uC-osflm202110e04b1
tcccctccnggacctctcctcaattccctcctcgacccacccctccttttatatttccaccaccccccccccctccanggngggattttttaacccccccgggggttccacaaccacctctccctactcactctctcc

SEQ ID NO: 27875 - DNA, 354 bp, Oryza sativa
  Clone ID: uC-osflm202110e05b1
caacaccccctccaccaaatacatggtggtctttattaacactacgggggggttaaaaaaaacccccacccaatcaagctcattaccctacaacaacaacaaatctgtaccaaacccatggacactctgcccctctcgatttcccactctcttaccttcttctatgacgccaacttctccaggcatctgactgtcatatacccacctcctccacccgtgatacccctacaccaccaccatcatatgcttcgcctcgccacccaaagaaccacttcgcatactctcactctattcactaatgtactacccttacaaatagaacccgatcatgtaccacacccttatacaccgcgg

SEQ ID NO: 27876 - DNA, 224 bp, Oryza sativa
  Clone ID: uC-osflm202110e06b1
ctctttttctaacccgcctccaccacccacatcgtgggcttctttacaccacctgtggggcttccaaaatatcccttccccttccatcccctttgcccaaaagctactctatcctattctcctccaccatcccattctgaccccaactagttacctctaccttcaatacatccaaatcaccattccacagaactatgacaagatacctccatactaccttcacc

SEQ ID NO: 27877 - DNA, 133 bp, Oryza sativa
  Clone ID: uC-osflm202110f04b1
ctttatctctacatcgcctccataaacaccagggtgggctttttcaaaaacgtggtgcgttacctacccttccctaccagaagacatccatttatcctccaacaccttcagccggcttctactgcatgatcaa

SEQ ID NO: 27878 - DNA, 53 bp, Oryza sativa
  Clone ID: uC-osflm202110f05b1
ctttatctctacatcacctcccacaactccatggtgggcttttttaaaaaccc

SEQ ID NO: 27879 - DNA, 215 bp, Oryza sativa
  Clone ID: uC-osflm202110f07b1
gaaccggctcgaccgacccacgcgtccttgtacggacaaggcacgcacgcacagaatgggggccctttaataggcgacgaggggtatatctctattccactcaggcggggagatcacgatgaggaagacgacaggggggaagggacgaagggctattgacaatcgccggccccaggccataaccagggtaaaatgccccgcaccggggttagacc

SEQ ID NO: 27880 - DNA, 228 bp, Oryza sativa
  Clone ID: uC-osflm202110f08b1
tcttatccgggcagggcacgcacgcacagatccgtgccgttttctagctgcccatcgctgtatctgtgttaccgtcgacacggcgagatcaggatgaggaggaggacagggtggaagggaggaaggggccgctacaaccgctcgccgcatgccacctggcgcgccaaggttgtccggagggaggaggcggcgcccgatgcggaatgtggctccctcggcgactacccc

SEQ ID NO: 27881 - DNA, 230 bp, Oryza sativa
  Clone ID: uC-osflm202110f09b1
tatatacgcaatgtaacacaacccaatcggggggtcttttttaacacccgggcgctacaagcgcaaaaaaatccttaaaaagcgaaacaaattatccaaaaccaccgtacgccagtgctacatggagaacgaccagtgcacccgacatggtaccaccaagttcaactatgcggcacaggcggtgatccacactacgatgcttgtgacacctcgactagcgcacctgatcc

SEQ ID NO: 27882 - DNA, 425 bp, Oryza sativa
  Clone ID: uC-osflm202110g02b1
gttgtttttactgttgctgtccaccggtgaatatggggatcctcaaaatcatcgtggggccccggtgacttggctcctaacaggaccatgatcatgttgcgaaggttctgcttgagcatggagctgatcccaacagagtatcgaaccatgttctttgatcactcatgggagatcgctgcagccactccttgaaatgcatgaacttactgatcaaggctattgctgatgggaatgattgaagttgtactgtaccataaacgaccattttagtggtgagccatgatgatggatcagccgatgtcgtcacaatcttgctagaggtctgagctgaccctaacattcgtgacgaggatgggacgattactatcatgacggcagcaactagcggtcaactagtgcttgttgaaattgtgtttcctacgaca

SEQ ID NO: 27883 - DNA, 472 bp, Oryza sativa
  Clone ID: uC-osflm202110g05b1
ctcgctcgattccgagagatcaatggggggatctaatcaaactggggggcgtttgagagagaggaataggaagaggaaccgaggagcctaagagcacggtagctagggcagcttgggcatggccagccgtcggtttctggcgacaacgagactggtggcaagaaccggcggctgtggtcgctccactagagctggaggatatcaacgtgactacggtggcgttctaggaggggtacacgccgctattcggcttagacaacatacttcgtttcggccacgaccgcaccgtcaaccttctcctagagcgctgcaccgattctggggtcatgtagtcgtccatgtaccaacacgggttttttagtgcctgcatcaaactccccttttactacaccgccggcgtcgtcctcgccttctacacatctaacggcgacatgatctataagctgatcgacgagctggacttccatttcct

SEQ ID NO: 27884 - DNA, 51 bp, Oryza sativa
  Clone ID: uC-osflm202110g06b1
ctttatctctacacaactcccataaattcaatagtggtgttttttaaaaac

SEQ ID NO: 27885 - DNA, 457 bp, Oryza sativa
  unsure (1)..(457): unsure at all n locations
  Clone ID: uC-osflm202110g11b1
tcgtagcccaagcccgccgcgtcggggagcccggggtacggcgccgaccgcgtgctgtacctcggcccgctctccggcgagccgccgagctacctgaccggcgagttccccggcgactacgggtgggacaccgcggggctctccgccgacccggagacgttcgccaagaaccgggagctggaggtgatccactccaggtgggcgatgctcggcgcgctgggctgcgtgttcccggagctcctcgcccgcaacggcgtcaagttcggcgaggcggtgtggttcaaggcggggtcgcagatcttcagcgagggcgggctcgactacctcggcaacccgagcctgatccacgcgcagagcatcctcgccatctgggcggtccangtggtgctcatgggcgccgtcgaggggtaccgcatcgccggcgggccgctcgcgaggtcgtcgacccgctctaccc

SEQ ID NO: 27886 - DNA, 407 bp, Oryza sativa
  Clone ID: uC-osflm202110h02b1
catgattttgtgagatatccatcaatacttggagtaggagttcatatatttactggcggtgtttcatcccttgcatggttcatgtcaaatcaggagaccagttttgtgactattggacagcgtgtgcttgccaaccccctgagggttcgatttcactatggccatcctgatatctttgatcgtcttttccacctcacaaggggtggtgtaagtaaagcatccaaaattatcaatcttagtgaagatatatttgccggtttcaattcaacattgcgtgaaggcaatgtcactcatcatgagtacatgcaagttggcaagggaagagatgtgggtctcaaccaaatttctctgtttgaggcaaaaatagcaaatggtaatggtgaacaaacactgagccgtgacattta

SEQ ID NO: 27887 - DNA, 444 bp, Oryza sativa
  Clone ID: uC-osflm202110h03b1
gataggtttcgcgagcttttcatcaatcctctgggtgggctccatgtttccccacccggaaagagcctcaaaattccccctcctctgtcgcgaccgatcgcgaccacggcgccggacgagcagacaccgccgccacgatgccggcctccaccggctccgtcccacccgccgcatcaacgccggcggctggggacgaggccaccgccgccgggagggtactcctcggcaggtacgagctcggcggcctcctcggccgcggcgcctccgccaaggtgtacctcgcccgcgacctcctcaccggccgcgacgtcgccatcaagtccttccccaacccccgacacggaggcggcctccgcggcggcgaggaggatgttcttctccgacccgcgcccatagagcgggaggcggacattctacccaggctgcgccaccgccacgtgatgc

SEQ ID NO: 27888 - DNA, 361 bp, Oryza sativa
  Clone ID: uC-osflm202110h05b1
atttatcttggggtagggaagcgattaaccggcggcgatctatcgatacaagtggtggggctcggatgatccaggaattggagagcatcggctgatcgagagatggcggggaacgagtggatcaatggctacctggaggcgatactggacagcggcggcgcggcggggggaggtggaggcggcggaagaggtggtggtggaggtagaggttacctctttcctaagcaggagggtaaagaactagtctagaagggcaaggagatatggatggatgaaagcaatgttcagcctggaaaaacaccaataacgatttgtggaagtattacgtggaatttcatgatgtcgataaagttcttcagtt

SEQ ID NO: 27889 - DNA, 308 bp, Oryza sativa
  Clone ID: uC-osflm202110h07b1
atttcatgcaactcttggtcagagatgtggggggggtttatggcatggatgtgagtgacacatacgggaaagctaccgatgaatgtgctgcacagctgtctagaaaggtaggcgaagctgggcctatccttgatgcgttggctgttgacctggataacatttcaagaactacacctgttgcccggcccactattgctgcaacatatcgcacagctcaaataattgcatacattgccaaatggtgatataccatagcaaagacatttactgaggcgttgattcactaattgctttctgcaatggactat

SEQ ID NO: 27890 - DNA, 506 bp, Oryza sativa
  unsure (1)..(506): unsure at all n locations
  Clone ID: uC-osflm202110h09b1
gctactcccccctcgccgagagagctctagggtgtccgctgccgaattttttttttaattcggggggagagatttgaagaggcggcaccatgttggtctaccaggatctgcttaccggtgacgagctcctgtcggattcgttcccctacagagagatcgagaacggcatcctctgggaagtcgatggcaagtgggtcgttcaaggagctattgatgtggacattggtgccaacccatctgctgagggtggtggtgatgatggngctgtttgatgaccaagctgtgaaggtggtcgacattgtggacaccttccgtcttcaggagcaacctccttttgacaagaagcagtttgtgaccttcatgaagcgctacatcaagaacctctccgccaagctggatgcggaaaagcaagaggaattcaagaagaacattgagggtgccaccaagtacttgcttggaaagctcaaggacctttagttcttttgtggtgagagcatgcatgatga

SEQ ID NO: 27891 - DNA, 151 bp, Oryza sativa
  Clone ID: uC-osflm202111a01b1
cggtcgctggggcggacgcgtgggcggactcttgggcggacacgtggagttctagatcgcgagcatccgcccttttttttaataggatacagattgagctcaaggatctgcaaaatgatcaccctacatcatccaatgcatgtcctagttg

SEQ ID NO: 27892 - DNA, 488 bp, Oryza sativa
  Clone ID: uC-osflm202111a03b1
agatatgtgccacggtcagttcatgggatcaaagaggcatgtagattctatatgattgaaagtgcatttgccctcacgatagcgttcctcattaacatatctatcatatctgttagtggtgctgtctgcgggtcagataatttgagtcctgaagaccagatgaattgcagtgatcttgatcttaacaaagcttcgtttttgttaaagaatgtcctcggaaactggagctcaaagttatttgcagtagccttgttggcgtctggccagagttctacaattacaggaacttatgcgggacaatatgtcatgcaggggtttctagatcttgggatgacaccctggatacggaaccttttaactaggcccttggccaatctgcctaggctgattgctcccattattggtggtccctcaccacgtggaccgttgcctatctttgcatctttgattctgtcattaaggctttcctttgctcatagttcttctca

SEQ ID NO: 27893 - DNA, 122 bp, Oryza sativa
  Clone ID: uC-osflm202111a04b1
cactaatcgaaaccgccattggagggagcagctgccgtttcttggtttcatttcttgggagttcaattggagagcgcgcttgaggtgctttgtgttgttgttccatgccccataccagggct

SEQ ID NO: 27894 - DNA, 253 bp, Oryza sativa
  Clone ID: uC-osflm202111a05b1
ttcctcattgaataattatttttaataattttaggttttttttttttggctttagatatattcccaatccccaacctcccaataatccgatctctcccagttctgttcggatcaaggctgtgtcgatcgcaaaaaagaaaaaaaaaaacaatttccttttggggtgggtcatctgttgatcacttctttgtttcccgcgttttgttggggattcgattttcgggttaagattttctacacgatggccttgaac

SEQ ID NO: 27895 - DNA, 281 bp, Oryza sativa
  Clone ID: uC-osflm202111a09b1
ttctagatggtgaggatgaagaatggaggccgccttctcgacgatgccaggatttgctagttctcccattgttatgaagttccctttttcgtgatcagaaacttgacaagaaagtactctgtagatgagcattgctgaggaactttaatttggtcttcgtagctctctctgttgtggcatttttctcaccacaagaaaaagaactgataacttattgaacaagagaaatgttttgctcactactatggaaaagccaactgtatgagtattatgatcatcag

SEQ ID NO: 27896 - DNA, 234 bp, Oryza sativa
  Clone ID: uC-osflm202111b11b1
gcctcggactcctctaattctctctcttgctttctctctcctcgcttcccgggtttgatacgtggggtagggaagcgattaaccggcgatcgatcgatcgatgcaagtgatcgcgctcggttgatccaggaattggagagcatcggctgatcgagagatggcggggaacgagtggatcaatggctacctggaggcgatactggacagcggcggcgcggcggggggaggtgggag

SEQ ID NO: 27897 - DNA, 454 bp, Oryza sativa
  Clone ID: uC-osflm202111b12b1
tgataatccccccctcctctggcagacatccgggggccaccacgtcagcctctcatggccttcgcggcggagccgatggatctggaggtgtcgccggattcctcgccggcggcggcggcggcggcggcggtgtgctcgatctgcctggacgcggtggcgtgcggcgacggggtggcggcgaggtccaccgcgcggctgcagtgcggccacgagttccacctagactgcattggatctgcatttaatgcaaaaggggtgatgcagtgcccaaattgtcggaatattgagaaaggtcactggctctatgggaatgagagccaaccatgtagccattctgatacaggtgactggctgaatggtgaaacctttgactacccgttctcatttgaatttgggtgggggtcccttcaatacaccattgacctctgtttttggggaaagcgaatctgagcca

SEQ ID NO: 27898 - DNA, 151 bp, Oryza sativa
  Clone ID: uC-osflm202111c07b1
gagtggctgcagctaatactagcgcgaaacttctttgacccgaagaaacatccccaactggcagctaggtatcatggtgaaggaggaggagatcatcacagaggcagcaggagcaagaggctacatggagatgcttggccttggagaggag

SEQ ID NO: 27899 - DNA, 605 bp, Oryza sativa
  Clone ID: uC-osflm202111c08b1
tttcttgctagctgcggcgttggcctccagagcggcggcggttgccgtccttctcctcgtcgtggcggtggtgtcgctttttgctctttttagttttcattttcttgtctttctttttttttttttttttttttttctttgtttctttttttttttttctttttttttttttggtctttttcttttttttttgttctctcgcttttttttttttctttttttttctttttttctttcttttctttctttttttttttttctttttctctttctttttttttctctttttttttcttttcttttttttttatttttttttctctttcttcttttttttttttttttcgtctttcttttttctctttcctgtttttttttttcttttctcttttttgtcttttttttttttcttttctcttgtttgtttttctttttctttctttcgtttttctcttctttgtttatttcttttctttttttttctttttttttttttcctttttttttttctttttttttgtttttttttttcttattcatttttttattcttttattcttttattttttttttttttctctattttttttttttattttattttt

SEQ ID NO: 27900 - DNA, 53 bp, Oryza sativa
  Clone ID: uC-osflm202111c10b1
ataatcaacacgaccatgcactctcctggggacattataaaatgctgcgcttt

SEQ ID NO: 27901 - DNA, 93 bp, Oryza sativa
  Clone ID: uC-osflm202111c11b1
tgctctctctttgtacacacaaaccaagatggggaatggagggcgatgcatggtggaggtgagctacccacggcggtggcggctgcgatggga

SEQ ID NO: 27902 - DNA, 293 bp, Oryza sativa
  Clone ID: uC-osflm202111c12b1
tgttattctgctccatcagtgagcgcgagagctcggcctcctcttcctcctcctcgcatgcccacctcagaatcatctctggttgtggtgaaaccgatggtgatgatgatggtacgagcactgtagcttcgatccaggtctagaatcgcatgttcttcccccacgctttcttggattgcggccaagaatcgatgcgagcggcgccaagatttcgttcttggagcgggtcactctagtgcggcgacgaccaggggcaatgggcggcgcggcggcggcggtggtggtgttggtgg

SEQ ID NO: 27903 - DNA, 563 bp, Oryza sativa
  unsure (1)..(563): unsure at all n locations
  Clone ID: uC-osflm202111d03b1
ctcaccatcccatccacgcttctcgactcccagacgacgcttgctgctgcctttcgtgaaccccccacttctccttccccgccgccgctcgccgccatggatgaggagtacgacgtgatcgtgctggggacgggcctcaaggagtgcatcctcagcggcctcctctccgtcgacggcctcaaggtcttgcacatggataggaatgactactatggaggagattccacctcgctcaaccttaaccagctgtggaagaggtttagaggggaagacaaacccccggctcatctgggctcaagcaaagattacaatgtagatatggtcccaaagtttatgatggcaaatgggacactggttaggaccctcattcacactgatgtgacaaagtatttgtcattcaaagctgtcgatggaagctatgtcttcagcaaagggaagattcacaaggtacctgctactgacatggaggctctgaagtcccctttgatgggtctttttgagaagcgcagagcanggaacttctttattacgtccaagatacaatgaagctgatccaaaacaca

SEQ ID NO: 27904 - DNA, 488 bp, Oryza sativa
  Clone ID: uC-osflm202111d04b1
gtcttctccccgccgcgctcgtgccctcgcctcgggtggcctcgccgaaaccctaaccctagaatcgtcgatcgcccgcgagagaggagggggagggggacgagggggaaccgcgcgtgatggggaagaagaagaagcgcgtggagaaggtgttctgctactactgcgaccgcgagttcgacgacgagaagatcctcgtgcagcaccagaaggccaagcacttcaagtgccacgtctgccacaagaagctctccaccgccggcggcatggccatccacgtcctccaggtccacaaggagtccgtcaccaaggttcccaatgcaaagcctgagagggaatcaacagagattgagatctttgggatgcaagggattcctccagatgtgttggccgcccactatggagaagaggaagacccttcatcgaaggtagccaaagtggaagtgccatcgctaaggcctcctgttatgcccaatccagcgggcatg

SEQ ID NO: 27905 - DNA, 431 bp, Oryza sativa
  Clone ID: uC-osflm202111d10b1
tttgtcgcgtgggtcgtcttcttgctggtgtgggcgaggtggaggaggaggaggagaagctagccgcggcggcggcaatggcgacaagcgggctgaggagctgcagcgcggtgcgcgatcccagcctgctggacgccgacgtggacaggagccgcctgccagtctgcgcctacgccaccacctacgggcgcgctaccaggtcctccgagtggatgccgcatcagccacgccccgtccacctagacgggtcctctcaccgtgactctgggggcgacccgctgggcctctccaccggggcccagaacatcgagcggatcacggagcctgacgggtaccactgacggagcgccacgctcactgtgcctggggtctcgacaacggaggcgctcgggccgatcatcttggagcaggccctacctgggcgggctccc

SEQ ID NO: 27906 - DNA, 456 bp, Oryza sativa
  Clone ID: uC-osflm202111d11b1
gcgttcgccatacttgaccttgcagagctctgtcggtgtctctcgctctgattgaagtgttctgctgccatctctctcccgcttctgtctccgtgtgcgcatatatatatgctgtattggggacgttgcggcagcggttcttgggtacatggcctactcctcacggtcttgtgatcagtgcagtcacggataaatttgagggccaccaagatttgactgaccctgactgcgcctgcgtgccccgtcaatcggaggtagaattgaaaaaggaaaagaagataacgctgtgattagcacggtgtagagaggggccatgttagcaacgcaagcaatttcgtgtggcgttttgtccctgtgcttcttgatcttgttcaatgcagagaggagatccggcttcatgaagtggctctgcgctatcctgaaggggacgaacgacggttaggccaaccgacggcg

SEQ ID NO: 27907 - DNA, 427 bp, Oryza sativa
  Clone ID: uC-osflm202111d12b1
tttttgatggaggggaaggaggaggatgtacggcggggatccaacaagatctcggagaggcagccgatcggaacggcggcgcagggctccgacgacaaggactacaaggagccgccgtcggcgccggtgttcgagccaggggagctcaaatggtggtccttgtaccgggcagggatcgccgagatcatggccaccttcctgttcctttacatcaccggacttaccgtaatgggggtcaacaactccacctgcaagtgcgccaccggctgcatccagggcatctgctggtccttcagcagcatgatcttcggcctcggctactgcaccgacggaatctacggcggccacatcaaccctgcacgaacctttagcctattgactctgaggaagctgatcataaccagggtcctcttctacatggtgatgc

SEQ ID NO: 27908 - DNA, 282 bp, Oryza sativa
  Clone ID: uC-osflm202111e01b1
cccttattatccccataacacggcaagaacaaaggggggggtttcataaaaatatcgggggggaacaccacccacccctaacattcgaaccttaggaatagaattttggagacaacacaaaaaaacaagaaccgaaaaaaaagccccacgaagacaagaagacacccaccgcgaagacagggccaccgaagaacaacacaacaccccaaggaccctctccacgccagcgggtacacaccgctgaaaaacccgcggcacaacaagggcttggcccacccagaa

SEQ ID NO: 27909 - DNA, 461 bp, Oryza sativa
  Clone ID: uC-osflm202111e02b1
ctttattttgccgcccttttttttttttttttttgtggggtttttttttttaaatcacaggacagagcaatctcaggtgtattaaaagggaagaaattaaagggtgatcacacgatacaactgcaggggttgggggtggtggtccagcactttatcctcggccaaacggaaccacttgtgtacagtaacttgttagctgaaaagacgcaatcacggacccgccattgctggcccagtgggaacatcacgtcaagcatggcattgtgcacactgacctccacacaagaatgatgctccattccacagtaacatagtacatttttacaacatcactgatcactctggtacaacggggttactgtactttaggataccatttaccgtctcaacgaacaaaacgtagggtcgcatttgcatcttgataacggttacaaaagagcgtctagctgagactggaggtc

SEQ ID NO: 27910 - DNA, 542 bp, Oryza sativa
  Clone ID: uC-osflm202111e05b1
gattgcttaagaaatctggcatggcgccaccggcaccggccgctctcctcctcccctccaaccattcctatcgcccgctcctgcctcgcccaatcctgcaccacgccaccggcttcgcctgcgcctcggcctcgccctcgccgccccctcgccttcgccttcgccttcggcatgccgccccgctccgtgccgccgccctgccggccatcgccatcgcccccggcgaccactggggcaactgggccttcctcctctccgccgccgccttcggcacctggtcggaggagtccacgtcgtggggcgccgcgctcagcggctcgctcgtcagcatcatggccggcctggccgccacggccacgggtctcgtcacggccggcgcgccggcgcaagacgccgtcatggactacctgctgccggccaccgtcccgctcctgcttctcggcgccgacctccgccgcgtcgtcagcaccaccggcgacctcctcaaggccttcctcatcggatcagttgcaactacaattggcacaacgattagccttctg

SEQ ID NO: 27911 - DNA, 470 bp, Oryza sativa
  Clone ID: uC-osflm202111e08b1
ctcttctcgccgctcgcagcgaaaaagccagcgcctcccagcgcccacgcgatcccgacgaatcgaatcgagtccgagacgccgatctcggattcgagaccgttgatttcaaccaacacaagccctcctccggatcgatccgctcctcttcagccatggcaggaatggcacccgaaggctcccagtttgatgctaagcactatgacagcaagatgcaggaactactgcaccaaggtgacaatgaggaattcttcacttcatatgatgaagtttttgagagttttgatgacatgggcctccaagagaaccttctcagaggcatctatgcttatggttttgagaagccatcagctattcagcaaagggggattgttcccttctgcaaagggcttgatgtgattcagcaggctcaatctggaacaggaaaaactgctaccttctgttctgggatcctgcagcaacttgactat

SEQ ID NO: 27912 - DNA, 535 bp, Oryza sativa
  Clone ID: uC-osflm202111e10b1
atcgaacctttcccctcgtccgactggtctacccagagaaaccctaatactcgcagatccccttcgccttcatacacctccatccacagctgatggctaccatggggtctgcaccttcctatgtcgtgctggaccgcgtggttcatctggacatggaagccgtcaaggaagaatcggtgtgggcgatcatggagtgtagagatcggaagacctacctgcgcaacgaccacgtcggcgacgaggtggtgtatggcttgtcactcctagtgcagatcgccgagccgccggatctctccaagctgtccatccgcctcagcgaaccccccgtgcaagtcgccgcccgaccagaggagatcctcgacgatggctcctccgtcttgcagctcttggacttgcctaaacgggccctcaacctgcacacctccgtccagtccgtcgccgacgacctcatcgtcttcaccttctggcctcgcaatcgcacccaccgctacctagtctacgacgccatcggcaggtcaactctcatgatcccttg

SEQ ID NO: 27913 - DNA, 579 bp, Oryza sativa
  Clone ID: uC-osflm202111f03b1
gaactggtgtgggtggcgagctcctgaccatctctgtgggccctctccgtttcgccggtgcctcgccggatccatctccaaaagaggacgtcggagaagatgatgggcggattcctctcccgggtcctcctgttggcctttggctacgcctatccagcatatgagtgctacaagactgtcgaactgaataaaccagagattgagcagctcatattttggtgtcagtattggattctagtagctctgatgacggttatggagagatttggagattttacaatatcatggctaccattttactcggaagcaaagctgatgttctttatatacttgtggtaccctaagacaaagggaactacctacatttatgggactttctttaggccatatatttcacagcatgagaatgaaattgaccgtaatttgcttgagttgagagctcgagccaccgatgtagttgtcctttattttcaaaaggctgctactggaggacagaatacattcttttgacgtttgaagatgttgcttctcaacaccatctcagagggcaagtcaacaaccttctaggagccgaacaac

SEQ ID NO: 27914 - DNA, 530 bp, Oryza sativa
  unsure (1)..(530): unsure at all n locations
  Clone ID: uC-osflm202111f04b1
ttctgtgtgtgtgtcttggttgcaaaaaccaagaggtacacacagaatcaaataataacaaaggtttcctagcctcaaaggatacatatatatagtttccctacaatacaatggagcctgtcaatgatttccaggaaggcatttcaacagagcatgcctttgaggcagagcctgtgccatcattgtcggaaacaataacgccacgatcaatggtggtgagcttcatccttagtgtaactctcagcatcgtcgccatgaaggtcaccttgagctctggcttcattccgtcgttcagcatcccagccggcctcctcggtttttgtgtatcccgtgcgtcgatccgcattcttgactacttcgcagtggcacaactaccattcacacgccaagagaacaccatcatccagacctgtgtcgtcgcatgcacctcgatcacattcaccggtggctttgggacatatattctngcaatgggaaagaaagcagctgtaggggatgtcaatgcccaaaataacgtgaggagccaagct

SEQ ID NO: 27915 - DNA, 397 bp, Oryza sativa
  Clone ID: uC-osflm202111f07b1
ttgttcgccagactctccccaggtgaggattcagccatgaagggggccaaatccaagggcgccgccaagcccgacgccaagttggctgtgaagagtaagggcgcggagaagcccgccgccaagggcaggaaggggaaggccggcaaggaccccaacaagcccaagagggctccctccgctttcttcgtttttatggaggagttccgtaaggagttcaaggagaagaaccccaagaataaatctgtcgctgctgtaggaaaagcagccggtgataggtggaaatccctgaccgaagcggacaaggctccctatgtagccaaggccaacaagctcaaggccgagtacaacatggccattgctgcctacaacaagggcgagagcactgccaagaaggcac

SEQ ID NO: 27916 - DNA, 137 bp, Oryza sativa
  Clone ID: uC-osflm202111g02b1
atgcggcctatattttgctagggagcacctggctacctgctgtgaaggactgtatgaccgtggtagggatgatgctaatgctacgccaggtatacgtgcattgcttggctgcggggaacgcacatggccaaagttac

SEQ ID NO: 27917 - DNA, 447 bp, Oryza sativa
  Clone ID: uC-osflm202111g07b1
gttgttagctctcacggggcctccttaccctcggcgtcgctcctatccgggggagcctgggcacggccgacgaccttctccccatccgccggcgctacacgcgcgcgcgcgcggtggaggtccaaagcaagggccaccaaggcaacttgcacacactgaagctgatggggtacggaaacccgacggtgcctagccccaacctggtcaagcttaaggaggccaggacgccgttcgatttcaagacaggagtcaagaagcgcatgaagacggcctacactgggatggcgcaatccacgaggacgcatgcaagagcccagggaccactggtgcgcgccacaccgacacacatgcaagaccaaggctgcaaagaaggataggatccggacaagaaactagagcaatgtgcagatacggtggctgaaaaactgcataaataggacccacaga

SEQ ID NO: 27918 - DNA, 447 bp, Oryza sativa
  Clone ID: uC-osflm202111g08b1
acctcaccgagcgagcagctagctagctgcggcgatggcctccagagcggcggcggtcgccgtcctcctcctcgccgtggcggcggcgccgctcttcgccgcggcgagcgcgcatggccgaggctaccttggtgccaagtcctggcctcctgacggcagcctgagctcatcaagctccggcgaggctgcagcggcggacgtcgacgacggccacacggactggaagtgctactcctcctgcatgagcaagtgctgtcaccgccacgacgacgacgacgacgacaaggccaatgccaaggccaacgccaccgccggcgccgccgccgtcgggctcgacgatgactacaagtgcaagaagcagtgcctcggcaactgcttaaggacgtgccggccgtttgctaccacaagtgcgtcgacgactggtgcgcgaagctgccaccatctgca

SEQ ID NO: 27919 - DNA, 520 bp, Oryza sativa
  Clone ID: uC-osflm202111g11b1
tttgttttaagagggacgtggtatcatatgggagtatgatttcgtgcttctcgaaagccggaagtttggacactgtcatgaagctctttaaccgcatgaaggaggctggtgttgtaccagacaggaaaatctacaatgcagttgtctacgctctcgccaagggacggtgtgtgaatgaggcaaaggctcttgtccggagcatggaggagaagggggttgccccagacacggccactttcaactccctcattagacctctttgcaaggctcgtcaggttcaggaggcaaggaaaatgcttgatgacatgttagggagagggctgtcaccttcagtgagaacatttcatgcgttactcgatgtggctagaagccccattgaggtgtttgatctgttggataagatgaaagaattgcagtgtgacccagagatggacactttcattatgttgatcaggaaattctgccggtggaggcaacatgacagtgtggagaagctctggagtgcaatgcctgcaaatgg

SEQ ID NO: 27920 - DNA, 482 bp, Oryza sativa
  Clone ID: uC-osflm202111g12b1
ttatccttcacgacaatagaatcggctgagggggcgaccgccgccacctcagtggaaaccgccgagagcaccaccgccgcccgcgacgtttcccctcctcccgccgccggccccgccgcccgcgacgtttcccctcccgccgccgcctccgtcgcacgcgacgtttcccctcctcctgccgcgacgtttcccctccctccgccgcacacgacgtttcccctcccgccgctgtctccgcccctcctcctgccgtcgaccccgctgctgcgcgcgacgctccccctcccgccgtcgacatggcggcggagatggaagtcgactacgtccacgtgcatgaggtccccgaatgcatagcatcgatgatcgaccgcggcagcgtggagagccacacgctgttcctggcgcgccggacggcgatggagatgctccgtgaccgtgggcacagcgtgccggaggccgatatcggccgcaccctacctgag

SEQ ID NO: 27921 - DNA, 351 bp, Oryza sativa
  Clone ID: uC-osflm202111h01b1
attttgattatcatgctcttggtggccgtaacaggggtgaaaggctagtggtacatgaatcatcaaatattgtcataacaagagagaccttgcagtgcttgaacgaaacggagtggctaaatgatgaggtcataaatttgtatcttgagctgctgaaagagagggaactgagagaacctaacaagtttttgaaatgccacttcttcaatacctttttgtacaaaaagctcattactggtggggatgattaataagtatgccaaaagatggacaactcaaaggaagttaggttacagcctacttgaatgtgataagatctttgttcctatacacaaggaagtgcattggtgt

SEQ ID NO: 27922 - DNA, 352 bp, Oryza sativa
  Clone ID: uC-osflm202111h05b1
gccccggacttactggccgacccacgcatccggcttatggttcatctacttctccccttcctccggaggcgattcccaaatcccatgggggagcacccatatccgtgccaatccatggattggatgcctcctccgaagcccacctggccgtgctcccctcctctgctctgggactgggccgacgccgccgtgccgggctcctcctccagcgaggtatccgccgcctccgccgccgccgctgctcatccgggaaggcggccgaaggagaagctaggcatggcggaggaaggacgaggtggtggtgtgaggcctactgctttatgagccaggtacaatttggtaggtagcttca

SEQ ID NO: 27923 - DNA, 431 bp, Oryza sativa
  Clone ID: uC-osflm202111h08b1
tttttctacgaaattcgttcccacgataatgggcaggctgaagagattagctggtgaggggcacacacctgcagccccagagaggcaaagagagatggaactccaaccaaaatccacaaggaatggttcacacagcaacgtgacatcggcagggtcatccagcataacctcttcggagagtggacccgaatattcaagcccgattgcacactgatcagttcatctatagcttttagctgaaaaccccagcagttgtagtttcaacgggtgagcctttggagaccgaagcgccttgcagtttttgtaagcttgcccttccccatctgatgtacggagatttaatggccccagccagaggttatttatgggattttgggcccagggagtttgtttgtagaaacgctgtaaaatatggtatatttcattttttt

SEQ ID NO: 27924 - DNA, 402 bp, Oryza sativa
  Clone ID: uC-osflm202111h12b1
ttgatcatatacccggtgtgctcaagtacaggggggagttaatcacacatgggtggtgatggattatatcatcatgtataacagctggatgaagaagacttaagtattggactctggctctgctgctgcctgtgccaaatgccaggaatttacctaagtgtgctgaggctacctcggatgggaatatgcatgctagctctaagaattaatctttcatgtaggtcaactactaaactaagtaatgcttgtataggaaaagaatcaccatcttttaatcaattattatacactgcgtgcttgtgcttgcggtaaaaagtaaatagtagaggtgcacaatgggatgccctgttagactgaacaacaagtttaggacgcggtccccatgctttgtgacctgcctga

SEQ ID NO: 27925 - DNA, 166 bp, Oryza sativa
  Clone ID: uC-osflm202112a05b1
caacttgatagggcctcgccgccattgccgcctcgctcctcgtctcgcgtgaacgccgctcggcgcttacatcatgtctttaacaatcggtgactcttcttcgtatgacataatggttgctgcaatcggcattgtattacacaagtagctattttttctatcttct

SEQ ID NO: 27926 - DNA, 486 bp, Oryza sativa
  Clone ID: uC-osflm202112a07b1
ttaattttgatgttactgcttcgcagaagttcattgatgctagcatcacccctaaagttgttacttttgacaagaaccctgacaaccatccttaccttctgaaatttttccaaagctcagctgccaaggctatgctatttttgaacttctccactggaccgtttgagtctttcaagtcagtttattatggtgctgctgaggagttcaaggacacggaaattaagttcctcattggtgacattgaggccagtcaaggtgccttccagtactttgggctgagggaggatcaagtaccactcatcatcatgcaggatggtgagtccaagaaatttttgaaggcacacgttgagcctgaccaaattgtttcttggttgaaggaatactttgatggtaaattgtctccattcaagaagtctgaacctattcctgaggtcaacgacgagcctgtttaagttggggaccctgataacgtccatgattttgtct

SEQ ID NO: 27927 - DNA, 229 bp, Oryza sativa
  Clone ID: uC-osflm202112a09b1
tttgtatatctatccccagtgccccatttcagatttggcgagaccagccatggcgatggcgatgacgaacacagcattggctttcttcctcctcgtcgccgccgcatccctcctctcgctgccgccgccgtcgctcgccgtcacgtcgccgtacgtgcgccccaagccgagggccacgctgtctctgctcaaggacgacgaccactgccggaagcccgcgcaggcgcac

SEQ ID NO: 27928 - DNA, 277 bp, Oryza sativa
  Clone ID: uC-osflm202112a10b1
tggctgaggaaagaggagaagaaaagatggcggctttcgcctccgctctccgcgttctcccctcgccgccggctgcggtgcctcgtcggcttcgctcgagagaacaaaggcagggctgtagatctccaaggtattcaaaagtcgtggcttactacgctctcactactccgccgtataaacttgatgccctggaaccttatattagcaagaggacagttgaacttcactggggtaagcatcaacaagaactttcggatcgcttgaataatcagcttgc

SEQ ID NO: 27929 - DNA, 243 bp, Oryza sativa
  Clone ID: uC-osflm202112a11b1
ttccatccgcgagagccgaacagatgacgcggggcggctgtcgcagtattccgcggtacgcccttgccggaagtgtgcacggcctgttgcggttctctcgcacagaacaaatgcacggcatgaaagctgacacggtttataaagagcgtggattactactctttcactactccagcggattaacttgatgccctggagccctttattagcttgagggccggcgagcttcacgggggcaacggt

SEQ ID NO: 27930 - DNA, 452 bp, Oryza sativa
  Clone ID: uC-osflm202112b02b1
ctcacagggccgagccaagccacccgtcctgttttttgaggagaaaggcaaactcaaacccgagctggttactttaaacagaatggcggatagcgaacgcagggacgcgggccaatctggctggtgtgccatgcttaagggcagagggcaccttctacgcagacaggatgggtgaaagcatggttgagaccaccgttacagcggacgtgatcagagaacgcctcgttgtcggcaactagagcgcaacggacacaggattgcaatgattcaattccactcgacatgacaggatgaaaactgttaaaatttgggcgggagagcttcctctttttgctataaaacagtgtgaaaaaaagaatgtttggcatttttttgataaaagttggattaggtcctattaggtcgttgatttacacgcaacaatgatgaagcttggtcaaggcggaaccccc

SEQ ID NO: 27931 - DNA, 424 bp, Oryza sativa
  Clone ID: uC-osflm202112b04b1
ggaatattgatacggtggaacgcgtacttacccacaagttaggtgcatgccatggcaccattcatggcgtgcgcctcgccaccggtactcacgctggccctgctcgcgtagtgcggtgcccttctagccacctccatgctcccggcgcgtgcgacggcgggcagttgcttggacgtcggcgacatggtgatgatggacaggttccgcgcttggcagggagctcacaaccggtcgtacccgagcgcagaagaggcgctgcagcggttcgatgtgtaccgccgcaacgcggagttcatcgacgccgtcaacctggcgcggcgacctcacttaccagctcgccgagaacgagttcgcaaacctcaccgaggaggagttcctggccacgtacaccgggtactacgccggcgatggccccgtggacgac

SEQ ID NO: 27932 - DNA, 338 bp, Oryza sativa
  Clone ID: uC-osflm202112c01b1
gtacttggtatcgactactacctctcgactcgatcgccatggctgtcaacaacaaggcggccaggcctgcgcccgacgctgttcacggctcctctccgccggcttgtgcctccgatacatgagctccccacggggcggcgcccccccggtgtgcgagggggtctggaaaccggcggaatttgtgcgctcgccgccggagtccggcacgggtggaggaggaccgcgaaccccttttttcttaacgaaattgtttcctcttctctcaagctgagcctaactttactggcattttagcttcccaagcgccgcgaattggacagactttttgcgggaggcgc

SEQ ID NO: 27933 - DNA, 667 bp, Oryza sativa
  Clone ID: uC-osflm202112c02b1
gcgtccgatctttcttttcagccgcatcctcctcctccttctccgacgagttgaggaggagagggatttcttttggtagtttgttttttctttttttttttttttttttttttttttttttttttttttatttttttttttttattatttttttttttcttttttttttttttttttttttttctttttttttttcttttttctttttttttttttttttttttttttttttttattttttttcttttttttttttttttttttttttttttccttttttctttattttttttttttttttttttttctttctttttttatttatctttttttttttttttctcttctcttcttttctttttcttcttttttttattctttattttgtttttttatctttcttttttttttttctttttatttctttctctttttcttttttttcatattttttttcttatattttttctttctcctttttttttttttttttttttttatttttttttttcttttcttcttttttttcttctatcttttatttttttttctttacctttttctttactcattttttctttttttttttttattcctttttttttttttttcttctcttttcttttttttttttcttctttttttctttacttttttttttttttct

SEQ ID NO: 27934 - DNA, 141 bp, Oryza sativa
  Clone ID: uC-osflm202112c03b1
agcctccgtcgccgcagcctcctcctctcgtcttctccttcgagttgttagctccctccttattcaaccatgggtaaggagaagacgcacatcaacattgtggtcattggccacgtcgactcccgcaagtcttccaccacg

SEQ ID NO: 27935 - DNA, 178 bp, Oryza sativa
  Clone ID: uC-osflm202112c05b1
gtttcagacaatggcatgtccatgtccactgctgaagaggtatccttcgatgatgagcgtcgcactgaaatcttcctgaaagatcaaattcctaagtcagttgcatatggaggctacgtcgtagctgctgctctatcgatcgtccccctttttgagatctttcttcaactacagttgg

SEQ ID NO: 27936 - DNA, 93 bp, Oryza sativa
  Clone ID: uC-osflm202112c06b1
gatttctttgtaaggagacggtctatgtggacaacagcgggcctcgtaggggatccgggacgagtgccgggtaaccaggatgggacgatggac

SEQ ID NO: 27937 - DNA, 177 bp, Oryza sativa
  Clone ID: uC-osflm202112c08b1
tgttttaatccagtagacttgttacgcctgttggtgttcgagtggtaggagcccttgggcttttccaggttcagatcgacgcctccttcctctggacattgttgctagttggtgatggctgagcaggctaatcaaccgactgtccttcagaagttcggtggccagttccaccttggc

SEQ ID NO: 27938 - DNA, 314 bp, Oryza sativa
  Clone ID: uC-osflm202112c12b1
tttattcaccggatagaacagcgcccccaccaggaggaggagcacgagcaacgccgttgcatggtcttgctggtggcagcagcgcattagcgctgggctggtttgcgtcgggcggggcccttctagccaccttacatgatcccggcgcgagcgacggagggcagttgcttggacgtcggcgacatggtgatgatggacaggttccgcgcttgggagggagcttacaaccggtcgtacccgagcgcaaaaaaagcgctgtagcggttcaatgtggtccgccccaacgcagagtttattcaagccgataaaattgt

SEQ ID NO: 27939 - DNA, 421 bp, Oryza sativa
  Clone ID: uC-osflm202112d01b1
cgaatccctttttcttctcttcccgtacgtgagaagcgccaggtcgtcttcaccggcatgggcgtggaggtgcgcgtcaaggccgtcgtcggccacccggacacgctgcagggactgaccatccttgtagagggtgctgctgactctggacgataagaaggtgccctacgagatgaagctgatcgacgtccagaacaagcccgactgggtcctgaagatcaacccataggggaaggtgcctgtgtttaacaggggtgatggcaaaaggattcctgattctgatgtgatcactcaagtcattgaggagaagtacccaaccccgtcttttgtgacccctactgagtatgcataactgggatcaaaaattttatgatgctttataacgttcatgaagagcaaggattccaatgatggtttaaag

SEQ ID NO: 27940 - DNA, 498 bp, Oryza sativa
  Clone ID: uC-osflm202112e03b1
ggcgtttggttggagcgggattcggagggggagcgcggccacggaggggcacacgggggcgcaacagggtcgggcgctcggcgccatggatgctaagaagggctcgggggagccggagttcttcagcgagtacggcgatgcgagccggtacgaggtcaccgaggtggtcggcaagggcagctacggcgtggtggccgccgccgtcgacactcacaccggcgggcgcgtcgccatcaagaagatcaacgacgtcttcgagcacatctccgacgccacccgcatcctccgcgagatcaagctactccgcctgctgcgccacccggacatcgtcgagatcaagcacatcatgctcccaccctcccgccgcgagtttcgcgacatttacattatcttcgaactcatggagtccgatctccaccaggtcatcaaggccaacgacgacctcacccccgagcaccaccagttcttcctctaccagctgcttcgtgggatgaagac

SEQ ID NO: 27941 - DNA, 430 bp, Oryza sativa
  Clone ID: uC-osflm202112e04b1
caacgcagttaaaggcgtcttcgtactcgcctctctccgcgcctccgcgcttttcctcctgctctcccctctctcccttctccgccgccgtcgcagcatcaacccaatccgccgccatgagggagtgcatctcgatccacatcggccaggccggtatccaggtcgggaacgcgtgctgggagctctactgcctcgagcatggcatccaggctgatggtcagatgcccagtgacaggactgtcggtggaggagatgatgctttcaacaccttcttcactgagactggtgctgggaagcatgttccccgtgctgcattagatgatcttgagcctactgtgattgatgaggagaggactggttgctaccggcagctcttccaccctgagcagatcatcaatggcaaggaggatgcagctaacacctttgcccg

SEQ ID NO: 27942 - DNA, 565 bp, Oryza sativa
  Clone ID: uC-osflm202112e06b1
cactttcccacctcgtcgtcttccgcgccgccctctccctgctccaccgcctccgcctccgccttctctcgtgccgccgatctccatcgccggcgtgcggtgcaccgagatccacccgagatgtggcgcggctgcgtctcgcgtggcctcaggagcctctccaagggcaagggctcctcctcctccgcccccgtctccgccgccgctaggctcttctccaccgcctcgtcgtcgtacacggtggtggatcactcgtatgacgcggtcgtggtgggagccggcggcgcggggctccgtgcggcgatcgggctctccgagcacgggttcaacacggcttgcatcaccaagctcttccccacgcggtcgcacaccgtcgcggcgcagggtggcataaatgctgctcttggaaacatgacggaagatgactggagatggcatatgtatgacactgtcaagggtagtgattggcttggtgaccaggattcttcagtatatgtgcagagaagcaccaaaagcagttatagaacttgaaaactatgggtggccattttcaagaacctgagat

SEQ ID NO: 27943 - DNA, 520 bp, Oryza sativa
  Clone ID: uC-osflm202112e07b1
tttcttttccaccaccaccattcctccccccttctcccctcctccccgcgacgcgaaggcgaccaccacgcccatgccctccgttcctcgcggcggcgcgaccgcgaccaccaccaccagcagcagcagctagccccatggccaagtcgacgcccgctgcggcggcggcggcgcccgaggaggcgacggcggcggcgctgcgcctccgcctgcgccgcctcgtggccgccgtgacagccggcggcgtcggaggggaggaggccttcgacgaggcggcgtcggcgctcgcggcgctgagagacgcggagctggggccaccgccgaaggaccgccccggggccggggcggaaaggaggaggagtgggcacgcggaggcggcggccgtgccggagcagttcctctgccctatctcgtcggagatcatgcgggaccccgtcgtgctcgcgtccggccagacatatgatcgccgctttattcaagaatggttaagtgctggaaacaggacatgcccacagactca

SEQ ID NO: 27944 - DNA, 500 bp, Oryza sativa
  Clone ID: uC-osflm202112e09b1
tcaatttaaaggcctgtgtcaaggagagggtagtagcaccttgctctcctttgccttcagagaaaccggaagcaatggcgtctgctactctcctcaagtcatctttccttcccaagaagtctgaatggggtgccacccgccaggctgccgcccccaagccggtgactgtctccatggttgtccgcgctggtgcctacgacgatgagcttgtcaagaccgcgaaaaccattgcatcaccaggaaggggtatccttgccatggatgagtcgaacgcgacctgcggtaagaggcttgcgtcaattggccttgagaacaccgaggccaaccgccaggcttaccggaccctccttgtcaccgcaccgggcttgggacagtacatctccggtgctatcctcttcgaggagactctgtaccagtcaactgtagatggcaagaagattgtcgacatccctactgagcagaatatcgttccaggtattaaggtcgacaagggtcttgtg

SEQ ID NO: 27945 - DNA, 533 bp, Oryza sativa
  Clone ID: uC-osflm202112e10b1
tttctttgctcgggtactgcctgcaccacggtcggctcgccgacgccggcgacatgtgcgaggcctgcctgtcttcttccaaggaggagagcataaaagatgcaggggaggagagcgccacggtgtgctcttgctgctacgccgttgtgaaaacctcctcgcgcgagctgccggataaaggacaaggccaatcggaggagaagacaaccgaagaagacagaaaccaagggtatgttccattggctcaagaggagcacggcgaagaagaagaccaaggatatgttattttggctcaagaggagcacgacgaggaagacgaagaagagcatggagaatttcaggaggaagagcggcaagaagaggtggacgataaagacgagcaagaggagaagatggccgccgtccaggacgagtccttggaagtcatggctgtcggagaagagatcgagctcgacggccagcgcttggtgtcggtggcagccatcgatgagatgacaatcgccgacgagtcacgcttgcatcaggcgtgctgt

SEQ ID NO: 27946 - DNA, 423 bp, Oryza sativa
  Clone ID: uC-osflm202112f02b1
ggcggcggtttaggccgacctgctcccccgccgcctctcctgctcctcctcctcgcgcgcgcgccgccggcgaacggccgccgtatacttacccgcggtgcggacgggctcctcttatctcctcccccgaccgcatactaccccctctctctcccttgtgagccctcctcggcgcgcacggcccccgccgccggcgagcaggctcggaaccagggggggtgggggactcgacgcgacgagccctcgttccatcggcctctgtctccgttgagtcgaattgaagtataatggcataccatggacagctggatggacgccaagcttcacgtttgatgcgtgatggcgccttccctgcagccagcctttctggccgccaacctttggatcgcgctgccaccgctctggagatcttggaaaagaaac

SEQ ID NO: 27947 - DNA, 493 bp, Oryza sativa
  Clone ID: uC-osflm202112f03b1
ggcttgcctttaaggagtggcgcatccggcgctacatcccgagcaccatcggcatggccatcaccttcttcatgccgccgcgcgtgcccgtcggcatgtgcatcggcagcctggtggcgtacctgtgggagaagatggacgccggccgcgggcggatgctctcgccggcgctggcgtcggggctcatctgcggcgacagcgccagctcgatcttgctgtccatgctgacactcatgggtgccagggcgcccatctgcatcaagttcttgtctcgaggtgacaatgtcaagttggacgccttcttggcaacactccatgacatgagatagctactagctagctatccatgtagggaaactagatcattttctcaagtgtcaaaacttttgtacatatgtatccacgtcataggggcttgagttaggagtcgtggcaaactgtataatcaagtttcagttcagtctataaacacagtttgatctcctctatcaac

SEQ ID NO: 27948 - DNA, 478 bp, Oryza sativa
  Clone ID: uC-osflm202112f05b1
ggactaggttatgaagatcacacccgtgcagaagcagacgcgcgccgggcagcgcacccggttcaaggcgttcgtcgtcgtcggcgacaacaacggccacgtcgggctgggggtcaagtgcgccaaggaggtggccaccgccatccgcggcgccatcatcctggccaagctgtccgtggtgcccgtcaggaggggttactggggtaacaagatcgggcagccgcacaccgtgccgtgcaaggtcaccggaaagtgtggctctgtcaccgtgcgcatggtgcccgccccgaggggttcgggtattgtcgccgcccgcgtgcccaagaaggtgctgcagttcgccggcattgaggatgtcttcacctcgtcccgtggatccaccaagacccttggcaacttcgtcaaggccacctttgactgcctgatgaagacttatggattccttactcctgacttctggagggacaccaagttcgtc

SEQ ID NO: 27949 - DNA, 424 bp, Oryza sativa
  unsure (1)..(424): unsure at all n locations
  Clone ID: uC-osflm202112f09b1
ttcttttactccggtaggctaccacccgaagccaagagaggaaccacgaaatttccacgaacaaacaccccaaattccaggcagtaatttttccggaatcaaaaatcgaatggaaaaacaaaaattaaaacaagagaaaaacaaggcgtaggcaaagtggcaaaccacgaatcgaagaagagcttctccttccctttcctcctccattccaaccttccaacccaacaaccttaaccctcctccctcagtatccccccaagaacgcgaggagccgagtccgtactaggcccaggtcatcttttgttgtagaggcgatgcanaccgcggctgctgctgccgtggcgtgggcgccgagcccatcgccgtccaccttcacctcattcgtcgcccccttcaaagtggggatcgcgtcgccgtgtgggac

SEQ ID NO: 27950 - DNA, 397 bp, Oryza sativa
  Clone ID: uC-osflm202112g05b1
gacttatgtttgcggaactcctcacgcaaagcgacccgaggcggcaagagcaacctaagctcgggcgagcatggcgaaggacgaggagaacgatagcggcggagaccatcaccatttaggtggacaaagtctacacggatccacaacctgaaggccaagatccagcacaaggaggtggattcccccggaccaggaccgtctcatcatcgccgagatgatcgctcacagcgacggtcgctccccagcagactacaacatccagatggaatacaccctccaccttgagcttaggctcacgggaggcatccagatcttcgacaagaccctcactgtcaagatcatgacacctgaggtcgagttcacggacacgatcgactacgtgaacgccaggatccac

SEQ ID NO: 27951 - DNA, 223 bp, Oryza sativa
  Clone ID: uC-osflm202112g06b1
ggagtgtgtgttggggggaatcgcgccagggacgtgaggggggtttattttaaatcaacgggggttataaaaaccaacaacatttccttttcaccaatttccatccattctatttcatttattgcgccatacactaaattcacaactataattaaattacccattaccagtccgtatacaaagcgaagaaccttgctcatagtcactctacatgactattccc

SEQ ID NO: 27952 - DNA, 452 bp, Oryza sativa
  Clone ID: uC-osflm202112g07b1
taattttccgacgccagagcgcgaggagacgcacacagagacttggcatttgtagagtttttagatttatagatagcaaagatgtcggcacaggcggagctttcccgtgaggagaatgtgtacatggccaagctcgctgagcaagccgagaggtacgaggagatggtcgaattcatggagaaggtggccaagacggttgactctgaggagctcaccgtggaggagcgcaacctcctgtctgttgcatacaagaatgtgattggagcccgccgtgcgtcatggcgcattatctcctccattgagcagaaggaggaaagccgtggtaacgaggaccgtgtcacactcatcaaggactaccgtggcaagatcgagactgagctcaccaagatttgcgacggcattctcaagctgcttgaatcccaccttgtcccctctttcactgcccctgagtc

SEQ ID NO: 27953 - DNA, 490 bp, Oryza sativa
  Clone ID: uC-osflm202112g12b1
ttgatctggacatcaccgagatctcgtcctacgaccggaacgggtttgctcgaggggagaagatgatggcgttcgaagttccggtctcgcagatctagtggagcttgagtgcattgattgggcgagaaaagaaattaacataaagtatgaaatcagagataacaggaagggatacaaagcaggagccttgaagaagggcatggaacatatctatacccaacagtgcgattttgttgccattttcgatgcagatttccaacctgaatctgatttccttctaaaaataataccatttcttgtgcataaccctaagattggtctggttcagacacgttgggagtttgtgaactatgatgtttgccttatgacaaggatacagaagatgtcactggactatcatttcaaagtagagcaggaatcaggctcatctatgcattcattctttggcttcaacggtactgctgctgtgtggcgggtatcagctactatt

SEQ ID NO: 27954 - DNA, 390 bp, Oryza sativa
  unsure (1)..(390): unsure at all n locations
  Clone ID: uC-osflm202112h08b1
taattatgggacctgcgcatggctcaggcctgacgggaagacccaagtgactgttgagtgccgcaatgagagcggtgccagggtccctgtccgtgtccacaccgtcctcatctctacccagcatgatgagacagacaccaacgatgagattgctgctgacctgaaggagcatgtcatcaagcctgtcattcccgagcagtaccttgatgagaagacaatcttccatcttaacccatctggtcgcttcgtcattggcggacctcatggtgatgctggtctcactggccggaagatcatcattgacacttatggtggctggngagctcacggtggtggtgccttctctggcaaggacccaaccaaggttgaccgcagtggaacatacgtcgc

SEQ ID NO: 27955 - DNA, 460 bp, Oryza sativa
  Clone ID: uC-osflm202112h09b1
ctcctcgtcgccgacgagccgcctcctcctcgtcggggccggcggcagagcaccggagcagccaccccatggcgtccccggacctcctcttcaacctgcgcaacctcttctacctcggcgcctaccaggccggcatcaacaacagcgacgtcccgggcctcgacgccgacgccgccgccgagcgcgacgccatcgtcttccgctcctacgtcgcgctcggctcctaccagttggtgatcagcgagatcgactcgtccgcggcgacgtcgctgcaggccgtgaagctgctcgcgctgtacctctccggagacaaggaaagtgcgattgtcagtcttgaaggaatggttgagtgattcagcggttggaagcaatcctgttctacgattgattgctggaattatatttatgcatgagcaagactacactgaagctctcaagcacacacactctggtggaactc

SEQ ID NO: 27956 - DNA, 334 bp, Oryza sativa
  Clone ID: uC-osflm202113a02b1
catgaacttcatgcaccgggacgaggaggtggggtagtacccatcgagccacgcgccgctccgccacgcgccgccgacgcccatcacgccgggccccgtggtggggaggaggcagaacgcgacgatacacaagcagaacgagttcaagcagcccggggagaggtacaggtcgcgggcgcctgatagacaggagagggctaacgaccggtatgccggtgatgtatgagacattacgggctcctaaaggttccacgcgagatgggtcaaatacctggagcaaggtgaagaggacaaagcataaataattgccatgatacaaaaacagaaggcgaat

SEQ ID NO: 27957 - DNA, 262 bp, Oryza sativa
  Clone ID: uC-osflm202113a04b1
ttctaactcgtcgccggtccgacgatcccgtcccgtccgccgccgccgccgtcggagattttctcgagataagccatgggtcaagcactccgtttggtacaagtagatcaatcgacagtagccatcaaggagtcctttgggaagtttgatgaggttcttgagcctggatgccactttttaccctggtgcatagggaagcatatcgctggatatctttccttgagtgtgtcataattgtacttccgttgtgaaactatttact

SEQ ID NO: 27958 - DNA, 479 bp, Oryza sativa
  Clone ID: uC-osflm202113a05b1
attattctgaacttgtgtgatttcattcacagggtgataaaagcagtcatgagtgctgataatttgttgctgcagatggatgggttaactaagacagatgatctcgtttttgttctagccgccacagatttgccatgggaactggatgcagcaatgttgcgccgtttggagaaacgtgtatccttttttctcaaaccatcttgtaatttctttgttcacgagtgctcctaaatactactccgtaattgccagttttgctattaggtaaactcccttggttttgtccgcaaatcgttgatgtttttggacaaaatctggttaaacttttgaaaccttgactatcgatgaactttaaaaacttagttcaaaaacataaatatgatatgctttgattttgtttaaaggactttcaacctcttattaaactgattaggattttttaaaccctattttaataataatcatggggaccaatttgc

SEQ ID NO: 27959 - DNA, 415 bp, Oryza sativa
  Clone ID: uC-osflm202113a07b1
tcgatatcgccggcgaaatggacgccttcctggggggaatcccgcagctccgcaggccggcggcgctgatcgcgtggtgctgagcgctggtcctcctcgccaccgtgctcctcctcccgcgcgctcctcccgccgccccggagcagcttgcctccgccgccggcgccgccgccgtccgcctggacgcgagggtcgagcggaggagcggcaacgaggtgctgcggcagaatgtccacgactacgacagcttcactggccgtggtgttagaggacttgcattaggcaaccatggatatgcatccggaggtggcatgacacatttatcaccattgaagtacacgcggtgtgggaaggcccaacccttgtcaaaggtgaagatcctttggaatccttacccaaaggatctcggacctgt

SEQ ID NO: 27960 - DNA, 489 bp, Oryza sativa
  Clone ID: uC-osflm202113a08b1
tcgttaattcagagcagaagtagtatgaagcttggtgacacatgcatgccaaaacatggctccgtttggagaaggcttatcaattagcatgtttgaggatgtgcaagaggaggtttatccaggacaatctataaagtgcacaccatggaacctgacaacttgaagctcaccgaatttcttggtttcactcatcatgcataagccagcaaagtagccaacacaatcgaaaataccaaaaccgagagtgtcaatggttgttttgtcagaggacttgcattaggcaaccatggatatgcatccggaggtggcatgacacaattatcaccattgaagtacacgcggtgtgggaaggcccatcccttgtcaaaggtgaagtccttggaatccttacgcagaagaagttctggctgtgcatttccaagtggaccagtttgcatgagccaatcgttatagaactttactttcctaaacattgcagttttatttaaa

SEQ ID NO: 27961 - DNA, 510 bp, Oryza sativa
  Clone ID: uC-osflm202113a12b1
tcggtagacgatggcgccggtggccgccgacggaaggttgtacggggagatcgtgatgctgtgcaacaccgtgatgaagggctacctgaagaaccccaaggcgaacgcggaggcgttcgccgatgggtggtactatttctgcgaccttggagtggagacagataatgttaccttcagctctgtgagaagcacaaccaagattgacatggttatttctgcaaggcttcatctctttatactggccatgggatgttatggaacttttaaatcaccctcatttttttgtcttatttctttttgagattggcattgactttctttaaagactttttcacttttttattttatttttatattgtggctattttgtttacttgtttactcttttaaatatcttttttatcgttatattttaatcaatctttcttttgtctccttttatttttttgggagtttgcgttacttttgtctagtttttttaatgagttattctctaatatttttcttttt

SEQ ID NO: 27962 - DNA, 527 bp, Oryza sativa
  unsure (1)..(527): unsure at all n locations
  Clone ID: uC-osflm202113b01b1
gcagaatgctgcacaagaatccttccatgaaatgactgcggtcaaaaggtatctttttacttattctttcaatgtaaaggatagcaaaaaaaatagacatttgacatcccttacaatggtagctaggttgacaagggaacactaagttcccagaaatgagaatatcagaatattattcacagctaacaaatatgatgtgctgatgttagccaatagaacatcaataattagtatactaactatggctattctacttctgatgtgctacagtgacacaaatatgtcaggactatagttcaaagcaacagttgtacattttaagtttgatgagtgctgggttgaatataanagctgttatgtacttgcatccatcattgtattggtattcttttatgcattttatgctctgaatgaaaccaatatgaatacacaaattctattttattttcgttaattagcttttagaggaacttggctgcatggtactgaaagttcaagccagtgccttatcatgactcatgtggttg

SEQ ID NO: 27963 - DNA, 491 bp, Oryza sativa
  Clone ID: uC-osflm202113b02b1
tttacccggccgccgcagaagcgcagaccatgggcggatctttccgcgcgaagacgagcacgccttgtgaatggtgggagcccgcacgacctcccccgcctccccgccgcagccggagagggcctccttccgcagcttcgttcgctgcatgcagggctggcaccaccgctgcatcggcctcgacccgtgaacgcctcgtcgccggcgacgagcgcgcaacgggcgcaggatttcgtcgattcgattcgactcgactctcccgcctgattcttttttttttttggtcgtgagttcttcctcttcttgcgagaaaacagagagaaaaaaagaaagttaggcaattctttgattttagttggatttgttccgatttggccgttgctctaccgccgacgatgatgaagctgggcaaggcggagtccgcccgcggaaaggtggcgcccgccgggtccggcggccgagcgcgcatgctggtgaccgtgaccgtgctc

SEQ ID NO: 27964 - DNA, 525 bp, Oryza sativa
  Clone ID: uC-osflm202113b04b1
atttaaaaaaaggaaaaaaaaacaaaacacaccaggccaaataaaagcgacaatgggatcgctcaccaccaacatcgtcctcgccgtcgccgtggtggcagcgctggtcggcggcgggtcgtgcggcccgcccaaggtgccacccggcccgaacatcacgaccaactacaacgccccgtggctccccgccagggccacctggtacggccagccctacggctccggctccaccgacaatggtggcgcgtgcgggatcaagaacgtcaacctgcctccctacaacggcatgatctcctgcggcaacgtcccaatcttcaaggacggcaggggatgcggctcatgctacgaggtgaagtgtgagcagccggcggcgtgctcgaagcagccgggacgggtgttcatcacggacatgaactacgagcccatctcggcgtaccacttcgacttctccggaaggcgttcggcgccatggctagcccggggaaggaagaccgagctccgcagggccggcattatctacatgca

SEQ ID NO: 27965 - DNA, 527 bp, Oryza sativa
  Clone ID: uC-osflm202113b07b1
tcggtggagttctgcgtcacacagcaaagcggggcaatggataatggaggacagcgtcttgatataatttttaagttttcaacatattatcacatcacattacacttttcaatagaacactactagagggagttccataaattgagacactgtcgtgtccagaaagatagcaagtggatcatcttgcacaggctgcaccgtcgtattggttcagaatctttcaaataaagtcgaaatattaagaagatatgcttctcagaccatgcatcaccacactatataaggggcaaacaagctcccagtatcgttactttgagcccccgcctccccttttgaaataaggttgactgtaattctgcttttgttcgtaatatggatgatcataacttagactacaagggaagtggtgctcttgaagagcttgacatgttaacagtgaatgccaaagaagcccaggagctcatattgacgaaaatccttgagaggaatcatgctaccgagtacctgagcatattcatgaatgggtc

SEQ ID NO: 27966 - DNA, 507 bp, Oryza sativa
  Clone ID: uC-osflm202113c01b1
atgcgttcgcttataccctgcctcttcttccttcccactaccagaaccctaccaaatattgtattgctggctcgctgcttgggaagataaaagtgcggctctgaaggggaatttcgccgaacaggatgaatgcgttggcagcaacctgcaggaacttcaaggatgcgcctcgaatgaccctactggactgcacacaggacaataacatctgcattcggagagggagaataaggctacaatgacgtctcctgcggtcgctttgggcctcgtgcctgttgtcatggaccatgagcctggtactatggacagtgtcccgcactggaccctttggtcagatctttccgccctgacaacttttgtcttgtggcaatctggtgctggtaacaactgggccaagggacactacactgagggtgccgagctaaatgattcagtattagatgttgtgaggaaggaggctgagaactgtgactgcctgaaggattccaagtatgccactcttttggt

SEQ ID NO: 27967 - DNA, 175 bp, Oryza sativa
  Clone ID: uC-osflm202113c03b1
gttcaagccccacacacaaagcgagcgactcggcggcggcggcgatggccacggtggcgatggacatctccaagccccctcccgcggcgggcggcgacgaggctgcggcggcgaaggggaggggcggcgcctgaggaggaggtggtctgcttgctcactcgttttggatcttcct

SEQ ID NO: 27968 - DNA, 236 bp, Oryza sativa
  Clone ID: uC-osflm202113c07b1
ttcatcactcttcacccgccgcgacctccggaagcaaacgccacacgcgcctctccgccatgcttcctcctagggttgccccggccgccgccgccgccgcgcctacctatctcgccgccgcggcctcgacccctgcttccgtctggctgcctgtgccgcgtggtgccggacccggggcagtgtgcagggccgccgggaaagggaaggaggtgctctattctctgttcttcttctga

SEQ ID NO: 27969 - DNA, 339 bp, Oryza sativa
  Clone ID: uC-osflm202113c08b1
tcggtcataactaagtccagaaccgttctagaggactctgatactgatgacctagtgggattccatatgctggcagtactgcgcaacagatgtgtcttcatggccacctgctgccgctccgagctaagccaaacctcgctgaatctttctcgtggactgttgctggatttaccagtgctcgaactggtggtcactgcaagcattgtgaggccaacaatgtacattgttttgaaggtttggcctagatctcgatggcgatgctctatgatccgaacttgtttagcctggcgcgctactgtggatcagatatttcctttgtgaatccttattttacttgct

SEQ ID NO: 27970 - DNA, 453 bp, Oryza sativa
  Clone ID: uC-osflm202113c09b1
tttcttggtccgtcttgggtggcacgattctggcacgtacgacaagaacatcgaggagtggccgcagaggggcggagccgacgggagcttgagatttgacgcctaattgagccacggagccaatgctggcactgattactgttatgtcgcttatccaaccattttaggacatttaccacagcttaccaaatgcagattcggatctgatgccatgtaacacagataattaggatgctaactattggtattttacttttgatgttctacagggacacaaatatttcagggcttatattcaaagcaaccggtggacattctaagtttgattagtgcttggttgaatattcaaagctggtattgtactttcatccatcattgtattggcattcttttatcattttatgctttgaatgaaaccaatttttaattcacatattcctattttaatttttc

SEQ ID NO: 27971 - DNA, 110 bp, Oryza sativa
  Clone ID: uC-osflm202113c11b1
tcgtgctctaccgcgcaggaggcagggcgagcgagcggcctccctccctcgctgctgccgagcgagcgcgccgacgctgctcgaacttggttttagactgtctgggggcg

SEQ ID NO: 27972 - DNA, 525 bp, Oryza sativa
  Clone ID: uC-osflm202113d01b1
gtccttagttggaagcgatcgatggcggctacgacgacgggacgagttgttgcactcggcgcggtggccgtggtggtggcgctgacattcctcgccggcggcgcggacgccgactgctacgacttctgcttcaaggactgcatggccagggagaacaacatggtcgactactgcagctacgcctgcgacaagacgtgccagccggacaagcccacgctgtactcgtcgtcgtcgtcgtcccgcctcgccggcgacatggagtgccaactctcctgcgccttgggctcctgccaccgcctccttccggacggcaagggcgccgtggaggcctgcttcgggcagtgctacgacggctgcaagaccacggcggcggccagactgccgaggcctctccgcgccggccactacgtgctctctagtccccctgatgacgtagaccatgatccggaccaccgctacgtgttctctaacccccatgatgacgtaagaccatgatccggaccaagtgttcgctagtccacctga

SEQ ID NO: 27973 - DNA, 493 bp, Oryza sativa
  Clone ID: uC-osflm202113d02b1
ctctattctctccctccacaccccactccgacgaccaccaccacctcgcccgcggtaacgccgccgccgtcgctcgccgcggtaaaaccagcgcgcgcgagagagtgggtgtccgtgtggcctactacttgcttcctcggcgcgcgcggcgcgtgtgtgcctcgcatcctccaccaccactagtgcagccaagtgcgtgcgtgtgtgtgtgtgcggacaccgttgctgccgccgccgccgccgccgcgcgcagggtggtgacaagatgacggcgacgccggcggtgatcgggctgagcgcggggaacaggctgctgagcgcgtcgttcgggccgaccgacgccgtcgcccgtctggcgcgccgcccacgcccatgacctcgagtcctccctcgaggccatcgtgctgctgcagaggtccatgctcgagaagcagtgggagctccccttcgacgacgacaaccacgccatggccatcggcttggccgaggatga

SEQ ID NO: 27974 - DNA, 447 bp, Oryza sativa
  Clone ID: uC-osflm202113d05b1
gtttgaatgacaagcttgtagaatccgcagttttactcctggctgcccgaaaacatatccgtgagggcaaacctgatgggttcgacattatcgcgcaacgtatatatgaggactatgattccctagtgtgtgataaaggtgatactgcagaggggcagaagctgctggaggaaagaagagcacttttgaaatgtaaatgtctgattgtcactataatttcgcaagctggtgaggttttggataactacattcaagcacattcagaggtgcccaatgtggaggtccttgcgcgtgtttcatatattcttaaggaattcgggttttgccctaacgaagaatacattgacaccatgatcctgtactgctctttttgtattcaatataatattttttttctatgcaaatgtttgttgtttattaattatttcttaaacttgttattgaagc

SEQ ID NO: 27975 - DNA, 520 bp, Oryza sativa
  Clone ID: uC-osflm202113d06b1
ttttaattcgaaatccctaattcgacgccatggccgggactggtggcgccgccggggagaagacggccagcagcctcctgctcggcgtccggggctacacgtccaccctcaagaacgcctccaccgccagctgcaggttgagcgccggccatcccatcaaggtgactttgtgggaggcgtccccgcctgccctctcccacttctccgtccactgccccgatctcccatccttcaatggcaatctgcttggcgcgcctcaagccatcgccgccgccgtcgacgacgccgacggccagctcctcctcctcctccgagtccccatcgatcagcttggtgccccgcatgacaacgactacttggtctaccatccggatcccccgtctccgaaactggatctgctccccaacccgcctacccctaccctcggtgaccaccagctcgccatactcagctgcggcgacgaccgctacgtcgtggccgccctccacgtctggagtgagttcacttccacgctgcgcct

SEQ ID NO: 27976 - DNA, 517 bp, Oryza sativa
  Clone ID: uC-osflm202113d09b1
tcgtctcacccacccctcgatctctcgctcgctcgccgccgatcggatcgcgtggttggatcatcacaactcggcaaagatgagagagatcctgcacatccaaggcgggcaatgtggcaaccagatcggtgccaaattctgggaggtggtgtgtgatgagcatggcattgaccctactgggcggtacacaggcaactcagatctgcagttggagcgtgtcaatgtgtactacaatgaggcctcctgcggtcgctttgtgcctcgtgctgttctcatggaccttgagcctggtactatggacagtgtccgcactggaccctatggccagatcttccgccctgacaactttgtcttcgggcaatctggtgctggtaacaactgggccaagggacactacactgagggtgccgagctaattgattctgttttagatgttgcgaggaaggaggctgaaaactgtgactgcctgcaaggatccaagtatgccactctcttgtggtggtactggatctggtat

SEQ ID NO: 27977 - DNA, 484 bp, Oryza sativa
  Clone ID: uC-osflm202113d11b1
ttcgtttcctaattgtcatcactagcttctagctagcttaattaattaattagccatggcggaggagaagcaccaccaccacctgttccaccacaagaaggacgacgagccggccaccggagtagactcctacggcgagggcgtctacacgtcggagacggtgaccaccgaggtggtcgccggcggccaggacgagtacgagaggtacaagaaggaggagaagcagcacaagcacaagcagcacctcggtgaggccggcgccctcgccgccggcgccttcgccctgtatgagaagcacgaggcgaataaggacccggagaacgcgcacaggcacaagatccggaggagatcgcggccacggcggcggtcggcgccggcggctacgccttccacgagcaccacgagaagaagaaggaccacaagagcgccgaggagtccaccggcgagaagaagcaccacctgttcggctgatcgaccttatcac

SEQ ID NO: 27978 - DNA, 451 bp, Oryza sativa
  Clone ID: uC-osflm202113e01b1
gtctattctgattggttgggatgtactggcctggatgatcattagtctccaagtgctaacagatcggccgccactaagttttcgcgagcacatcctacagactacacgtctaacaaactgcgggagatgatccgtgtgatgaagcaaaggaatgtccctgcctctattaaatggtaggggaactaccacataattgactctctatcgaatgacatcttgttttacaaaatggtcatccatgtgctcagtgaatctgtttgtagacgctatgagccagagatgacgagaaatccagggatgtggccactgtatagggggatctttgctggtgtagacatgttcaaggataataatatgaaatctttcatacctgaggaagacattgtcatctggctgaaaaatatatgtggtgccttggatataaattcgtcagctaatgatggtctggctg

SEQ ID NO: 27979 - DNA, 504 bp, Oryza sativa
  Clone ID: uC-osflm202113e04b1
tttgattccctcaattgaactgggtccagagttcaagaaggtcgggtgtttccttggtcgcttcaagtcaatccccagcattgttgagcttgacaccttgaaggtttccggtgatgtttggtttggctctagcatcacattgaagggcaaggtgaccatcacagcccaacctggtgtcaaactggaaatcccagatggagcagtgatcgagaacaaggatatcaatggccccgaggacctttgagcgaaaggatgcagagttcacaaagagagatcatatcaccattccatataatcaatcaagctccacgacattgtggagaatatttttgatccaatattgcttcggcataaggaataacaaaattagtacatgtcttttacctacttgactatgcttcttgatctattttctccttgtgagtgggcaaacaagtcatgtcccggcaaaatatcatatgaacatatttggttacatatctgttcaacaatcagcaagaaaac

SEQ ID NO: 27980 - DNA, 496 bp, Oryza sativa
  Clone ID: uC-osflm202113e05b1
ttcgaattggggagcacacaacaaaattccgatccaaccctaagcccgatccgccctagcacgatcccctcccccctccccgtctccgatccccctcctccacctcagatctccggcgagccgatcgaatcggcggctgcggcggcggcggcggcgcgatgtcggggcagacgcagcgcctgaacgtggtgccgacggtgacgatgctcggggtcatgaaggcccggctcgtcggcgccacccgcggccacgcgctcctcaagaagaagtcggacgcgctcaccgtgcagttccgcgccatcctcaagaagatcgtcgccgcaaggagtccatgggggaggccatgagggcgtcctccttctccctcgccgaggccaagtacgtcgccggcgacggcgtccgccacgtcgtcctcagtccgtccgctccgactacctccgcgtccgctcccaccaggagaacgtcgccggtgtcaagctccccaagttcacccact

SEQ ID NO: 27981 - DNA, 528 bp, Oryza sativa
  Clone ID: uC-osflm202113e07b1
ttctgtagatccgtcgccgagttcgcctgagccccaatctccgatcccccaccatcgccggcgccgccgccgctccaccctgccgcttttcctcccgccgccgcatcctcgccgcgcgggatggccggagcgacggatctccccccgaagggagggttcagctacgacaattgcgcgaggaacgccatgcttgtggagaagggcttgaagatgcctgggttcctcaagaccgggactaccatcgtcggtttggtctttcaggatggtgttgttcttggggcagacacgagggccaccgagggtcctatagttgctgataagaactgcgagaaaattcattatatggcgccaaacatatattgctgtggagcaggaactgccgctgatactgaggctgtaacagatatggtcagttcccagcttcaacttcaccgttatgcaactggtcgtgagtccagagttgtaacctctcttacattactgaagtcgcacctttttagctaccaaggtcatgtcagtgctgccctt

SEQ ID NO: 27982 - DNA, 516 bp, Oryza sativa
  Clone ID: uC-osflm202113e10b1
tcggtcgctcgccgctcgcccaccatggccatggcgacggcgctccgcaagctctcctccgacgccctccgccgccagccgctctcccgcatcaccccgctctactacatggcgtccctgccggcgacggaggagagatccggagtcacctggccgaagcagctgaacgcgccgctggaggaggtggatcccgagatcgccgacatcatcgagcacgagaaggcccgccaatggaagggtctggagctcatcccgtcggagaacttcacctcggtgtcagtgatgcaggcggtgggatccgtcatgaccaacaagtacagcgaggggtaccccggcgcggaactacggtggaaacgaatacattgatatggccgagtcattgtgccagaaacgtgctttggaggccttccgcttggacccagcgaaatggggagtgaatgtgcaacctctatcaaggtcacctgccaactgccatgtttacactgccctattgaaaccacatgagagaatcatggc

SEQ ID NO: 27983 - DNA, 485 bp, Oryza sativa
  Clone ID: uC-osflm202113e12b1
atcggtagttttaggccatctgagggcctttgaagggctctttgcctccttcattggtcatagcatttgtgtagtgtgtgcaaatccatcatcgcatcttcatatctgaagaaatgaaggtgaccactcagctcaagcccatggcctcctcgtcgacgtcgtcgtcgtcgtcccggctgcctcggagcgcgagcgggaaggtgcccacctcgccgtcgtacagctccaacgcctcgcgccgccaccaccagcagccgccgcgggcctcggcgtggacgcccggcaccccggggccgtggcgccaccacctcaggtcgctgtccatcagctgcatgacgatcaggaccgacgacgactcgccgccgtcggccgccacccacaaggacaaggcggcgacggccaagccggtgtcctactacttgtcgatgctgtcgccgaggaagctcatgcagcgcgcgtcccgcgcgttccgtcgcagcaagtcg

SEQ ID NO: 27984 - DNA, 480 bp, Oryza sativa
  Clone ID: uC-osflm202113f03b1
gtcgctttgggtagcgcacgggtggtatgaggtggcgaccaaggggtggcgggaggtggatctcgggtacatcgccatcctcccgtcgttgctgctgcggatgctgcacaaccaagcctggatcaccatctcccgcctccaaaacgcccgtggccgccgtcagattgttcgccgcggcatcgagttcgaccaggttgaccgcgagaggaactgggacgaccagatcatcctgagcggtatcctactatacctcggcgcactgtacgtaccgggcgggcaacacttaccgctgtggaggacggatggcgcggggctgatcgccttgctgcatgcggggccagtggagttcctctactactggttccatcgtgcgttgcaccaccactttctctacacccactaccactcgcaccaccactctttaatcgtcactgagcccatcacatccgtcatccatccgtttgctgagctcgttgccta

SEQ ID NO: 27985 - DNA, 519 bp, Oryza sativa
  unsure (1)..(519): unsure at all n locations
  Clone ID: uC-osflm202113f06b1
ttgcttcttttttttaatggcaaaaaattaccgtgcctcagattttgctaaagtgggaatcccctccacaaactgttcttttcgtgactaaacctaattccaactccgtgcacgctctctgtgctgaaatggttaggtatgttttctttctgctctgtgtgccaacatggtcaggtatgtcaaaggttttatattttatcaatcatctgagttcggcattaaaaatagcttcttttttgtttctggaacttgtcctctcctaatttacttatgttaagcagattttgttgataaataatgttgcatggaattgtatatttttcattcaatatcgttgtttcacttgtgctaatgtctgccgttctccgcagatggcttaaagagcacaataatataaacatctttgtagagccacgagttagcaaggaactagtgactgaagattcatacttcaactntatccaaacatgggataatgatgaggaaatgaagacattacacacgaaggttgatctcatt

SEQ ID NO: 27986 - DNA, 481 bp, Oryza sativa
  Clone ID: uC-osflm202113g02b1
acccaaccgtcgcgttcgtttctttgtcaagacactgaccggcaagaccatcacccttgaggtggaatcttctgacaccatcgacaacgtcaaggccaagatccaggacaaggagggcattcccccggaccagcagcgtctcatctttgccggcaagcagcttgaggacggcaggacccttgctgactacaacatccagaaggagataacgcttcaccttgtcctccgtctcaggggaggcatgcaaatcttcgtgaagactctgaccgggaagaccatcaccctcgaggtggattcttctgatacacatccacaatgtcaagggcaaaatccaggacaaggagggcattcccccggaccagcagcgcctcatctttgctggcaagcagctggaggatggcacgacccttgctgactacaacatccagaaagagtacaccctccaccttgtgctccgccttcggggtggtatgcagatctt

SEQ ID NO: 27987 - DNA, 296 bp, Oryza sativa
  Clone ID: uC-osflm202113g10b1
tctgtcctcgatcgagagccgcccctccttgagtggcggtggttccgacgaacgacgacggcggcggctcccccctcctcgcctcctcgggcgccgaatccgccgccggctctcctcgccgctggccggtctcggggaggggaggggagtggaggggagggaaggcggataaaaagatgcggaacccgccgtctaaagcggtacataaaccgccgtcctgggggaccacgtgaaatacaaaaacggcgtttcctgggcaaaaacaagttcaacaccgcccgccttgggggtcaccc

SEQ ID NO: 27988 - DNA, 568 bp, Oryza sativa
  unsure (1)..(568): unsure at all n locations
  Clone ID: uC-osflm202113h03b1
gtaccggtccggcctgcccggcccaccccatcgcgtgtcgtttgtcatcatggattattcgaggggatcagcgcacgcacgaggacaccacgacgtgccgatcgctatggggtcgtggcggcgcatggcctacggcgccctcaaggactccaccaaggtcggcctcgccaaggtcaacagcgacttcaaggagttggatattgcaattgtgaaggccaccaaccatgtagaatgcccttccaaggacaggcacgttgaataaatattcggggagacctccattaaccgctctcgagcggacgttcaatactgcatatatgccttgtcaaggagattgtccaagacaaagaattggacagttgcattgaagacattgatagtggtacataggctcttgagagaaggtgatcctacattcaaagaagagttcctggcctactcatacaagggaagcgttttgcagagagcaaacttcaaggacgattcaagccaattagcttgngattgctctgcgtgggttcgcgcctacgcgctcttcctagaagaacggctcgagtgttttaggatc

SEQ ID NO: 27989 - DNA, 481 bp, Oryza sativa
  Clone ID: uC-osflm202113h05b1
gggtggttttttttttttttttttttttaaaatggcacatgattattcaccatgaacaggagaatacaggttagtgccttgttatcagcctctattactattacatgctcatccttctctcatttcatcttatttctccatccatttgtgtttaagagtacagactttatttggatggcaacagattgtcattcttcacttacacagtactggtgacttgaggctagcaataactttctccaactccatcagtgatacatccaattatgattaagcggatgtccagctcatggatcaaatgtgagggatgatcatggaaaggaagacataatagacttggggctcctactacatgatccacggatccaaccaagctgtgctttctcgttatcatatatcaccatctgatcctgcattgtaatgtctacaattatgctgaaactcagcttagcagcagatccatcaaggatgcccaagcaca

SEQ ID NO: 27990 - DNA, 310 bp, Oryza sativa
  Clone ID: uC-osflm202113h06b1
gtctttttttttttgtgctgaaaaccaccacgggcgggttttattgagacaaccatggctaaacccccacgggggcgataacgggaaagacaagctcccggacagactccacaaatacccccgagcaacaacagaaggccactcacaacatttgatacaagatattgaagccacacatgaggggctgacaaggccacgactaagaatgccaggagagcagctgcgcaggaacaagacaaccagcaagggcgagctcggggccaaagcctactaaggccacaccatccaggagacacaccaaggcaacttc

SEQ ID NO: 27991 - DNA, 503 bp, Oryza sativa
  Clone ID: uC-osflm202113h07b1
tcgatctcctcctcctcctcctcttcctccgcgcgcgcgagatccagggagagggagagggagagatcatggcggggacggtgacggtgccgtcggcgtcggtgccgtcgacgccgctgctcaaggacgagctggacatcgtgatcccgacgatccgcaacctggacttcctggagatgtggcggcccttcttccagccctaccacctcatcatcgtgcaggacggcgacccgaccaagaccatccgcgtccccgagggcttcgactacgagctctacaaccgcaacgacatcaaccggatcctcggccccaaggcctcctgcatctgcttcaaggactccgcatgccgctgcttcggctacatggtcttcaagaagaagtacctttttaccatcgacgacgactggtttgttggcaaggacccatctggcaaggacatcaatgctcttgagcagcacatcaagaacctcctcaggtccgtccaccccgttctttttaacacc

SEQ ID NO: 27992 - DNA, 457 bp, Oryza sativa
  Clone ID: uC-osflm202113h10b1
ttctttcgtctgaccgcgtggcgttgctcacacaggctagcgaaagcgagagacacaggcgggtgggggggcgacagacagggagagggagagggagagagagagagagactccgccggtttctttcgcctgctcccgctcgttctttctcggggtgggtgggtgagccggtccacgaggcggcgtcggcgaccgtggtgcaacactgccgcagcacaggggtcatgagacggggccggctgttggcggaggagaagattgggcacaacgagactatagagcaagcgacgcctccttttctttttttctccgatccatctaggggaagcattctcccatgctcgttgactattgagaacggattattcgaatggagtgagggttttgtatggctcatcgggagctgagctgtgtgatcttgtctttccgacagttactagcacgaactggtgcactg

SEQ ID NO: 27993 - DNA, 438 bp, Oryza sativa
  Clone ID: uC-osflm202120a01b1
ttccttctaaacaaccagccaccttccctgcttgtccaaatggtgagatggccgaattcactgattctgcttactcggtaaaacggagtccacgtagtgttgcacctgctaaagcaccgggcatctttgctcaacattctaatggtaacaaggcccaattcactgatgctggttacccagtcgactggaatccacgtagtgttgcgcctcctactccaccggctgccttgtcttctgtggctcatccagctgcaggcatacatatccagcgcgggatgctcttcttaatgaagaagttgcatcctggcgccgtcttgccggaaggcacgaagctggcgctgccgcacggcgaccacagcgtggccgcagcggcgccaaggttcatctacattgacaagggcgacgccgtgccgttcgacctccgcgccatggacgcca

SEQ ID NO: 27994 - DNA, 373 bp, Oryza sativa
  Clone ID: uC-osflm202120a07b1
cgtggtgatacccactgatctcaccactcctaggggggctgcttgcaacaagcgggccgtcgaagcaaccaaggatatgaccgacagcgacacagtacagcacctccgcgcgcccgcagacgaggccccatactacggagctagagcacaaacggagaacgttcgcctacacgactctctcagaaacgtgagccaggccgcaaccgagggcccgacgatgggtagccaatgtatcaactgagctgacgctgggagtgattgactaacgacatgagaggatgcaatgccacagccagaccatgggttagatcaagactcacaccaagttggacccactcggcacctgagtcaagaacacggggggggggaacta

SEQ ID NO: 27995 - DNA, 450 bp, Oryza sativa
  Clone ID: uC-osflm202120a08b1
tttttcatggccaagatccccaatgccgtcctgggacagggttacggtatgactgaggctgggccagtgctggcaatgtgcctggcgtttgccaaggagcccttcaaggttaagtccgggtcgtgcggtacagtggtgcgcaacgcggagctgaagatcgtcgaccccgacaccggcacctccctcggccggaaccagtccggcgagatctgcatccgcggagaacagatcatgaaaggctatctgaatgatcctgaggcgaccaagaacaccattgacgaggacgggtggctgcacaccggagacatcggcttcgtcgacgacgacgacgagatcttcatcgtggacaggctcaaggagatcatcaagtacatggggttccaggtgccaccggccgagctggaggcgctgctcatcactcacccggagatcaaggacgcccccgtcgtc

SEQ ID NO: 27996 - DNA, 508 bp, Oryza sativa
  Clone ID: uC-osflm202120a09b1
tgtcgagcccgaggcctccgtgttctccaagatgaccaagttcgaggaggagctgcgctctgcgctgccccgggagatcgaggccgcccgcgtcgccgtcgccaacggcaccgcccccgtcgccaaccggatcgtcgagagccggtcgttcccgctctaccgcttcgtccgcgaggagctcggctgcgtattcctcaccggcgagaagctcaagtcccccggcgaggagtgcaacaaggtgttcctcggcatcagccagggcaagctcatcgaccccatgctcgactgcctcaaggagtggaacggcgagccccttcccatcaactaagccaagatcccatcgccattgccattgccatacacccatcatcgaggaggagaggagactaaaaataaaagaaaacgaaccgcttcgtgtatcttcagacaaaaaagaccctgtattttcttcgttcgttgccgtttggtttatagtgatctcgtgttctttgtggtagctgctctgctc

SEQ ID NO: 27997 - DNA, 379 bp, Oryza sativa
  Clone ID: uC-osflm202120b04b1
tttggttcatgcacgagtaccgcctcgccgacgtggaccgctccgccgccgcccgcaggctctccaagtcctcccacaacgccctcaggttggatgattgggtgttgtgccgaatctacaacaagaagggagtgatcgagaggtacgacacggtggacgccggcgaggacgtgaagccggcggcggcggcggcggcggcgaagggtggtcgcatcggcggcggcggcggcgcggcggcgatgaaggtggagctctccgactatgggttctacgaccaggagccggagtcggagatgctgtgcttcgaccggtcggggtcggcggaccgcgactcgatgccgcggctgcacaccgactccagcgggtcggagcacgtgct

SEQ ID NO: 27998 - DNA, 552 bp, Oryza sativa
  Clone ID: uC-osflm202120b06b1
gttcatctatcttctatgagaaagccaagaagcattgagcagatatgctaaagaacactagtcaatctgccagctatccgacagcccaagtatcaaaatctttggaaggaatgctttctcaacctcattacaacgtgtcacctcctaggagtgaccataggggaaaatgccacaatgccttctcacctgaagagccagaagtttgtcttgtaaaagctgttgatgtagaagaaccagcccaagagagaagccaactgcatgataactcagagagcaatgcatatagtactagtgtagcagttgatgatcaggtggcggttctagaagaatgtggcatcaaagaagacacccaagaaggtatcatatatgctactgatgaggtagacaccgtgcctgttgaaggagttggcaaattggattgttccaaaacaatttgcaacatacagtgcatcccagcagaacaatacacagacagccccttgccagaaatattagaaggaacttgaggaataagaacctgttcaaatgttcatgagctctcctgagagcatg

SEQ ID NO: 27999 - DNA, 413 bp, Oryza sativa
  Clone ID: uC-osflm202120c09b1
tgtcggtttatgagcaccaaccgcgggtaggggctccattagtgcgccggtagaaccttatagaagctgtcctgctcgtcccatggcagcgaccatcgtgtgcgtgaaggcgcgccagatcttggacagcaggggcaaccccaccgccgagggctatgtgggctgctcacatagaacctttgcaaggtctgcagtcaccagggaggcatcaactggtgtctatgaagccatggactagagggacgggggagctgaacacttgggacagggagtttgcaaggctactaacaatgcgaactcatctattgccccaaacttgactggcaaggaccctacttaacaggctgaacttgacatcttgatggatgagcaactcgacagtaccaaaaatgagcggaggagtgagcaagcag

SEQ ID NO: 28000 - DNA, 477 bp, Oryza sativa
  unsure (1)..(477): unsure at all n locations
  Clone ID: uC-osflm202120c10b1
ttcgcctcactttattagcaccaaccccgtctggttggtccattcctccgccgctagaaccttctagaagctctcctcctcctcccatggcggcgacgatcgtgtccgtcaaggcgcgccagatcttcgacagcaggggcaaccccaccgtcgaggtcgatgtgtgctgctcagatggaacctttgcaagggctgcagttcccagtggtgcatcaactggtgtctatgaagctctcgaattgagggacggtggatctgattacttgggaaagggtgtttccaaggctgtcgacaatgtgaactcggttattgccccagcttctgattggcaaggaccctacgtcacaggctgagcttgataacttcatggttcagcagctcgatggaaccaaaaatgagtgggggtggtgcatgcagaagctnggtgctaatgcaaatcttgctgtgcactggccatttgcaaagctggagctatca

SEQ ID NO: 28001 - DNA, 537 bp, Oryza sativa
  Clone ID: uC-osflm202120d01b1
ttttcctctcccgcagatcagatcagatcagagccgatcaggtgaaaaagaggaggggggaaagatggggttggcgttcgggaagctgttcagccggctgttcgcgaagaaggagatgcggatcctgatggtcggtctcgacgccgccggaaagaccaccatcctctacaagctcaagctcggcgagatcgtcaccaccatccccaccattgggttcaacgttgaaactgttgagtacaagaacattagcttcactgtttgggatgtcgggggtcaggacaagatcagacctctttggaggcattacttccagaacacacagggtcttatctttgttgttgatagcaatgatcgggaccgtgttgtggaagctagagatgagctccacaggatgctgaatgaggatgagttgcgtgatgctgttttgcttgtgtttgccaacaagcaagatcttccaaatgctatgaatgctgctgagatcactgataagcttggactgcactcccttcgccagcgacactggtacattcagagcac

SEQ ID NO: 28002 - DNA, 539 bp, Oryza sativa
  unsure (1)..(539): unsure at all n locations
  Clone ID: uC-osflm202120d03b1
cttgtatttccggagatctctgtgggaggagcccctccaatttggcagggaatgaaagagcagcaactgatcgagaaggatgtattctccttctggctcaaccgcgatcctgatgcaccgacagggggtgagttaatctttggtggtgtagacccaaatcattacaaggggagccatacatatgttcctgttacccgcaaaggctactggcagtttgagatgggggatcttcttattgatgactactcaactgggttctgttctggtggttgcgccgctattgcggattcagggacttcattgctcggtggcccaacaactattgttgctcaaattaatcacgcaattggagctgagggaattgttagtatggaatgcaaacaagttgtgcgggactacggggacatgatcctcgagatgctcatagcacaggcaagccccatgaaactgtgctctcagattggtctctgtgcatttgatggtactcgntctgtcagaaacaatatagagtctgttggtgataaagaaaaggtgggctc

SEQ ID NO: 28003 - DNA, 509 bp, Oryza sativa
  Clone ID: uC-osflm202120d04b1
ttccttgcacgcgccgcgcagcctacgagcgggagccacacctcgagggctgcatctgttgcactcatgatttagcaccagctgaagtgacctctgagactgcgcggtgacgtagcctgttgctaggataaaaatctcagtagttaagcatggcggattctatggtgtcaagtttctgggggcctgttacttcaacaactgagctctgcgaggaaaattatgcacactcgtcatatattgcagaattctacaatactgtttctaatgttccatgtgttcttctggcacttgttggacttgtgaatgctcttcgccaaggttttgagaaacgattcagtgtcctgcacatatccaatatgatacttgctatcggcagtatgatcttccatgccaccttacagcacgttttacagcagagcgatgagactccaatggtgtgggagattctcctatatctttatggactttattcaccagactggcattaccggagcactatgcctactttc

SEQ ID NO: 28004 - DNA, 485 bp, Oryza sativa
  Clone ID: uC-osflm202120d11b1
gacccacgcgttttttatagctgaaatccctaattcgacgccgtgggcgcgactggcggcgccgccggggagaagactgtcagcagcctactgctcggcgtccggggctacacgtccaccctcaagaacgcctccaccgccagctgcaggttgagcgccggccatcccatcgaggtgactttgtgggaggcgtccccgcctgccctgtcccacttctgcgtccactgccccgatctcccatccttcaatggcaatctgcttggcgcgcctcaagccatcgccgccgccgtcgacgacgccgacggccagctcctcctcctcctccgagtccccatcgatcagcttggtgccccgcatgacaacgactacttggtctaccatccggatcccccgtctccgaaactggatctgctccccaacccgcctccccctaccctgggggaccaccagctcgccatactcagctgcggcgacgaccgctacgt

SEQ ID NO: 28005 - DNA, 476 bp, Oryza sativa
  Clone ID: uC-osflm202120e01b1
gttgttttctcttccgctttttcctctctctgtggcctcgcctctgcttcctcctcccgttcgtctcccctacctacctagggtttctcgccgcctcgcatcccctcctcctcctcggctggttcgcctcctactctacgcttgctgctgcaggtacaagcgataagcagtagcttcttcatcaaaggttttgtgcaaaattatgcgatcttcatgggctgattcagttgcgaacgccgaggaatcggcgcccgcgactggtgctgctcccacccctgttgctaatcaccagaactcacgccccactcgcagcgcatacgtgcctcctcacctccgtggccaggcaccaaccacaactgcagctccagctccagctccaggaccagctgctgtccagccctcagcttctgtacagccttctggttacgcagctattggtggtggctctcgctgggctggccctgccagtggtgatg

SEQ ID NO: 28006 - DNA, 530 bp, Oryza sativa
  Clone ID: uC-osflm202120e03b1
gttcacttccctcctctcctctctcctcttctctcttcccactctcacgtctcctctcttcccctccgcgaagcaacggggggcgaggcgaggcgagccgacggcagcggaggaggcggcggcagccgaaaccccaagaaaacgccgccccttgtttctttcttgccttgcacagcctcctcctcgatccgtcgcgcgttcgtcgggcgagatccctcctcctcctccggtttccccgcgtgcgagattgagccccgttttcggtggaagcccaaccagccgcggggttggggttgcgaggcgagagggcggctggcgcgaggctcttgatttgatctgcggctgctgctgcgggggtgctgtggggcgccatggcggcggcgggagggctggagcagtggcagaaggacgggttcttccaggcggccgaggaggtgcaggagtccgcggacttgatggaatctatttatagaacttggatgcgggaatgcgatagcggggctaatttagaggagctgagcgatttgcaa

SEQ ID NO: 28007 - DNA, 389 bp, Oryza sativa
  Clone ID: uC-osflm202120e05b1
ttatgatctgccggatgatcaaggacaatcgggggcacacccttcagatccgggttggtggtcctcacatgcggagcacaagctcggatcaatttctctgactaaacaggaaaggaattcgggttcgccaggatcttctcattgtggggaaggtgaccattcattatgggctgcccagacattatggtgtactgggtgtttatcaagtccaatacccaatgggttttattcaattattcctgataagaaactgaaggagcgttttgacaccatcccgtctccagatgatctttattcccttgaatagagggattcaaagctgagataattcttgtggatttagagaaggataaaaaactatctgctataaagcagctatgtgcagcatt

SEQ ID NO: 28008 - DNA, 530 bp, Oryza sativa
  Clone ID: uC-osflm202120e06b1
ttcagccgccgccatcgccatctctcggacggaaaccctagacgagcgaccatggccaccatgccaagcacttgcgcctcctcctcctccctcttcctcctcctccgcagggacaggaggagcagcaggagtgccagcctccccggacccgcccgccgtttgggggttgtgcgcgcctccgccaaggagatcgccttcgaccagggatcgcgatcctccctccaggccggcgtcgagaagctcgccgccgccgtcgccgtcaccctcggtcccagaggaagaaatgtcgtcttggatgagtttgggagccccaaagtggtcaatgacggagttaccattgctcgagctattgagctcgctgatccaatggagaatgccggtgctgctttgattcgtgaggttgccagcaagacaaatgactcagcaggtgatgggactacaaccgcatctgtcctggctcgtgagatcataaaattgggcctgctgagtgttacttcaggggcaaacccagtatctatcaaaaagggcat

SEQ ID NO: 28009 - DNA, 176 bp, Oryza sativa
  Clone ID: uC-osflm202120e09b1
tggttgcgacccatgtgaacctcccttcggggggcgtttaaaaaaacaaaggggtctcccaacacgtccaacccatgagcagccaagacgcgccttggcttagcaggggagggccggcgctctccatctgccgagcaaagcgggccagaggattacaagatcatccctactaccct

SEQ ID NO: 28010 - DNA, 457 bp, Oryza sativa
  Clone ID: uC-osflm202120e10b1
ttctttgctcgcttcctccccctctcccacgagggagggcgtctcacattggggggtacccccgcatgggccccaagagggagctcaagtttgccctggagtctttctgggatgggaagagcagcgctgaggatttggagaaggttgcgaccgacctcagggccagcatctggaagcaaatggctgacgctgggatcaagtacatccccagcaacaccttctcgtactatgatcaggttcttgacacggctgccatgcttggtgctgtcccagagcgctactcatggactggtggagagattgggttcagcacctacttctcgatggctaggggcaatgccactgtccctgccatggagatgaccaagtggtttgacaccaactaccactttatcgtccctgaacttggtcccaacaccaagttctcctactcttcccacaaggctgtgaatgaata

SEQ ID NO: 28011 - DNA, 394 bp, Oryza sativa
  Clone ID: uC-osflm202120f01b1
ctcctctccatttctgagctcttctagtttgagggagagagcagcagaagggagtagtgcaagatgccgatccgcaacatcgccgtggggagccaccaggaggtgtaccacccgggtgcactcaaggcggcgttggccgagttcatctccaccctcatcttcgtcttcgccggccagggctccggcatggccttcagcaagctgaccggcggcggagcgacgacccccgccgggctgatcgcggcggcggtggcccacgccttcgccctgttcgtggcggtgtccgtcggcgccaacatctccggcggccacgtgaacccggccgtgaccttcggcgccttcgtcggcggcaacatcaccctgttccgcggcctcctctactggatccgccagc

SEQ ID NO: 28012 - DNA, 509 bp, Oryza sativa
  Clone ID: uC-osflm202120f03b1
ttctaacaacgtcgccggcggtttgacgtcgagcggcgtacggcagaggcgacggtaaacccccacaccgccgccctccgccgccgtcgtcgttcatccgtgggagggggatacatatgcatgcaagcacgcatatcgactttcattgctcgtagttgcagagattaatctttgtggttacttcaatactgtatcaagtcttagtgaaggataattatcttgaagtatatcatacttcccagaagctagatacaaacacgagttgtcactaccatgggttcctgtgcttccaagtctgtcattgagcagagaccaccagcaaggcactataccaggaaaggaagaagagctcgtactaattcccgatccatcatgccagaggcgcccaagtcacggttgaacgattcaagaggacacatgactgacttctcaatgagtgagggtgtccattttgagacatcatcaaccatggaaatcagagcattccaaacattccacctcacacagat

SEQ ID NO: 28013 - DNA, 482 bp, Oryza sativa
  Clone ID: uC-osflm202120g02b1
cgttctccgccgtgtttttcgttcgttctgtggcttggtgttcttgaagagtgcctgaaattgagtcatggctgccaagctagctcgcctccacagtctccgcgaacgcctcggtgccaccttctcgtctcatcccaatgagttgattgcactcttctctaggtatgttaaccagggaaagggaatgctccagcgtcaccagctgcttgcggagttcgatgccttgatcgaagctgacaaagagaaatatgctccctttgaagacattctccgggctgctcaggaagccattgtgctgccgccctgggttgcactggccatcaggccaagggcctggtgtctgggactacattcgggtgaatgtaagtgagttggcagtggaagagctgagtgtttctgagtacttggcattcaaggaacagcttgttgatggacacaccaacagcaactttgttcttgaggctgattttgagcccttcaat

SEQ ID NO: 28014 - DNA, 403 bp, Oryza sativa
  Clone ID: uC-osflm202120g03b1
cttcctcctccccaaaccctatccggggggggcttcttactcgagagagggatcaacatccatggcgggcaagggcgagggtccggccatcggcatcgaccttggcacgacctactcgtgcgtgggcgtttggcagcacgaccgtgtggagatcatcgccaacgaccagggcaaccgcaccaccccctcctacgtgggctataccgactccgagaggctcatcggagactgctgccaagaaccaggtcgccatgaaccccatcaacaccgtcttcgatgccaagcgtctcattggcaggaggtttagcgatgcttctgttcacagtgacattaagctctggcccctcaaggtgatatgtggacctggtgacaagcctatgattggtgaccagtacaagggtga

SEQ ID NO: 28015 - DNA, 377 bp, Oryza sativa
  Clone ID: uC-osflm202120g04b1
gtcacgtgaggccccaaccgcaaaggaagcatgggggcccttagtagactggccggcggatccagaagcagactcgccttatcagatctccctggaccctgcacttctactagtcagccaatgcgattataaactccttgttaacagctgactggatttccctctattcgccagaatctcgctttatatggcgttggtgtttcggtggcttatatattagggaggagtttggatggccatcgactcttgaggagatctaccgatttaattaggccgacttgctgcttaatttgtccttaaaaaaattttagcacccttggttcttaattgattctttctacccgtttcgaattttgaacaacgttttttctaataca

SEQ ID NO: 28016 - DNA, 171 bp, Oryza sativa
  Clone ID: uC-osflm202120g11b1
aggcaccggcccgaaacacccgggccgacccacgcgcctgttcaaagaaagagagagagagagcggccgggggggaagacaaaggacgacagacacaacacgcggagaccgcggagcccgaacaggaacaaagagaacccgggcaacaaaaaggcaaacgacaggcaacag

SEQ ID NO: 28017 - DNA, 477 bp, Oryza sativa
  Clone ID: uC-osflm202120h09b1
ttcttgcgccaagcatttcgttggggatggtggcacggacaaggggatcaatgagggaaacaccatttgctcacttgaagatttggaagggatccatatcagaccttatcctgattgtatatctcaaggggtggcaactgtcatggcgtcctacacccaatggaacggggaaccattgcacgcaagccgctatttgctgacagatgttttaaagggcaagttaggcttcaagggttttgtggtgtcagattgggagggtattgacaggctctgtgagcccagaggttctgattatcgctattgcatcgcgcagtctgttaatgcaggaatggatatgattatgatacctttcagatttgagaagtttttggaagatcttgtgttcttggtagaggcaggggagataccaatgtcacggattgatgatgctgttgagcggattctgagggttaagttcatatccggagtgttcgagca

SEQ ID NO: 28018 - DNA, 340 bp, Oryza sativa
  Clone ID: uC-osflM202020a05b1
gtcttcttaagcgcgaaaccctagcaatggcggcagcggctgcagaagagtgcggcggcggaggtggctgcggtgtacaacccgagctacgtgccggactctgtgaagacgttggtggagcacatgtacaggcacgttagtgacaagaacgtgtacgagatccaccagatgtacgaggtgcggcttccagcggctctacgaccgtcttttacgcgacgcgccgtggacgagagacgaagtcgtcttgcctactgggaccgataccacgtattcctcctcctctaccgggagctgtggtaccggcatgcctacgcgcaggccttctcgtggtcgaatgggt

SEQ ID NO: 28019 - DNA, 255 bp, Oryza sativa
  Clone ID: uC-osflM202020a09b1
tgttgataactggtacctcatctgatgatcgacaatcattcaggcagtaccttgagcactcagcgcatactcaccaggaggacaccatccagatgagcgggagcattcataccatcaaggagaaaagatcaccttcctatgggcggttcaccgttaaggcggatgcatactacatgtactatgaagactgctaactttggcaacacgtcggagcttgaggacaagataaagacgggagaccatgttcaagcttgt

SEQ ID NO: 28020 - DNA, 462 bp, Oryza sativa
  Clone ID: uC-osflM202020a10b1
tctttttgtggcatcgtcttcggatgtgctcgacaccaccagcgggagccggggaggtagtgcgccacccgggagcagacagcttggaaatggatcgtctccaccgccggcgtatcgtcggctgaaaggagaagctcgaggtgcgttcagtttggaaacctctctgaagatccatgccatcagtttgcatcctggtgcttccattgaacaccaacttagttatgttttcgccaattgtggatgtaattccattttcaattaaagagttgcgagccagagtttctgatatcttcttgaacttgtctttaaaagctatcgacatatcgggcgtttcgatggtggtcattgatggactgaaatgtttcatggaccttaaatttccattacagacgacattcttagcggaagttcctctttgccaatccttgactggggttcttaaaatctgtggtcagtttagta

SEQ ID NO: 28021 - DNA, 397 bp, Oryza sativa
  Clone ID: uC-osflM202020a11b1
ttctttcccccacactccttcggcgcgcgcgtccgtcctcgatcgcgcgcgcgtcgacgagctaagccggcccgggaagcccaaggcccctctcccttcctcaagcgcgccggcgggcctcgtcggcgcgcgacattgagctcaacccccccgtcgtagtcgcacgttgagcgccaccaccaccggcagcgcgtcgcatcgtacgtactccacgcgcggcgccgtgctaggcaacctcctctgctgatcgcccgcctgctcatgagcgtgtgacctgctgtcgaatggtgcggaggcacctgctgcgcggacacagactggacaggttcctgccgatcaggagcctcatcatgtcgagcagctcttccttcttgacgtcgtattcggcgacgacgcc

SEQ ID NO: 28022 - DNA, 211 bp, Oryza sativa
  Clone ID: uC-osflM202020a12b1
tttgtttcggtggctaaccaacaggttgggtgcttgtgatgggtcaacttatcggctgcgggatagcacgggaccacaaacgggctgtgagtgtgccttgctaaagctcgcgagttatcttggtgagagcgggacattggactgaagctacgagtgtggactattgttgaggagtcatgaaaacctactgtctatcttgtcaaaggtgctc

SEQ ID NO: 28023 - DNA, 417 bp, Oryza sativa
  Clone ID: uC-osflM202020b01b1
gcttgttcttcctctcccccccggttgctgctgctgcagctgagcctccgttcttggaagcgagagagagggagggaggagggaggcaattggtgaggcttttggaggaggaaagggaagcttcgggccccatcatcctactcctactcttgctcactcaccacgctatcctatcaccaaactctctcttatctgcttccaagatcccaaccccttttcttctttttttttgttcgcacttgataggatcatttttttgacctttcaagctcaactccagcactccccccgtccgtttcagctgacacagagatctaggttagttggatttatagcttccgagtattttgagcgagttctcggctaaatgctccaatccgagataaatcaccaagtgccctttgcttgcctccttcc

SEQ ID NO: 28024 - DNA, 518 bp, Oryza sativa
  Clone ID: uC-osflM202020b03b1
gctcgcggttgcctgtgcgttcgtctcgcgatttctcctcctcctcctgggatcatggcgatgtggagggcggcggcggggcatcttctcggccgcgcgctcggctccagggccgcgcacacatcagcaggcagcaagaagatcgtgggtgtgttctacaagggcggcgagtacgccgacaagaatcccaacttcgtcggctgcgtggagggcgctctcggcatccgcgaatggcttgagtccaaggggcatcactacattgtcaccgacgacaaggaggggctaaacagcgagctggagaagcacattgaggatatgcatgtcttgatcaccacccctttccacccagcctatgttagcgcagaaaggatcaagaaggcaaagaacctcgagctgcttctcacagctgggattgggtcagatcatattgatctgccagcagctgctgcagcaggtttaactgtggcagaggttaccggaagaacactgtgtcggtggcagaagatgagctcatgcgc

SEQ ID NO: 28025 - DNA, 486 bp, Oryza sativa
  Clone ID: uC-osflM202020b08b1
ggcggccggcctggtggtcgatatgatccgccagaagaagatggccggccgcgcgctgctcctcgccggcccgcccgccaccggcaagacggccctcgctctcggcatctcccaggagctaggtagtaaggtccccttctgtcctatggtgggatcagaagtgtattcctcagaggtcaagaaaactgaggtgctgatggaaaatttccgtcgagctataggcttgcgtataaaagaaaataaagaggtttatgaaggagaggttactgaactttcgccagaagaagctgagagtacaacaagtggatatggaaaaagcattagccatgtaatcataggtctgaagactgtaaaagggactaagcagctgaagttagatcctacaatttacgatgctttaataaaggaaaaggtggcagtgggtgatggtatatacattgaagctaatagtggtgcagtgaaaagagttggtagatgtgattcttt

SEQ ID NO: 28026 - DNA, 500 bp, Oryza sativa
  unsure (1)..(500): unsure at all n locations
  Clone ID: uC-osflM202020b11b1
ccatgcgttttttttggcatgggcgcgagcgccgcgccaccgtgacactcacagccacgatgtgaggatgggctgagcgccaagtccagaggactggaagaaagcctaggagcctaacgaagcgcgatggctgttcgctatggtggcgacaatcgcggtactgacgtgcattgcttaccggaggatgcatgggatccatagggaagacaccttcgtggaggaccattcgacagcatgggcgtcgagcgacttggacacctcctcgccggacatcatgtctgcgctcgccaccacagttcgccgacgacagtcgccgcccagaccgctgcctcgtcgncgccttctcttgtgctcagcccgacggcttcacccaggatcctgtcactcaggtgtacacatcggcgcgcggcgcgaaaggaaatgagacgaancacggattctggggagtgttggcacagcaagccatagtgatgctcgacgaaaacggtggcacggatgat

SEQ ID NO: 28027 - DNA, 411 bp, Oryza sativa
  unsure (1)..(411): unsure at all n locations
  Clone ID: uC-osflM202020b12b1
tctggtacgcgtacttacccacaagttaggtgcatgccatggcaccattcatggcgtgcgcctcgccaccggtactcacgctggccctgctcgcgtcgtgcggtgcccttctcgtcaccttcatgctcccggcgcgtgcgactgcgggcagttgcttggacgtacgccacatggtgatgatggacaggttccgcgcttggcagggagctcacaaccggtcgtacccgagcgcagaagaggcgctgcagcggttcgatgtgtaccgccgcaacgcggagttcatcgacgccgtcaacctgcgcggngaccttactttaccagctcgccgagaacgagttcgcagacctcaccgaggaggagttcctggccacgtacaccgggtactacgccggcgatggccccgtggacgac

SEQ ID NO: 28028 - DNA, 496 bp, Oryza sativa
  Clone ID: uC-osflM202020c02b1
gccgttttgttcctcgccgtcctcgtctcggtggcgccgctcgccggcgcggcggacaacctccaggacgcgtgcaaccggacgctgttccccaaggtgtgcatccaggcgctgacgacgaacccggagagccggacggcgaacgcgcggcggctggcggagctgtcggtgtacgtggcggcggaggtgggcacggcggtggcggcgttcgcgcaccacgagctgaacggcgtgaaggaggacgccctgttcaagtgcgtggacagctgctccgacgacatcgaggaggcggtggcgcacctcagcgcgctcacccgcgagctcaccgacgccaagttcctcgaggtcaaggcctggctctccgccacgctcggcggctcctccacctgcgaggacacctgcaaggacgcccccatcagcgagatcaagaacgccgttcgtacaagagcctcgagttcgagaagctccttcgagtcacgctcgacctaatcaccga

SEQ ID NO: 28029 - DNA, 422 bp, Oryza sativa
  Clone ID: uC-osflM202020c03b1
ggcggttgcggcggcggctccggctctatccttggccgaggcggcgccggtgacagcagttctggcaccgtgtcccacgccctcgaggacgttccgccgccgcagctgggtcgcggctatctgccggcccgccctgaaatgccaccacagtcgtcccctgaccgccgtggtcgccgcggctgcggctgccgctgcggcgggggactcgacgtcggccggcgtattccacggcgagtgcttcgtcgtgggggataacatcgacaccgaccagatcatcccggccgagcacctgaccctggtcccgtccaagcccgacgagtaccgcaagctcggctcgttcgccttcgtcggcctccccaccgcggcctacccgacgccgttcgtcgcccccggcgaggagaccacccgctacgccgtcatca

SEQ ID NO: 28030 - DNA, 355 bp, Oryza sativa
  Clone ID: uC-osflM202020c04b1
gttatttttacatgcaacagagcaagtataaggaggctaacatggccaacgccaccatcagtcctcttgtatccccaccctattcatcaaggacacaatgaaagaggacaagaggggctcaaagcaaacgcaagtaaaagatcatcactattcacagcaaaccactgagattataaccttgttcgctccttctgcagtataataggccgatgtcttgtctgtctgctggatacctgtccgaataatatcactgaggctacggatgagacaccgatgcaatttcaaaacatccggcgaacaaatctgataacaactacatggacgggacacagtcaaggccggcaacacttgagac

SEQ ID NO: 28031 - DNA, 474 bp, Oryza sativa
  Clone ID: uC-osflM202020c06b1
gcttctcctcttcttttcttggcttgtgctctgttttaatttctttgcaatgatggggaggcagagctcgtcggcggcgaggagggtggtggtggtggtgtgcgcggcgatggtggtggcggcggcggcggcgcagaagtacaatgcggtgtacaacttcggggactcgatcacggacaccggcaacctgtgcaccaatggcaggccgtcgcagatcaccttcacccagcctccctacggcgagacctacttcggctcccctacctgccgctgctgcgacggccgcgtcgtcgtcgacttcctcgcgagtaagttcgggctgccgttcctgccgccgtcgaagtcgacgagcgccgacttcaagaagggagcgaacatggcgatcacccgagccaccgtcatggacgccaactttttccgctccctcggcctcttcgacaagatctggtacaacggccccatcagctttcaaat

SEQ ID NO: 28032 - DNA, 515 bp, Oryza sativa
  Clone ID: uC-osflM202020c07b1
gttcgctcatcgccatctctctcagctctcacagctcactgcatcaatggccgcggccaccatggcgctctcctccccggtgatggcccgcgcggcgccgtcgacctcctccgcgctcttcggcgaggcgcggatcaccatgcgcaagaccgccgcgaagcccaagccggcggcgtcgtcggggagcccgtggtacggcgccgaccgcgtcctctacctcggcccgctctccggcgagccgccgagctacctcaccggcgagttcccgggcgactacgggtgggacaccgcggggctctccgccgacccggagacgttcgccaagaaccgggagctggaggtgatccactcccggtgggcgatgctgggcgcgctcggctgcgtcttcccggagctcctcgcccggaacggcgtcaagttcggcgaggccgtgtggttcaaggcgggctcgcaaatcttcagcgagggcgggctcgactacctcggcaacccgagcctgatccacgcgcagagca

SEQ ID NO: 28033 - DNA, 525 bp, Oryza sativa
  Clone ID: uC-osflM202020c11b1
tgtggatactaaaacgtgtacttgaggaagtggaaaaggtaatgcaggaattcagaggcatgctttacaagtcaatggaggatcctcatcttgacctcgctgagcttgagaacattgttcggctactgttggagttggaacctgagaccgatccagtgtggcattatcttaacattcagaatagcaggatccatggattgtttgaaaaatgcaccttagatcatgaagcacgaatggaggttctacagaataaaattcgtgagaaaatactatctgatgcaaaatggaggcaattgcaacaagattcaaataaatcattggaagttgattctgctaccggtgactcttttcaagatgatcaactgtcaacaaatattatggctgatgaagctgatagcttaagggcagcctacattcgtaggttaactgctgtacttatccagcatgttcctgcattctggagattagctttatctgtcttcagtggaaaatttgcaaggcagcttgcgggaattactttctgat

SEQ ID NO: 28034 - DNA, 507 bp, Oryza sativa
  Clone ID: uC-osflM202020d03b1
cttatatttcctctctctttctgttaattgagtaaattggtgttgctgcttcttcctcctccgatcaatcgatcatctcccatcggcggtggcagcagacccgatctttctgttaattcagaagatggaggggtacgacgagcgtgagttctggcagttcagcgaccagctccgcctccacaacttctccagcctctccatcgccgactccatctggtcctccccctcgcctgccgccgtcgatcatagcagcaacaagctcgccctcgccaacaacagcaacaacaacgccaccgccaagacctacttcaacaagtccgtcggcaggccggccaacaacaacttcaacttcaactacaacagcaacagcgtcgtcgtagatgcgttcaacgggaagaagaaggccgctgtcgacgctcctgctggaggaggaggaggaggcaggaacaggaacatgaagaacagcagcagcaacgacaacaagatgagcagcaggttgaagaagag

SEQ ID NO: 28035 - DNA, 399 bp, Oryza sativa
  Clone ID: uC-osflM202020d06b1
aggcgttctggtttcgaactgaatggacagctgacaccattggactccatcaagaacgccgtgtcttcctcgggtctcttcctcgccgcgctgctgctgctctcgtgcagctccatgagcagcgcggcacggtggctcgaggaggagtacccgccgcaccccgccgtgccggagctgcccaagcatgaggagccgccgcaccccgtcgtgccggagttgcccaagcacgaagagccgccgcaccccgccgtagtgccggagttgcccaagcacgaggagccgccacaccccgtcgtgccggagctgccaaagccggaggtgccacacgccgccgtgccggagttgcccaaacctgatctgtcgccacaccccgccgtgcccgagctttccaagcacgag

SEQ ID NO: 28036 - DNA, 485 bp, Oryza sativa
  Clone ID: uC-osflM202020d08b1
gttcaccctttgattgacccgcacccgcatccctttcccgcaaggccgcaacaccgtccgtcgccgcctccgcctcgctccgatccccattccgcggtcgccgcccgagtcaaaaagagggggaagcttctcccaccatagtcctcctcctcctcctcctactcccatcaacgactagtcgcggcgaccaagagccaaaccctacgcctgctcccctccccctccacctcgtcctccccgcgagcggcggcggccatggattcctcctccggcggcgcgggcggcggcggcggcgcgcagatcaaggggatggggacgcacgggggccgctacgtgctgtacaacgtgtacgggaacttcttcgaggtctccttcaagtacgcccctcccattcgacccatcggtcggggcgcctacggcattgtctgcgcggctgttaactcggagaacggcgaggaagttgccatcaagaagattggcaatgc

SEQ ID NO: 28037 - DNA, 515 bp, Oryza sativa
  Clone ID: uC-osflM202020d11b1
tctgtcgcactcaatggacaatcgtaaccatgggcggtgctcgttgccgcggctcgccgttggcgccgccgtcctcctcctcgccgtctccctagcggccacgccggcggcgagccatgccgggcacgatgacaccggcttgcacagcaactacctcgtcatcgtgcgcaagccgtacgcgtacgacacgaacctgtacaagaacgtgtcgagctggcacgcgtcgctggtggcgtcggtgtgcgacatggcgaaggaggcgctggagagggacccctcctccgtgtcccggctcatctactcctaccgcaacgtcgtcaatggcttcgccgcccgcctgacgccggaggaggtggaggagatgtccaagaacgactggttcatccgcgccgacccggagaagacgtaccagcttcagaccacccacacgccgtagctgctcggcctaatgggcggggccccgcgcggctgcgtgtgaacaccagcaacatgggcgagggcattaatatcgggat

SEQ ID NO: 28038 - DNA, 536 bp, Oryza sativa
  Clone ID: uC-osflM202020e05b1
ccttcttccacgagtaatctaacagaataaatcatgggaccagcccacggccacctcgtcctcctcgtcgccgcggtggcgttgctgtcagctggcttcctcccgcacgctgtggcgaagaagggcggcgccgtgccaccggcggttgctgacatatgctctcgcactccattcccagacacgtgcaagagcaccgccgggcggcacgcgtccaagtacccggtgatcgacgtcgtggctgtgctcaacatgcaggtggacgcgttctccaagcgcacggcgcatgcgagggagcgcgtgaccaaggtgtcccgcggcgcacagcctcagcagacgcaggcgctgagcttctgcgacaccatgtacatgaacacccaggacaccatcggcgccgcggagcgggcgatcacctttagagacaaggctacggcgaagatcatgctgcagctcgctgtgcaggactttgagtcgtgccgatccgtccttcaagcagtccgggatcaacaaccccttggagaagatcgacgtagagctta

SEQ ID NO: 28039 - DNA, 510 bp, Oryza sativa
  Clone ID: uC-osflM202020e09b1
tttttacctcctccacctcctcctcctccccccgatcggatcggcccggctcctcctcctccgccgccgccaccgccgccgcagataggagaagatggccgcacttgataccttcctctttacctcggagtctgtgaacgagggccaccctgacaagctctgcgaccaagtctcagatgctgtgcttgatgcctgcctcgccgaggaccctgacagcaaggtcgcttgtgagacctgcaccaagacaaacatggtcatggtctttggtgagatcaccaccaaggctaacgttgactatgagaagattgtcagggagacatgccgtaacatcggttttgtgtcagctgatgtcggtctcgatgctgaccactgcaaggtgcttgtgaacatcgagcagcagtcccctgacattgcacagggtgtgcacggtcacttcaccaagcgccctgaggagattggtgctggcgaccagggacacatgtttggatatgcaactgatgagacccctga

SEQ ID NO: 28040 - DNA, 489 bp, Oryza sativa
  Clone ID: uC-osflM202020e11b1
tattgaaggagagtctcctacgaagcagcaaatactctaatcgacgatgattcaaggacatgcacgggtactaaagaaactgaaagtattgttcagttgatggcttgtgtggagcaaactaacccatgcagttcatctaggatcactgtgggttacagtgaagtctgccaaggtgatatcgagaagatggacaaagacattgtttatgctaatgaacaggaagagtctggtgatctctgctcttctaaagtattatcaagtagcaaagctgaagataactatgaacatgagacttgtcagtttcatgctaacatgaacaacccagtaaaagcagattctcctgttcgagaaaatgaaactgcagaagttgtcttgaaattgaacaaggagatgctggggcaaaactctgttgataatgaatctagattctcctctgctgagatttgtatggaaggaggattatcaacaataaaagatcaactatctggg

SEQ ID NO: 28041 - DNA, 501 bp, Oryza sativa
  Clone ID: uC-osflM202020e12b1
tttcgtttcttgctccatccatctatccatccaaggagtgtggaacgccacacgtattttttttttatctatgctaatctgatcattagcagaggagagttttagcagtaggattggattaaattggagtagtttcatagtttgtgtgtagtgatcttaattagctttgattagacagacagtacagtagagtagaggatgttggctgtgttcagcggcgcggtggtggaggtgccggcggagctggtggccgccggcagccggacgccgtcgcccaagacgcgggcgttggagctggtcggccgcttcctcgtcgccgccgagccggccgtgtccctgcagctcggcgaccttggccaccttgcctactcccacgccaaccaatcccttcttccgccaagatcctttgcattaaaagatgacattttctgcctgtttgagggagtcctggacaatctgggcaggctgagccagcagtatggcctgtccaagggcgccaat

SEQ ID NO: 28042 - DNA, 506 bp, Oryza sativa
  Clone ID: uC-osflM202020f06b1
agttcattgcaattgaaggaaggaaatgcagaaacacctaaaagtggtggaggcgatcttcccaaaaaaaggggtcgtccgaaaggttccagcaatggtacacccaaaagtaacatctcggcaacttcaagcaaatcaaaggggaaagctgcaaggaaggatgacaatgagacacctaaggttggcagtgaccttaagaaggaagctgaagaaggatccgaagacaaagccactaagtcaactgagaagacaaaggatgatttgcctgaggatggtagcaacaagagtgccagtaaaccaaaggaggctagcagcggaggcaaggatttgaagggtgagagcaaaccaagtgaaggaagagccaagccaggtcgaaagccaaaggttgccggtgctgcggtggctggtgaggaatctaaggccaatgtctcagctgagaaagagaagcagaaggaagcagaaggcgaggcagcagctgaagtggagcaagggggatctgctggtgg

SEQ ID NO: 28043 - DNA, 480 bp, Oryza sativa
  Clone ID: uC-osflM202020f09b1
tctctgatcaagctctctaagcatcgatcacttggttcttgctcatcatctttcgcttgctcgtcagctaggaattcgtagtcttgagccgaggttgggtgattcgatggacatgagcgagagcagtgagaaaggaatggagagcaatgcgtcgtctggccctggcaatggcatcccggtggagtggcagagccaattcagcagcgccttcgcgtgccagccgtcggtggcggcgcagcaccagcagcacgccatgatggactccttcgcggcggcgtccgccggcctgtgggcgtcctccgacgtcgtcagcgccatgtcatcggccgcgccgccgcggggcgcggggttcttggcgccggtgcccgggttcctccagcaggggctcggccatttcccggtggactccggcttcatcgagcgcgcagcgcggtcgacgtgctttggcggcgggatgatggccggcggcccataccgcgc

SEQ ID NO: 28044 - DNA, 419 bp, Oryza sativa
  Clone ID: uC-osflM202020g04b1
cgttctttcagagcatccattgcctcgattttctattccaaattcccccacgcgaagaacagccagcgccctcctcctcctcctccttcgccttcctcctggtttcttgccatctttccagggaaggaggaaccgcggcccggccgcattcttggacaagaattgttggcataaaggaacattttgttgatgttctaatggagtcaaaaggtggcaaaaagaagtctagcagtagtagttccatgtacgaagctcccctaggctacaagattgaggacgttcgcccagccggaggaatcaagaagttccagtcttgctgcttactccaactgcgctcgcaagccatcctggatatcctttacatgcctttccccgtagagtaggaatttcctgcattttttcctttgtttggtgcaata

SEQ ID NO: 28045 - DNA, 535 bp, Oryza sativa
  unsure (1)..(535): unsure at all n locations
  Clone ID: uC-osflM202020g05b1
cgctcttgtagctctcgacccccgcatctcatccctcctctcgcttagttcagatcgaaatcgcaaatggcgaagattaagatcgggatcaatgggttcgggaggatcgggaggctcgtggccagggtggccctgcagagcgacgacgtcgagctcgtcgccgtcaacgaccccttcatcaccaccgactacatgacatacatgttcaagtatgacactgtgcacggccagtggaagcatcatgaggttaaggtgaaggactccaagacccttctcttcggtgagaaggaggtcaccgtgttcggctgcaggaaccctgaggagatcccatggggtgagactggcgctgagtttgttgtggagtccactggtgttttcactgacaaggacaaggccgntgctcacctgaagggtggtgctaagaaggccgtcatctctgctcccagcatggatgcccccatgtctgttgttggtgtcaatgagaaggagtacaagcctgacatcgacattgtgtccaatgctagcttgaccacca

SEQ ID NO: 28046 - DNA, 454 bp, Oryza sativa
  Clone ID: uC-osflM202020g08b1
tagcttggtgagctgcagagatggccccctccgtgatggcgtcgtcggccaccaccgtcgctcccttccaggggctcaagtccaccgccggcatgcccgtcgcccgccgctccggcaactccagcttcggcaacgtcagcaatggcggcaggatcaggtgcatgcaggtgtggccgattgagggcatcaagaagttcgagaccctctcctacctgccaccgctcaccgtggaggacctcctgaagcagatcgagtacctgctccgttccaagtgggtgccctgccttgagttcagcaaggtcggatttgtctaccgtgagaaccacaggtcccctggatactaccacgggaggtactgggccatgtggaagctgcccatgttcgggtgcaccgacgccacccaggtgctcaaggagctcgaggaggccaagaaggcggaccctgatgcattcgt

SEQ ID NO: 28047 - DNA, 512 bp, Oryza sativa
  Clone ID: uC-osflM202020g10b1
tatttcgccctccccggccgtccccgtcgatatcacccgagccctaactcccgactccttcctcgccgcgccgccatggcgccccctcggcccgcttcaccacagagcttgccgcccgtggctgccacccgatcccgcggtcgcccgtacgagggctggactctcaaggagctgattggggaggtgcgccgtctacgacgagccgcctcctcggcgccgccccggccggcgggcgtcctcgacctcgaccagggggacgcgcgcgcctcggacacggtcgccccctcgccgccctcaccgtgtgaatcccaggagcaaccccaccatcttggcacgaggctggaggatgtgcttattttcctacgggatgtcgccttccaggtcatcaagaacggtcgacaagacgaggtgcgttaaatcgtgaatgtagcacacgatattgtggttaacctctgcaatgccattagagcgcccgaagccgtcaaaatagtggctgctgctgagaatgtgaa

SEQ ID NO: 28048 - DNA, 395 bp, Oryza sativa
  Clone ID: uC-osflM202020g11b1
ttctcgcgtccggccggccgcccacggccctcgcgcgcatgggcggcttcgctccccaccccgtcgtcgtccccaccgccgccatggacgggaccagcagcgttagcgcgcggacggcctcgtctctgtcgtcgtcgtcgtcgtcgctcgacgacggcggccgtggccggcctccgccggccgggtcgacgctggagctgccgtcgcggaagcactaccggtacccttcccggtcggcgaggctgatccagaagctgcgccgctcgctcccgctgctgacgctggcgccgaggtgcggccggatgcaggtcggctcggcgagcgaggtcgcccgcggcggcggcttccggcggaggaggaggaggagcagtcgactcgcacactgatgtcgcacg

SEQ ID NO: 28049 - DNA, 469 bp, Oryza sativa
  Clone ID: uC-osflM202020g12b1
ttttctactgctataaggagcgcgccgtgcaccgcctctcacaatgtcgaccgccgccgccgccgccgctgcccagagctggtgcttcgccactgtcaccccgcgctcccgcgccacagtcgtcgccagcctcgcctccccatcaccgtcctcctcctcctcctcctccaacagcagcaacctcccggccccctttcgcccccgcctcatccggaacacccccgtcttcgccgcccccgtcgcccccgccgtgatggacgccgccgtcgaccgtctcaaggatgggttcgccaagttcaagaccgagttttatgacaagaagccggagctcttcgagccgctcaagggcggccaggcacccaaggacatggtgttctcgtgcgccgactctcgcgtgtgcccgtcggtgaccatgggcctggagcccggcgaggcctttaccgttccgaacattggcaacatggtccca

SEQ ID NO: 28050 - DNA, 344 bp, Oryza sativa
  Clone ID: uC-osflM202020h01b1
cgttgctccaagacgagtcgcggctgaacaggggaggggaggtgacgagcagagcagagcaggggaggggaggggatcctggctgactattcaatatccatggcgcggtgcatctccttcctgtctacctcctcgtccttgccatgtgccacaaaaccgccctgctgatcagtgttctctgtcttaccctcgtctacgtactctcatcaatgccgaggtacgaaaacgagatcgcgggtcaattagggcgctgcgggaggattggagggagagaaccaaggccatgcctcatggtggggtctaccccaccaaggaccactgctgccaatgagggctttgtgaca

SEQ ID NO: 28051 - DNA, 477 bp, Oryza sativa
  Clone ID: uC-osflM202020h05b1
gcgttcttttccagccacacccacacgcgcgcgccggtcagcctacgcttttcccctccccccctcccccgcaacgagccgcggcggaaggaaggatggggagccttggcggggaggagggggcgaggccggctgcggcggcggagggggcgcggaggccgaggttcctgtgcctgcacgggttccggacgagcggggagatcatgcggaagcaggtggtggggaagtggcccgccgacgtcacggcgcgccttgacctcgtcttcgccgacgcgccgttccccgccgaggggaagtccgacgtcgagggcatctttgacccgccctactacgagtggtttcagttctacaagaattttacagagtacaggaatttcgaccaatgcctgaactacatcgaggaattgatgattaaagaaaggccttttgatggactgatgggtttctctcagggctcgattttttctggcgcccttc

SEQ ID NO: 28052 - DNA, 453 bp, Oryza sativa
  Clone ID: uC-osflM202020h07b1
gttttctcatcgccatctctctcagctctcacagctcactgcatcaatggccgcggccaccatggcgctctcctccccggtgatggcccgcgcggcgccgtcgacctcctccgcgctcttcggcgaggcgcggatcaccatgcgcaagaccgccgcgaagcccaagccggcggcgtcgtcggggagcccgtggtacggcgccgaccgcgtcctctacctcggcccgctctccggcgagccgccgagctacctcaccggcgagttcccgggcgactacgggtgggacaccgcggggctctccgccgacccggagacgttcgccaagaaccgggagctggaggggatccactcccggtgggcgatgctgggcgcgctcggctgcgtcttccccgagcttctcgccccggacggcgttaagttcgggcaggccgtgtggttaaggcgggcttccaa

SEQ ID NO: 28053 - DNA, 415 bp, Oryza sativa
  Clone ID: uC-osflM202020h09b1
ttatttctcgaaaagagatgatcttttgtacaacaattcatctctgaaaaatgcagatggccgacctatctgcccttcaacaggaaaaccatgatcctgcggagatcagaaagacatcaatggtagtgaatcttcattattgacacctacgaaaagctactcaccttgttcatacaatgagattgatggaaatgcgtacagtgagaaagaactcattttccccccagaacttcagttgagaaaagttacgtcacttaaattgaatgggtttaatgggattcggtggtatagacctcttaaactaaagcaagtattgcatttgaaagcatgctacccaaatgccaaactaatcattggtaactctgaagtaggagttgaaacaaagtttaagaatgcccagtttaaggtcttgatc

SEQ ID NO: 28054 - DNA, 495 bp, Oryza sativa
  Clone ID: uC-osflM202020h10b1
cctcccttctttgacttcccctttcctcctccgtgcgcacgctctcctgattcatacagcatttcgtcggggatgacgtcgacggcgtactcccggccgtcgaagctgccgggcggcggcaacggcagcgaccgcaggctgccgccgcggctgatgaggggcctcaccaccaagatcgagcccaagaagctcttcgcaatctactcccctgtgttcgccagcacagccaacacatccgctctgatgcagaactcgccgccatcctcgccggagacgggacccattccgccccaagaaactgcagctggcgccggaaacaatgacagcactgtggaccccgtcgatctccctgaggacaagtcgctggtggaggcgcagcctcaagaacccgggttcccctcggcggaatctcaggagcctgtgttgccggcggcgctctcgaagaaggaggatgatgccgaaagggcggcggcggcggcggcctctgagataaag

SEQ ID NO: 28055 - DNA, 502 bp, Oryza sativa
  Clone ID: uC-osflM202035a03b1
acgttatttacgaagccctggtgggcaggctgggggcgggggtgttccggctcgaggctgggcaatggcgccgccggtgccacggcgagaggcggctacggcggccaggtcgaccacgcgtcggcgcatgacccagcgatcctggcgttcgacgagctcgtcgccggcgccgtcgggagggtgtcggcggcggccggcaagatcggggcggaggtcgcggaggtgaccagggtgctggagaaggcgttcttggttgggaaggaccttcttgtcaggaccaagcaaactcagaagccaaccgtggattccatcgcagtattcatggggcctctgaatgaaacaatattggaggcaaattcattggcagaggggacaagatcgagccatggcaaccatttgaaagcagccgccggtagcctggccgctctggcgtggattgggtacaccggcaaaggttgcggtatgccccttcctattgctcatgtaaaagagagttggcaaa

SEQ ID NO: 28056 - DNA, 154 bp, Oryza sativa
  Clone ID: uC-osflM202035a05b1
atgcggaatttcaaccgaacgtgattatctctctgtaacgagtgcctgaaattcacagtgcactggagttgaaaattcatgtacaaacaacgtttgcttcggatcaccaccgtatcttcgttgaatgatactaccactatacagccagcttatt

SEQ ID NO: 28057 - DNA, 438 bp, Oryza sativa
  Clone ID: uC-osflM202035a11b1
tttgtactgcacgaagctcactagactttcaggctgggttctgctcactgagcaggggggtgcatacatcgggaactatcggaaactaataaagacactgactgttgccttcgctggagatactgacatgtctctccaatctgtgtttgaaggatgcactagggtgcaaaagcttgaggtcacagatagtccttttagtgataagggattgctctctggcctgagctatttttacaacatgaggttcttatggatgaattcatgcaggctaaccatgaggggttgtagagatgtagctcagcaaatgcctgacttggtggttgaagtgatgaaggatcatcttgatgatgaaggggagatggagactgttgataaactgtacttgtatcgatcactggcaggagcaaggaatgatgcaccttcatttgtcaacatctt

SEQ ID NO: 28058 - DNA, 364 bp, Oryza sativa
  Clone ID: uC-osflM202035a12b1
ccggcccggaattactttctcgttccactcatccggtctaaattttaagattgactaccacgtgtccgggggagggattatttaaccggcggtgaggctcaataacgaccacctattcccgcgggtgcggattccgcgagcttcacagatgactacgccaagttcgagcttccggacaccgacgccagcatggccaacgccctccgcctcgtcatgatcgccgaggtccccaccgtctccatcgacctcatccatattcgagtatatgttcttcctcctcaactacgagttcatcgcacatcgactcggcctcatccccctcacctacccacacggcatggccatgcgcttctcccgctactgc

SEQ ID NO: 28059 - DNA, 511 bp, Oryza sativa
  Clone ID: uC-osflM202035b05b1
gcttttgagttccagccatggcagcagacaagggagtgaaggtgttcggcatgtgggcgagccccatggcgatccgtgtggagtgggcgctccggctcaagggcgtcgactacgagtacgtcgacgaggacctcgccaacaagagcgaggcgctgctccggcacaacccggtgaccaagaaggtgcccgtgctggtccacgacggcaagcctctcgccgagtccaccgtcatcgtcgagtacatcgacgaggcctggaagcacggctaccccatcatgccctccgaccccttcgaccgtgctcaggcgaggttctgggccaggttcgctgaagagaagtgcaacgctgctctgtacccgatcttcatgacgaccggagaggagcagagaaagctggtgcacgaggcccaacagtgcctgaagacgctggagacggccctggaggggaaagaagttcttcggcggcgacgccttcggctaccttgacatcgtcaccgggtggttcgcctact

SEQ ID NO: 28060 - DNA, 459 bp, Oryza sativa
  Clone ID: uC-osflM202035b09b1
ttggtgggtcgaagagttcatgcattgcataaagtcaaacggatacatacataacaattcctacataaataaccgtgcaattttgaggcagggtatctagaacctagaggtggacaagttagttgttctggataaacgggagaacaatcgctttcagtgccagatcgggctgcaagatcaaatgagcgaccgaaactgaatgctaaagctgtgatgaactgttgttgagcatgctaagatgaccagagattttctccttgcacgccggacagatgaagccaagtgaatcagcctgctgatcggcaacggtgccaaaatgctggaactgagtgttgcaccatacacacatggacgactggagcacacacccgccaaccatctttgacatggacatgtcccatcctaactggacaggagggcagctgccaatgtgcggcgcataacctaacatcagtgttg

SEQ ID NO: 28061 - DNA, 504 bp, Oryza sativa
  unsure (1)..(504): unsure at all n locations
  Clone ID: uC-osflM202035b10b1
cacacaccttggatcgcggcctcacgcgcgtgaggggccgcaacgcaacgtgcgaccccgacctctcctcctccacctcggcttccccccaaattccatctcctcgcctcggcgaatccgattccgagcactcacaaccggatcggagcgagttccatggcctgaatctcagggggggtgactggccgaggagcgggctctctctctcactgccttaggctgaaatctgctataactttggaggtactaaaacgagtctgagatgggtgtgattagtacggtgcttggtttctctgggtttggctttggattctccgctggtattgtcatcggatactacttcttcatctacttccagccaactgatgtcaaggacgtcaaagttcgcccacttgtcgaatatgactcaatatcgttggacggtatccttcctgaaattcctttgtgggtcaagaatcctgactatgatagaattgatggncttgatagatttttggagatgat

SEQ ID NO: 28062 - DNA, 467 bp, Oryza sativa
  Clone ID: uC-osflM202035c06b1
tttttgttaaaccaatacacaaattttattgccagttcccggactgcagtaagggggctcaaggcagcacattgtactgcaaagggcatggcggtggcaagcggtgtatctttgacggctgcagcaaaggtgctgaggggagcacgcctctgtgcaaagcacacggtggcgggaagcgatgcatgttcgaaggtggcggcgtctgcccaaagagcgtccatggtggcactgagtactgcgtggcgcacggaggagggaagcgctgttcggtggctggctgcaccaagagtgcccgtggccgcacggactgttgcgtgaagcacggtggtggcaagaggtgcaaggtcgacaactgcagcaagagcgcccaggggagcacggacttctgcaaagcccacggcggcggcaagcggtgcacttggggaacgggctgcgagaagttcgccccgcgcaggagcgggctgtgc

SEQ ID NO: 28063 - DNA, 499 bp, Oryza sativa
  Clone ID: uC-osflM202035c07b1
tgcttagctaccggcggcgcagccacacagcagcagcaggtgaggaggagaggagacccgccgccgccgccgccatgggtatctcgcgtgattccatgcacaagcgccgcgccacgggcggcaagcagaaggcatggcgcaaaaagcgaaagtatgagctcggaaggcagcctgccaacaccaagctgtcaagcaacaagacagtgaggagggtgcgtgtccgtggaggtaatgtgaaatggagggccctccgtttggatactggcaactactcatggggaagtgaggccgtgacccgcaagacccgtatccttgatgtggtctacaatgcatccaacaatgagcttgtcaggactcagacccttgtaaagagtgctattgtgcaagttgatgctgcccccttaagcagtggtacctcactcactatggagtggatattggtagaaagaagaaggctcctgcagccaagaaggatgctgaggggcaggatgctgaagct

SEQ ID NO: 28064 - DNA, 492 bp, Oryza sativa
  Clone ID: uC-osflM202035c09b1
agatacgagagctagctagccagaggctggaagaagattctgcacccatagatcgtctaccatggccacaaacccaggactcttcacggagtggccatggaagaagcttggcagcttcaagtacgtgttgctggcgccgtgggtagcgcacgggtggtatgaggtggcgaccaaggggtggcgggaggtggatctcgggtacatcgccatcctcccgtcgttgctgctgcggatgctgcacaaccaagcctggatcaccatctcccgcctccaaaacgcccgtggccgccgccagattgttcgccgcggcattcgagttcgaccaggttgaccgcgagaggaactgggacgaccagatcatcctgagcggtatcctactatacctcggcgcactgtacgtaccgggcgggcaacacttaccgctgtggaggacggatggcgcggggctgatcgccttgctgcatgcggggccagtggagttcctctactact

SEQ ID NO: 28065 - DNA, 501 bp, Oryza sativa
  Clone ID: uC-osflM202035c10b1
tccttaattccaaagagccaaaaaccctagcgcgcggcatcccccgccgccgcctgcggctccgccgcgggtaaatccctcctcgtcgtctcctccgctcctcgtgccatctcgcggctgaacaggggaggggatcctggttgctgttactgccatattttcacatggattcgactaagcaagatttccaaccccggacattctccatcaaactgtggccaccaagtgaaagcactcgtctcatgcttgtggagaggatgaccaagaacctttccacagagtccatattttctcgcaagtacggccttttgggcaaggaagaggctcatgataatgctaaaaggatcgaagaggtatgctttgcctctgcagacgagcatttcaaggaggagcctgatggggatgggagttctgctgtccagctgtacgcaaaggaaactagcaagttgatgctggaagttctgaaaagagggccaaggaccactgtggaaccagagtacc

SEQ ID NO: 28066 - DNA, 494 bp, Oryza sativa
  Clone ID: uC-osflM202035d07b1
gtgctcgctcgccggcggcggcaggcaccggagggggctcgccgcgctgtcctgcgtctgcccggtggtgtcctggatgcgtcccagggccgacggcggcagcggcggcaagtcggccggccccgtgctcgatgattcgatcatgtcgtggtatctgtccatggagagtggcaagttctggttcccggctcaggtctacaaccgtgagcatgggcatgttggattcatgatgtcatgctacgatgcagagctcagctatgatttccacagtgataccttccgtgcaaggtatccaccacacggacgacggaccgtagtcttggaggacggggtacactgggagtagggtcagggcacctccagtagacactcacgcacatgatctccatgcctctgactgcttacacgaactccggccaggcgataacattgagatccaatggagaaggaacaaggaattcccctaggctggtggtatggagttgtttggccac

SEQ ID NO: 28067 - DNA, 434 bp, Oryza sativa
  Clone ID: uC-osflM202035d09b1
gagaatgggcggttccataatgaaacaacagtgcggtactttctcagttattagtacagatatcctcaaacaggacgcatatacgcgagtgacactcacacatgaaacctgggaaccagaaaggggtaataactagcagggactacagcaaatgggcctgttatatccatactcacacccatacttgaccagcaacttaacatcctaacaaacgaacgaattaaagaagccaattcctatctgctgctgacgccgatgttcctttctatcataacaagtcacccgcaaggaagttgccaggcagggcaatattgtggcccggcttgaatgctggtagacctatgtatgggcaagtaccacatcgaaatgcatcgtccaacccacaattgccacaagctgactgagggatattgagtctgtctgatgtgagattt

SEQ ID NO: 28068 - DNA, 497 bp, Oryza sativa
  unsure (1)..(497): unsure at all n locations
  Clone ID: uC-osflM202035d10b1
cgttaattcagagctgtaaaagaagaagaaaaattcagagttcaaaagttcagtgagaattatcttgcaggtgctgcattatgggggacgagaagcatcctagctcgaagctttcagagattctccggccaggaaagctgctgcaccggcggcggcggctcgtctccgagttcgccgacgtagggcgggaggacgcgttgcacgagagcgacacggtcaagtacagggtgttcgccgncacgtggaacgtcgccggcgtggcgccgccggacgacctggacctcggcgactggctggacgccaaggccgactcctacgacatctacgttcttgggttgcaggagaatcgtgccgctgaacgcgaggaacgtgcttggcccgacgaggagctcggcctcatgaaatggaactcgctcatcggcgacgcgctgaacagttcactaccggaagaagaagacgagacgacgacgaccacggcgacgacgacgaaggggcgc

SEQ ID NO: 28069 - DNA, 474 bp, Oryza sativa
  unsure (1)..(474): unsure at all n locations
  Clone ID: uC-osflM202035d12b1
tttatttcgttgatgagcctctaccttctcagtgtcagtttagagcattccttggggcaagatccatcatgctcgacgacgtcgacgacgagcctttcgccgatggcatctcgagcccgatagcgcagcacatctatgacttctgcgacgacggcaacggcggcgacctcttcgcggcggtgaacgcggcggcggcggcagggtcggacatgttcacggcctcctcggaggacgcgtccgcctcgtcgtcgtcgacggccaccgcgccctcgngggcgggcggcgacaccctgtcgccgccgctgccgtcgctggactccacgctctcggctctcctcgagcaagacgagccgcccggcgccgacggcgagctcctcctccccatcgacgactacgcgttctccgccgtcgacgagacgcagccaccaccaccaccggagcatcaacagcagcagcaattcacccagatgcctc

SEQ ID NO: 28070 - DNA, 435 bp, Oryza sativa
  Clone ID: uC-osflM202035e01b1
gagtacatcatggctttgctcctcctgtgaacaggagcgattcctcggatggtgaggctggttctagacctggagatcggccatatgggaggggccaggagggctctaccccatttccctggatcccagctgacggtgaatctcactggtggggcaccttcaatcccatgcagaaccatacacatggaggctttactcgaagacccaccggtgagcgaatgccgcagagccacccagatagtggatatcattccatgcatcctcagaggatgccgccattcttgtaaaggatatcttcctcgatgtttgtgtatatctcaaaattagacggaattattacgctccgagagaaaacgatgaatcacatgctattgtttccaaggaactaaatgatgctgcttctgttggcggaaaaaaaaaaaaatagggcggccg

SEQ ID NO: 28071 - DNA, 498 bp, Oryza sativa
  Clone ID: uC-osflM202035e05b1
cactctttcacaacacaaccctccccaaaacctccgggagagagcaagatgttcgggttcgggcaccacggccaccatggccaagaccagccgccccagcaccacggcggcggcggcggcggcgcgcaccagcccaccttcaagatcttctgccgcgccgacgaggggtactgcgtcgccgtgcgcgaggggaacgtcgtcctcgccccgaccaacccgcgcgacgagcaccagcactggtacaaggacatgcgcttcagcgccaagatcaaggacgaggagggcaacccggcgttcgcgctcgtcaacaaggccaccggcctcgccatcaagcactccctcggccagggccacccggtgaagctggcgccgttcaacccggagtacccggacgagtcggtgctgtggacggagagcggcgacgtgggcaagagcttccgctgcatccgcatgctgaacaacatccgcctcaacttcgacgcgttccacggcgacaag

SEQ ID NO: 28072 - DNA, 248 bp, Oryza sativa
  Clone ID: uC-osflM202035e09b1
ttaattttcttacccgcgttccaagagactagagtggggccagattaactatatggggccacatttgcaaggaactacatattataatgctttttgtgtgcactcatatcctatcgatgttcataactctttagatcgaattcttgaaaaccttcatgattgctattttcttctacatctatatgattatcttgaataaaatcatgattattagataattcttattgtttatgatgacaatcacttta

SEQ ID NO: 28073 - DNA, 305 bp, Oryza sativa
  Clone ID: uC-osflM202035f01b1
atgccctatggaacaaccaaccaaggaaggctacagtaagaacgggagcttgatacgtcgagcacacatggcatgagctcaaatccattcttccccggcatgacctatccttgtcacactgtagggactacacaatatgagatctcccaaactttcacaggccggactagggatctacagtacatcaagcgaagtacttacaacctgcagcccaagtaacacgtcatacatagggcagtcgaggaccaattttcattctttgaaatacagctgacccttatcaaaacgacaattctgaggacctc

SEQ ID NO: 28074 - DNA, 459 bp, Oryza sativa
  Clone ID: uC-osflM202035f09b1
gcttttctgggccgcctacgtcgacgacagggtcgggccggcgtggctggccatcctgttcgggagcaagacggaggaggagagggctggcggtggaggcgcatgccgtgtcggcgctggagacgctagagggcgcgttcggggagtgctccaaggggaagccgttcttcggcggcgacggcgtcgggttcgacgacatcgtgctcggcggctacctcgggtggttcacggcgatcgacacgctgatcggtcgcaggctgattgacccggcgaggacgccggcgctggccgcgtgggaggagcggatgcgcgccaccgacgcggtcaagggagtcgtgccggatgacgccgacaagctgctcaagttcaggcagaccctgcttcgctggagcgcatccatagcaaagtgagatgacatgacacgactgtttttcgcatggtgatgctgcatctaagatg

SEQ ID NO: 28075 - DNA, 486 bp, Oryza sativa
  Clone ID: uC-osflM202035f11b1
tcaatgtcgttgaagggaatgaaccatgcttcttgagaacttacttctcctgggataacacaagatctgtgattcatggaaattcatttcagaagaagctttcacttcttttcggaatgcgctcagagagtggatctaagagttcaggtgatggtggaccaactcagagggcatcagcattggctgctctttcatctgcattcaacccatcttcccaaaagaataagggtaatgataggcctaaaagctctgatggtggacccactcagcgcgcttcagcaatggctgccttaacatcagcgttcaatccatcagcaaaacccaaaagcccaccacaacgtgcaggtcaaggttctcagcgagcagctgctgttgctgcgctgtctaatgttttgactgctgagggttcatctcaaagcccacgcataggtaggtcttccccatggcaggtgatgcagatacagctgaactaactccgtctgctgc

SEQ ID NO: 28076 - DNA, 497 bp, Oryza sativa
  Clone ID: uC-osflM202035f12b1
ttgcttttctgcgaggcgacatcagcggcgaggggggggctagggtttcgagcaccggcaccgcgcgccatggccgaggccaaccagtaccagatcctggtgcggctcctcgacggccgcacacgctgcctccgcttctcgacgacgaccgtctccggcgcggcgctcctcgacgccgtctcggcgctctcccgcgtccccgccgcgtccctccgcctcgtcaccggccgcctcgacgtctcgccgtcctccgtcctcgcctcctccgccgacggccgattcccctccgcatccgcgctccttcgcctccgcggaggcaagggcgggtttggctcgctcctccgtggcgccgcctccaaggccggccagaagaagaccagcaacttcgacgcctgccgcgatatcaacggccgccggctgcgccacgttaacgccgagcgccgcctcgaggagtggaaggccgaagccgcagatcgccagctcgagaagcttgcgga

SEQ ID NO: 28077 - DNA, 382 bp, Oryza sativa
  unsure (1)..(382): unsure at all n locations
  Clone ID: uC-osflM202035g01b1
ggtttatgtaaagaaaaacaccagcattgatgctgggttgcctcaatggtttacaagctttcaagtgttctatttgatccaggagggatctgcatagaggacatctgatggttggtatagaaaattttctaactgggtatcgaggcttaatgtggcgactggagcagtttgtacattttttttgttttgacttttactggatataaggaatagaggtggggtcatccctggaccctggatgcaagacaaatacatgtgaatgttttgggtgtaccatcattgtatttagggtttgggggtactaatttagttgtttattaacctggtatttgatggagaataaattattcctggaagtggcggccaaanaaaaaaaatagaa

SEQ ID NO: 28078 - DNA, 249 bp, Oryza sativa
  Clone ID: uC-osflM202035g07b1
tcttttttatctcctcctgctacgcagccttgggggtgtcatcacctagggacgggaggtataagagggcgaactaaaacaggctggctcctgctatgtgcacatctgtgggtacgggtactggactacctaacggggcttcgatacatgagctcaccactggggtgcgaggagcattgtaaaccggaagattttgactgattgtaaggattacacgagactgttgcaggagaactgagacccactaca

SEQ ID NO: 28079 - DNA, 213 bp, Oryza sativa
  Clone ID: uC-osflM202035g08b1
ttttatgatcgcctcggagaaggcaacgtcgcgctcgtcgccgggtaggtagaatccagctgatggcgaactcaaaccggctgccgtactgcacatggtcatgtcggaggtggaggaggaggaggaggggggttgctcattcataggctcatacaatgatttggtgtacaggtcggttaagggcaaggtggtgcaagattggaggctgcattg

SEQ ID NO: 28080 - DNA, 326 bp, Oryza sativa
  Clone ID: uC-osflM202035g09b1
tgctttgttggcccccatacttcccccacacggtcgtgctgcggtcgatcgctcgcatgtgcgccttaaactcctatggacttgaggacgtcggtgaacttgacataccccaccaagatgctggccatgcattccgcttgcaggtcgtaaaagactacgtcggcgtacacggatatcattggccacgtcgtccacaactaggagccaaccttcttggtctggagcaactctccaaagctcacgaccagctggcgcacgatcaccaaccagtgcaggtccactgctgtacacaaccagaacgggcgcattatggatcgatactatat

SEQ ID NO: 28081 - DNA, 316 bp, Oryza sativa
  Clone ID: uC-osflM202035h02b1
ctctagctttagaaggagagagcttggtgagctgcggagagggccccctccgtgatggcgtcgtcggccaccaccgtcgctcccttccaggggctcaagtccaccgccggcatgcccgacgcccgccgctccggcaactccagcttcggcaacgtcagcaatggcggcaggatcaggtgcatgcaggtgtggccgattgagggcatcaagaagttcgagaccctctcctacctgccaccgctcaccgtggaggacctcctgaagcagatcgagtacctgctccgttccaagtgggtgccctgcctcgagttcagca

SEQ ID NO: 28082 - DNA, 294 bp, Oryza sativa
  Clone ID: uC-osflM202035h09b1
tgttttttttgaccttatagttactcgaggggggcggtttagttgagagatgggacaggcaatgccttacataaacgggctggcgcaaggctggcaatctcctgtcactcctactacacgctggtcataggaacagtcatgcacgttgatgaagccgacgccggcgtatacgacattcatacccgtcgacgtgacgagctagaactcttcttgaatggcatggaccgtctcgccatagctcatgtcgcgcttgctctggttgacacgcatatgcagctcgaccatttgatcacc

SEQ ID NO: 28083 - DNA, 309 bp, Oryza sativa
  Clone ID: uC-osflM202040a01b1
gcgtccggtcatgctaaacagtgatggaggaagatcctcttcggccattgttcctgggaggcgagcactcaatatcttatccagttgttagggctgtgtctgaaaagcttggtggacctgttgtcattcttcaccttgacgcacatccagttatccactttgttttttgaaggaaacaattttttctcatgctcttttcttttgcttgaatttatcttggtgtttttttttctccttcttttattctttcctttttttttttatcttattctctttttcccttttattctcttttttttttttcttttt

SEQ ID NO: 28084 - DNA, 412 bp, Oryza sativa
  Clone ID: uC-osflM202040a02b1
agcagtcatacaatccctggtgacctaatttgtatggagacggtgagtctgaggctgtgattggttcccacagcttagctcgaccggtgtgagccacagttcgcagtgagcccgagcaacaatcagcaggcaggccgcagacccagtcactgatctccctccagcgcacccatgccacgccgccgacattgcatgccgccgccagtaaccccatggttgtacataggctatattttcccttgattaaccaactagttcacatatccctgcactttttaaacttccattgtattccctcatgcgtcccaaccaaagctttatcccctggggccttggaattttaggttttcctgggaaatttttgctttccaagattccccttaaaacaatgttccatatttttttccttttc

SEQ ID NO: 28085 - DNA, 479 bp, Oryza sativa
  Clone ID: uC-osflM202040a03b1
aatcaatccttcctcccagccaagatctttcttcctcctcctcgtcttcaggactcaattcgtcttctgatagcttagcttgattggggtgggtgacaatgggaggtggcaaggacaagcatgacgagagcgacaaggggctcttctctaacatgatgcacggcgttgccggcggccatgggtatcctcctcaccagggataccctcctcagggctacccgccgtcgccgggagcgtacccgcctcctccgggggcttatccccctcctcctggggcttaccctccaccacctggggcataccctccacagcatgggtaccctcagcctggtggctaccctccactgggtggttacccccaacatggtggctaccctcctgcgggctaccccggatcatctgggcaccagggccggcatgggagtagcggtggaggacacatgggagcaatgctggctggaagcgccgctgcggctgct

SEQ ID NO: 28086 - DNA, 538 bp, Oryza sativa
  Clone ID: uC-osflM202040a04b1
cttcttcattcccccaaatccatccatcatggagttccctcatcgccaccaccaccacggtcaccgcggcgacgacgacgacgacgatcgccgtcgccatcccgctcccgctcccgcctacggtcacgactcagcccctccgccgggtccctacggccaagcgcctcctccggctgatccctacgctcgccacccgccttcccacgactacgctcatcctcctccggcgtatgggggagggggctacggcaacgtcgtccacgtttcccacgaggtctccgaccaccagaggcccacgccgcactacggtggatccgagtacatcagccccgtccaagagacccgcccttaccacggtggcggaggagccccaccggtgacccacaggatctactgcaagggccgggaggacaactacagcctcgccgtcagagatggcaaggtctgcctcgtccgctccgatcgcgacgaccacacgcagcactgggtgaaggacatgacgtacagcacgagagtggaagacgaggaagggtcccct

SEQ ID NO: 28087 - DNA, 449 bp, Oryza sativa
  Clone ID: uC-osflM202040a06b1
cccccacgcccgcggatgatagacattcacggatgtgctaataggtgggctatcgcaattgctgaggtgcagggaggatctaagatcttctgcattctgaagcagccatggctaaagagtatccctgcctcccccaaagctcagcagctgcaagaatccaagaagcagcgggctcacctacatcctcgtggtgagcgcgctctgcgtcgccttctacgtcctcgtgcgtggcagaacaccacagtgcccaagccggcggtgagctcggcgatcaccaaggttggctgcgacccggcggcggcggggcagtcctccgccgtgccgtcgttcggttcggcctgcagggagtcactcgacttcgaggcgcaccaccagctcagcctcgacgacaccgacgccgaggcggtggtgcatccgttcccggcgtgcccgctcaacttcagcgagta

SEQ ID NO: 28088 - DNA, 380 bp, Oryza sativa
  Clone ID: uC-osflM202040b01b1
gactctgtgggccggagcaaaacacagaccgttggatacaaaatggacggcccgaacgagacccaggatataatacgcagcgcagaagaaaatcaaacggaccaacacgaaaaccctgcttctccgaccaaccccattccttctgacccactctattctcccgccgccgccgtcggaggaggcggctcctcgtcgtcggcctcgacgaccatggcacggatcgtgtcgcgcgccctcccgatcgcctcgcgctcgccgcagctcggcgcggcgctgatacgctcggcgccgatgcgctgcccgaccctccccgtcgcggagcccaccgctaggctgctgtactgcggcgggttcacgcccttcttagaggcgtggcgctc

SEQ ID NO: 28089 - DNA, 296 bp, Oryza sativa
  Clone ID: uC-osflM202040b06b1
tgaagcaggagggaggggaggagagtactcccatggccagccagctactcaagagcagataagcacgctccaagcccagagggccctcctcttctagccttgcacataagctactaacgtgacagtgggcgttgcaacaaggtttctttgtttttccaattcttgatttcctttcgttgcattctggggactctcttgatctaaaggggaataaattttggtttccatcgtccatattgggtgttaattctgtacaaaatttgctaagttctttattgcaatcaattagaattttg

SEQ ID NO: 28090 - DNA, 397 bp, Oryza sativa
  Clone ID: uC-osflM202040b07b1
gtctctctccactgtcaaccacgccgccgccgccgccgccgccgcagcggggccggggaaatccttctccgcggctgcgcctgcggcgccatcggtgcgcctgccaaggacacgggctcctgctgccgccgcggtgtccgcggcggctgcgggggcggaccgcgcggcggacagggtgtcggcgctgagccaggtctccggggtgctggggtcgcagtggggcgacgaggggaaggggaagctcgtcgtcgtgctagcccctcgcttttacatcgccgagcatagccagagcggagcaaaagctggtcacaccatatacaagtctgaaggaatgaaattggctcctgattgagagccatctggaactgtccatgaaggaacgctgtgtgaaaaaggc

SEQ ID NO: 28091 - DNA, 343 bp, Oryza sativa
  unsure (1)..(343): unsure at all n locations
  Clone ID: uC-osflM202040b09b1
accttccactagcaataagcttgcctacttccgcgccggtgggtgggtggatagagaagatnttcttaaaaaaacatgaataaaagagaaaaagaaaataaaaaaaaaaaataataaaataaaaaaatgaatggaagtaatagttaaaaataaattaattatataaaaaaaantatttaataaaaaaaaatataaaaaaataaaaaataatattaaaaaaaaaaatagatataaaaaaatatataataaatanaattataataaaaaaaaatttataaaatataaataaaaatatataataaaataaaaaaaaaaataaaaaaaataaataaaaatatttaat

SEQ ID NO: 28092 - DNA, 64 bp, Oryza sativa
  unsure (1)..(64): unsure at all n locations
  Clone ID: uC-osflM202040b11b1
cccttcgaaccacaaaccccacccttctaaaaacaacaccgnaaccaaaaacgaagggagattc

SEQ ID NO: 28093 - DNA, 387 bp, Oryza sativa
  Clone ID: uC-osflM202040b12b1
cttctcttgtcctccgtgactggtgaagctgtgagcgaggagcatatgtccatgggtggcacgaaggtgtggagaagcacgatgtacacacccaggtgcctcctcttctagccttgcacataatcaattaatggtgcggtgttcgttgcaacaaggtttctttggtggtccaattcttggtttccttccgttgcattctggggactctcttgatcgaaaggggaataaattttggtttccatcgtccatattggtgttaatttggtacaaatttgctaagttcttattgcaatcaattagattttggtgcaatggattaaatggctgggaaaaaaaaactcccctaaaaaaaaaaaaaaacaaaaaaaaaaaaaaaaaaaaaacaac

SEQ ID NO: 28094 - DNA, 96 bp, Oryza sativa
  Clone ID: uC-osflM202040c05b1
gcgtcgccaactcccttggcggcggcgggggtgagggcgacatcgtggcgctgaagaactacatgaacgcacaccactttggtgagattggctgtc

SEQ ID NO: 28095 - DNA, 351 bp, Oryza sativa
  Clone ID: uC-osflM202040c08b1
tgattcctcgcattcgtccccactccccagcggcaccgcatccgagccagcgcgacctcctcctcgagccagtggtcgcccgcccgcccgccgtcgctacctcctcctcgagccagcggctggcatagatccggttgtcgatgtggttgcagatcacggacgacgtcggccaccaggtggatgaggtcgagggaggcctggcggcgctgagcaacgatgtccaggtatggtgcttcttctccacctctctccctcatctcaggatgcgtcagatggtgctctccgggccgggatccttctctttcgcgcctcggtgtcgtcgacggcagcgtgaggaggccacggtgcaca

SEQ ID NO: 28096 - DNA, 506 bp, Oryza sativa
  Clone ID: uC-osflM202040d02b1
gcacgtttcgaagcccgacatctccttcgccggccgcttcaccgcaagcgccatcgctgcatgcttcgctgaggtgtgcacgatccccctggatacggccaaggtgaggcttcagctgcagaagaacgtggccgccgatgccgcccccaagtaccgcggtctcctcggcaccgtcgtcaccatcgcgcgcgaggaaggcgccgccgctctctggaagggcatcgtcccgggactccaccggcagtgcatctacggcggcctccgcatcggcctctacgagcccgtgaaatccttctacgttggcaaagaccatgtcggggatgtgcctctcaccaagaagatcgctgccggcttcaccactggtgccattgcgatcagtatcgccaaccccactgaccttgtcaaggttaggcttcaggcggagggcaagctggcgcccggcgccccgcgccgatatgctggggccatggatgcctatgccaagatgttaggcaggaagggtttgc

SEQ ID NO: 28097 - DNA, 316 bp, Oryza sativa
  Clone ID: uC-osflM202040d03b1
gtaagtccactgcgctgcaccaccagccaacccaagatgaactggaaccagagagagagatgaacgccgcacttcggcgcgcccaaggacctcgcggtgggcctccagcagcgtaggtttttttttccagtcatacttttcctttttgtctccagtcttcttcgtttctttttctttttttatttttttcttcttaggttttttttttctcttcttttgttctgctttttatctcttttctttctctttttttttttttctctatttgtttttttttttttttcttattttttttttttttttttatttttctttt

SEQ ID NO: 28098 - DNA, 120 bp, Oryza sativa
  Clone ID: uC-osflM202040d05b1
gactccgccccttgtctttccctgtctctttttcgcggtcttcgtctgtctgactcggtgaggcgccaccggcagcaactgcaccaccgtcaagatggctcggtcggcgctcgacgaggt

SEQ ID NO: 28099 - DNA, 351 bp, Oryza sativa
  Clone ID: uC-osflM202040d07b1
tatcagcttcaaggttacctgtatcatcgaatgaactatttagcatgcttgacgaagcaagtgagaatacgtttctctctactaacccaaccgcctgtatacaaaagtttatatttaacggggaggctgacaaagttgcacctgagttgaaaaatgctgttgcatgcactagttatatgcttgaacaaacactggtcgaagcatggtctgctgataaggctgctgaagcattaagatgccagaagttgctcgtggaggaagaggaagctgctcagaaaaggcaagctgaactgatagaaaggatacggatgaagaaactgaggctgaaagaacagagattgactgacttgt

SEQ ID NO: 28100 - DNA, 481 bp, Oryza sativa
  Clone ID: uC-osflM202040d10b1
ttctcgcggtccgctcgcctcctcacggcgccaaagcagccaggaagaagaagaaccacgctgtttctaggacgattcctggaacagccaacttctgaacctctatctgcaagactgcagacagtataatacttcttcctggttgcagccgcctcagcggaaaaaccaaattcagcttcattcatgggttccccaagcaaaacacgtcggatgaagccattggggattcagtttctattgagtgttcccggcggtgttcttttttattgtttatttcacttattccttattttctttttcttttttatctttttttcttctattcaattcttttattcttccttttatattctcactattctctttttctcattatttacttttttttcttctttttatttttatataatattcttacttttttctctctatctcttttttcccttttttattattttttttttttctctatctatttttt

SEQ ID NO: 28101 - DNA, 151 bp, Oryza sativa
  Clone ID: uC-osflM202040f01b1
gaggatggggcgtgtctccgtcaactgccaccaggggaggggtgattcctgctcccctaccctaaatagcatgttgcgaaccttctgaaagcttcgggaggcggcggcgccgatcacctcccagaggaacctgaggcggcgactaggaagg

SEQ ID NO: 28102 - DNA, 361 bp, Oryza sativa
  Clone ID: uC-osflM202040f02b1
agctttttggtctttctctctaaccttccaccaccgaatgggggattcctcctcccctcacctaatcgccatgttccgaaccttctcgaagcttcgggaggcggcggcgccactcaccgccgcggcggtgcggaggtgctgctccggaggcggcggcgggcggatccgcgcggaggccaattgcccgcgctgcgcggtccacatgtcggtccaattctccctccagccactctcgacgccccggccggccgccgcggctggtggccacggcggagatgggtgcgatagccatcaccatgacggagcgagcgtgtgccccgcgtgcagcgcggcgttcctgttccgagcgcaccggatcgag

SEQ ID NO: 28103 - DNA, 561 bp, Oryza sativa
  Clone ID: uC-osflM202040f03b1
atgatccgagagaggcatggtgcttgcgaagcctgcttgcattattccacacaccatgtttgatgcggttgtgtatgtactgaagatggacgagggtggtcgaggactcaccgtttttgcctggttatccgcctcagttttacatgcagtctaccgttgtgacggtgaatgttacaaagattatgaacgacatggactagtaggttatgatgtgtttgccttgttgacctgtttaagatggttgtattatttattcattttgtctccttgttttcatatgattttatttttttctttcagttattttttgttttgttcttttctttttttttttttttaaattattatttttttttttacttttattttttttttttacttttttttttttatattttctttttttttttttttatcttattttattttgtaaatttttatttttttttttttctaccttttcttcttttttctcttattttctttttttctttttttatttttaattaatagttttttttttagcctctcttcttttttttattttctaattattttttt

SEQ ID NO: 28104 - DNA, 435 bp, Oryza sativa
  unsure (1)..(435): unsure at all n locations
  Clone ID: uC-osflM202040f05b1
cgcttttctcctgtcccactcctctccttctccttgtgcttcttcttcctccattggcatctccaagaaacccaagcctttctacgtgcttcgagctcggccaccggccggcggacgcgcgcgcgccagccaccagtgtccggattnatgctnnattangaactaacagtgtattcaaagaacctaaacatcagatgcccaacaatttgaatggagagttccaggacgtcattgagatgccttttactcatgaccatcatggatcaaatgatcaaccctgagattgattccacaactgatgcatgagatcaatatgtgccacgggccttcatgcatatctgagttccatgagcatgttgtcatcatgtttcttagcttccatcttgaccctgaatcctttgtattcaatacctcttttttattatttttctcttc

SEQ ID NO: 28105 - DNA, 105 bp, Oryza sativa
  Clone ID: uC-osflM202040f06b1
gcgataaaccgggccggggtgatcgagcgcagctagggcgctttgccatggaccgctgggcgtacgaacgcctcaccgtggtccaggctctgctcaagctgccct

SEQ ID NO: 28106 - DNA, 470 bp, Oryza sativa
  Clone ID: uC-osflM202040f09b1
tattatccttattacctcagcgataacacaaagaatgtgctgttatcatgtgcattcatacacttggaaaagaaggaattcatcaaacaattctcagaaatttcatcaataaaccaacggattctattatctggtccagcaggttcggagatttatcaggaaacattgataaaggcacttgcaaaacatttcggtgctaggctacttgttgttgattcgcttttgttgcctggggcgccttcaaaggacccagagtcgcagaaagatgctgcgaagtctgataagtcaggggataaggctggtagtgagaagttggcaattcttcataagaaccgctcttccttggcagacgctatgcacttcaggaggccagctgtacaaccttctagtgtgcatgccgatatcgggggtacatcgactttgcattctgcatctttgcccaaacaggaattatttacaacttcattcca

SEQ ID NO: 28107 - DNA, 253 bp, Oryza sativa
  Clone ID: uC-osflM202040f11b1
ttctagctgagctacccgtacgaggtgcgacgatccatgaagccaaccagacacctgctccacgcgcgcgcgccgtaagcagttacaaggcccaagatagagcacccactctcccgcgggctggacctactcatagcacgacacgcgcacgcacgctatgtcacgggcggtgagcactgtccgaggcagcgacatccatacagaaagtgactgaggttgcaaacatcctctacagaacaagcttctactacac

SEQ ID NO: 28108 - DNA, 293 bp, Oryza sativa
  Clone ID: uC-osflM202040g02b1
gagaatgggagctacataaaacaatgtctacaccggggtgggctattactccaaccctgggctgtctcccatgtccggcgccgtcgcagaatcaacccaatccgccgccatgagggagtgcatctagatccacatcggccaggccggtattcaggtcgggaacgccagctggcagctctactgcccaaagcatggcatccacgctgaagcacagatccccactaacaagaccggtgggcaagaggctgccgccgaacgcagtctaaacactcagactgtctccaagaaacatt

SEQ ID NO: 28109 - DNA, 329 bp, Oryza sativa
  Clone ID: uC-osflM202040g05b1
gcgctgagcaccgtctctcacaatgtcgaccgccgccgccgttctcgctgcccagagctggtgcttcgccactgtcaccccgcgctcccgcgccacagtcgtcgccagcctcgccttcccatcaccgttctcctccttctcctcctccaacagcagcaacctcccggcccccttccgcccccgtctcatccgcaacacccccgttttcgtcgcccccgtcgcccccgccgcgatggacgccgccgtcgaccgtcttcaaggatgggttcgccaagttcaagaccgagttctatgactagaagccgtagcttctttgagccgctcatggc

SEQ ID NO: 28110 - DNA, 90 bp, Oryza sativa
  Clone ID: uC-osflM202040g08b1
ttcccggacccacccacccgtccggtcagttataaccaaaaaaattgcaaaaccggggggctttattaaaaaaaaccgggggaccccccc

SEQ ID NO: 28111 - DNA, 213 bp, Oryza sativa
  Clone ID: uC-osflM202040g09b1
ataaattccagcaccatggccctgtgactatgaccgatatgttgtcaacgaccttcgtcctacccaatccggacggaacgtatcaaacattaccgagaaaggtgatcaataaaccaacggattgtattatctggtccagcaggctcggagatttatcaaggaaacatcgataaaggcaccttgcaaaacatatcggggctaggctacttgctg

SEQ ID NO: 28112 - DNA, 53 bp, Oryza sativa
  Clone ID: uC-osflM202040g11b1
aataaaccgaaggagaggaacgacgtacctcgaggggtttttttaaactattc

SEQ ID NO: 28113 - DNA, 155 bp, Oryza sativa
  Clone ID: uC-osflM202040h01b1
cgcgtccggagcgtccgagtccttttacacctgtccccaccctcgctctccgctccttcgactccgactccgcctccgagtgctcccgtaaccgtgccgtcgcagcctccgtctccgagcggttcctcccgcaagcggcttctccgccgcgcgcg

SEQ ID NO: 28114 - DNA, 429 bp, Oryza sativa
  Clone ID: uC-osflM202040h02b1
gggttttcgagccaatccagccatggcctccacggggctctccaccgcctccaaccctactcagctgtgcaggtctcgcgcctcgctgggcaagcccgtcaagggcctgggcttcggccggtagcgcgtgcccaggacggcgacgaccatcacatgccaggccgcgagcagcatcccggccgaccgcgtcccggacatggacaagcgccagctgatgaacctcctcctgctcggcgccatctcgctccccaccgtcggcatgctcgtcccctacggtgccttcttgatccccgacgggtccggtaacgccggcggcgggcaggtcgccaaggacaagcatcgcaacgacgtgctcgccgaggagtggctcaagacacacgggcccatcgaccgcaccctcagccaggggctcaagggtgacccgacgta

SEQ ID NO: 28115 - DNA, 193 bp, Oryza sativa
  unsure (1)..(193): unsure at all n locations
  Clone ID: uC-osflM202040h08b1
ngtcaccaccactttacgcctttgcctatcagggggctttctccccagagtagggcagcgtccatctctgcagccgtggttagcaacagcaagcgaaggcgagtgaaagaaactcgatcgatcatcagtggcggtgaaagaaacaaaccaggacgttctaacgatacaggagagattttgatggggcccgttt

SEQ ID NO: 28116 - DNA, 497 bp, Oryza sativa
  Clone ID: uC-osflM202043a03b1
gtccctgtctcccctccttcctcctctcctttcccctcctctcttcccccctctcacaagagagagagagcgccagactctccccaggattcagccatgaagggggccaaatccaagggcgccgccaagcccgacgccaagttggctgtgaagagtaagggcgcggagaagcccgccgccaagggcaggaaggggaaggccggcaaggaccccaacaagcccaagagggctccctccgctttcttcgtttttatggaggagttccgtaaggagttcaaggagaagaaccccaagaataaatctgtcgctgctgtaggaaaagcagccggtgataggtggaaatccctgaccgaagcggacaaggctccctatgtagccaaggccaacaagctcaaggccgagtacaacaaggccattgctgcctacaacaagggcgagagcactgccaagaaggcacccgccaaggaggacgaggaggacgactaggaggaatctga

SEQ ID NO: 28117 - DNA, 121 bp, Oryza sativa
  Clone ID: uC-osflM202043a06b1
ctctctccctactgcacctttcgcctgccaggtagtgggctagggttacgcactcccagtgtgcctgactcctgcggaacaggaaccctaacgctaacctggcctagtgctgccaccatgg

SEQ ID NO: 28118 - DNA, 513 bp, Oryza sativa
  Clone ID: uC-osflM202043a09b1
gacggcgatgacttcgccttgtacgacctcgtgaactcctacatggacctcgacgggatggaggctctcaactcctccgaggagcggcacgaggaccgcgacagccgcgccagcggcacgcgcaccgggagcgtggccgacagcagcgagaacgaggccgagagccactcgactccagtggagaggaaggacggaggaggcaaatcccggcattgccgcagcttatcggtggacagcttcatcgagaagctcaacttcgacgagtcaccgaagctgccactgccgtctcccagcggtggcctatccagaagcgggagcgggtccttggatggcggcgctgcatctctgtttggtgctgagtttgccaatggggagttcactgaagctgagaagaagagatcatggcaaatgagcgccttgccgagatcgctttgactgatcctaagagggttaaaagaattttggcaaatcggcagtctgcggcaaggtcaaaggagcgtaagatgaggtaca

SEQ ID NO: 28119 - DNA, 391 bp, Oryza sativa
  Clone ID: uC-osflM202043a11b1
tgtgggccagtcagccattggacaaaggattatgatgcacggaagtacttgaacgtgaaggttcgagcatgtactaaagagtcctgcgagttcaggggggcatacggtcaactgaggagacacgccagggagaaccatcctactgttagaccaactcaggtggatcctgaacggcagcgagactggcacagaatggagcagcagcgtgatcttggggacttgttcagcatgcttcgttcaggcttaagtgccagggaggacgggatcggagtcagtgaaggggaagaggatatcagcgagagggctctacatagcccatctataacaatgggcttcattgtgcgcactggcaggtcgatacttcactacagggaagcattcccaggccacc

SEQ ID NO: 28120 - DNA, 494 bp, Oryza sativa
  Clone ID: uC-osflM202043b01b1
ggggagcagcctgccattgctgctgttggttcactgaaaagtgtggatccggaccggattattcttaagaaaattgtttcgactggttatcctcaacgggtctcaaaactgaaagcagtagtgcgatacatgttctacaatcctgaagatgtcaagtggtttaagcctgtagagttgtggacgaaacatggtcgacgtggccgaatcaaggagactgatggcactcatggtgctatgaaatgcatattcaatagcagcgtccagcagcatgataccgtgtgcatgagcctttacaaacgcgcttaccccaaatggccagaacagctctaccagatatgatcatatcagggtcatggatatgtgcttgcacgttggcatgtacgtctcaaagttttgacagattgagctcatcgatgtgcttcctgatgcagctcaatatatgtatactagtgctagccgaaaaagaaacctcatgtaacaacgacatgtaggta

SEQ ID NO: 28121 - DNA, 440 bp, Oryza sativa
  Clone ID: uC-osflM202043b05b1
gcgatgaccagctctggtgctcctttctggtctgctccaaagcgtttcccacgaccactggagttcttgacatctgatccaagccagcttaactttattttggctgctgcaattttaagggcagagacatttgggatacccatacctgactgggtcaaaaacccagcaaagatggctgaagctgttgacaaggtgattgttcctgatttccaaccaaaacagggggttaagatagttacagatgagaaggctactagtctttcgtctgcatctgttgatgatgctgctgtcattgaagagcttattgcaaagttagaagcaatttccaaaacactgcaaccaggattccagatgaaaccaatccagtttgagaaggatgatgacaccaattaccatatggacgtgatagctggttttgctaacatgcgggcaaggaacta

SEQ ID NO: 28122 - DNA, 276 bp, Oryza sativa
  Clone ID: uC-osflM202043b06b1
gtggtcccacttggcggctgaggttgagtggtggtggagcatcagtgcgtcagccgtggattcgtaggtggtgagcaacaggtgaaaacccagcccggtcttggccggaccgacaacgatggttaattctccctcctgagggcgttgtcgtgctgtatcatccctaatgggtgggtggcaggtgaaagccaggctaggtttctttgtacccaaacggaccgtgacggtgggtctttataacatttgcttcatgctgaatggcgaatgggactccct

SEQ ID NO: 28123 - DNA, 512 bp, Oryza sativa
  Clone ID: uC-osflM202043b07b1
gttcatgttcgcagttcatcgaactgtggaagcgaaagcatgaaactggacaatggattgaagttgaaccagaagcaatgtctacacactctgaatttcctccttttaatccatcgggtattgtttttgttggagacaacatgaagcaaaacacggaaactatgtctgtttccaatggagaggcaaatggcgaggatgcttctaaagctgagcataagtctggtcaacagatggggtatcaggctgcatatcctccatgggcaatgcatcctccaccttaccatatgcaaggaatgccttactatcctgggccgtactaccctccatatcctccagtggatgaccccaggtatcactactcgggaaggaaatcatcgaggaagcactcttcagacagtaaagagtcagaagtacttgacgaaggaagtgatggtagcagttctgaaagagggagttctcatggtcacaagtcacataaaaagggctagcgatcagggaaaaagagacctaga

SEQ ID NO: 28124 - DNA, 242 bp, Oryza sativa
  Clone ID: uC-osflM202043b08b1
ctaagagtgtggacgcctgtcgatgtgagtatctgtagccttaaaaggcctttttattgctttcccctttgcttgtttgagcagctcatagtgggcttgatttgctgacagcgtgtggcgttcgtgttgcccggttttgtgttctgcttatcttgagacctaccattctttctggcgcatgtggtaaatagccaagacttgttaacactaataaaatttgccttcaggtctaaaaaaatcat

SEQ ID NO: 28125 - DNA, 459 bp, Oryza sativa
  Clone ID: uC-osflM202043c06b1
cgtcgtctggtggttgcattgtgttgcaatgagcaaaggcgcgatcatcggcgcgtcgaccgtgctggtggtggcggtggtggcggcggtgtgcgtggtgtcgttcaagaacgggtcgagcaatgccaaggaggacggcgagctgtcgacgtcggtgaagtcgatcaagtcgttctgccagccggtggactaccgggagacgtgcgagaccacgctggagcagacggcgggcaacgcgacgaacccgacggacctcgccaaggccatcttcaaggcgacgtcggagcggatcgagaaggcggtgagggagtccgccgtgctcaacgacctcaagaacgacccgcgcacgttcgacgcgctcaaggactgcgaggagctgctcgactacgccatcgacgaccttaagacgacgtttcgacaagctcggcggttttcaaaccagcaactttaagcgcgccg

SEQ ID NO: 28126 - DNA, 448 bp, Oryza sativa
  Clone ID: uC-osflM202043c07b1
gtttcttctcttcttccatcttcgtcatcttcaacctcctcctcctcgttatattaggtatataaaatagcctttcttttcttatcctttttaattttacagagtaattgatttgcaactcttcacctggaactctcttgagaaatgggattttgatactggtagtactagtaaatggaattgaattctttgttagtactactactggtagtactttgtactgctcgcttggtagtagtaacagccaatccatccgccatggattggctggcttgaacgggaagctgaagaattaattcatggcggaatcatgtctaccgaatgggttttgattgctctgcgtttagagaagagatctctgacgttactgaccccaagattaaactcattgatttttttttatgtttatgtacgcatttattgaattcgtaacagctcgcgcctatag

SEQ ID NO: 28127 - DNA, 379 bp, Oryza sativa
  Clone ID: uC-osflM202043c08b1
ctttgactgatcgtcttcctcctcttgtttcgcgagaaaaaaagaaaataaaaatataggcgaggaggtctctcgagctaccaaaccctaggggtcgattcggtggcgggggggagggggctggatctgcgcgatcgcgcggtcagcatccaccgcagggagggtattacaatagagaaggtgcgactgatccttgaatgtcttgcagctcgaagagagcggcgcccggtctgagtacatcatccagaatgggttcaccttgcaatgagtgattaatgtcaggggcggcatgctaatgttcatgtagaccttgagtggcacgaccatcagcctagaggtcgaggcttctgacaccattgacagtgacgagggctagatc

SEQ ID NO: 28128 - DNA, 363 bp, Oryza sativa
  Clone ID: uC-osflM202043c11b1
tgcttcgcgtgtgcccgcgcccgcccccgccctccctcccgcggcggcccccgcggcgcgggggccgccgcgccgctctccctctagcttccctccatgtcctcctctttccttctcttcttcccgctcacccagcttctcctcccccctcctccttcttcccctcttcttcctccctcctttccccctcttccccctttccctcttctccccccctactttcttctttctctccccccctcctcccccctcctctccctctccccttccctcttctcccccctcctccccctccctcccttccctttccgtctcttcctttccccctcccctcttttcttctttcctctcttttctctctcc

SEQ ID NO: 28129 - DNA, 412 bp, Oryza sativa
  Clone ID: uC-osflM202043d03b1
gagagagatgggggaagagaccctcgtggccatgccgctcgcgccgccgcatcaccaccaccaccacgcccacctccccgcgctcccgcacctcgccgcgccgcccccgccgccaccgccgcccgcagagaccgaactcacggaacagcgagaagaggaggtcccggtggacgacgtcgtcgaggcggcggcggacgtgccaaggagggaggagggccttgccgcccctgggggtgaggccacatactaaaggaggaggacgctccacgggggggcaggctcaggggaggcatgcagatgttcatcaagaccttgactgggaagaccatcaccctagagggcgagttcgtgtgacaccattgtcaatgtcgagggcaggatccatgacaaggagggcatcccccccgaccag

SEQ ID NO: 28130 - DNA, 404 bp, Oryza sativa
  Clone ID: uC-osflM202043d05b1
ctgcacgcaccggtgccgtacttcccggacccacccactgcgtgtgagcctgaagatgaacgctttttgcacctttctcaggctgctcttggggaatcaaagaaaggatctgacaatgcacaaatgtatgttaaaactgatgatcaaaagctagtcattggaaccctctcagctgacaagttccatgaaatgcagcttgatttggtctttgacaaagagtttgagctgtcacacacttcatagactgctagtgtggacttttctggctacaaagtttcccagccggctgaggaaaagcaaatagattcagattctgtagacgctgaagatgaccaggagtatggtgagcgcatgacccagtacttggatgaatattgccattctaactgaggcactgtaatcag

SEQ ID NO: 28131 - DNA, 434 bp, Oryza sativa
  Clone ID: uC-osflM202043d06b1
ctaacacggagcggagttaccatcaatgggaagcgagcggtcgtggttggccgcagcaacattgtcgggctacctgtatccctgcttcttctgaaggcggatgcgaccgtatccattgttcactcccggaccccaaaccctgaaagtattgtccgtgaagcagacattgtcattgcagcggctggccaggctatgatgatcaaaggagactggatcaaaccaggcgctgctgtcatcgacgttgggacgaactccatcagtgacccaaccaggaaatcggggtacagactcgtcggcgatgtggatttcgcagaggtgagcaaggttgctggtcacctgactccagtcccaggtggcgttggccccatgacggaggcgatgttgctgaagaacacggtggatggagcgaaacgtggtatagttcagtaaaggtt

SEQ ID NO: 28132 - DNA, 437 bp, Oryza sativa
  Clone ID: uC-osflM202043d08b1
ctttaattggacagaaaaaaaaatctgccctgggagcgaagcgtagaatcggcttctcaagatgcagatctttgtgacgaccctcacctgcaagaccatcaccctcgagggggagtgctgctacaccattgactatgtcaaggtcatcatccacgacaaggagggctattccctggaccaggagcgtctcatctttgctggcacgcactttgaggatggccggaccctgtccgagtacaacatccagaaggagtccaccctccaccttgtgctcaggctcaggggaggcatgcagatcttcctctagaccttgactggcaagaccatcacccttgaggtcgagtcctcggacaccattgacaatgtcgaggccaagatccatgacaaggagggcataccaccggaccaggagggtctgatcttcgctggcaagcagc

SEQ ID NO: 28133 - DNA, 546 bp, Oryza sativa
  Clone ID: uC-osflM202043e08b1
tgggggctgctgcgcctcgctggtgccgcgcgcggcgtaattgggtggaccaacgacgcctccgctctggtgtgtctctgctcattttcagattatctacagtgtcgtgtgcgttgtattcgaccggtgttcgttctcgcccgctcgctgattcgttgggatttcctgacaatgggtatcagagcaaggtttagggcttggacgcatgatcgtgctcttgaagttgcactcatgcctcgccgtcgctcgtcgtccctgacgaagcgcactctaggaggttccggcagccacgcctcgggcagcggcgggaacgaccgcgggttggtgattcaccgtgtggtcaaggaggcggaaggcgcggtgaactaccccgtgctcacgaagacaaactacaacgagtggtctttactgatgaagatcaagctgcaagctcgatgcttgactgcttgtggggcaccattgatccgggaggggtcgcagtggagctccatgaagatcgaatggcgttggacgccatttgcagcgccgaacccgtagagatgatct

SEQ ID NO: 28134 - DNA, 400 bp, Oryza sativa
  Clone ID: uC-osflM202043e09b1
atctagcgctccaagccggaggcctggtccgacaagaccgcccttatccacgtcaccgacatgaacgacgagcccatcgctgtctaccactatgacctgtccggacttgccttcggcgccaagggtaaagatggcgaggacgaatagctccccaaggccggcatcatctacacgcaaatccgtcgcgtgaagtgcaaggatgctgccgacaccaggatcaccttccacatcgagaaggccggcaaccacaactaccttgcgctgatagtcaagttcgtcactggtgatggggacgtcgtggaggtggcaatccaggggacgggctactaggagagggaggcgctcaaggagccatgaggtgccattggtaggatagacacttcctgggcggtaagggccc

SEQ ID NO: 28135 - DNA, 514 bp, Oryza sativa
  Clone ID: uC-osflM202043f02b1
gctgtcggcaccattcatgacgccaccgtgcactcagtatcatcgtactggatacagctgcgggggcaggcacctctttgcccttaccagactcactcccccagtcagggcatgacagtggagcgcggatccgacatctccagtacgagagaacgatggaagctcaagaattcagaggcctagcgcctcgagaacggcctgaagcacgcgaattccgccgtcaaagcgagcccggtccgaagccgttgaagcatacgaatgggcaggtgtgccagatttgcggcgacgacgtcggtctcacccccgacggcgagcccttcgtcgtctgcaacgagtgcgccttccccgtctgccgtgactgctacgagtacgagcgccgcgagggcacgcagaactgcccccaggtgcaagacccgctttcaaacgcctcaagggttgcgcccgcgttcccggcgatgaaggaggaggaggacgtctactacctggagaactagtctaactggagggacaagac

SEQ ID NO: 28136 - DNA, 289 bp, Oryza sativa
  Clone ID: uC-osflM202043f05b1
ctcgcgtgcggcgggagggaacccaccgaccttgttgggctcccttcacgtacacgacatgcgaagagcccccctcaagctagggctccccggcggatcctcggcggggtgggtctcgcgccccacttttgccgatttggaggctgggcttgccgcgattgcctcccaccagctgaagaccctcctgacccacaagctgaagcaccaccctgggtcgatcttcttccgtttcattatggagcacatcctcgccgggagcattttttttttttttttcatctatgttaac

SEQ ID NO: 28137 - DNA, 420 bp, Oryza sativa
  Clone ID: uC-osflM202043f07b1
gccgaagaatccacagcattctctcttcctctctcttcttcccccattttgctctcgccgccgcccacgccgatgctgctccgtcgttggtagcctctgctgctacgagggcgttgggatctggagatctggtagggaggattgcgggatggaggccagcgccgggctggtcgccggatcccacaaccggaacgagctcgtcgtcatccgccgcgacggggagcccgggccgaagccggtgaagcatacgaatgggcaggtgtgccagatttgcggcgacgacgtcggcctcacccccgacggcgagcccttcgacgcctgcaacgagtgcgccttccccgtctgccgcgactgctacgagtactagcgccgcgagggcacgcagaactgcccccagtgcaagacccgcttcaaacgcct

SEQ ID NO: 28138 - DNA, 454 bp, Oryza sativa
  Clone ID: uC-osflM202043f09b1
atatggctaaagccctcaaatcattctcggccataacgcttcatgcagaaggttacacgcgtgaggtgcgtgagcagacacaggacgcactggctgcatacttcaatgcggtctcgaccgaggtggagcacgtaccatcaaaggtatccatcggcgccctcctgtccaaacaaggccccaagtatctccccgtcgcaaggagcttcctctcggacgccctaaggcacgagccgacgaaccggatggcatggctctacctagggaaggtccacaagcatgatggcaggctagctgatgctgctgactgcttccaggcagcctcaatgcttgaggaatcagacccaatagaaagcttcagatcactctgatggctcatcatcttactgcagcaccatgaggtttttttttttcgcgggttaatttttcttctctctcttcttctcctcctaccttt

SEQ ID NO: 28139 - DNA, 537 bp, Oryza sativa
  unsure (1)..(537): unsure at all n locations
  Clone ID: uC-osflM202043f10b1
gtcttctcctccccctctttaccttttcctcctcggttcggttccgtggatcgtctagggtttagtgggttgagatggcacatcccgatgtcaagtacctctgcttttcggtcgcgaacaaggcagaccacggccgatgatagctattgacggatgctccgacgtccaagacacggtacctatgtttgtggcacctaccaagtagctggcctccttgcacgcacctagaagctccagcccgacgagaccgaacggcacgggctctaccatagctagatgtccacaaagcatgatggccgcactagcatgatgcctgctgactgccttccaggcagcactgaactgcttgagggaatcagaccccaatnagaaagctttcagatcacctctgagtggctcatcaatcttactgcagcaacattgaggtttttcttttttcgcgggataattttttcttctctacttttcttctcctcctacctttttttgggacataactgtgtggaatctggataccagctacaatgaacttttgta

SEQ ID NO: 28140 - DNA, 367 bp, Oryza sativa
  Clone ID: uC-osflM202043g05b1
acgcgtccgcagttacactatacgtgtacttctcatggcgatctggaaggctaggatactgatgttgctcgcgcttggcggggctgctggctgctgcccggcggcgagggcggaggaggcggcggctgcggaggaggggggcgatgcggcggctgaggccgtgctgactcttgacgcggccgggtgcgatcaggccgtgggcaagcacccgttcatgggcgccgagttctacgccccgtggtgtggacactgcaagaagacacattcagagtatgagaaagctgcacaagagctaaccaagcacgagccaccgattggtgtcgccaaggatgaagccaacaaggagaagaacaagcctcttgctacc

SEQ ID NO: 28141 - DNA, 475 bp, Oryza sativa
  Clone ID: uC-osflM202043g09b1
ctcgtctccccccttcctccaatatatcggcggcgatcccggctcgaggagaggaggctccgccgcgattttttcggtgtcgcatcgaaattatgattttcgatgcattttaggctaaaagtgctcgggtctgaaacctacgtgcttttcttgtcgccgaagatggtgtcagcaaatatacatcgacgcacatgaacagcgatgatgcgttgctgaatccgtctgaagctgcaataagcatgacggttttgcaaattatgatactaaaccattcatgctgctacgccctcgtctggaactttcttcttctgatgcaaccgtgcacaagcaaacctagcctcgaagcgattgtgatgagttttagaggtggtgccggttcgatcacgtggagctctattggtgttcagtgactcttggcaaaagttctcttgtaaaatcgacgacgattgaaaggtacaaagtgataagggagata

SEQ ID NO: 28142 - DNA, 514 bp, Oryza sativa
  unsure (1)..(514): unsure at all n locations
  Clone ID: uC-osflM202043h04b1
ggagaagacggcggcccctctcctcctcgcggcggccttgttcctcgtcgtcgccggcgacggatcggagccgacgccgacgccgacgccatggccggcccagttccacgcgaagctcctgatggagttccacggcaacctgtcgctggcggacctgtggtacgactggccggggggccgcaacctgcacgtcatccgctaccagctcgccgtcgacgagcccttctacgacaacgagtggaacaacggcacctccttcttgtacaccccggcccgccgcgcctgccgctccgacgccgtcggcgtcggcatcctgcccccaaactggctcgttcctggctacgtctacctcggccggcaccccgtcgacgggttcgactggcacgtctgggccaaggccgacttcatcacctactacgaggacaccctgaccaaacgccccgtcaaatgggtcctctacaccgngaggactagccatgtgatgagctttgaggaaggtgctgagctggaggac

SEQ ID NO: 28143 - DNA, 582 bp, Oryza sativa
  Clone ID: uC-osflM202043h12b1
atggggagcggtgcgcgcgctggggcccgcgcggaatctcgccggggcgacccacgcgtgcgggctgagcagtaggctgttcctcgccgccgccctcctgtgcctcgcctcctccgcccaagcattcaagaagccctacatcgtgtatctgggatcacacccgtacggcccagatgcgtcggcggaggagcacgcccgtgcgacgcagtctcaccacgaccttctaggatcagttcttggcagtaagcaattggccaaggacgcgatactctactcctacaccaagaacatcaacggcttcgcggcgcatctggaggaggaggtagcaacccagatcgcgaggcaccctgacgtggtgacggtgatggcgagcacgatgctgaagctgcacacgacgaggtcatgggacttcatggacatggagagggacggccagatcctcccggactccatctggaagcacggcaggttcggccaggacgtcatcatcgccaacctcgacagcggtgtgtggccggagtccaacagcttcaccgacgaggaagtggtcggcgaggtgcccaagcgctggaagggctcctg

SEQ ID NO: 28144 - DNA, 102 bp, Oryza sativa
  Clone ID: uC-osflM202074a02a1
actcttattgaatcgcggtaaagtattctaattcaataaaaatttacgcgggcagaatatttactcgtttcctgttcttatcttggtaaattcagtaacctt

SEQ ID NO: 28145 - DNA, 414 bp, Oryza sativa
  unsure (1)..(414): unsure at all n locations
  Clone ID: uC-osflM202074a03a1
aacatgatacaaaaggcacatctttattatatcgataatatttacattattacaaaggcacttcaggcctaacaaataaaaataaacaacagcggacttagcgggcctacggcgtccatcattcacagngggctacaactgggtgtataangcgcaggactcgcacctttaggactttcgttcttcaaaaagcttctctttacnnntgaagggnngggacgagnanntagatgcaagaattgaggtattacnaccacagttacttcaagcaaggtcacaactgggnnnagatgcanntgaataanntgcaagggggttacagagggngttaataatatagggttttaggttttttgcagttaaacaaaccatttaaaagttcaacttagtttgccccaaaagctatttttataa

SEQ ID NO: 28146 - DNA, 53 bp, Oryza sativa
  Clone ID: uC-osflM202074a04a1
ggttagtaacagtcagtgattttttgcggtacaagataaaccctacaacgttg

SEQ ID NO: 28147 - DNA, 312 bp, Oryza sativa
  Clone ID: uC-osflM202074a07a1
actcttattgaatcgcggtaaagtattctaattcaataaaaatttcgcgggcgaatatttactctttcctgtcttatttgttaattcataaccttatcaaataagacaatttttttggttttgtttccgccattcccacccaattgaagttatttgggatttctttttcaaggaaaaatcctatcccagttcattaggtttctggtccgttccccactggcttcttccttttaaatggtttagggttttgaatcttcgcaaatgggagccttcccaaaaaaatttttcttttccgagttcaaatttctcagt

SEQ ID NO: 28148 - DNA, 80 bp, Oryza sativa
  Clone ID: uC-osflM202074a08a1
cgggaaaacatcatgacatcacaaaaaaagaggggacattactaaagggcactaacatcaacatgcaaaaaatttccaaa

SEQ ID NO: 28149 - DNA, 56 bp, Oryza sativa
  Clone ID: uC-osflM202074a09a1
ttttttttttttttttttttttttttttatttatattttttttttttatttttttt

SEQ ID NO: 28150 - DNA, 292 bp, Oryza sativa
  Clone ID: uC-osflM202074a10a1
ctccttgaaaattttgtaatttgatccgcaacgattcagatgcagatgaaacactgctgattcccactcagattacacacaatacaaatacaccgacaaactgcctcaaaaaccaccaaattgattcaaaagtaaaacgggtatgagggatcttcccaccgagactgactaaaacctaaccacagacaattggatccactggacccagattattcaaaaacagatggctatgacggcatcgtccttgcaaccgaagggaacttgcagctttggatatcctcaattcgcgctg

SEQ ID NO: 28151 - DNA, 362 bp, Oryza sativa
  Clone ID: uC-osflM202074a11a1
acgcgcccctcgcatctttcgcgaaggcgattcaggcgagaagagagagagagagcgcgaggccggcggttctagaagcttccagacccttcggcgcgagcgagctcacctcccccgtaggagctgttcattagatctgaataagggggattgaagcagtgaggagaagatgagcgtggtgggctttgatctagggaatgagagctgcattgtggccgtcgcgcggcagcgcggcattgatgtggtcctcaacgaggagtcgaagcgggagactccggctattgtctgcttcggcgacaagcagcggttcatcgggacagcgggcgctgcttcctccacgatgaacccgaagaattctggtt

SEQ ID NO: 28152 - DNA, 287 bp, Oryza sativa
  Clone ID: uC-osflM202074a12a1
gaagtgataatttaaatacttaatagtaatagactctttgatggagtattacaacatgcagcagtggcattaatacgccagtacattaattaagttacacatatgcaggctccattttggtttcttttaatttatcgtattacagaatttctgtagccttgctgatgatcacttggatatcatgtactagtaattaacaataggatgcatacaaaagatgggcccaacgacaacagaagatggcgtgcatctgacatttgtctggccttatttggttggtagtactt

SEQ ID NO: 28153 - DNA, 172 bp, Oryza sativa
  unsure (1)..(172): unsure at all n locations
  Clone ID: uC-osflM202074b01a1
cagtaaaaaatggtgaggcactcattcaagtggtacttgctgaacagaggaaaaagaccgaactgcaaatacacacccaggttagcacgacccagagagccaaatgggcacatngaatgcagtatatatacataggcaggaataaaccctgatggctatccctaacctctaa

SEQ ID NO: 28154 - DNA, 111 bp, Oryza sativa
  Clone ID: uC-osflM202074b02a1
cagtaaaaaatggaggggcactcattcaagcggtacttgctgaacagaggaaaaagaccgaactgcaaatacacaaccaggttacgcagcatccacgagagaccacaatgg

SEQ ID NO: 28155 - DNA, 175 bp, Oryza sativa
  Clone ID: uC-osflM202074b04a1
tgtcggttcgcgctcaccttgtacgtccccgccgcgccgacgttggtgagcgtgcgcctgtgcgtcaccgtcgtcgccgtcgatcctgagctctccgccgcctgtctgaatagccgtcgagtacgctcacgtggaaggacagggtacgtgtgaggattgtacaacggagtaggtc

SEQ ID NO: 28156 - DNA, 279 bp, Oryza sativa
  Clone ID: uC-osflM202074b05a1
gtgtacctgtctctctatataaaaaggggaaatttaatacacttttatttgccagccagattgacttggcaacgaattcttaacatgaatgtcaaaaaaaaaagggaaattgaaaagagaaaatatcatcgagcttttgggcgctgttaaaaaaaactggacacgacattacttgcaaaattaagcctagtaattagcggtagtagtatgctcgtcccttctacaaacaggccaaagagagagtgagaaaatcaaaaacgaataatgggaatgcgcgct

SEQ ID NO: 28157 - DNA, 93 bp, Oryza sativa
  Clone ID: uC-osflM202074b06a1
caattttttttttttttttggggtatttattttttttaattttaatacattttattttatataaaatcaatttaataaaaatacactacacac

SEQ ID NO: 28158 - DNA, 406 bp, Oryza sativa
  unsure (1)..(406): unsure at all n locations
  Clone ID: uC-osflM202074b07a1
cagtaaaaaatggtgaggcactcattcaagtggtacttgctgaacagaggaaaaagaccgaactgcaaatacacaaccaggttagcagatccagagagccaaatgggccacatgaatgcagatattcacatanggcagaaaaaccctgatgcctattcctaactcctaaatcctcctaatccaatttatgtaactcgcattttctttacaccttttgtggagcccctgcctttaaaaccaacaatttttccttaccgctaaagcctttcttccccttcacaaaaggncttggcctgccgatgttagttttaaagggtttaggaccaaaaacacaccattctcttccctttacttgcccagttaattttgcccacaaaccgtcagcccgtgggagacaggccaacaa

SEQ ID NO: 28159 - DNA, 403 bp, Oryza sativa
  unsure (1)..(403): unsure at all n locations
  Clone ID: uC-osflM202074b08a1
acttaatagtaatagactctttgatggagtattacaacatgcagcagtggcattaatacgccagtacattaattaagttacacatatgcaggctccattttggtttcttttaatttatcgtattacangaattttctgtagccccttgctgatgatcacttttgggatattcatgtaccctagtaatttaaaccaatannggatgcattacccaaaagattggcnnnccaacgaccaacagnannagatgcgtgncnnatctgaacattnngtctggccttaaatttggttggttagttacttccaatttaaatttaaacaagnnnagatgattgcatttctttgtgcctttaggtttcctttcacaaatgcttggctttcacggttgaggccttattcgcaa

SEQ ID NO: 28160 - DNA, 91 bp, Oryza sativa
  Clone ID: uC-osflM202074b09a1
gttatgttgttacaatttttttttaggtttttattttaagtattttttttttgaatatggaaggaggcaaaaaaaattccaacagcaaaag

SEQ ID NO: 28161 - DNA, 353 bp, Oryza sativa
  Clone ID: uC-osflM202074b10a1
catagaagcacgacaacttgctcaagattaaaacagcaagcacctttgatgctgtacatcatatcatcattcttaacaatacccccataattatctggtgaaacattaacaggaagacgcacaccatcaacatccacatgtcaaaacaataccacatcccgttactcagggggggcaggggcacaaaaccaaaatgagatgccactttgcactctagggtaacttctgttggtgaccacggtcgcagccgcctaaacagtggattctcataatctatcaactaattcacttttatttagcaaaccaggcaggctgataacttttttttatctcttttgaagatacatgggacc

SEQ ID NO: 28162 - DNA, 358 bp, Oryza sativa
  Clone ID: uC-osflM202074b11a1
gaagaatccgcaatataaaacctcaattattatgatttgtttctaaaaaaaccctatcaacaataacaacaacaaaatcaatatttgggctcgttctgctgcattccccatggctggctgcgcgttgtagacctgtacagtgttcttgtgtcaacaacaagcgaatgcataggcttgttccctgcagacgaagaaaccgccattttttggaggctgaccagtattctcattcccttccaccaaaacgacccaaaaattgaatattccctttatcatgagtacagaagggtttgccccgatttgacccagatgaaacttactgccatgtccgaataaacacgtgacacaaaacggggag

SEQ ID NO: 28163 - DNA, 416 bp, Oryza sativa
  unsure (1)..(416): unsure at all n locations
  Clone ID: uC-osflM202074b12a1
gataaccgcatatcaaaatatcgatccatgagagtatgtatgtcagttcgaaccacttcactcgcggcagcgaggaagtcgaaaagcttattcacgactcatctagcaaaacttgacgataangcctatctcaaagttcttcatacaanngcattgacaattgnncaaagttaccaccgaggaggttcttgaaacccaaaagtggcagactgggctgatggagaccannagccgaattnagcttacggctttcaatcaagggggcaagaaacacccttgggaggggtctttgcnctttccagcaaacttccaaagctttagcaccaccgccgggtgggaggattgtgggctcattcttggtcgggccaagcccaagcctttcttgaaccgcaagcaaccgggagtcaccaccaccg

SEQ ID NO: 28164 - DNA, 381 bp, Oryza sativa
  unsure (1)..(381): unsure at all n locations
  Clone ID: uC-osflM202074c01a1
aaaatgaacactagcaattctgtcattcatttccaatgttttacatagcaacatgccaacattcattagaatcgttctagtcatgaaaacttaatgattaaagcaaagttcaaaatgcataaccagacaattgacgcccccacggttcccttcatgtttccttcattgcgagaaaaaaanntgggtgaaaatgaaacaaatgtccggaacttcaaattgggcacatgnaaaattgtctgaaataaattnnnagctgcctttttctccttttaaagacccaaacgaagccaggattttgcattattgccaagccaaaatcaagatttgccattgcagtttaaattgttcaagtttaaaatgcatttgcatgccaatgcaacg

SEQ ID NO: 28165 - DNA, 291 bp, Oryza sativa
  unsure (1)..(291): unsure at all n locations
  Clone ID: uC-osflM202074c02a1
aggtaggagtatatcttatgaaggccaagaaagccttatgttgttagcacaagcttatatatcaaacgacacaacttagacattcactatttaatttaactagtacaaaatacactaaaatgaacagttctcacccaaaaactatcttagatttacatgnggagtatcattcnacnnntgcgccaagaaagtgaacacctttctttacttgttgagcaacacctgtaactcctttggaagcatccctccttccttcatccttttcgtcgtaaccgctttccctgctttcct

SEQ ID NO: 28166 - DNA, 171 bp, Oryza sativa
  Clone ID: uC-osflM202074c03a1
aaaacatatttctacttgattcaacagttcaagcatggctgcaatggattcacatgaaaaccaacaccatgccccagttgccgcggagaccatacaacaataggaagatctaaacttggatctggccaaacccctttcagtttattagcaattaaacctttttctatcgta

SEQ ID NO: 28167 - DNA, 75 bp, Oryza sativa
  Clone ID: uC-osflM202074c05a1
caaaaaaaaagctggttgggttcctttagggcacctttaaattaatatattaggccaattttggtcaaggaccgg

SEQ ID NO: 28168 - DNA, 360 bp, Oryza sativa
  Clone ID: uC-osflM202074c06a1
gaggagatcaaactgtgtttatagactgaactgaaacttgattatacagtttgccacgactcctaactcaagcccctatgacgtggatacatatgtacaaaagttttgacacctgagaaaatgatctagtttccctacatggatagctagctagtagctatctcatgtcatggagtgttgccaagaaggcgtccaacttgacattgtcacctcgagacaagaacttgatgcagatgggcgccctggcacccatgagtgtcagcatggacagcaagatcgagccgacgccgtcgccgcagatgagccccgacgccagcgccggcgagagcatccgcccgcggccggcgaacatcttctccc

SEQ ID NO: 28169 - DNA, 398 bp, Oryza sativa
  unsure (1)..(398): unsure at all n locations
  Clone ID: uC-osflM202074c09a1
ggagttcaaccagactttttaaaaaaataacagaaacatacagtaatgtggcgccgaaacaacaggtgacgcattatggtagacatgcaaattaaccagctacaatcatggaacgcttttgtttgctcaaggggcacgactccacactttgcaatnaatagtttcattcctttcctgtcattcttaaaattagtacaaaaaacctttatcgattcctttaactatnnnggaacccnnaaaagttacgtcaaaaaagctttgggtgtaccaacatgttacattatattaggannctaaagatanntttctnngcattacacttccaannnaagtatccatcctgcatcaanaacagatccaaaccgactggctttgttgttggtgttcaagngggcagg

SEQ ID NO: 28170 - DNA, 290 bp, Oryza sativa
  Clone ID: uC-osflM202074c10a1
cccaaaaaaaggggggaaaaaaaataaattccccccaaataaaaaaacataaaaaaaaccccccaaagggagaaaaaaaaacttgtttttaaaccagaaaaaaaataactgggggccccccgccctttttggatgtagcctgggaaaaaaatggaaggtcaacaaaaaatgtggggaggttaacaaaataaagaccaaaggggtttttaaccacaaaattggggggaaaaaaaattgggaaaaaaaaattttcccgcaagattttttggaaaaaaacaaggtagggaaaa

SEQ ID NO: 28171 - DNA, 108 bp, Oryza sativa
  Clone ID: uC-osflM202074c11a1
acggaatcaatggtgaaattaattaattcccaaacatggacatttatacatataaccggccggcggtggcggtggccggcggcgggcggcggctgtccggccgcggca

SEQ ID NO: 28172 - DNA, 376 bp, Oryza sativa
  Clone ID: uC-osflM202074c12a1
acctgctgcaccagctcctcgggccggcactgcgcgtcctgcggctgctcgtggttgcgcatctccacgcacgtgaagttgagcaccgcgccgtggcgggccagcatgcgcgcgatcggctggtacccgtcgtggtgcctcgtgttgtagtaccctgccgtcagctccgcggcgtgggaccgcgtgccgtagtgccagtggatgccggccaccttcacggagatcttcacgccgggtgtgccggtgtacacgcccgacgccgccgacaggatgcgctcgccgtgttccaggagcatctgcgagtaccagctcatgaaaaactcaccgtagggagtgttccacccaccttcacggcggaagaagggcggacgcgtgg

SEQ ID NO: 28173 - DNA, 390 bp, Oryza sativa
  Clone ID: uC-osflM202074d01a1
ttatatcggttcggccttccttttttttttttggaagcccatctatgaactttatataaaggtgatcactaataacaatgatgattaaaccacatgtggaaaggaggactatgatccacaggatgggacaagtaccttaggtacgggcattattggaggattacacaaaaacacccaaacgcactcatctccaaaagaccatataataaagtgatctgaatctaaatgcgtagatgattcaattgtagctagtagccggtttacatgtcaaaccaaattcaaaatgtaaatgaggaattttttttatggcggtgattttactcttgtatcatctttgcctttaactctattacttaatctgcaggcacaaatagcaattttaccaatatt

SEQ ID NO: 28174 - DNA, 233 bp, Oryza sativa
  Clone ID: uC-osflM202074d02a1
ttcggccttccttttttttttttttaaggcgaaattctgatcaaacattgattactcaagatcgatcacacatcaagagtacacttatacaagttcactattacgcccacagttctgatcatacgacacttaattgcaataggtcgatatcaatactgcagttcctaaatatcctatcagtcacataagaattatcagcacaagctcttgtatgctcattcctaagccggaca

SEQ ID NO: 28175 - DNA, 194 bp, Oryza sativa
  Clone ID: uC-osflM202074d03a1
ttttttttttttttttttttttttttttttttttttttttttttttttttttttttttttttttttttttttttttttttttttttttttttttttttaagggggaaaaaggttttcggggctttttataaagggcaatggggggaaaaaaaattttaaaaaggtttttaaaaaaaagggggaattttgcgggg

SEQ ID NO: 28176 - DNA, 395 bp, Oryza sativa
  unsure (1)..(395): unsure at all n locations
  Clone ID: uC-osflM202074d04a1
gagctcccaacgcagttcttcaattcaaaaagactgcccaaacagaccaagggtatcatcatagcagcaaagttttttaacacgcaacatcaaagagacactaatgcaataagataaccttgaagcgcgngatcactagcaaatnttcgcgcctttagtcgaccctcctcgnatacttgggggcccagcaacccgcttgcccgcctgtccgtggnggagcncaatcgtcccttcgtccattgccgaccaggccattgtccggcgccaggcgccctggtgacatctttgggcgatgatggggttttgcagaatgcccctccaagctccctttcatccttggtcattcgaacctctatcacgcctcggccgaggctggttttgccgtccagcccact

SEQ ID NO: 28177 - DNA, 73 bp, Oryza sativa
  Clone ID: uC-osflM202074d05a1
aaatattattaattattatgataatttaaaaaacggtataaaaaaaataaattttttgtatagaaaaggaaaa

SEQ ID NO: 28178 - DNA, 265 bp, Oryza sativa
  Clone ID: uC-osflM202074d06a1
aaaaaaaaaaaaaaagttttttttttttaaaaaaaaggaggtcccaaaaaaaaaaagggggtcaaaaggagaaacaaaaaggaaaaaaaagggggaaggaccaaaaaaaaaattattttgcgggttttcaaaaaaaattttttggaaaaaaaaaagggggggggccccaaggggaaaattgaaaaaacgggggaaaaaaatgggggaaaacaaaatggatttgaaacccccaaaaaaaaggggcaccggggttttttagggcaaa

SEQ ID NO: 28179 - DNA, 142 bp, Oryza sativa
  Clone ID: uC-osflM202074d08a1
aaagcaccctttattaattgcgataataaggaagttgcaacgctttaaggtagagcgaaagcgagggggcaaaaagaacgggcaatataaccgggcggaacaggtcagtcaaaattattagcccgaacagaaacaggggggg

SEQ ID NO: 28180 - DNA, 365 bp, Oryza sativa
  unsure (1)..(365): unsure at all n locations
  Clone ID: uC-osflM202074d09a1
acgcaatatgagcacaactatataacttaataagcacattacagcacacacatggccaaggcagttatttgaatcagtctccaacatacttcaaatcatagaccacaccatacagcaaacatagtataaacattgtcatangagagtacacgctgatagccagcttgtannatattctagcattactttttggganngcatacctgctacacaagacatagcnnagacatcaaccgnagctctttcaatcttggggccatacacnnattcaaacatggtttgctttagtgacagaccanncactgaccagaacantttnncgtctcctcaaagtaggcaccagctgccatgagcagctatcaagg

SEQ ID NO: 28181 - DNA, 303 bp, Oryza sativa
  unsure (1)..(303): unsure at all n locations
  Clone ID: uC-osflM202074d10a1
agcatggcagctgccttgtctagaacaaggccagctaccttaattaccttatgcctagaagaacaaggctgcgttatgatttatgaagataccccaaaacacaagaaggcatcaacatacattcttggaggattggngagccgacaaattgcaaagggtagacccataatttctatggcggtaagatccgataaatttcatanntgtatgtaccatcnnaacccaaatgagtcaaatacaanccacgcgtaaaaacaaanggcatgcacgacccactgtatgggaaaagttaatggtgggggt

SEQ ID NO: 28182 - DNA, 370 bp, Oryza sativa
  Clone ID: uC-osflM202074d11a1
gaaatgcacagtactagtagtagaatttttggcaataagtttcgggccattgaatgcttacagtcctttgaatttcctaggctgccttcaccataactgttgtctagattccagaatcgctccccctggccgccgaagaaaccctgttaaagtgtataccaccctggagactttctgaggagggggaaattcacagagaagcttccacaatcgcaaaggcctcctcttagtatccccacttataaaccaaagggttcatacaaccagaaatggagaagggaacgtggactaaaagcctcatgtaaatttcaaggatatattcggcaaggggtcaaggactcggggttttgtaattccctcttcccttttc

SEQ ID NO: 28183 - DNA, 171 bp, Oryza sativa
  Clone ID: uC-osflM202074d12a1
acccattaggatatacccaggggggttccgccatcagggaaaacccaacaggaagcacacatgttgggggaaaaacacacgggaaaaaggaacccacaacagaaaaacccactcgaatccaaaggaaacaaaaacaaggaggggcgaacaatcagaacaaagaaaagaaaa

SEQ ID NO: 28184 - DNA, 361 bp, Oryza sativa
  Clone ID: uC-osflM202074e01a1
atcttgacagcaaatagcttggtaactttgaaactccacagtacaatatcggcggtctagaggtccagacaaagagcatcaaagcaagaatgaagagaaagacaattggaatcacataaaaagatggcccaaagcacactaatttttattacaaccgccacgacagtcttgatcgtactgactctaaggcgcaaaatacaaatcggcattaatcttttgcggatatcccgctctctaaaggcttcttattcctcagcaaatcccagttcagagagcttgaggtgggcctcggcgtaatccgaaaagagggcgtcctcatccgcagcatatttctccaccagtggacggaaggctgggtcag

SEQ ID NO: 28185 - DNA, 181 bp, Oryza sativa
  Clone ID: uC-osflM202074e02a1
ttcggccttcctttttttttttttttttaaattgattgctgaaatttggtaaccttggtacaaatgcggccagcatgcgagcaatgaggggcaagcaaggatcacaattaattgattgaaatgcaagactatgggcgttatcattcaacggtggccgcgaagtccaactaaaatatttatt

SEQ ID NO: 28186 - DNA, 96 bp, Oryza sativa
  Clone ID: uC-osflM202074e03a1
gggacgcgcgcagcatgcattttatttaggcccgggccacaattcaaacatgtataggggatacctcttgggcgggagacacctcacgggtatagg

SEQ ID NO: 28187 - DNA, 354 bp, Oryza sativa
  Clone ID: uC-osflM202074e04a1
atcatagaaacagtgtatgattctgtcatcaaaagaaaggaaattttacaggatcggtgattgtcccatcgaggaaaagacgaggaactaaccagtcagttagacagttgtttgctgtcaaaacacaaaactgaagggggaaaaatttacagtacaacagaggttaccaaaacaacttgtggtattattagttgtagactctttatcatggttaagaccgtcctgatctgggattctcgtcttctggggaagggcatttatacacatgctgttgtactaactccgatcgattctgtgaccttgacgggaatcatcaggttttcagttgagcaaccttttctgagacctcatagc

SEQ ID NO: 28188 - DNA, 398 bp, Oryza sativa
  unsure (1)..(398): unsure at all n locations
  Clone ID: uC-osflM202074e05a1
atcaaaacgcttgcaaatgatatcagataagtagagtcaacaagacaaaactgtatctgccaaagcacacctccccaactccacccaattacgccattatttctgggcaaaagcaaacgngcttcccattcctccccttcaccagttctcaaacccatataaccccacaacanaatcnnctcctaagtgacgngcatatnnnaagatgantgaaaacccaaagcaggatacctccagnnagtcgttcatgggcgaactttccaagttgaccacttctnncatgccacagccgcctatgtcgttgccttgggcagccctagttaccggttagttgccgccgggcttgttaagggacccttcaacttggaacgcttgatgttaagtcaggcctgccgact

SEQ ID NO: 28189 - DNA, 65 bp, Oryza sativa
  Clone ID: uC-osflM202074e06a1
gggaaaaaaaactggtcaattttgaatttttgagttctgattggggaaatgccaaagggcttctg

SEQ ID NO: 28190 - DNA, 393 bp, Oryza sativa
  unsure (1)..(393): unsure at all n locations
  Clone ID: uC-osflM202074e07a1
atcttgacagcaaatagcttggtaactttgaaactccacagtacaatacggcggtctagaggtccagacaaagagcatcaaagcaagaatgaagagaaagacaattggaatcacataaaaagatggcccaaagcacactaatttttattacaannccgccacgacagtcttggatcgtacctgacctctaanggcgcaaaatacanaatcggccattaaatcttttnggcggatatccccgcctcttcttaaaggcttccttaaattcctcagcaaattcccagtttcaagagaggctttgagggtgggcccttcggccgtaattccgccaaagaaagggcgttcctcatcccgcagcaatattttctccacccaagtggacggaaggcctgg

SEQ ID NO: 28191 - DNA, 397 bp, Oryza sativa
  Clone ID: uC-osflM202074e08a1
atatcaactcatcatgttgcatgattaacatgatcaatcaacaacagaggtaatgataaacaaaaaaaaataaaaatgaggctttgttaggccttaacaaaggatttttggcatagaatatgtcttggtgcaattattctatgggattaaggaatcatttcacctttggggcttcattctttacctcgtttcagggcattcagagcggcacctttggaggacgcgggcagaatagccactgtgtgtgacctctttccgcgcgggacccctcggggctttccgcccgcggccttgtccgggctctctggcagggtgcctttccggagggccaaacaacaccctgtgaggtgtggtggttgactggttggaggccttccgccaaattggccgccactgc

SEQ ID NO: 28192 - DNA, 395 bp, Oryza sativa
  unsure (1)..(395): unsure at all n locations
  Clone ID: uC-osflM202074e09a1
ggactagatgatctgattattcagagtttcaaacaacaaggtagtcgcttattacccacccacacacaacacagaacaggtacaagagatagcctctcaatctttactctcaagcatggacgatcttcaagngttcagggacctacaatactactacaaantcgacgnaatcaatcgcttccacagtnnncacccgccgcattttcgaatttgnnatgcagaagaacnnaactgacataccagcannattgattgggaggggnnagttagccaaacacacttttcagagcttntacccttgagcctccttccttgagggaccatccatngacggcanccgaaagttcagccttcacngctgaccggggggatttcgcatacttgcaggccatgtt

SEQ ID NO: 28193 - DNA, 294 bp, Oryza sativa
  unsure (1)..(294): unsure at all n locations
  Clone ID: uC-osflM202074e10a1
gaacaacatagtgtatatatattgtataagttagatgtcaggtacaaccaagcaaaaaatcagacatgatttcatcatcgagacggcttctgctatagactgaagtgaagtagcatggtcagggaacaantttcattttgcaaggggctattacatgaattngcggaatcgtnnnagcgtagagggtnngcccaaagnannatcaatttnnaattcctctactttcatttgcttcnaaacacaggganngcagggttgacnncaaagggtatttcaagaannagagtaaggcnn

SEQ ID NO: 28194 - DNA, 58 bp, Oryza sativa
  Clone ID: uC-osflM202074e12a1
aatataaattaatttaataataaaaattgaaaaaagaaaaaaaataaaaaaaataaaa

SEQ ID NO: 28195 - DNA, 365 bp, Oryza sativa
  Clone ID: uC-osflM202074f01a1
tttgtttttgttcaattgttttttttcgtttgtttaaatgcaaattacattattgggggatatgatcatcatttcacgagaacagaggaagaaacaaaagctaaaaattaaaaccatcaacagcccgaacgagtttgcattactagatacacacattgcagcctttacttcccttctctccaaggtatcgaaatatcaaacccggtccacgcacaaaacattttgttcaattccctactcgagctgcgcgtaccacaccccttggatccttgaacatccttgggcaccttgggcccgaggtctgtgtccgacggcttgcacgcctcttgaagacgccaatcacctcgccggtctctggcttgctc

SEQ ID NO: 28196 - DNA, 325 bp, Oryza sativa
  Clone ID: uC-osflM202074f02a1
gatgataaagttcactcctataaaacggtttataaaggttccatttttacaaaaagaacttcacacatgagctctgaacgaataacaacaaggaccccaaaaattagtattcacaaggttgcacacaacaatcccggttctatttgtcgacagcatgaatttattaccgtatcttgtcatactgattacacgagaaactacgaggctactgtgaagccttatgtttgtcttgcctatttctgtatagtgtaccttttgcctgtgaccccaaaccaaactatctcgtcgtgtccctcccgttttgattgcttcaaagaaatatttc

SEQ ID NO: 28197 - DNA, 255 bp, Oryza sativa
  unsure (1)..(255): unsure at all n locations
  Clone ID: uC-osflM202074f05a1
caatcatccatataataataataaatatcggaaccatgttagatgtcaaagaattacaccgacttttaactccaattttctaagcaactggcacgcttcgtttctgaaaaactccacagattggtattgggcatggcacctatggcctttaccaggccaaaatccgaccttcttttgaccaacacttcaactttctaccacaagcttaggagcncgaggctaatttcctgggataatttcctgaatgggtgttca

SEQ ID NO: 28198 - DNA, 273 bp, Oryza sativa
  Clone ID: uC-osflM202074f06a1
attaggaaaaacaacagaaaaaaaaacttgcagaagggggattggacaagggccaaaccaaaaaaggggttaaaacaccataaagggttttttttgggggacaaaaccttaaaaagggggtgcagggaggttccgggttcatattaagaaggaaaaaaaacccaaaaggtgccacaaaggattttgcctgggtgttttttccacttttaaaagaaaaggcctttatgaacttacttaataaaaaagggcaaaccaaaaaggggacaattttgg

SEQ ID NO: 28199 - DNA, 61 bp, Oryza sativa
  Clone ID: uC-osflM202074f07a1
ttttgtgtatatattttttttttttttttttttttataaagtttttttttttttttttttt

SEQ ID NO: 28200 - DNA, 261 bp, Oryza sativa
  Clone ID: uC-osflM202074f08a1
catcaaaaaaagattttattagcaaagaacgggggataaatgattccacatgccgactcgatgaatgatgctaattattaccaggggtaaacggactaaagttggcgtaaacaaaattctagctgaaacaacaccagcatgaactggaatgcacaattggtagaacagcatgccttatgtctattttacatggtgacacgagaatactcactttcggctgttgcttgaggatagattcctctagtggttctaccagtttaa

SEQ ID NO: 28201 - DNA, 399 bp, Oryza sativa
  unsure (1)..(399): unsure at all n locations
  Clone ID: uC-osflM202074f09a1
acacacacaaatcattcattcattcattaccagtcaaataacaacaaaccaagaaccaacaaatgtacattataggaaagctgttgctgttcttctcccaagttccaaccataccgagtattccaacaaagaatanaannaaaactgnnacgaattagatgggtggttgnntgcggtggggaaaacccaagccacaaatccttgagtcattctcaatcaaaatggcttcctttatggcacctcngcttaaaaaactcttggctagggcgnncactcatcattatatgccatcttcctaattcagatgaattggggaaggggaacaggaacagcacccatttgctttttcacatttctgctgagccttgggatgatgatccgttgcatgcgaggagatga

SEQ ID NO: 28202 - DNA, 335 bp, Oryza sativa
  Clone ID: uC-osflM202074f10a1
ataatgccacgtaggataaagaatcggtcaagactgtcacgtaggcgccatgtcagctgaaaccatcatgtttgaaggacatgaatcatacccgggcgcaatagttgagggagccaaaatatactgttttcctttcccttttaggcttgacccatcttccttttcttttgtagagcggcccaaatccgaaagggtggggagatcagatgggcttttggggcccacattatcattttgtctttttagaatggtttttttcgaatcagttcgatttaaaatttacaaagtttacaagggttaaaaaaaaaaaataagggcgccgccggacgcggggg

SEQ ID NO: 28203 - DNA, 302 bp, Oryza sativa
  Clone ID: uC-osflM202074f11a1
gggaaaaaattaactaagggagaaaaaatttctaagccaaaaacccaaacactgggcccttcctataaaaagaccaaaaggaacaggtttaaaaaataaaccccaaactggacgaaaattaacacgcacattaaaaaaattcttccacccttcaaaaacccccccctttttcttcccggggaagataaaaataaactgggggccagccagggtcgccggggggaaaatgttaacaggcggggcgccctctcggggggcccggaaaaaacggggagcaggttgtggccaaaggggccgctgag

SEQ ID NO: 28204 - DNA, 403 bp, Oryza sativa
  unsure (1)..(403): unsure at all n locations
  Clone ID: uC-osflM202074f12a1
acaatagcaatgataaggtttaatagaacaaacttgttttgtgagtacaacaaacttcttcctgtagcagtactacaagatgttgacaaatgaaggtgcantcattccttgcttcctgnccagtgatcgatacaangtaccagtttatttcaacagtctccatctcgccctttcattcaatacaagagtggatcctttcatttcacttttcaaaccactcaagtcagggcattttgactggagcttacatctctacaaacccnctcaatggttnnagcctgcattgannattcatccatttaagaacctcatgtttgtaaaaaaattagcttncaggccagannnagcaatcccttatcactaaaaaggactaatctcttgacctcaagctttttgcaaccta

SEQ ID NO: 28205 - DNA, 139 bp, Oryza sativa
  Clone ID: uC-osflM202074g01a1
agaattaattcacaacaccatattttattgatcaggttcagaacctgcacagaaatacacactaccggtacagatctcaccttgtctccaatactcgtacatcacataccacgcttgttccaccacgaataccgtacat

SEQ ID NO: 28206 - DNA, 187 bp, Oryza sativa
  Clone ID: uC-osflM202074g02a1
aaggcttaacatccaagtttaaaccgaacagaaaatagagatttaaatgactgacatagtgcacaaagcgagcagaaattaacggtcaatgcaacaacttgaaatgaccgcgggacaaaactataaccgagtcactaaatagaggctacgatatacttaaaatgcaacatgatggaaagtcacacac

SEQ ID NO: 28207 - DNA, 367 bp, Oryza sativa
  Clone ID: uC-osflM202074g03a1
atctatagttttatgaaatttactttttaatttataatacaaggatagtaatacttccataaagaaacagagataatataacgttatattgcacgaaatttattgatacaacaaaataattgactgttcaagcataaggtggtaaagaagacacaaaaaccttgccacgattagcacgctagtaactcaactacaaacgatacacacagcagcatcagttcactggatggagcttctccaaggatcattctaagctaaggcactcattccgatggcgtgtggcaatgcttctacgggtcttcacgatagataccaagacacaatcaggcagtcttgggcttgggtttaagccgcttcaattgtgagt

SEQ ID NO: 28208 - DNA, 342 bp, Oryza sativa
  Clone ID: uC-osflM202074g04a1
gaacaaaatggtacagcctttttattgtcaagccagcaagaacgctgaaacaatcacaatgtttactgaaaaaaaaacatcctatagagaattatacagctacattgatgattatagtattaaggctttgcatccaacacaacacagtagttgtagcattgcccccgttcacatggtcatatatttagtagatacaatattccaacatggtataggaaaagaatagtgatgaaaaattataacccccccccacccaaaacaaaagaaaccatacataaagaaaatccaggtgaccaaaatccaaacgcctcctaaactgtttttaaacccctaactgagtat

SEQ ID NO: 28209 - DNA, 395 bp, Oryza sativa
  unsure (1)..(395): unsure at all n locations
  Clone ID: uC-osflM202074g05a1
gaactaaaattaagcacgtgtaagagttcatttccattaattcctgtaaagcacagcattacaaacacacaatcacctcaagaacacactcacaccaaaagtccattttattctccactgctactgaaggcaaattcatacctatangctatacatgcgtctgtcctcttgatcccatgccatcgggccgtctgagaaaatttctcgagtcattttgtccgaacgaggcgacttttgaaccaaccacgttcccctttggtgttccggtgggacgcccggcgtcagctcctccgagcggccgggttcgtgcctggcggccgtcttggcgcagtcttcttcggaccgtcgtacccctttccttccttggccctttctccagactagccgccccgtac

SEQ ID NO: 28210 - DNA, 145 bp, Oryza sativa
  Clone ID: uC-osflM202074g06a1
gcagcaactgacagatatttgtattaaaggggatagcaacgttaagagtctacagaatatgggaacatcagaaatacaaaaccaccggttccagcctttgagcatggtacctatacaaacgatcacaaacccaaaagcgtaaaca

SEQ ID NO: 28211 - DNA, 257 bp, Oryza sativa
  Clone ID: uC-osflM202074g07a1
ataattaattcacaacaccatatttcattgatcaggatcagaacctgcacagaaatacacactaccggtacagatctcaccttctctccaatactcgtacatccatccacgcggtgccacacgaatacgtacatctataccggttacacgtaacgtaacattctactgctaccgcgttacaccacacgcaccacttctttcatgcaggagaacgccgccattcgttcgtctaaccctagccttaggcttagcttgaa

SEQ ID NO: 28212 - DNA, 369 bp, Oryza sativa
  Clone ID: uC-osflM202074g08a1
caatcaactctgttcaccagatatattactactaacccagaagacatctctaaattagatgctccgatttgctaatgagcgatagagatttacataatggagaggtgcgaatgttgtgaatctgcagatacactgaaacatgctgatacgcctcccccggtctctgaatctggggacaatcagagcacacgcaaaaatgggggcggatactcctactaggataatgcatactactacaacaattggtttggggggagccctcgcccctcagtctactccttgttccgggttgatcggtctttcttgtgcccgccagggatacgggagatctgcagacctctgctgaaggcctggttgaagagcatcctg

SEQ ID NO: 28213 - DNA, 373 bp, Oryza sativa
  unsure (1)..(373): unsure at all n locations
  Clone ID: uC-osflM202074g09a1
gcagagcttaattcggatcataattgtctgctcaatggcacatacaaactccagacattgaattgcctggcaaactccaaagggttacacggtataacttggacactttcagaactaatcaaaactgaacgacccgctagctacaacaacaattggacaatgcttggttnntagtgatctgaatatggttgatcccaacangatcaatgaatcccctgtgtttctgcagggcccgcatgcttttgagcaggtaagttagcccttgctgcttatttatttctctttctttcagcagttcatgctatgatggatatgctatctatcaggaaaacaatccattcttcacttactaagcttctagtacacggtgact

SEQ ID NO: 28214 - DNA, 391 bp, Oryza sativa
  unsure (1)..(391): unsure at all n locations
  Clone ID: uC-osflM202074g10a1
gattaaaaataatgatgaatttgaagttttctgtattatttcacgtgttatttctaggagcatacaaaacagcacaattcttggtgctgaatttacattgccagacaagtttgcaattaataataggnttccctaatanatatatacataccttgaacatataaaccctcatatacaccnaagtagtgnagatgtncnngttgtgaaaccccttattcccaccattcannagtagggnnagttgggattggcttcagattcnnaagcatctatttgaggggcattnnatgaagaagattaccccttttatcaccaannntatcaatcgcaaccgcaatggggccaaccccttantgcctttcnttatgtgcaatggcccgcaattcctctc

SEQ ID NO: 28215 - DNA, 353 bp, Oryza sativa
  Clone ID: uC-osflM202074g11a1
ggtgaaacagggtaccacatcctttcaagcatcatcactagatttaattaaaaattacaacatgcgaaggacggattagatcataagcacttcaatgaaaaataaaggttgctcggaatacatctaataacctaaacataatatttctaagccatcctttcatacatcagcttgcatgcaccaaccctgttcagaaacacaaaggaaagcaaacctagaagaactcgaactctagataattgtctgagcccttctggttggcagccggggcaaccttctcagtagctggtgctggctttggtgggcgctcgagctcaactggcttgggtatctcaggagggcttgcacatcgt

SEQ ID NO: 28216 - DNA, 164 bp, Oryza sativa
  Clone ID: uC-osflM202074g12a1
aggcaagccccatccaacttatatcaacccatcatgttgcatgattaacatggacaatcaacaacagaggtaatggttaacaaaaaaaaaccaaaatggggctcttggtacgccttaacaaagggatttttggcatagaattatgcttggagcaatagattcta

SEQ ID NO: 28217 - DNA, 246 bp, Oryza sativa
  Clone ID: uC-osflM202074h01a1
agcccatatctttatattatattattattaacaaaaacttgtcatgcccagctatggcttgggcgcgatctgatacacagaacaaagagaaaacataaaaaggagaaataattaatagcaagcgttaagccggcctgcttaaacggtgtcaaggcagctgccgtcgcacgctcctctgcacgttgaggtcgaagactctttgggcaacagggttcggatgcaacacttccgggcacagagcaggtt

SEQ ID NO: 28218 - DNA, 369 bp, Oryza sativa
  Clone ID: uC-osflM202074h02a1
aaacaatgaacagggattcttgggaaaccagatctctccacaatattatgttatatacagctcatgaatggtccagagcagcagcagattacaaacgatgccagtacattttgacaggtccgggaaacaaagtgaagacattgaaatcaaagtatactatagagtacacagaaatgttcccaactagtgaccctatgtattagttttttttccctgttcgtatgtattagagcagaaatttaaatgagacaaaccggcaacctcttatctatgctgtaatctgtatccttatcatggctacactcaaaaagtaggcctttggaacaagaagcagggaaaaaaatccactttctgggcagcaaaacgttg

SEQ ID NO: 28219 - DNA, 85 bp, Oryza sativa
  Clone ID: uC-osflM202074h04a1
ttttttttttttttttttttttttttttttttttttttttttttttttttttttttttttttttttttttttaatttttttattt

SEQ ID NO: 28220 - DNA, 399 bp, Oryza sativa
  unsure (1)..(399): unsure at all n locations
  Clone ID: uC-osflM202074h05a1
actgctcattgcaagcatacttttgttccactttcaatccatttcatgtcctgatccaagcaaccagaccagaaatgaccatgaacagtttgctaatgttgcatgcttacaacaatgtgttcaaantcccaacagntctaactattttcaagttgacanntggctttatatctaaactaaaagtgcaaaggttgatctccacncnnagcaaggannatcatcnnagaaatcaaccccacttctcaactccaggtgaacccaactgacacaaaacacnnttaggtagttttggaaggacccataanccatcaagaacctctcctttgaaaattttttgtaattttggatccgcaaccgatttcagatgccaagatgaaaacactgtctgaattcccactc

SEQ ID NO: 28221 - DNA, 338 bp, Oryza sativa
  Clone ID: uC-osflM202074h06a1
atccttcaaaaactcaaagggtgtagaatgctacttgtagtacattagatggaacaatggacaaggacaaaaggatcacatcagtcattacaccatccatgctgcaatccagattagatgatatcatcgcccctcaaaacttatctccagttccgaatggctaactaaaactgataaggttagatgatgaaaatgttacaggaagagatcatacataaagatgaaatagatgggactcccgtctaccaaaaccatcaatcacaaaaacacccgaccatcaacatgcggcagataaagcgcagcagcaatgggcatgcgaacaggtgagcacttggctg

SEQ ID NO: 28222 - DNA, 177 bp, Oryza sativa
  Clone ID: uC-osflM202074h07a1
tttttgtccatatctttgtagtcttgaagccataacaaaaactggtcatgcccaggtatggaccgcgcgcgatctgatacacaggctaaagcgtaaacatagcaacgtgaaaagcctgacagggcgcggctacaaatggcctggttaaaccgatacaaaggctgcactcctgaacaa

SEQ ID NO: 28223 - DNA, 362 bp, Oryza sativa
  Clone ID: uC-osflM202074h08a1
atgacgaaaaacaaggaaaacgatacattaatacattttgcccaactcttccaggtacagaattgattacccacaagatacaacatacttactttaaataccattgcataatactgggaaaaaactgtacctgcccacaacaaatttggacctgtaccactaggactcggaatatatccacagaatcggctgtgaaattcaagaaaggggagctatttagtctggcaaccccgatttccagcagggtaattcacctttaacaacaggaacttttggtttcgattgcactgctgacatgcaacctttcatgccatgataattcctttggaaactggatgttcaacttaaattttgcattatat

SEQ ID NO: 28224 - DNA, 366 bp, Oryza sativa
  unsure (1)..(366): unsure at all n locations
  Clone ID: uC-osflM202074h09a1
gcacactataaaagggtaatactactccattctgaatatctcttaagatacaatacaatgagccaccataattcaacaacacagaacatgcatcgaatttggtattcccgtctcaattcaaacagttagcataagtcttcacataccatgtacaacataccggatcacatgcgtgccacccagatgtcaattacannncttagagcactccccacatgttttcagcaaccaagcgcacgggcccttgcttggtcccacgcattgttcgcccgacggtccgcccggatggcccgtcttccgtttgcccgacttcgtcagcgcccgaacacctaatgggagaaacggggagtgttgcgcggaagtagt

SEQ ID NO: 28225 - DNA, 346 bp, Oryza sativa
  Clone ID: uC-osflM202074h10a1
gatgaaaaggtattttttattacatgacactaaacataaaccagttcacttttgattggaccaagggccccggtagaccactatgggacattttattaatttacacatacttgaagggctaagaggggaacttcctaggccatactggatttcccaacaacattccaattttccctaatatagactggaaacaaggttttaaggatattacaacaatattgaagggcatttatttcaatatggacataaggagcaatactcggcaatatgagtagacactaactggatgctgtgccgaagatgttgtggtaggttattttgacgggcgcatatcagcactgtgaga

SEQ ID NO: 28226 - DNA, 133 bp, Oryza sativa
  Clone ID: uC-osflM202074h11a1
agccaaaaacaaaaaatatgcataaggatcctatatcaaagatccagagtaccgataagctaatgggcaaatctaaccattaattaatgaaaaagaaatagaaagatccatggcaaatgttatgcactcaaaa

SEQ ID NO: 28227 - DNA, 403 bp, Oryza sativa
  unsure (1)..(403): unsure at all n locations
  Clone ID: uC-osflM202074h12a1
acaattaccaaccaaaaatagggcgcctttacaacactggatgcactacattactaacactaaatgatccatttggttctagataagtaaaaaagagaaacaaggaatgaacaangcccttcaatggggcaacccacacaacgtttcaactacataaaatatcttgtgcatcaacctcttctgactccatcagcaggatgccaattcgctgcctaggcattaaattggagacaaaagttttgtgacaatgaacaagcaagtgccaaacaccatatctggttccagctcacgccaatttaacatttactcaccaaaggcagctaataacagaatggcctggacaatgcaaaacgcacgtttgggctggtaccttgggtgggccgaagttcacaaggttgcccgc

SEQ ID NO: 28228 - DNA, 359 bp, Oryza sativa
  Clone ID: uC-osflM202075a01a1
ggaaacaacgggtggcaactcaagtaagccacttcagttgaatttgcctatcattattgacagctttgttggttttggacaaagaaaacaaggaaaatggtgctcaaaaaaatttcctccacgtcgcacacacaatgtgcatggacgaggccataatatactgatgccaaaagaggcaattattttgcctttgcagaatgtaaacatagtacatcggttggagagtctagtaacggagcatgtaggtccggcgcctgaaccaattgttgtccggaagacccttaatggttcccattgcagcaatatcgatattcctggtcaaaaaatgaaaacggttggccacttccttgactgtgctt

SEQ ID NO: 28229 - DNA, 270 bp, Oryza sativa
  Clone ID: uC-osflM202075a01b1
tttcgttcaacagcgacgaagcaaaccctaggggagggggacatgcaccaccggcgacgaaatcaccgacaccagcgagacaccaccgacacaaaagccccccagaaggcaacccagaggggaccctacgacaaaaaacacacacaacaagcaccaagcgaagagaggggcgagcattaacgcacaaacgatcaccagatacaaaagacaaaagcgccaggaacaccgggcacaaaaaagaagcaacgactgaaaacagaaaacgactaa

SEQ ID NO: 28230 - DNA, 260 bp, Oryza sativa
  Clone ID: uC-osflM202075a05b1
cttccttcaattcccttcccacccaaaccctaaaacccaaatggtcatcgcaggacgcctggacagtgagccgttcccgagacacgtcagtgaggaaccaattgcgtgcggccccgagggggacatgatgaagaactgaagagctaaaagaacatctgctgtgaaacaattgaaagcacaacaccgtcttatccctagcggtccttcaatctagaataaagctctggagctctggtcactatttgacctctctaacgccc

SEQ ID NO: 28231 - DNA, 122 bp, Oryza sativa
  Clone ID: uC-osflM202075a07b1
tctctactaccaagatagagcaaagcgtaaaggagacaattgcctagaggttatatggcgctatttaagaacatttgtgtcattttttcatatctttacatatatatttttctgcccttttt

SEQ ID NO: 28232 - DNA, 261 bp, Oryza sativa
  Clone ID: uC-osflM202075a08b1
tcgcgtacctctccgagctgcgacttgacgtggtagccatggaagcacgggacctggacatgcttgcaaggatgccagcactccgcacactctgcctgagaacccaggcgagattttcatggacagttggtggtgccggactgtttccgaacctgagattctgtaggatggacatagcactcacattttttcaaggagccatgccgatgctcatgaagcttcaattatggctgtgggcgtttgacaatttttccctcactg

SEQ ID NO: 28233 - DNA, 165 bp, Oryza sativa
  Clone ID: uC-osflM202075a10b1
tttctcagtttgataagttcaacgtaatcataacgtcatatgatattatacgcaaggatattgattttcttgagaatgtcttttggaactattgtgtgctggatgaggggcacataattaagaacttaagatcttaaataacatctggtgtgaaacatttgaaag

SEQ ID NO: 28234 - DNA, 286 bp, Oryza sativa
  Clone ID: uC-osflM202075b01b1
gtgctgtgcaagatggtgattgcgcgcggccttctccgatcgaatgcctcttcttcctcctctcaggcaatcaacttattgaagtatgtaactagcactggaagtctgcaagggcacacgcaaaatttgtgtgatgcatcaaccagacatttcagttcagtaccatcgccccagtacaactcaactgaagagaatgggttcaaggggcatggcatgttggcaccattcacagctggttggcagagcaccgatgtccatccgtttgtcattgtaagatccgagggtt

SEQ ID NO: 28235 - DNA, 241 bp, Oryza sativa
  Clone ID: uC-osflM202075b02b1
atacataggaggcaatcccctgtttcttgctcctcccctgtgttcccggcggcggcgatggggtgcgcggtgtccaagggcgcggcggttgtttctttttctttctatttatttttttcctttataatttctttttttttttttattttattttactaatatttttttttacataattttttatattttttatttatctttatattttttttttctttctttataattctctttatttttt

SEQ ID NO: 28236 - DNA, 434 bp, Oryza sativa
  unsure (1)..(434): unsure at all n locations
  Clone ID: uC-osflM202075c01b1
gttcttgcctccgccgccgccttcttccgctcccaattcgggcccgaattcggtccggggggggttaaatgaaaattatttttttatattattttttttttatattttttatttatttttttttattttatttttatttttatatttttttttattnttttttttttttattttttttttttatttttttttattttttatttttttttttttattttttttttttttttatttttttttttatttttttatttatttctttttttatttattattatttttataatttatattttttttttttttattttttattaatttttatttttattttatattttttattttttttatttttcttttttatctttttatttctttttatttttattttttcacctctttattttattcttcttctctttcattttttt

SEQ ID NO: 28237 - DNA, 689 bp, Oryza sativa
  unsure (1)..(689): unsure at all n locations
  Clone ID: uC-osflM202075c03b1
cccccctttttcctttccttttttcccttttcttcccatctcttccttttatgctctccctgctcccccccccctgctgccctgttggttggntnnttccctccttcctctcttttgtcttcttcttcttcctctctcctctttttcctttctttttcttttttcctcttttctttcttttttttttttctcctcttttcctttcttttcttctcccctttcttttctcctttctttctttttctctctttttcttttcttttttttcctctccttcctttctccttccttcccttccctcttttttttttctcttccttctctttttctttttttctctcccttctctctcttctctttcttccctttttcttctccctttcctcctctttcttctttctcttcttttctcttttcttttctcttctccttcttttttctttccttttttttttttccctcttttttttcttttttcttttttttttttctctcctcttttttttcttcctctttcctccccctcttctttttntcctcttctctttttctctctctccctcttctttttctcttcttcttctttttcttcttctcccnttcttttctccccctcttctttttttcttctccttcctttcctcttttttcccctcctccttctctttccttctccttctttttctttc

SEQ ID NO: 28238 - DNA, 131 bp, Oryza sativa
  Clone ID: uC-osflM202075c08b1
gttcggccgccctttttttattttttttgaggggaccattttatagtgatcagggtcagaacctgcacagaaatggatactacgggttcagatctcacccgcttttttaattatcttgttatacattattt

SEQ ID NO: 28239 - DNA, 514 bp, Oryza sativa
  Clone ID: uC-osflM202075d01b1
ctcgtagaaaaagaaagaaattaaaaagaaaatcacggcgcgtgagcttgcagagacagcaatggtgagagttggtgccgccgcggcggtgctcgtgctggcggcggcggcggttttattttttttcaggcgtttgttttttttcctctctttcttcttttgcgttgtttttttctttctctcttttttctttcttcgttttctttttccttttctctttttttctcctccttcttctctttctctctttttccttttcttcctctctttttctctttttttttctttctcttcttttttttcttctcttttctccttttcttcttttttcctccccttttcttcttcttttttttttcttttcttttctttctttctttcctttttctttttcttttttctctcctctttccttttttctctcttttctttttttttctcctctgtttccttttacttttctctctctctttttttttctcttcttttctttttctttctccttttccttttc

SEQ ID NO: 28240 - DNA, 286 bp, Oryza sativa
  unsure (1)..(286): unsure at all n locations
  Clone ID: uC-osflM202075d03b1
acatcncgccgtccggcgatcatccttgataatctcaattaaaattatacatccctttgttatcgatcatcgatcatcagattggtggctggctggctaggccttatcagtttggaaccggatgctggttgaggagctgagttggagtgtcattctcttggattccaggacttgtttctgttgtccttttatctggttccttctttcttatttttttttggttttcctccctctcattccctcctcttttacttcacctcctcccttttttctcttcttttttttc

SEQ ID NO: 28241 - DNA, 286 bp, Oryza sativa
  Clone ID: uC-osflM202075d04b1
ccctcatcgtctcgtcgtcctcccggagcgaccgcctttcgccctccctccatggcgtcgacggatgccgacgaggaccagctcctcaagagcttcctcgccgaggtcagcgaggccgaacgcgacaacgaagtgctcaggattcatggttgctcaagttaatacccctccgagcattataagtcttcattttaatctccagttgactatgcgattaaagattatacgatgttaatcacattattcttttatatttatcctccccattctactcagacattttatt

SEQ ID NO: 28242 - DNA, 348 bp, Oryza sativa
  unsure (1)..(348): unsure at all n locations
  Clone ID: uC-osflM202075e08b1
tcgctaacaaaacagatactatgtccggtcacttgacttnttctnttccttctctgcctcagcagcccacttcaagaagcactggcagaactatgtcaagacatggttcaaccagcccgcccgcaagcagaggcgccgcattgctcgccagaagaaggctgtgaagatcttcccccgcccaacatctggccctcttcgacccattgttcagtgccaaactttgaagtacaacatgaagtcgagggctgggagaggctttacccttgaggagctgaaggctgcgggcatccccaagaagtatgctccaaccattggaatttccgtggatcaccgccccaagaaccgctc

SEQ ID NO: 28243 - DNA, 142 bp, Oryza sativa
  Clone ID: uC-osflM202075f02b1
tgagactgcagaaacgagagctagctagccagaggctgcaagaagattctgcacccatagatcgtttaccatggtctcatacccatgacttttaactgtgttccctatttatgtttatatttattttatctctttctttcat

SEQ ID NO: 28244 - DNA, 371 bp, Oryza sativa
  Clone ID: uC-osflM202075f06b1
ttatgtggcagatcttcgtgaagaccctgacggggaagaccatcaccctcgaggtggagagcagcgacaccatcgacaacgtcaaggccaaaatccaggacaaggaagggatccctccagatcaacagcgtttgatattcgccggcaagcagctggaagatgggcgcacactggccgactacaacattcagaaggagtcaactcttcacttggtcctcaggctcaggggtggcactatgatcaaggttaagaccctcactggaaaagagattgaaattgacattgagcccaccgacacgatcgattggatcaaggagcgtgttgaggagaaagaaggcattcctcccgtgcagcaaaggcttatttatgct

SEQ ID NO: 28245 - DNA, 473 bp, Oryza sativa
  Clone ID: uC-osflM202075g05b1
ctctcctccgcccttgcgccgcctccgcggagccctcccctccccgccggcggcggttgcgaagcgactggattggatggcatcgagggttccgtctccaccgtgcgcggcggcgcggtccggttgggctgttccgttggtctccgtcctggtcgttagctccggcttttcttgtgtgtctgtcttttttctcttttttttttctcgttttttctctcttcttctttttctttctgtttttttctttcctctctcttctctttttttttttttttctctttctcttttttttttctttttttttcgtcttcctcctctcctcctttcttttttctttcttttttctttttttcctcctttcttctttgtttttccttttttttttccttgtttttttcttttttccttgtttctctctgtttctcttctttcttcttttttttttctttttttttctctatcttcttttttct

SEQ ID NO: 28246 - DNA, 320 bp, Oryza sativa
  Clone ID: uC-osflM202075g06b1
atctaatccaacacttattgcttgagctcctttccataggcaacttacttagctggtcacacttacctgtcgaatggaaaagcataggtagttccaaaacgggtgcataggcagatatgcttgcactggttgcgcttgtgagcacggctcaggtatccatgggtgcaaggcggcgcatggtgctgtacaagccagacccggctgacatgctcttctaccacagctgcgccgtgctccagggcaacatgccggtgtccatctactggtacggcaagttcacgccggcgcagaagtctatactcttcgacttgcttctgtcg

SEQ ID NO: 28247 - DNA, 499 bp, Oryza sativa
  Clone ID: uC-osflM202075g07b1
tctttagctctgtgcgtcgtcagctctcctgcccgggacagtgatgagggcaaggagccatgcttgtcaggttaggcgtcgttgttgtagcctccgtctcagctttaactcttaagagagccaacagtggctacagagatggccaagcaaggtaaggacaggataaaactcgctactctttacatggggagcatgaacaagagactggcgtggttaaaacatttaaaggaatttatctatctatcatggagctatgattcgtccgatgaatcaaatggttttgatctacatttagttggctttacttgagacccatattgtggacacttacaaaatatttcctctacctttgtagattcccaatatttgtcatctataactttgtcctgtgtaactttcagttttccaatctttcccttattacattttatatatgtatcttttctcattttacttgtcttttataatcctacttcctctatttactttttattttttc

SEQ ID NO: 28248 - DNA, 296 bp, Oryza sativa
  Clone ID: uC-osflM202075h05b1
catctttcccccctccgccgccgccgccgccttcttcccgggggcggggcggggagaggaggctcgggggagcagggatatagtatagacactcaccaaagatgggagaacatgtggactctggtctatactaagtgaagctaacagtaaggctaaggtaacaacttccaagaggccaaatataagacaacagcaattctgtaacaacatgagacccaaaaagaaactgtgcggacgattccaaagcacaacatacactggtaagtttattaatgatgatacgactatagatatta

SEQ ID NO: 28249 - DNA, 363 bp, Oryza sativa
  Clone ID: uC-osflM202075h06b1
ctccttttaacatgcaacaatcatcatctcattgttcaagagttcaaacattatcgtcgtcatcatgggacgaggaaaatttgccagacacgcaccagagatgggagaacatctggactctggtctcttctaagtgaagctaacagtaaggctaaggtaacaactcccaagaggccaaagataagacaacagcaatcctgaatcaacatgtgacccaaaaagaaacggtgcgggcgattcccaagcacaacgtacactggcagtcgttattcgtgatgtccgtcgaagatttcagcgctgctgccaatggcattatgttcttagaaccacttgtacagcagtccaccgcttgtggcgattaat

SEQ ID NO: 28250 - DNA, 110 bp, Oryza sativa
  Clone ID: uC-osflM202082a06b1
atgagtagcttgatgcgaagccagcaccaacggtgtcggctcatgcagacatcggaggcatgaacaggaccggagggcaggtcctatgataccgtgaggaggagcctaag

SEQ ID NO: 28251 - DNA, 405 bp, Oryza sativa
  Clone ID: uC-osflM202082a07b1
tcgatacgaacttgatgttactctaataataaccgtgaaaatctatatagttcaaacttagattcatgtaacaagggcacgttggattccttatttgtttatttctcgtctatattttctcctctgtgaacttgcaggttaccatacctaagctgttagaaaactgcaaaatatttctcctttgtttataccatattcttggaggagaccatggacaaaagaaattattggtgcttatctgttttgattatcaatgaaatagatattctacttagttgagtagtataatcacttatcagtcaatttatttttgacctgccaacatatataaactgcatggcactcttctattgcttttcaatatatatgctcgtcttagattgccaatcttcttttagcccccat

SEQ ID NO: 28252 - DNA, 429 bp, Oryza sativa
  Clone ID: uC-osflM202082a08b1
tcgttcagccgtccgccgccgcattggccgagcaggccctgctcggttcagacgccagcctcgccgtccacgcgggcgagaggctgggcagaaggatcgccacagacgcgatcaccacgccagtagtgaacacctcggcctactggttcaacaactcgcaggagctcattgacttcaaggaggggaggcatgctagcttcgagtatgggaggtatggtaacccgaccactgaggcattggagaagaagatgagtgcactggagaaagccgagtccactgtctttgtggcatccgggatgtattgcaagtgtggctatgctcagcgcgcttgttccagcaggtgggcacgttgtggcccccactgattgttaccgcaagacgagaatttacatggagactggacttcctaagaggggaatttccatgacc

SEQ ID NO: 28253 - DNA, 155 bp, Oryza sativa
  Clone ID: uC-osflM202082a11b1
tttcgtcgaagcaaagcgcaccacgcacacgggaagagttgagaggtcacatcgcggcggccgcagccaggatgccggctcctctctcaccaccagcctgtccttgatcctcctcgaccctatcgcagaggcacccgccgcggaagcctcaacag

SEQ ID NO: 28254 - DNA, 227 bp, Oryza sativa
  Clone ID: uC-osflM202082a12b1
ggtttttctatgcaacgaacggggacacagaacaagcaacgctggcacacacacacaaacccaacatggccaaaagaggacctgtaccacaatcaagggcgcaacatcaacgacacacaacaacgagacggagaaaaaaaaccagcctttgacctagacaagcaagccaggaagcaagggcgagcaaaaacaccccaaaggcactcaccgacaaggaacaacacaag

SEQ ID NO: 28255 - DNA, 100 bp, Oryza sativa
  Clone ID: uC-osflM202082b04b1
ccccgttcctacaataccaacaccacatcaaaaaaaaggggttatttaaaaaccccagggggtccacaccccaccccacctccaacccccactacacccc

SEQ ID NO: 28256 - DNA, 457 bp, Oryza sativa
  Clone ID: uC-osflM202082b05b1
atagattaagaaaaaaagaaaaaaaaaacatagcgaggaggagcccgcgagatggcgatggcgagcttggcgaggaggcgcgcggcggaggcggcgctgctgcggcgggcgccggcggcggcgtgggcgtccgcgtggagggggtacgcggcggcggcggcgggggaggagagcgacgtcgtggtgatcggcggcgggccgggcgggtacgtggccgccatcaaggcggcgcagctagggctcaagaccacctgcatcgagaagaggggaacgctcgggggcacctgcctcaacgtcggctgcatcccctccaaggctctcctgcattcgtcgcatatgtaccatgaggccaaggcttcttttgcacaccatggtatcaaattctcaaatcttgaaatagatttgcctgccatgatgtcacagaaagacaaagcagttgctgggctgactaaaggga

SEQ ID NO: 28257 - DNA, 234 bp, Oryza sativa
  Clone ID: uC-osflM202082b07b1
tcgatcaccccccctccccaccaccaatcccccacgcgattctccggatgcgcccgcccgacgcggcctaggcccctgcggttcaccggcggtggtggggtgagagagcgcgcgccggcgaccggcgaagaggagggggggggggtctatggtttctttcgtggtgtttttgttccgtcttgggcggtggctcgggtgcggcttgttcggggtgtttttcttctggtctttcgt

SEQ ID NO: 28258 - DNA, 519 bp, Oryza sativa
  Clone ID: uC-osflM202082b09b1
tcgatcagttgctcctgcaggagtaggatatgcaggtactaaccaaggtacaggaggtccagcggctgtacctccacccgcttctaataataaagcaccagccacccaacctggtgcaaatgaagtctatctggtgtgggatgatgaagcaatgtcaatggaggaaagaagattgtcgctacccaagtatcaggtgcatgatgaaactagccaggtaagttctgatttttataattttatatctgtaatattaatgatatgtgaaaaaaaccaagttgaagttcatggggatgctctgaactggaatattgggtaagtgttcattctagggtatagagtaaagtaaaaattttaggcacttatgaattgcatgatacgcctttgtgttctaaaattgggtttccatccctttagtttgtgcgtcagaaatttcattttgtttctgttccaattggtcctgtataaccttagtattgctttaattacatttgtagacccttcactgggcttcgattgctt

SEQ ID NO: 28259 - DNA, 438 bp, Oryza sativa
  unsure (1)..(438): unsure at all n locations
  Clone ID: uC-osflM202082b10b1
tcgtatcatgaacccgacgatcatcagccagggggacaggttcatcgcgcccgacgacttgaacgccaaggaggtgaccaagagggagtacacgccgtacgacgagtacaaggagtgggtgtggaagtcncatggcgacgtgatgatgaacggcgccttctttaacgagtcctgcggccagaacgagcgcagctacgaccagctcgacttcatccctgccaagcacggcaagtacgtcggccagatcaccaagttcgtcggcacgctcaactgccacgtcggcatgccatgctaattaactagacatatcagcaacgatatggaagaggacgagagaaagctaattaaccatgccttaatttgtatatatatgaaaatctgacacatttgtacattgtgtaaaactttataattgtcagaagagaaaaaaaaacgtac

SEQ ID NO: 28260 - DNA, 520 bp, Oryza sativa
  Clone ID: uC-osflM202082b11b1
tcgttccattgcagcatcagctacaataaaaaatgtgactaccttgattcggacaaaaagcaaaagtccacaaactgtctctggaaaatcatctggctcaaaggcagctgcaaagggtgcagttgatcaatccttgcctttccagcagaatgtggccattgctttacttctgggtgctttctacttgcttagtagatatgctgtacactgcacttgggtgacatctgaagcttactcttctccttccattgttctggccgcaaggggtcataatggaggcagggtcatatttgatgattatcgtgaagcgtattattggcttcgtcagaacactccttctgatgcaaagattatgtcatggtgggattatggataccaaatcacagctatggggaacagaactgttattgttgataacaacacatggaataatacacatatagctacagttgggcgtgcaatgtcatcctatgaagatgaagcgtatgagataatgcagtcactggatgtgaattatgtg

SEQ ID NO: 28261 - DNA, 527 bp, Oryza sativa
  unsure (1)..(527): unsure at all n locations
  Clone ID: uC-osflM202082b12b1
tcgtttgttcccagatcggccagcaatggcttcatgttcggacccatggatgaaagagtacaatgaggcatctaggcttgctgatgatatcaattccatgattgccgatagagggtctcttccacaatcaggcccggaaattatacgtcacacatcagccattcgaagaaaaataactattctttgtactagactggatagcttggaagcattgttgtccaagattcctccgaagtcactcagtgacaaggagttacacaagcgccaagacacgctttccaatttgaaatctaaaacaaaacagatggcaacaagttttaacatgtcaaactttgccaacagggaggacttgcttggtcagaacaagaaggcagctgatgatatgagcagagttgctggtttggataaccaagggattgttggccttcaaaggcaaattatgaaagaacangatgaangtcttgagaagctggaagagacagtcctgagtacaaaacatatcgctttagcagtcaatgaagaactta

SEQ ID NO: 28262 - DNA, 396 bp, Oryza sativa
  Clone ID: uC-osflM202082c02b1
ttaatttgatggtataatccttctttaccatgggaactactcctaacaaccagtaggagcaatcgtacgcctttgctggaacaaagacaaatcaggaccatgtttgtattgatctgttgaagaacaacagttcttttgaaagttgttgctgagttgcttttattgatctgtaggtctcagctgcttccattgtaggggtttcagatagaaaattgcccatctgttgataggttaaatcaagcataagttcattctctctgtaggtccattgtgacataagctagtgttgggtttttgttttgtgagtttgtaaatcagttcctgcttgtgccagggttttggacgcgactcatatgttgtcatcaaaattatttatttattggggttcaaaccaaa

SEQ ID NO: 28263 - DNA, 452 bp, Oryza sativa
  Clone ID: uC-osflM202082c07b1
tcgttcttaccggcggataaaccctaaccggagaggaggaggagggggaggccatgagggggaagaagccgcacaaggagctcaagctctccgtgcctgcgcaggagacgcccgtcgacaagttcctgaccgcgagtggtacattcaaggatggtgaactgcggcttaatcaaagaggtttgcagcttatatccgaggaaactgcagatgaacctcagtcaacaaacctgaaggtggaagatgttcagttgtcaatggatgaccttgagatgattcaagtcattggcaaggggagtggtggtatcgtccaactagttcggctacaagtgggtggggacattatatgccttgaagggcctacaaatgaaacattcaagaggcagtgcgcaaacaaatagttccatagctcaaattacattaagcacacataactcacatatagttctttgccc

SEQ ID NO: 28264 - DNA, 412 bp, Oryza sativa
  Clone ID: uC-osflM202082c09b1
tcgttggtggaacgcgtacttacccacaagttaggtgcatgccatggcaccattcatggcgtgcgcctcgccaccggtactcacgctggccctgctcgcgtcgtgcggtgcccttctcgccacctccatgctcccggcgcgtgcgacggcgggcagttgcttggacgtcggcgacatggtgatgatggacaggttccgcgcttggcagggagctcacaaccggtcgtacccgagcgcagaagaggcgctgcagcggttcgatgtgtaccgccgcaacgcggagttcatcgacgccgtcaacctgcgcggcgacctaacttaccagcttgccgagaacgagttcgcataccttaccgaggaggagttcctggccacgtacaccgggtactcctccccccattgccccgttgca

SEQ ID NO: 28265 - DNA, 528 bp, Oryza sativa
  unsure (1)..(528): unsure at all n locations
  Clone ID: uC-osflM202082c10b1
tcgttcatattagcagccgatgcagagttctttgacatgactctaagacggccagggcaacatcaagaaaaaacaaattgcactatgatcttggctcctcttgttggcattatcctcaatcttatggaaagcagcagtacttcaggccatagggagttaaatgatgtgattacagtgttcacaagcatggattgccctgccacaatccattttgggttgcagtacctactgagctacaattggagcaatgttctccgaggtgacgcttcccttgcaaagctagctcagcttgaagaattctcccattactttatgcacatcactatgtcagcggatggcaatgaagagcaaggtttcagcactgccagtaatgaagaggacaactgctgcatatgctacaattccgattcggataccacattcgagccatgccatcacaggtcctgctacggctgcataaccaggcacctnctaacagccaaaggtgcttcttctgcatgcagtggtgacttcagttaccagatagct

SEQ ID NO: 28266 - DNA, 92 bp, Oryza sativa
  Clone ID: uC-osflM202082d01b1
ttcctagcgggagcagcatggctacggccacgtagacggcgacgagcgtggcggcggtgctcctcctctcgctcctcctggcgcgcgcgcgg

SEQ ID NO: 28267 - DNA, 446 bp, Oryza sativa
  Clone ID: uC-osflM202082d02b1
ttgcttgtttctattactactaggaaaaactgaaggaagtggaaaggcatgcagaacttgctgaaaacactgttgatcaccacattcacagtccaagagatttaagagcagagttaaaaaaactaaagcacgcctacaagactttgagctctgaaaaggaaaaggaagtttctgcattacgtgcagaaaaggattttgtgtggaaccagttgaggacaatggagaatgattatactgatctccttaagaagaaaaaaatagaggcagcacaagctactgaagctgcacaaaagcttcagaagaatttagaagagctgcaagatcaaaataagggcaacgagatcggcagattacaagcagaagctgttgatgccaaaatgaacatatcaattcttgaggataagctccaggaaatgctttccttgttgaaggagaaagacttggaa

SEQ ID NO: 28268 - DNA, 518 bp, Oryza sativa
  Clone ID: uC-osflM202082d03b1
tttgtttctgaagaggctcaccgctcccacacatgggatgctaaacaagcttgctggagctttagcccgcaagccatgttttgtggctcacaagatcagtgcgtgactgcctctgatcctgattattaggaacaggctcaggtctgctctgacatacctggaggagatcaatattctcatgcatagccatgctttggatgaaggcaaggtcaagactgactagagcttctcgggtgaatagatggatgcaagtggcataccgaatgactgcggagaactacaggctgctgcacgacaccaagggacgtttccgccttcagattgacaaggatgaggatgctaagttcaagctttgcacggttcgggttgtgcagcatggccagaagggaatttcctacctgaacacctatgatggtcgcaccatccggtaccctgacccgatcattaaggtaaacgacacatttcaagatcgttttgtaacccaacaagattgtcgacttcatcaagtttgatgttgg

SEQ ID NO: 28269 - DNA, 504 bp, Oryza sativa
  Clone ID: uC-osflM202082d04b1
ttcattgcacccttgggtttgaacccaccacacacgcagccctttgcaaccgagatcttcacggtgcttgaaggaacactctacgttggctttgttacgtccaacccagataacaggctattgtccaaggtgctcaacaagggtgatgtgtttgtgttccctgaggggctcatccacttccagttcaatcctaacccacacaagccggcagttgccattgctgcactgagtagccaaaatcccggggttattactattgccaatgcggtgtttggatcgaacccacctatctcagatgatattttgatgaaggcgtttcaggtggataagaagatcatagatttgctccaagctcagttctagaagaacaactactgattgtcctgttggttgcaccattaaggacagtatactacatgcacctgatgctatgtaactatcatatatgatacgtagaataagtgggggtttatgtgcttgaattgttttctgcatgatttgcta

SEQ ID NO: 28270 - DNA, 188 bp, Oryza sativa
  Clone ID: uC-osflM202082d08b1
ttcgtcactgatataatcaagctagctagcttaatgacctagctatccgtcagtttagctagatatggctgcagttaactgcaaggtggtggttttctttatattctatttattttttttttaattttattaatctttatttttattttttatattttattttataaatatttttttatatttttttt

SEQ ID NO: 28271 - DNA, 314 bp, Oryza sativa
  Clone ID: uC-osflM202082d12b1
tcgtaacgctgactatcctcctccccgtctccctgcggcgccggttcccctaccctccatctgcctagtgagcacagtagggcagaggaggggatcctggttgaatattcacctacctcggagtaattggcatacgtcacaagttaaaagatgggtatccttgagaggatcaaggagattgaagccgagatggttcggacacagaaaaataaagcaacagaataccatctgggacaactgaaagcaaaagtagcaaagtagaggacacaattattagagccccctaaggagtccactgccggaggagatagtat

SEQ ID NO: 28272 - DNA, 290 bp, Oryza sativa
  Clone ID: uC-osflM202082e03b1
tttttccaatcgaacaattattcttgaatgcccagataggccatgcaatttcaaagagtcttcatatggtaatagcaggtgattgtacctatgaatatgttcctgaccaaatatcaggaattttctttggttgggccaagccagaagcaggcggagtatctaggtcggtgataagcattggatgggacttttcgctgcggacagttgaaagagtgatgcacatatatctccttgattcctgttgtaagataacaacggaggagcccctgaagccgcagtttgttggtgtc

SEQ ID NO: 28273 - DNA, 123 bp, Oryza sativa
  Clone ID: uC-osflM202082e06b1
tttgagtcactcactacttgccagccgacaaacaggagggtattaatttagctagaagaggggagaaactaaccaaacctagagctaacgatcagtatggctcttcacatgaaataacaattt

SEQ ID NO: 28274 - DNA, 122 bp, Oryza sativa
  Clone ID: uC-osflM202082e07b1
tcggtatcctccggagattcgtcggagcgcaaggcaccctccacggaagatgacgccgtcactgactgacatgatcatactgaccaaggatctcaaggggaacacatcctatcagagagtta

SEQ ID NO: 28275 - DNA, 370 bp, Oryza sativa
  Clone ID: uC-osflM202082e08b1
tcgtgtagcggcgagatggcggcgaccggggacagcagcggcgccctcgtctgcgtgacgggcggcagcggcttcatcggctcgtggctcgtccgcctcctcctcgaccgcggctacaccgtccacgccaccgtcaagaacctccaggacgacggcgagacgaggcacctgcaggctctggacggcgccgacacgcggctccggctgttccagatggacctcctcgacccggcctccatcacgccggcggtggacggcgcccactggcgtcttccacctgggttgccctctcacactttacccgactcaagaccccgagggtgagctgctgaagccagcggtgagtggcactcttaacgtcctcctcgcc

SEQ ID NO: 28276 - DNA, 234 bp, Oryza sativa
  unsure (1)..(234): unsure at all n locations
  Clone ID: uC-osflM202082e10b1
tcggtcaaagcgacgcgagcgcgagagcgaggaggagagcccgagatctcggcggcggcggcggcggcgatggcgctctccgaccgctcccgcgagtcgctcctgccgagcttcctctactcgacggcgggggcgcggccgtacaccgcgggcggcggnggntccaacttaaaattccccgtggaggctgacctaggaggagtaacagtactcttaccaatctcacccagaatg

SEQ ID NO: 28277 - DNA, 426 bp, Oryza sativa
  Clone ID: uC-osflM202082f01b1
ttttacatactctactactactagccagtaagctagctgactaactacgtggctatggcccccaccgtgatggcctcctcggccacctccgtggctccattccaagggctcaagtccaccgccggcctccccgtcagccgccgctccaccaactcgggcttcggcaacgtcagcaatggcggaaggatcaagtgcatgcaggtgtggccaattgagggcatcaagaagttcgagaccctatcgtacctgccaccactcaccgtggaggatcttttgaagcagatcgagtacctgcttcgatccaagtgggtgccttgtctcgagttcagcaaggttgggttcgtctacctgtgagaaccacaggtctcccggatactacgatggcaggtattggaccctgtggaagctgcccatgttcggctgcac

SEQ ID NO: 28278 - DNA, 232 bp, Oryza sativa
  Clone ID: uC-osflM202082f02b1
gtcgtttcattccggttgagtgagttggtgattatctgtagggggtgaaaatggcgcaggcggtggtgccgtcgatgcagtgccagttcggtgccgttcgtttgaggcctgttttggctgcttctgcttctgtttggagtatttttatctctctgtcttttttatcttgacttaagctatgcttgatcgtgttatttttatatctttttttttctttgtttttttttttatt

SEQ ID NO: 28279 - DNA, 456 bp, Oryza sativa
  Clone ID: uC-osflM202082f06b1
ttcatagaaaaaaaaatctcccctcgaagcgaagcggcgaatcgccttctcaagatgcagatctttgtgaagaccctcaccggcaagaccatcaccctcgaggttgagtcctcggacaccattgacaatgtcaaggccaagatccaggacaaggagggcatccccccggaccagcagcgtctcatctttgctggcaagcagctcgaggatggccgcaccctggccgactacaacatccagaaggagtccaccctccaccttgtgctcaggctcaggggaggcatgcagatcttcgtcaagaccttgactggcaagaccatcacccttgaggtcgagtcgtctgacaccattgacaatgtcaaggccaagatccaggacaaggagggcatccccccggaccagcagcgtctcatcttcgctggccagcagcttgaggatggccgcaccctggccgac

SEQ ID NO: 28280 - DNA, 514 bp, Oryza sativa
  unsure (1)..(514): unsure at all n locations
  Clone ID: uC-osflM202082f07b1
tcgttcgctctccgccgccatcgccgccgccgccttgctctccgccgccgccgttggtactcgcgcttgccgcccgtcgagctcccctcaccgataaaggctcaccgaaggtttcgtcgtcgaccccgggagtttcaaatatgtctggccgaggactgatgaagcaggacttaagcaagcttgacgtgacgaagctccaccctttatcacctgaagttatctcacgccaggcgacgatcaatatcggtaccatagggcatgtggcccatggaaagtccactgttgtgaaggctatatctggagttcagaccgttcgcttcaagaatgagctggagcgtaacatcactataaagcttggctatgctaatgcgaaaatctacaaatgtgaagacgagaaatgtccacgaccaatgtgctacaaggcttatggaagcnngaaagaagatagccctcactgtgatgtgcctgggtttgaaaacactaggatgaaactactgagacatgtttcttttgg

SEQ ID NO: 28281 - DNA, 275 bp, Oryza sativa
  Clone ID: uC-osflM202082f12b1
ctaccagtagtttcgccctttccccccttcttgcaccattcactaacccccatctgaacgcaaaccaccctctccgccgcgcgcgcgaggcagatctcgacggggagcgcagccgccgccgccagatcccgccccgatcgcccccgcctcgtccccacggtcccgtggatacctctctctctctctctctctctctctctctctcggatcggtgcgactgcctttctttttgcgcggcggggatcgggtgtgctttggggacggccgcgcgatgc

SEQ ID NO: 28282 - DNA, 263 bp, Oryza sativa
  Clone ID: uC-osflM202082g03b1
cttgatccctgaaaggattcaagatgttatatgcagaggggcggatctttttgacatgcttcctgaagagtacacgttccaagagatcattgccaagttggggccgattccaagcacattttctgctgttcatcttcctagctatctgctacagaatgttgatcggtacagataccttctcccagggtactgcaggagagaaagtgggtagattttgatgatctacactcttcaatctgatgtgcaggccctgtcactgtcat

SEQ ID NO: 28283 - DNA, 379 bp, Oryza sativa
  Clone ID: uC-osflM202082g10b1
tcgttacctccccacacgctcccctcctcctgccgagccgaaaccctaacgatccaattcctcctccctttgggcctcccaccatgagcgccgccgccgccccagcagccgccgtcggcagcggcaaggagctcgccaacccgccgacggacgggatctccaacctccggttctccaaccacagtgaccacctcctcgtctcctcctgggacaagacggtgcgcctctacgacgccgacgcgaacgtgctcaagggtgagttcgtacacgccggggccgtgctcgactgctgcttccacgacgactcctccgggtttagcgccggcgccgaccacaccgtgcgtcggttagtctttggttcagccaaagaggatctctt

SEQ ID NO: 28284 - DNA, 451 bp, Oryza sativa
  Clone ID: uC-osflM202082h04b1
ttacatgctaatttaattagcaccagaaatatggctgcttccaagatgacgctgctccccgtcctcctcctcctcgccgcggcctcgccggcggcgctgggcgccttcgacgtgaaccagatgctcgccgacaagtcccagtacgggtcgttcctgaagttgctgacgcagacgaaggtcgcggaggagacgaaccggctcaagtcggcgtcgctgctggtcctccaagacaaggccatgaagccgatcacgtcgctccccgccgacaagcagcggatggccatggccaaccacgtcctcctcaagtacttcgaccccattccagctgggcgagatgaaggaccgcaccgccatgctccccacgctgctgtccaacaccgacaagaagctcggcgtcgtcaactacaccaaggccagcgacgggcagatggtcctggggcgccccggcgcc

SEQ ID NO: 28285 - DNA, 289 bp, Oryza sativa
  Clone ID: uC-osflM202082h09b1
tcgctgacgcgtggggggaccatgaccttgaaaccctaatccctatttccccaattctccaatccgagcacctagtcaaatcggtgaaattcaacggcgtcacggcgctgaggggagcgggcgcgccggcgtgcggcggcgcggcgggcttgctcgcggtcgcggagggaagcggcagccggcagccgtgcggtgtggcggcggcgctgccgcgcagggcggcctcgaggaggggagcggtctaacggccgccggtagcccgcatgccgcagggcgggtgcggctgggt

SEQ ID NO: 28286 - DNA, 308 bp, Oryza sativa
  Clone ID: uC-osflM202082h10b1
tcgttctgtactaactagtaaagtttttttttttgggcttcgctttgcgctctctgtatctctctctcttccaaaaccctaaccctagcggcgggcgggagcggcggaggaggagggcgcggcggcggtggggtggtagtggtggtggctacaacagccataagtggggccccgcgcccgcggtcagggcccccacgtacacctacccacagaacgggttctgcgccgacaagccgggggccgcccgctcggctccggtgatggcactgctggaccttctgcggcgaggtcgattaccccaagaggct

SEQ ID NO: 28287 - DNA, 363 bp, Oryza sativa
  Clone ID: uC-osflM202085a03a1
aagttaataactgactgatatagcttttccggaagtaaacaagttaacatcaaattctcggagaactatggccatgtctatgttctgacaagacaaccataaaagcgcagcaggatggacttaaataaccagagttttccaagcagacaaatggcctccaaataatatcaatctcacttgttattttgacccaaaagcgtagcagcagtcttgaatggaatggagaaaacatcttatacaccaaagactattcctaacaatgaccaatcccatacaacaagcttcaatttctctggtttataaatgttcgtattacaaataaaatgttcttggacagttgcttgtaatggaagcaaaccaact

SEQ ID NO: 28288 - DNA, 342 bp, Oryza sativa
  Clone ID: uC-osflM202085a04a1
tttgccttcctctccttttttttttttttttggcacaagctgtaacactttcatttcgttgtattcagggcatggatccattgaacatcgagctcgacaaaataaaaaatcagtcttccggagaaaggcaatatgtatcatactcggcccctatgccaatcaaattgtacaagcatattgatcgctcttacgataagaaggaaaccagccagggaggttacctcatactgacataggtggcagcttaaacaactaacttacatgaccagaaacacatgctacacatatacggggaagcatatgcaatgggaattgccttagggaaaaacaattgctggatgt

SEQ ID NO: 28289 - DNA, 223 bp, Oryza sativa
  Clone ID: uC-osflM202085a05a1
gccgcgacgcggcgtgggcctgtggttgctttgtcgccctttttttttcactacggggagaacattatcgattgacttcttcatagtacgaaacacatatggccatgaagtgcagacagttgagaatacggtgccaacgcacaggcaatcaattcatgacgatgtgggcagtattctgcaggcacacgagttctggactgagaagtcaagtgtactacttggt

SEQ ID NO: 28290 - DNA, 99 bp, Oryza sativa
  Clone ID: uC-osflM202085a06a1
gggcgaaatttgtatgtttttttttttttttgaactgaacgcaatatggtcattaaggaccccccgcaaaaaaatgtactcggtttgtacacgccatca

SEQ ID NO: 28291 - DNA, 366 bp, Oryza sativa
  Clone ID: uC-osflM202085a07a1
gagaacacaacgcatttctgcgttttttttttggctggaaatggatatattccccaagcgtgacaacaacttttgagtgccaatgagggtgagttccccttccctccctggttaattacatcatctctaacctaaatgattcgagatcttcaacgggaggaaaatgacgctctatttgacctgcatagcgggtttcctcccgagacaaaaagcacaaatccaaagctccccaaaaggctgtacaaaacggcaaaaggaagaagaaaaaaagggggatcgaatgatcccacataggaatccgacctagaggcgacggggtatatgagcgtgtgaccgtgctagctacggagcgcgacacgtggacta

SEQ ID NO: 28292 - DNA, 366 bp, Oryza sativa
  Clone ID: uC-osflM202085a08a1
ggcgtataacgtttaatataatcatttgtgttccttcaaatcacgcttgcgccacgcaacatcaaaattaagcgttttgtgggagcatgtccacccacatctgaccgtggggaattattgctcaaaccctcacaatcttcacaaaatttacggaaacgaagtggttctattcccatctagtagggctccactggtgcacggaatttggctccggcatagacggcagcagcaccaagctcctcctcgatcctaagaagctggttgtacttggcaaggcgctcagatctgcaaggagctccagtcttgatctggcccgtggataaaccaactgccagatcagcaatgaatgtatcctcagtttcacca

SEQ ID NO: 28293 - DNA, 361 bp, Oryza sativa
  Clone ID: uC-osflM202085a09a1
gacggacgctcaacaagggcaaataagttaagaaaaaccgctttgtcaatatgggactatgacagccatcggtagaatctccaaatgcacacatttgacaaacagaaacagttcatcgactagaaaatttcaaataggagtagcagaactgggatgcataacaacggtttaaacaccttgattgtactatcatgagtcaccatactactaggaataagggggcacatgtttcacaaaactgatgatgcacgaaagcaaagcttctcagtatttgatcggagcaagaatctccagctgaggacccagcttctcctcggctgccttctcagccttgacacgcagcttcgccagttgcttcctc

SEQ ID NO: 28294 - DNA, 378 bp, Oryza sativa
  Clone ID: uC-osflM202085a10a1
ggcagaaacataattatcgttttgataattagcgattcctttagggagagaacaaaaatacagggcgccatacaattctactactcagtgcaatacaattcattgcatcttcttcctgacttcctgtagaacagaaactaccagcatttttttagctattaccatacatctcagttttttatcgatgtaaaacttctcctgaatcagtaatgggctgcaataattatctcccatataacccaacaacaaacatgtccaatcgaagctacaaattggaatgagctaaaatattaaactcattccttgtggtctctgaccttctttctcttccatttgagaaagatttgtaaagagagaccagaaaagaccatcacaaca

SEQ ID NO: 28295 - DNA, 382 bp, Oryza sativa
  Clone ID: uC-osflM202085a11a1
gaacaaaattagcaagtatcacattaccattgaactgaacgcaatatggacatgaagtacagacagttaagactacggtaaaattgcacaagccatcaacttttgacgatgtagtcagtatcgacaggtacacgagttctgcactcagaagtcaagctactactggtctccaagagctggattgttttattagtagagctgaaggtcatcacagctgatagcagcatccaacaccgatctgctttccatgctctgacatgcctactcaacatgcgagaaaccacctccagtctcagacttagttttgtgatcagatggattaggcattatttcatacacaattgtggccacaacatcccttttgttctgagtagcttcacca

SEQ ID NO: 28296 - DNA, 396 bp, Oryza sativa
  Clone ID: uC-osflM202085a12a1
ggcggcaggtgcggcggccgggccttgggcggcgccgccgccgctttcttggtcttggcacggatggcgtcgagggcctcgacgtacttctgcacccgcttctcctgcactcggcgctgctccttgacctcgccgtcggcggcgatggagtcgagcttgaccagctcattcatcagcgcctgggtgagcgccaccacgtcggcgtaaaccaccctcccgcccttgctcacgatcgcctccagcgccgacaccttggaggcgagcttgtcgacgtcgagggcgacgcggtagacggacttggcggcgcgctcggccttgcaatggcggcgctcctcgaggaggcgcttggcctgggcggtggggtcctagaggaggagcatcttggagcggtccttg

SEQ ID NO: 28297 - DNA, 315 bp, Oryza sativa
  Clone ID: uC-osflM202085b01a1
acccgcgcagcatgcattttatttaggcacgggccaaaattaaaacatgtataggggataccttttggcgggagacactcacggtataaaaggggaggcgggggtacagggatatagtcatatttgggcgttttttaatgccggtcggtgacttcggtcaaaggggcagggtcgggtaggcaaaatcgagggggaccccccaaagggcggggccaccgacgttggggagaaaccggatgtagccgggcttgccccaagactggccccaagaggtcttgaagggccaaaacttggcgccggaagacccgttggtgc

SEQ ID NO: 28298 - DNA, 365 bp, Oryza sativa
  Clone ID: uC-osflM202085b02a1
agtgaaaactttctttctccagatcggacggtaatcaataccacttcagaacttacaaccacacaaggtcatattgcgcggggggattgaagtgaagtgatatactacgtctttctactctcaagtgaagtgatccgccattattggacagagatccgctgcaatcaccgcaaaacatattgccgcttcccaagtcagcctggtaactactactgaaagaggccaccgatcccctagccacgcacacatgcactgtttacatccttttttctactcctgtttttgtaatacaagctctctctcatccgttgtccttgcattatcttagaacttgagaacctgctttggttggcttccatgtttgc

SEQ ID NO: 28299 - DNA, 367 bp, Oryza sativa
  Clone ID: uC-osflM202085b03a1
agctagtacaataacactattcctttttgccattccaattggatgcaaaaaccacatacaactgcctatccaccagcagccgagtatatacaggtgaagtgaagcctcgtcgatctccagataatctctgtgaattgaattgttttactgtcgtgttcgggaaacagcttggactggacggcgctgttcaggatgatcatctgttcatccatcttatctactaccttgctcactttaaatgtttaccttttggcatggctgtgggccactgtctcgcaaacacaaatcactttactctgtgcagaaaaaaataaaaatagcaagatcgcgccgatcgagacttcatatatagatcagattaacggac

SEQ ID NO: 28300 - DNA, 365 bp, Oryza sativa
  Clone ID: uC-osflM202085b04a1
gcttaaaaaaaagcaccactcaatcaagccaaattaaggaacactgatattgaaatattcattcaaaaggcttacaaccaaacaaatgttgcactcaacaaggagctcacaatttttgacgaaaggctggcataaacatcatgatgagaactaaagcaaccagtagaaacttaaatgggactaatactaaattattcggggaaatagacttaggatgtcttcagcttgattaaatagacttctggagatcaacttcatgcattctaatggtcatctgatggagatcgtgaggatgaaacaccattggaagaagcgaagcgtgagaaatatatggccatttgctcatcaagtttttgttgtaccat

SEQ ID NO: 28301 - DNA, 389 bp, Oryza sativa
  Clone ID: uC-osflM202085b05a1
gccgccgcaaaacccgttttgggtggccaaagctaataaagcaagcgtggcaaataagggtggaattatccaagcacaggtgaacaccacgcatacataatacaacatgatcagtgactggtgcaaaagtgcaagagacaacacacggtttaaccgctggatcatagcacacatcaagtggtttggtaaatgaaatgaagttcttgcgttgatcgataataatgcatgcgcatgcaggtaagtaacacgagcactgcaatttattcctcggcttgttatctagatcgagcgatgatacggtgtccggcggccggccggccggcgacgagcaggccgccggcggcggcggcggcggcggcgatgatatatcaaccgaggcgcaggtcgtg

SEQ ID NO: 28302 - DNA, 268 bp, Oryza sativa
  Clone ID: uC-osflM202085b07a1
ggggaaaaaattaaagggattcggcccaaaaaaaaaattggggaaaaaaaacaaaaaatggggggggccccaagggaaaaaaaccatgttttaaatggagggggaaaaaagtttaaaaaagggaaaaaagccaaatttgggaggggccggtttgttaggaagtgacggggttaaaaccttttctgaactgggcggggggccccgggaaaaccccaaatgggcccaaggccttgaggggatttttgaaaggggcaaggaaaaacccggg

SEQ ID NO: 28303 - DNA, 323 bp, Oryza sativa
  Clone ID: uC-osflM202085b08a1
acacaaattaccaacttaacggaacaacacacgggaacacatgtacttttaccatccaagaaaaaatcaacttttaactacgtttataaattcatagggaagttaattttttttagacagggggggtccttaattaacacacagtaggggggcacgttatattaagccgccggggtacacacattgggggggggtgggcaacggtttaacttaacgacgggatgggggctcgccggggttgattaacacctatgggacggggggaacgacggacgggattggggggtgggggtcttcctgcacggggggcgacgaccccgggg

SEQ ID NO: 28304 - DNA, 270 bp, Oryza sativa
  Clone ID: uC-osflM202085b09a1
ggggaaaaaaaaaaaggttttttaaaaatgaaaaaaaatttttttaatttcccccaaaaaatttaaaaaaaaaaaaggggaaaaagtttttaaaaaaggaaaggggggaaaaaataaaaaaagggggggggaaaccgaaaaaaaatttggccggaaattttaaccaaaataaacggtgaaaaaaacggggggagggcaactgaagggaaaaaaaaggggggaataaccaaggggggcgcccaaaaaaatctaagggggggctcccgggga

SEQ ID NO: 28305 - DNA, 364 bp, Oryza sativa
  Clone ID: uC-osflM202085b11a1
gggcaatcactgagctgattcgcatagactgaagcttatttaacaggtcgaaaccagatacaactgattgtagtcatagctcaaagcacaccatcatattggatcagtacatacaaagcgtgcgtattgacaccgtctaattggattagtacattcgaagtggataagtaggctttggttcaccagtccatgcctaaattccttgaggtaaacagatcttcaacgtagagaattactggtccagatgctctgatgaaagtctgcatttgaacctttgccgaattttcatcttcattcaatttcttcaggagctgcgattttgagggaagggcgtacattccagcagcaacggctttccttatgg

SEQ ID NO: 28306 - DNA, 267 bp, Oryza sativa
  Clone ID: uC-osflM202085b12a1
aaaaaaaacaaaagggaaatttggggggggtaaatgaaaaactttggggggaaaaaattttcctcggaaccaaaaaaaaagggggcaccctttggaaaaaaaccctaaaaaaaaagcgggctttttaaaaagggtaaattttctcaaaattttaaacttaaaaaaaagtttttatttttcccacgttgggattggggacaaatgggggttttttttttaaattggggtaagggggaaaaaaaccccaaaatttttgaaaaaagaaac

SEQ ID NO: 28307 - DNA, 368 bp, Oryza sativa
  Clone ID: uC-osflM202085c01a1
aaccacatactaatagcgtcttatatatggcaattaagactccaaagtacaatctcttgtgaagttataatataatacagatagcatgaccgcatacagaaacagatgttacagaacacagcaggaaacattttctgtaaaggtaattacagcaccagagcaaacgacgaacatgttgtaatcctcacacagtgcagagttagaaacattctggtcaacatattttgctttatgacagcgagatattggaggtatatacgacaccacggtaaattgacacagacattttcagcgtgttcttgagtacccaacccagttcacatcgcttcacaacagtaggcaagtgatgcatggtcctcttctacctg

SEQ ID NO: 28308 - DNA, 368 bp, Oryza sativa
  Clone ID: uC-osflM202085c02a1
cacaaatgatctagatccattcctaccaacaatttagtcacaaaacatcgtaattagattgaactaacaatctataatctttgacacaacaatgccacaaaatcctactaatatacatcatcatacatgtgacaaagtccatgtcctacaaaagaatcccttccttgtctttcttccctccatcgcagccatgccatgccatcaccacgtcgtcgccgagctccgccctgagctcctcccacccgaactcctcggcaccgccgtcgccgtcgccgtcgtcgcctccctccagcctcagctagacgagcatcatcgacggcgacacctccgacatctccatggacatggcgacgaggcccgagaggccg

SEQ ID NO: 28309 - DNA, 365 bp, Oryza sativa
  Clone ID: uC-osflM202085c03a1
gggaacactataacttagacagcaaaaagatgatccaggttccacatccgttacatcacgacagagtaaaaatagtttctcagtagcacgcgaacataggattgttgatgtgaaacacatgcattcgacaaaagggaaatgaaatacgacaacgaaagcagttctcttagcagtagaccaactagaacatgtaagggtaacggcacaacacatgcggcggccaaaaatttagagcttgtcctcgaaatcggagaggggagtcatctgctccttgagacccttcctcttgcggatatcctgcaccagggttgaagcctgcgagccagcttcaagaggatcagaggtcatcatgtcccaatggtcga

SEQ ID NO: 28310 - DNA, 392 bp, Oryza sativa
  Clone ID: uC-osflM202085c04a1
ttcggccttcctttttttttttttttttgttttttgtttttttctttttttttccgccaaccgctgaattaaatcgaacttttacagatcaggtacgcagttgcaatagacaagtcacaagtttcgccaccaaagggggaaagaacagttgaacaaattttccaacaacatccaggcactggaatttttaacccaggccgatagacacctcaggcctcagcccccaaaatccagaccaccatgctaaaccggggggggcttgattttaattgcagggagggggctaatattcgcaatcaagatcctaacaaggaggggcactttttaatcaccctgggggaagaatattgggatcttcctgagttttacacaattgaacatttcttctattt

SEQ ID NO: 28311 - DNA, 354 bp, Oryza sativa
  Clone ID: uC-osflM202085c05a1
agctgccatccaaagaatgttcttttccatatatcaagacacgacacagagactaactgacaaatgacgtttggcaccaacctatttttcccatgaactggaggcgaacttgaaacaaattttgaccagtttcagatgttgcgatgaccagcgtgcggttagatgatggtgatcatttttgtacagggatagaccacaatggatggcaaaaatagtacactctttttattggacagcagtttgcttcggacatgtccatgcctgatgagcaggtgaggcttgcttgtctttctgaccgatctgactaacaactgttctggtcaactatgccattttagcccatgagatttcctg

SEQ ID NO: 28312 - DNA, 375 bp, Oryza sativa
  Clone ID: uC-osflM202085c06a1
ttttgtgaacaaccgttaaaaactatcatcaccatgctcgtctagacatagattaaaacattcacgctctcaacatgctctctataacaccataaccaaagcgaactcaattcatggtaacatcacggacgaagaacacctaacactggatggatggatagagggcttctcgactcgagagagccactggacacgataacgactcgactcgatgataagatgattctgacacggatagctaaggataactggccacgatgggccccaccaatcagttcctccagttcccgccggagtcgccgccgtagccgccgccacggatgccaccgtagccgccggagagttgggagagcaggtggaatggaaatgggagct

SEQ ID NO: 28313 - DNA, 357 bp, Oryza sativa
  Clone ID: uC-osflM202085c07a1
aaaggattatagcacttctgttgcatcataacttgccatagttattacagtttagtgggcatcaaagcaaggtccttacatatagagcatattggcgaacactattattacaacttttagaaaatcatgagaagtatttctacaagactgctcttttcaataggctttgttccaggcttccagcacacgacttaccatagcgatgcagtgcgacatcaaagtatctgcttcttcctcaagatgactgcttccatccaccaatgtcttcctcagataaaccccgatcgcgatcatcctctggagtgaacgtcaggcccactttgatttctccacggtattcttcttctttcacaacat

SEQ ID NO: 28314 - DNA, 233 bp, Oryza sativa
  Clone ID: uC-osflM202085c09a1
aaaaaaaaaccggaaaaaaaaaaaaaaaaaaaaaaaaataaaaaaaaggggggaaaaaaaaaaaaaaaaaaaaacaggaaaaagaaaaaccggggaaaaaaaaaaaaccctttttaaaaaggggggaaaaaaaaaaaagggaaaaattaaaaacttttggggcaaaaaaaaaaaaattttaaaaaagggggggggaaaaagggggggttaaggttaaaaaaaaaggggggggg

SEQ ID NO: 28315 - DNA, 370 bp, Oryza sativa
  Clone ID: uC-osflM202085c11a1
gtgtagaaccgtaaaataggatcatcaccatgttcatctagacatagtagaaaacattcacactctcgaaatgctctctatctttcagttttgtgttgctatacgtcttcttgttttgcattttttttagtattccatttctgttcagcagagtggcagtggcgcgccattccattccttgaggcattcgagcagcgggtcgatgtgcttgcgctcgttgatggcgacgagcaccttgttcagctcctcgccgggcgaccgcgtcttctcgccggtgaggtactcggtgccgacctcctcgcgcacgaaccggtagagcgggtacgagcggcactccttgatccggttggggacgagcggggtgccggtc

SEQ ID NO: 28316 - DNA, 368 bp, Oryza sativa
  Clone ID: uC-osflM202085c12a1
gcaaaaagacaagcaccacactttcatgttcataatttatacaacagttgatgagccacacataacagttgatggcagaaacgggcgtgtaagttttttcattgattgtacagctattgctgaatgggaggctcactctggtacacaatttcagctgatatttgacaacgaaacatccataaatttagcagcagaaggtctggagtaatgtatagatctcagtggtgcactttaagcagcaacaggtgcggttacggccagaccttgggcttctgccggagcaaccaactgactgatgttctccacggcacgaatcctgccactcgccagcccagcagtcaggtcctccacttccactttcagcacat

SEQ ID NO: 28317 - DNA, 348 bp, Oryza sativa
  Clone ID: uC-osflM202085d01a1
cattgcaaatcatattaggcactcgatacccaacaatataactgtacacatgaaacctgcagattcatgggagggaagctttccagtcctagctttatttctaagtccctcacatgaacctcagcagcatgacaagccaaagaatcaattgcgatgtttattctgctgttcacacttattgcaagcaattgaattgcgggataaccatttatctacgcatggcacgccacaaatcgtttgtcgttctgcacatctagcacgaatggccggtcgagaccctgtgccatgtgtccatgtagagccaaccagctagttgatggtttaacagcagctcacagcgataggcta

SEQ ID NO: 28318 - DNA, 130 bp, Oryza sativa
  Clone ID: uC-osflM202085d02a1
gggcccagggggggtaaaaaatccgtttgggcactcaaaaaggggcttaaaaacccaacccaaaaaaaggggggggtggaaaccaaaatgttaacatggaaaaaggaaagggggaggggggttttttaaa

SEQ ID NO: 28319 - DNA, 424 bp, Oryza sativa
  Clone ID: uC-osflM202085d04a1
gcacgcgcgcgtacgctagcatgctttcgagcggtcggccttcctttttttttttccatggatataaccagtcttagttatacgttgcttagcatccccttatttacatatagagttcagaggtgcaaactgcaaatagtgattgcatagaggtgcaaactacactaattcatgacaccataacacaccatcagaacgaaccagttctacttcacccagtgttctgcataccagcagcgatgcccttcatggtcaggatgagagtgtcctcgaggcctgggccgtactcgcttgttgtgttcagcttcacaagctcagcggctggcttccctgagtccattatgtccttggagaggtgagctcgggggcttacatggaagccagggtccctgatacgctttagcgtgcaagcttggcaaacatt

SEQ ID NO: 28320 - DNA, 400 bp, Oryza sativa
  Clone ID: uC-osflM202085d05a1
gctaggatcctctagtttggttggccttctttttttttttttttggcattaacctttctgctggctataacatttcgtagaacaaagagatgttgctgttgttatgtacttatgtacacaaatatgaatgacatcattgcacaagtatagttttttttttaattccctttatccccatatatacaatcgcaatggcggaatatttacagttttacagttttggttatacacccttggggtgtaacttcaacagcagcactgtgataaagcccagcacagcgtttgtttcctttgctatggttatgtggatcctttcattgttctttgtgtacctatggaaacaattgcagcacttgagtcgttagtcgcttagctatgaagaaaacaggtattctctgca

SEQ ID NO: 28321 - DNA, 455 bp, Oryza sativa
  Clone ID: uC-osflM202085d06a1
ggccacactatgtactagcatctgacgatgcacgcacgcgtacgctagcatgctttctatcgggtcgcccttcctttttttttttttttttgatccaaacatggtgttgaactttgcttataacgtttaatataatcatttgtgttccttcaaatcacgcttgcgccacgcaacatcaaaattaagcgttttgtgggagcatgtccacccacatctgaccgtggggaattattgctcaaaccctcacaatcttcacaaaatttacggaaacgaagtggttctattcccatctagtagggctccactggtgcacggaatttggctccggcatagacggcagcagcaccaagctcctcctcgatcctaagaagctggttgtacttggcaaggcgctcagatctgcaaggagctccagtcttgatctggcccgtggataaaccaactgccagatcagc

SEQ ID NO: 28322 - DNA, 365 bp, Oryza sativa
  Clone ID: uC-osflM202085d07a1
aatctatgaataaaatttttatataggtgttcctagtgatctaaaagtaaatgctgaaaaacaaattttaatgagaaaaccacaaaatcaggtccaaatctaagattaaaaatttaaattttgactgctaagcataaataaaagcgaaaagatgttacacgaacctattcagaaaaactacctaacggcatcccgtggagacgggatagtagtactgccttatctcctcttcccctctctctgtgtctcttcctctccactcgctctctctctgtctcttcccctccactcgatctctctctctgtgactaccacccatgagcatggaggcggcgatgacgatgacgacgacgacgacggtgccg

SEQ ID NO: 28323 - DNA, 359 bp, Oryza sativa
  Clone ID: uC-osflM202085d10a1
aaaataaaaatatatagcatattatatattgatatatcatcaacatagcccaaaacaaagctgcatactattattataggcagcaatccaccagcgcgatgcttgatcttagcttagttgccaccagactcctcgcaacctgggggcttgtaggcgatgaagctaatcaactgcacctgcctgacgttgtcgaagccgatgatacggacaaaggcatcagggtaggccttcttggcctcctcgagctccttgagcacctgggtggcatcggtgcagccgaacatgggcagcttccacatggtccaatacctgccatcgtagtatccgggagacctgtggttctcacggtagacgaaccc

SEQ ID NO: 28324 - DNA, 368 bp, Oryza sativa
  unsure (1)..(368): unsure at all n locations
  Clone ID: uC-osflM202085d11a1
atatcaatcaacaatcccatcagtccatttatttctggcaaaattgatcttacatcacccaacgatcccgattttagttttctagcaccgacaaatcccaggtcacttgaatagcatggaaccaatttcgcctttatttatcgtatacatttgtatgtctgaaacgcatcctccgaaagactgcatcagtgaatgttagtgaacctcacagtttggatgcgttggcagtagcaaccttgcttcccaaagcgatagctgccttggacccagactggcgccccagatggttgcagatgaactcgccggcggccatcaccttgcccaggtcgacattggtgctgatccccagnccgttcagcatgtacacc

SEQ ID NO: 28325 - DNA, 401 bp, Oryza sativa
  Clone ID: uC-osflM202085d12a1
agttgtcggccgccccttccataattttttttgtataatgtagagatcagatgtaaacttatgactgactgaaaacttaccccccgcactgtcgaggacacatgaaaaaacaaaaacaaaatgcaaaattgcagcagacaaaatagcaaggccatggaggtaaggggcagacagccactaaggatttagaataaacaaaattgccatcaggattagcatctttacatgttagatgtgaaaagtaagcgcagatttcttcctgtgtttatgttgtatgtacacctaatccacaaaccatcctatctgactttcgataagatgacaagccaaaagaaccactttagtttctatggcactctggtatatatgaaccacctcagtttctgtggcgccctggtatg

SEQ ID NO: 28326 - DNA, 354 bp, Oryza sativa
  Clone ID: uC-osflM202085e01a1
ataaactgggagcaaacattcccgatgatcatagctcattatagttaatgcccaacaccatgctgataagaattgggcccaaattgtcttacaattacatacgcccacagtaagatgtacttagcacacttagtacaaccgagatggcagtgttctttgcatacatacaaaattacatcacttgcatagcattactgttacataacaacatctcatccaagatcaggaacgatgaaaaagtcctcgtcgtcatcgggtatctccacccggggcttcttgctttggcgtgcaccgctcgccttgtagagccccatgttgctcgctggctgcggcgaggcaaagagcttaggcacc

SEQ ID NO: 28327 - DNA, 368 bp, Oryza sativa
  Clone ID: uC-osflM202085e02a1
atcagaggggggaaaaatacatgcttattatactagatcatcaattaatttaccagcgtatcctctcagcggccgtgatcagtacacacggtactgtatgtataacgaatcaaatgaaatcaatcggggccgggcatcgtacaaaaccggaacaagattatacattcaaatgctacaacagcgtatgatcaagccacgtggggaaaaaaatgtgtaacaattacacaagagatattagacctcttcacactttttttttaatactccatttgattgtttctcattaagccttgttctgcttagctttggcaatgctaagaagatcttcaaacagcttgtcctcaggctttgatggttgccccatggaa

SEQ ID NO: 28328 - DNA, 361 bp, Oryza sativa
  Clone ID: uC-osflM202085e04a1
aaaaaaatggagggagtgtaagttaattaaaagtctgacttaaagccaaagacagcaaatctaagcctaaacaaaatatctcagtctataatattaggttccaacgaaatactgtcactagctagatttatctttgttcctacgtagaagaaaaccagctgtactttgcaaacaacttaacgagataaaaaaaaagatgaaaagaaaaaaaacaaagcttgctatgagcctcggaaataattagaaattacaagaagataaatgattgataagttgcagtgcgtgcgttgagagaggtgctagcttagttggttttcttggacaaatgatcatcctcggaggaagaagcagcggcgttgtc

SEQ ID NO: 28329 - DNA, 384 bp, Oryza sativa
  Clone ID: uC-osflM202085e05a1
tccggtggccgtgggcggggcgaaggcgtaccacgagcgggtggtggaccactacgagaacccgcggaacgtggggtcgttcgagaacgacgaccccagcgtcgggacggggctggtgggggcgccggcctgcggcgacgtgatgaagctgcagatccgcgtcgacgagagctccggcaagatcgtcgacgcatgcttcaagacctttgggtgcggatccgccatcgcgtcctcctccgtcgctactgaatgggtaaagggcaagcaaatggaggaagtagtgactataaaaaacactgagattgccaagcacttgtcacttccaccagtaaagcttcattgtagcatgcttgctgaggatgcaattaaagctgccgtgaaaga

SEQ ID NO: 28330 - DNA, 78 bp, Oryza sativa
  Clone ID: uC-osflM202085e06a1
gttacttacatgtttttgtaatcaaattttgttaatataccacaacaataagttgttattttgggctacaataaagaa

SEQ ID NO: 28331 - DNA, 370 bp, Oryza sativa
  Clone ID: uC-osflM202085e07a1
ggcctagaaacttggaatctttattcccgcttataacgctttttatttttcatactacttcatttcatgatgtaaattggcccctcataccttgcagaactattgacttatatacatcacaacagaacacttctttcctcactacactaaaaaaaataattacaatagcaaattctcccaatcatattagtcaaaactaatcacagactgccatttttaatgccacgggtgcagcgcgcgtcccacgctagtagcattaactttataagaaattgagaataacataccagctagaccaaaccaatctttttcgccatatccattttttttgccgcatacccacacatggtctgagtgtgatgaaattctc

SEQ ID NO: 28332 - DNA, 288 bp, Oryza sativa
  Clone ID: uC-osflM202085e08a1
ggggggggaaaaaaaattttcctttgaagggaaaaaagagggaaaagaaaaaacggggggggattccataaggttttcttaagaaaaagggaaaaaaagaattttttttttaaaacccaggaaacccccttttggaagggtccttaatggcccccatttgttgggcccccgggaaaatcacaggggaaaaggggaaaaatgaaacaaagggaccgttaattgccccaaaaaaaaggccttgttgaagttgccataaaaataggacccccggcccataaatgctgtttc

SEQ ID NO: 28333 - DNA, 372 bp, Oryza sativa
  Clone ID: uC-osflM202085e09a1
gaatggaaatggcatacaccttgcacgtttttatgatataacaccagatacaataaacatatcatggcatggatcggcttagatgtgcaatgaatccaagcagagcaccccacacatgaagtttctcaggtctccttgttgcttagcctcagtaagcgatacagtacctatacacactaggggtttggagatctatacaagggggacaactgtaagtatcatggcttcccgagcctagatgcttctatccaatggtgctccacagaatgccggccctcaactcatgtacagaatctaacacaacaatagctccccgaaccaataaataccacaaactaatacattaatcgaatcaaccctaacctcacagga

SEQ ID NO: 28334 - DNA, 329 bp, Oryza sativa
  Clone ID: uC-osflM202085e10a1
agagcaattagattatgtccccttttttattaccaagagaaaatacagagcaaaaaaattttggttttcaacatcaattaagggggaaaagaatttgacagaacaggaatggaaattgcctgggcctccatttccctgttaggctggtactgccatccaacgttttatgccattagaaaacctccaaactcattggggctatactagctatatcccgctgcagaggcacttatgtttgccctcaaaatagccaaaaaaagatgggaagatttcaaggggggagccaggagtattatggggattttgaagggggaaatgagaacctacaa

SEQ ID NO: 28335 - DNA, 313 bp, Oryza sativa
  Clone ID: uC-osflM202085e11a1
gcgattaagtaaggaattttatttaggggccaggcggcaacatgacatacatgagaccctaagggagctagctagctagctagcagcaaattaaggacttgcatgcaagctaggtagctagtccatggcatatgtaggggaactgggagctcgttgatgaggggatgaattggatggggaaaagtttcttctagttgcagttgcagcaggagcagccccagctggggccccacttgcaggggttgcaaccccaactgccgttttccccccccaactctgatcccccggaagcagcacccgaccccttggtggt

SEQ ID NO: 28336 - DNA, 361 bp, Oryza sativa
  Clone ID: uC-osflM202085e12a1
acaacctgtgacctacatgtttttgtttcagatttgtatatctaccctacaaaagttgtatattgcctacaaaaagaattcagtcttcatcaaaaaggcattagaggcatttccctcatcgatttttgcatctccaatctgaatgaaattaatttatgctgttcgctacacctagccaaaactttgcagctatagctaatattactggtagtcaggtttcagcacccacgttgcaccatttgcacctctttgcaacgtagctatttccttcagcagattcttaaacagcagcatatccttggacagtatccggttcttgaagtgttcagttatacttgttgagctggcggaaccaccatgc

SEQ ID NO: 28337 - DNA, 103 bp, Oryza sativa
  Clone ID: uC-osflM202085f01a1
gtgattggtaaatgggttgggtatcttttgccaaaaatatgtggagttttttgatggaagacacaggaaacttgcataaggaattagctgagaaaaatataac

SEQ ID NO: 28338 - DNA, 348 bp, Oryza sativa
  Clone ID: uC-osflM202085f02a1
gaaacatggaagttatctgtcacaatttcatgctgattactgggatttacaagatgaagcttgcacgagattctcagccctgctttaccacaggctccagaaaatgacttgggtccacatttataaataataggcactatcatgatggcaaaagttattaacacgaaagttattggagtaatcagttcaaccagaagcaaaagttccccttgtaccaccggatggtccagagtatccaagcaaaatgagacatccaccattacaatttacagccaggaatatgggatctttagcattgtatagataccggtggacagcccatatgcgtcaagggattcaggggcaagc

SEQ ID NO: 28339 - DNA, 371 bp, Oryza sativa
  Clone ID: uC-osflM202085f03a1
aacttctacaacaatgctggttttagtaatgacttgagctgtaacaggtgcaaaaatgtgtggatgctacctatctggttaagatattatcctgtgatatcttggttgcaggctgaggagtacaactattctgccctaccaatctcaatctctcccctcactccactcccaaaatcaaacagggcagatctttttcctggttggtgaggctgtggggcagtgattgtttcactgtgaccaaaccctagccttgtggtcacatgggaagcactatgagcagagaggctggctagctaggtcttggccattaagccaagtgggggctgcaatgcaattgcaatgcatggagtggtggccagtggtcacaccaa

SEQ ID NO: 28340 - DNA, 367 bp, Oryza sativa
  Clone ID: uC-osflM202085f04a1
ggattataggtaatcaccacctttattcgattcttcgtcgtcatcgctgtttggtacattaccatggcagttcaagcgaaattttcagaaaactaccaccacataggcttacatgcgaacatgcatactacatacaacggcgcctttgacaggcagcagagtttccaccattccatggctatgtatttattattcttcaccaggtgcaccaacagcaggcgatctggttgccggtaaagagaagggcgtcatcatcagaggagcacctgagctgcagctagcctagcaattgggaccctgaaaggcgaacaagaaacatagtccagcccagccttcgcaaagaaagcgactgacagaggctctccac

SEQ ID NO: 28341 - DNA, 366 bp, Oryza sativa
  Clone ID: uC-osflM202085f05a1
aagaattaagatctccatcacataaaaacatacagtgactgagtactggattacacgattgagttgttcagggttcagataggaaaaacatcttggggactagagatagagggaatcgacagatgcgcagcagtagcgcgcgggaaacaggacatcacgattgcgttgcatgtcgtcggctgcgcagcggcggcgcggggcttaagacctgctcttgaatgggatcgccctgatgatcacctggtggtagatggcagccagggcagcgccaacgaagggaccaacccagaagatccaatggtcattccaggcatggtccttgttgtagatgatggcagcgccaaggctcctggctgggttgatgcc

SEQ ID NO: 28342 - DNA, 83 bp, Oryza sativa
  Clone ID: uC-osflM202085f06a1
atggggaatataaacggacattcaatttaaaaaataaatagagggcttttttacaagtgagtttaataaatcctggtaaaagc

SEQ ID NO: 28343 - DNA, 371 bp, Oryza sativa
  Clone ID: uC-osflM202085f07a1
caggaagttatcatcttagcatctgccaaagttctagtgaaatgtgtgtgtgcatactgcgagttagagatacaaaaccggttatatctagcaggaaaaggaaaggcttatatgatcaatgaaaccttagttacaagatttacaattacattcttaataatttcttggtctttgaggcttaattaagccttctgagtttgaaacagcaaatcagggttgcgagatcaaggaattgaatcgcttccatctccaacaacacccctgaatcaccatcttcctcaatgttcagcaaactgaatttcgacgcaagtagcaactaggccagacataggattggtagtgctcacaattccgccaacttgtttatgaat

SEQ ID NO: 28344 - DNA, 359 bp, Oryza sativa
  Clone ID: uC-osflM202085f08a1
cggcaagcagtacaaaatttcatttatacaagttgcccaaaagggaccagttaggcactagcattagcatgagtttggcctttatttttctagcaaattacacaaaataccgagggaaaaaggaggatggaattcaggtcgcactttcagctaggaatgcccagcccctgaattattaacaccacacagaattacggcgctgcgtgaatcccgaactaataaacacgcgccttgggtgggaacgactcaacttcactgtccaatgggttcatgtggactggcctgtatgccaagcgaaccttctcattctcccagaaccccagcgagtgcttcatccattgctcatcatctcttttcgg

SEQ ID NO: 28345 - DNA, 346 bp, Oryza sativa
  Clone ID: uC-osflM202085f09a1
tctctccgatggaagaacgatcacagcattgatcgccgaagcgctgacgctccctctgctaccgtccaaaaacgcggggaaccgacccttcgagcatggagccaacttcgcgacggccggcggcacggcgctggaccgcacgtactttggggccaacaacttcacggtgatgccccagttcaacatctagatcgaacaccagataggttggctcgacgggatgaaaccgtgggtctgcggcgtgaagacaggtggccagccaggtagcacttgtggcgagcaccgtgaagctactatgagcagataggatggaacgacttggtccggcgcgctgatccaagggagg

SEQ ID NO: 28346 - DNA, 362 bp, Oryza sativa
  Clone ID: uC-osflM202085f10a1
acagaattgaattggctttctgttttagataaacaacttgagcattttacaaatggttacattcaatttcaacgtaaataaactattgcatgttacattcaatttcaaagtaaataaactatgacatgccacaaagcgtaatgctccatttggcggtacagtacacacttccacaggttcaccggcgacggaatttaggacgaacagagaacacaccaggccgcagctcatcaaatcggtacccattttcaatgaggaagcccctgactgcaacaggtagtgaggcctgccctttgctgtgcttgccaatccctgtgatcacctctaagatagcctgtatgggacgaacaaacaccaccttc

SEQ ID NO: 28347 - DNA, 356 bp, Oryza sativa
  Clone ID: uC-osflM202085f11a1
actgatgcaaaagttacatttgccgaagagggctatattacaagtgagttcaataaatctggcaaatgcagatctactgagcaatgcaacttatccaataaatctgtaatcagatcattactggtacaaaggtgtatctcccagaatacatttacaatggcggttggaagccagcagcataagcatatagtttcgacaaagcgcattgaggcaagcaaatatttacccattttttctgtcgatgtacagagcaatgtttttgcagatacccgatcgtcgcgatgcttcggtgctgaagatgaacagcacagataactcatggatccatcaggttttctcttccacgaaactgaaat

SEQ ID NO: 28348 - DNA, 363 bp, Oryza sativa
  Clone ID: uC-osflM202085f12a1
ggtatataattgtacattatatggaaaaaataaattaattcgttttttccccatccagcgcctgtcccagttaccaccttgctgaagccggaaggataataacagtggtgtgcggtgctaaaattgcctacgtaaaacgaaatatgaacgtggggttattgaactttcatatgcttgcaagattcctgaaacgtttcattacatataatagaaagaatatagctccatatctgcatagccagaaattagaaggcatcatttttcgcctcatttttcgctcaaacaaattctttttgcctcatccattttgtagctgaccatttctccccttccagaacagggcacccaccatgaatgctgttt

SEQ ID NO: 28349 - DNA, 365 bp, Oryza sativa
  Clone ID: uC-osflM202085g01a1
gtgcattggttaaacacgtggtatgtatattaaacgctttagattaggggagccaggggtaccacatacattgaatcgcaaagaaaatttttattatacaaattttttacaaaattaaagttagagtttgatcctgggctttaaatgaggggaacccccggtggcaaaaaaactggggggccatcaaaggggataattttggaaaatggacccgggaaacgggagggataaatttgccctttagtagttgtttttttaaaaaaactactggtaggggcacgcaaaaaccgggttcaagttttaggtccttcagccgggaagatttccgcgctcccttgaaagcagggggtttttatgggggtacc

SEQ ID NO: 28350 - DNA, 264 bp, Oryza sativa
  Clone ID: uC-osflM202085g02a1
gatataagacagtgacatgcactcatcaccgtaacgctaggatccactacgtatcggtcgcccttcctttttttttttttttttttaaagttaatattattgtttttttttaattaaaatttcttttgtttttcatttttaggtcatttattaaactaaaaataaataacctttctaaacgtgggatcccaaaatgaatgatacaattacaacagaacgagaaaatctcatacgtgccccctaaagtcaaaacattataaaaga

SEQ ID NO: 28351 - DNA, 372 bp, Oryza sativa
  Clone ID: uC-osflM202085g03a1
gggagaaaatttcgtgcgtaacattataagttaattaactgaaaatccttccaaccgtacaaatttgataattttactgtcgaagaacctgcaatctcatgaaatttacagttcggtaatttaggtaactacagatgaagctatgatcattcttagctgaggtgcaagcgaagcgaaaaccctgacgtgtacgatacagaaaaatccctggaggttaagccacgaacaagcattcaagaaacacaactggcaaaaggttcacatgtaaaactagtcgtcctcccttcatgggcttactttggctttagagaataacatggacagggaagggttgtaacaccaacaccacggaagctgttgtctgggagcatg

SEQ ID NO: 28352 - DNA, 337 bp, Oryza sativa
  Clone ID: uC-osflM202085g04a1
ggaccaaacatccaaacccaactaaagggttattaatttttgcctgtcaaaataaccctccaaattaccctgtggtacaaacaaataatcagtgcagagcttgtccggccataactgtaaatggcaccgttgcaagcacgatgcacaaatgcgtgcagaaggaagctacattggcacttttcccaactttggcctgcgtaaggagcctccaagcgaagcccgaaacaatggccgacgcttcaaagatgaggaaccactgggtggacgtgctgagcgggccacggatggtcgacctggcagatattgccacggtcaggaacccggtgaacgcgacctt

SEQ ID NO: 28353 - DNA, 361 bp, Oryza sativa
  Clone ID: uC-osflM202085g05a1
cgacaacaatgtgaacattcacccttgattaatagttttgttatacacaacaatgttatacacatcctgtacgacaacaatgtgaacgttcacccttgattaatacttttgtcttaggttcatatcaatatcaacagacagtgtcgattcgtggcacgaaaactatttcatgattttgttccctattttatttagggaagaattgttaccaatatatggtacgagttccatgtgatactagcaaccccgtctgagttaccttttgtgatcttggtaatatataattgtagccaaaatatgttacacatcactgtaaaaatcttgaacactgggcattgggctcccagccaagaatgatttg

SEQ ID NO: 28354 - DNA, 358 bp, Oryza sativa
  Clone ID: uC-osflM202085g06a1
gctgcctgccaagattattctagtacgtgtattaaaggcgcggttcatgcacgaagaggaaaccggatttccagcaacagagatgataacttaagaattaagatctccatcacataaaaacatacagtgactgagtactggattacacgattgagttgttcagggttcagataggaaaaacattttggggactagagatagagggaatcgacagatgcgcagcagtagcgcgcgggaaacaggacatcacgattgcgttgcatgtcgtcggctgcgcagaggcggcacggggcttaagacctgctcttgaatgggatcgccctgatgatcacctggtggtagatggcagccagggcag

SEQ ID NO: 28355 - DNA, 368 bp, Oryza sativa
  Clone ID: uC-osflM202085g07a1
ctgatgaataagatggaaattaattagtagtactccagtagtagctgtcaaagttgacaggatcggccaactagtcaaggagtgctacattcttcacatcttgaccaacagaacacaggtcaaaccaaggtgatggatctttattgatcttagctatttactgacatactgtacatgctgaagttgcaaaaaattactacgcggccgtggctgggatgatgatggggctcctcacgatgtgttcgtccgagacccacttcaggttgccctcggcgccggcgacgttcggctggccggcccaccgcaccgtcacggtgaagctctgcatctccttcagctccgtgaaccgaagcatcggcggctgcacg

SEQ ID NO: 28356 - DNA, 369 bp, Oryza sativa
  Clone ID: uC-osflM202085g08a1
aaagctaatactagtgttgctgcttaattaaaggtccggtagccgtccagtacgaggtacattaataaaacgaacagcagctaaccccgcaaaacgggggatcccaaaatggtggtacaatacacagaacgagaaaccttattgtgcccctaaatcaaacatataaaagcggcacattttcaaactaaaaccagaaaaaaccctggaggcttagccaagaacaaacatttaagaaacacaactcgcaaaagcttcacatgtcaaactagcccgtctcccttcatgggcttactctggctttagagcataacatcgccagtgcaggcttcttacaccaacaggacacaaggtttactttgggatcaattg

SEQ ID NO: 28357 - DNA, 371 bp, Oryza sativa
  Clone ID: uC-osflM202085g09a1
cagtgaaaatttcgtgcgtaacattataagttaattaactgaaaatccttccaaccgtacaaatttgataattttactgtcgaagaacctgcaatctcatgaaatttacagttcggtaatttaggtaactacagatgaagctatgatcattcttagctgaggtgcaagcgaagcgaaaacccgacgtgacgatacagtagttgcagtgttctgaacgacctaacaagcaagcacgtcagtcaaaggtccgatagggcgtcgaaacaaagcctgaaccgaagtagcagtcgaaagttcagtaaactgaacgcgatggaattggacgagatggaaaaatctgaccaaggaagctgctggcctgctgcttgctg

SEQ ID NO: 28358 - DNA, 344 bp, Oryza sativa
  Clone ID: uC-osflM202085g10a1
ggtcgcaaaaacataaggatagacttttgtcatatagaaggattacgcacggtaacaaaacaacctgtgcatgatgtaatttaaaagtggcgtagcctgaacgggcataattacttatcaattaaagaaaaagaataaaaacaagaattgactccgctaatgaaagtataattataggaggatagagagcaaagaaagaggactacataaatcaaggagaacaaatgggaaaagactacctgacggttcatcagaaccaagccgactggagtggctgcttactatttacacaagatgatgccagatgaaggccaatgatacagctaatattaacaaatattatg

SEQ ID NO: 28359 - DNA, 368 bp, Oryza sativa
  Clone ID: uC-osflM202085g11a1
cacacgattagataggagttcaatcatatcggacaggtgtacacatctgacaacgccttgcactacaattaacagtacactacatgaacgattacacgaactacaaaaacatttactactgtacaagctcttctataattaagaacgatagccattaaatatcttcacgacagcacgatagtcagggtacgctaagtcgcattcagaacttgccagcatcacataagccgctgcactctgagcagagaccaatgctagaagcctagaactcgaaatggcttcaactagatggccagatttctaggatacagtacgtccatagcatactgatgcaaggtagagattcttggaccatttctccttgacat

SEQ ID NO: 28360 - DNA, 366 bp, Oryza sativa
  Clone ID: uC-osflM202085g12a1
aggctcaacattggttcataaatatcaccaaattccaaaatgcagcaatcttagtaacaaaacaatatcgcataaacaatatgcatgcgacatcttacagatcaaaaatcaaacagcgatggagcaaagcatgcgctgcagctgcatactgtcgtagcgcaagctactcagctactcccatcaagatcagacaacaaaagagccatacacaacacaaggcaataggtgacagcagtgcatctcaagaaccacaacccaaccactactatcacctgccacgaggcactgcatcacctcttcctagtgcttcttgtctttcaaggggccccttggtactttactcaggaccttagcatcgagcacagt

SEQ ID NO: 28361 - DNA, 369 bp, Oryza sativa
  Clone ID: uC-osflM202085h01a1
atgggcagcaagtgtgcctgagcattttaacttttggattggtaatagtacatgacctgttgcaacagcaaagcaaaaacaagcttcgtctttgcctgcacgggaaatgcattgcatgttaattagcaatagctcaaagaaagcaaccaccccaggacaaactacaagctcatggaataagccctcaaaagggaaagggatttggcgcaaatcaagcagcaacgcgaggaacagtactacaaagccaagggaggcccatagaaacttttacaacaagactggtgctgaggagtttaggtatgtacaaagtcactgaacacacctttatacaccggaaaaatggggatagcggatagcaaggggtggaac

SEQ ID NO: 28362 - DNA, 55 bp, Oryza sativa
  Clone ID: uC-osflM202085h02a1
ccatgttagggttgggcgctgattcgaccacagaacccagagaaaacatcacagg

SEQ ID NO: 28363 - DNA, 373 bp, Oryza sativa
  Clone ID: uC-osflM202085h03a1
ttggctttcctttctttttttttttacgtgaagccgtataaattactctgatagcaataactaaaaacagtttgcaattcaaaaggcagagcgcgtgacagatccgacaataaggcccagtacaaacaacaaaaaacaagaaccaacattttttctcactgctcatcagaaccgatttacaggctctctctctctctcactaccaaatcatctctcatcttgctgttccaaagctttatgcgttccagttatgatgctcttcaggttgaagcagcggcagcgacgacatgatctgctgcatcttgagggtgaagtcgtcgtcggtggtgacgacggacgacggccccggagacggagccgacgacccgccggc

SEQ ID NO: 28364 - DNA, 365 bp, Oryza sativa
  Clone ID: uC-osflM202085h04a1
atataagacagtatgatttactagccgttaagtaacagatgttttcttgagtgaaccaaaatcaacaagcaaccacatataggttgacagctgatgacaaattagaggttgattcaacatttgtgttcatcatttgatttcataacggtggtcggcaacaatataaaacctaaagagtaagcttgcaaaacagtaagacgggacgaagaattacgagccctaccctaccaagtaagcagcagcctggcaaaatgaagactgctccagctttacgagccggccactgacaaagatgtcactacgggaatgacgacctccttctcttggttgcaaatgggcgtccctgtgtcttggctggaacagac

SEQ ID NO: 28365 - DNA, 315 bp, Oryza sativa
  Clone ID: uC-osflM202085h05a1
aagaaaaccagaatgtttaaaggatcaccaccagggcaggggttgccattgtttttcacaaacaaaaacagggtttgggagcccaaaggcatacttttacagggtacatgacaacgggttatcagtactacaaaacactggggagctgagcaaactggaacatttggaacttttgggggtggcacaaaaaactactggcaaaaacatgcaagcattttttttttcttttccaccctaaaatggggagacaccggaggtggcgaatcggcgcgaaatgcttttgccaacaatggggactggccccatggttgacct

SEQ ID NO: 28366 - DNA, 365 bp, Oryza sativa
  Clone ID: uC-osflM202085h06a1
acgaggaagagctatatgtatgtgtaataatccaaaacaagcacgtagtacaaggagttgcagtacatgcatgtagaatctctagctctctctggtacacgtacccctcgaaaaggagcaaaacgtacgagacgaacacacaagaagaagaaagctagctagcgttgaccgggccgatcaaccatggatgcatggtgattgatcgagaccttagctagctcatcttttattccagaatacagatatgatactactagtactggatacagaattcggctccacacattgacccaggcagaatctactaggtggcaaccggcgcgctgctgtatatatatgatccgtctctgatcgatggctcagct

SEQ ID NO: 28367 - DNA, 343 bp, Oryza sativa
  Clone ID: uC-osflM202085h07a1
atattatattattattaacaaaaacttgtcatgcccagctatggcttgggcgcgatctgatacacagaacaaagggaaaacattaaaaggagaaataattaatagcaagcgtaaagccggcctgcttaaaaggtgtaaaggcagctgccgacggcgctcctggccgttgggtcgaagttcttggcaacagggtcggtgcaaccttccggcacaggcaggttacctgcttgctgtgctccttgccctacttctcctatgcaggccgcctacgatgcattgatgggatgcgaatagctagaggtcttttattcagcttgaaggcgcaaaaccgtagaaggaacca

SEQ ID NO: 28368 - DNA, 108 bp, Oryza sativa
  Clone ID: uC-osflM202085h08a1
actatgagcaaacgcatattgctcgtcttatgcatcgtttgtttacagcgacgactcgtgattactcatgagtaaaccatttacagggttgatttgaactaattaatt

SEQ ID NO: 28369 - DNA, 341 bp, Oryza sativa
  Clone ID: uC-osflM202085h09a1
gttgcagaggcaaaacacgaggtatgtatatcaaacgctctagaaaagattcatgtgatgaaatacatgatgaaccacgtatgttctcaaggtaaaattaattaatgcagtatagttttaactttgtccatcgatctcaacctgtaactgtgacgacacactggctacagtgccctcgaggtactagcagtatagcagtagcttgagtacgtagcagcagcagcagcaggttcactgtcttgattggattggatcggattagtagacgtagtttttgacgaacatgccctccttggcctaggcggacttgccgtcgctggtgtacttgccgagctgcgcca

SEQ ID NO: 28370 - DNA, 361 bp, Oryza sativa
  Clone ID: uC-osflM202085h10a1
gcttgcaatgggcatgatttttcttgttcttggccaaacatttgtgatatttttgacctgattaggcctccatgaaactctctacatgttactagatacaaactgattttatcaaattggctactctaagtattacaaagtattatctgggagaagatctgtacaaaggggggcattggattattcttccagagcaaaaaaccgatgaaattatctggccaagcctggccacaatcaagcaatacctactttgatctaatccctctacatttccaatatgtatgtcatcatacttgtcatatgtatagaactttgtatgtactaaacatggccgtgcgaaaactttggttttgattccaga

SEQ ID NO: 28371 - DNA, 330 bp, Oryza sativa
  Clone ID: uC-osflM202085h11a1
ggccaaaagtaggattttactcggggatttttgattaaccatttgtcttgcttccatatgttgctatgctgcataaaaaccttatgctaaacacaggctccagaaatggggatctagcagcaactttttttaggtatcgttttagtatgagcatttaaacctaaaggcatttacatataataggggggtatcagctcatacagcagctaagctataaagtattcaaagggtagcaaatgccacattttggggggccttaggcactcgatgggtaaacaggggaacaggattggggatccattgcgccgcagattgttgtcggagagatcc

SEQ ID NO: 28372 - DNA, 367 bp, Oryza sativa
  Clone ID: uC-osflM202085h12a1
ggaataatgagatataattgcattagagattcactatttccaaggtgcaattgcagctgggaacggattacaaatatacaatcccttcaaaatcctgtggcatctttatgccagcagtatgcctatgtacacccaaactccaaagaatgaacttcctctcgatcacaaccaacaaaaagaaatggagaaagatgagagaattcagtcatctagctaagtagctattgaatctgtagccttttgtatgcattttctgtgcctcactaacgaatgaatcccctggtgtagagaagaatgagcaaagaaaccaaagtgacaacatttatcagtctcttcaccttctccaccgtccagcttccatccgaca

SEQ ID NO: 28373 - DNA, 74 bp, Oryza sativa
  Clone ID: uC-osflM202086a01a1
ggggggattaaaacaattttgtgaacaaccatttgtaaggatggaatggatttataatcctttgaccacaaaat

SEQ ID NO: 28374 - DNA, 482 bp, Oryza sativa
  Clone ID: uC-osflM202089a01b1
gtgtctgaatcgccggcggcggccatgggacgggtgaagctgcagatcaagaggatcgagaacatcccgaacaggcaggtgacgttctccaagcggcgaaacgggctgatcaagaaggcctacgagctgtccgtcctctgcgacatcgacatcgccctcctcatgttctccccctccggccggctcagccacttctccggacgacgcaggatcgaggacgtgctcacaaggtacatcaatctcccagaaagtgacagaggaggaactatccaaaacagagagtatttgatcaacatgctcacccagctcaaatgcgagagcgacgtcaccgaggatctcactaacacgagcagtaaggcgccggttaactccaacattgaggagcttcagcatgagatcaggagatgccagcaccagatgcagctcacagaggagcaattgaggatgtttgagccggacaccgccaggtctgcatccatgga

SEQ ID NO: 28375 - DNA, 490 bp, Oryza sativa
  Clone ID: uC-osflM202089a05b1
tttgccttttagatcgaatttcattcctaaaatggaccacctcattccgaattgaagtttagaactctctagaaaaggaccacattgcacacatttgcatgtcctacctcacttggcattttgccctttagctagacacagcacagctgttagttaggtaatccccatcgtccattctcatctggagtacagattgcctttccactaagctccctttccaaatcctttttatcgcaacttatcagaggcattcattgtgttgcatgctttcgtacatgtaatagtttggtcccaaattaacctctcaaatatgacaattctcaatgctacaatgggaggccatggaaagagatcaagcagagcctgctctgttcctggcaccaaactgacatatatagttttgttaattaggtatatgataaaggcagattggttatttgattattacaattgtaatgaatctttagccaacttacatagatcagagatg

SEQ ID NO: 28376 - DNA, 536 bp, Oryza sativa
  Clone ID: uC-osflM202089a10b1
tttcagatcgcatcgattttctccttttcgagtttttttccccttcgcttgagagctttcgacgagagcgagggagagggagatcatggccggcaagggagacgggccggcgatcggcatcgacctcgggacgacctactcgtgcgtcggcgtgtggcagcacgaccgcgtcgagatcatcgccaacgaccaggggaaccgcaccacgccgtcgtatgtcgcgttcaccgactccgagaggctcatcggcgacgccgccaagaaccaggtcgccatgaaccccatcaacaccgtcttcgatgcgaagcgtctcatcggccggcgtttctctgacacgtcggtgcagagcgacgcgaagctgtggccgatcaaggtgctacccggccccggcgacaagccgatgatcggcgtgcagtacaagggagaggagatgcagttctcctgcaggagatctcgtccatggtgctcaacacgatgaaggagacggccgaggcctatcttcggagcacccgtcagacgccgtcgtcaccgtccgg

SEQ ID NO: 28377 - DNA, 546 bp, Oryza sativa
  Clone ID: uC-osflM202089b01b1
tttaatcgaatcgatcggaatttgcttctccgttgaggctaggcgagggcgaagggggaacgaagtggaaggagatttggattgattggttggacgccggcggcgcagatccccaattcgatctcctcctcttcgatcttcatcctaccctgcctgccagtgccagtataagattcttatgagctggtcggctgtggttttccctcaattctggtgctactaagatgggtcaggagctcaccacaaacaagcctctcacaaccctcttaccaacggatgaaatagcaaccgcctaccatttctccctcctcctctcacctgtcgtctccttttgggactgcatcttccgcaagataagatactcattcagacctgagtgggtgtagcatcctgcactgcctgtttctttatagcgctagccagtgctttgctttctggcctggatcactccagacaatgaactttgaagcttttgctttcccgtaattacaattacagtcactagtggagtttagctgaaaatagtacataagtgtcatggaaaag

SEQ ID NO: 28378 - DNA, 530 bp, Oryza sativa
  Clone ID: uC-osflM202089b10b1
ttcgaggattagcgatcgataactggagggagtatacagttggaaaattcaaactagacgctgatcatatcgagggagagttcaactcaactggagcgcggagatggcaacgcccaagctgtcccctgtatcgccggtgcggccggaagataagcagcgcgcgtcctcctcgtcgtcgtcgggggcggcggctgcgcctctgagggtgcaggacgatacggcggtcgaggagtacgagcagtacctgcggcttccggagctcgcaaggctgtggaaggataggtgctgtccggagtgggccgacgagggcctcgtcaagccggcgctgcaggcgctggagatcaccttccgcttcatctgcgtcgcgctctccgacccgcggggctacgccagccgccgcgagctcgcgcggcggctggaggcgctcgcggcaagggaggaggagctggtggccgcgctctgcgagggcgagcagtgcccgccgatggccgagctgagcgcgttcaaagccgtgctcccgcggagcggag

SEQ ID NO: 28379 - DNA, 275 bp, Oryza sativa
  Clone ID: uC-osflM202089c03b1
ctctttctctatgcaggggagggaggggaggcgcggataaaacatcgagagcggcctgttgccagctacctaccgtccatctgtgcagatccattgctgtacggcttcttgattttttttttatttttgtttctccggtgatcggagaggtggtgtgttttggaacgggaggggagagaagtttgtaacttctaatgttattttaacttgtgttcatgaagttcacctagcctgtattttatctgaattttgatttctagctgtaatgattattc

SEQ ID NO: 28380 - DNA, 269 bp, Oryza sativa
  Clone ID: uC-osflM202089c08b1
ttccttcctcctcctcagatcaagaaaccgtgtcctagaaaccatcgagatcgccctctcccccctcggatcgcggcctctcgcgcggatcgatcgctgctcggtttcttgattttttttttatttttttttctccggtgaccggagaggcggtggtgtttggatcgggaggggagagatggtggctgaggctgatgtgatgtatcagcccgtgccggcgttggaggtgacgcaccaccggtgctttgccaaggctgtccaggaggtgg

SEQ ID NO: 28381 - DNA, 484 bp, Oryza sativa
  Clone ID: uC-osflM202089c10b1
ataggactgcacggagttcctgccggagaggtggatcaccagcgaagggaagctgcggtacgagccgtcgtacaagttcttctccttcaacgccggcccgaggacgtgcctcggcaaggagctggcgttcgtgcagctcaagaccgtggcggcggccgtgatgtggaacttcgccgtggaggtggtgccggggcacgccgtcgagccgaagctgtccatcatcctgcacatgaagaatgggctcgctgtcacggtcaagaggagggccaccatggctagctgctagctagctcatgagtcattagccatcagccatggctggttccgttcgtgacgtcctcgtcaatggccgcagcaacgtacgtcgtcagctaaacttacaatgacctaatgatcgtcatcgtataccacatcatttatggtaccaggactagagctacacgtaggtgacacgtatcagtatttcatcagttcgtatacgtat

SEQ ID NO: 28382 - DNA, 559 bp, Oryza sativa
  unsure (1)..(559): unsure at all n locations
  Clone ID: uC-osflM202089c11b1
aaaaaaaaaagaaaatcatatatagtcctagctagtctcctagactcctagtcctagctgcaagaaagccacattggccatgggatcgttgggtccaagcgtggtggggctgcagcccaaggccgagaagacgacggcggcggccggcggtgagcagcagcacggcggcggcggcggcgggtgtggcgggtcgtcgttccggatgccgctgcactacccgcggtacaagaaggcggagtacgaggcgatgccggagtggcgggtggactgcctgctccgggagtacgggctccccgtcgacggcgacctcgacgccaagcggcggttcgccatgggcgccttcctctggcccgaccagtactagctctagctagctacatccatggcatcagctactacgtacgttgctgcagctaagctactctccctctccgtccgaaaatttgaagagccttaaatcgaaagggatatttcctaataccacgaatccngatatgctgctcaataagcacttaattttccttctcttcgacccgactacgctgcactatagccccta

SEQ ID NO: 28383 - DNA, 475 bp, Oryza sativa
  Clone ID: uC-osflM202089d02b1
ttctcctcctcccctgcacagaccactcgtttcctccacaaagagggagggaacaagggaagggtgtcgcccgccccccaccccgatctgcctccgccgctccgctcctccgcgcctgcgaaatctaccaacgctaactcagcaagatgggtgccggcggcaggatgacggagaaggagcgggaggagcagcagaagctgctcggccgcgccggcaatggcgcggccgtgcagcggtcgccgacggacaagccgccgttcacgctggggcagatcaagaaggccatcccgcctcactgcttccagcgctcggtgatcaagtccttctcctacgtggtccatgacctcgtgatcgtcgccgcgctgctctactttcgcgctggtcatgatccccgtgctgccgagcgggatggaattcgcggcatggccgctctactggatcgcgcaaggctgcgtgctcaccggcgtgtgggtca

SEQ ID NO: 28384 - DNA, 438 bp, Oryza sativa
  Clone ID: uC-osflM202089d03b1
gtcgttgttacgtaggcaccacaggctaggcagaacgctctggcttgcttcggcaccacctgcactgcgacgatcctgctcctgatcctgggtcgggcggagaaggggtaccggatgctggagctcacgctggactacgcgagcgacctgaacaagggcactgtcttttcgcgcatgcatgggtacgccgctgtctacatgttcgggagcaacggcccgatgcacatgcacgggacccacgccgaccggagcggtgggaggaaccctgcgtggaacaccgcgctccacttacctgttgctgcctgctttgacacccgaggtctcgtccttcacgtacagctacgagcacggcgctacttcggagggcaccgagacgtcggtgacgtgatcgtgcccctagacgacctacacggcggtacgcacgacagaggtgagccg

SEQ ID NO: 28385 - DNA, 551 bp, Oryza sativa
  Clone ID: uC-osflM202089d04b1
tttctctctctctctctctctctcctcgaaaaccccaacacacacaacgcgaaccccactccgcgatggcgtccgccggcgatcgccgcggcggcggggggcctcccggctccggcgacgactccgggggtggttgggagactgttgagaagagggtaaagaaaccagcgcaacaagttgggaaggggcaatggggacaatggaattctccaaatgctgcacctgcacctactgcaccacggagtggctctggagcttttcatcattctggaaacactttggttcgacattctgatcgtaggccagcaagaggcactcctaggccaccaccacaaaacaggtctatagaggcagaactgcaagcaccgcacggagttgtgactgcacctctggcaaatggttggcagtggggagccaggtcttgcccacctggtactgaaagcaaggagggtggccttcctttgtctggttgggatcctgaaacagacaatgctgaaggttatgacacatcggacgatgataatgatgatgatatgagtgacgatttgagt

SEQ ID NO: 28386 - DNA, 435 bp, Oryza sativa
  Clone ID: uC-osflM202089d07b1
ttcggttgctgcttcttccccggggaggtttatcggatcttgatggagacccatatcggatccgtggacggggcggcggcggcggcggacaacggcgcggtggggtgcccggcgtcggcggtggggtgcccgatgacctcggcgcgccccgcgcccgtgtcggccggcgaggcgtcgctgggacggcacctggcgaggcggctggtgcaggtgggcgtcagcgacgtgttcgccgtgcccggggacttcaacctcacgctgctcgaccacctgatcgccgagcccgggctgcgcctcgtcggctgctgtaacgagctcaacgccgggtacgcggtcgacggctacgcccgcgcgcgcggcgttggcgcctgcgccgttacgttcaccgtcggcggactcagcgtgctcaacgccatcggccgcgcgtacagcgag

SEQ ID NO: 28387 - DNA, 251 bp, Oryza sativa
  Clone ID: uC-osflM202089d08b1
attatgtaagcagcagagggtagccaggacgcggtgcctttcatcgggaacaccggcaatccgcctagcctgcccctgaccatgggtcatgcagaaaagagatgccgaatggcagaagctaaccgaatcaacgcgagcgaggagaacaaaggcaaggatcttgagcacgtgcagtggtcaaaagctttaaaaagttcatcaggccctgattgaaagactatgagaagacaaattaacttacgtgaccatga

SEQ ID NO: 28388 - DNA, 280 bp, Oryza sativa
  Clone ID: uC-osflM202089e03b1
ctggaggatgggcacataatgctgtctgattttgatctctcccttcgttgtgctgtaagccctactgttgtcaagtccgcgaatcctggaccagatgcgttgcagaggaacaatcaagcttattgtgtccagcctgcctgtattcagccatcctgcatccagccatcatgtgtagctccaacaacctgctttggtccccgttttttcttctccaagtctaagttcaagttcaagaaggggaagaaatcaaagcctgaggtttgtaaccaaattagcccac

SEQ ID NO: 28389 - DNA, 523 bp, Oryza sativa
  Clone ID: uC-osflM202089e05b1
atcaacagctacatccaagagctatacttttagagaaggggatagggtaagatatgtgggtccagctcagcaatcgtcattgtcgcaaaggggacccagttatggttatcgaggcagagtgatgcttgcttttgaagaaaatgggtcttccaaaattggagttcgatttgacaagcagatccctgatggtaatgatcttggtggtttgtgcgaggaagatcatggtttcttctgctctgctgacttacttcgccctgacttttctggtggtgaagaggttgaaaggctagcaatggccgagttaattgaagtcatctcagaggaacacaaagctggccctatgatagtgttacttaaggatgtagagaaatcattcactggaattacagagtcactttcatctttgaggaataagcttgaagcgcttccatctggtgtgcttattataggatctcacactcaaatggacagccgcaaagagaaggcccacccacgtggatttttttctacaaagttgtagtag

SEQ ID NO: 28390 - DNA, 519 bp, Oryza sativa
  Clone ID: uC-osflM202089e09b1
ttgtcctccacctccaccccccacccgccgagcgccctttgcgagctcgtcccgtcgcggcgggcgatcgctccacccacccatccacctccaccttcccgcgcgattccccgagaggagaggcgaggcgaggccgctatagctccgctccgctccccgaccaccacgacgcgggtggcggcggatcctccactccacccacccaccccgctttcgccgatcggatcgcgagctccccccgaggtagaggtgatgataaatcatagttagtgacttagcttgcagcagttctttcttgcagctaagacatataataattggcgttatggcatatagaaatacggtatgcactccccaagttattgatctagaaactgaacaagggcactctcatatgcattctgaaagctctaatcgcactgggaatgatacatgtgaccaaggtgctcaacatgctgccagaggggtaggaaatgcttcaaacattggtctatctgatatgcgaagttctatgatgcg

SEQ ID NO: 28391 - DNA, 555 bp, Oryza sativa
  Clone ID: uC-osflM202089e11b1
taccattgcgctgggtaggattccaatgtgggggactagggtttagggtttggagtcaatcccagaccgcgcccatgacgtcctcgtctcgagtaagggttggcaatctagtccccctcaatgaaggaaatgcgagctcgtcaaatggatcggtgtcaagcattcctatctatctgggtgccaatgttgtagggaggaatcatttggtggtcgtcgacaagagagtcagccgcaagcatctgagcctacatgcctcggcggatggttccattgaagcggtagtggaaggaccaaatcctatcattgttcgatctgagggccagaggaggaaggtctgtgctcaagagagagtaaagattgcacatgatgatgtcctggaactcatccctggtgaatattttgtgaagtatttgaatgtgggcgataaccataaaagttccacatcaatgggttcaagtgattttaaaaaggggaagaggctctgtgaggatgatactgtagttatcaaaagaaatcgtcagattatggaagatgaggctttggcaagaagtttac

SEQ ID NO: 28392 - DNA, 491 bp, Oryza sativa
  unsure (1)..(491): unsure at all n locations
  Clone ID: uC-osflM202089f02b1
ttatggcatactggggatcctatactctgtgcttataactgcggtaatcacagatgcaattaaggatggtgtgggtcgtccacgcccagattttttctggcgctgtttcccagatggaaaggatgtttatgataatgtcactactggtgtcatatgccatggagagaagagtgtcatcaaagaaggtcacaagagctttccaagcgggcactcttcatggtcttttgctggtctaggcttccttgcatggtacttagctgggaagatcacagtttttgatcgtagaggtcatgttgcaaagctatgcatagtatttctgcctcttcttactgctgcacttgtggctgtttctcgagtggatgactactggcattactggcaggatgtatttgcaggctctctgataggtcttacagtcgcatcattttgntatctgcaattcttcccatattcttatgacgcagacgctttctggcctcatgcatacacct

SEQ ID NO: 28393 - DNA, 450 bp, Oryza sativa
  Clone ID: uC-osflM202089f04b1
ttggtggcctaggagggttaagttctacagatttgggaggtatgctgggtggtggctcggatacttccttcttgagtcaggtgttgcaaaatcctacaatgatgcaaatgatgcagaacattatgtcaaatcctcagtccatgaatcagctgcttaatatcaacccaaatgtacgtaatatgatggaatctaacactcagttgagggagatgttccagaacccagaatttgttcgccagatgacatctcctgaaactttgcagcaattaatcttattccagcagtccttgatgtcacaacttggtcaacaacaagctggcccagagcgaacccaatcaggtgctggtgcaggcaatactaacctcaacaatctgatgagcatgttcagtgggctcggtgctggtggtggactaagtgttcctagtcgacccaatgttccaccagaagagc

SEQ ID NO: 28394 - DNA, 537 bp, Oryza sativa
  Clone ID: uC-osflM202089g02b1
attggagaaggagaggtcgccgaggaagaggaggaggagggatggcggcggctgcggcggagggcgcggcggcgacggcgctgcgggcggtgctggggcgcgcggcgaaggcggcggagcggtcggggcgcgcggcggaggcggtgcgggtggtggcggtggggaagacgaagccggtgtcgatggcgcgggagctctacgacgccggccaccgctgcttcggcgagaactacgtccaggagttcgtcaccaaggcgccgcagcttccagaagatatccggtggcatttcatcggccacctgcagagtaacaaggtgaaatcactgttagctgctgttccaaatcttcacatggttgagggtgtagataatgtaaagaatgctaaccaccttgatcgtgctgttagtagcttgggaagggatcctttgaaagttttggtacaagtaaacacttgtggagaagaatcaaaacctggtattgacccttcagaagcgtcgagcttgcccagcatgtgaaagtagcatgccccaactaata

SEQ ID NO: 28395 - DNA, 296 bp, Oryza sativa
  Clone ID: uC-osflM202089g06b1
gtgcctcgctgccacgccgcgccgacgccgtcgccccgccgccgtcgtcgccgtacgccatccccccgccgacgccgtgcatcatctggcgccggtcccccccttcccccttcttcgccctcccctcgcggcggcggggtaaccggcgccagtatccccctcccctcgtggcggcgtcagagtcggctccggcgctcccctccctcctccatcccctttcgaccgcgctggggatggtggcaacgccctgaggggtggcggcgtgaggcgcggctagaaaggagctgacgacaagc

SEQ ID NO: 28396 - DNA, 382 bp, Oryza sativa
  Clone ID: uC-osflM202089g07b1
ctgacgcgtgggtttttgggatcggtgatccgtttgggttcttgttttgggggtgacaggatcttgtctgtgtggattcgcgggtttcttggatcggaaagggggaatgctggtatcaatatgctagcccgcggagccgtgcggtcgctgttcgatcgtctccggccgccgccgcatcaccggaggaggaggagtagccccgccgcgattatgccggccgccgtcgtcgcccaccgtggctgcttctgcagcctcagccactcgaatctgtgcggggagggcagtgtgattcagaggaagggatttcttgatcttgggatgggtcggaggatcgcgccgggcagcgcattgggatccaagggatgcctgaattggcaggatc

SEQ ID NO: 28397 - DNA, 374 bp, Oryza sativa
  Clone ID: uC-osflM202089g08b1
gttcattgctcagcttgagctgtggaaggagaagagcactggcaagtacgagaagaaggtgtacgttcttcccaagcacctcgacgagaaggtggccgccctccacttgggcaagcttggtgccaggctgaccaagctcttcaagtcgcaggctgactacatcagcgttccagttgagggtccctacaagcccgcgcactaccggtactaggctgaccagcacgactagcggctgtggcatgagaagtgtcaacttgaagttcgccatgacgactctggagtatcctgctttgttttcatcatcttatatgccggcacttaggaggatttgttgtggggtttatgcgtttgagactgatgacgggagggaatgt

SEQ ID NO: 28398 - DNA, 404 bp, Oryza sativa
  Clone ID: uC-osflM202089g10b1
ttgccatggccaccgagctcactgagtacttgctgctcctgccgcttctcgtcgtaccgctcctctacctcgcggcgtcgtcgtcgcggaggtcggggaggctgcggctgccgccggggccgtgggcgctgccggtgatcggccacctgcaccacctcgccctcgccggcgcgcccacgcaccgcgccatgcgcgacatggcgcggcgccacggcccgctcatgctgctccgcttctgcgagctccccgtggtggtggcctcctcgccggacgccgtccgcgagatcatgaggacgcacgacgtcgcgtttcgcgtcgcggacgatcgggccgatgctgcggctcgtgttccagggcgccgagggcgtgatcttcgcgccctacggcgacgggtggaggcagtt

SEQ ID NO: 28399 - DNA, 528 bp, Oryza sativa
  Clone ID: uC-osflM202089g11b1
tttgtcttctcgccgccgccgcgagcggaatccccctctctccggctaaacctcgccgccgcggcgaagcaaaagcacctccctcttcgccgccgcccgccggcaatggcggggctgtcgctgcggtgcggcgactgcggcgtgctgctgcggagcgtggaggaggcgcaggcgcacgccgaggccaccaaccacgccaacttctccgagtccaccgaggccgtactcaacctcgtctgcgccgcctgcggcaagccctgccgctcccagaccgaggtggacctgcacaccaagcgcacgggccacacggagttcactgacaagaccatggaggcggccaagccaattgatctcgaggcggcgccgtcgaagccggccggtgaggccatggatgtcgatgcctcggcaagcgccgagccacaagagatggtggcgccggaagttaacaaggagatgctggcggacctcgggcgatggggttcacgacggcgcgtgccactagggcacttcaattttctggaatagcac

SEQ ID NO: 28400 - DNA, 510 bp, Oryza sativa
  Clone ID: uC-osflM202089g12b1
ttttgtacatatgctaaaagtactatagaaaacattggaattaccattaaattcttgaactgttgttgatgtaacaaccacaacagtgtggttgccaatcacatcttcattcaaagaatgagctaactgcccccataacgtcactctgattttagcaccactgtagataacattgtaaaagacttagataagattatgaaagatatcaaaaatcgattgaaaggaaagacagccatgtttcttactctaataatagaagttcaatctcacggataactttaggccatgggtttgtagagttcttcattatcattcttgattctatgggcttaattttggtaagcagtccgatgacatctgtcaccttggaatgttaattttgtgataatacaatttgaatagtgaagttaaatattattatacgcttacctgataaaatttatcttatttactttataaacaatgtttccttgtgcaactctagtatattcttgaatttgttgatgcttc

SEQ ID NO: 28401 - DNA, 341 bp, Oryza sativa
  Clone ID: uC-osflM202089h07b1
gttggaacgaaacccaacccaagcgaggcaaaagcggcggtggcggaggaggagaggagcaatggagagggcggtgccggtgaggaagccgcacacctcgacggcggacctgctcacgtggtcggcgacggggcccgacgccgccgccgccgcggcctcgccggtcgcctcctcccgccccagcctcaagccggccggggggatcacgccggcgatgttcggcgcgccggtgagcgagaaggaggcggaggatctgagcaagagtgaacgaaaattttgcttgggctcaaagttaaaagaaatgactggaagtgggatattcgcttggaatagggaaaatg

SEQ ID NO: 28402 - DNA, 456 bp, Oryza sativa
  Clone ID: uC-osflM202089h09b1
gtgccatcgtcgtcacacgcgtacggcgtaccggcaccttcgatggcggccaccaagcccccgagctgctccacccgcctcagatctccggccaccaccgccgcctgcttcctcccggcgtccctccttctcttcctcctcctcctcctcctccgccgccctcccatgggctccttccctcccacaattccaggtggctccgtgtcgtcgcggcgggcggagctgtacgggaggatggcgagggacctcgacgagcgcggcgcggcgttcttggacggcggcgagacgtcgcagtcgctcacgctgtcggagctcttcgacaccagggacggcgccgtcgtgcccatgctcaaggctgccaacccgccggtgcgcgcgaatgtgctctacctggatcctgagtttgcttccgtgatatcgaaggctgtgaaggaagtgtttttttcttatttaatc

SEQ ID NO: 28403 - DNA, 513 bp, Oryza sativa
  Clone ID: uC-osflM202089h10b1
tttccatgcgagacaaaaaccaatatggactggaagttgatatctggtcatttggctgttttttattggagatgcttacacttcggataccctaccagggcctacctgattcagaaatatatgatctcataatgaggaagaagcaaagaccaagactaactcaagaactagaagcgttctggacgttagacaagccaattacgaggctggagttgggtatcacatctgatgctcatgcagaaaaactaagactgttgatagatctcttctaccagtgcactaaaggaattgcatctgagcgcccaaaagctgaggcggtttacaatttactgtgctctctacccacatgctatgacatgaggtgaaagtgtggatcttaaatcagtatgacataaggtgaaaatgtggatcttgaatcaggaacctgttgatgagacagtcagccagatcggcctgcgccaggatggcaagttatgctgggtggttttagcaggtcaacagatcttgcctcgc

SEQ ID NO: 28404 - DNA, 516 bp, Oryza sativa
  unsure (1)..(516): unsure at all n locations
  Clone ID: uC-osflM202089h11b1
ttcggcgcaggacatgcagggctgcgacgagcagttcaggaaggtcggcgagaagaaccccatggaccacttcaaccggtccctcctcgagatgtccgagatctgccgctccctctccaacatgatctgatcgatcgctctcgccgcccgccaccgtgccggcgcgcgcaccgcgcacgcgtgccgccggccggcgaccctttgcgtgagagcgagcaagcgcgctccagcagcgctggtgattgaagcttctctttttaatttgttttctttcgcttctttttttttaacgatcttgttttcttagtgaaaaatgtgttaacttgtaattgttggtctcgggaaagagaaggcacattcaagagggtcttctaattttgaatggaaatgttgntgattcttttttgttgtaatttatccttgatgtcaaaatgtgcatgagcagtatattgaagtgtaacagcgactaaattaaatgtatacttttgtagcaccattatatantaaataagattt

SEQ ID NO: 28405 - DNA, 360 bp, Oryza sativa
  Clone ID: uC-osflM202089h12b1
gtctccccctcctcctcctccgtcccccgccgggcgccaccgatcttccccttcccttcccggccgaggcgatcgatcgatccacgcgcccgcgcgccaccgccgctgatcataacaagcaccagcagcctcccttctccgcgcgcgcggttagctcgcggctcgccatggcgcccaagacgacgacggacccttccacgtccaccccgccgccgccgggcgcgttcaggcgctgcagcgggcgcgtgcgcggcgccggcatctcgtgcgcgggctgcttcggcgacgcggagtccaagcggcggcggcgggtggcggtctacaaggcgtacgccgtggagggcaaggggaaggccttgc

SEQ ID NO: 28406 - DNA, 146 bp, Oryza sativa
  Clone ID: uC-osflM202090a01b1
accacagcgctcgatccacccccaacgcaacgctactcgtcgcatggtcttgttctccagccaagccgacctcacccgtcctcctcgcggtgagcccatggcggtgccattaggccgccgcccgagcgatgaccgcaccagaggga

SEQ ID NO: 28407 - DNA, 234 bp, Oryza sativa
  Clone ID: uC-osflM202090a02b1
cttgtttctgtcttctttctttgtctacatttgtgcaacctcttgaggaaaagagagcgattgacaaggcctttaattccatttgtatgtatgcagcagcaggatatcttgcagctaggccccccacactggaaatcttccctccatggccaatgagtcatctacaggagccatacagcaactcgcagtcagtagggagcaccactgactctagctcagcttagaacacaatgt

SEQ ID NO: 28408 - DNA, 306 bp, Oryza sativa
  Clone ID: uC-osflM202090a05b1
gttatatccaatgcatctcgtgcttctgccactcggagaaagttctacttcttgcagaaatctctgcttgtctcttctttgcttgcggctgctgcagcagatgctgttggagcagggccaaaccagcagtgttttccttcctcctgtggtgatcttggcaacatatcctaccctttccgtcttgcaagcgattcacgcccgtgcgttggtactcttcgcccatggtacaacctctcatgtagcagtggcagggctaccattcagatcaacacacggacgtactatgtcaccagcatcaactatact

SEQ ID NO: 28409 - DNA, 337 bp, Oryza sativa
  Clone ID: uC-osflM202090a06b1
attttggaacgcgtacttacccacaagttaggtgcatgccatggcaccattcatggcgtgcgcctcgccaccggtactcacgctggccctgctcgcgtcgtgcggtgcccttctcgccacctccatgctcccggcgcgtgcgacggcgggcagttgcttggacgtcggcgacatggtgatgatggacaggttccgcgcttggcagggagctcacaaccggtcgtacccgagcgcagaagaggcgctgcagcggttcgatgtgtaccgccgcaacgcggagttcatcgacgccgtcaacctgcgcggggacctcacttaccagctcgccgagaacgag

SEQ ID NO: 28410 - DNA, 90 bp, Oryza sativa
  Clone ID: uC-osflM202090a12b1
tgtctcttctctagtctagaccaaaggaaggaaaccaacctataggcgtggcgaggtgaggagaggagaggataggagaggcggaggatg

SEQ ID NO: 28411 - DNA, 233 bp, Oryza sativa
  Clone ID: uC-osflM202090b02b1
agcgcgcgtttattgtcaatcagtatagatgcttgaacaagggctgtagagatattgccaaaccgcaagctgccaataatgcgaggctctaccaggtctgctcggaccaaggctagtgtcgatcgcaaccgagaaaataagatgcaccttggccattggggtggcttgacaggctgagtcacgatattagtcatcccgcgtttacgttagtgaactcgaagctggggcacgat

SEQ ID NO: 28412 - DNA, 167 bp, Oryza sativa
  Clone ID: uC-osflM202090b03b1
cgggaccgggccgggaatcccggggcgagcccacgcgcgcggttataacaccagcatccacaacacactccgcggctactatagcaacgtgtgtagacacttaccgcccccctgcggagacgcgaagagctactctaacaagccgatggggaggcccgccagcgaca

SEQ ID NO: 28413 - DNA, 385 bp, Oryza sativa
  Clone ID: uC-osflM202090b06b1
gtttgatgttgatggatttcatccactgaacattggacgacttgcaatgcaaggtcgggatccgttctttgttccatgcacccctaaaggatgcatggaattactacacagatatggagttgaaatcaaagggaagagagctgttgcaattgggcggagcaatattgtggggatgcctgctgcattattactgcaaaaagccaacgcaactgttagcattgtacattcaaataccaagaagcctgaggaaataacaagacaagcagatattgttatcgcagctgttggagttgctaatctggtcagagggagttggataaagcctggagctgctattattgatgctggcatcaatccagttgatgatccagaaagccctcgaggt

SEQ ID NO: 28414 - DNA, 287 bp, Oryza sativa
  Clone ID: uC-osflM202090c02b1
cctatgatgttgatgacctaaggaagtctattgaggctcctggaatggcagttcttcagattgcttttggaggcggatctgacaatccacacttgcccacatagccatgaatacgaacaagcagtatacaccggaacacacgacaacgtcacaggcatatggtgggggcacactgtaccagaggatgagaagcagacctgtggtaaggatctgcctgcggctaataagactgaaatctcatgggcactggtcactgctgccctctctctaattgcaggacatccatg

SEQ ID NO: 28415 - DNA, 286 bp, Oryza sativa
  Clone ID: uC-osflM202090c03b1
gggggcccctgggggccggccgggatccggggggagcccacgcgcgctgttgtgcggactattgctacctacacctaagggtacgtcatggcttatgtgaccgagctctgacaggcataatctatatgacaccactgcgaagcacatgggcctgtacatgaggatcgggggggctggcaagcatctcatgagcaaggcgcggactctgtgccgtcatgggactgaacacaaacggcagccccagtggaagtacgatggatccagcaccggactgtcagcaggggag

SEQ ID NO: 28416 - DNA, 357 bp, Oryza sativa
  Clone ID: uC-osflM202090c04b1
tatatcaccgcatcctccatgggcaacgccgaggccgtcgtggtgctgcccgcgaacggcggcgcgcggcggcgcgccgacaaggtcgtccacccggcgccgatgccggacagagcagctggtggcgcgatggagagggaaggcggcggcgtcggcggcggcggctaggtgggtgggtggaggaggtcctccttatcttcattcttatttcaaacacatcttccttttgaccaactgtatgtgtgccttcgccgctttcgctttcgtggaggaagaccacgtaacacgtggggttgggatatcgtcattcttcaaagcaaatccaagaaatcctttgttgttccacccaatcccagt

SEQ ID NO: 28417 - DNA, 426 bp, Oryza sativa
  Clone ID: uC-osflM202090c06b1
ttttatgatcacctacgccgacaccgacgtcgtggtcgtcggcgccggctccgcggggctctcctgcgcgtacgagctctccaaggacccctccgtcagcgtcgccgtcatcgagcagtcggtgtcccccggcggcggcgcgtggctcggcgggcagctgttctccgccatggtggtgcgcaagccggcgcacctgttcctcgacgagctcggcgtcgcgtacgacgagcaggaggactacgtcgtcatcaagcacgccgcgctcttcacctccaccgtcatgagccgcctcctggcgcgccccaacgtgaagctgttcaacgccgtcgccgtcgaggacctcatcgcaaggagggccgcgtcgcggcctggtcaccaactgggcgctggtgtcgatgaaccacgacacgcaagcgtgcatggccc

SEQ ID NO: 28418 - DNA, 509 bp, Oryza sativa
  unsure (1)..(509): unsure at all n locations
  Clone ID: uC-osflM202090c12b1
ttgcaaagcctcgccgccgccgccgccgccgcggggatcgccacgccatgtctccctccctcttgcttacctctaggggtacccactcgccggcgccacggccgcaaacccgtcgagcatcacaactgctcgtctctttcccctcgcgctgcagccgcttcgtcggcctccgcctcgcgcgcgcagccgccgattcgcaggggcccaacggcgctgcccctggatctggatctggtggggacggagagggcaaggcagccaatggtgccgacaccaaattgccaaagaaccggagggacatactcctggaatacgttaaaaatgtccagccagagtttatggagctcttcataaaaagagctccgccacaggttgttgatgccatgcgccaaacggtgactaatatgattgggactctgccacctcaanttttcgctgtaactgtgacaacggttgctgaaaatctagctcagcttatgtacagtgttctgatgaccggatacatgttc

SEQ ID NO: 28419 - DNA, 402 bp, Oryza sativa
  Clone ID: uC-osflM202090d02b1
tccggtgacttgcagaaaataattccagatacttagaaactctagctgaagaaaataattccagaggtctactgtctacatcattacagtaccaaccaccgtcaacttgtaaatgtacaggggaggaagacatttcaacactaagagatataaagctcggagaatctgaatcaatgcaagaaaatttattccctgggcttgaggaccaacagaacattcaaaaagagagtgaagggagagagatagtatctcaagatgggcttctcgaagagcatcaagatggtccttcaaatagattgttggaaaaacactggaacgaagagatgcaagagtcctatcctatggaaaatggaggcagagaatatcagataatagatgcgttatcatttgacccatctcatc

SEQ ID NO: 28420 - DNA, 325 bp, Oryza sativa
  Clone ID: uC-osflM202090d03b1
gcgggtatctcctgctccgcccttacccccgcgcgcgtgcacgcgacggcgcggcgatctgatgctgccgccgctgctgctgcaggcgccgcggtgatggcggcggcgccgtccgccggcggcgttggggagggctcttcctcctccgccgccgccggcgctgctgctgctgccgcgacgatcgggccccacgtggtcgacgaagaggcgatgtggcagatgaatctaggagaagctatgggagctgggccatacccagagcgtattggagaaccagagtgtagatattacatgaggactggcttgtgcaggtttgggatgacct

SEQ ID NO: 28421 - DNA, 428 bp, Oryza sativa
  unsure (1)..(428): unsure at all n locations
  Clone ID: uC-osflM202090d05b1
ttttgagctcgctaaggagaacgtcaagaacgcctcgtcgtcgacgggcaacatcacgttgagcgtcaccaagagcaagccagagaccggcgaggtgattggcgtcttcgagagcgtgcagccgtcggacacagacctcggcgccaaggtgcccaaggatgtcaagatccaaggggtgtggtacgcgcagctcgagtagggaatgaacaaatgttttgtgcgtggccgggttgatatatcgatacatggagagagggaaggaaggctgcaatgtgtgtatctagtaatgcaaactcgatcgggctgttgatggctttaattattagcttttgtttcttcctctgttctcgngaactgatgatcatatcccncgatgatgctatttgcatttcgacaagcgagaggacattgtacgttttccttttttc

SEQ ID NO: 28422 - DNA, 469 bp, Oryza sativa
  Clone ID: uC-osflM202090d06b1
tttctgtgctttcgcttaagatctattatggactacccaaatcttaaggcacagctttttaacatgccatttggatatatcttgacacacccactggaacctttaaaggtttgcttgccatcgatagttgatgagttcctgaggcaggccaaggctgccaggttgttcaatgcatctgtccattcagaatttgaagatgcgcttgaatctgatttgtccaaaacttttggaggaatgaatagacttgacatgttcttcccatttgatccttatctgctaaaagaatccgacagatatatgcgtccaaattttgagtactggtccatggtcaagacgacatacaacaattataacagtgatgttgatgatgagctagtggacctcgatgcaccttgaatgaatgtcggcagtttagatgatcattgtgagatagatctcacagtgatgatgacttggaatacttcatgaa

SEQ ID NO: 28423 - DNA, 384 bp, Oryza sativa
  Clone ID: uC-osflM202090d08b1
caaagatcatgtgatcagaattaacaaagcagaagctgaatattggaagaagtcagagggctatcgcatgggctggagtgatgaaatattaggctttgattgtggcgggcagcagtgggtttctgaaacctgcttccctgcagggaccctagcaaagcctaatatgaaggatctggattatatagaggagctgctgcagttgattgagaaggaagatatacccgcaccggcacctattgagcagcgctggactgcctgcagcaagagtcccatgagcccagcatcaagctctcaagaagatgacatattttcatggggtgggataataatgtacctcccaacgtccgatgctcgacaaaggaaggaaattaccgagggattttt

SEQ ID NO: 28424 - DNA, 451 bp, Oryza sativa
  Clone ID: uC-osflM202090d12b1
tttcagccgccgccgccgcagcctcctcctctcgccatctcccgtcctctccttcaagtcagctacctgcttaatcaaccatgggtaaggagaagacgcacatcaacattgtggtcattggccacgtcgactctggcaagtcgaccaccacgggccatctgatctacaagcttggaggtatcgacaagcgtgtgattgagaggttcgagaaggaagccgctgagatgaacaagaggtccttcaagtacgcgtgggtgctcgacaagctcaaggccgagcgtgagagaggtatcaccatcgatattgccctgtggaagttcgagaccaccaagtactactgcacggtcatcgatgcccctggtcaccgtgacttcatcaagaacatgatcacgggtaccctccaggctgactgtgccgtgctcatcattgactccacactggtggttttgag

SEQ ID NO: 28425 - DNA, 431 bp, Oryza sativa
  Clone ID: uC-osflM202090e01b1
gtacgcgctggtgagtgtgagagtgagatcgatggcggcggcgtccatctcgcggagcctcctccgccgatcccgctgcggcggcggggagcaccacctcctcctgctggcgcgcggcttcgtcacggcggagtgccaccgccccgtcgtgctccacaagcgcggctccgacatcctccacgacccatggttcaaccggggcacggggttctcgatgacggagagggaccgcctcggcctccgcggcctgctcccgcccaacgtcgtctcctcccagcagcagatcgaccgattcatgcttgacatgcaacggctgcagaaatatgcgagagatggcccatcggatacttacccgttagcaaaatggcgtatccttaacaggctgcatgacagaaatgaaacaatgtattacaaggtcctaatagataata

SEQ ID NO: 28426 - DNA, 376 bp, Oryza sativa
  Clone ID: uC-osflM202090e05b1
ttctaagccgctatcccatcctaccgcgcgcgtgcgccatcgccatgtcatccttcgactccgtcgcggccgtcgccggcgacggcgacgccgacgacgacgacgtgctccctcccgctcccttcgaccccgccgccgacggcgcccagggcggcctcggcgccctgcgccgtggccaccgcttcgccacgtcctactcgtccttcggcaccgccgcctccgaggacgacctggctggcgccggcgccgggaccgacggcggcgtcggcgccggcattcccctgggctcgagctcgaacggcggcgccgcgtatgggtacggcgggtcgggggacgtgatgaatggccacgtggaccagatcggcgacctcatggg

SEQ ID NO: 28427 - DNA, 266 bp, Oryza sativa
  unsure (1)..(266): unsure at all n locations
  Clone ID: uC-osflM202090e07b1
tgctctctctctctctctatccctcttcccccgcaacccccacctactcgtcgcgggggggcccgtctcggctgcggcggcggcggcggagtaggccacggcggtggtggtggtggtgagtggacgnacaaaanacaccttacgtccgagcaatacaagcgactgtccgacaacactgaaccacccaatggtcaaagggagcacgagccatctcgatcaagaagaggcaacgactagatcaccgcggcctgctaccgacaaagaat

SEQ ID NO: 28428 - DNA, 248 bp, Oryza sativa
  Clone ID: uC-osflM202090e09b1
ttgggaacccgcagcgtggccttggtgctcctcgcggccgtgctgctccaagccctcctccccgcttcggcggcggagggtttggtgcggatcgcgctgaagaagcgcccgatcgacgagaacagccgcgtcgccgcgcgactctccggcgaggaaggggcgcgccggctgggcctccgcggcgccaactcccttggcggcggcgggggtgagggcgacatcgtggcgcttgagaactacatgaacgc

SEQ ID NO: 28429 - DNA, 401 bp, Oryza sativa
  Clone ID: uC-osflM202090f02b1
gttttcacaatccatttctttactagaagaaactgataggcagataagagaaaaatcatgcatggagcaagtaagacgcttgaaggaagcccgcaatagttatcatgaggagttggtggattgtgtcaggcattgtgtttggtatcgtgccactgttttttcttcatggaagcaaaggggaatgtatgcaacttgcatgtgggttgtggagcttcttttggtgctcagtgattcttcttccattttccactatattcctgaattctatgtggaatcattggtagactgtttccatgccctgcggcggagtgatcctccttttgtctctcctgcagtatttcttaagcatgggctagcttcatttgtcactcttgttgtcaaacactttgatgatccaagga

SEQ ID NO: 28430 - DNA, 344 bp, Oryza sativa
  Clone ID: uC-osflM202090f04b1
tgtcgtcgccttctccgtcgacaaccgccagatcgtctccgcggcgcgcgacaacaccatcaagctctggaacaccctcggcgagtgcaagtacaccatcggcggcgaccatggcgccggcgagggccacaccgggtgggtctcctgcgtgagattctcccccaaccccatggcccccaccatcgtctccggctcgtgggatcgcagcgtcaaggtctggaacctcacgaactgcaagctgcgcaccaagctcgagggccacaacgggtacgttaacggcgtcgccgagagcccagacagatgcctgtgtgccttccgtgggaaggaccgaaccaccctgctct

SEQ ID NO: 28431 - DNA, 363 bp, Oryza sativa
  Clone ID: uC-osflM202090f05b1
ttttacatgtaaccatagttagtactagaaccactctctagctacttgtatagttgtatgttccagcttcctagtaggtggttatggacaaacacccgtgatgatcttagtgtcttatcagaataatcatgctgatgcattggtcaacactggtctggcgaaattggggtaccagtatgtgaatatagatgattgctgggcagaatatagtagggattcccagggtaactctgtgccaaataggcagacgttcccctctggtatcaaggcactggcagattatgtgcatgcaaaagggctgaagcttggcatttacagcgatgccgggtcacaaacatgccagtacaaaatgccaggatcact

SEQ ID NO: 28432 - DNA, 369 bp, Oryza sativa
  Clone ID: uC-osflM202090f09b1
tttagggttttcctctctctctctcgcatcgcatccatcccctcgtgtcgccgccggcggaggctgcggcgagccttcaccccccacccgcccaccgccggcgagccacggcgtgggcgacctcctctcctctcccgatcccctctcgcccttaggtaggggcttctccccagtccccaccacacgcgcgtgcgtggccgacgagcaccccaggttcggatcggatggaagaccagaagaaaaatgcaaaaccagaggggtcttctggctcgcaaaggggagctcccccggcacctgatgcaggccttcccaatccttttgattattctcaggttagcaacttgctcaatgatccatctataaggagat

SEQ ID NO: 28433 - DNA, 208 bp, Oryza sativa
  Clone ID: uC-osflM202090f11b1
ttagaagctgattcagcttcgaagcaagcggagatcgccatcgggagctagggagagactgggacagcctgaggagagcatgatatggactgcttcgcgcagacaggagggaagagggtgcatgaccctttgaaccatattatctcaggctgatgcggccaccaccgtaacggaggtgccggtggactacgtggacaaggcgcaggac

SEQ ID NO: 28434 - DNA, 364 bp, Oryza sativa
  Clone ID: uC-osflM202090f12b1
tataaccctagacttgcacagatcgagacgagagaggctagcagcaacattcttcgacaatggctagccttgcaatcttcgccgctgtagccttcgttctcctcgccgcctcggtgtcgtcgtcgtcggcggctttgtacaccgtcggcgatgcgagggggtgggcagtgccgcccacaggctcagagtcgtacaaccattggggtctaaagaatcgcttccgcgtaggcgacgtcgcggagttcaagtacgtgaacgaatcggtggtggtggtgaaccacgagggctacaggaactgcagctcgctgagcccggtgatcccggtcacggacggcgacacccagtacctgcttgaccgcccggg

SEQ ID NO: 28435 - DNA, 313 bp, Oryza sativa
  Clone ID: uC-osflM202090g03b1
tctgtcaccgccgccgccgccgccgccttggtcaccaaatccgcctacggcggcgccggcggtggggggcatcgtcatggcgtcgccgagcagccgcgcggtggccgtcggcggcgcgctcctcctgctcctcgtcttcgccgtcccaaccaccttcctctacctcacctccgcccccgccgcctgctccccgagcctcctcctcaacctcaagccgttcggcgcccggtgcgcgcccgccgccgccgccgccccgccgctcagggtcttcatgtacgacctgccacggcgggtccacgtcggcatgatggac

SEQ ID NO: 28436 - DNA, 184 bp, Oryza sativa
  Clone ID: uC-osflM202090g05b1
tatagtatggaaccggagagcggagtacaacgaggggtctgtttgggcgtctgcccgtaagtttcagagccccctatatacggaacgggaaaacgagaggagtgcagctgctgtcagatgagatgagacaatgggaatgatagatcagtagtaagaacaaaaggcggtagtgccaatgggggca

SEQ ID NO: 28437 - DNA, 389 bp, Oryza sativa
  Clone ID: uC-osflM202090h03b1
tcttaatccgacgcactacttcgtggaggaggtggtgaagttcgtcaacgagagcgacctccaccggacgtggatcaaggtcgtcgccacccgcaacgcccgcgagcggagcacccgcctcgagaacatgtgctggcgcatctggcacctcgcgagaaagaagaagcagctggagcttgagggaatcctgaggatttctgcacggaggaaggagcaggagcaggtgcgccgcgagacttcggaggaccttgcagaggatctgtttgaaggctagaaggcggacaccgtcggtgaattggcacagcaagacactcccatgaagaagaagttccagaggaacttctcagagctcaccgtcagctggtccgaccagaacaaggagaaaaagc

SEQ ID NO: 28438 - DNA, 312 bp, Oryza sativa
  Clone ID: uC-osflM202090h04b1
gttaaaaaaaacgaaaaaaaaagagaaaaaaggggaaggtctcgccaccccggcgggagaggcgtacggcgcaccggccggccggcggatctgcgccggcgacgcgcgcccccgccggatccccgctgcccgaggtggacgaggcggcacttcggccatttatccgaccgggagcgcccacaaacgacccggcggatatttgctggtcaatttgccataaagtgcttccagttgaccccgagttggtggagaccccctgctctttaatctattctccatttgctaacaatgatcaattggaagaatctggcc

SEQ ID NO: 28439 - DNA, 308 bp, Oryza sativa
  Clone ID: uC-osflM202090h05b1
ctttatatcaactcaaggaccaagccacttgcagcctatcttttcaccaaggacaagaaactgcaagaggaatttgtgtccaatgtcccagcaggaggaatgcttgtaaatgatgttgccctgcatctcgccaatccgcacctgccatttggcggagtcggcgacagcgggatcggctcctaccatggcaaattcagcttcgattgtttcacccacaagaaggccgtcctgatccgcggcttctgaggggaggcaactgctaggtacccaccttacacgattgagaagcagaagatcctgagaggact

SEQ ID NO: 28440 - DNA, 340 bp, Oryza sativa
  Clone ID: uC-osflM202090h06b1
tctgagcaccccgggcaccgacgtcgcggccgagaccgccgtggcgctcgccgccgcctcgctcgtcttccgcaagtccgacccggcctacgccagccgcctcgtcgccagggccaagagggtgtttgagttcgcggacaagcacaggggcacgtacagcacccgtctctcgccatacgtctgcccatactactgctcctactccgggtaccaggatgagctgctgtggggggcggcatggctacacagggggaccaagaacccgacgtacctgagctacattcagatgaacgggcaggtgctgggcgcggactagcaggacaacacgttcgggtgggac

SEQ ID NO: 28441 - DNA, 150 bp, Oryza sativa
  Clone ID: uC-osflM202090h10b1
tatgacactctcactctcctatctctcctgtgtctctctctctcactctgtctgtctatcctctggagactgcaggttcacaggtcgaatctactggaaggccaccaaaagaacaagccgtggacttcaccaccaccacctggtgaaaaa

SEQ ID NO: 28442 - DNA, 318 bp, Oryza sativa
  Clone ID: uC-osflM202090h12b1
tatagagaaatctcccgtctcgtcgtctgctgggctccttgcgccaagacgagtggcggctcaacagaggaggggcgccgatctccatctggcgagcagagcacgggaggggaagggaaggtatcctgaaagatgcttaatcttatcaaaataaaggataaaaagaaagagcaggcagcaagtgctgctggaaaggctcctgtgaagaagcaatctgctggagagctccgtcttcacaaagatattagtgagctaaacctacccaagagcacatcaatttctttttcccatgggaaggatgatctgatgaattttgag

SEQ ID NO: 28443 - DNA, 105 bp, Oryza sativa
  Clone ID: uC-osflM202091a03b1
gtcttcctctgaaccctgaaccaatcccgaactctgaactctgaaggctgcagagacaggcagagagatatgagggagataataagcatccacatagggcaggcg

SEQ ID NO: 28444 - DNA, 504 bp, Oryza sativa
  Clone ID: uC-osflM202091a04b1
tgcctcacatcataccaagtgtcctccttcctcctcatcctccccaaccactgcatccgggtcggcgtcctcctcctcctcctcctcctcgcagaatgcaacgggcaattcaagctatcgggtcacatggcagtctcctcaagtctgctgttctgcgacacatcagtgctccaaaaccatctattttacctgctgtatattcacgctccatgtcagtttcatctgctcaaatagaggagagtggatttgagactgccactgtggcagatattttgaagtctaaggggaagagtgctgatggatcttggctctggtgcactactgatgactctgtctatgatgctgtcaaatctatgacgcaacacaatgttggagctctggtggctgctaaacctggacaggataaatcaattgctggtattgctactgagagagattacctcaggaaaatcatagtgcagggacgatcttccaagtcaactaaagctggagacatcatgactg

SEQ ID NO: 28445 - DNA, 127 bp, Oryza sativa
  Clone ID: uC-osflM202091a05b1
tcgataaaaaagaaaagaaaaacagagcgcgtgtctcgcgcacagtgcacaggacgtcggcgcggcggcggttagcggttagcggtctattgctgactgtggtgagatggactaggaggccatgcgg

SEQ ID NO: 28446 - DNA, 365 bp, Oryza sativa
  unsure (1)..(365): unsure at all n locations
  Clone ID: uC-osflM202091a06b1
gtatatacccaatcaaatccttttcctccaaatctcgccaaattcttcgagcgagacacgtataaactctcactcgctcactcacacctcacacgctgctgctgctgcttctcgatgaggaatattttttttgcttcggccaaggcaacgctaatatcgcgcgatgtaaggttgcacagattgctgtgggatgaaattactgaggaaaagagatgtgcctgaagagaaatatacgaatgcatttctttggtttggacctgaggacaccaactttgcacttgaattgacatacaattatggtggtgataagtacgacattggagcagggatttgngcatttcgctattgcaactgaggacgtgtac

SEQ ID NO: 28447 - DNA, 122 bp, Oryza sativa
  Clone ID: uC-osflM202091a07b1
cccacgcgtttgtccgtcgccgtctcccctctgacgcgtggggcccacctgtcatccacctccgccgccgccgtcgccgccgtcgatctcggtcgccggtcggtaggggctccgaggggggc

SEQ ID NO: 28448 - DNA, 470 bp, Oryza sativa
  Clone ID: uC-osflM202091b03b1
tgccatctctctcagctctcacagctcactgcatcaatggccgcggccaccatggcgctctcctccccggtgatggcccgcgcggcgccgtcgacctcctccgcgctcttcggcgaggcgcggatcaccatgcgcaagaccgccgcgaagcccaagccggcggcgtcgtcggggagcccgtggtacggcgccgaccgcgtcctctacctcggcccgctctccggcgagccgccgagctacctcaccggcgagttcccgggcgactacgggtgggacaccgcggggctctccgccgacccggagacgttcgccaagaaccgggagcggaaggtgatccactcccggtgggcgatgctgggcgcgctcggctgcgtcttcccggagctcctcgcccggaacggcgtcaagttcggcgaggccgtgtggttcaaggcgggctcgcagatcttcagcgagggcgggctcgacta

SEQ ID NO: 28449 - DNA, 220 bp, Oryza sativa
  Clone ID: uC-osflM202091b04b1
atcaccaccaccaccacctccacctcctcccccgtcgctgacggacgacgagcccgttcgtctcccccgtcaaccgccgccgcgcgaggagaagccgtcctgaaccacagcgggacagagccgcattccaggacaggtacctactgccagcagctacattacccccagcactgattatcaccctgatggacagatgcccggtgacaagaccgctggggga

SEQ ID NO: 28450 - DNA, 346 bp, Oryza sativa
  Clone ID: uC-osflM202091b12b1
tttgttcacctcccccatcgccggcttcccctgggcgcacggtgccactacccgagccctgccccgaccgtcgtggtcatgctccttttcggaaaatgcaataggcaaattaagctatctggtcacatggcagcctcctcaagtctgctgttctgcgacacatcagtgctgcctaactacttatattccctgccgataaattaacctccatgccagtattatctgcttaaatagaggagagtggatatgagactgccactgtggcaggcttcatttacatcattggcatcaaatactcttagaacttgcctttggtgcactactgaagacctctgtcctatgatgc

SEQ ID NO: 28451 - DNA, 155 bp, Oryza sativa
  Clone ID: uC-osflM202091c01b1
ctcatgccgagtgaagtagctagcaggacattgttggtagtgtgatcttctccctgttttgcaacaatggcctcacgcagtagtgccctgctcctcctcttctcggccttttgcttcctcgcccgaagagccgacgccaacttcggcttctggct

SEQ ID NO: 28452 - DNA, 471 bp, Oryza sativa
  Clone ID: uC-osflM202091c10b1
gccggaggtcagtggagaagcgggtggtgtccgtgccgatcgcggagtgcggcgaccggccgaagggcgccggggaggggccgccgccgtcggactcgtgggcctggcgcaagtacggccagaagcccatcaagggctctccctacccaaggtaattaggctttatattcagtttggttgatattcttgagcctgttgattagttaccgtgctgattaatcactgcaattagatcagttaaacggttgttgaagtggcaagatttaatttgggtttgttgcttgtgtttattatgctcagggggtactacaggtgcagtagctccaaggggtgtccggcgaggaagcaggtggagcgcagtcgcgccgaccccaccgtgctgctcgtcacctactccttcgagcacaaccacccgtggccgcagcccatgagcagcagctgccacgcgagcatgtcgtctctcggtcgacg

SEQ ID NO: 28453 - DNA, 468 bp, Oryza sativa
  Clone ID: uC-osflM202091c12b1
gcgtcttcgtactcgcctctctccgcgccctcctccgccgccgctcgccgccgttcgtctccgccgccaccgccgccgccatgagggagtgcatctcgatccacatcgggcaggccggtatccaggtcgggaacgcgtgctgggagctctattgcctcgagcatggcatccagcctgatggacagatgcccggtgacaagaccgttgggggaggtgatgatgcttttaacaccttcttcagtgagactggtgctgggaagcatgtcccccgtgctgtcttcgtcgatcttgagcctaccgtgattgatgaggtgaggactggtgactaccgccagctcttccaccctgagcagctcatcagtggcaaggaggatgcagccaacaactttgcccgtggtcactacaccattggcaaggagattgttgacctgtgccttgaccgaatcaggaagcttgccgacaactgca

SEQ ID NO: 28454 - DNA, 106 bp, Oryza sativa
  Clone ID: uC-osflM202091d04b1
ccgggccggaaaacccggggcgacccacgcgccctgatatgcccaaaaaccaacagagaccacaaggggggaacgtaagacaccacaacgccccacaacccaacgg

SEQ ID NO: 28455 - DNA, 83 bp, Oryza sativa
  Clone ID: uC-osflM202091d09b1
tctaggagctccaggaaaggaaaatcacgcataggcatctgtcaataccagatgcctctgcataaacacacggctatgatgga

SEQ ID NO: 28456 - DNA, 276 bp, Oryza sativa
  Clone ID: uC-osflM202091d11b1
tttgagctcaaaagacacacattccaaaagcatctgtggccatctcctcctagtcctaggctcgcgtcaatggcggcgtccaccatggcactctcctcccctgccgccctcgccggcaaggcggtcgccaatgccaaggtgttcggcgagggccgcgtcacgatgcgcaagtcggcggccaagcccaagcccgccgcggcgtcggggagcccgtggtacggcgccgaccgtgtgctctacctcggcccgttctccggcgagccgacgtcctactct

SEQ ID NO: 28457 - DNA, 296 bp, Oryza sativa
  Clone ID: uC-osflM202091e12b1
tcggacgcgtgggctcgcgatctccactcgcttcgtccagatctccgcatcaacccacaggtaaagtaagaaaaaatcaatctatgtttctttctacttgctctcgcttcgttttggaggatatttgtgcctcagatcttgttgccgtgtgtagcctagccgtgtagaataggaaagagaaaagaaagcaatctttcttgtgatcaagtctttggtgattcttgtggagttagcaatggcgtgcgatctgtttgcttgatttgatcttgctgtgagatctcgattccgttcgcttg

SEQ ID NO: 28458 - DNA, 75 bp, Oryza sativa
  Clone ID: uC-osflM202091f03b1
catcactgcacaagcagcttcctcgccttcgcatctactactccccccaaaatggcgcatccggcggctgaggcc

SEQ ID NO: 28459 - DNA, 64 bp, Oryza sativa
  Clone ID: uC-osflM202091f05b1
gtcatgccagcctgcacccggttgccttcccgccgatcttctaatacggcaaaccccttctttc

SEQ ID NO: 28460 - DNA, 64 bp, Oryza sativa
  Clone ID: uC-osflM202091g01b1
tataatcattatattgcaacaatggcatcctcctcccttctactcacctgagttgcggcttcta

SEQ ID NO: 28461 - DNA, 53 bp, Oryza sativa
  Clone ID: uC-osflM202091g04b1
cataaatacgggagaccgaactcacaacgacggggagatttatacagacaaac

SEQ ID NO: 28462 - DNA, 473 bp, Oryza sativa
  unsure (1)..(473): unsure at all n locations
  Clone ID: uC-osflM2020114d02a1
aatatggatcacttattcattatagttcttgcatgctgctctaccacagcaaaacgtttcagacaccatcaaaccagacttaaggatacacattacaggtaaatagtacacaatgaaacgggacacgaccaaggaccagaccagacaaccatagctccattggggaagacaaataggcagacttgtgaaccctagaacagcagcagctccatggctgaggacttactggccaccacggaggcggagcaccaggtggagtgtggactccttctggatgttgtaatccgcaagggtgcggccatcctcaagctgcttaccagcaaagatcagacgctgctggtccggngnggatgccctccttgtcctggatcttcgccttcacgttgtcaatagtgtcggacgactcaacctcaagggtaatggtcttgccagtcagggtctttacgaagaactgaattcacccctgagcctga

SEQ ID NO: 28463 - DNA, 470 bp, Oryza sativa
  unsure (1)..(470): unsure at all n locations
  Clone ID: uC-osflM2020114h05a1
ttttntaattaattctcccgggcgttcacattgccaatgcaggaaacaatattctccacgcaggaaggtaacaagcaatccaactcaaccgttgacttgtctttgtacttcggtgcagtttttattacaaaaagcaagaataacattcattggtatgcttacagcgccggctgtcactggaaaagaaaaccattatggagtgtccgagcatttcaaaatgccttgagagatttatggcctacaggaagtttctgatgtccaacttcttgacatcaggcatctcctcgtctttgaactcctccctctttagttgaacctccattgcttcaacacattccttcttaagctccgtcagctcacttttggcaatttccaattcaagctcttcctcaatcttgggaagatcctccttgcggattccaagctttttgtttatcttctcaaactcttgcagaggagacccatatttt

SEQ ID NO: 28464 - DNA, 323 bp, Oryza sativa
  Clone ID: uC-osflM2020116b06a1
gattaaatcttatcttaaaagaatatatttcaccatgcactctgtcatcgtttttcagaattgctccgtaacaatctgatttgaatttgagaaaccccatataataaacttttcactcgtcatcaccgcgtgtcgtcgtctgaaatttgagaaccgccaaaatttttacttggcctccctctcgtcgtttctccagctgcccttcatcctcggccccgtcgggccctcgccgacgaagacgctatcgacgagcttccgcagccgctccctcgtcgaccgcggcagcagcttcgccacgcggttgatctcgcggccgatgtcgt

SEQ ID NO: 28465 - DNA, 336 bp, Oryza sativa
  Clone ID: uC-osflM2020116h09a1
gagtggattgacataatgaattcgtgccattctctatagggccttgaattcaaacaagtttagtggtggaataccgtcttcgattggcgtactcacaaacctcttatggctagacctggctgataatcaactcactggatctgtccccatctcaacatcaacatcaccaggcctggaccaaaattgattgttttgctccaaacttcaaattgatgaacagccatttcaacaagaaccagttaactggaacgcttactggacttttcaactccaatatgactctcatacacatgtaagggatcgacaaattttcatgtctaatatgaatactgaata

SEQ ID NO: 28466 - DNA, 459 bp, Oryza sativa
  unsure (1)..(459): unsure at all n locations
  Clone ID: uC-osflM2020117d04a1
ttttntttttttttttttttttttttttttncgagaggggcagtactactttattcatgccatgaccatgcatacatatgggctttcacagatccatgaagaattcctcgcccgaaaccgaaaaatacataaagcaaactcactcactctggctgcagagcgaccgtgcgaagtgcgtactcacacgcaattttattcgatcgatcggggccggcacgggggcgcacacgtttacttcgccgaagacgccgacatgatgtcgccgtcgaacggcgcctggccgaagcagtccaggttgggcccgtagccgacgccgagcacgttgcagtagcgcttgtagaacgcacgnggtcgcgcccgccgttgccgccggcgcactggagccgccgtgggggatgttccgtggtgagcccgtaacctggcgcgcggccggcggtgcttgccgggggagttcggagt

SEQ ID NO: 28467 - DNA, 494 bp, Oryza sativa
  Clone ID: uC-osflM2020118e04a1
aaaaccaaccacattatatagtaaacattggcttcagagttcagatccacaaggttcacagccactatagcaagtacagataaggtagaagctaagtaacttgttccagcctcatatagcagttacagatagatagtttcactgccaaatagtacttgagacttcagcatctaagctagacacagcacatactaacatactaacatagctatatagcgcaactagaagcgcccgacagacacatgccgcttcttggatgtccagaatgtttattccatttgtccttatatatacaggcaccagttgctacaccccaaacccctcagtagaactcggccgacacgggcatgtcatcgaagctccaaaggtccatgctactggccacatcctgagatccatcagagctcaaaagggtgtcaatcgactcatccgaaccacatcgatcagaatttcatgtacggctccaggtcagaagatcaatgctagcttcccca

SEQ ID NO: 28468 - DNA, 506 bp, Oryza sativa
  unsure (1)..(506): unsure at all n locations
  Clone ID: uC-osflM2020118h09a1
cttcaactgatctttgattgctcatccacatacaaaagcaaaaaaaaaaaaaagaagtaaatattcacatctaccttttctgttgttacttttacacaagcagaggtaattgcaatttacaagttgcaacgagaagaaggcgctacatgtcgtcacttatggaatcaagtgtcagttcgtcttgatatcctggacctagcatatcaacaaatctagcgaacggttggtacaaccatgacactgctaccagatttaatagccctctgaaaaattggccatgaagagctgcaaaactgatgtcaacgaggcagagattcttagcacattcctgcagaagaatcactcggcatccttcacttcagcttcgatgtctacaacagttcagaaggtgtcttcttcccctccgaccacgtttgaaggactcactgaaggctagagcacctggggaggcccttccagatgaaaatctagcagattctctaacaatntgtttccctgcaccgaga

SEQ ID NO: 28469 - DNA, 231 bp, Oryza sativa
  Clone ID: uC-osflM202052b04b1
taaccttgatggggacgtctatatagagcaagctgaaggagctcatctctggctactgaaatgcatgtccactgagttggtgaaacctcatgcgaatgctactcaatgcactaagacgctggggaattgtgatggactgatgaaaacttttgtaagtggaaacaaactgcagactactgtaccatgtatgtcacatgagccagcaaaatctgacggaggatgtggacctgc

SEQ ID NO: 28470 - DNA, 181 bp, Oryza sativa
  Clone ID: uC-osflM202054b06b1
gtttctttgtcatcttggcaaatattaataggaataattcatattgaaaaagagagaaagaaaaaaaaaaaaagaaataagaaagaaaaaaaactaggacacaaaaaagaagagcaacaaaggggcacaactaaaaaaggggggggccgtttttggggttccaggtttccttccccgggct

SEQ ID NO: 28471 - DNA, 452 bp, Oryza sativa
  Clone ID: uC-osflM202056b06a1
agtatctctgaactcaaatattgtcaaggttccatttacaatactactattgtacaaaacaaagttaaagcacatatcgacacggtagagcggaaacgcctaatgccgagtttcatcatagtccctaaaattttcaaattctacgagaaaacaaagttctgaacaagattgccaaacagcacaagattgtgcctgtctgcgtatcaatcggtgtaggacttttcaagtcaagtttattcagcatccactagcattttttacatcgataagccaaaagttttcggtactacatgctagctactagactgtgacagacgatctgggcgcacacttcctccatcgagacaaatttcatcatctggtagcggcggttcattccccatatccctagtcttgtgcaggagaaaagttcctgcaacgatggtccaaaaccacataactgtgttgaatct

SEQ ID NO: 28472 - DNA, 431 bp, Oryza sativa
  Clone ID: uC-osflM202063f06a1
acaaaaaagaatgtaaactacgtgttgatattatgtcctgctggcaagttgttacaatgctgaagcagatgctgaagttgaacacatgaaaaatattacaaagagatctagcccttttgtgtctagctttaaggccaatctgccatctggagtgtagaggtaaataatttcctcttcaaagtgagatttcatttactgacagcaccacatggtaagcaaaaagaaaaaaaaaagaccaaaaatggaacagacatcgttcattacactcagggttggcttccttccaaccctagtactatctgcctactaagctgaactctgtatagaaccatacactagtatcatcagagcagtttcttcatgcctttgagtacttggagctccacataggtaccttcagagcctcgtcggcgcctgcgttgcccccattt

SEQ ID NO: 28473 - DNA, 419 bp, Oryza sativa
  Clone ID: uC-osflM202064g02a1
tttgtttttttagataaactagatatatattcgatttccacgcttgctgtaaaagcgcagcgcacagtcatcagttcatcagcaaccataaactgatagtactccatataatacggaactggttcaggtttccttccaaaggcatgcatccacccaaacagaatgatgctttcgcatcgctagaagttttacgggtacttaggaaatgggagtcttagctattgtagatgagcaggaaatgtatggtaagccgcagttcttcatgtcgaaggcgagggggaggatttgaagatgtccggcttgtgtttatccatcagggaagtgagggctgtgtccagctccttctcaagctcaaattccttcgccaggtactccttcttgagcttcaccttcttctcttcatgcaatttgatcagttt

SEQ ID NO: 28474 - DNA, 413 bp, Oryza sativa
  Clone ID: uC-osflM202064h07a1
aggggcaagaacgataacgccttttcatcatcggtgcaatgcaatcgtagtcatcatgtaatagtacatatctacgtcgctgcttattgctgagatatttatcaaaaattgatcatcaattggttctacacatacacggacaaaagctggcactctgtagtctgtacccgtatacacacggacagttcgtacctataccattaccattacacccactctcaagtctcaactggaactagccaagctccgtacgcgtaaaccgggggagctcgccgcgcccaggcccaagcgaccaccgtccatccttgcacgccggcgtcgccacgacgccaccgccttcgtggtgcgccgggcacggcaatgcgaggctgctccggcgagaccggcagaccggcggggggcgtgagctatat

SEQ ID NO: 28475 - DNA, 360 bp, Oryza sativa
  Clone ID: uC-osflM202085e03a1
catattattagatgggcagaggtaaaatgtcaagctgtaagatgagaccttacagaagttacagttgcggtgctgcagaacaagcagcgacaagagagttgcatgagaaaatttcaaccgaaggagcatcctttgtacaaatctatgagggtttgtagtacttggtcggcacgaacggcatattggtgacgacggcatcgtaggacttcccacggacgacaaccttgaactctgtcccagccttgtgcaaaccggattttacgtagcccatggcgatgttcttcttcaagcaggggctgaaccctccactggtaacctcaccaatgttctccccggagttgctcacaatctcactatgac

SEQ ID NO: 28476 - DNA, 54 bp, Oryza sativa
  unsure (1)..(54): unsure at all n locations
  Clone ID: uC-osflM202135h07a1
ggggaatttnttttttttttaaaaaaggggccgctagccccccaattatttaat

SEQ ID NO: 28477 - DNA, 427 bp, Oryza sativa
  Clone ID: uC-osflM202145h12b1
cggttttaattattggttctacccacgcgtccgcggtcgtcctttctgctgctcatcagtagaccatcaggtgtagttttaggggagataatccgtctttcgcttagcgcatccatccagaattcgttccatatccagccagccagccatctcaagcttctctcttctcttgttattaagagcaagcaaacagtagtctagcgaagcgagactgcgagagcagagcattgttcttcttctctagctattagtggtggggaataatggctcccgccaccaccgtagcaatggcccttgcgccgcctccttcccatcaccatcaccatcaccatgtcaagcaggtgcagctccctccgtctgtctccgtctccgtgcccctccgttccggtttccttggccgcgcactgccttgttgttggccacccac

SEQ ID NO: 28478 - DNA, 433 bp, Oryza sativa
  unsure (1)..(433): unsure at all n locations
  Clone ID: uC-osflM202064a02a1
ttttgttttttttactagacagcgatattatattattatatatcactgggattgggggtacatatggtccatatggatgaagctacatatcacgaaactaattacagtcacacgcacgtaactgattcccaaaggctacaagaataaaacactggaacactagtcaaataagccgaacccgtaatattaagggcttgggatatcgcaactataagatcctccccagacggcccaagggaatggaaaaagacaaggggtaaagttggttccccaaccaccaccatctgcatgccttcatgccnaaactggggaaaccagcnaaactatgctgctattgccactactgtgccacttactatggncaacaccagcttattgcnnnngttggagcnnnnggtattgtataacaaanctnnnacaagttcacatgaag

SEQ ID NO: 28479 - DNA, 409 bp, Oryza sativa
  unsure (1)..(409): unsure at all n locations
  Clone ID: uC-osflM202064a03a1
aatataaaacgagcagaaactgttaaacatgactgcacgatcacttgactcggtttgaaatactttacattgttctgcacacatttccttcagtctttgtaggtacagttgttaccggtttcaccgttattatcatacttggaacggcatcatgtcaagtactccatatttgggtgttcatcctgatgtctgaataactgacaatatatgtaccgggtgtttattttcacttaattgtgtctaccatgagcagccaaatcagctgctgcctgtgctgccctatggagagcatcagacagcatcatagctcctgcagagaaatagctgctggtcatgatgccattcacaaccttaactgctgttcttcctgtggcggtggcgacggncttggtcgnctcggatacgtggt

SEQ ID NO: 28480 - DNA, 400 bp, Oryza sativa
  Clone ID: uC-osflM202064a04a1
tttttgtttttttttttttggaaggcaaaggaaatttcccgcaaatacttattcatatgttttgacaacatttctcccgacgcatgctcattgagggagacgcagctgaccacctagaggttttagttcaccattattatttagaccaagcatacgtcccaagatcagaacacattgcttacaagcgaaaatactaatagcctggctggctgcttcacagaataaccaaacgacaacctcaacagataaaaatgccacggaatgaaaacaaagcagcgaatcgtcaccagaagtcccatcttactcatcaaacactccatcattctgctgcaacgcatcctttccccaggggagaagattgcccagtttaccttccttaacaggagcagggttcaccata

SEQ ID NO: 28481 - DNA, 439 bp, Oryza sativa
  Clone ID: uC-osflM202064a05a1
gcataaagagcatctttattcagagaactgcatatacaaccagaggcagtcaagtttataaaatttatatgtacaaaaaatattacaccgacatttacactattaacaatttaacaattatccttacacagttacactacaagacaacaaatcaaaggcacccaggctccgataaaggataaccttacatcacgtgtgatctaatgaaccaggcatgtagatccacgggtgtcatcacctaactagagtggcacaatggagataacccaccgtataaaaggctgatatttatcaatgatacattgaaatttagcttctgtcgaaaattgcttatcaaagggttgattacgtgttgggcgcatgaattaacaggatggatcctaacctggatattgaggtgggcattgaatcttagccagctcttatgaaagcatacatc

SEQ ID NO: 28482 - DNA, 328 bp, Oryza sativa
  Clone ID: uC-osflM202064a06a1
tttttgttttttagtttttttgtgttttttttttttttttattttttttttttttctttatttgatgttaattcatggataagcaacagtcagtgattttttgcggcacaagataaaccctacaacgtgacagaaatgtactggttctacaagaaggattattactcaaagaaatcacattcaactcacaacagattataccctctcgcttctacatgcatatacaactaccgacaggaaatatctctaagtattatatatatcctgtattcatgggcatggcaaaagttctagataaaaagcttttggcggttaccaaaggaccaaa

SEQ ID NO: 28483 - DNA, 405 bp, Oryza sativa
  unsure (1)..(405): unsure at all n locations
  Clone ID: uC-osflM202064a07a1
tgttttttttttttttttttggatccgcaacgattcaaatgcagatgaaacactggtgattcccactcagattacacacaatacaaatacaccgacaaactgcctcaaaaaccaccaaattgattcaaaagtaaaacgggtatgagggatcttcccaccgagactgactaaacctaaccacagacaattggatccactggacccagattattcaaaaacagatggctatgacggcatcgtcctcgcaaccgaagggaacttgcagctatggatatcctcacttcncgctggcaagctgggtgcggatgagcttggcggccgaaaccatgttggtaagggcgggcttgacctcgttgtacttgcggnccttgagaccgcagtcagggttcaccccagagaatgtta

SEQ ID NO: 28484 - DNA, 396 bp, Oryza sativa
  Clone ID: uC-osflM202064a08a1
gccacggcacagaaacactgaacaaaatgtgcctttgttcaatacaatcaagaaaaggaataataaaaaggaatgaaaatcctctatcctattaatctagctataataaggaactatacaggtatttacgggaacatgtcagatatgcctacgtaaggtttttgctatgcctccatcgaaagtcgaaataggcgattcaagaaaatacgaggataaagttgatccccaaaccaccaccatctgcatgccttcatgcaaatactggggaaaccagcgaaactatgctgctattgccactactgtgccacttactatggtcaacaccagcttattgcatctctagcaacaaattgtattgtctaacaaaacttctacaagttcacatgaagctcatcc

SEQ ID NO: 28485 - DNA, 118 bp, Oryza sativa
  Clone ID: uC-osflM202064a09a1
gttgttttttttttttttggtgttttttttttttttttttttttttttttttttttttttttttttttttttttttttgtttgaaaaaaatgactccaattcctgtatgaacggaagg

SEQ ID NO: 28486 - DNA, 445 bp, Oryza sativa
  Clone ID: uC-osflM202064a10a1
ttgttttttttttagatactagtatagccacccacgataaactgacaagtcggcaaacttacagacaaactaatactactatatatactaagatggcaccaaaacaaaacaaggaattgtcttgttctaactgactatttcaaggtaatgctgaatcgcacacctcatatgacctcccagtgagcgactcgaagatactcttttgatgctttagcatgtggcgcacatagtacagaccacgaaaatctgctatgaaaaacgcctctagcaaccacagatgcaaatggaagacaactgacagctcaggtgggtctgtggatcctggttgacatggcaaaaaaatgcaaggcccttcagggggcatgggacgagatggactctgggtcgttcatcccagcgagaaatgcaatgaagacccacagcattagaacaccaatgatggcag

SEQ ID NO: 28487 - DNA, 268 bp, Oryza sativa
  Clone ID: uC-osflM202064a11a1
tttgttttttgatccaggaagcacaatcaatatttctggtatttcggagtagtttggagtgcattggtttttacaagacaccggaaatcacactgtttgtttacaccaagtgtaatagagctgcaaacaacaagccaaatgaattgggtgtgattttccatctcagtatgaggtccaaagaaggaactagtctacttctgtgcagtcgcaaccttgttagcttctgaaacgcaatagcgctttgccaagggaaaccatgacatgaaca

SEQ ID NO: 28488 - DNA, 459 bp, Oryza sativa
  unsure (1)..(459): unsure at all n locations
  Clone ID: uC-osflM202064a12a1
tttgtttttttgactaaaagcagaatttattataaggttctcaagagcgaaggccagagcacaagaatgctcatagcagtacaagacttaggttggatcatatgcagcataacaacacaatcctgattgcttgaacattcaacatccaggacacacataataacacaaatccttaaaccgagcaaccaactgggcacacctcagcttattctgtggaccatggacgacaaacctgtgcctagaacaactaccttaagcaggaggcttcatcagtgaagccaccttctgggaagacggccttgccatcaggtcagtccaccaggccttcacatgcgggtatgcgtccaacacggatgcgtggggagtagcccccaagcatacagtgccagccacatggcttaggtccgcgacactgatgtagtctccagccaggtacttgcacttngtcaggcgcgcctc

SEQ ID NO: 28489 - DNA, 413 bp, Oryza sativa
  unsure (1)..(413): unsure at all n locations
  Clone ID: uC-osflM202064b01a1
tttgtttcaagggagaagtatgtgagttttattatatatctattaatatagcgcagcagaagtctctccaactgttttcagtaaaaaaaaaaagtatccgagttttagatgcatggactcagcacaatctctttattatcaatctaccatacgtagcaagtggttctcactagcacaaattgagtgaaataatccaggctagtctgacatgtacagcaacaacattacagggcaaattatgatttaccattcaccaaaatacacagtaaatctgaatatctccgtgcaagacgagcatcagggcggcaggaaacttgaagaaagcagcaacccaaccactgactactgactgagcctagcattgtccatacatcagtgtattcnaagatagttggctcgaattataggctcac

SEQ ID NO: 28490 - DNA, 355 bp, Oryza sativa
  unsure (1)..(355): unsure at all n locations
  Clone ID: uC-osflM202064b02a1
gttgttataattattcacggggtttcaattgcttacattaagctacatgatctatgtctaatccttacagaaaatggttgttggtttgtacaagctcaaaattcttacaatgtttttagaataatctacatacatgaacaaatcattaacatgcaccgaagaaaaaaaaaaggaagaaagaaaatggacacagctaagcgtagttcggagtccggcgtcgtggtgaacaccggcttgtccttgtccaccaccgacgccaccgccggcggcgcccgagagggggctttggcgctggcgctgccggtggagctgccgctcttgcggcgcggctnngtctcgccgaccatggctatga

SEQ ID NO: 28491 - DNA, 407 bp, Oryza sativa
  Clone ID: uC-osflM202064b03a1
gaacaaacgcgcatattataagtgacgaagcggtctcacataaaacagggcacacaggttacaacaacgagggttgtaagcccattaagccccaaacatcagatcaccacaagcaaatgtctcgaagacacacgcacacggcaacaggataactccacactggcagatcatgggatagcagcagttatcaatcaggccttgacacacagaacatcaagcccccagacgacgacgactcctctagtactcgtcaccatcatcgccatcctcattctcgtcggactcagcgccaacctcctcgtagtccttctccaacgcggcgagatcctcacgggcctcagagaactcaccctcctccatgccctcacccacgtaccagtggacgaaggcgcgcttggagtacatga

SEQ ID NO: 28492 - DNA, 412 bp, Oryza sativa
  Clone ID: uC-osflM202064b04a1
tttttgtttttttttttttttaaggatggaatcgagtagcaatactttcaccccaaaatacagtttagcgacaatatcttagaaaagccgcttgctttgccgccatggctggcaagctgagcagagcagctaacacaaagaacacgagatcactataaaccaaacggcaacgaaacgaagaaaatacagggacttttttgtctgaagatacacgaagcggttcggtttcttttatttttagactcctctcctcctcgatgatgggtgtatggcaatggcaatggcgatgggaccttggcttattcgatgggaagggggtcgccgttccactccttgaggcagccgagcatggggtcgatgagcttgccctggctgatgcccaggaacaccttggggcacctcaccccggggg

SEQ ID NO: 28493 - DNA, 251 bp, Oryza sativa
  unsure (1)..(251): unsure at all n locations
  Clone ID: uC-osflM202064b05a1
acaatacgtttgggggacaaaaaacaagccacctaggccaagccccggggccaaaaaaaaaaattttaaaatgggctaaagcttaaaaaaaggcccctgggagcctcaattttctgggggccctttttttttagaggcaaaccaaaaaaaaagcctctgggggggacccttggagggggatcccccctgggaaaaaaaaaacatttgttccctngccaacaagagccccggaaaaaggggggggggaaacc

SEQ ID NO: 28494 - DNA, 343 bp, Oryza sativa
  unsure (1)..(343): unsure at all n locations
  Clone ID: uC-osflM202064b06a1
tttttgtttttttttttttttttttttttttttttttttttttttttttttttttttttttttttttttggggctcttaaaggagcaaatatttttcaaacttgatgaaagggggacccaagccattatttatagggggggggccttttacaaactttaaaacccggataaaaaggaacccctcaaaagtcaaaaggtggctggggtttgggggcccaaaggaaccccccggcctttaccccccccaanatactcccccccaaaatttcaactttggaaaggctttggggggtgctcaaaaaccaaaaattttgggggggacctttttaacaatgccgggctg

SEQ ID NO: 28495 - DNA, 385 bp, Oryza sativa
  unsure (1)..(385): unsure at all n locations
  Clone ID: uC-osflM202064b07a1
actggacttaccagattgtacattgatcatatgaacagtaatacagtggactatatgtaaatgtaacttctcttttctgtagtctgtcaccaatgctatggtcgaaacaggcttggaagacttggtctcggttcctttgaagaaagagcaaaaccaaaaaaataatctgatctccaattgagccggaaagatcatttacaccatgtcattggagtggcagctatgcttgatcatttacaccatgtcatcctatcttagacatttgaattacatttgtgaatataaattgcgaccaagagaagattccacgaattatgtacacatgcactgtgatcagcaagaccagaataagaactgacctgtcaatgnactgtaaagtgtaaac

SEQ ID NO: 28496 - DNA, 402 bp, Oryza sativa
  Clone ID: uC-osflM202064b08a1
aacacaacaatggtaaattatataaaacttacatatcaataatgtcttactattaaaaaatgttaacaaagaaaaatcactctcatttagatgttctcattccgtttaactgatagccttgctccaacagctaaggaatttgcgataaccgcaagaggcatgcctttcgtttcaggcaccttaattaacacgaatataaaggagactatgcagacaacagcatatatcccacaaacaccaattagacctatggagcttagcataacaggaaatgcataagtgacaataatggaaacaatccaaaatgtcaatgtacaaatagacatacaacggttacgacaactaggaggaaaaagctctgagcaaagaacattgggaattggtccaaatcccataacgaag

SEQ ID NO: 28497 - DNA, 402 bp, Oryza sativa
  Clone ID: uC-osflM202064b09a1
agtcaattgagcaatgcgagctcacttttcatgatacttaataacacaatcttgtacaagttctcaaaaccactcattttattaccatatcagcatgcatttctagcatagaaaccaccgtctaagcaaaagaacagcttcagatggtatcacgcgacggtgcaagcgttcgggttctcgtcattgaactcctcggacaccagtgccgtcggtggcggcggtagcgggtatggtgtagacgtactcgacatagtactggacgggcggccagaagtcatacttcttgacatcttcgatgccgtcggccttcttatcctcatctggcttcttctcttcctcctctgccttcttctcctcctcccgcggcttcacctcttcgacgatgactgccggcctccgcgt

SEQ ID NO: 28498 - DNA, 424 bp, Oryza sativa
  unsure (1)..(424): unsure at all n locations
  Clone ID: uC-osflM202064b10a1
cagacagttacaaagtgattgataaaaacaaaaactccgggccagctgatgttcatcagcaaatattttacaagaaaaaaacaaggttctggattattaagacaaggcttttagataaccacagatatattgtgccccagggttcgatctatcggaaaggganaaaaattctgaaattccgatccgaaattgtgaatcctgttagagcctctagatatcaaaaccgaattaagtaacggccccagaatgggcaatcgatcaggtagccaagccatagcaggccagcgcctgatgcagatcagtacttgtagtccttgacgtgcaggctttcagcagcgccctcgccgaggacagcatcacccttgtaagtacccagggtagcctcggagttggccttgcacctgacgaggaaggccgccctggc

SEQ ID NO: 28499 - DNA, 441 bp, Oryza sativa
  unsure (1)..(441): unsure at all n locations
  Clone ID: uC-osflM202064b11a1
tttgtttgtaaatattcatatggctcaaaatgatcattaagaaaagtagagtacatgcggacgatgcagaacacaatacgatactaccacagcgcgcaacctatatagcatctacgaatctgagcagcacaagagcaaatggtagctactcaaacttctaggccagcttcaaaggggattgtgctattgtctcaagctatacaaagntgcgggcgcgaaaaacaaagtaccaaaagttaagttcacacaaacagatagctcatcaaatagcacaagcaagcaaacccatggcgtaaatgttaatcaaaaaccgatcgacagaaaatgtagagcctactggaagtgcttgtcgccaaggccctagcacaataaactccatagtcttcaaaagcatcatcaatagtcagaaggcgagataacatcatcgatcttgagaatcat

SEQ ID NO: 28500 - DNA, 393 bp, Oryza sativa
  Clone ID: uC-osflM202064b12a1
tttgttttttttttttttttggttttttttttttaaggggtttgcctatgacctgaattgggcgggccctatcaaattgatcgaagaataatttgggttgattctgaaaataacatccaaatcagtatggcaacctttgccctacggtaaatgcatttatgtctgcaaacaggctaacagcttcaccatggacaatacatgatggaagaaccctagattgtatactgatcaagatacaaaataagctggagctactactgtcaggaggtacaaataatggccacatcaggtgccacccaacgacctaattgtccaccggtggttttattgagagctgctgcgcacaaacaggactggaagcctgatggatggagaacttcttggtggtaatgg

SEQ ID NO: 28501 - DNA, 433 bp, Oryza sativa
  unsure (1)..(433): unsure at all n locations
  Clone ID: uC-osflM202064c01a1
tttgtttttttttttttttttgtttttttttttttgggttcaacttccatcattcctttgaatttagggatctattaacagggacatagcagtaaccacgaaatacatctacttgtacaatggacacaccccagcctttggctacccaaaagaaaaatgtagcactctattatggcagaagaggggctataactgtaccaaaggacaccttgctaaaaacacttcaaatatccaggtgcctcagaagttacctcctgagactccaggccacttggcttctttctttcttcttcgctgtcgggaggggtcacacacgtcacagggntcgcgtctttggaggagcggcagatcgtatcaaggcccaatttaagccttcaaagaaagggggttgcttgatttcagctgctcctctcaatgatccaaggctgttctt

SEQ ID NO: 28502 - DNA, 398 bp, Oryza sativa
  unsure (1)..(398): unsure at all n locations
  Clone ID: uC-osflM202064c03a1
tttgtttttggacacaatgatgagggatcacttattcattatagttcttccatgctgctctaccacagcaaaacgtttcagacaccatcaaaccagacttaaggatacacattacaggtaaatagtacacaatgaaacgggacacgaccaaggaccagaccagacaaccatagctccattggggaagacaaataggcagacttgtgaaccctagaacagcagcagctccatggctgaggacttactggccaccacggaggcggagcaccaggtggagtgtggactccttctggatgttgaaatccgcacgggtgcggccatcctcaagctgcttaccagcaaagatcagacgctgctggcccggggggatgccctccttggccnggancttcgccttc

SEQ ID NO: 28503 - DNA, 433 bp, Oryza sativa
  unsure (1)..(433): unsure at all n locations
  Clone ID: uC-osflM202064c04a1
gccgcgtcggcggcggcgagcgcgggcgccgggaagatgacggcgtcggcgccggggttgtagaaggaggcgatggacatgcggttgccgtcggggcgcgtgaggacgcggtgcatgacgctcttgtacctgccgttggtgatcacctccagctggtcgccgatgttggcgacnatggcnctggcgcnngngcggtacgtccacccactccccntccttgagcagctggaggccggtcacctggtcgtactggaacagcaggatgatgccaccggcgtctgtgcgggccccgaggccgcctactagatcggtgcgagcacactgggggtagctgcttacctgggtgccggacggtgtctcgaacgaacaggctgaagcacatttctggtaacccttctccagacacagattctctttacagtttggagagcac

SEQ ID NO: 28504 - DNA, 438 bp, Oryza sativa
  unsure (1)..(438): unsure at all n locations
  Clone ID: uC-osflM202064c05a1
tcgggccgccgttcaggtgcgccggctggtagctcccctgcgcgatctcgctgtcccggttgccggccagcgaccgctcgttgaggttcgccgagccgaccatgacgtactcgtcgtccacgatcatgagcttggcgtgcacgtagatggggaaccggcggttcacctgcgcgcgccagtagatccgcgtcaacgtccggcgtctccggcggcnagtactcgccggggcgcggcgcctcccggttcccgaggcagaagaagttgaggtagtcgcaggggtgcgcctggccgcgcagcccgtcgtacacgatggccttcgtgacgatgccgtacataatatctacggtgagccggtttcaccgtaggatggacttgacggagtcgccggccgacttgacgttcggtcacattcgcgttacgacttacgcggcttacagc

SEQ ID NO: 28505 - DNA, 435 bp, Oryza sativa
  Clone ID: uC-osflM202064c06a1
gccggcgtggcgtccgtcgtgacgtcggaccagttcgagcgcatgctgccccaccgcgacgacgcggcgtgccccgcccgcgggttctacgcctaccgcgccttcgtcgccgcggccggcgcgttcccggccttcgccgccacgggcgacgccgacacccgcaagcgtgaggtcgccgcgttcctggcccagacttcccacgcgacctctggtgggccctactcgtggggctactgctacaaggcggtgaagggcgcgacgtcagacttctgcgtgccgaacgcgcgctggccgtgcgcgcccggcaaggcgtaccacgcccgcggacccatgcaaatcgcatacaactacaactatggggcggccggcgaggcgatcggcgcggacctgctgggcaacccggagctggtgggcacggaccctgcggtggcgttc

SEQ ID NO: 28506 - DNA, 316 bp, Oryza sativa
  Clone ID: uC-osflM202064c07a1
ggggccaaaaagaaacttggaacccctttattacccacgaacactgccttccctttttccactatgcaagggagaagaagtacccccttggttattcattcacaagcatcaaaattttgggtaatatttaccaactcctcccgtggggttggccgatgagatccctcataagattccatggttcattcacgtcagggaacattttggattccgctgaaatacacctcggcttgggtcttggcctatgaggggggtacttctatggcgggaggccactgggagaggggggtatcctacctccctgcccctacttggc

SEQ ID NO: 28507 - DNA, 408 bp, Oryza sativa
  unsure (1)..(408): unsure at all n locations
  Clone ID: uC-osflM202064c08a1
aaaaaaaatatagtgcccaatcaattagcgcgtgcccaattgccatatgctaatctcttatcttacatctgaacatacggcttatcaattgtcgccgtcgaacaccaagaggccgctaaacaaagaagtgtatacgaacagttctaacancgatcgagttntgggtcaacaccaaaaaggaaaattaagcatcataccccattgtgttcacaacgttgacacatagcaaggctccctgctcaccatcccttcaaattaatttcaccattttaggtgcatgtaataccatgccatgaaacagcagcaagcaattcctctggagtgtgtgtgtgtgtgttgtgtgcaacctgtcgtgacaaatgtttttcgatgccaaaactgatcgatgatgaagatcatgtttttgtt

SEQ ID NO: 28508 - DNA, 346 bp, Oryza sativa
  Clone ID: uC-osflM202064c09a1
ctggggaaagggccccctctttttttccgagggaaaaatccagggaaaaaaaacattgggttttaacatcaattaaggggggaaagaaagttgggccaacacacggaacggaaaaggggcgagggcactccatattcccttggtgaggttggtcacggagccatccaacagcttggatgccctattgaaaaacccccaaacataaagggcggcatataacaagcggaaatatcccgcgggcaaggcacatctatggtgtgccctccagaaaacgccaaaaaaagaaggggacagaatctcacaggggggggggcccggagccctaatagggggtctttcaaggggg

SEQ ID NO: 28509 - DNA, 419 bp, Oryza sativa
  Clone ID: uC-osflM202064c10a1
gcggtactagaaaagttcaagaatctcaaatcaatttatgaaatcaaactacacacataatgttcttgactccccacgtacttacggaataattatattggcatacacaaaaaccggagctaatcagagtagatacacccatagacaagccatcagacccaacaatttttttgtccatgaaacagccagctaatgctaatagacaaggggttctcatgaaagatacagctaggccacatctagaagcacttcctgtggacgatagctgggccagattcttcatactcagcccttgagatccacatctgctggaaggtgctcagagatgcaaggattgatcctccaatccagacactgtacttcctctctggcggagcgacaaccttgatcttcatgctgcttggcgcgagcgcggtgat

SEQ ID NO: 28510 - DNA, 410 bp, Oryza sativa
  unsure (1)..(410): unsure at all n locations
  Clone ID: uC-osflM202064c11a1
gttattaacataggaaagctccattagatcctgttaacatacaaggcaacatctatattccagaagagattacttgagctgtgcaactcacacaagatagaatcgaataacacagaagctcaaagcctaggaacttctgtgggcacacagaccctatgagnctggtactaatgaatacattgagattgcctctttcttcatcctcccttgcttcctccctcgatccatgttgtaatcatctacattgctttaatttcagtcggttgtcatgggctcagtgatgcaacagcggaagcgtgctttacggacattgctcagaatctccatctctgcactctcaagcatacaaacgatatcagtaaatgcggggcgaacttcagggttcgcatcccaacaaagagtcatgatgt

SEQ ID NO: 28511 - DNA, 401 bp, Oryza sativa
  Clone ID: uC-osflM202064c12a1
gaagcacacccatttgccaaagtgagaattaacgtggccgaaaatttttcatccattatttctccatcttggattccgcaagaagaccgctagttagggggaaatgagtaaaaaaagaccaaaaacgatcacaacacgtcctcgaactgccaacacgtacgtacggcactccactagaacgtaaaacctctctagaagagggaaaccggcccatatatttgggagcactttacaactagggctgttcagatcagccatgcttttttgattttcgggcttccaatcattcatcgaaaatttcctttaaccagagcgccgtttgcaattcccgctccagggctgatgacgatctcttgttgaatgccgagggggcccctcacactgtgtagttctgctggatc

SEQ ID NO: 28512 - DNA, 403 bp, Oryza sativa
  Clone ID: uC-osflM202064d01a1
tttgtgtttttttttttttttttttttttttttttttttttttttttttttttttttttttttttttttttttttttaaacaggtaaaaaatttcaaaggggtttttggggccggggggggcaagggattttaaaaaaaaaaaccgggagggccctgcccccccgggggggattaatttaaaagccccacaaaaaaaacgggggggtccgggcaatcgcccccggggggggtgattatgtaaggggcccccgggttccgggggccgaaaatggggtcaaagttcccccgcatggaccccctttcgccctttttacggcccatggtccaaaccccgggggggccccccccccccatggacaccccccccaaaggttccacaacgggaatcaaacccaggggggg

SEQ ID NO: 28513 - DNA, 406 bp, Oryza sativa
  Clone ID: uC-osflM202064d03a1
atcacagaaaccaaaacaaacaagatgactctggcataagcttaaaacgaaccgctgaccaagatggtaaaatctttgtacacgtacaagaagaatttttaccaagatggcagaggaggagcatatcgatctcatgtaaaaaaggaaaatggtaaaattctaaactatcaagccatattctaaatgatgataccgggcttgatcaagatggccactgcagttagtcgatggaacttcagaaagctcaagcttccctgtccactcctctcccggtttcagagtgatttgtctctccgctgcagccgcatcaacgcacagcatctgtttgtactcctcatcgccgaagtccacgatgtttttcgatttcttttcccacggattccacacaacaacgtcaggcagtcct

SEQ ID NO: 28514 - DNA, 435 bp, Oryza sativa
  Clone ID: uC-osflM202064d04a1
cgcgacgccgagctagtgcgacccggggagctctgcgacctcctccatggccaaggcggtgctgctccgcaaggtgcggggcaccgagcttttccgagagccccgcgaggtggacatcaatacgttggaacaaaactctcaaaaacccggattcaatgaccaaaggaaccaaggatctcaagtccagatatagatatcatgcttgccagcggtagcaagaggtgcctaaccccacaccatgaactttaaactaccgacgaagaatggccctgtaggatcggcaagtaccccatccttcttcaatcttgaccatatgtaaacagacccatcattagcaccagcagctatggagttttcatcagggcttatgcaaggcctgccccagctgctaaccactctgttacccatggccttgaattttccacagacttccat

SEQ ID NO: 28515 - DNA, 300 bp, Oryza sativa
  Clone ID: uC-osflM202064d05a1
atcgacgaacttgtccatacgtttatatgccagagcattcttatagctgaggctggagcaatagcaccaaggagcaaacaagtacagtagatagaaggtactagcagcattttcagaacagtctaaaaaccaggtagcagtctagggcacaaagaaccaataaaatcgacgaggaggatcccaacatatggatcaactacaccataataaatacattcttaaactgctctagaacatattacagatcatcagctatgggaattctcaattctcaggtgggtgagggttagtatggggagg

SEQ ID NO: 28516 - DNA, 428 bp, Oryza sativa
  Clone ID: uC-osflM202064d06a1
tttttgtaaccgaatagaaataagacgagttttaaacgactaacatagtgcacattgcgagcagatattaacggtccatgcaacgagtgccatggccgtgggcaaaacttaacgaacgctaagatatctcaaatgcagccagcataaccaccacttcaacgatgctcatttcttcttggcggcagccttggccaccttggcaccggttgggtccttcttctccacgttcttgatgacgccaacagccaccgtttgcctcatgtcacgcacggcaaaacgaccaacaggagggtactcagagaaggtctccacaaccatgggcttggtgggaatcattttaaccataccagcatcaccgttcttgaggaactcgggctccttctccagctccttgcccggatcgctgtcgatcttggtcaccagctcag

SEQ ID NO: 28517 - DNA, 403 bp, Oryza sativa
  Clone ID: uC-osflM202064d07a1
ggcaaggaaaataacaaggtcaggcttgccctgttctttttactgaagaaaaagaacattttatctgcctattatagaaatgtaagcatcacaactcacaagaatgcaatgcagccaatgaaccaaggccacaagatcgtggtgatactattcccaatcacatcgcctcatatttacacacaacctgaacctggagctaaacgaaaattggaaaaaccaaaagggaacatctgctgctgaaaagaaaagccactactgcttttgagtgggttgtccagtccagtaaggtcttgacagccacaagtatcttctcagggttgaatggaccagattcgcgatccattatttggctcttccaccgcatgccttctgtaattgattggatcttcactaacacctccac

SEQ ID NO: 28518 - DNA, 397 bp, Oryza sativa
  Clone ID: uC-osflM202064d08a1
aattaagaagcatccatatcactatatcggcactgatcattcagaacacaggttatggtattgtactaggtagtgtttaattaataactcgacgagagtagtaagaagcatgcatttggattgagctaagctactgaaacggtgaccctaagccatacatgcatggtgatctaggcccttctgggcacgagacgagcgcgcagcggcttcgccatgacggttgtgaactcgatcttctcggcgaagtccacctcgtcgccggcgacctccttccactcgaactcgctcaccatgttcgccacgaagtactcgacatgtagcatggcgacgccgagcccggcgcaaatcctccgcccaacgccgaacggcatcatccggatctccctgctgcctgtga

SEQ ID NO: 28519 - DNA, 404 bp, Oryza sativa
  Clone ID: uC-osflM202064d09a1
cactgaagtcccacaaagactttattcacatagcgaaaaacatatgacaggaaaatgtagcaataacactttcagtacctcatcatgacctgatctatcatctcatttcacaccggagagaacaaaagccttgctatacaactgatttagtgatttttaaccagacatgtgtattcacagtttgctgtgccgaagttttttccttttgggtgtacgtatgatgcaatagaaccaattttgcttttttgtaactacctagattttggagtgctttggctgctgggtgaactccttgcggaggactctcctcatgaccttgtttgaggctgttctagggagcgaagggactaccacaactgaagaaaccttgaaaagagggttaagtttcttcagagcagtgttga

SEQ ID NO: 28520 - DNA, 414 bp, Oryza sativa
  unsure (1)..(414): unsure at all n locations
  Clone ID: uC-osflM202064d10a1
actgtcaatttgcggattaagttattcacaatgcttataaactaagctatttacatgtaaactagcatctttgagaggaaagcgaggtagacatcaatacattggaacaaaactctcaaaaacctggattcaatgaccaaaggaaccaaagatctcaagntccagatatagatatgatgcttgtcagcggtagcaagaggtcctaacccacaccatgaacttgaaactaccgacgaagaatggccctgtaggatcgtcggtaccccatcctttttcaatcttgaccatatgtaaacagacccatcattagcaccagcagctatggagttttcatcagggcttatgcaaggcctgccccagctgctaaccactctgttacccatggccttgaattttccacaaacttccattgtt

SEQ ID NO: 28521 - DNA, 364 bp, Oryza sativa
  Clone ID: uC-osflM202064d11a1
ggcatggcatggcatcccgcgcctatcgattattcttctgttcatttcgcattggggcatgggtctatttccatggatgggcaaatgaagaacgtccaagatgcctttcttttttttcaccccccttttgccaggggggcctggagagggagacgctctgagcccgcaactccttccactggtgcgggacccccttgatctgggtgaagaactgaacgcccgccttgccgtaaaaattcaagtctcctgcaaaggaggctttgctgcccgtgaaggaaaaaaacggcaggggtcctggaatcggcacgttgatgcccacctggccagcttcaatggctgtttgaaatttccttggtgacccccc

SEQ ID NO: 28522 - DNA, 396 bp, Oryza sativa
  Clone ID: uC-osflM202064d12a1
catgaaaggcagggatctacaacatcactacataaaacagacatccatagtaacaactgacagggacaggttatttgcaacagaactacattcaactgatcacagccggcctggagttcattcctgcttgaacaacacaaggtccagagatcatactacacacccagaacactgaagcacttgccatgcaggcagaacttcttttttatgaaaagatgatccagatcagttgcaactatgttacaccaccaccatgtacaacgaccggacaccgaaacatcatcctagtgcaaagctgtgaggattgcaggggcgctctcaaccttgaaggttgcaccacagatctttttttcatttgcaggaacagcagccaccttgttctttgggttctcatag

SEQ ID NO: 28523 - DNA, 406 bp, Oryza sativa
  Clone ID: uC-osflM202064e01a1
ttggttttttttttttttttttttttttttttttttttttttttttggtttttttttttttttttttttttttttgacccgggggaccaaaaaagattgcctaggatgtttagcacccccaaaagagagaggtgtccctcccatacaccagagagggggggatcagttgttcagccattacagacgcaaagccggcacaacaatgggttggaattccgcccgggcatgcatttttaacgacaaccaagggcaaagcctacttgaaaattaccgggggcccaggggggggtacaaggaaaccatttttccctccagatttgccagctattgaactggctggcatatacacaaacaagggcgaggaaaccgtccagcaaaggggggaggctttgggaatttggctttc

SEQ ID NO: 28524 - DNA, 410 bp, Oryza sativa
  Clone ID: uC-osflM202064e02a1
aaagcaagcacaactagcgaacatatcaagaaacaaaagcatccagacaggaacaaaccccagggccaacgggtacagatttcccaccggaagtctcactgtaaacacaggccaagtctacctcctgttggaacgccaaaattgcatatccagtatccagctcaagacagcctaaagataaaaataaccatgttgcatacatagataaggagacattctccccagtaacagaagaaaagcctagttcatcctccggatgagctcgttgatgtagtcctcacggttgccggcatcaccaccctcgacatagtggttcctcttcttcttgaggccaccgagtggtgccttcaacttgaagggccacaggaagttgttggcctccttgaagtgtggaccgacagtcatgatct

SEQ ID NO: 28525 - DNA, 392 bp, Oryza sativa
  unsure (1)..(392): unsure at all n locations
  Clone ID: uC-osflM202064e03a1
agcggcgtcaaaggaattttctcatgttaattacatttgttgttacatttccaaactccaatggaaatcgaaatgaccacgtcagaaagaaatacaaaaagttattagccaaaaacggcatgaagaaatgggatcaaacaaaatatggcagaacgtacaagaggtgatccagaacatgcttgcggaggtggacaaggaaagaggagaggaaaattaaaccacaatccccatgcatgcatgcacggtggctagaaaaatgcatagcatagagatctactatgtgctgngtgtgtctctcattcgtctccgtttaatttgttgctgacgaattgaactgtggcaacgacgaccatgatggcgacggtgatctacaggccctgctctacgaggta

SEQ ID NO: 28526 - DNA, 427 bp, Oryza sativa
  Clone ID: uC-osflM202064e04a1
tttttgtttttttttttgggctgcaaatacaggaagtggttgaaagttgctaattaactagtaaataagtcacggaagcaatgtagtgcacataaactgtgtccactgggtacttcagctcgacacattttgacatacgcagccctaatcttatgattccacatagcaatgtgatcctagtacatcttatgatccagtaatacagcaggtaggctgagtaaatggactcagaaatagacttcaggacagattagtggccctctccttcaggcttcgctgcttccttgatctcgtcaccaccatcctccgcattgtcagaggtccagagagtcagattgtcacacagaagttgcatgatcaaggcgctggccttgtaagactcctcgccaagagtgtccagttcagcaatagcatcgtcgaacgcctg

SEQ ID NO: 28527 - DNA, 408 bp, Oryza sativa
  Clone ID: uC-osflM202064e05a1
tttttgttttatcgacgaacttgtccatacgttcatatgccagagcatcctcatagctgaggctggagcaatagcaccaaggagcaaacaagtacagtagatagaaggtactagcagcattttcagaacagtctaaaaaccaggtagcagtctagggcacaaagaaccaagaaaatcgacgaggaggatcccaacatatggatcaactacaccataataaatacattcttaaactgctctagaacatattacagatcatcagctatgggaattctgaattctcaggagggagagggttatgacggcggtacacaacacatcaactggaaccggaagcatgtcccagggaaagaagcggcttggctaccggtagcatcatggacctgaatcttcttgcctcgaggatgg

SEQ ID NO: 28528 - DNA, 404 bp, Oryza sativa
  Clone ID: uC-osflM202064e06a1
gtgttttttttttttttgtggggtctttttttattattttcatgaaaacaaaaacaaataacagatgaataaatgacaatggatcgtcttctgggagaaaagatgaacatataaatgggataactacacctcttaggccttattatgagaaatcgtgcgcaacctgcaacatatcaatctatcagctatcggacagacatacaggtatgcagcctcgctgacagggggtccctatcaaaaatgtaaaggtaacagacttgagcaaagtgattgatcatcttaatcgacaaaacagctccctttgacaccatcatacacccaaaaacgggctccaggacaccggggacacctccaaccgctaaaggagcccccgggcacaggcaggttttttccaccatcaggaa

SEQ ID NO: 28529 - DNA, 408 bp, Oryza sativa
  unsure (1)..(408): unsure at all n locations
  Clone ID: uC-osflM202064e07a1
acaaaatctactctccaattctctgggttaggttttcaacttccaaaaacacaaacagagaaaattcatacagttcaaggatgcggcagccttaaagctctcgcgctatcaatctaaaaaacctgccaccatctcttcctctttttaataaaaaagaacaaacactgccttatatatggtaggcaagtatatcaacgcctcttcttgcttgcttttgcaccgctggattttgacgggcttgcaaccaggtagataaacactccaaccaagccaacaacggacaccagcgacccgtacttcgccacaagcctcttagcccattcaaacttcttttctggaggcctctcagcaagaacatcaagtgcaaggatggnggctgaataggcctcctgaagcgcagcctttgtg

SEQ ID NO: 28530 - DNA, 187 bp, Oryza sativa
  Clone ID: uC-osflM202064e08a1
gttgttttttttttttttgttgtttttttttttttttttatttttttttttactggaacaaaccccagggccaacgggtacagagggcccaccggaaggaacaccgaaaagacaggccaagtctaccggcctgaaggaacggcgaacaaagcataatccaggcgagacagcgtcaagaacagccaaa

SEQ ID NO: 28531 - DNA, 413 bp, Oryza sativa
  Clone ID: uC-osflM202064e09a1
tttgtttttttttttttttttttttttaagaaaaaaaaacattagagggccgtaactggcttttaataaggaagaacattgtatgtacctttctgggcgatcaacctcccatgcactgatgcacaaatatatcccggacttaactacaacaattgggctttctttttgctaatcatccaagaccaagacgcctatatatggccgcttgcgagaaatattgataaaaacatacggcactggatgctctccccattctccccatgacccgtgtacatacagacaccatgttcgctagttcacacgtatacgcacatgaaaaggcagagtgtgcgcacaccatgcaggacttggcgcagtaggctagccccctcccctggaggcacaatcaaactacaaacctagggtggtcggcc

SEQ ID NO: 28532 - DNA, 414 bp, Oryza sativa
  unsure (1)..(414): unsure at all n locations
  Clone ID: uC-osflM202064e10a1
aagaatattatgaaatgttcatcgttttcagaaatgtttaagacacattcgactgcagtctgcaaaaccatatcttggtgcacagcaagcatatatcttggtgcacaacaagcatacatttattagtttttcttttggatacacatgttgcccctaagngccaacactgcttacaatcacccatggccttctcactgttgcagaactgccacttttacaatgggaaagccacacctacatggtcctttccttccatcttattcttgggatttccacacctacatggttctgccaccgttacacaacacatcaactggaactggaagcatgtacatggaaagagttggctgggctaccggtagcatcatgacatgaatcttcttgcgttgaggatggcagacggctttggtattc

SEQ ID NO: 28533 - DNA, 200 bp, Oryza sativa
  Clone ID: uC-osflM202064e11a1
ttgttttttttttttttttttttttttttttttttttttttattatttttatattttattttttattaataatataaaaaagtaaataagaaaagaaaaaagaaagaaaaaaaaaaaaaaaaaaaacagaaaaaaaaacaaaaagaaagaaagggaacaaagaacaaaagaaaacaagacgaggaggaacccaacaaaag

SEQ ID NO: 28534 - DNA, 376 bp, Oryza sativa
  Clone ID: uC-osflM202064e12a1
acaacatcaatacattaaaaaggctttagtggcaaccccttacaggggcaggatattgggaaaagagctacatccaactgatcagcagcccctctgaagtacattcctgcttgaacaacagaatggtacacataacatattacacagccagtacacttatgttgcttgccatgcatgaagaacttgtgttttatgaaaaggtgatccaaaccacgggaacctatgttacaccacctgcgtggacagggaccgggacaccgaaacatcagtcctatgcaaaggtcataggattgcaggagacaccctcaaccttgaaggttgcacgagggatgtatacttcatttgcaggaacaggagccaccttggtctcgggggt

SEQ ID NO: 28535 - DNA, 424 bp, Oryza sativa
  unsure (1)..(424): unsure at all n locations
  Clone ID: uC-osflM202064f01a1
tttgtttttgatacccaaatgaaatatactcatgtatagtatagcccatatctttatattatattattattaacaaaaacttgtcatgcccagctatggcgttgggcgcgatctgatacacagaacaaagagaaaacataaaaaggagaaataattaatagcaangcgtcaagnccggcctgcttaaaaggtgtaaaggcagctgccgtcgntcgctcctcgccgttgggtcgaagttcttggcaacagggtcggtgcaaccttccggcacaggcaggttacctgcttgctgtgctccttgccctcctcctcctatgcaggccgcctacgatgcatcgatgggatgcgaatagctagagatcttttattcagctggatggcgcagaaccgtagaaggaaccagtcttcatggcgtcggagttag

SEQ ID NO: 28536 - DNA, 426 bp, Oryza sativa
  Clone ID: uC-osflM202064f02a1
tcgcgatctagaactatttttttttggctggaaatggatatattccccaagcgtgacaacaacttttgagtgccagtgtgtgtgtgttcccctcccctccctgcttaattacatcatctctaacgtaaatgattcgtgatcttcaacgggaggaaaatgacgctctcttcgacctccagagcggttttcctcccgagacaaaaagcacaaatccaaagcctccccaaaaggctgtacaaaatggcaaaaagaagaaaaaaaaaagggagatcgaatgatcccacatcggaatccgacctcgaggcgacggtgtatatgagcgtctgaccgtgctagctccggagcgcgaccgcggcctcgtgcacgagcgagccggtggcctgcgcgacgccctgcgcggcgctctcggcggcctcccgcggcgag

SEQ ID NO: 28537 - DNA, 380 bp, Oryza sativa
  unsure (1)..(380): unsure at all n locations
  Clone ID: uC-osflM202064f03a1
cgaggcattaaaagtccaacatatacatttcactaacagggggttatacagttcttcaggggcacttggcctatgaacagcagttctacattttttttttcggttccaggtaatgcacaagaaaaacacagggatccctgcatttgaagcacccctccagcatgtatgttacctctgagttcatgtcaaggctattcagttccctggccagcacaaattcagcaggtttttagccttggccaggctgaaatgcctaagtactcgncattgctgaatatgctgctataatgcaatgccgattaaatagcaagccggtaaactacccagtttaatttattttgcaatctcttcgagctttttggggataaactttgggttag

SEQ ID NO: 28538 - DNA, 140 bp, Oryza sativa
  Clone ID: uC-osflM202064f04a1
tttttgttttttttttttttttttttttttttttttttttttaaaacaatagtttaatttattagcaggtaaaaatttcttgaaagaatcccatcgactcacttgggtctacaggcctggagttatactttttgcaacac

SEQ ID NO: 28539 - DNA, 350 bp, Oryza sativa
  Clone ID: uC-osflM202064f05a1
agaacttccaaaaaaggaagaacaaggacatttatttatttatttcccgtaagggaaatcccccggggactgagctaccttgcaagccatttttaaccataaaacccaacatcgcgaaacaaatttttgactgaaaacgctaagtttgggaaaagccagcctcccccttttgtacctactactactactgggaacctattgggccggacttcaagttacaaatttgacttcaagaggggggtgctaagtgggggcgctaaatggtttaaagccaacttttcctctgttgggcaccctggcacaatgtgtttaacaacccttctcatgctgactttcaagctgcaaccctg

SEQ ID NO: 28540 - DNA, 417 bp, Oryza sativa
  Clone ID: uC-osflM202064f06a1
tttttgtccaatgtgatttttttttcaactatgatcttctttgcaatttacaatacggtgaagattgaaatgaacgacaccggagacccgacacagatgcggaaaaccttttccagacgctaagaggaacacgagcttttccaataacaaagctcggggacctgaccaggggaggggcatccggcccctcccattacaatttaaattctgatccccccagaaaaaaaggggagaaaattggacaaagaaccaatcaaatcaaaccgaagtcctaaatagtaaataacaaataggcctaacgattactgaccagactagaccatgggattttggcaaaagggaaaccggccaccatttgcctgcccatgagttatgcccaagttggaaatgagggggacaaaaggccctccggatttt

SEQ ID NO: 28541 - DNA, 400 bp, Oryza sativa
  unsure (1)..(400): unsure at all n locations
  Clone ID: uC-osflM202064f07a1
ggaatatactcatgtttagtatagcccatatttttatattatattattattaacaaaaacttgtcatgcccagctatggcttgggcgcgatctgatacacagaacaaagagaaaacataaaaaggagaaataattaatagcaagcgtcaagccggcctgcttaaaaggtgtaaaggcagctgccgccgtcgctcctcgccgttgggtcgaagttcttggcaacagggacggtgcaaccttccggcacaggcaggttacctgcttgctgtgctccttgccctcctcctcctatgcaggccgcctacgatgcatccacgggatgcgaatagctagagatcttttattcagctggatggcgcagaaccgtnnaaggaaccagncttcatggcgtcggagttag

SEQ ID NO: 28542 - DNA, 396 bp, Oryza sativa
  Clone ID: uC-osflM202064f08a1
cttccactgtcagttatcacttgctttaaggctgaagaatcaatctcccacgcagcatatctgataaagagtcactccacacaagaaaccatacaatggaatctgttctctcctctctttcaaaagacaacaaaaagaatccctaaaaagaaaatcggaacaaaacaaaactggcttcatggctttacttataggccgacccaatatgatcgaccattgctgttatggattggtgatggagaaggtgccgtcacagcccactcgtaccacacctttgttgcaccgcagcatcgccaaaagtgcacttctataggcgtcttcgacggtacgtagatgggctttctcaatgggaagaagatcgggaaccagctaaacatgtttggtgtagccgtgttt

SEQ ID NO: 28543 - DNA, 410 bp, Oryza sativa
  Clone ID: uC-osflM202064f09a1
gaacgactcgcacgagacggtacgaagttctattgatagagcaggaaaaaattacaagatcacaaccctaaagggtcgtaaccaggaaaaaggaaaaatataccaccacccacacaccgacagtttcaacacacaagaccgggagaaggctaacaccggaccggccgccgttaagcttgaccgactgccgctagaccaacaaagaaacatagatgagatcgcccaaaagaacaccctcacaaccaatacaaagccaactcctagagtgtgcttgcaccaatcgatcgagaggcttcggctaggggataccaaaacgacgtattcaagaagagaagcgatggtaaaccaccgccgccatccgtcggggctcaaaggagccaggactgggctttcgcccggacgcgtgggtc

SEQ ID NO: 28544 - DNA, 385 bp, Oryza sativa
  Clone ID: uC-osflM202064f11a1
ggggagcaaaacaaggggggccactttattcgcaggagtataactgggtaagaccagttaaaggacatgcaatggtggtatagcatccttcacaaacgagagggtggacaattacaatcacgccgaagcacaatggttggctggcttccctacactacaccccaaaatccagcacccagctgagccggttcatccttcctaatctagtaagaaccaattttattggggatatcttggtggacttttgggtgggctttttgggggcactacttggtttgaaggttctctttcgtcggcttggaacccggacacgatgtgtattacaacacttctcatgctgacttccaataaccaaacatgaaatggaactcccatggcaaccgcg

SEQ ID NO: 28545 - DNA, 419 bp, Oryza sativa
  Clone ID: uC-osflM202064f12a1
ttgtttttttttttttttttgttttttttttttttttttttttttttttttttttttttttttaaaaggggcgggaagccccacaaaaataaaatttctcaccccatttaaagggggcaaagaggtcccaacgcagttttttaattaaaaaagactgcccaaacaaaccagggggtttataatagcagcaaagttttttaacccgcaacattaaagagaccctaatgcaataagaaaacttgaagggggggtcactagcaaatttcgggcttaggcgaccccctcgatcttggggccagcacccttgccccctggcggggggggatggtccttggccatgccgccggccatgtccccgccagggccctgggacattttggcaaaaaagggggggaaaatgccctccagctccttaattt

SEQ ID NO: 28546 - DNA, 411 bp, Oryza sativa
  Clone ID: uC-osflM202064g01a1
gaaaaagaatgcactgctgtgttagacttccttttcttttgtagatcacaaacatcaccattttatagtgtttgtttggtcaaacacaagtgcagaactgcaagttcaatgccgcgcacatcccatttacagtgtccagcttgctaatttttcatggtgcaaaaagtcttattaatacctgagtaaaattcgataacttgccgcaatctgcagttttttttctaccaaatacaaatgctaggacggtaggcaagcctacaaggtaatgttattattttgctgtattatgctggcgttggtttatatcccataaatatgggaaaacacattctttgttgtacactcaacgcttacaagttgatgagaagggcatggattgatagactggcaagccacgccacagaaacaccc

SEQ ID NO: 28547 - DNA, 397 bp, Oryza sativa
  unsure (1)..(397): unsure at all n locations
  Clone ID: uC-osflM202064g03a1
tttgtgttttttttttttttggtgttttttttttttttttttttttttttttttttttttttttttttttttttttttatcacgggggcaggggggggacccaccaaaccccaaggggcttaaaaaaagaggcggggggaaaaaaaaaagggggcccgaccgggggaaggccaccgaggacattgggggggggggaaaaggaccccaaaaaaggggggaacaggggctcgccggggggaaccccgggaccaaaaacctgccctcctgagagggggggaaaccctgggcccctttgcacaaagccggcccaggggaaaaaaatcccggaatcggncccccacccggccccccgcccccccnnnccannnccaccccccccccncccccgggggccccc

SEQ ID NO: 28548 - DNA, 476 bp, Oryza sativa
  unsure (1)..(476): unsure at all n locations
  Clone ID: uC-osflM202064g04a1
cgagcgatgctcccctccgtcagcatggtagcctctagtgcaggccgccctccttttttttttttgtttcagaaaatttactttattatgaaccccaacatagtagctcaaaatcagattagcacagcttatttttgaacatccctagcagcaactactgatgaataacaacattacctaacacagtactaaataaacaagaagtggacatgaataacatgaaaatttcctactttacaggtggcctgtgccagaaatgaactcttttcccttgcataaggagcatgaatagcaaccctcttctgtcatttacaactcaaaaagctcctgcagcctcatggtgcgatcttgcagattccaatttacagtgttatataaagattgaaagcagagttgctgaagaattaggcctttgtggcctgcatttgctttgcaccaacagcgaagaactcggngatgactttgcgcggcatgcc

SEQ ID NO: 28549 - DNA, 475 bp, Oryza sativa
  Clone ID: uC-osflM202064g05a1
cgcgatgacgcgaccgcagcatgggagcctttgtgcggccgccctccttttttttgtgtttttgtattttcagggggacacaaattgaaggccaacggaaagaggaaccaacaccatgccaaaactgataggagaccaagcccaacacacatgagggattaaggacaaagataacaacataagtgttgtaagcaatagagccatataggagatcaaaacatgaaaacccactggggtggacaccctgagacacggtatgatctgactgatttggatgaccagcgacaacacacagggttgtcacagttggcctccacttaacatgtgatgcgcaattacggtagaacgcttctgggctttgattttgtgacagactaaataagccggcacatccataggccaagcattcctgtcattgcaaaggtaccgccaagaactgcacatagtcgggtgaggaaatgcaggaagacccttc

SEQ ID NO: 28550 - DNA, 472 bp, Oryza sativa
  Clone ID: uC-osflM202064g06a1
cgcgatgccgcgtccgcagcttgatcctttgtatgcgccgccctttttttttttttgtgctctaaaagcatgggtgccagcatatattcatataggatggctgcaatcctaataataagaaaaaagaagcgctcaatacctccaattggcaatttcagaccattgtattcagctgaacaaaagccatgttcaccaataatcaccacaagagcacttcccatccttgaaatggtggaagcgcttattacctcttacgataatgctctctccctacaatcctcgacatgatcttgatagcactgaggcagactccacagcacctgaggttctcaatgacgcaaagagaggttccatgctggggggctcatcaaaccataggcactcgctagcctctccctatggcacaggagcgcctggccccttgcctcccgtccactgcaaccttgaacagacccggacgcggggatatacc

SEQ ID NO: 28551 - DNA, 412 bp, Oryza sativa
  Clone ID: uC-osflM202064g07a1
gttgtttttataaataatggatttttaaccaaaggtcgctttcattttgttaaaaacgcacaaaaccattatataatgggtgtcgggaaaaagatagggccagaactcaaagagaagaggctcactcgatcggccaacagcaagcgtcgaaccggacagagtgagggtagggtgtctctagaatacgtacgggggcttgggaaactgggaggcattagctaagtgtagatgagcacgaaatgcaagggctaggcacggtaggcaaggctacaagggagggggaggaatttgcggaatcacggggggggggatcatatcccataaagatgggaaaacacattctttgttgtacactcaacgcttacaagaggatgagaagggcatggattgatagactggcaagccacgccac

SEQ ID NO: 28552 - DNA, 423 bp, Oryza sativa
  unsure (1)..(423): unsure at all n locations
  Clone ID: uC-osflM202064g08a1
gttgtttttttttttttttgtttttttttttttttttttttttacagggaaacaaaaaagggcactagtattgttatattctgcccgaattacattgtgggggaggaactaaacacgtactggtggggtccaatttaagggcagcgggcagggaaatgaaaagaatgccctatgtcccaggaatagttacggtaagaagaaagaaaataaacctgggaatatatctggtggaattggacaattatgctacgggggcaatggtcacaagagggtggctatcaaccatgggggcaagaagagccaattcaccctgagccctagccttggacgaggccggttcatcagaaatcggctccctgngacccagatgccatcaaccctatcancaatccgttttccttgggctggaatcatgccggaggg

SEQ ID NO: 28553 - DNA, 354 bp, Oryza sativa
  Clone ID: uC-osflM202064g09a1
gaaacctcggaagatgaaccttaattatcggagcatggggaaaaacattgtgcttttaggatcaaataacaaagtggagtctgcaaacagaaacaagaactggttttacatgataaccctgtttggacttaggggggcatggatttggcccgcaaatcctattttattgggggctgaatacatggaacaaagggggtcatgaccactgggtataggatggggcccaaatttatagggatatccttattggacccttatcctataaggattagaaacaccttgacaaggattccgggcaacttccaatgcatcccttcgggaaaccctgaccaccaagaggaaccgtcttgctgg

SEQ ID NO: 28554 - DNA, 405 bp, Oryza sativa
  Clone ID: uC-osflM202064g10a1
ctccatgatcacacgacgttggcacctccgatttgtgggaatcattgattacaaaactgttatgagtccgtgccagtctaacatgagtgattaatgacaaagctaacaacataagtattttaagcaatcgagccatagagcatatcaaaacatgaaaacccactggggttgaccgtatctgagacgatatgctctgactgatttgtatgaccagtgacaacacacagggttgtcacagtttgcctccacttatcatgtgatgcgcaattaccgtagtacgcttctggtctttgattttgtgacagactcaataagccggtacatccatcggtcaagcattcctgtcattgcaaaggtaccgccaagaactgcacatagtcgggtgaggaaatgcaggaagttcct

SEQ ID NO: 28555 - DNA, 180 bp, Oryza sativa
  Clone ID: uC-osflM202064g11a1
gcagtaacaaccatccataaattgaaggtaaacgggcgcattttccagcaccatgccaaccaggctgattacaaatcccaacacatcagatgttttcagggaaatcaatagaatatgatcgttgctcgcgacagccgggaatcagtatcagtcccacgaactagttgagccttgaccacc

SEQ ID NO: 28556 - DNA, 394 bp, Oryza sativa
  Clone ID: uC-osflM202064g12a1
aaaccgcgcaggggtctgctttatatctttctcaagtcattctgatgtagcacttttgatatgagaaacatctctatacaacattggaaaaagaaaaaaaaaagaggaaaaggttagtggtccttcctttcccttttgtcccctcaccctagaaatacaatctggggcctaaaatatgctcagattacaagccactggactacccccttcaagtgtgcaacgaagggcacattttcttacacacacacaggcagatacaagctgatttgcctaaagccaatacagagccgaaaagcttttgacacctcccgggggggctcctgatcaagccggaacaggagcagcagggcaccaatgcaacttcttaggcatcgccgaaaaccttggattgccc

SEQ ID NO: 28557 - DNA, 415 bp, Oryza sativa
  Clone ID: uC-osflM202064h01a1
gccgtaatgtttatattgacaatattgatctctcttgtcatctacaaaggagtgctcaaaaatgtgttctgtaaccagcaacggtaataacagcagctgaaaaaaaggggcagcaatataacaggtgatacagaattacagatggaaacttaccatactaccaacagctatgaacttccatgaatcaaaatatgcccaactcctgatgtcaggattgagactagagatcacctcctcaatcagttctcaccaagggtgtaccgggtgaacctccgtaccttgatgttctccccaagggtggcgatcgtctccttcacaagatcctttaccgtcttgctgtcatccttgatgaaaggctgctccaggagggccagcacgccgagcctcttcgatatccggccttcgacgatcttct

SEQ ID NO: 28558 - DNA, 386 bp, Oryza sativa
  Clone ID: uC-osflM202064h02a1
tttgttgtttttttttttgtggtggtttattttgagcacattcaccacgtattcaggtgcaaatgccacttattcataaagacatctgtactcccccagtaaacggttcgataaacatcacaaattgatcgtccattgggtgtacacaaccccggcccaaagcgggatctgtgccccctgtacccgtataccagaggctggggccgacccatgcccattccatgccaccccctactgggtgattactgacccccacgggggcggggccccaggaggggggggggctcgttctggatgttcccaaccgacagggggcgatcattctacagctgcttggccacgacaccaccgcccttgcggggcgccgggaactgcaatgctgggct

SEQ ID NO: 28559 - DNA, 421 bp, Oryza sativa
  Clone ID: uC-osflM202064h03a1
ttttgttgaaaactaccttttattcatcatcttaaacacacgcgcagcgtagcgcgctgttattgctagtatttataaaacaacaacctattgaagtattgataggatcgtgtaacaattaccaatactcatctataaaacaagaaaaatactactacagaacgggacaggatgatgcctccgaggtgatatcttgcatcagccgattactactactatttgactattgtgtactcaactactgtactactactgttgagctggtccctgcagctgagtggttctggttcggtggttccccaaccaactgatgcggctcgcttattctctccttcgcgccggcaccagccatcgccaccggcgctccacctccacgccggccggatacaccgaaagcgacgacgacggcgaagcgccgccg

SEQ ID NO: 28560 - DNA, 412 bp, Oryza sativa
  unsure (1)..(412): unsure at all n locations
  Clone ID: uC-osflM202064h04a1
agaagtgtgaagtatgtataaaaaggataaaccaaatcgaaacataactgagcataagttttgcattgaacatcacaataaactgggaatactacatatgaataagcacccgatgaacttttttggtgctaatcttcaaagagggtaattaacaantcctctaacgtcaacctataaaaacagtttgaaattatccccttttattggttcccaattaatcttgatttcaatcgatccttaagatgaataccaagtcgcggcttcaactagtacacatcagatatatgagcatgtatcaaaaattccccccggccactttctgaaagcaaacttacctatatacgctcttcatttctaccacttgccgttgcagcttcagatgttcatggccagaaatgatgttgatgctatt

SEQ ID NO: 28561 - DNA, 126 bp, Oryza sativa
  Clone ID: uC-osflM202064h05a1
tttgtgtttttaatttttttggttttttaactttttttattttttttttattttaaccgttcaaaagaaaaaaaaagaacaaaacaacaaacaggggaggcgaacacaaaaagaagccaaccgcag

SEQ ID NO: 28562 - DNA, 237 bp, Oryza sativa
  Clone ID: uC-osflM202064h08a1
tgtgtttttttttttttgggtttatcattttttaacacactctcatcgtatcacgctgttattgctagtaattataaaacaacaacctattgcagtatggatcggttcgataaacatcaaccaatactcatctataaaacaagaaaaaacctaccacaaaacgggacaggttgccgccttactggtgataccttgcctcaggcgatcccataccacctatgcggctattgcgaactg

SEQ ID NO: 28563 - DNA, 345 bp, Oryza sativa
  Clone ID: uC-osflM202064h09a1
accacaatgtaaaatattttatttctattgacagcgcatagcacgacagtagcacgagctagtacacgttccgggttacttagtacttcatttgacaatgggtatgtccatgcatgttgcagaatatacatatactaatattagcatggatatatcagtatatgccaataatccaatatctacttgtcctttaacaacgtgatatatatgttggccttgtataccaaagttactccatcttgacttttagatatgttgaaatccctcctttggtaacattgattcttttctcatatatactcaggcagatggagccggccaagagtagagaggcggcacaccacc

SEQ ID NO: 28564 - DNA, 301 bp, Oryza sativa
  Clone ID: uC-osflM202064h10a1
ggtgttttttttttttttgggttttattttttggtttattttttttattttatactcgggttgagaaacgaaaggaaccaagcaacacacagaggaagcgccaaaaaaagaaacaaacaggcagaggggcaaagcaagcaagcccccaaggcagccaggaacaacccaggggcggcccccgacaggctcagacagaaaggaaaaacgaaaaaagcctgcgcggacaccaagcaagcaggggggcgggaacacaaaacccacgagcggggggtgagagaaagcaccgcagaaggcccagggg

SEQ ID NO: 28565 - DNA, 273 bp, Oryza sativa
  Clone ID: uC-osflM202064h11a1
tttgttttttggcacaacctggcccatggcaaggatcagagggcacattcaacacccgaattggtaactaaatagttacaagctactcattcaagaataactaaaaatagttacaatttaatggagttttcatcggcgagcccgggaggctgcccgggctagctggtgcggtggctccgcccttgcttttaattaaaggattattgtgtgatgcttgtgctttcgtctagtaagcttgtctgttggtctcatattatcccattattacattat

SEQ ID NO: 28566 - DNA, 124 bp, Oryza sativa
  Clone ID: uC-osflM202064h12a1
tttgttttgagggacaaccggggccatggctcgggccagcgggtacattggacccccgtcaaggtagctaaattgatacaggctgccgatccagggctaactaaaaggacatgcaatgcacacg

SEQ ID NO: 28567 - DNA, 443 bp, Oryza sativa
  Clone ID: uC-osflM202065a01a1
tttgttttttttttttttttgttttttttttttttttttttttttttttttttttttttttttttttttttttttttggaaggggggcaacaaccaacaggattccattcgcctaagaaaaggaccaatttacaaggggggaagggattttacatggatattcaaaaagatgtcaggggggggccccagcgttacacaaatttatcagggccataggggggggggccaattcttaaagagaaacatagcccaaaaacctaccggttttaaaactccggactttttggtgacattttcccatcctccggggggggaccaatagtaggggcccaaaaaaagcatccacaggggactgccgggttaaaattcgccaccaggccaagggtttaaccttgttaaaaatcaaagaaaaggcccaggaaatttttaggcacatttatccc

SEQ ID NO: 28568 - DNA, 234 bp, Oryza sativa
  Clone ID: uC-osflM2020116a02a1
ggggaaacccacccaattttttaggggaaaagggggggggaacccaaaaaaacccgtccagggcccgaaaaacccgccgggggggacccctggggaccccaggggcaaaagctttcggcaaagggggcccaaaaggggggggggcaaaacccctgggaaaagggggggtttcaaccccgggggggggccccctaaagggggcgaaaaaatccccttgacccccggaaagggacc

SEQ ID NO: 28569 - DNA, 270 bp, Oryza sativa
  Clone ID: uC-osflM2020116a03a1
ggaccaaaacacggaataaaaacctatagccaagaggttacagactttacaatcagttatcgggcatatgcaaaggggaaagccgtacttttttgctcagggcaaaaacagataaaccccactttaacttgggaaaaaagaaggggttgctaaattgggggcccacagaggtttattaacaggagaccaaaaggtttttgggggaaatcaagccaaaataattccacttaaaaaggattgggggttcccaacttaaaacccctgaaatat

SEQ ID NO: 28570 - DNA, 261 bp, Oryza sativa
  Clone ID: uC-osflM2020116a06a1
cgggggggaaaaacctatttatctcccggggaaaaaaaaaaaacccccccccccgggtataccccccaaagggttaaaaaccccctgcgggcccaaaactggaccgggcaaaaaaaacccccttttcaggattttgtttaaccccaaacccccccccgcgatttttcgccccccccaacagaaaacaagggggggggaaaaacccccgggcccggaacctggccccaaaagcaaagcgggcaccccttaggcccccccccc

SEQ ID NO: 28571 - DNA, 300 bp, Oryza sativa
  Clone ID: uC-osflM2020116a07a1
aagttagatctttataacatttacacaaaatatatggatatatatttatattacaaattaatggagcgaccgagcgaaggatgaattagcaacgccccaggccggacacacatttcgggggttaattaattatcacaaatcggcgaggtttccatactcgtaaaggaagtcgttttggacagcgacacggtctttaaaacataactttgatatcttatttctataaaattatttattaaaaagggatatatgcatgcttttataaaagtatttttcaagacaaatttattcatataatta

SEQ ID NO: 28572 - DNA, 328 bp, Oryza sativa
  Clone ID: uC-osflM2020116a08a1
aggggatgacaatgtttcagacaacaaggtttacatacagcaagagctgacaaatcttttctgacaattagcctctttgcccgccacaaacactacagttgcatatcagcctatcagctattcatcgtccagtacaacgacaacaaccatgtgaactacaactagcagtaaaatacatgaaacaaagtgcatcctggcacaacgctgcaatcgaatgaatgcagcataagcaccctggagcattatttgatatcaaaatacctgagcaaacgacactggaaatgagagttcaactctgattgtaagcagtaaatagtggtatcggatg

SEQ ID NO: 28573 - DNA, 317 bp, Oryza sativa
  Clone ID: uC-osflM2020116a09a1
gatgatggaacctacatcctcatttaaatttcttatgcacccatccaccgtttcttgttaatgttacaaatgggtaatgacaacagatatccatatcctgaggtctttttaccttacctcccaaaatgtacccagtgacggcaacagctacaaaacaccatactgaacagaaagcagaaccagaaagctacataccatgatcaaagttaatgatggaattgcttgctcgcacttccacaaaataacaaagaaaatggcagccaaacaataacagttcagctccaaaatttgagcacagcaattgaataaaccgacat

SEQ ID NO: 28574 - DNA, 222 bp, Oryza sativa
  Clone ID: uC-osflM2020116a10a1
aaaacaaaaaatgggggggcaaaaaaaaagccaggggcaaaaggagaccacaaaatcctttcggagggaaaaacagtctcaacccccacaggaaggccccaacaaataggaccattcccccccaaaactttgctaagcagggggctcattgcccaaggcataaaaaaacgggaacattcccgctcaaaactttgctcagcaaggggctcattcacttccccg

SEQ ID NO: 28575 - DNA, 322 bp, Oryza sativa
  Clone ID: uC-osflM2020116a11a1
gttaatccagcagccaagaaccatcacataacctattccatcagtacaatacaaatacatcaatggcacatttcttttgcctccctcgtttcataactaggaaacaagagggaattcagctcagggacaggggaactgaattttctaaggtcagacattttgttcagctgctactggctcatccttgagattcttgctgagccactcctgagcagctaccaggtcagggagcacagttgctccagacttcctccagctttcagcatcggcggtcttgaatcggtccagaagcagcgcgtgcattccgatgctccgtgcaggg

SEQ ID NO: 28576 - DNA, 342 bp, Oryza sativa
  Clone ID: uC-osflM2020116a12a1
aggaacacctactactcatatagcagagcgaaaagagggtagcatacaggctatacatgaatagcgtccaaaaatacacgggactccgacccataaacccagtcactatccgacaccaatcaagcgcgacatcagggacactcgaacacccaagaatcggggcaggactcatgactaacagaacaaaaaaaaacatatggtcttttttttcgccaggaataggcggtattatggggggcaaggtgaatgtggaggactgggaagccaacaccctcacttgcacttgaagccatggcacacggacaggatgatgatgaggatgagcgcgatgatgatgcccag

SEQ ID NO: 28577 - DNA, 307 bp, Oryza sativa
  Clone ID: uC-osflM2020116b01a1
aaccgcaacatgccaacatagttacatgaaagcaacgacctttttcattggtgtttggaagataaaaaaacaatttaaccacctaaataacacattgagtctggtttctaatagttacaggacctacaccagaagagctggctagagatgcaacggttacagattttttccttgattcaggctcagacattacactagataggggggctagttaggatccatggcgtcgcaccggagaacctcgggtaccaccggcacgacatttcctttcgcaagttctacgggggtcagacgggaccaaggtttg

SEQ ID NO: 28578 - DNA, 326 bp, Oryza sativa
  Clone ID: uC-osflM2020116b03a1
acgcaatatgagcacaactatataacttaataagcacattacagcacacacatggccaaggcagttatttgaatcagtctccaacatacttcaaatcatagaccacaccatacagcaaacatagtataaacattgtcatagagagtacagctgatagcagcttgtaatattctagcattactttggtagcatccctctacaaaacatagcagacatcaccagctcttcatcttggccatacacattcaacatggtttgctagtgacagaccacactgaccagaacatttcgtctcctcagtaggcaccagctgccatgagcagctc

SEQ ID NO: 28579 - DNA, 330 bp, Oryza sativa
  Clone ID: uC-osflM2020116b04a1
atatgaagattatttaattatatataaatccgtgatactgtactttgtttcagtaaggtcaaatggaactggaatagcaagaagtagtttaattgaacagatccatctatgaaagaataaaaggaattggaagaagtagctatcgctcaggccgcttcagattcagcagcactagcagcattcagatccacagaaagatcaagttccttcccagtgatcttgctgtacaatgcaagcacatccttcaccgttgtctcaaaatgagtagttgcatcgtaactatttgtcacgaagcagttgtcctcgtcagcggtattagtaggttcgtat

SEQ ID NO: 28580 - DNA, 328 bp, Oryza sativa
  Clone ID: uC-osflM2020116b05a1
agcaaatcgatccatgcgaccatgcgtgcaaatcagttggagcacaaatttacatgttacacccacaccctacacccatgcataataatacatcgtatatatgtacgtacatacatacccctttcgatcacacgcaccatcgatcgtacaaagttgcgtacatacatacgtacacacatatacgcatacgcacgtacatacatacataattaaaaactcgtaattaattaaatacgtagttgatggcatttctaatggaacttgaggctggtgaggatgttgttgtggacgggatcagcgaggtgatcaagcaggttctgcacggggc

SEQ ID NO: 28581 - DNA, 325 bp, Oryza sativa
  Clone ID: uC-osflM2020116b07a1
gaagtgataatttaaatacttaatagtaatagactctttgatggagtattacaacatgcagcagtggcattaatacgccagtacattaattaagttacacatatgcaggctccattttggtttcttttaatttatcgtattacagaatttctgtagccttgctgatgatcacttggatatcatgtactagtaattaacaataggatgcatacaaaagatggcccaacgacaacagaagatgcgtgcatctgacattgtctggccttatttggttggtagtactccaattaattaacaagagatgatgcattcttgtgccttagtt

SEQ ID NO: 28582 - DNA, 326 bp, Oryza sativa
  Clone ID: uC-osflM2020116b08a1
ggtatgccataggctatatattaaacaaaagcaaattattttaactagacattagaagtaaattatgtcataagtcgtgagggaaattaacagattttcacactggccactcagcacacacaagagtggtcgaactaatttaagctaggcagtctagctagtggattgatacaactacagcacatagtagcagcaggttaaaagctagtacatagttaggaaagagcacattacgctctctccatcagtggatatatggtacctggtactgaacctgatagccattaccataatatgttgtgtgggcaggtgagatgccataggga

SEQ ID NO: 28583 - DNA, 327 bp, Oryza sativa
  Clone ID: uC-osflM2020116b09a1
gggaaaaaatatatctgcaacaaaatcatcgcgaatagtttacaactctgccacagcaataaaaaaaaagaaagaaaatagaaaaaatagaaaaaccgaacacaaaagcaaaaggacacgatctaaccgatacatttcattgcatttcaccattccaattgaattacagtcatacagacgactacaaatcgacaaagctgacctaagcacaaagttaaacttccatagaaacattctgcgccgttatttccaccgacaaaaccttgcgcccagtccacctttgccgtgccacctgagtgcactttatggtcacaggctgcgaagctc

SEQ ID NO: 28584 - DNA, 272 bp, Oryza sativa
  Clone ID: uC-osflM2020116b12a1
ataaattatattattaattttttttataaattatatttaaaaattaataattaaatttaaaaattttttttaaaaaaaaaaaaatgggttttgaaattaaaaaaccaaaaaaaaaacaaaacccccttaaaggggaaattggcaaaaaaaaaggggggtaaaaaaagggaaaaaagaatgaaaactttttgcaaaaagggagggggtaaaaaaaaaaaaaaatcccgaggcaaaaaacccaaaaaattttaaaaggaaagggggttttttaa

SEQ ID NO: 28585 - DNA, 249 bp, Oryza sativa
  unsure (1)..(249): unsure at all n locations
  Clone ID: uC-osflM2020116c01a1
accaaatcctatctttagaagggtacattgcacaagctcaggaagtggtagggtggggattgacaaggcaacactatgctacaaagtacaaaggatcacaactcagaaacgaccaagtgcttgacatggntctccctcattggagttgacaacccaggcaaacaacaggaatacatgatttaaaagaatctgaaacagggaatgtcagggggaacacctttagtagatgggcttctaggaactacagat

SEQ ID NO: 28586 - DNA, 327 bp, Oryza sativa
  Clone ID: uC-osflM2020116c02a1
ctgaaagtatgtgcattcatgttactcaagacatcaaatgtaaatggacatcaatttttacagtcaggtgagcccaagagctaaatttcttgttcattattttcgaatcatatcaacatcaaggacaaagtacttgatcaggaaaatttcctttggaagccaaaaaaatatggaccaacattgcgtccacaagcctagtccatgtaatatctttcatagctcatgaccttgggtagagacatatataggtactggtaagaaaggaaaaggggccacagaagcataggcaaccggagggcgcgagtgaatacgagaaggttttcggtc

SEQ ID NO: 28587 - DNA, 95 bp, Oryza sativa
  Clone ID: uC-osflM2020116c03a1
accataattaatatattttatttaaaaaaaatatttatttttttttcattttttatatattttaatttttttaaaattgggggggggggaaatta

SEQ ID NO: 28588 - DNA, 334 bp, Oryza sativa
  Clone ID: uC-osflM2020116c04a1
gtgctgaagcaagttttatatgtttcgtgaagctctcaaaggcgagtggaagtgcagtaatttgttattggcagtacattattagaaccgcagagagcattcacaaggcatacatttaacaccatccagcacatacgcagggagaatagcaatcaggcaatatctttgatatactaatatttttttagctttacttctttggcgtgtcagcatacttccaggtgtaatgtgcaaatgaggtatactgtcttccaccagcgacatcttcttcgcgtacctggctagagatctctttcaggtcatcatccgtgaggttcacctttaaggagtcaat

SEQ ID NO: 28589 - DNA, 336 bp, Oryza sativa
  Clone ID: uC-osflM2020116c05a1
gtagagtgccttttttttttcctttgaacaatgtaaattcacaagagaatatggcagagacacagaagtaagtgtgaaatgaggctacacataattgtgctagctccaaaagatcaaacaaccacagctccaaaatttcaggctacctcctgccggtatcagcatcttcagtttgctcacaagagctctgtcctacggtagctggttgtgtcaaaacgtcgagtaggcttaatcagcaattcagcattgatcatcaggcgtatagtttagcaagatcatcctcatatgtcttcctgagcacttccctcttgagcttgagggcagcagtgacaaggc

SEQ ID NO: 28590 - DNA, 127 bp, Oryza sativa
  Clone ID: uC-osflM2020116c06a1
atgtggtgaattaaaagacaatcggggaataccagcagtggcagggaagcaaagggatatgacaaaaaacactggcccgttctacacggaaaggcactgacctggtcaagcccggcacacactcaca

SEQ ID NO: 28591 - DNA, 327 bp, Oryza sativa
  Clone ID: uC-osflM2020116c07a1
aatcggagaagttcttttcacgtagagacctgtcaatacataggtaatcattcctaacaaaacgactacatttacaacttataagtggtagtatgctcagacatcctcggagctagcagaatcaacatggtcctatctaaatagcatccgtatatattaactctctcttccatatgatccctacaccagcagggtgcaatagaataaatagaatctttcacctccggcacgcaatgtgcagttggggggtcattccttctgttgttgtttttgttgttagatgccgacacactttgcccatctgaaccagcatgagatcttctcagg

SEQ ID NO: 28592 - DNA, 328 bp, Oryza sativa
  Clone ID: uC-osflM2020116c09a1
gtacgaacagaactgcacctgcttttatattccaagctatatactgctgcaaataaacagacttgtgagtatggcacaaagcacacacaccacttgtggagggtaccttgaggacagtgctactcgctcttcgggcatacaagaactaagctacacgggcatgattaaatcatcaaagcacttatcagaacaagtctgactaataagagctaaaactttttattttgagcaaaagattcttcttcacctccattgcaggatggggactgcatccaatctttaccagattttatcagagcaccgggggtgatggctgatcataccaatg

SEQ ID NO: 28593 - DNA, 299 bp, Oryza sativa
  Clone ID: uC-osflM2020116c11a1
agagggatgaataggtatttccaaaaatttcttaaacttacaaacagcttaaaactaactggatagtccggtaccactgcagacaatctgactatagagcagtcggatagtccgactgcatcagaacaatccaatcagagcattgccagagaaaaactataagtgacctggaaaatagaaatagaaatgaaaaaataatggtggtggtggcaggatgtagcgtgggttgatcgtttagaagcacgaaagctccttgaggcagccggtggcagggcccttggcatttttgcagacggcca

SEQ ID NO: 28594 - DNA, 330 bp, Oryza sativa
  Clone ID: uC-osflM2020116c12a1
aaccaacaaacgacaatccaaaaagcattgccgccaacacaaaggaatagtagcgaaaatacgtccagtttcacatcaaaaggattgaccgtgcaaacctttctattttccagcaagtacaagcacaaattgaaattacagacctgataaaacagattggggcactgacgagcctctaggtacataaactaaatatcgctgaggcgactatccaggaaatcatctttaatgttaatgatagctccggaggggaacaagcatgcagttcaacaatatgttgcctcatttgtagaagtcaaagtcagtctcaggcttcttgacattggttcg

SEQ ID NO: 28595 - DNA, 334 bp, Oryza sativa
  Clone ID: uC-osflM2020116d01a1
gaagcgagaactcattttttattgatatatgttggatgaatccaataaaaccgatacaagtcacgaaaaatcagactagatgaatccttcgagatcacatgagcaaaagctttcgacgaaagctgtcctatagtcgtggaagcaataacacttgataaagataggaattcagacacgagaggttgcagactataagatgtcatcaaatctccttgaacgccgcgaagagatcaccgttgatgtagtcgttgtccacaagactaaccaagaagtagctcttctggaccttgtctagtatctccctagatgagtcgccctcagggaacaggcaagc

SEQ ID NO: 28596 - DNA, 327 bp, Oryza sativa
  Clone ID: uC-osflM2020116d02a1
aaacgagtaactcagtgtaaagtttgcattactaaaactgtactctgatcagaatgtacaacatgatttacctgttttctatacagaaagtttgacctaggattacaacaaaaatatgtatgctttactctcagcaacggaaaatgtattttctgtctaccgtgacctccccgccttaccaacaatgaataaaaagaatttccaccttgatggttgtgaaaaagcacatgttaccagagaaaatggagctggaaaaaaatatgaagaattaacaactgggcatgtatttgttaaattttaactgggctcatcgctgccttttgcttt

SEQ ID NO: 28597 - DNA, 247 bp, Oryza sativa
  Clone ID: uC-osflM2020116d03a1
gggaaaaggaagcttttccccgacccttttctaatttttttcccagattttgggtccagaatttacccccggggtccagccctaattttttcccccccaaagaaaaggccaaaggaagggggggggggaaaaaaaaggaggaccgttttcccaacagagggcccccttttaaagacaccctttcccattttttaaaacttgggcccttttaacggggtgccatggggggaacaccctttagaaaaac

SEQ ID NO: 28598 - DNA, 323 bp, Oryza sativa
  Clone ID: uC-osflM2020116d04a1
aagaacaactgaaagaaacaaaactcttcttgattttgatccaacgtgagtacgaacaaatcaaaaattggatatttggacatccaaagaatccttttgattgctattctgattagcagcttgtggatatagattccagacatctcagccttccatcctctcgtagaaaagaaggtaagcctcgcacttgagaacttcttctaaagagacttctctgatgtcggtatcacttgcacaaaaccatgaggaagaaccattggtctgctgccgaggacttggtctcacataagcaacaaagtgccctgaatctttgccgcggccat

SEQ ID NO: 28599 - DNA, 277 bp, Oryza sativa
  Clone ID: uC-osflM2020116d06a1
gggcagggacaaatatgaaattattgccgaacaggacagccaactaataacatggcactacgggaacatatccttgagtattgacaaagggaaatcgacagcagtaatgcagaatcttcttggaatctacacctattgacacatgaattcatgaaacatcattctgggattatttgtcttgaattcttgatgcgtgaagttagctgttagaaggcaattcagttttcaactcctgaagccttcagggatcataactaccgacttccatttcttcctc

SEQ ID NO: 28600 - DNA, 325 bp, Oryza sativa
  Clone ID: uC-osflM2020116d07a1
gctatgataaaatgaagagaatcacagcgtggcaaacgcctataatacaagttcactcatctaaaccacctctctcagaacataactgcaaacgtccatgcaccatcttcagatttaactgcgggcgatggtaacaaacctattgatacaaaagggccaaagtttttgaaccaaatgacattagcattccaggatttacagtgactgcatgtgtacttgtccatattcatttaaacaactcgttactaccccatgtcgtcactgctggaacgaaatggagtacgagcctgtgtttgggtctttaacagctttgaaattgtcgacg

SEQ ID NO: 28601 - DNA, 324 bp, Oryza sativa
  Clone ID: uC-osflM2020116d08a1
caccaacccgacagggttgatgccgccgccgccttcgccgcctagttcatcctcaactcatccaaatgaatacagagttagttttaagatgctttctctctcacacgcaactatcgacagcctggacatggtgctcatatggcccattccggcccactcactctaggattacatactcggtgcctaacaggtcttccttccttagtctgcttaacctccttggtcttgacagtgttctgtagctcatccggtacaactgtgttgctgacaagcaggttcatcacgatggacaagtcttgttgctcaactttgagcaatgtcagt

SEQ ID NO: 28602 - DNA, 330 bp, Oryza sativa
  Clone ID: uC-osflM2020116d09a1
aatcaaagtatcaacccagtagtactatgattatatattaagctctaccaaacaaatctgagaaggttccagaccaagacaggaaatatatggctgggattgacaaggcaacactatgctacaaagtacaaaggatcacactacagaaacgaccaagtgcttgacatgttctccctcattggagttgacaacccagacaaacaacaggaatacatgatttaaaagaatctgaaacagggaatgtcaacaagaacacgtatagtagatcgcctcctatgaactacagatagctttacgacctcaacgactggaaaagagcattcgaaaacg

SEQ ID NO: 28603 - DNA, 119 bp, Oryza sativa
  Clone ID: uC-osflM2020116d10a1
aaaaattgttttattttttttttattttttttgaaattaaaataaaattttttaatttttggatgaaataaccgaagatgaaattccaattttccaacaaaaaagaaaggggctctttt

SEQ ID NO: 28604 - DNA, 327 bp, Oryza sativa
  Clone ID: uC-osflM2020116d11a1
ggcacataaaacacattaaggttttgatagataaaaagatctccagcaggagtgtgacaccacatagtctgtaaggaccgtctgggtttattgaccaacattacagataagcaagcgcacaggacacacgaacaaactcgaagcactcataactcgtaggaaaagcacacgacgatacgaactggaaatattcatggcgaacgaatactcaaaagacgataaggcgaagtaggcgatgattggggacgaggttggacgcgtcactcttcctcggattcagaatccgcgctctggagccactccacgaatggtttggcattcttcacc

SEQ ID NO: 28605 - DNA, 325 bp, Oryza sativa
  Clone ID: uC-osflM2020116d12a1
ctcaatcaaatgcagtgaaaagatggtgtgattacagagttatgacgaaatcaatgcatgtcctggaagcacatctacatcactggctgagcaatcaacaaattgaggtggctgatattctttaaagatccatcccaaaatcatttaaccaactctacaccatcatgtaattaaccaaatggttggcccaaaggggaggaaaaagaaaagaaaaccaaaagtcctaaccatttgtaccatatccccactaagttgagactttttaatcttggcggtgccaattgctacatgtcacaggagtaaggaagggctaacaagaacaaag

SEQ ID NO: 28606 - DNA, 308 bp, Oryza sativa
  Clone ID: uC-osflM2020116e01a1
ccaccaagaaacacacttttccatctttctttcaagaggaacagatcaaaacttcattacagatctagacagatagtatatgatatatctgatccctgtgctgaatgctgactaaagatgggcaactcttcgtgaggcttctgaaatgcaaccaatttacaaatttacatcaattttctgtacagtgttccaaatgtgctgcttgagaggggtggcacacagatattcttcagactatgacaataattggaccatttggagggaggcaagatcttgtgggagctgtttactcacgggaatccgaacag

SEQ ID NO: 28607 - DNA, 328 bp, Oryza sativa
  Clone ID: uC-osflM2020116e03a1
aagcagataaaaattattttacacaatcaggtccattgtacttctttcatcaaccaaccagataacattgttttacacaatctgaacgaacgaagcaaatattcgggtacgcggaaagaggagaacgtcgcgcgtctcaccgcagcctgcatgaaagcaatggacctcaccgccgttgctcgccggagatccacactcacttgccggggacgaagttggtggcgtaggcccatgcgttgttgttgacggggtcggcgaggtggtcggccaggttctccagtggccccttgccggtgacgatggcctggacgaagaacccgaacatgga

SEQ ID NO: 28608 - DNA, 328 bp, Oryza sativa
  Clone ID: uC-osflM2020116e04a1
agggtattctgataaatgtggaattacatagagagagtccatctatatagttcagtgacagcacaatctgaagatacataatttgtaatggggaattaaagtacaaattgaaaatttatttagagtatagcaatttcgttcatcaaatactcaatgcctaggttgattatccaagttagtccactggcactggctgcatggcctcagcctccgctctcaattcctcaaacaatgcagatgacaggtatctctcccctaaactcggaagaacagtcacaatgagcttccctttgttttctggcttctttgctagttcaagagcagcaac

SEQ ID NO: 28609 - DNA, 329 bp, Oryza sativa
  Clone ID: uC-osflM2020116e05a1
aattgaaatacttaatagtaatagactctttgatggagtattacaacatgcagcagtggcattaatacgccagtacattaattaagttacacatatgcaggctccattttggtttcttttaatttatcgtattacagaatttctgtagccttgctgatgatcacttggatatcatgtactagtaattaacaataggatgcatacaaaagatggcccaacgacagctgaagatgcgtgcatctgacattggctggccttatttggttggtagtactccaattaattaacaagagatgatgcattcttgtgccttagtttcttcacatgct

SEQ ID NO: 28610 - DNA, 323 bp, Oryza sativa
  Clone ID: uC-osflM2020116e06a1
cgaagctcttactttacttctgcactaaatgtggtataaatattacattccacccagagatcaccattggcctttgcatgcccagacatcatttcttctgcttctatttttaactatattagtaatggccactcaagttcctccaagatttgccattcactggtaaaaaaaaatcaataagtttttgcagcaagactaaggtccataccatgatccttttgcccactaggctgtaatatcataagcttaaaagggccaagaatctagggagttcatatacttgaacagggcagtgaatgtcgtccagaaaacagcattagaag

SEQ ID NO: 28611 - DNA, 329 bp, Oryza sativa
  Clone ID: uC-osflM2020116e07a1
gacgcaaaattatggatcaatataataaaggaaaagaataaaaaggacagtcagcatcatcgccgtttgagtaactattatttgcttaaaattaaaatatctaagaaaaataagtctagacaatttattattgtgaattccagcggttagggccaaggaccagtagagttacacgtctgcaactttagaagtcgggggcaagccatgcgataggcttgcttactttgagaaaaacttctggctaacagattcatagctcgggacatgaataacgtcaccccatgatgccagtgtaaggggtgatgaaatgatcttcttggcagtagaag

SEQ ID NO: 28612 - DNA, 310 bp, Oryza sativa
  Clone ID: uC-osflM2020116e08a1
gcgaaaaggcgtgtgtttgttacaaacacacactgtcatttgatcaaaaatttcaaaattgatacactcgtttaaccattttttttcctcgcaaaagttggtgtacaaactcgaactctgctactcacacatatgtgatatgtacatagatggatacacaattatacacggaatttagtttttgtaatacgcttcaaatttttagaaggcaggcggcctggacgtgcccggagaactcgggcggcgccggagcgcgcgcccacgacgcgggcttgccggccttctcccgcagcgtgtacaccgtttggtc

SEQ ID NO: 28613 - DNA, 323 bp, Oryza sativa
  Clone ID: uC-osflM2020116e09a1
ggtctcgacggcgtgcaacggcgcgggcggcggtttacacaatcaggcccattgtacttctttcatcaaccaaccagataacattgttttacacaatctgaacgaacgaagcaaatattcgggtacgcggaaagaggagaacgttgcgcgttttaccgcagcctgcatgaaagcaatggacctcaccgccgttgcttgccggagatccacactcacttgccggggacgaagttggtggcgtaggcccatgcgttgttgttgaccgggtcggcgaggtggtcggccaggttcttcagtggccccttgccggtgacgatggcctg

SEQ ID NO: 28614 - DNA, 325 bp, Oryza sativa
  Clone ID: uC-osflM2020116e10a1
aggtagaagagattgctgataaagaaaaatggcattttgcaacacatttaacttgttcagtgttcaagctaacgttgaacctggtacaagtacaacatgctggcacgcatgtccacatctcgcgggtcgagggttcaagccgaatacaacacacggcatgttgcatttcatcataatttaaagtacttagcatcactttgaacaaggttttggtggtcacatgtatattcgcaaccttcttaaggtgtccgcaaaagacgtgcgcagcataatactttgcagacctatggttatcaacagcaacatgccactaggcacctttttg

SEQ ID NO: 28615 - DNA, 308 bp, Oryza sativa
  Clone ID: uC-osflM2020116e12a1
actgcatcattcttgagatattccagtagcaatattgattggtcgtaaaaagaaggatacacacagagcaggcaggaaatgatgccaattgtatctaaaaactagccctttttcagagtcagttgaagtatacaggacgcggtgtcaaggtggcctggggaaaaaacagcctaaaactcgccgattgtcaaccactaaaccaaacaacataagctaacacggagcatttatgaagtggaacaggcttcgagctttgggaggacgcctcgccatgcatcagcaatatctttagctaactttgcttggcc

SEQ ID NO: 28616 - DNA, 103 bp, Oryza sativa
  Clone ID: uC-osflM2020116f01a1
ggtggttctttaagtgtttcggggctttccccaagcccacaagagcgcgcaaatcccatggcacaagaagattgatgatacccttgcacttaaaacacaatgt

SEQ ID NO: 28617 - DNA, 330 bp, Oryza sativa
  Clone ID: uC-osflM2020116f02a1
ggataagagcaattcgaatcggccttagcaccaaacaactcaagtagctctcacatcagaccttgataaagtgcacacaggcacgcagttggcttaacagaattctagccatgtactgaagacttaacctaacccaaaacataggtagcatatactacttaactaggttaatgaccagggtgatgatctgctaatgataactaggaaaaatgccatttgcggagccgttcacaggtgtcccagcacattctgcaaaaacagcttcacttcctgtggactcatctgatgatcttgcagcatccttttgtggcattcatccttaagaacttc

SEQ ID NO: 28618 - DNA, 284 bp, Oryza sativa
  Clone ID: uC-osflM2020116f03a1
ggaccaaatctatgcttggatatatacgaaacttaaaaagggtttcataaatctaccatgtaggggatacgggcatatccttcataaggacatttgaatttttgggaactgggatgatccgtatacaagcattatgtctgaagtcacaaacatttcggaccttctcttcttcttctctatctgcagcagcagcagttcagggggggagctggtcctttgcggcggcggcggcgggggaccccggccccggcaacaaggcgtcctttggggggggcgcgttgacg

SEQ ID NO: 28619 - DNA, 66 bp, Oryza sativa
  Clone ID: uC-osflM2020116f04a1
accgttcatcatcaaaaagggcgaaaccgaaagcaaaaccggcacacaaaaggggggcggaccccc

SEQ ID NO: 28620 - DNA, 325 bp, Oryza sativa
  Clone ID: uC-osflM2020116f05a1
ggaccaacacgattcataggtacaccaatcaaaaacacaaagttgttactattacatagtcttagttacaccttacaagtactacaacactaaacaaatagtaaaactctatatgtacggttccctcctctcagacacatatttgtacttctaccaactggtctcatctctcatgagatggtcagttgagcctgcatatctatatggccaagaaaagctgcgatgaatgcaaagcaaatttcttgaaatattggatagatcatcacagtccaaggctgccaatatatccatgaacgatatctcaggtgaaaatgttgccaatgac

SEQ ID NO: 28621 - DNA, 217 bp, Oryza sativa
  Clone ID: uC-osflM2020116f06a1
ggggaaaaaaagggaggggggaacaaattttctaccaagttggggcttatttcccacgggagggagcaaaccccccttaaaaaagggggggggggaaccccaccggggggggtttataaattttttggacccaacattttaaaaggggaaaaactggtggaccaaaaaaatttttttggacaagccggtttcaggggaacctcccccggggtttggg

SEQ ID NO: 28622 - DNA, 273 bp, Oryza sativa
  Clone ID: uC-osflM2020116f07a1
ggtcctaaaagtgtcacagtactactttattattacaatcaccatgtccgataatagtacattaaaaagcattaaggtttctctctgtacacacagagagagggaagagaggtggggaaggagggaagggagcagaaaggagtgatcctggacctaaccatggaagtgacattggggaagcaatggacatctagatgagtggccgacccaagacaataaaatatatctatgggtccattggggttaatgaatgaaatacataggcagtgtctg

SEQ ID NO: 28623 - DNA, 322 bp, Oryza sativa
  Clone ID: uC-osflM2020116f09a1
caaaaggaaaacactgtgtaaaattcactatagttttgaagatgcgtacactgataaaagacccaaacgaaatgggaagaaaatacaactgttacacgtacgtgcaacatctaagtagccggccgattgattaatccggcccaaattgacacaaagaatgaacaattaaacgggcttccaaaacagaattggttggccccaatgaacgcgattcatcgcgtcggcgccgtcgtcgccgctgcacttgtattaactacttgccttttgccggtggacttgaactcgagtaattagtcgccttcgctgacgcagtggaattact

SEQ ID NO: 28624 - DNA, 319 bp, Oryza sativa
  Clone ID: uC-osflM2020116f10a1
gtattgaaagataaggctttatttatctgtagcatccagacaatacaaaactttcccatccttcattattaaggcaaaaccgaatgcaaaactgtcacacaaattatatctataccgcgtcatctaagagcctagcatgatctcatatgaagctccagttttccattggacaagaatagcagtattcagttagaccagaatagtcagctctcttataccctgaaaaagctcaaacaggtcagctcctgtcaagtaggagctgactaataaaggagctgaggcatctcaggatttcaggaagatgacgggacatctatac

SEQ ID NO: 28625 - DNA, 290 bp, Oryza sativa
  Clone ID: uC-osflM2020116f11a1
aaccaaacaaaacaagcagatgtgatgcgaccgaggcagttttattcaacttggccagaaccacttttttaccgactattacttttgcatgggtaaaattaactaggtaccacgggttgattgtacagtatttttcaatgggacagacatgccgaaacatcaactatttcccccactttcactactttccatttaaccgtttttcaaaaccttggcaaaatctggcgttggagctgtcaaacatgttagccgtcaggtcccgtctcctccatgtttacagccacaagcat

SEQ ID NO: 28626 - DNA, 325 bp, Oryza sativa
  Clone ID: uC-osflM2020116f12a1
acggggtggtggaagaaaacttctatattcaaattgaaccagttgtagaaagagcccatattaaggaggggtacagagttcagtcgcatcacataaagaaaaccaatagggggagaaccatgtgaaaactgatcataagaactacaaaaatagcatatttggttgacaaactggaagcctcccttcttgagctcttctatggtggcaaccggcaggatggtttttgagacctgggcaagggaactagatctcatcaggcgacccaccctccaggaaggcacccaacacacttgcacgggcatgagccagcgggacccgaacttgg

SEQ ID NO: 28627 - DNA, 192 bp, Oryza sativa
  Clone ID: uC-osflM2020116g01a1
gggtcattccccttttctttttgatttttgtatgaaaacttgtttggggggggaataccaccaaaaaaagaccaggctctatcccctcttagtcgtcgtactccaacacgtacgaacggtactccactataacgtactaaaccactttagaagagggaaacccggaccatatattttggtagcacttttaca

SEQ ID NO: 28628 - DNA, 335 bp, Oryza sativa
  Clone ID: uC-osflM2020116g02a1
ccactcgaatagttactgctatatagcttgctattagtctacaaaccgcataaacaaggtaatagagatacaacacacttaggattacacaagctttacacccccaaaatcggggcacggcattgcaaacagaacagaattgaaaagcctagttagttttccagaactatacaaccaaactaacggaattatggacaaggtggggagccccaactgaaagaatgaaccattcaaatgctacctacttgccagcttgctagaatacagttatagctctgaaagaattgcaggaatatagtgtgaaagctcagctgtgagcgactgaaagccattga

SEQ ID NO: 28629 - DNA, 299 bp, Oryza sativa
  Clone ID: uC-osflM2020116g03a1
gggccgtattaccgttcctttacagaacgagtaaataaaattttcatttaacatttttaaagggctaatatgtatcatcaccgtttcttcattacattgcaacttcagaatccagacgggaatagacaggatacaattccggaagggctgtcatgccattggggctgcctttgatttgaccgtaaccacgccgccgccctgggcgacgtcgtccatggggacgttaacgtcgatggtctccggggactctacgcggtccgagtacttgcagctgagcacgactaacgccaaccggttcg

SEQ ID NO: 28630 - DNA, 118 bp, Oryza sativa
  Clone ID: uC-osflM2020116g04a1
agaccgacagaagaaggcaccggaagaacaccgggaagaggaagccgaaactgaccaagacgaagaagcagacgcgcaacagggacaacccggagccagaccaaggacagacccaaaa

SEQ ID NO: 28631 - DNA, 327 bp, Oryza sativa
  Clone ID: uC-osflM2020116g06a1
aaagatgaaaaacatatattcaaataaatgtgtactttaacatagcaaaacatggatattttgctagtggacagtaaaacctactatttttccccctttctgcgcgagcaccctacaccttgcgactaccaatctgtagttttgcataggggatggcattgttcatgcataacaatatatatagataacacaagcatgccactgttatatcttgtacagcggcagcaaacttgttagcctggttaggtccaggcaacaagaataaaaggacatgtcaggaaatagaacgagcttaaaaagaaatgcttggaactgcaaatgtgttac

SEQ ID NO: 28632 - DNA, 333 bp, Oryza sativa
  Clone ID: uC-osflM2020116g07a1
aacgtggcagaaaatttttcatccattatttctccatcttgcattccgcaagaagaccgctagttagggggaaaagagtaaaaaaagaccaaaaacgatcacaacacgtcgtcgtactccaacacgtacgtacggtactccactagaacgtaaaacctctctagaagagggaaaccggaccatatatttggtagcactttacaactagggctgttcagatcagccatgtttttttgttttttgttcttccaatcattcatcgaaaatttcctttaaccagagcgccgtttgcaattcccgctccagcgctgatgacgatctctcgttgaatgc

SEQ ID NO: 28633 - DNA, 331 bp, Oryza sativa
  unsure (1)..(331): unsure at all n locations
  Clone ID: uC-osflM2020116g08a1
gcccttnntttttttttttgggggcatttaaaaatggccggctgtccactccctcttcaaaagtaaaaaccatttctgggtcccaaaatattacagaagaacatagcacgaactcaacacgagcaatacaaaactttgacaaatcgatcttcttgctgcccccctatgcacaaatcttcagaaagggatgacgccctcaatcagcagttgatgccgcactgcctgacgtcagggcccctggccttgatggtgaagggatcaatcctgtcccagagcaaggaaaagatggaggcgagcagtacggaccaggtggcaacaatggtgggcgttc

SEQ ID NO: 28634 - DNA, 314 bp, Oryza sativa
  Clone ID: uC-osflM2020116g09a1
ggaatggccaaaacaaccgggataacatatggctactgccatgtagagattattgtaagcttacaaaaattccaatatatgttcggtacaccatagaaaacattactgaggctaactgtgacaagatgggagatgaaaatatatagaggatgaacttaaaacaatcactaacttttaaatacccaactcaagagatagaagttcacagtgccaacccaactatacactgttgctagctttaggccactgagaaaatggtagaaactcataaaacgttatttttttccaatgcaaatggttcgttcgaccgaatc

SEQ ID NO: 28635 - DNA, 340 bp, Oryza sativa
  Clone ID: uC-osflM2020116g10a1
gcacagcgtttcgaggagcgcgacgccgaaggagtagacgtcggacttgtccgtcagctgctggcaccggaagtactccgggtcgaggtagccgaagctgcccttgacggcggtgctgacgtgcagctggttcatcccggggccgtccttggacagcccaaagtcggatacctttgcgacgaagttgtcgtcgaggaggatgttggtggtcttgacgtcgcggtggatgatcccctgcgccgtgccggtgtgcaggtagtggaggccgcgggcggcgccgatgcagatctccagccgctgcttccacgtcaacgccggcaggtccttgccgtagatgtgg

SEQ ID NO: 28636 - DNA, 314 bp, Oryza sativa
  Clone ID: uC-osflM2020116g11a1
cggctgccatagtatgttcgttggattgaaatctcaactgtttgaaaagcacaaaaagtccattgctctacatgaaaagatcagttctatcactaaataatctacaggtgttggaagaaaaagaacggaataaacaattgtgcccacttcttcctcgatcaagaattcaggatcatccagctttagccttactcgccaagaaagcgtccagcttgtcgttctgcacccggccgaggaacctgatgcagatgggcggcgtgacgtcgtacctcgcgagcagcgcgtacggtatggagaagaggccgtcgccgcag

SEQ ID NO: 28637 - DNA, 326 bp, Oryza sativa
  Clone ID: uC-osflM2020116g12a1
ggtaactgtccaggtgaaacagcatccttggaggaaggcaacatcaatatctacatagatcatggtaaatgaaactatgaacaaaccagggttttaccggtgacactaaaaggcaggaagtcacgaggaagcacaaaatgaaaataatgattctgggcccaaggcaacatgcactgactttaccctactacggacaaggaattgtttataactgacagccgaagccctgataccacagaacataaaaatgttaagagaaaagctgacatacaacaatgcaagggcaggttagtttgcaggcttagtcagctgggactcgccatcta

SEQ ID NO: 28638 - DNA, 349 bp, Oryza sativa
  Clone ID: uC-osflM2020116h01a1
ggatattcagaaactgctttacaaccatggattaataatacagattctgattggtgccattaagtttcacatttcacacactacacatcagatgacccccgggcatggcatatatgttctcttttggctgatatagctgagtgatcaaaaggatttgcatccaccagtctgaaacattccggttcggaccataagcacatcaccagcacaaacacagaaaagcatttccgcgtgctttcggaagcttttgatagtgtcaggtatatggccggacagatccccatcatatgcactgcgccaccttttgatacaaattctgtggccagttccttgtcatgttgcttgccac

SEQ ID NO: 28639 - DNA, 316 bp, Oryza sativa
  Clone ID: uC-osflM2020116h03a1
aaaaaccaaccaacgaatagaacttttattgccgggaacttgaaacatcaccaatgcttatgtacacggattaaaagaataagattacaaaccgtaatgctggtgaccacagtgcttccatcagggcagcttgagccaaaacaaagcagctttactttcactgcttccaaccgggcagtttgaaaccaaaacaaagcagctttacttaactatacaggtttcattctattgacaaaacgatttcaacttcgcttggacagtaaaaaaggcaagtttccaacatacaggctgaaattgcccatgacctaaaatcatt

SEQ ID NO: 28640 - DNA, 327 bp, Oryza sativa
  Clone ID: uC-osflM2020116h04a1
aaccgaaacataggaggtttcatttcttcttctcaaagtagtgtagcatctttccttctttcaccattacataagcttaagcaataacagataacaaatcctcctcctcctctaggtaaaatattcaaacacaatacccttataagtacttattattaggaaagtagcgtgcatgggcataaatggcagcggggggcaggttaagaatcacaatgctgagcagcgaggaaacaaaacaccataatgggacagagcaaaagcctccgaaagggagcttttaggcagaaggcttctcccacttgaggggcttcaccacctcccaggtga

SEQ ID NO: 28641 - DNA, 323 bp, Oryza sativa
  Clone ID: uC-osflM2020116h05a1
gatggaggagatcaaactgtgtttatagactgaactgaaacttgattatacagtttgccacgactcctaactcaagcccctatgacgtggatacatatgtacaaaagttttgacacctgagaaaatgatctagtttccctacatggatagctagctagtagctatctcatgtcatggagtgttgccaagaaggcgtccaacttgacattgtcacctcgagacaagaacttgatgcagatgggcgccctggcacccatgagtgtcagcatggacagcaagatcgagccgacgccgtcgccgcagatgagccccgacgccagcgc

SEQ ID NO: 28642 - DNA, 328 bp, Oryza sativa
  Clone ID: uC-osflM2020116h06a1
ccacacgcaaaaacatatatatacttctcattgcaatccaacaaattccacgtgagtggtagtctcagacatattgttgggcatatatgccagggcctcatatgacgtacacacactgataaaaccattccacccaggagaacaaagccgagatgaaaaccatggtacatctttaaaaggctgcacattttgatgagtagcgcagaagtgatgcgttgaacaaacgtcatggatccattttacatatacttgataagaagccacacgataacagcaaggatcactattgcgacgacagatagcagcaggcacatgcatgagcagccac

SEQ ID NO: 28643 - DNA, 209 bp, Oryza sativa
  Clone ID: uC-osflM2020116h07a1
attaaatatatttaatatattaaatattttttaaaaaaaatgaaaaaaaaagaaaaaaaaaaaaaaaaaaaaaaagttaaaaaaaaaaagggaaaaaaaaacgagaaaaaaaaaaaaaaaaaaaaaacaagaggaaaaaaaaaaaaaaaaaagacaaaaaaagccaaaaaaaaaaaaaaagggggagggccgtaaaaactcaaaaccaa

SEQ ID NO: 28644 - DNA, 341 bp, Oryza sativa
  Clone ID: uC-osflM2020116h08a1
ggaagtgataatttaaatacttaatagtaatagactctttgatggagtattacaacatgcagcagtggcattaatacgccagtacattaattaagttacacatatgcaggctccattttggtttcttttaatttatcgtattacagaatttctgtagccttgctgatgatcacttggatatcatgtactagtaattaacaataggatgcatacaaaagatggcccaacgacaacagaagatgcgtgcatctgacattgtctggccttatttggttggtagtactccaattaattaacaagagatgatgcattcttgtgccttagtttcttcacatgcttgg

SEQ ID NO: 28645 - DNA, 326 bp, Oryza sativa
  Clone ID: uC-osflM2020116h12a1
ggggggacattagaagtatatattgattacaattaccaaccaaaaatagggcgcctttacaacactggatgcactacattactaacactaaatgatccatttggttctagataagtaaaaaagagaaacaaggaatgaacaagcccttcaatgggcacccacacacgtttcactacataaatactgtgcatcacctttctactccatagcagatccattcctgcctgccttattgagacacaagtttgtacatgaacagcaatgccaacaccttctgttcagctcacccaattaaatttaccaccaaagcagtaataaagaatgct

SEQ ID NO: 28646 - DNA, 469 bp, Oryza sativa
  unsure (1)..(469): unsure at all n locations
  Clone ID: uC-osflM2020117a01a1
actcacaagaacatttggtagatggttttataatggcacactttacacaaccatcgaatttacttctcagagcaggaaagcaaattcagttccatcaattttcttgaaacaaatcttcaaattattttcaccattagtcaaaagattccagcatcaccttcataaccttgtatattgttcaaaggaagtaactgccaaaagaatcatctaccatagaaactttaggatgggccttttagctactacataaccatctccatcttaactgataaattagctttccggaagtaaacaagttaacatcaaaattctgtgagaactatgaccatgtttaaatgttctgacaagattgactgatccatgaaccatagcaggatttgacttaacagcaaagtacaagcagataaatttcctccaaatacatcattactgttaagtntgatgagaaaagagtagcaccagtcttgat

SEQ ID NO: 28647 - DNA, 395 bp, Oryza sativa
  Clone ID: uC-osflm202002a01b1
gcatttagtaactaataaagtgatgacgatggatggtcccaacgtcgccgtggccgcggtggggctgctagtggcggcggtggcggcgacgctgccggcgccgtcgtgggggcagcagcagccagccaacaagctcatcaccagcacctccggctccggcaaagggttgtccaagtggctggcgatgaaccaggaggagtacgtggagaagaaggcgctgcacaccatggccaccgcggaggagctcggcgggaagaagctggacgcgaacctgacggcggcggaggaggccaaggtgacgtgggtgatcgaccccaaggggacgccgggcgacaccaccttcaccaccatcacggcggcgctggagaaggtccccgaggggaacaagaagcgcg

SEQ ID NO: 28648 - DNA, 489 bp, Oryza sativa
  unsure (1)..(489): unsure at all n locations
  Clone ID: uC-osflm202002a04b1
ctcttatattgtcgtacgtcatccgtcagaattgggtgcatcagccaactggtttaactccaagtcaggaaagaagattcctttaagatcagttacttcgatcatcgatgggttaaagaaatcttacattgagaagttgaggccactagaaaaaacatatcagttcgatgactttgtttcacctttgctgactagcagtgatttcgatgcgaagccaatggtcatgttgctgggtcagtattccacaggaaaaaccacattcataaagcatttactgaagacaaattatccaggtgctcatattggtccagagcctacaactgacagatttgttgttattacttctggacctgatgaaagatgcatccctggaaacacaattgccgtgcaagcagacatgccatatagtggcttgtcatcttttgggacagcatttctatcaaagtttgaatgttctcagatgcctcatncactactggatcatataac

SEQ ID NO: 28649 - DNA, 350 bp, Oryza sativa
  Clone ID: uC-osflm202002a08b1
cgactagcccaaacgcaccgacctggcctccgaccggaattccgatcgccacccgggggttctgctctcgccggccgaacaacgcgtgctcacgctcgccgccgccggtcgccgcctccaaatcgtcgccagagaatccgcgtcctccccagatgacgctgcgcacgggagaagcaacgccgcctccccaggcgcatgccgaggaggagccggggcgggggaagcgccggcgcgtcgtcgcccgtgagacgaggctgcagcaggaggaggaggaggagggagggcacctcatccgagctggacaccagaccgggctggtcgacgggcacccccgtcaatggataagtttc

SEQ ID NO: 28650 - DNA, 392 bp, Oryza sativa
  Clone ID: uC-osflm202002b02b1
agctttgctaagaattaaacatgtgtaatggaagtgtcaggaattcagaatggtagttggcgcatatggaatggatttgatgactgaaaattgtgtaccctgtgaagaattcattgctggttttaagttttaacttcataccgttatcatttcaaggaaagaaggtcttgcaatcgatcttctgaagagctgagaaaggggtgtctcgaggggaacaaccagaattttggccaagccaaggatagacattgaccccactggaaaaagcacaaagaacattgtatatcgagatgttttattctgaacagattgtctaaggttgattagagagtaccatgttcagattcttctgaaggcccagttctttatattattcattggactgttgagct

SEQ ID NO: 28651 - DNA, 428 bp, Oryza sativa
  Clone ID: uC-osflm202002b06b1
cagttcacaagccccagcaccagcaagctgctactcatcatcagcgagagctagctagctgtgtgtgccacttacactgctgctgctgctggttctagctaagctcaccgatcgtcgtcttcgtcatcgccggtgacctggtgaattagtcgagagagatggcggcggcggtgacggtggaggaggtgaggagggcgcagagggcggaggggccggcgacggtgctggcgatcgggacggcgacgccggcgaactgcgtgtaccaggccgactacccggactactacttcaggatcaccaagagcgagcacatggtcgagctcaaggagaagttcaagaggatgtgtgacaagtcgcagatcaagaagaggtacatgcacctgacggaggagatcctgcaggagaaccccaacatgtgcgcgtacatg

SEQ ID NO: 28652 - DNA, 392 bp, Oryza sativa
  Clone ID: uC-osflm202002b08b1
aatttggcgtgtttcatatgacctaagtagcaaaaagataggcattagtacaattagacatggcttgtgggtaataaggcttagctatatggtcattaacttagctataaagttgttacttgaccagatcagctatctggcagaactaagacttacaactggcacatcacttcagagaacatacttgcttagacctgcaacttgcatgtaccatattcttcagatacgttggttgcccatataaaatggggtcttaattcctttacgtgcaataattcataaagtctgaattcatcttcaacagtgctttggtcacaaccaattgaaagctgtagatatttcttaccacacacattccttatggtagggttcaaataaaataaatttactct

SEQ ID NO: 28653 - DNA, 419 bp, Oryza sativa
  unsure (1)..(419): unsure at all n locations
  Clone ID: uC-osflm202002b11b1
acgtttacgcgaaccggagagcgagccagccgacgggctacaacccatgggatgtcaaccccggcgtcgccggcgccggcgccgccccgatgatgcagcagccgatgatgcacgacccgttctacgcctccagcggctacgcggcgccgcacaacgtgcagatgaccgccatggcgcagcagcagcaggccttcatgctccagcagcagatgatgatggccgccgccgccgccgccgccgcggcgcccccgcctcaggtgttccaccaccaccagcagcagcagcagcatctccaggccaacccggcgaacccgttcggcaacccgttcgccgncgtcgtagctcgccaccacccttacggggccgncgncgncgtcggcaacggctacacggggctcatatgatgatcatcatccagc

SEQ ID NO: 28654 - DNA, 213 bp, Oryza sativa
  Clone ID: uC-osflm202002b12b1
gactgtacacgacgaaataccaacaggcgaatcgtgggtattgaaaaacggggtgtactacacctgacaagattaccctttcctttaatatcatgtgctgagggcgacaacatgagtaagaagtctcaccaaccttgactcgggcaaagtacccacatagatcgaggctgttgaccacatcaacgagcccaagatggcatcagacaagcccct

SEQ ID NO: 28655 - DNA, 379 bp, Oryza sativa
  Clone ID: uC-osflm202002c01b1
tcctaggagataaacacacacacaaaaatctaattgaggaaactgattgccactagcttcaccaagaaatggagagggagcagatgaggatggccatcctgaggcaagaacaaacattcagacaacaggttcatgagctgcacagactgtaccatgttcagaaacagctgatgaaacagatgcagatcgccaagctgaaccaagctcaggcaatcgctgccaacgccgaaaccaaaccgaaattcgagatcactttcgccgagaattcaaccaaccatcaccaccaccaccaattctacagcttccagagcagcaagatcatgtctgcccctgcagcagcagcagcagcagcagatcaagaagaggaagaaagaatgcg

SEQ ID NO: 28656 - DNA, 344 bp, Oryza sativa
  Clone ID: uC-osflm202002c04b1
attttatcatactggaagaaatgctcctgctgggggggaaaatacggtcaatccagacattccaattccatgtcatgaggacttgtcagctgttgaagtggtaactgaggagcagttgccacctgctgaaataacagatgttattttacctcaaaaggtacatagctcctcaagcactcctgaagttgcaagatcagatcaactaaaggacgcagcggcttcacaaacccctaaatgttcaattcaagctgtgccatattcaacacctatatcttcaccacaaccactaggccgtcagataatagcagaagaagaacgggctcaattgttgttcggttcatttg

SEQ ID NO: 28657 - DNA, 336 bp, Oryza sativa
  Clone ID: uC-osflm202002c07b1
caaagcccacagatgtagatacaaatagggtttgcttagataacaaagggggactcaggccctgacttgataaatctagcgaacgatgccgtcgtatgcccagctgggcgggttctcatacagcttgggttccgatctctctcttcccctttaagtgcacagatagcatcgtcccttgttttgagtactgatcaactgaaagtcaaagactatgaccctttacgcgcacagggggctcagatccaatactgccatctgtagaatcacttactctatcacattttatccggcattgcaaaccctgagatcgttgggttgtacatcgtggcctgcgag

SEQ ID NO: 28658 - DNA, 342 bp, Oryza sativa
  Clone ID: uC-osflm202002c10b1
ctcttaccatactttgccgactagaactgctggtggggaagttgcagtgcatctgggctcctaaatgacataggaagtggtcaaagaggttatcatagtctcaactcccgaatcatctaaatcgacaagcggcgatttcccggtgaatcctcttgaaaatgtggatgtcagcagcgcgccatctgacctgaagaggaaggagaagtcagtgccacattacctgagagcatccactggttcttgccatgacagctgcaaatttggggcacatcattcccctgaacccaagaagtactggcctgttcgtcgcaagcgacatcatgaccgtgccaatgccgggtg

SEQ ID NO: 28659 - DNA, 312 bp, Oryza sativa
  Clone ID: uC-osflm202002d02b1
cattttccaacattgaaagatccctgtccagttcattagcaatggccaaagccgtcgccctactccttgcagccatcgcggcatcggccgtgttagtgcaagtggaatgcgacgcccccgtcgagaagagcttcaacaaggccctcctcgcccctgtcgataagcgcttggatgaggcaactcaggccatcaacgaggccggcgactccgttgtggctgctgccccaccagcaaaaaaggatgaagttgaagctgccacgtggaagcggagaatgttcgcctttgctgctctcgggatggcccaaggagatg

SEQ ID NO: 28660 - DNA, 442 bp, Oryza sativa
  unsure (1)..(442): unsure at all n locations
  Clone ID: uC-osflm202002d04b1
cgcttatggcggcggtggcggtgaacgggggctcgccgggggctgtcaccgcggcggcggcggcgggaggggtcggcgtcgccgtgggcctcgggggcggcggggcgcagtcgctgtacgtgggcgacctggaggcgtcggtcacggactcgcagctgtacgagctcttcagccaggcggggcaggtgatgtcggtgcgcgtttgcagggacatcagctcgcgccgctcgctcggctacgcctacgtcaacttcaacaaccccgtggatgctgcaagagcactggagctgctcaactttgctcctctgaatggcaaacccattcgggtaatgtactcaaaccgtgacccaagcagtcgcagaagtggatctgctaacattntcatcaagaaccttgacaaagcaatagaccacaaaactttccatgataccttttctgcatt

SEQ ID NO: 28661 - DNA, 428 bp, Oryza sativa
  Clone ID: uC-osflm202002e01b1
ggctatctgggcgttcagcgtggtgacctacttcccgctggacgtgctcaagttcatcatccggtacgcgctgagcgggcgggcgtggaacaacatcaacaacaagacggcgttcgtgaacaagaacgactacgggaagggggagcgggaggcgcagtgggcgacggcgcagaggacgctgcacgggctcaaccagtcgtccaccagctccgacctcttcaacgacaagaccggctaccgcgagctctccgagatcgccgagcaggccgcaaagcgagccgaggtcgccagactgagggagttgcacacgctcaaggggcacgtagagtcggtggtgaaacttaaggggctcgacattgacacaattcaacagagctacaccgggtaacatacaagatgccatcgatgtgttggtggtggtggtcata

SEQ ID NO: 28662 - DNA, 255 bp, Oryza sativa
  Clone ID: uC-osflm202002e08b1
cgttgttcgtctagggtttagtgggttgagatgggggcgcctgatgtcgagtaccgctgcttcgtcggcggcctcgcctgggccaccgacgaccgctccctcgaggccgccttctccacctacggcgagatcctcgactccaagatcatcaacgacagggagacggggaggtcacgtgggtttggcttcgacaccttctccttcgagcagtcgatgcgcgacgccatcgagggcatgaacggcaaggagctcgac

SEQ ID NO: 28663 - DNA, 397 bp, Oryza sativa
  Clone ID: uC-osflm202002e12b1
cgcttacaacggcgagtaccaattgtcctctgtcggggagacctggctcttcgtgggggtctcacatttgttctttgtacgccgccgcgacaagatgaaccaaatacgccgccatgagggagtgcatttcaatccacatgagacacagaggcatccaggcatgcaactcttgctggaagctttactggactcagactgggatcaatgctgatggtcatattcccaccgatacgactgctgctggacgtgaacaaactctcacacactttcttaacggagagtggtgctcaggatcatattcccagaacagggtcctatgatcttcaccatactgaaactgatgaggcgcggactggttaataccagcagctgtttcaacatgagccagtcatcaatg

SEQ ID NO: 28664 - DNA, 324 bp, Oryza sativa
  Clone ID: uC-osflm202002f01b1
cttatagttcagttctaccacgtacaacagcagaggtgagagtgggagaagaagacaagggacgaggaggagcttagctagccagccatggcgaggcgctctccttgcctcgccgtcgccatgctcctgcttggggcgttggcggtggcgagcgccttcattgatgaagcggcggctgctggccgggggctcggccatggcccccgcttcatgagcaagcagggtcgtgtgacatacgagaagctgcccgagccggagccgaagccaaagccaaagccttattctaaacccacgccgaaacctgagcccaagccagagtcggag

SEQ ID NO: 28665 - DNA, 374 bp, Oryza sativa
  Clone ID: uC-osflm202002f03b1
gcctttagccactgagatttgaccttctgtttctaccagaaaaacacaaacagtgaagatgtcgcagcctgctgagctttcccgtgaggagaatgtgtacatggctaagcttgcagagcaggccgagaggtatgaggagatggttgagttcatggagaaggttgctaagacagttgactctgaggagctcactgttgaggagcgcaaccttctatcagttgcttacaagaatgttattggtgctcgccgtgcgtcatggcgcatcatatcatccattgaacagaaggaagagagccgtggtaatgaggatcgttgcacgctcatcaaggaatacaggggaaagattgaaactgagctcttcaagatctgtgatg

SEQ ID NO: 28666 - DNA, 471 bp, Oryza sativa
  Clone ID: uC-osflm202002f04b1
agttgttagggccgtggcatggaaaggtcgtcaggggcttgttgtagttagctccctgctaaatcaaccatgggtaaggataggacacccataaagattgcggtcattggccacgatgactactgcaaggcgaccaccacgggccatttgatctacaagcttggaggtatctacaagcgtaagatctggaggttcgaaaatgaattcgttaatatgaacaaaacgatcttaaagttcggaagggggctccataagattgaagacttcccgcgagagactgatcaccattgatatcgccctgtggaagttcgagaccaccaacaactactgcacggacatggatgcctctggccaccgtgacttcatcaagaacatgatcacggatacctcccatggtgactgtgccttgctcataattgacttgaatagtgatgaatttgatgctggactctacaagatagaaaaacccca

SEQ ID NO: 28667 - DNA, 427 bp, Oryza sativa
  unsure (1)..(427): unsure at all n locations
  Clone ID: uC-osflm202002f06b1
gtttattggactatgtggatgcagcatactactcggcctttcttaacttggcacaggggtcggcctctgctggatcaaaaggatacatatgctttagaaactagaacatatgatgtggaatttggagtatttgatcccatggctaatactcgggctagccgatataaggcatttatttatcttgccttggattcctcagctgtgatctctctttggatgtcatcactatagatgtggacttactcctttcttgaattatttatgttcttgctgctcacacgtgagattgtgcctgaaaactcaatatgaagcgcttatcatctgtctgctgattaattgaaaactagaccttctagagtcctttcaatgattgcactgaggggtntgggtatattccagtgaaaaacatatggaagcttagagatca

SEQ ID NO: 28668 - DNA, 375 bp, Oryza sativa
  Clone ID: uC-osflm202002f07b1
ggattatgaagaacaatgccatcgtttgcaacattggtcactttgacaatgagattgacatgctcggccttgagacctaccctggtgtcaagcgcatcaccatcaagcctcagaccgaccgctgggtcttccctgagaccaacactggcatcattgtccttgctgagggtcgtctcatgaaccttgggtgcgctactggccaccccagttttgtcatgtcctgctcattcactaaccaggtcattgctcagcttgagctgtggaaggagaagagcactggcaagtacgagaagaaggtgtacgttcttcccaagcacctcgacgagaaggtggcccgcctccacttgggcaagcttggtgccaggctgaccaagc

SEQ ID NO: 28669 - DNA, 204 bp, Oryza sativa
  Clone ID: uC-osflm202002f11b1
gttttctccccgacacgaaagcctgagaccaacggggcgattttaacacatcaccggggtgctccccggcttgacttaaaggataccctcccgccggcaactgacaaattgggagggcgagcgaggtgatagtgactccaacgaagaggacgagggatgaccgacacttgggcgaagaaagcgaggctaggagagaagaggtgg

SEQ ID NO: 28670 - DNA, 366 bp, Oryza sativa
  Clone ID: uC-osflm202002g01b1
ctctgctcctccgctccttgcgccatttcgcggggggacaggtgaggtggctagcggggcagcggtgagcatgggaggggatcctgcaggttttctttagaatggcaacatctttggatatgtcactggactatatgattaagaacaacagaaattctagggggagaggaaggggtaggtcacagggaggaggtccaggcacaagtgatggccaaaggttcagctatggttcagggcgtggacgtggtgctggcaccttccgtggaaggggagtaggagtgccttcacgaaggccacttggtgttagtactcggtcatcatcgtatgctattgccaagtcattcaacaaaaccaaagatattgtat

SEQ ID NO: 28671 - DNA, 523 bp, Oryza sativa
  Clone ID: uC-osflm202002g04b1
ccgttctttcccccttcttctcccctctcctacctcgccgagatctagccctagggttcgccaacttcaccggcggcgaggagcacgtcaccggcggcgagcacaggcggagggcgaggggagagagagagggaggaggacatggggcagcagtcgctgatctacgcgttcgtggcccgcggcacggtcatcctggccgagtacacggagttcaccggcaacttcaccaccatcgcctcccagtgcctcatgaagctcccggcgagcaacaacaagttcacctacaactgcgacggccacacgttcaactacctcgtggaggacggcttcacatactgtgtcgtagctgttgaatcagtagggcggcagattcccattgcattcttggatagagttaaggatgatttcacaaaaagatatgctggtggaaaagctgctactgctgctgcgaacagccttaaccgagattttggatcgaaacttaagaacacatgcagtactgtgtggatcattcttgagagat

SEQ ID NO: 28672 - DNA, 303 bp, Oryza sativa
  unsure (1)..(303): unsure at all n locations
  Clone ID: uC-osflm202002g07b1
ccctgcagcgtacacgaaacacgaggcaatgcggcgcagccgccgccgccacccgctgccgccgctggcacctggccttctactgatcctcctcctccacgccttggcgccgccgccggctgccgcggcggtgggcgtgaactggggcttctcctcctcccaccctctcccggcggcgcaggtggtgcgcggcctcctcctccccaactccgtcccccgcgtccgcctcgccgncgncttccccgacgcgctcgcggcgctctcgggcaccggggtcgcggtcaccgtcggggtccccaacga

SEQ ID NO: 28673 - DNA, 445 bp, Oryza sativa
  Clone ID: uC-osflm202002h02b1
ggatttcccgcggagcccggaggcggagatcggcgcagggtggaggacctgtgggaggtggcggacccgcagctgtcgccgtccgagaagctcaactcctgcttcgaggacatcgccgtcgcctccttcccccgcccccttggctcgcaagtaatcgagataccttcaaatgctagtctggctgatactgttgaaatattatccaaaaacaaaattttgagtgcacccataagaaatgttgatgctccagaagatgctagttggattgacaaatacattggcattgtggaatttgctggtattgctatgtggttgctctatcagtctgaggctgcagctaatggcacggctggttctgccgtagggtcaccagtagccaatctagtatctaggctaggctctttcacattcagaaggacatcatttggcagggtagaaaccacca

SEQ ID NO: 28674 - DNA, 415 bp, Oryza sativa
  Clone ID: uC-osflm202002h03b1
ggcagcctccatgccgtgccgcctgcctctgcgcagcgggcttgatatcttacctgcgttttctgcgccgcgtcctcctatctatccttacccctaaggctatagctacaccggctgtcggacaccgccgctccccgtcgccaccgacgacgactcgcgagggagtgtggtgaggactgatgaacttctaaacattgggtatggatggatgtgactgcatagagccactatggccaactgatgagctcctcatcaagtatcaggacatctcggacttcttcatagccctcgcatatttctcgatcccgttggaactaatttatttcgtgaagaagtcattcttcttaccatacagatgggttttgatccaacttggtgcatttatagtcctatgtggagcgacttaacttataaa

SEQ ID NO: 28675 - DNA, 325 bp, Oryza sativa
  unsure (1)..(325): unsure at all n locations
  Clone ID: uC-osflm202002h08b1
accttatacgagtcggacacggagcgagcaagtcggcggagttcttggtccaactggggataagagcagccggccggaagttggaccacacgctccactccaatccaactcgtcgtcgtacgtctccctcctctcgcaccgaaccaaatccccatcgcgccgcggcggtggcgaggcgtgcgtacgtacgtgatgccgggaccgggggcgcacctgctgtacgcgctgtcaggcggggcggcgctgtcgcggatggccggggcggcgcggttcgggcccgaccactgcgccgtntacgccgccaacgcctttctcgggccggacc

SEQ ID NO: 28676 - DNA, 72 bp, Oryza sativa
  Clone ID: uC-osflm202002h11b1
ggcaaatagtcaggcatgacacaaataaataacatcattcggtcatacatagttttaacaatagatataaaa

SEQ ID NO: 28677 - DNA, 523 bp, Oryza sativa
  unsure (1)..(523): unsure at all n locations
  Clone ID: uC-osflm202099a05b1
ggctaggaacagagagaggggggaaagcgaaacgtgcaagttcaaaatcactccccagtgtcccccgaataattccaccgtcgcctaaagccagtttcatcgggaacgcctcgaattttccgatccctangcgggcgggcgggggaggtggagtgcccgcggcgcggcgcggcggtggttagggtttggggctcgtcggcgtcggcgagggcggaggggggggggggantggatnccngagcannacgttccttgcgggtgcaccgcgcggcttgtccgggatggctggtcgtagcttgctcaacgccgcggatcccgcctcgcgcttcgagtaccctctatcctcgccgggcgccggtcgcgctctatctgcctgctcgtcgttcatgcacaccaactttcgtgcagcagccctggctgttcaagcgagttttctggggatgaatttggagaagcgcaacttgtccaaatcaagataatcagtgggggactatgggtcagcanaggtgcatcctacattatg

SEQ ID NO: 28678 - DNA, 439 bp, Oryza sativa
  Clone ID: uC-osflm202099a09b1
ttcaatatccccaaaatccatcggtgcacgaggggaggttcacaaggcgagtcgggtggtaaggtttggtgcgctcccgattgatgcggccatgacgatacggaacctgccggatgcctccagtggatcgtacgacgcgcgaggaggactaccggcaggaggcgaggggccggggccatatcggacgcaggcgcgaggtggtcaccttcgcgcggattagggctaaacgctcgctccaaggcgcccgcgcgagggtgctgttttacccgactctgctctacaacgtcctacggaaccggtttgagtttgagttctcgttgtgggatcgcatcgaccactatgttttgctacggcgctgctcctgtctatattgatgtacagcatcttaagcaacttggagtaaggggcgttgtcacactgaatgaatagtatgaaaatc

SEQ ID NO: 28679 - DNA, 380 bp, Oryza sativa
  Clone ID: uC-osflm202099a10b1
ttctctcaccatcaggggtaaaagcaatacgggggcgtggaaacatcatatcgaggtagtcatcggctcttccaccatgggcctatcttcctcctcgctggccattaaggccactcttaaagtgttcagcgaggggcgcattaccatgcacaagtctgaagctaacaccaagcccgcctcgtactggagcccttggtacggcaccaaccgcgtactatacctcggaccactctccacgctagcctttctaactacctgacctgcgattttctcggcgactacaggtgggacaccgcatggctcttcgccgacccggatacgtactgcaacaacctggagctattagttatccactccacgagggcgatactcggcactct

SEQ ID NO: 28680 - DNA, 458 bp, Oryza sativa
  Clone ID: uC-osflm202099b01b1
gcactcctctcctctcctctcctcagatcggatcgggagggccccaatcccaccaccgatcgatccattcctgctgctcgcggccaccggagaaggagagagagagagagctcgacctcgtcggcgggtgaaggatcgcagcagcagcagcggcggtagagcaggaggagaggcgaagatgtcgtcggtgttcagcggcgatgagaccgcccccttcttcggcttcctcggcgccgcctccgccctcgtcttctcatgcatgggggcggcgtacgggacggcgaaaagcggcgtcggggtggcgtcgatgggggtgatgcgcccggagctcgtgatgaagtccatcgtgcccgtggtcatggctggtgtgctgggtatctacggcctcatcatcgcagtcatcatcagcacggggatcaaccccaaggccaagccctactacctcttcgacggctacg

SEQ ID NO: 28681 - DNA, 260 bp, Oryza sativa
  unsure (1)..(260): unsure at all n locations
  Clone ID: uC-osflm202099b02b1
gttttgggtgtaagtaaagtgatcgaagtaggggggatcgggggtgtaattgtaaaactgtgtatgagaagggggtgtagcttgctgtaaagatagattggtatttttgctagcttgcagatttctctactgattgatgcatggatcattcatatatatatatgtggtgatgtgttgggtcagattggaccagatgttcaatggattactgtgaattgcagctcccnncaaaaaaagataataattaaaacattcaaaaa

SEQ ID NO: 28682 - DNA, 465 bp, Oryza sativa
  Clone ID: uC-osflm202099b08b1
tcgccttcattgaaagatccctgtccagttcatgagcaatggccaaagccgtcgccctactccttgcagccatcgcggcatcggccgtgttagtgcaagtggaatgcgacgcccccgtcgagaagagctttaacaaggccctcctcgcccctgtcgataagcgcttggatgaggcaactcaggccatcaacgaggccgccgactccgttgtggctgctgccccaccagcaaaaaaggatgaagttgaagctgccacgtggaagcggacaatgttcgcctttgctgctctcgggatggcccaaggagatgagaagaaagttgctgcaacttcacttgcctacaagaaagcagctaaagctgtcctcgatgccgccccagctgacaagtttaagttagatggatgaatacttcaaagtggctgctatggaggtaatcgcatcatgagccacacgccaaccttcataa

SEQ ID NO: 28683 - DNA, 493 bp, Oryza sativa
  Clone ID: uC-osflm202099b10b1
ttggacttcgccgtcgaggacatcctcatcaccgccgcccacgtcacgctctacgacttcaacatcgagctcaaccagtggagccggaaggacgtcgagggatcgctgttcgtggtgaagaggaacaagcagccgaggttccagttcatcgtcatgaacaggcgtaacaccgataatctcgtggaggatctattgagtgactttgaatttgaacttcagcctccgtatttgttataccgaaatgctgcacaagaagtaaacggtatttggttttataaccaacaagactgtgatgctgttgcaggtgtttttggaaggatattgaatgcttacgccaaagtgcctccaaagcccaaagtaccttccacaaaaagtgagtttgaggaattggaagctgttcctacatccgctgctatagatggcccccttgaaccttcttcgtcgtccactgttctagtttctaatgcccctgatgaatcattgactgattatt

SEQ ID NO: 28684 - DNA, 392 bp, Oryza sativa
  Clone ID: uC-osflm202099b12b1
tcgccgtcacctattctcgccttggccatgggaggatcgcgattcacgagctggagctggagctcgagcagtcaacagaagaagggaggaaaggaatcctccctcaccccacccgagcaggtattgggctcggaatctgaaggggaattggaagcggaagcggaagcggagccgattctgatgatctgatctgatcgaggccaggggactaatatcttgttgtaaggaacctagtggagtagtatttgatttgcctgctgcatcgacaccaatcaatctccccactactatggcttcttcgcgcgctatcgaggaggaactcgaaactgtaggagatgacaggatcagcgcgcttcctgacgatattctgctgcaaatccttgagagacttg

SEQ ID NO: 28685 - DNA, 320 bp, Oryza sativa
  unsure (1)..(320): unsure at all n locations
  Clone ID: uC-osflm202099c01b1
ctatctatcttaattacctagctactcgatcgatgatcagtctatatatggcggctttgaacggtaaggtggtggtggcggtgatggtggtggcgatggtggtggcggcncctggaaaccccacgaaggaccaccggccgcaggtagggccagtgttcaggactgcacttttaaaagatgaattccaggcacttgatcctcacatgaaaacatcatgggacgtgttcaggtgtcgcaccacgcacgtaccaacataatctgatgctccgattgccgtctgtaaaagatggagtgatagggccatacatatggaaatcata

SEQ ID NO: 28686 - DNA, 520 bp, Oryza sativa
  Clone ID: uC-osflm202099c04b1
ctgtgatttctgaaatcatccctgagatggagatgggtgactttgagtttgacccgtgtgggtactcaatgaatggcatttatggtcccgccgtctccacgatccatgtcactcctgaggaaggtttcagctatgcaagctatgaagcaatgaacttcaatcctagctccttggtctacgatgatttgatcaagaaggtcctggcttgtttctgcccttcagacttttcggtcgctgttaccatcttcggtgggcatggttttgccaaatcatgggcaaaaggtgcagaggttgattcctacatgtgcgatgatcttgttgagcaagagcttcctggtggcggtgtgctgatgtatcagagttttactgctgttactcctggtgctgtgtcaccgaggtcgaccttggatggctggaacagcgatggagcagagatggttgcgaagagcaaagagatgagtgtctgctgggaaggagagaaggcggccaaaaagaaagatgcagatgcctgagaaatcgc

SEQ ID NO: 28687 - DNA, 485 bp, Oryza sativa
  Clone ID: uC-osflm202099c05b1
ctccgtcgtatccgaccaaatccagcgcaaaatccatcatgcgcctcccccccctcgcggcggtcgtcgtcttcgcgtcgttctctcggagccccccctcgcttagattggataggatcgcgccaatcgcggtctcgtcctccatggcatctgcccccccccccctagatttccgtaggaggtagctatctagcttgctgccgcccgtcgcatgaccacgaccctcggatcgtggtggccgttggctccccgattagcttctcccattgccgctcctgtaggctgtagccccagccgatatgcttgcgttgattttgattctgtgccgcctagcgacccgcctctcttcatctagggttcaaccttcgagccggcttctcagttgctgcaagtggaggcggcaagctagagacagcaactgcatatcttgcaagaaaatcggttttatggccataccgatgattttcttgcaagctgtgcagttg

SEQ ID NO: 28688 - DNA, 506 bp, Oryza sativa
  unsure (1)..(506): unsure at all n locations
  Clone ID: uC-osflm202099c07b1
tcgccagcttcttctcaactcgacataagagctccctggcttctctgtaggggggtcactttggtcgatggagggggggacgaagaaagttttcacagttcaggtggaggatggaaagcccaggaaggacggccggccggcggtagggccagtgttcaggagtgcactgtcaaaggatggattcccgccacttgagcctgacatgaaaacatcatgggacgtgttcagggtcgcagcaggcaagtacccagataatcggatgctcggatggcgtcctgtaaaagatggagtgatagggccatacatatggaaatcatacagggaagtgtatgaagaagtcctgcaagttggatctgctttgcagcagctgggggtgaagccaggttcccggattggaatatatggatcaaactgccctcagtggatagtagcaatgcaggcttgcaatggttacagcttaatctgtgtcccactctacgatancgtaggtgcaggagcttgtgact

SEQ ID NO: 28689 - DNA, 453 bp, Oryza sativa
  Clone ID: uC-osflm202099c09b1
ggctccgccgctcgccgcgccgcgcttccgggcgggcgcgctacccctccgcctccgcctccgcacccgcccccagaagctcccctgctggcgccgcgccgcccggcccaacgacgaggattactacttgatcgatgcgccggagtccatcggggacggcttctcgttcagtggggggaagtatacggatggcccgagcaagtccgatgagtggtttgctcaagggagaatggtaaaagctcatccagtatacgggaacaaagggaaggcaaaagatcccatctttgggctcacaatgggagctgaatcacaatcttcaaatgatgttttcaggtggttttgtgtggaggctgggagttcttcgaatcctcctgttctttctattcatggatttccatctcaggcatactcttatcgaaatgtgctacctgtagtatcagacaattatcatgc

SEQ ID NO: 28690 - DNA, 480 bp, Oryza sativa
  unsure (1)..(480): unsure at all n locations
  Clone ID: uC-osflm202099c11b1
tcggactaccgcgcgcgagcagagcatctcctgactcgctancttgctccagtttcggggagctgcgtgacagttcaattgaactctctggattcgttggttacttcgtctgagctgctgcagcgttgaggaggaggaggagcaatggcgctcacgacgttctccatttcgagaggaggcttcgtcggcgcgctgccgcaggaggggcatttcgctccggcggcggcggagctcagtctccacaagctccagagcaggccacacaaggctaggcggaggtcgtcgtcgagcatctcggcgtcgctgtccacggagagggaggcggcggagtaccactcgcagcggccaccgacgccgctgctggacacggtcaactaccccatccacatgaagaacctgtccctcaaggagctccagcagctcgccgacgagctccgctccgacgtcatcttccacgtctccaagaaccggggacatctc

SEQ ID NO: 28691 - DNA, 581 bp, Oryza sativa
  Clone ID: uC-osflm202099d05b1
ctttatctttctctctctctctctctctctctctgtctcggccaatctaagaggcggatgcgaggcggcaaggcgatgccactactctcggaggcgagccacggggtggctggatccggcgtcggcggcaggcggggtggccggatccggcatcagcagcagacgggggtggctggatccggcgtcggcagcaggcggggtggccggatccgacgtcagcatctgttcccgcggcggatccgcgttgacagcgggaatggtacagcggcagcgtaggtgggcgccctcctcagcaagctaccgtggcagcggcgggcgccatccccggtgagctacgatagcagcggggctcgcacgtgcatgggtggatccggtgacgacaggcgccatcctcggtgagctacagtggcgggcatgcaatggcgaagttctcaaatcagtgatttggattatatgtttgcgattctgttctagccttgtgatggttgatggtgattctcgtggctcttgtgatgatcatcaatctagatgtgctgatggtttggggattaaaaaaaaaaaaaaaaaaaaaaagggcggcg

SEQ ID NO: 28692 - DNA, 595 bp, Oryza sativa
  unsure (1)..(595): unsure at all n locations
  Clone ID: uC-osflm202099d06b1
ctcgctttcacgcaagattaaaagctgcccctcttgctgctgcagactgcagtcctgcaagatcagcgcctgaagcaagaagcgaagaatcaaacgagagcctagcagcgtagcagatcgatcgatcgatcgatattatggaggcgcgaggaagcagaggaatgcggctgtggctcctgtccgtggcggtgatggccatggcgatggcgacgaggtcgcaggcgcagctgcaggtcgggtactacgacacgctgtgcccggcggcggagatcatcgtgcaggaggaggtcagcaaggcggtgtccgggaaccccggcatggccgccggcctcgtccgtctccacttccacgactgcttcgtcagggggtgcgacgcgtcggtgctgctggactcgacgcaggggaacagggcggagaaggacgcgcccccgaacacgagcctccgcggcttcgaggtcatcgacagcgccaagtcccgcctcgagacggcctgcttcggcgtcgtcttctgcgccgacgtnctcgccttcgccgnccgggacgccctcgcgctggtggggagggacgcgtaccangtgccggggggggagagaga

SEQ ID NO: 28693 - DNA, 570 bp, Oryza sativa
  unsure (1)..(570): unsure at all n locations
  Clone ID: uC-osflm202099d07b1
tcgattttgtgacatcgagtagtctatatgaaacagacgagttacttgtttttgtgttattcatgcgtagatgagattgtacactgttaacacacatacatcgtgtttccagcaatttttactaggagtaatatctacttttatttttactaggtatcagctagattacagaaggacaataggttctgatggaattgtcgaaatctgccaccaatgtgttttgatttttctggttgatacaggggagggagatgagatgcataaactgcatcttgtcactgtttactagtactggttcaccaaaatttatctgacacaccaatatttttcccagtttacatggcactggggatactagtgtagtataaacatatattttgcacacaacatatacaactctgaagcattgcacaagaggaagctgttaaaatgaagcgataattgtacattatataactntatgtatcgataaatatatattntctggttgataccatgggaggagtggcatctactgatttttttaactaaatttgaacatgttcactatatctgacatacagtaacatg

SEQ ID NO: 28694 - DNA, 295 bp, Oryza sativa
  Clone ID: uC-osflm202099d08b1
tgcaaacccacccaccaacccaacccaatcccatcgagaggaggggacgcggcggcggcggctgatcggcggcgggggaaggaaggggatgggcggcggaggcggggagtaggacggcttccttctgtaactgtatctgatgaatgaaccgtttgcacttcttgccaccttggcgagtcttatgaagtactaccatgatagatactacgccttcttttaatactcatttatggcttacttcatcatgttcaaccttttgttaccgtttgatccaactttttttttttatttgtca

SEQ ID NO: 28695 - DNA, 475 bp, Oryza sativa
  unsure (1)..(475): unsure at all n locations
  Clone ID: uC-osflm202099d09b1
ctgtgaggctagggttcccggcggctccccttgggccaccgtgccgcggccgtctgctcgccgccgacgctgagacaggccgcgccgccgctcctctccacgcgccggtccggtccggtccgtcgccgttcggtgctccgagctcgctcaaccagcggcgatggcgggcggcgacagggagagggatgtcgaggaggagacgaggaaccagatgatgcagaatctcttcggcgaccagtcggaggaggaggaggaggacgacgacgaggccgtcgatttcgtcgacgaggacgaccacccgcatccgcatcagcagcagcagcagcttcgccaccaggtggtggatgacgacgacgacgacgacgcccacgcccgctccggctaccactcggaagaagtggaaggtgaggctgataatggaggggaaggtgaagcggaaggagaaggtgaaagtgangggcaagttgggatggaa

SEQ ID NO: 28696 - DNA, 490 bp, Oryza sativa
  unsure (1)..(490): unsure at all n locations
  Clone ID: uC-osflm202099d11b1
tcgttttttggaggggccgaggcaaccgtcgccgctgggacgatcccgtcccatccggcggcgccgccgccggagatttcctcgagataagccatgggtcaagcactcggtttggtacaagtagatcaatcgacagtagccatcaaggagtcctttgggaagtttgatgaggttcttgagcctggatgccactttttaccctggtgcatagggaagcagatcgctggatatctttccttgcgtgtgcagcagctggacgtccgttgtgaaacaaagactaaggacaatgtttttgtcaatgttgtggcatctgtgcaataccgtgctcttgctgagaaggcatcagacgccttttacaggcttagcaacaccagggagcaaatccagtcatatgtttttgatgtgatcagggctagtgttccaaagatgaacttggatgatgcatttgagcagaagaatgagatcgcanaagctgtggaagatgagcttg

SEQ ID NO: 28697 - DNA, 374 bp, Oryza sativa
  Clone ID: uC-osflm202099e01b1
cgcttcactatctgtcttggcgcgtcgtgtacacgagcgatcaccagacaatggcggtggcgcagcagcagcagcagcagcagaggcaggccaccggtgagtcgctgatgcagaagtgcaagccgtacgtggcgatggtctcgctgcagttcgggtacgccggcatgaacgtgatcaccaaggtgtccctcaaccacggcatgagccactacgtgctcgtcgtgtaccgacacgccttcgccaccctctacatcgcgcccttcgcgctcgtcctcgagcgcaaggtccgccctcgcatgtccttctgggtcttcctccagatcttcgtcctcgccctcctcgggccggggatcgatcagaatttctactacgcc

SEQ ID NO: 28698 - DNA, 414 bp, Oryza sativa
  Clone ID: uC-osflm202099e03b1
atttatctgaacgcccagggccttgctcgctacggcatcatttgccaggagaacgggctggtgccgatcgtcgagccggagatcctcgtcgatggccctcacgacatcgaccgatgcgcgtacgtctccgaggtggtcctcgccgcgtgctacaaggcgctgaacgagcaccatgtcctcctcgagggcaccctcctgaagcccaacatggtcaccccgggttccgacgccaagaaggtggcgccggaggtcatcgcggagtacaccgtccgcaccctccagaggaccgtccctcccgccgtgccggccatcgtcttcctctccggtggacagagcgaggaggaggcgacgctgaacctgaacgccatgaacaagctcagcgccaagaagcgcgggtcgctgtccttcttcttt

SEQ ID NO: 28699 - DNA, 474 bp, Oryza sativa
  unsure (1)..(474): unsure at all n locations
  Clone ID: uC-osflm202099f01b1
gttttctgtttaagcaattgaggctaatgatgtggggatcatctgaccttccttcgcgacttatgaaacaggcgggaggaagtgacaggtcaccgtctttcggaacgatacggcatgactgagtttggcatggtactggctaacccattgcatggtgcacgtaaagaaggctcagtcagcaaaccgcttccgtgtgttgaggccaagattattattgaggatggcgctgcatctacatctgaggtgggcgagctgtgtattaaaagggcatccatttttaagggacattgtacaaaaccagatgttactgcaaaatcatttattgatggtggggtgtgtaacactggcggtacagcaactgtanaggcatgagggacattcataattttagggcgcacaaataggtgacatcatgaaagttaggtggatataagctgtctgcattagaaattgattcagggctgtacagcatga

SEQ ID NO: 28700 - DNA, 543 bp, Oryza sativa
  Clone ID: uC-osflm202099f07b1
ttggcctcagagaggcgcacacaccagtgcagcaatgagaggctaaccgatcagatcatcaagctcaagcaagctaaaatcaatgatcgatgacgtgcctaagcaacagtcgccatggatgctgcctttttgttcgaccgatgctggtgctggtgatggtgctggagctgacgatattgattccgccggctagctgtcttgcaagtccggttcggaacatctcggccatcttcatcttcggcgactcgaccgtcgatccaggcaacaacaacaaccgcctgacgccgtccaaggccaacttcccgccgtacggccaggacttccccggcggcgtggccacaggcaggttttccaacgggaaggccatgagggacatgatagcttcaaaattgggtgttaaggagctaattcctccttatctcggcgatggtcttcaactcgatgatctactcagtggggtagcatttgcttctggcggcagtggatatgaccctctcacttctaaaataacgaccgcgatatcaagtagtcagcagcttcaat

SEQ ID NO: 28701 - DNA, 476 bp, Oryza sativa
  Clone ID: uC-osflm202099f11b1
agctgcccgcctgggtaccggccgaattccggtcacccacgcgtttttttttgccgccgcggcggtgctcgtgctggcgggggctgttgcagtcatagtgggggagccacccaccgatgacagctccgtcctggtggccgcggggctgacgaattgcgtgtcctggtgccgtaccaaggtgacctactgcttgctcggctgctacggcggctgcggcggtcccgctcacatctcgacagcgataccagtctgcgtcatcagctgcaccagcgacgtcttgtgctgcgccaccggctgctccacctagctctgattaaggactaatgaagtaattaaccgcgctaattaataataaatcgcacctacttatgccacatgtggactcgcttgactaattaaatactgccatgcgaatgcgattagtggattatgaaaagaggaaatgtaataactcatggctctctctgtgccatgcc

SEQ ID NO: 28702 - DNA, 435 bp, Oryza sativa
  Clone ID: uC-osflm202099f12b1
tttgagtctcaccacacagaggataggagaggagagagggaccgtatcaagaggagtaggggtagaggagagcagagagccgaggacttggccaggagagagaaggggtagggggagaccgggagagaggttgcagcagaggcagagccaactgcacaaggcaaggggcacgcagccacgcagtgctcctgcttgccctgcccctgcccacccccacctcctcgctgttctactgctgctctactctggctggcaacgcatcgcgtcgcgcgcccaagcaaaggctccatcaaacacacaccaagaaagaagaagaaaaaaaaatcccccgccacgccgggctgctccagatctctcagccgcgcgcgcgattatgtgggattaggtagatgagggcggcgctgttcggtgccgagaggagcggggtagttgacc

SEQ ID NO: 28703 - DNA, 395 bp, Oryza sativa
  Clone ID: uC-osflm202099g03b1
tttggttgtcgtcgcaaacatacaccaccatcgcgcgggtttaaggagtatggggcgggggcccctcccgggcgaagctcgcgctattaatattgctgactacaatgctactcctcgccggggacctgtccctcaccggcaccgcggcgaaccgatgggtgcggttccaatacctgcattagatccgcaacagcggcggaggtggcggtggtggcgggttctgtgtccgccgccaagaggccaataacaacgagctttcttggctctcagtgccagacccgtccaacttcacagaggaactaactgaacggcgtctgacgcccggtgagactgcgtgccgtgactcctggacggagaacatctccatcccttgtcttgactaccccgcccccggc

SEQ ID NO: 28704 - DNA, 522 bp, Oryza sativa
  Clone ID: uC-osflm202099g04b1
gcgttggttgtggcggcggaaacgccggggtcgtgggcgcgggtctcatcaagagaggctgggggaatccctctccgcccgcgggtggtgcttccgtgaccccagcaacgagatcatccaggagctactccacgcctccccctcgccgtcgccggaggccgtggagaccgagctcgtcgacgtggacctgaggctcttcggcggcaagtcgctccctgaccgcgccgccgccgtcgccacggggaggcggctttcctacctccatggccccatcgtcctacaggtagtatcagtaagagatatatatagaagcatcattgatgcgtcctttaagaacccacagcaacaccgccttctgcgctttgttctgactgatggaatttctgaagcagtagcgatagagtttttcccaatcccgtttatcattgaagatattgctccaggtactaagatttgtcttgagaacaagattccaatacataatggcatattgggctaacgtgcgaagaatataagtatcat

SEQ ID NO: 28705 - DNA, 405 bp, Oryza sativa
  Clone ID: uC-osflm202099g07b1
tcgggattcggagcccggcaaagccgagcggcagcagagagcacagctcggcaacaccatggcgccggcagcgctagccgctcccatcgcgtccatttcccccagctccgccgggagggtcaccgccgccgccgccggcctccgctctgccaggatggccagctcacctgtagcccagcccattggcgaggcagttgtgttacggcccaaccagatgttcagatcagtgctgcgacagcggaggcgtctggtggtccgaagcagcagctcagatgaaaccaattccaccaccgaagagaagacgccattcggatacacgaggaaggacgtgctgctcatcggcgtcggcgtgacactcttaggctacggcctcaaatacgggctggagctggtcggagtcgatcc

SEQ ID NO: 28706 - DNA, 459 bp, Oryza sativa
  Clone ID: uC-osflm202099g09b1
ttgccagtctcccccaaatctcctttgcgtccggtcgatttctcagcaaccatgtgggcctactgcggcaagtacaaggacgagctcatcaagaacgctgcctacattggcactcctggcaagggtatccttgctgcagatgagtccactggcaccattggcaagcgctttgccagcatcaatgtcgagaacgttgaggagaaccgccgctctctccgcgagctgctcttcaccacccctggtgccctccagcacctaagtggtgtgatcctcttcgaggagaccctgtaccagaagaccaaggacggcaagcccttcgtcgatgtcctcaaggagggtggtgtcctccctggcatcaaggttgacaagggtaccgttgaggttgccggcaccaacaaagagaccaccacccagggccacgatgatcttggcaagcgttgcgccaagtactacgaggcc

SEQ ID NO: 28707 - DNA, 477 bp, Oryza sativa
  Clone ID: uC-osflm202099g11b1
tttggtcgccaatggacgtgacattgaggtcgcgacggtcgatgtcgcgataggcaacacctaccttgccctcgcccgcttcgacgaggctgtcttctcctaccagaaggcgttgacagtactcaagtctgcccgtggtgatgaccacccttcggttgcatctgtctttgtccgcctcgcagacctttaccaccgaacagggaggctccgcgagtccaaatcctactgtgagaatgcactccgtgtctatgcaaagcccgcgcctggcgctgcccctgatgaggttgctggaggcctaatggagattgctgccatctatgaggcgcttggagaccttgatgaggcactgaagcttttgcaaagggcactaaagttgcttgaggactcaccaggacagtggagcactgttgctggcatcgaggcacaaatgggtgtgttgtactacatggtagggaggtatgccgattcaaggaactc

SEQ ID NO: 28708 - DNA, 424 bp, Oryza sativa
  unsure (1)..(424): unsure at all n locations
  Clone ID: uC-osflm202099h03b1
cccttcgattaaggaaaaaaaaaggaggaaaagaagagaggatgaaagcgaanaggggggagagagacgctcgtctccacgtcgccgccatggccgcccgcgccgccgccgccgcgttcctgctgctgctcatcgtcggcgcgggcaccgcggcgccggacatgtcgatcatctcctacaacgcggagcacggggcgcgggggctggaggaggggcccacggaggccgaggcgcgcgccgcgtacgacctctggctcgccgagaacggcggcggctcgcccaacgcgctcggcggcgagcacgagcgccggttcctcgtgttctgggacaacctcaagttcgtngacgcccacaacgcccgggccgacgagcgcggtgggttccgtcttgggatgaaccggttcgccgatcttaccaacgagga

SEQ ID NO: 28709 - DNA, 392 bp, Oryza sativa
  Clone ID: uC-osflm202099h10b1
taccggacctgaattcccgacccaacccacccgtcttgtttttacaccaccacccttccaaaaccgagctgggttgacatcaaaccccggggcagggaaaccacccccctatgaccggtgacacaccgcccttcgaacattacccccctaatactcggactcgacgttgtgatggcgcatgctcccattgctaactaagattctaacttagatgctatattcataaaacgcgacacgctacatctagaccactgtctattctacaaagcgcaataaacaaatgattcaatcaacgccaactatcttactactgtgaattaccattatggaaatgatactattaggactaaactcacatctcatactacaacttaaagacaaccacatttcct

SEQ ID NO: 28710 - DNA, 530 bp, Oryza sativa
  Clone ID: uC-osflm202100a02b1
caaaagcttctttgcatctatctattaaattattgtccctttctcttctccatggatttttgcaaggcgagatggaaggttccggcgctgtgcctggtgactgttcttctccaagcaagcctctctgcttgcgcgccaactcccaagacttacatcgtgcagatggcggcgtctgagatgccgagctcgttcgatttttaccatgagtggtacgcttccacggtgaagtcggtgagctcttcgcagctggaagatgaagaggatgatgcttccacgaggattatctacaactacgagacggcattccatggcttcgcggctcagctcgacgaggaggaagccgagctgatggccgaggcggacggcgtgctggccgtgatcccggagacggtgttgcagctgcacaccaccaggagccctgacttcctcggcattggcccggaggtcaagcacaagatatggttcgacagcctcgccgaccacgacgtcgtcgtcggcgtgcttgacaccggcatatggccggagagccc

SEQ ID NO: 28711 - DNA, 253 bp, Oryza sativa
  Clone ID: uC-osflm202100a07b1
ttggtatggggaggggtggggaaggtgaagggggggggttgattcaaaatggggggggctttcaacaacactgtgggtacatgtggcggcggggagcactatacttatctcccactatactcccaccccatcaaagaggctctgggacacaaccagaatgcgctcaccatgctctgcgtctccaacgacttctgccagaacgcggggctcgtaccttgggtagttctccaacccccttccaccgtggctcatc

SEQ ID NO: 28712 - DNA, 469 bp, Oryza sativa
  Clone ID: uC-osflm202100a12b1
ttgggttcttcctcttccgccgccgccaccggggccggagatattagaagatggccggggttgataccttcctctttacctcggagtctgtgaacgagggccaccctgacaagctctgcgaccaagtcttagatgctgtgcttgatgcctggctcgccgaggaccctgacagcaaggtcgcttgtgagacctgcaccaagacaaacatggtcatggtctttggtgagatcaccaccaaggctaacgttgactatgagaagattgtcagggagacatgccgtaacatcggttttgtgtcagctgatgtcggtctcaatgctgaccactgcaaggtgcttgagaacatcgagcaacagtcccctgacattgcacagggggtgcacggccactttaccaagcgccctgaggagattgggcttgtgaccagggacacatgtttggatatgcaactgatgagacccctgagttg

SEQ ID NO: 28713 - DNA, 347 bp, Oryza sativa
  Clone ID: uC-osflm202100b01b1
gtgtgtgtgtgacagtgagtgatggattgatgtgggatgcctcactagctgagccccccctcctcctcctccttcctttgtggcaaatctcatcagcaacaggggcctcttggtgtgactactttgtttacatggtgggtctctccttttcttcttctcagcgtcgccgtcgtcttctttctccttcattcattcagacttcatcagagtagtagtagtaggaaggagatagtgtagacaacaagtgtgtgtgtgtgtgagagagagaggtagagggatggagagggggaacgaacccccttcttgcttttcttcataggtggtgggcttcaacctttcggcaagat

SEQ ID NO: 28714 - DNA, 99 bp, Oryza sativa
  Clone ID: uC-osflm202100b03b1
gtttaccatagtacgcaactccgaacatcactcccacgcgtgctctttaaaatacaggaccgggttccaaaacacaccccaacatgcatattggtagct

SEQ ID NO: 28715 - DNA, 581 bp, Oryza sativa
  unsure (1)..(581): unsure at all n locations
  Clone ID: uC-osflm202100c02b1
agtatacatgcggcagcgacgagccatggccacacacgcggcgctcgcggcgtcccgcattccggccaccgcccggctgcacagcaaggcggcgtccaagcagagggtggacttcgccgacttctccggactgaggccgggatcgtgctccatcagccacgccgcgagggaggcgtccttctccgatgtccttggctcgcagctcgtcgccagggctaccggagagaacgccgtgagggcgccggctgaggcgaagctcaaggttgccatcaacggcttcggccgcattggccgcaacttcctccggtgctggcacgaacgcgagaactccccgctcgaggtcgtcgtcgtcaacgacagcggaggcgtcaggaacgcatcacaccttctcaagtacgactcgatgctcggcaccttcaaggccgacgtcaagatcgtcgacgaccagaccatcagcgtcgacggcaagctgatcaaggtcgtctccaacagggaccccctcagctgncatgggctgagctcggcatcgacattgcatcgagggtacccgagtgtcgtcgacggccccgcgccggaagaca

SEQ ID NO: 28716 - DNA, 246 bp, Oryza sativa
  Clone ID: uC-osflm202100c03b1
ggttgatatagttaacaagcaatgggcacaccagggccgggtgaatttaataagtcgtcgcgtttaaacacaaccgggaaaaacttaaacgcactggtcgagctaacacagggcaggggggaggcctacacaagctccaacgcaaaatcaactgaccaagcgagagtgctgaatgataacaacagtgaccaacattgagaacaaaagcatcgccttagaggcgcaccacatcctcacacaagaaaa

SEQ ID NO: 28717 - DNA, 414 bp, Oryza sativa
  Clone ID: uC-osflm202100c07b1
tcgcaccccagcagcagcagcagcagcagctgagctggaagcatcagagcgaggtagacatggccgccgccaccatggccctctcgtccccggcgctggccggcaaggccgccgcgaaggtgttcggcgaggggcgcatcaccatgcgcaagtcggcggcgaagcccaagcccgccgcgtcggggagcccgtggtacggcgccgaccgcgtgctctacctcggcccgctctccggcgagccgccgagctacctgaccggcgagttccccggcgactacgggtgggacaccgcggggctctccgccgacccggagacgttcgccaagaaccgggagctggaggtgatccactccaagtgggcgatgctcggcgcgcttggctgcgtgttcccggagctcctcgcccgcaacggcg

SEQ ID NO: 28718 - DNA, 420 bp, Oryza sativa
  Clone ID: uC-osflm202100c12b1
tcgctttctcctcatcctccccaaccactgcaggcggggcggcgttctcctcctgctgctgctcctcgcagaatgcaacgggcaattcaagctatcgggtcacatggcagtctcctcaagtctgctgttctgcgacacatcagtgctccaaaaccatctattttacctgctgtatattcacgctccatgtcagtttcatctgctcaaatagaggagagtggatttgagactgccactgtggcagatattttgaagtctaaggggaagagggctgatggatcttggctctggtgcactactgatgacttctgctatgatgctgtcaaatctatgaacgcaacacaatgttggagctctggtggttgtaaaccctgacaggataaatcaattgctggtattggtactgagagagattacctc

SEQ ID NO: 28719 - DNA, 448 bp, Oryza sativa
  Clone ID: uC-osflm202100d08b1
tcgcataaagcttttgcttgttagcaatatgggcacggattcacagtttacacatgaagaagtctatgggcatgttaggacatcatctctttgatcatgcaacattgcaaaatgggcagtgatcccttacaaaagaggtcccattgccaaataccacgatttacatcgaaaattgcaattgtttggatctcaaagttctgtatatcttctgtctaggatctgcaaaattctctagtaagcttcaccccagcacctacatcattgttctagtatggatcaaagttgtaaatacatctcagtttaacgctatttcacgattcagataggaaacaccggtttcacagtagaagagctctgttgtttaatgacatcctcaattgatggtcctttttcatgtacaaagttgacagattctgacagcctattcagagggttactagtgcaatga

SEQ ID NO: 28720 - DNA, 390 bp, Oryza sativa
  Clone ID: uC-osflm202100d09b1
tcggtttatcacaagcaacaacggcacggccgggcagtctttcatcatcaagtgccctggcgccgaacagcaaacgagggagaaggtgattgccgccatgtctcgcgtgatgaactcagggtagaatcagttggggagtgggcgccaccggtagaggcagctttacttcgttcgctggttgcagacaagcagcaagcagtcggttggacggacacccatccacccacctttcagcgctgttgatagaagaagtttgtaggcagagaaagaaagctcagattctgacttagcgatccaaggggaagacaaagctctcaagttaaaactgccattgttgtatggtaggcttttgtgggcggcgaaggttttctctttttggtggttattggg

SEQ ID NO: 28721 - DNA, 424 bp, Oryza sativa
  Clone ID: uC-osflm202100d10b1
tcggccgcggaggcgtcgtcgtctcccgtggggggcgggaggctaatgctatggggtccaagactaaggggtgctgcgggtggctgatcgtggcgctggtggcgtcgctggtggcgacggcggcggtggtggccatcatgaagaagaaggtcggcggggggagcgggcgcaagctcaagccgctgccggtgcccggcccgcccggggccatcgactccaagtacggcgacgcgctcggggtggcgctccagttcttccaggtccagaaggcggggaagctggagaacaaccagatcccgtggaggggggactcggcgctggatgatgggaaaccagcggggctggatctttccaagggaatgtatgatgctggtgatcatatcaagtgtagtttccctatggccttcacggcaacggtgctctc

SEQ ID NO: 28722 - DNA, 391 bp, Oryza sativa
  Clone ID: uC-osflm202100e06b1
ctttcatttctgcctatatatccacgaggccacgggtggggtgaggtcacttcagaattttactgctgcagacctttgccatgggggagctatgctacctcacccgtcaatctgttgcacggagacaaggcgtgacgcatgctaaaagaggttacaagttgatacctgcgcgcatcatgttctcgacaccttgatctcgaagcggctttcgcccctttcaacccccgtgcaaagattggcactaaaggtggtacttagtcaatcgctcgactggtagccatgcattagcgactctaaaggcccataatgaactacagccttgatagaggcctgtctatgctgctcggtacactgagaccggccattagtattgattacctctaacttccac

SEQ ID NO: 28723 - DNA, 448 bp, Oryza sativa
  Clone ID: uC-osflm202100e10b1
ttggttggatgcgccctcgccgccatcaccgagctcaatttcaatatgattggattcatgggggcgatgatctcgaacctggcattcgtgttccggaacatattctccaagaaggggatgaagggcaagtcggtgagcgggatgaactactacgcctgcctctccatgctctcgctggtcatcctcctccctttcgccttcgccatggaggggcccaaggtgtgggctgccggctggcaaaaagccgtcgccgagatcggtccaaacttcgtctggtgggtggcggcgcagagtgtgttctaccacttgtacaaccaagtgtcctacatgtcattggacgagatctcaccactgacattcagcatcggcaacaccatgaagcggatctccgtcattgtcgcctccatcatcatctttcacacgccggtccagcccatcaacgccctcg

SEQ ID NO: 28724 - DNA, 495 bp, Oryza sativa
  unsure (1)..(495): unsure at all n locations
  Clone ID: uC-osflm202100f02b1
ctttctatctcgcgatcgattcgatcgtcgtcgacgctgggattaattatcgctcgcagagaccaccaccagtagcagcatccagctgattaaattaagctcgcggcaatggcgcaggtgagcaggacggtcgtggcggcgctgctcctcgtcgccgccgtggtggcggcgtcgcccgtggcgtcggcggccacgtacggctgcttcgaagactgctacgagcgctgcgcctccgggaagaaggacgaggcctgcaccaaaatgtgcaaggaggcttgcggcggcgccgccacggacggccatgcccccgccgctggcgctggtgctggcgccggcgctggcgccgccgtcggggctggcgctaaggctgccatcggggttggcgccggagctggcgctggcgctggcgccggcgtccgagctggcgctaaggccgccatcggngctggcacccgagctggcgctggcgctggtgctggcgccggcgtcggggct

SEQ ID NO: 28725 - DNA, 536 bp, Oryza sativa
  unsure (1)..(536): unsure at all n locations
  Clone ID: uC-osflm202100f05b1
gtttatctctcctccgccgccggcaatggcgtctccgcggcggcgctccctgccgctgccgctcctcctcctcgtcttcccggtctccctcttcgtcgtccttctcctccaccaccgctcctcgatccccgcggcggagctcctctccggccccgggccggacccgcgccgcttctccctcctcatcaaggtcctcgcctacgaccgcccggggccgctccgccgctgcctccgctcgctcgcagcggcggactacgccggggaccgcgtggcgctccacgtcctcgtcgaccacccgcgccccaacgcatccctcgatgcgtcgcgcgagatcctcgccgaggccgacgccctccggtggccgcacggngagaagcgcgtgcactaccgcgccgncaacgcggggctccaggcgcagtggatcgaggcgtggtggcccggctccgacgacgagttcgccttcgtcgtcgaggacgacctcgaggtgtcgccgctctactatcggntcctcaagccgctggtcatggcgactacta

SEQ ID NO: 28726 - DNA, 317 bp, Oryza sativa
  Clone ID: uC-osflm202100g03b1
cttattattattcatccatactcgttgcttctctgtttcgtttccttgaaacatacgtagggcgactgacccggacgctgctccgtcttctgcggggctaccggagataatggatggccgccgccagccaccgactgaacgctgggtccgccaaggagaagaccaggttgtctgacaagaagatggagctgtcttagccggagaagggctgtcctgcacgccaagaccaattgtgatatcatgcgccgactggcgggtgtgccgcgtcgatgaccatcctactggagccacgcgaggtgctgacctcacgggcatcg

SEQ ID NO: 28727 - DNA, 455 bp, Oryza sativa
  Clone ID: uC-osflm202101a05b1
cgctcacctgaagctctcccctgtacccacccaccgccagcgcggctactaccccgccggcgctatcgccgccgccatcacgagctactagtagctaccgggctatcgccgccgcttgccctgatgccgcagcaggaggtcgccgaccagatcgccgccgcggcggcggagcggggcctgcagaggagcggctcggccagccgcctcaacgcgggggcgccggagttcgtgccgcgggtcgccgcccccgtggtgccgccgccgccgccgccggtgatccgcgtgttcgccgcggcgcctcccccgccgcgggcggccttcttcgcgccgccgccgccgcatcaccggccgtacgagtactacgcgcctgtgaggggcggtcggttcgccgacgccgtcgtcgtcgaggagcatgaggcggaagtggacccggatgcgacggaggcgggggagcc

SEQ ID NO: 28728 - DNA, 500 bp, Oryza sativa
  Clone ID: uC-osflm202101a08b1
tgtttatcacactcaaattgagtaccgttgggggggagaaggtttaaggaagacactaattcgatgggcagcagaaaaaagcgagggtggtcaagtggtacttgtacaatatgaagaatgttcatccacttattgtatttcatttagagtgaagaatgctgaggctgtacctcctgtgaaagagcttaggaagacaatgagaattcaagcactgcgctgtcatgttttgtacagtcatgatggtagcaagttgaatgttattcctgttttagcatcacgatcgcaggctctaaggtacttgtatataagatggggggtagagctgtcaaatatgacagtggttgttggtgaaagtggtgatactgattatgaaggactattaggaggcgcgcacaagaccattattctcaaaggctcatttaatgctgttcctaaccaagtccatgctgccagacgttattcattacaggatgtcatattctttgacaaaccaggaatta

SEQ ID NO: 28729 - DNA, 441 bp, Oryza sativa
  Clone ID: uC-osflm202101b05b1
tcttcttggagaaagaaaccacctgatcgagcccgtgtctttgcagccgcaggagaggaggacgagtcgttcgttgtgcagcaggaggcggcggcgaagatgtcgtggcagacgtacgtcgacgagcacctgatgtgcgagatcgagggccaccacctcacctccgccgccatcgtcggccacgacggcaccgtctgggcacagagcgccgccttcccgcagttcaaaccggaggagatgaccaacatcatgaaggacttcgacgagccggggttcctcgccccgaccggactgtttcttggaccaaccaagtacatggtcatccaaggtgaacctggcgctgtcattcgtggcaagaagggatcaggaggcatcacggtgaagaagaccgggcaggcgctggtggtcggcatctaccaccagccgatgacccccgggcag

SEQ ID NO: 28730 - DNA, 520 bp, Oryza sativa
  Clone ID: uC-osflm202101b12b1
tcgactaacgcaaaccgcatcgatcaactccttccgggagtcgtagcaaaatccctagcgatgtcgtcgccgccgcccgccgtcgtcgccgcgatggccgttgacgacgccgacgacgaccagctcgtctccatgtccacggaggacatcgtcagggcaacccgcctcctcgacaacgagacccgcgtcctcaaggatgagctgcagcggacgaaccttgaggtggaatcctacaaggagaagatcaaggagaaccaggagaagatcaaactcaacaagcagctgccttaccttgtcggcaacatcgtcgagatattggaaatgaaccccgaggatgaggctgaagaggatggtgcgaacatcgatctggattcacaaaggaaaggaaaatgcgttgttttgaagacatccacaagacaaacaatattccttcctgtaatcgggcttgttgaccctgaaaagcttaagcctggggatttggttggagtcaacaaagacagctacttgatactagacacgc

SEQ ID NO: 28731 - DNA, 511 bp, Oryza sativa
  Clone ID: uC-osflm202101d03b1
gttaatggaccctgacctccggagatcgggaatttttcctcgcgcgatccgccgccgcttctctctcgcgcggagtctcttctctcgcacgcgaccaatgttgggcgccgccgcgcctcctcctccggcgagacgcgccaccgccgggactcctccggcgagacaccaccagcgctgccaccatactaggcttctctagaacagccaccgtcaatcttgctcccacctgaagcaacacgacgcgctctctccagtggcagtgcgccagtgccccatcccccaggtcaacctcgatagccaccaagagcggttctccagtggccgtcactaagcatcgccagcaccgtgactcagttcgactggttcatatgctttaacacataagctacgaggtaaattaaacaacattgattaagaagggaacacgcgcgttcactgcttcgacagatcaactacaagaattgtcaaagaatcatttttgctggagttattaggaacattttatgtttag

SEQ ID NO: 28732 - DNA, 498 bp, Oryza sativa
  Clone ID: uC-osflm202101d05b1
atttattaatgcaaaacattcaggtcttagaaagtaggttggctggtaaagacttggtaaggctggaaagagatatccttgtacatatcgaacggctgggagctttgaaatcattcaacgcgtctatctccagggccactctaacacaaacatatgaatcagagttttcacttcctgggaatattattaagcttgatccagagattcctctcgaggagcaaaatgttgtggtaattgttcgaagtgggaaaagtcaagagaggaaactgaaaagaatgaaagcatcagaaaagggctctcgggtctccgtgaaaacaccctcacgaaaatcaaagaagtccagtagtagtcaatttatagctgagtggaaaaactatccaggccgaagaaggagcattgtacgagaacaatcagcattgctggttactatcaaggagtgtgcaaaccttgagaaaataagagaaaacttgttgaaggatgggagtgaagtcagccatg

SEQ ID NO: 28733 - DNA, 472 bp, Oryza sativa
  Clone ID: uC-osflm202101d07b1
tgttttggcacgaatagatgctgcagacccatgcacagtacctggagtgtacaaacgcttcatgtcagaccaatatgttgatatagaggcaaggggacccatgactggcattgcggactacatctggatgaggagcgggacctacgtgctccgatactagactttgcaacctacggactacgctgacattgtggataggcaagataattgcctcttttggcattaatatatcatggcctgggacatgcacattgtgagcgcgacgaggaggaaattatcatgagaaccatcacactggttgagtttgggcaaaaccaacacagcgtgcagtaatgataggcagatgcaactgacctggataacttgagctgacaaccgtgattctacgatgacaagctaccagtacttatacttttgtatactgcaagactgctgagatcctcttggaataagtggatgaagctgcttatgt

SEQ ID NO: 28734 - DNA, 481 bp, Oryza sativa
  Clone ID: uC-osflm202101d08b1
tttcttaacgggaagcgcccgttgtttggcccagaccttcccatgaccgacgagattgctgacgttctcgacacgtttcgtgtgatagctgagcttcccgctgacaatcttggggcctatatcatttccatggcgacagctccgtcagacgtgcttgctgttgagctcctccaacgtgaatgccatgtgaagacgccacttagagttgtcccgctgtttgagaagttggctgatcttgaatctgccccagcagcagtggccagactgttctctatagattggtacagagaaaggataaatggcaaacaggaggtcatgattggctattcggactcgggtaaggacgccggtcgtctctcagcagcttggcagctgtacaagtctcaggaggagctcatcaacgttgccaaggagtttggggtgaagttgacaatgttccatggtcgcggtgggactgtctgaagaggcggaggtaccactc

SEQ ID NO: 28735 - DNA, 510 bp, Oryza sativa
  Clone ID: uC-osflm202101d09b1
tcgtgtttacctcatgaagatcctgacggagcgtgggtactcattcaccacaacggccgagcgggaaattgtgagggacatgaaggagaagctttcctacatcgccctggactatgaccaggaaatggagactgccaagaccagctcctccgtggagaagagctacgagcttcctgatggacaggttatcaccattggtgctgagcgtttccgctgccctgaggtcctcttccagccttccttcataggaatggaagctgcgggtatccatgagactacatacaactccatcatgaagtgcgacgtggatattaggaaggatctatatggcaacatcgttctcagtggtggtaccactatgttccctggcattgctgacaggatgagcaaggagatcactgccttggctcctagcagcatgaagatcaaggtggtcgcccctcctgaaaggaagtacagtgtctggattggaggatccatcttggcatctctcagcacattccagcagat

SEQ ID NO: 28736 - DNA, 504 bp, Oryza sativa
  Clone ID: uC-osflm202101e05b1
gttgatggtcagctggaattcaaagctgttctctttgttcccaagagggcaccattcgacctctttgatacgaggaagaagctcaacaacatcaagctctacgtccgccgagtcttcatcatggacaactgtgaggagctgatccctgagtggctgagctttgtcaagggcattgttgactccgaggatcttcccctcaacatctcccgtgagatgctgcagcagaacaagattctcaaggtcatcaggaagaaccttgtcaagaagtgcgttgagctcttcttcgagattgctgagaacaaggaagactacaacaagttctatgaagccttctccaagaacctcaagctcggtatccacgaggactccaccaacagaaacaagattgccgagctcctgaggtaccactccaccaagagcggcgatgagctgaccagcctcaaggattacgtgacgaggatgaaggaaggccagaacgacatatactacatcaccggcgagagc

SEQ ID NO: 28737 - DNA, 488 bp, Oryza sativa
  Clone ID: uC-osflm202101e07b1
tctcagctcacctactccagatctcgccatggcggcggcgtcgtctcggtggcagcggatggccgcggcgtgcttcgtcctcgccgcgcttgcgatgtgggcggcgcccgcggcgtgcggcgcgcgcgcggttcctcgtggggcgggggcgggggtggcggcgcagcaggcgaacgcgtcgtcgtcgtcgtcggcggcggcggacgagttcctggcgccgcacaaccaggcgcgggcggcggtcggggtggcgccgtgcggggagcggcgacctggcggcggcggcggcgaggacgacgtcgcagcagcagggcgggcaggggcggcggtgcgggttcgcggacatgagcgggagcccctacggcgcgaccaggggtgggcgagctacccggcgcgccccgggaggtggtggcgtcgtgggtggcgcagggaggtactacgcccacgccaacaacagctgcgcgccgggcagcagtgcggcacctaca

SEQ ID NO: 28738 - DNA, 511 bp, Oryza sativa
  unsure (1)..(511): unsure at all n locations
  Clone ID: uC-osflm202101e11b1
tttctcccaaggaggcagcggtggtggtgccgtccgccggcgacgccaccctgggcgggcacctggctcggcgcctcgtgcaggtgggcgtgagcgacgtgttcgccgtgccgggggacttcaacctgacgcttctggaccacctgatcgccgagcccgggctccgcgtggtgggctgctgcaacgagctgaacgccggatacgcggccgacgggtacgcgcgggcccgtggcgtgggcgcctgcgccgtgaccttcaccgtgggcgggctgagcgtgctgaacgccatcggcggggcgtacagcgagaacctgccgctgatctgcatcgtggggggccccaactccaacgactacggcaccaaccgcatcctccaccacaccatcggcctcccggacttctcccaggagctccgctgctttcaacccctcacctgctaccaggccgtcgtcaacaaccttgacgacgcccacgaccagatcgaccgcgccatctncaccgccatcaggga

SEQ ID NO: 28739 - DNA, 87 bp, Oryza sativa
  Clone ID: uC-osflm202101f01b1
aacggtctttttacgacagaggaaggggaacaggggggggagccagcgacaaacacgggggcggacaaaaacgaggaaagcaaaaac

SEQ ID NO: 28740 - DNA, 474 bp, Oryza sativa
  Clone ID: uC-osflm202101f03b1
gtcgtttccgcggcgcccacgcggccgtcggcgctggtgtgcgggacgtacgcgctcaccaaggaggagcgggagcgggagcggatgtgccagctgttcgacgaggcctccgagcgctgccgcaccgcgcccatggagggcgtctccttctcgcccgaggacctcgactccgccgtcgagtccaccgacatcgacaccgatatcggctcactcattaaaggaacagtgttcatgaccacttcaaatggtgcatatgttgatatccaatcgaagtctactgctttcttgcctttggatgaggcatgccttctcgatgtcaaccatatagaagaggcagggatccgtgcaggtttggtagaagagttcatgattattgacgagaatcctggtgatgaaactttgattttgagcttacaagcaattcagcaagaccttgcctgggaaaggtgcagacagcttcagcagaagatgttg

SEQ ID NO: 28741 - DNA, 396 bp, Oryza sativa
  Clone ID: uC-osflm202101f05b1
attaattaaaaaaaggaaaatcgtgtctcgtctcgtggcgtcttcgtctcccccgattcccgagcagcttctcgaaaccctcgcggcctcgattccggcgatggcggagcccaacccgcaagtggagagggaggtggaggtggaggaggtgaggacgcccaatcttgtgtactgggagtttgtgcaggaggctgcagcgtaggcgatgtatttgcctatcgggggtgttggcgcttgtcatggaccactccggtgcgttccgtcccggagtttaccccgtcaagttttccgtgaagggtttctggccgctaactttacggtcggttccatggcttatcactctacgttactgcacttcgtcgaccggcaggatggatgacaataatgctagaagct

SEQ ID NO: 28742 - DNA, 498 bp, Oryza sativa
  Clone ID: uC-osflm202101f06b1
tttctttattccacttctcttctctctcgtggtcgggggatctcatcaggagcgcagatgctacggcgtccttgagaattgcagagaggcaaaagaagaacaagcagagagcaagaacaagcagaagcagaagcaaagaggcgatggacggcgacacgctgtcggcggcggcggcggaggacgggaaggtgctgcacgcgttccagacgagcttcgtgcaggtgcagagcttgctggaccagaaccgggtgctgatcaacgagatcaaccagaaccacgagtccaaggtccccggcgacctctcccgcaacgtcggcctcatccgcgagctcaacaacaacatccgccgcgtcgtcgacctctacgccgacctctcctccctcttcgccgcctcctcccccggccccgccgactccgagggcgccttcgtcggcaccgccgtccgccacgccggccacaagcgtgtcaggtccacccacctcgactgaacaagaacca

SEQ ID NO: 28743 - DNA, 338 bp, Oryza sativa
  Clone ID: uC-osflm202101f10b1
tcggtcattgctaaagctgagaagatcgccaaggagtcggcttcataagatctcttcattgttaagttctgtacaagttaaatttttggattctggtttctatatgcccgttctgtagccaggacgtgattacaagcaggggtgacatcttctgatgagcgatgtttttttgtcttccttttctccttttacccctaataaggaaccgcagtgacattgtattgtgctgcacaaaagtactcggaacttcgaaagcatgtgtcctttataatgcagatccatgaagcataggatcattgagttcttgtttttagttggtcaaaaaaaaaaaaaaaata

SEQ ID NO: 28744 - DNA, 504 bp, Oryza sativa
  unsure (1)..(504): unsure at all n locations
  Clone ID: uC-osflm202101f11b1
ttggtttggtcgcagcaacggccgcggcgttggggggaatggaacgcccaatctgcatgcttcttcttgctgtcgaacaccagatcgcaggtgacaagaatcagtgagcatgcatcatgtcgtccaacatgttcggcaagaaagggtgggactcgaatgggatggatacatctggttctgtctgcagaagttcttcagatatcaattacattaatcaacgggcaagattgaagagtgcgagcctaaactgtgtgggttcgccgccaaggaagaacaacaatgctacacagtaccggatgtttgttgccacatggaatgtgggaggaagaactcctaataaacgacttaaccttcaagactttctgcaggttgaagaatctcctgacatctacgtcttagggtttcaggagattgtccccctgaccgccggcaatgtgctcgtcctcgaagacaacnagccggcggcgaggtggctggcgctgatccaccaggcgctgaacatgc

SEQ ID NO: 28745 - DNA, 489 bp, Oryza sativa
  unsure (1)..(489): unsure at all n locations
  Clone ID: uC-osflm202101g07b1
agttaccctaggtgctcattccaccgccatcgcctccggcgaactctccaccgccccctttcctacatcccaccactattttataagccagcccttcatctcatctggagatctggttctactcatccaggaaagccccaatctttatcatagcaaggaggtcatgtcggaatcggccctcgacaaacatatagtggtgaaaattcccgatcattttctgccagatgctttcataggagaaagtgttggtaaaggtaaagaagatggagcaaccgtagataacatggacccgtcccgcccttttctagttatcaagaagtctgatttggataaggctggtgagtgggttaaaataaaatatgcttggatggccaagtccttaacaaatgatataatcatcccagaccctaccctcangtggtgcgggatgccttctttgatatatctccccgcttggactccgtctttgagaaggacagtgtccggtgc

SEQ ID NO: 28746 - DNA, 272 bp, Oryza sativa
  Clone ID: uC-osflm202101g09b1
tagttggggtacttaaaaacacacctgccttttactcctcgaatcgtaatggcattgatcccaattacgacccttttaagaagtacatcaacctcgccgacgccgtcgacatgctattctggcctccccgagcgaacggagaagccaggtggctggctcgattaggcgggctggatccctcactaccaattagacgccattcctaacaaggacctccaggacggcgcgcagatgcagctcaaggctcgaggcggcagatgcccacctaacct

SEQ ID NO: 28747 - DNA, 168 bp, Oryza sativa
  Clone ID: uC-osflm202101h01b1
ctttacttttacctctacaaccaaggtcgttgcgatgggcctctttgactgacccgcggtgtaaaaaacaggactagacccatgtgacggccgttagtttaaaatgaagagaggcatgctcactatgcctccagtgaactatggcacgacatgcatggaatgatcttg

SEQ ID NO: 28748 - DNA, 235 bp, Oryza sativa
  Clone ID: uC-osflm202101h03b1
attcgtatctcctcctctcctctccctctccgggggggcaaatttacccaaagccccctatcccaatgccctcccaggcccatccctagcttgttccaccccaaaccctcacccccacccatggcccattactgtcgcgccggagagcttcctcacatatcccttctctacccttcgaccccgtgtgtgcctacgaccgtcaccgccggccccgtactcactgcgcctggaacga

SEQ ID NO: 28749 - DNA, 442 bp, Oryza sativa
  Clone ID: uC-osflm202101h07b1
cttttaattatgatgaccttgatagtgtttcaaagcttcagaaaacacaacgttacaatgacattatgcaaaaagttgaaaatgcacttcagaaaggtacagatttttccaatcaaaggtcgatcctggaggaagatccagaataccagctgattgttgattgcaatgctctatcagtagatattgagaatgagatcattataatccataatttcatacgtgacaagtataggctgaagtttcctgaactagaatcccttgttcatcatccgatcgattatgctcgtgttgtccagaagattggaaatgagatggatttaacgcttgtagatctggaagggcttttaccttctgcaattataatggtaatttcagtgacagcatcaacgacaagtgggaaagccgtttccgaggagaaccttgtaaaaactattggagcatg

SEQ ID NO: 28750 - DNA, 447 bp, Oryza sativa
  Clone ID: uC-osflm202101h09b1
tttttaatcaagaaacaagcaagattattctagccaactagctagcttgcgaatggcttccttgtcctccttaatgctcgtcacggcagtggccgcattgttggtcattggctcatctggcactgaggtcaccttcaagatcggtgagtcctctaccacctctacactggaactcatcaccaatgtcgccatatctgaggtggagatcaaggagaagggtggcagcgactggagggggctcaaggagtcatcggctaacacctggaaaatcaaaagtgatgcaccgctcaagggccccttatccgtccgcttccttgtcaagaacggtggctatcgcgtcgtcgacgatgtaatccccgaaacctttaaggccggctccgtctacaagagtggcatccaggtccagtaatggacatgcatgtccttgcattaggtcacatggaaata

SEQ ID NO: 28751 - DNA, 382 bp, Oryza sativa
  Clone ID: uC-osflm202101h10b1
ttttgaggtgggttggcttctcctccccctctttaccttttcctcctcggttcggttccgtggttcgtctagggtttagtgggttgagatggcggcgccggatgtcgagtaccgctgcttcgtcggcggcctcgcctgggccaccgacgaccgctccctcgaggccgccttctccacctacggcgagatcctcgactccaagatcatcaacgacagggagacggggaggtcacgtgggtttggcttcgtcaccttctcctccgagcagtcgatgcgcgacgccatcgagggcatgaacggcaaggagctcgacggccgcaacatcaccgtcaatgaggccccatcccgccgctccggcggcggaggcgggggctacagcggc

SEQ ID NO: 28752 - DNA, 502 bp, Oryza sativa
  unsure (1)..(502): unsure at all n locations
  Clone ID: uC-osflm202101h12b1
gttatcctcctatacctgccagaaacatggagggggacaccaacagactaggtagcggaccaatggcctcgttgtcctccttccggctcgccgtggcagtggcggcattgttggtcgtcggctcatgcgccactgaggtcaccttcaaggtcggtgagggctctagcggaaaaagtctagagctcgtcaccaacgtcgccatctctgaggtggagatcaaggagaagggcggcaaggactgggtggcgctcaaggagtcgtcgactaacacctggtcgctcaagagtgaggcggcgctcaagggccccttttccgtccgcttccttgtcaagaacggcggctaccgtgtcgtcgacgacgtcatccccgaaagctttacggccggctctgaatacaagagtggtatcaacgtctaattaatagacatgcgtactctngcattgagttgcatgataattattaacctctaaataattttgtcttgtaagagatcacgctacgc

SEQ ID NO: 28753 - DNA, 497 bp, Oryza sativa
  Clone ID: uC-osflm202102a03b1
cgacccacgcgaccgataaaatagaacaagcaaggcaccaaaaccccgcaccatggaacaccgacaccaccacctcgaccaccaacaaaactaccaggcggtggacgaaaccaaagaacacgaaaaggagagaactataaactaccaaggagaaaacaattaaaaaaaaataaaattaaaactacatattatacaataaaaaattaataaaaaaagaaaaaaacaaaatatacaaaataaaaaataactttataaaaattataataaaaaataaaaataaaaatataaaaattatcaaataaaataaaaaatatattaaatgatatcaaaataataataaaaaaaaataaaaagaaaaaaaaaaaaaaaaaaaaactataataaaaatgaataaaaaaaaataaaaataatataataaacataaaaaaatataataaaaaaaaaaaaaaaaattaatatacaaataaaaataaaaatataaaacataaaaatataaa

SEQ ID NO: 28754 - DNA, 482 bp, Oryza sativa
  Clone ID: uC-osflm202102a05b1
ttatctccatcctcaagcaagctacaagcgcggctactctcctcctcgcgtcgcctgctcatcccgcgtcggagaaatcggtttcgttttttcttttccgctgtggtgtgtttttctccccgttcttggtgggcgcgtctgctgcgtgagagatttttttgggtttctgctggttgggttggttagctgctgcgcttgctgaggtttctagttgttctttggccggattgtgtgactgcgtccccatttcgtgttcttgacttcttgttgggggaggggagcttttcgccgagcccctttcgtgcggttcgggctgttgtggtctggggaggggtcgcgtctatcctgttggttagctgtcttgttcgataacctgattctttgcccatctcttatcctcttttatctttttttcatcgttgtttttattctctttccttttttcttgactctttttttttttttctttttttttctctttt

SEQ ID NO: 28755 - DNA, 435 bp, Oryza sativa
  Clone ID: uC-osflm202102a08b1
tcgataagctgcagttgcagcaactagtaactaatagaagtgatgacgatggatcgtcccaacgtcgccgtggccgcggtggggctgctagtggcggcggtggcggcgacgctgccggcgccgtcgtgggggcagcagcagccagccaacaagctcatcaccagcacctccggctccggcaaagggttgtccaagtggctggcgatgaaccaggaggagtacgtggagaagaaggcgctgcacaccatggccaccgcggaggagctcggcgggaagaagctggacgcgaacctgacggcggcggaggaggccaaggtgacgtgggtgatcgaccccaaggggacgccgggcgacaccacctttaccaccatcacggcggcgctggagaaggtccccgaggggaacaagaagcgcgttatccttgacctcaagccc

SEQ ID NO: 28756 - DNA, 380 bp, Oryza sativa
  Clone ID: uC-osflm202102a09b1
tcgtttgagctccccgtgcggcggcgcaagaggggagctacgcgggggaggcggcgaggtaaccacgagctgcgcagcggagcgcgctctggcgaggcagcaggcggaagcgtgcggcgcggcggcggacggcggcaggtagcaggcgaagcgcgcggcgccgcgagcgcgagcagccgagcaggtgcagcaacaggccagctggatgggaaaggacgcatgctagcgaaaagcgtggcgcacacctgggagcacgctagccagaggcaggaccagccgagcaacaggcaggcagcagctggccaacggttgcaaaataactaaacaagcgagcaagattgatcccaaggtgctggtgctgattaccttccaaaccatgt

SEQ ID NO: 28757 - DNA, 348 bp, Oryza sativa
  Clone ID: uC-osflm202102a12b1
tcgattctttattacattcaataccatctccacaggagtaccatacaaggacgcgtcgaggctccaaggacgactacatagacagcagctgtttgatctcaatagccagcacgccatgcagccattacaggcaggatgtcagcaactgctggtacaacttcagcgtgcctggcaatcctatcctatcacctggaactatacatactactcacaaagagtctggatagatggaaggaggcatatccaaacactaataccatggcagatatcatgccgggctctaacatatgtgactagactgaatacggggattcatagcctttaagatgactggacctaagaaattgt

SEQ ID NO: 28758 - DNA, 222 bp, Oryza sativa
  Clone ID: uC-osflm202102b01b1
ttacatatgctccaacagaaacagcagagagggaatgcagggtttacgcccgctcaggggtgctcccaaccacgcaccacagctaacatagccgtaacccataacctagagttaaacctcataatcttgcctcacacctccctacttagcctgttgattatgtactctactatcaagcactctaatcaaaacccatccatgtcccagaaaaggaagccgcag

SEQ ID NO: 28759 - DNA, 341 bp, Oryza sativa
  Clone ID: uC-osflm202102b04b1
aaaaccctagccgccgttccagcttgcggagaagaagcgcgcgagccagcaatctcgggcggcggcggcggcgaggaggaggaagtagccggagaggagggagatggggagcgacacggaggcggagaagaagaagactcccgtggcgctggcgcccatcgcgaagccgctcgccggcaagaagctctgcaagcgaaccctcaagctcgtccgccgagcgtctgaggccaaatgcttgaagcgaggagtcaaggaggtcgtcaagagcattcgccgcggacagaaaggaatgtgccatattgttggcaacattttttccattgatgtgattacacatgttc

SEQ ID NO: 28760 - DNA, 181 bp, Oryza sativa
  Clone ID: uC-osflm202102b10b1
tcggtggccggcgttcctgtacccgccgccggcgccggcgttcgtggcggcggcgtcggtggcgcagttcgcgttgctggcgaacgccgggctcggggagctccgcggcgagcacatggcctactccaagttctggcaggtcgtcgccgggaagaagaagaacggcggccgtggctgggga

SEQ ID NO: 28761 - DNA, 490 bp, Oryza sativa
  Clone ID: uC-osflm202102b12b1
gtcctcctccagtggaggaatgagatgtacaattcagtaatagacgcattcaaagattttggccaaacaaatcctcaacttcatcatcttggttaccgagacaaagcttggaatgtgaacaagcttgctcacatagctcgcaaacaaggtcttcctgacgtttgtgtaactatactcgataagatgtatggtcatgctaccatggaagttcaggaagcatttgtgaagatatgtgaacaagccaaggcatacttagagatgaaaggcgaactagtcagtggtcttaacttaatcaataacaccaatttggaatttttccctgtgaagaacaaagcagaaatatttcgtctggagaggtgacttcctgctaaaaatgaatgactgcgagaatgcaaatgttgcttattcaaatgctataacactttttaagcatttgcccaaagcatggattagctgggggaattactgcaatatggtttccaggagacaa

SEQ ID NO: 28762 - DNA, 352 bp, Oryza sativa
  Clone ID: uC-osflm202102c03b1
gttcttcctcctctcgcaggagaaaatttcgctggttgaatcggagggaggcagcaatggccgctcgagctcggtggcgaatcctcgcgctgccgctcgctcttctcctagcggacgggtcgtctcttgccctcttttggcggtcctttcttctttgagttcctgtcttattttccttctctatctttctcaccccatatacttacttctctctttgcttttcctttttgtcctcattactcttttttcactccctctctgttacttactgtcttgtattggttttttctctctttcctccttcttgcccctttttctaactttttctattcccttctcctccctttttctt

SEQ ID NO: 28763 - DNA, 146 bp, Oryza sativa
  Clone ID: uC-osflm202102c07b1
taagatcgcgagcggccgcgcacagtgctttttttatttttcgtcttctgccttgccatttgtgagctctgagcctcgatcgaggtgtgggctggagtgttgggcgggagcaagaatgaatgcggcctgcgtgcggagagaggaga

SEQ ID NO: 28764 - DNA, 152 bp, Oryza sativa
  Clone ID: uC-osflm202102c09b1
catttataatccccacggccacatcctaccgtggggccggctacgccaacgactaccctgtgccgccgctacgtttcctactcctcctcatccatcttgacggattatcgcggttaggtctatccatatctccaaaatctaacataattcta

SEQ ID NO: 28765 - DNA, 460 bp, Oryza sativa
  Clone ID: uC-osflm202102c11b1
ttttcggtagaacaccgcatcagcagtagtaagcagctaattgcgtacgtacgcacattgtggcccggggcgagatggcgcagttttatttgtttttttttgactattttatcttttccttttttttattttttattattttttttattctttttttttttttttctttttttttttttttttttttttttattcttatttttttttttttttttttttttttttttttttttctttttcttttttttttttctttttttttttttttttatattttttttttttttatttttttttatttatttttttatttttttttttatctttatttctttttttttttttttatcatctttcttttcttatttttttatcatttatttttattatttttatttttattttttttttttttcttttttattcttctttattaatttttttattttttatatttttt

SEQ ID NO: 28766 - DNA, 275 bp, Oryza sativa
  Clone ID: uC-osflm202102c12b1
tacagaacccaattcccctccctcctcctccacccgcccctccctcccacacacaccacaccaccaccaccaccacccacccctcgtatgcaattattcacgcccagtcgccgcctccaccgccgccgcctgctcgactcaccaccgcagggcggcctcctcctgccgcatgggtgactcgacggtggccggcgcgctggtgccatcggtgccgaagcaggagcaggcgccgtcgggggacgcgtccacggcggcgttggcggtggctgggggag

SEQ ID NO: 28767 - DNA, 495 bp, Oryza sativa
  Clone ID: uC-osflm202102d03b1
gtggcgtctgctccacccgctcttcgactcctgccggttctccgggttttctctcgatttccgccgaatttcgctccgctccagcaatgggcgaattgggtgctctccagtccatcgtctaccaccgcggatcgctccgcctgcttgatcagaggaagctcccactcgaggtggactacatcgacgtcaagtgctccggcgatggatggaacgcaatcagagacatggttgtccgtggcgctcctgcgattgccatagcagcggctttggctctggctgtagaggtttctgggttggaggatttcaccggtacgcctgcagaggcagcagtttttgtttccgagaaattggagtaccttgtatcgagccgcccaactgcagtgaacctatctgatgctgcaaccaagcttcggagtttagtttcaaggacagcagaaactgagaaagatgccaaagcaatctttcaggcctacattgatgcagcagagaccatgc

SEQ ID NO: 28768 - DNA, 377 bp, Oryza sativa
  Clone ID: uC-osflm202102d05b1
ttcatgcctaagacaacaaaataaaaaacacgaagagagataaaattaaaccaaacctacataatcacactcctaaaacgatagcataatctcgagcgctactagatccatctctggggggccgtactacaagggcaaagtttacttacccgtgcttgcgacgtaatacctcttctatggctcgacctaaatcaaactcactggccggggttctacaacgccaagactggaaaaaccctggcttaccccaactaaatcccctggaagccgatccccttttatgacggtgaggtcaatgaaaaaagccctgaacagagcgcctttcccaagaattgcgcagacttaaggtcaaaaggtactccccttggcccagctca

SEQ ID NO: 28769 - DNA, 449 bp, Oryza sativa
  Clone ID: uC-osflm202102d07b1
tttcaaactgttggacccccgtacccaacgcgaagctgcagtgatggctcaagagagtcttggtctgaagtggacgatggcacgtgacctatggcatgatggcacctgatgacatatccagtgttgaccgctgttcatgagcgagaacaaattggcagagcactgaatactacataatggttcatgttccagggttgaagaaagccttgatatcgttgacctggagaggatgctggtgggtagcagagctcgagctctttcataacacctgcaagacgttagactatcacatctgataggctgtgcacacagaacgtcatatggctgactgagatgatcaccagcctaggagctatgagagattatcacccaagaccgatggatgatagcatgtacagcgagagcattgaccatgatcactagtacgtggaccatgcttagactgcata

SEQ ID NO: 28770 - DNA, 461 bp, Oryza sativa
  Clone ID: uC-osflm202102e01b1
ttgactttgtgggcgcgcatggcggcggcgggctaccggcggaacgcgaagcggtgcaaggagaagtgggagaacatcaacaagtacttccgcaaggccaaggagagcggcaagaagcggccggcgcacgccaagacgtgcccctacttcgacgagctcgaccgcctctactcccgctccggctccggcggcggtggtgggtcgtcctcggcgggcggcaatggcggggaggaggcgaagggcagctcggagctgctggacgcggtggtgaagtacccagacgtgcggtgcgcgccgccgggtttcccgttcgacggggagcagaacgaggaagggaggactaaggacgactgcgacgaggcgcaccatgatggcgacggcgacggcgacgaggaaaaacgttggcgttggcgttggagagcgaccgatgatcatgacgaccaagtggatgagagccatga

SEQ ID NO: 28771 - DNA, 485 bp, Oryza sativa
  Clone ID: uC-osflm202102e12b1
atcctcctcctcctcctccgccgccggctccgtgctcccccacctccactctccactccaatggcgactcacacgcagatcagcaagaagcgcaagttcgtggcggatggggtgttcttcgcggagctgaacgagatgctgacgcgcgagctcgcggaggacggctactccggcgtcgaggtccgcgtcacccccatgcgcaccgagatcatcatccgcgccacccgcacccagaacgtcctcggcgagaaggggaggaggatccgcgagctgacgtccgtggtgcagaagcggttcaacttcccggagaatggcgtcgagctctacgccgagaaggtgaacaaccgcggcctctgcgccatcgcccaggccgagtcgctccgctacaagctcctcggtggcctcgccgtcagaagggcgtgctatggtgtgctcaggtttgttatggagagtggtgctaagggctgtgaggttattgtgagtgg

SEQ ID NO: 28772 - DNA, 326 bp, Oryza sativa
  Clone ID: uC-osflm202102f01b1
ttcgggatacggcattgcatttgcattggggggcattgctattgcttcgcttgcgcttggccacccaccatttcggcgcggagaggagaccgcttcacccgccgatctgcgagaaaccctctccgcctcgcctgctccacctcccaatcttaacccaacctccccccttcctctcgcgtcgaccccttgctttgctcctccttcaaccttcttctttcttggagtttcttgagagagagagagagagagagagagagagagagagagagagagaggggggagcggtctcatgaggaggaggaccgccgcgtctgctgccaccgacg

SEQ ID NO: 28773 - DNA, 432 bp, Oryza sativa
  Clone ID: uC-osflm202102f02b1
acgttagagttgcgtcgcctctcctcctcctgcgtgacccctacgcttccagaaccttctcgaagctcccgctcccccccccttccgctccaatggcgaaggaaccgatgcgcgtgctcgtcaccggcgccgcaggacaaattggatatgctcttgtccccatgattgctaggggtgtgatgatgggtgctgaccagcctggtatgctacacatgcttgacataccaccagctactgaatcacttaatggcctaaagatggagctggttgatgctgcatttcctcttttgaagggaattgtcgcaacaactgatgttgcggaggcctgcactggtgtgaatgttgcggttatggttggtgggctccccaggaaggagggaatggaaaggaaggatgttatgtcaaataatggctccatctacaaatcccaag

SEQ ID NO: 28774 - DNA, 487 bp, Oryza sativa
  unsure (1)..(487): unsure at all n locations
  Clone ID: uC-osflm202102f07b1
tttctttggacttgaattgaatggaacgaagaagttgataactaggaaacaaagtaaaatctgaacaattcgacttagatctaacggttagatagatttgtgtgatttggtgagatgaaatgtattgagtgacacatacatggttcctttctataatacaagtgtgtactcgatatcataaaaatactataattgagatttcaaatgagcacagcttgttaattaatatctatgtggcccacatagataatgttatttttgatggaaattattgtcaggctttgcccaacagtatagcttttataaaagaaaaatatttacatcatacaaagaggacacagaaagatctgaagaatattacaaagtttgtaaccaaacaaacaatagttgtttaagggggtccttcattctacacatttgccanaactatcatctggaagaagttgagattggagctccaactgatacccaagtgctgccaacattc

SEQ ID NO: 28775 - DNA, 489 bp, Oryza sativa
  Clone ID: uC-osflm202102f08b1
tttcgtcgttcttgtcgatctctgtgtgtgttcttcgtcgtcgtcgtgttcgttttggattttggtttcagtttagtatatgcacttcttgttcttcactgctgctgctgctgctaagcttgtagcaatctagtggtgcttgttgttcttcttctcccgaaatctttgcgatcgattgattgatggcatcgccgcgcgcctcgcctccctcaacgacatcctctcctgcatcaacgccttcgacgacctcttcagatcctcccccgagctgttccagctttgctagctcaaacactgaagctgaagctgccatggcagagaccaagaagaagatgaagaaaattacagtacttgccactgggggtaagcaactaagcactgcacctaacgaagctaagctagctgctagggctaattaatggcctaattatcttgtgtaattggtaaatcaagtgatggttaagttaagccttctgcatgcatcatcat

SEQ ID NO: 28776 - DNA, 474 bp, Oryza sativa
  unsure (1)..(474): unsure at all n locations
  Clone ID: uC-osflm202102g03b1
acgaccttcgcgagtagagcaagtaagctcgcaccgcaccgaaaccgcagtgcgttctccttttctagtgttcgcccgccgccatccacacgccgtgccgcagatcctatctcccgtccgcggcggccgaagcaatcggacgaattcgtccccccctgcttcgcctcctcttcgctgtgtagtttgtgagcgatgcgagcggatcgtctgatggcggaggggggcaagcggatcgacctgggggcgccgctccggtcggtgcgccacgccgacgcgctgccctaccacaaggccgacctcaactccggccccgtccgccaccccggcgcggtgcccttcgtctgggagcagcggcccgggcagccaaggagcgttcgcacccgccgcgcgccgncgtcgcccacaaccgcgttccatcctcaaccgctggagcacggcgtggaggattagaaccacnggagcccataccacgac

SEQ ID NO: 28777 - DNA, 491 bp, Oryza sativa
  Clone ID: uC-osflm202102g05b1
attaaacaaagaattcaattaaaattgatgctgtgaagaggcatgaactcccacgccatgaagtgcagcaggttatatgctcgttgtgtggcacggaacaagaggtacggcaagtatgtatcagttgtggtgtatgcatggggaagtacttctgtgaagtgtgcaagctctttgatgatgatgtttcaaaacagcaatatcattgcaatggttgtggaatatgcagaattggtggcaaggagaatttctttcactgctcaaaatgcggatgctgttattctatagtattgaagaacagtcatgcatgtgttgaaggagcgatgcatcatgactgtccaatctgctttgagtacctttttgaatcaaccaatgatgtttccgtcttgccctgtggtcataccattcatgtcaagtgcttgcgagaaatggaggagcactgccaatttgcttgcccgctttgctctaatctgtctgcgacatgtcgaaggcat

SEQ ID NO: 28778 - DNA, 477 bp, Oryza sativa
  Clone ID: uC-osflm202102g06b1
atcctttttcccccccaaaatcatcagatccggctcgggctccttctactccaccttctgccaccccctcgccgatccagatccatcgccggggaggcgccagccatggccggcggcgggggcgccggcggcatgtcggagtcggtgctccgcaaggtgctcctctcctactgctacgtcggcgtctggatcttcctctccttcgccgtcatcgtctacaacaagtacatcctcgaccccaagatgtacaactggcccttcccgatctccctcaccatggtccacatggccttctgctcctccctcgccgacgccctcgtccgcctcctccgcgtcgtcgagccgccctcgtcgcccgccatgaccccgcagctctacacctcctccgttgtacccatcggcgcgctctacgccatgtcgctgtgggtcttcaactcgggctacatctaccttttcgtgttcttcattcagatgctc

SEQ ID NO: 28779 - DNA, 393 bp, Oryza sativa
  Clone ID: uC-osflm202102h03b1
atgggatcttggcagggctgtcggggtgcacggggctgatggagctgaacctggtggggaacaagatcagcgacgtggaggggctgcaccggctgctgaagctggcggcgctggacctggggttcaacaaggtcaccactgcgagggcgctgggccagctggtggccaactaccactccctccgcgccctcaacctcgtcggcaaccccgtccaggccaacgtcggagacgacgccctccgcagggccgtgacgggcctcctccccgacctcggctaccttaacaagcagtccgtcaagccctgctgcgcgcgccccgccgacggagccgagtcgcgcgccgagctcgaggccggcctccgcgggggaggctcccgtagcgcgcggaagcggc

SEQ ID NO: 28780 - DNA, 470 bp, Oryza sativa
  Clone ID: uC-osflm202102h07b1
gttagaaagagaaagagagagcaacgccccaagcaccaccccctctgcccaggccccagatccctccaccccatcgcacgccacaacataacataacaccgcaaacacgcaccctaccaacagacgcctactatggtgcgtttctgccacctacactccgctgcgcagccagcttcgctcgcccgctacctcactcactctcgggtgagcgcggccaccgctgccggcgacgaggtagggaggaggaggagggcaagatgttcgggcgggacccgtggggcgggccgctggagatctcgaatgcggactcggcgacggacgacgaccggagccgggacctggacaggggggcgctgatgcggcagctggacgagacgcagcatagctggctcctggccgggccgggcgaccaggcctgcaagaagaagaagaagtacgtcgacctcggctgcatggtcctcgaccgcaag

SEQ ID NO: 28781 - DNA, 330 bp, Oryza sativa
  Clone ID: uC-osflm202102h11b1
cgcctcacgccgccgtgaaacgagtaaggccctttttttttttgctctgaccagacttgccggcgaaggaaccaccggcgggcaccgcctctcctcggcaatcgttgccggggataaagtggggtcgttaagggagcggaaggcttgggggtttgggattatagatcgaggaagatgaagcaatccatatcgactatcatcttggtatctactcacgctgctgctgctaactataggatcatttcgctactgcctctatctgacccgactctttaaggtttttgcctcgtcgataatgaacttgagtacactcagaagcttgcctattag

SEQ ID NO: 28782 - DNA, 100 bp, Oryza sativa
  Clone ID: uC-osflm202103a10b1
tcgatttctccatctcctccttccacccataattgttttgagaaattgaatgacaatgcttaccaattcaatgttccggaaggtttcatagaacatcttc

SEQ ID NO: 28783 - DNA, 91 bp, Oryza sativa
  Clone ID: uC-osflm202103b07b1
ttggttgcagccggggccggatggggggacatggtgcctatgaagaggacgatgttggtttacagcttttttggctgtatatttatttata

SEQ ID NO: 28784 - DNA, 110 bp, Oryza sativa
  Clone ID: uC-osflm202103b11b1
ttgtttgatacatggacgctataacaggatttagtgaactagttgctactctgattgtatcaaacataaacattgacatatatgtaaatggatgagttgtgtataaattt

SEQ ID NO: 28785 - DNA, 290 bp, Oryza sativa
  Clone ID: uC-osflm202103d01b1
gcgttagagcttactctttctgtgtgtagcgtgtgcaactaggaggcttgttccatactagtttgctaggtcatggaaaagagcgagattttcgtatgagcacactaatatgcagctatatgtgcttttacacttatcataggatggttagctcactggtgtttacagatggataaattcctccatgcaatgggaggcttcctccgggcctcaatgggcttccctattgatggggagacctttccatttttcagaacaagtccatcaataaacatgccaatttactacaa

SEQ ID NO: 28786 - DNA, 251 bp, Oryza sativa
  Clone ID: uC-osflm202103d10b1
tttagatctcctactcctcctcctcctcgccgccggcgatggccaacgaccctctcgacccgtcgtcggagccgcagtctcatacactgccggcggtagcagtcgcgaccccgttccccgacccctcagccggtccttctccgccaccgtcgcgaggcctttgagcacggcactcttccccatccccaagctcattttccccgagggcacgcttgcgcacactcttgctcaggtcaaaggacaagctcgcc

SEQ ID NO: 28787 - DNA, 325 bp, Oryza sativa
  Clone ID: uC-osflm202103e01b1
ttcttgccctcgccgccgcgggcgccgccgaatagcctactccgactccgccgccgtcgcggtgctagcggcagcggacgacggcgccaagatgaagggcctcttcaagtccaagccgtggacgccggcagacgtcgtgcggcagacgcgggagctccttatcttccttgacctacactccggatcacgcggtggagacgccaaacgcgaggagaagatggctgaattaagcaaaaaatattcaggagttgaaagtcaattctttatggcaatggtgaatctgaacctgtgactgaggcttgggtgctattgacccaagaatttt

SEQ ID NO: 28788 - DNA, 457 bp, Oryza sativa
  Clone ID: uC-osflm202103e11b1
tcgttaaaactagtgaagcgtcactgtttcaggccatatagtttttgcaggtgaagggcacacacagatagtttcttttctttgctaatgttagaggtttccgcctttgctaattgctattgacaccatgctgatcgttatgagcgtatctctacatgagcagaccatcttttttcaaggaattccttcagtactccacctgaagaaaaccatgtaaattttaacaaaaaggggaacattaggctatgttttggttacaacccagataccactctagatgggcctatgcaggccttagcaactctattggactaaaaaccctttctttaaccaaaatgatcatcctgaagttactgtctttgaaccctcaagtgttacctattatacttggggggacagttaacccatcagtatacacatgggactgttatgtaactccttgaatcctgataagcca

SEQ ID NO: 28789 - DNA, 424 bp, Oryza sativa
  Clone ID: uC-osflm202103f05b1
tatttttaactatcgatccatcagtagctagctagctagctagctgcatcgtccggcgagagagatagctgctgcagggggcggccatggggaggggcaagatcgagatcaagcggatcgagaacgcgaccaacaggcaggtgacctactcgaagcgcctgacggcgatcatgaagaaggccagggagctcaccgtgctctgcgacgcccaggtcgccatcatcatgttctcctccaccggcaagtaccatgagttctgcagcccttccaccgacatcaagggggatctttgaccgcttccagcaagcctatcggcaccagcctttggatcgagcagtatgagaatattgcagcgcacgctgagccatttaaggacattaaccgcaacctgcgcacctgagaacaggcaaaggatgggagaaga

SEQ ID NO: 28790 - DNA, 403 bp, Oryza sativa
  Clone ID: uC-osflm202103f08b1
tcggttccgccagcgtccctggggcaaatgggcagctgaaatccgagaccccagcaagggtgtccgtgtttggcttggaacatataacactgctgatgaggcagctagggcatatgacgctgaagcccgcaagatccgtggcaagaaagccaaggtcaactttcctgatgaaccagctgttgctcagaagctttccctgaagcaaaacgctgccaagcaagagaaactagctccacctttgaagacctgtggcgaagatgctttctttcagctaaacagttcatacaatgattttgtttgccattgcttgcaaaggtgcctgctaagccggcatagcctgttgatcttatgccttcagacaaatctcttgctttcactggaaccattcggatgaacaatgctt

SEQ ID NO: 28791 - DNA, 314 bp, Oryza sativa
  Clone ID: uC-osflm202103f10b1
acggttagcggaccccctctttttttttttttttatgacaaatatagtgcacattactaaaccgaacatttcaatttgacaatttaattgaggattaagcataagtagcagcgccctcgtctttctcatcaaggaaaggatagtccgtgtagccaacaacaggatcctgtatgtaaaaggtggacctattatacttgttcaatggtgcgttgatcgcgaacctattgggcaaggccggattggttaagaagtgccttccgtaggcgacgaggtcagcatatccatcgggtatcaccttgtgatcttcctcccga

SEQ ID NO: 28792 - DNA, 333 bp, Oryza sativa
  Clone ID: uC-osflm202103f11b1
tcggtagaagagtcaggctccttttcctcggcatcctgctcctgaatactccttctcggatcaccttttctcttcacctcctctctctcccatccgctgcaaccgccgttttacaaacgagagtttaaattgggattttagatcttctgcacatccattgagctcatcatcagattgaaacaaataaagtgaagtatttgatcacttatatggccctcaagacgctgcaagttccatctaactttgcaagggccgatcaaccgcagctttaatcggttcttcttcttcttcgacgtcgtcgtctcagtttttctctggggcccaaagcctgca

SEQ ID NO: 28793 - DNA, 404 bp, Oryza sativa
  Clone ID: uC-osflm202103g02b1
ctgagtttccccatctctcgctgactcccctcctccacgtgtagacgtcgacgacgagttatatacgtacgcacgcgcgcacgctcgctcgctcgctgccaccgccttccttcgttgccaccatctccttcgccgccgggcaccatcgccggcggaggccgggttcatgctgtcctgaaggagaggaaagctcctcggtgaatagtagggcaccaaaaaaacttctctccaagcctcccgggggttggttacccaaatttatcatcaacttcctgaaatctgaagaaaaaaaaaaatcgggtttaccaccaccctggggtgccctggcgtgggcttcaagcaaaaaaaaccgggaatcacaagaaaatggggcctggaaaaacccgggcgataccccggaaaaa

SEQ ID NO: 28794 - DNA, 484 bp, Oryza sativa
  Clone ID: uC-osflm202103g11b1
tcggtctacaaatcgcaattccccaatccatattcccttcccttcctttcctcctcctccatctccaccctcccgccgccgccgccgccgccgtcgccgcggcacactccccgggaccagcagaggccgccgccaacgccgcgggggcaggtaaaaaggcgcgcgagacgcccgcctctgcccgctgacctagatcgctgcggataaggttgcttgaagcagtggaagatttcctggatggcttgtgctgcagcaactgatgattctgctgcgagcacggctgggatgagggacgaggatcgtagcctgtctggcgagtcgttgtccgagtggcggtcctgcgagcaggtggagagcgagagcccttcgacgtccccgcccttttgggacactgacggtgatgacgatgatcctggccccaaaccttcagatatatttgggcggtatacttggagaattgaaaattcttcaaaggagaagaaga

SEQ ID NO: 28795 - DNA, 275 bp, Oryza sativa
  Clone ID: uC-osflm202103g12b1
tcgtattcaatggcgccgccgccggaggcgtggactagtcgctgacggcggcgacgccggcggtgaggacgttcaacttcctgagcgcgctgggggacgtggcgttcgtgtacgcggggtacaacgtggtgctggagatccaggcaacgatcccgtcgacgccggagcggcctgtcaaggggcctatgtggcgcggtgtcgtgctggcctacggcgtggaggccttctgctactttcccgtggcaggtcgcgtgggacttctgtgttctggtaac

SEQ ID NO: 28796 - DNA, 222 bp, Oryza sativa
  Clone ID: uC-osflm202103h06b1
tttcgatttcatgagacagaccgaactacaatttcatgagagtgtcagaacgttttgggcatactcttatgcaggaacccggaatggcctgggtgggcgtgcgttggacaggaccttctcaaggcggactgcgggcatatcgaaacacccgtattcaagatcaactatccgaggctccgggtctggagcgcctagagagggctggcccaactgctatgggga

SEQ ID NO: 28797 - DNA, 410 bp, Oryza sativa
  Clone ID: uC-osflm202103h08b1
tcggttggctcgtttgcgcggcgccgcgttgaagcgatctgttgatctcgcgcggtggatcaccgaggccgccttccctctcatcgcgacgacgatgggaggggaccgagggaagaagccggtggataccccggcggacatgcttctttccagccgcaaaaggtggctcggggacggaggttcggatcgcgctcacggcggctgcctgttttacgaaactactccttcgtccttcacgcatgggtcttcttcctcttcccccaatcgcccgctgcacgataggatggaggtggatacaaaggaatcagagataccaatacagaggacagaaaatgaccgaaagattagtgccccggatcaaaagaagtcattaagcttgcaggaggcaacggttccagggccaggaagac

SEQ ID NO: 28798 - DNA, 370 bp, Oryza sativa
  Clone ID: uC-osflm202103h10b1
tcggtaaatcaaaataagtcctggaatcatgctcgtaatttatcagaagtcagctaatcatgttccattacagatactctcaattgaggatggaaccccactgaaaaccttcacccagttgcttcattggagcagaaaggttgacttcatcgagcagtttaatgaaaaacttcttgtgaaacaagacaaggaaaacctacagattattgatgttagaaactccaacttgattgaggtcaacaaaaccgaattcatgactccttcggcattcatcttcctctacgaaaataagtctattcctggacattctgcaataaggacagttgcagcatggaatttccggggagagctaggtacttcatttgatgaa

SEQ ID NO: 28799 - DNA, 386 bp, Oryza sativa
  Clone ID: uC-osflm202103h12b1
tcggttgaaccacatccacactgcagtccctggaggcgagccaccaacaacaaggatttgcgacttcaggttgggaattcaattgaaatgttcataaattagttttgaattgagacttatctgattcatgctctgcgtgttgttctatataatattactgcccctcaatgcatgtaatgttatttttatcatgatgactctcagttctgcttaattattgaaaaactatggtgtcaagagtagcatgcttgagtgcttagtaacaactgatgtcaagagtagcatgcttgagtgcttaggaatagaacaatatttttagatgaaagatatgaaggctcaaaaatcattaagttttacaaatgcagaacttccttttttttcttcaa

SEQ ID NO: 28800 - DNA, 507 bp, Oryza sativa
  Clone ID: uC-osflm202104a06b1
tttctattggttatgacttactgactcacactgccaaacccttaattgtggggctgactgctattttctatatcatgtgggggccttattaaaaaatatacaagctgtcaaccaacaactaaagcaaaaccacaaaaaaaataattctgaacaattgaatcgttaaatgagcaaattttcagaggttctcaaaaaaaaaaactcagatgtagacacttgggttacccaaaaccataaaatatatggactaagttacaaagatcttaagaagagtaatcaattgagtccaacaaacagcattgatcaagcatttttcattttaccaaacgaaataacaaatgcagagggatccatcacaaatcttattaaacacgtggtcacaattagcatagaagaacttgcaataatcaaatcatttaaatgcatccccaaattatcactaatcacccccttaaaagtcactaatttacaatttacaaatcgtccattttcacatcaccattacca

SEQ ID NO: 28801 - DNA, 154 bp, Oryza sativa
  Clone ID: uC-osflm202104a08b1
tgggctctttcttgattactagtttagctgcattaagctaagtattactttggttcattcgttgtgtttacgcgagctattttgtttgcaggtttaggggagtaaagggaaatggatgtggagtatattatttaaaagggatagggttttttta

SEQ ID NO: 28802 - DNA, 96 bp, Oryza sativa
  Clone ID: uC-osflm202104a10b1
tcgtcaactgtggcttctaatcaaggtggagctggatttgggggaagctcgaccatgtcgatggcttgttacaagcttgccgccgtgttcctcgcc

SEQ ID NO: 28803 - DNA, 121 bp, Oryza sativa
  Clone ID: uC-osflm202104a11b1
cagcgccagatgtagagtgcggctgctttaaagtggagcgggctgttttaaataataacatgagggggccttagtaataacatttcaagctggcaaccaacaactaaagctaaaccacaaa

SEQ ID NO: 28804 - DNA, 484 bp, Oryza sativa
  Clone ID: uC-osflm202104b01b1
gtcagagacaaggatatgcagcttcaaactgtgtgggcaaaacttaggcgtaatgaagttcataaagatgatttcttgagagttatcaggaacatcgttggagatcaaatgctaaagcaagcagcccataaagtttttgcacagatgcaagcccaggcacagagaagtggccaggcaaatgcaaatcagcaggctaatgcaaatcagtattctttacaatcccaagtatcttccagcggttcagctcaattacatgatcagcaagttcacgtgtccaccacacctaatcagggccaaaaaaaccaagcattgtcttcatcccaaacctttgtgcaatctggcactcaggtgcagagcagtatgactgctcatgataattccatccaacggccagatgcaaagggaatgcatgttacgccgaaccgaccttctgttatgaactcagcaattctgcacaacaatgaacaaacagcagcaacccaca

SEQ ID NO: 28805 - DNA, 76 bp, Oryza sativa
  Clone ID: uC-osflm202104b05b1
gcggcggctgcggcggagggcacgggggggactattcgtgcggacggtgcttttgcgcacaagaaaagcgatcgat

SEQ ID NO: 28806 - DNA, 510 bp, Oryza sativa
  Clone ID: uC-osflm202104b08b1
gtgaacaggagaggatccgtcgacaattggttgaaaaagaaaagatagaggcagaagaactgcttcagaaacagataaaggagatagcaaagagaggaggaaaaaaacctgtccttcagggggaagttactaaggaggctgtgatggaattggctatgaatgagcagtttaaggagcgccaagagatggagaaaaaactacagaagactggtaagcaaatggattacttggagagggcaaaaaggcaggaagaggcacctctaattgagcaagcttttcaaaaacgccttgaagtagagaaaatccttcatgagcaagagcagctgagagagattgagctcagcaagcaacaccatgcaggtgacctgcaggagaagaacagactttctcgaatgttggagcataagaacatttttcaggaaagaattgtccaacgtcgtgaagctgagtttagtcgtttaagaaagagagggttgaaaggactagtcatttgatatcattcaaggagcg

SEQ ID NO: 28807 - DNA, 267 bp, Oryza sativa
  Clone ID: uC-osflm202104b09b1
tctcttcttcctacttcgtcttcttgctggtgtgttctaggaggaggaggaggaggagaagctagcgtcgtttgcgtctttggtctctagctgtctgttgttctctatttctctttctctttttttcttcttttttttctagttttctctctttctttcttttcttcttactcttttctttttttattttctttcctttctctttctcttttcttccctttttctttcttttttctctttctttttctttcttttttttttcctctt

SEQ ID NO: 28808 - DNA, 251 bp, Oryza sativa
  Clone ID: uC-osflm202104b11b1
tcgtaaatatttcttcctataacagggcaagagcagatcgatcgtttccttttgatttctgaggagaagaggatcgatcgtttcgttcgatcgtttggttttgaattttgaggagaagagaagagaagaggatcggaagagatggccggcggcggcgtggaggacacgtacggtgaggacaggtccatcgaggattcagttcatcaccccatggttcttttttgtcgccagcggatatacgctgttgagag

SEQ ID NO: 28809 - DNA, 365 bp, Oryza sativa
  Clone ID: uC-osflm202104c12b1
tcgtttgaacatcctctactactaatcgtccgggagcatagcttaataccatctcctccttctccccccatggcgagtcaaggcggcggcgctcttctcctccccattcgagtgcttcaggcgcctttcctgccccgcggtgtctctccgctcccgttcgtcgtggttgcttgatctgaagttatgttgcctatgttattcttcaatttattttcttcttttcttgtttctttcccttattctttttcttattctatttcactttttttctcttttatttttttccattttttttctttttttttctttttcttcttctatttttttttctttctatcctcgtactttttctttttttttttttt

SEQ ID NO: 28810 - DNA, 510 bp, Oryza sativa
  Clone ID: uC-osflm202104d01b1
atctgtaggtcgtatcgtagggagggcctgcgccgatccccatccgtcccgcgactcgaactcgagcgagcagaggcggcgccggcgctcgtcctgccgcctgagccgatcccatccatcccgcgagcgagcgagcgcttccgccgcatcctggtcctggatcaggtagaaggagatggcgactcttggtcttgccccaaacatgaatccaaacaagtcatttgaggtactgcctaatccaggtgactccgtatcgagcctcagttttagcccaaagagcaaccttctggtggcaacttcctgggataaccaggtgcggtgctgggagattgttggtgggagtagtcaaccaaaggcatctatatcgcatgaccagccagtcctctgttcagcttggaaggatgatggaactactgtgttctctggaggctgtgaataacaagtaaaaatgtggcctctgttgtctggtgggcaggctcagactgttgcaatgcatgacgcacctgtcaa

SEQ ID NO: 28811 - DNA, 477 bp, Oryza sativa
  Clone ID: uC-osflm202104d06b1
tgttgacattgtcctctgggctactggagaccgagccaacatgaaaacggtcgcggtgctgctactggcggtggtggcggatacactcacggcgccgacatggcagttcttcgacctattcctccccgccggccccagccaccgctcctccggcggagggtttggcaagtgggtgctgatgaaccacgaggagtacgtcgagaagaagtcgctgtacgccatgaaggccgccggcgacatcggcgggaagaccatcgacgcgagcctctcggcggcggaggaggccaaggtgacgtgggtggttgaccccaaggggacgccgggcgacaccaccttcaccaccatcgcggcggcgctcgagaaggtccccgaggggaacaccaagcgcgtcatcctcgacctcaagcccggcgccgagttccgggagaagctccttctcaacatcactaagccctacattaccttcaagtccgaccc

SEQ ID NO: 28812 - DNA, 511 bp, Oryza sativa
  Clone ID: uC-osflm202104d11b1
attgtcctcggggcttctggagaccgggccaagaagaaaactttcccggcactcttccatctttttgcacagggatttatacaatcaggtgaagtgcatatatttgggtatgcgagatcaaacctttctgatgatgggttaagggaacgcattcgtggatacctcaaaggagcctcagaagaacatctctcagactttttgcaacatataaaatatgtcagtggttcctatgacagcggagaaggatttgagaaattgaacaaggaaatttcagagtatgagaagtcaaacaaatcagaaagccctcgcaggctcttctatttggcattgcctccatctgtctacccttcagtctgcaaaatgatcagaacatattgcatgaatccatctggatggactagagtcattgttgagaagccatttggaaaggacttggactctgcagaagattaagtgcccaacttggggagctatttgacgaaaccaactctacagaatgatcactacttgg

SEQ ID NO: 28813 - DNA, 434 bp, Oryza sativa
  Clone ID: uC-osflm202104e02b1
tttttattcagcccgacggccattgacaagggagctatgaggccggcggaccgtggagagctaccacgcccgggtcgcgcatcaggctcgggccctagcgggaccgcgcggctatcgacattactcagcgaccggctggatgcgacgcactgtctagctaacgatggatgctgactgagcggctggtatgcatagtgccgcgcaccacacggtgggccaccatggctgtgaaagcaaccctgatgaccattggcgagaatcaaccgaacgtgcagtactagggggagatcactaaggaggacggccatcaggtacggatatctaacctggctacgacggtctacgctgaactcacggttcatatcggtcggtggtcaggagaactcttgctgagctctgattcacaacgaccggatgagcctatgtcgagggat

SEQ ID NO: 28814 - DNA, 417 bp, Oryza sativa
  Clone ID: uC-osflm202104e09b1
cgtcgcgcatccgacggccactcaccatcggcgtcgggggaggcgaaaacagcggctgcaattccgcttccaggtggagggggaggaggcccggtttgtgtgccacgccgccccactccgtccgtggtttgctacccaagaagacaagaagaaggaagtggcgaaacctcaccctccatcctccatcctctcctttcttccttcgaggaggaggagctatatatagacggggatggttcatctagcctcctcaccggttttgatttgatctgtgtgatttgagtgagtgagtgagattctttggaggagggattttggtttggtttggtttggtgggtttgtgcgggattttgtggggaggagagtaatggctaccgcagggaaggtgatcaagtgcaaagcggctgtggcatggga

SEQ ID NO: 28815 - DNA, 514 bp, Oryza sativa
  Clone ID: uC-osflm202104f04b1
tttcagcatgcattttatttaggcacggtccacagttcatacatgtatagtggatacgtctcgtcggcagacactcacggtatagtagggtagtcgtgtgtacagtgatatagtcatatctgcgcgtcttttcatgccgttcgttgacttcgttcacagggtcagggtcgggtaggcgatatcgagtgtgacgccacacaggccggggccaccgacgtcgcggagaatccggatgtggccgcgctcgccccatgactggccccatgagttcttgatggtccagtacttggcgccggaagacgcgtcggtgccgtacccgacgacggtgacggcgtgcgctaggcgcgtgccgcacgggcccgtgtaaacgccacccttgtagaactgcatcccgctaccgacctcgatggccacagccacgggctgccgagcgacggcggcctgcaacgccgcctcgttccgcggcggcaccttcccgaagccggtgatcttggcggcatggtgcgcggacttg

SEQ ID NO: 28816 - DNA, 444 bp, Oryza sativa
  Clone ID: uC-osflm202104f06b1
tgttctccgggatcacactgatatgaatgcagagggaaagaatagtgtacggagcgtgcatgtgaatccagacgtaaatggaattagagcattctacggcaatgatctgtgtgtcgcagatgtatgtctatctcttccagctgtgacttcgctaaccgatcatttccacgcgactgagtcgatctcgttccgggcagatttgtacagctctagcctcttgactaaggaatccctcttctccatcaaagcgggatcctcatccaacatcgcgctgagctgtttcttctccttgcttcccacatgagcatagaaacggttaagcaagtttctatttgccttcttcacttgactgtgcacattggtttttgaactggcgatacgcattgtctcgtattccatgattttgtacgatgtatacgtttggcccttatatgaaacctctga

SEQ ID NO: 28817 - DNA, 507 bp, Oryza sativa
  Clone ID: uC-osflm202104f08b1
ttgttccttcagcctcagcttcctcctctccggcaccgtggaggccctcccgatcctcctccacgagcggcgcgtcctgatgcgcgaggcgtcccgccgcgcctaccgcctttcctcctacgtggtggccaacgccctcgtcttcgcgccgtgcctcctcgccgtgtccctcctcttctcggcgcccgtctacttcctcgcggggctccgcgccacgacccaggccttcgcctgcttcgcgctcgccgtgtggctcatcgtgctcatggcgagctccctggtgctcttcctcagcgccgtctcccccgacttcgtgctggggaactcgctgatctgcatgtcgctgggcgtgttcttcctcttctccggctacttcatcccgagggagagcattccgaggtactgggcgttcatgtactacgtgtccatgtccaggtacccgctggacctgctgctgatcaacgagtacggcggcagcagctgcggcaggtgcctggcgtgggcggt

SEQ ID NO: 28818 - DNA, 481 bp, Oryza sativa
  unsure (1)..(481): unsure at all n locations
  Clone ID: uC-osflm202104f09b1
tttctccttgtgggatatggttttggtgcgtcttttgtcgccctttttgctcagttgggtggtggaatatacaccaaagctgctgatgtcggagctgatcttgtgggaaaggttgagcagggaataccagaagatgatcctcgtaatcctgctgtcattgctgacttggttggtgacaatgttggagattgtgccgcacgaggggctgacctttttgagagcatagcagctgaaattatcagtgcaatgatactcgggggaacaatggcacaacgctgcaaaattgaagatccctcaggctttatactgtttcctcttgttgttcattcatttgatctggtgatctcatcagttggaatactctcaattcggggaacacgtgactctgggttaatatcccctattgaagatccgatggcaatcatgcagaaaggatattctatcactatactngctcgctgttgtacctttggagtgtcta

SEQ ID NO: 28819 - DNA, 516 bp, Oryza sativa
  Clone ID: uC-osflm202104g02b1
gtgatctatggcgcatccagagatccacctgaaaagcaggcgccgatgtgtactgtacattcatttcctcataatattgatcattgcctaacctgggctaggtctgagtttgagggtttgcttgagaagacccccactgaagtaaatgccttcctatcgaatcctggtggatatgcaactgtagcaagaactgctggtgatgcacaggctagggatcagcttgagcgcgttattgaatgtctcgagagagagaagtgtgagacattccaagattgtattacctgggcccggctcaagtttgaggattatttctccaaccgtgtgaagcaactgacatacactttccctgaagatgcgatgaccagctctggtgctcctttctggtctgctccaaagcgtttcccacgaccactggagttcttgacatctgatccaagccagcttaactttattttggctgctgcaatttaagggcagagacatttgggatacccatacctgactgggtcaaaaacc

SEQ ID NO: 28820 - DNA, 494 bp, Oryza sativa
  Clone ID: uC-osflm202104g04b1
tataatttctcgtgccactgcactgcacctaagggggatagagctgaagttgctgccattcccatcttttccctgcagctctagtttcagctcctaacacttgttcacagcatagtcatctcctgttagtttcatctgcaggacctatagaacaaacattacttccggctgattcccgttcttctctccctcatggcatcactgataacggtacaagaaaggaaggaaggaggaggaggagggggagaaagaggaaggagacagcaaaagatgaaggggagtgtgttccatctgcggaggaagtgtccattagggttaatactctttatgagagtggcgaccccattgggaagaaggagttgggccggtgcgtggtacattggctaaagcagggtatgcactcaatggctttaaaatttgttttcacagaaatgcttaacgatggagtcacatttttactggatggtggatcattctgagaccacctcggtttt

SEQ ID NO: 28821 - DNA, 477 bp, Oryza sativa
  Clone ID: uC-osflm202104g06b1
tcgtcatatctctcgtggtcagccaaagcgacaggggctaattacaggctggagcgggttttaaagtgcaaagagacttgacgccggggatatcagtcctaatttatctggaatgacaacaaccagcttctactgggaattcgtcgagctaaccgcccacatactgttatgccatcttcagtcctatctagtgatagcatgcatattggtctttttgctgcggctgctcatgctgcttcaacaaatagccggtttacaattttttataacccaagagcaagcctcttcagagtttgttatcccactttctaaatatgttaaggctgtatatcatacccgaatatctgcgggcatgcgtttcaggatgctttttgagacagaagagtctagtgttcggagtatacatgggcaccgaaacaggaattagtgatcttgatgctgattgttggccaacttcacattggctttctgtaaagg

SEQ ID NO: 28822 - DNA, 513 bp, Oryza sativa
  unsure (1)..(513): unsure at all n locations
  Clone ID: uC-osflm202104g12b1
taaccccgtctccttcctccattcctccgccgctagaaccttctagaagctctcctcctcctcccatggcggcgacgatcgtgtccgtcaaggcgcgccagatcttcgacagcaggggcaaccccaccgtcgaggtcgatgtgtgctgctcagatggaacctttgcaagggctgcagttcccagtggtgcatcaactggtgtctatgaagctctcgaattgagggacggtggatctgattacttgggaaagggtgtttccaaggctgtcgacaatgtgaactcggttattgccccagctctgattggcaaggaccctacgtcacaggctgagcttgataacttcatggttcagcagcttgatggaaccaaaaatgagtggnnggtggtgcaagcagaagcttggtgctaatgcaatcctggctgtgtcactggccatttgcaaagctggagctatcatcaagaagattcctctgtaccagcacattgccaaccttgctggaaacaagcaactg

SEQ ID NO: 28823 - DNA, 524 bp, Oryza sativa
  Clone ID: uC-osflm202104h01b1
tacattatgcatctcaaacaaatttctatgggccatccggacatctcatttgtctccatggggctgggcaagacactcttggtcgtctttagcttgctacatgccttagtgttagcaacatcagtaggtgttgagcatgcaacagatgatgtatccacctacatcatacatgttgcacatgtgcatgcgacacctccaactcatgcctcgcaatgcatggaccagcacgccattgcacactacacctcctttctccaagggatcctcccttctcacttaagcgagccaacaccacgccttgtctatgcatactcccacgcggccacaggctttgccgcgaagctagcgaagcaccaggctacacacatcgtgcaccatcccagcatccttgccatcttccccgacaagcgcaatgagttgcagaccactctgtctccctccttcctcggcctctcaccgtccaacggcctcgtacaggcatcgaacgatggtggcactggtgcagtgatcgaatggtagacact

SEQ ID NO: 28824 - DNA, 470 bp, Oryza sativa
  Clone ID: uC-osflm202104h05b1
tactatacagggaagggcaattggaggaagagagcggctgttgttacgcctaaagcattattcacgctcggcgagatggcaataatccatgtcatccaccttctgtgactatcaaccgatcactgaaccgcgacatgaaaagaggcaacagcttgatctcgggcgcgttaaggtggcgatcactgccttgtttgccattcttatcatcatgattcatagggcggcgcgaacattttctacaccacgagcttcaactatggtgacagcgcttcctcctccagttcactttcagaccgccggtcacaccccagcacttactgcgtgggcaagaatatcaaggccatgtgcgcgcacaccgactagactgacgcttacgagacgagcctcgtccaagccggcggcaaccccagcgcgggctcgtcacgtggtcgcccaggacgtagcgcacgcataacggcctgcatcggtta

SEQ ID NO: 28825 - DNA, 159 bp, Oryza sativa
  Clone ID: uC-osflm202104h08b1
tcggtacagcacaaatacaggatcggactggtgtgggtattttctagtgcagccctcgtgccgtggctactgacggttttagttgggctctttggctctacatctctcgctgaccacagtgcaggtgtagatgaggtcaactacatcagggggctaacc

SEQ ID NO: 28826 - DNA, 496 bp, Oryza sativa
  Clone ID: uC-osflm202104h10b1
tagctcccatggccgcacgccccgcgcgctagctgaagcagccagcctcgggccccacccacgcagccgccggcgccggcgccgccgctccccatgaggcagccgcacctcctctcgccgcagcagctctccccgtccccggtcctctcctcccacttctcgccgccggcgcccgggggctcgccggcgtggcggcggggccgacaccaccaccaccggcgggcgttccacccgccgctctcgtcgctgcgtgaccccgacaaggccacgctccgcaaggcctcgcccaacgtccccttccgcctcggcggcggcggcggcggcggcggcggtcagggcggcggtagcagcaaggaccggcgacccgacggtgaccaagaagaggaggaggaggaagaggcggttgctgaggataagggagacgacggcccgggggccaatatcgggacgcttcttggccgggcgctgatggttggagtcctaggggggttcgggg

SEQ ID NO: 28827 - DNA, 398 bp, Oryza sativa
  Clone ID: uC-osflm202104h11b1
tctttggaatcctagcgaagatatcaaaagctatgccaggcttggctggtgtcaatttgacggaaatacttcagggtgcagatcagtcccagaaaggaaaattgctgctcgatcgtgaggatgcaactggcgacaggatccaggtgtccatcgagtgatcaatgcctacatacattgcctacaagcatggatggccagtaatgtacggcaaatcgctcttcaatattgaagcaaacgattttccaagttgtaatggtagccgtttagcgtagtaccttgaagtgttacttctgcgagttgggtcttcctgtttgcgttgccttgtggtgttaataatcctggattcctgtgttgattcaaataaaagaaacctatcatcaggggctttagaatgttct

SEQ ID NO: 28828 - DNA, 434 bp, Oryza sativa
  Clone ID: uC-osflm202106a02b1
ggaggtgctcttcaacatcaactcgctccgctccttcgacggggtcgacgagatcaaggaggcgctggaggagcgctgccctggcgtcgtctcctgcgccgacatcatcgtcatggccgtccgtgacgccgtcgccctgacaggtgggcccttctgggacgtgaggctcgggcgcgaggacagcctgactgcgagccaggaggactcggacaacatcatgccgagcccacgcgccaacgccaccaccctcatcaagctcttcgacggctacaacctcaccgacaccgacctggtcgcgctctccggctcgcactacatcggcgaggcccgctgcttgttcatcgtcttacgcctctacgaccaggccggcttcggcaggccacgaccacaacatggaccccgcctaccgagcggggctcgactagctctgcccc

SEQ ID NO: 28829 - DNA, 68 bp, Oryza sativa
  Clone ID: uC-osflm202106a03b1
gggggccggaactccctgctcgacccaccccacccggccgttttctatcaccccaacacccccccacc

SEQ ID NO: 28830 - DNA, 408 bp, Oryza sativa
  Clone ID: uC-osflm202106a05b1
gattattcttacaccggccaccaccagtcacacaacacagcggtttatgattggtagagcccatgtctgagccctgccttgctggccctgagctctctcttgctgcttcttttaatgggtttttgtctccttggatttgtgcttgtgctcacctgggcgtggagttctctgcatgagagagagagagagagagagagagagagagagagagagagagagagagaggacacctctgagctgtttcttaacaagtcttcaagatttggcatacctactgaaagagagcaaaggagaggagggctatagggaaaaaagtattttttttttgggggtacaaattcattgctagattctctttcatcccggagagcagtcaccatttgaggcacaatccttgctgaacgagtg

SEQ ID NO: 28831 - DNA, 437 bp, Oryza sativa
  Clone ID: uC-osflm202106a06b1
cccgccggcgggggccgggccggaatggccggacccacgcgtgcgggcttttctttggctcgagccaatctctcgctgtgtctctggcgcgctctgcactagcaccggctcggctcggctcgcgcggcggcggcggcggggcggcgtggcgccgagggaggggacgccggtgtggtgagggcggcggcgaggggactcgccggcgacgagctggtttgggtatgagaggggttacccatgcggcgccgaccacgagcgtgccccgccgcggctccatggacggactcctcatcttggtcttctacctctcgcttcctatacgtggaggacgcgaccactcgttaatctgctcctctaattgatagccgatctcgcctgtaccccacactctctgatcccgctctctatctctgcttccattcgattcgattcgagct

SEQ ID NO: 28832 - DNA, 521 bp, Oryza sativa
  Clone ID: uC-osflm202106a08b1
ataccttcgagccctaatcccctcttccccttcctccgggctacggcggcggcggcgacggtgaccgccggagccgacccgatcccacccgagtccttccctgtgcgcgcaccgatccttcctctacttgccgaccgccgcttcctcccctgttggtgtgggcgcgggcggctagaggaatcgaattgaagattacggaacaactctggagacatggcagaggggtccctagttgttgccatttgccagtatggtggagaggtcacttctggccccaatggcaatttgatctacaaaggaggagaagcacacgctgttgacgtcacacgagagatgtcactagataacttcaaggatgaggtgtccaaggtgtttcatgttgaggttgcagaagtgtcactgaaatactgtctcccgaacaataacagaactcttatcacaatatcatgtgatcgagatttgaacggatggtcgattttactgctagttctgcacaagtggatgtttttctgataactaga

SEQ ID NO: 28833 - DNA, 416 bp, Oryza sativa
  Clone ID: uC-osflm202106a10b1
ctttctagcccatgattctgcatcaaattgaggcctggggagatgttggagtaacagaagttgttttagccatcaactaccgaccggaggtaatgctcaatttcctgaaggactttcaggataagcttggcatcacaatcacgtgttcccaagagactgagcccttgggaactgctggccctcttgctctaccaagggacaagcttgtggatggatctggtgagccattctttgtcctcaacagggacgtcattagtgaatacccttttgctgagctcatagaatttcacaagagccatggtggtgaggcaacgattatggtcaccaaggtggaccaaccatcaaaatatggtgttgtggctatggaggaagtcactggaatggtggaaaaatttgttgagaaacccaaaatattt

SEQ ID NO: 28834 - DNA, 388 bp, Oryza sativa
  Clone ID: uC-osflm202106a12b1
ctcacttaatctttcgccgtctccgaggcttgcacaggggttcttcctcatcttccgccgtgggcggcgacagcagcggccgcggccatggcggcggcggagcagagcgcggagcacttcagggtgcccttatctaatgggagaccagcccgtaattactcatacttgagcgctaacaccccgggaagagcagctggtgtgcaaaggaagctggagttggatcaccaggtgaatatgaattcttgtcacgctccagagggtaaccataaactgacaaaggcagagggaatgaatcaggcttgggccagaccaccaccagcagcagcagcagtaaggagcaatggaaattacttcactaaagaccagggtccttgtgcgcctgacattg

SEQ ID NO: 28835 - DNA, 570 bp, Oryza sativa
  Clone ID: uC-osflm202106b05b1
cagtttctttattgaggcaccagaaaattgccttgtcatggatggtacaaaaggagagaaatggttcgagttgctctggcggaattcttgcagatgatcagggcctgggtaaaacagtgtcgactatatcactgattttgacagaaaggtcaccagttccatcttcagctgttaagcaagaaccatgcgaagctgtaacccttgacgatgacgatgaggatgacgatgctgagcctcatttgaagaaaccggcactagcacatctagcagatacatgtaaacctgaagcgacaagtagtaccattaagacagaaaatcctattgcaaatgttaaggctagaccagctgctgggactttggttgtttgccccacgagtgttctacgtcagtgggcagatgaactgaggaataaagtcaccagtaaagctaacttgacctttttagtatatcatggtagcaaccgcacaaaggatcctaatgatcttactaaatacgatgtcgtgttaaccacatattctatagtaagcatggaagtaccaaaacaatcaagtcctgatagtgatgatgaaa

SEQ ID NO: 28836 - DNA, 542 bp, Oryza sativa
  Clone ID: uC-osflm202106b07b1
ttgaataggcctgtgtcaaggagagggtagtagcaccttgctctcctttgccttcagagaaaccggaagcaatggcgtctgctactctcctcaagtcatctttccttcccaagaagtctgaatggggtgccacccgccaggctgccgcccccaagccggtgactgtctccatggttgtccgcgctggtgcctacgacgatgagcttgtcaagaccgcgaaaaccattgcatcaccaggaaggggtatccttgccatggatgagtcgaacgcgacctgcggtaagaggcttgcgtcaattggccttgagaacaccgaggccaaccgccaggcttaccggaccctccttgtcaccgcaccgggcttgggacagtacatcttcggtgctatcctcttcgaggagactctgtaccagtcaactgtagatggcaagaagattgtcgacatcctcactgagcagaaaatcgttccaggtatcaaggtcgacaagggtcttgtgccccttgctggctccaacaacgagtcatggtgccaaagtcttgac

SEQ ID NO: 28837 - DNA, 385 bp, Oryza sativa
  Clone ID: uC-osflm202106b10b1
gttcattccgccacatcagcagcgtcttatttttgccggcatgcagctggaggatggcaggaccctcgctgactacaacatccagaaggagtccacccttcaccttgttctgcgcctaaggggtggaatgcagattttcgtcaagactctcactggcaagactattaccctggaggttgagagctcagacaccattgacaacgtgaaggcgaagatccaggataaggagggcatccccccggaccagcagagactcatcttcgctggtaagcagctggaggatggccgcacccttgccgactacaacattcagaaggagtctaccctacacttggtgctccgcctcaggggtggtatgcagatcttcgtcaagactcttactggc

SEQ ID NO: 28838 - DNA, 388 bp, Oryza sativa
  Clone ID: uC-osflm202106c03b1
tctacttatattatagataaataacgtcaataaaaagggccaagctaaactaattaaaagggacagaggaaaaggttgtacacttacattactttttttttcttggattactaactttaatgggttatttcggtcctgggaatacgactgaatgaaagcagtgttttcagctacatggttttcaactgagagagagagatagagagagacagaaagtttggctgaggctctcctttcacaagatgcttcttattcaacaagttttcaggatttggcagacctcctgatatagacccaagggtgatgacttgctagggaaaaaagtattttttttttgggggaacaaattgcttgcttgggtttatttgatccctgagagggttcacaa

SEQ ID NO: 28839 - DNA, 444 bp, Oryza sativa
  Clone ID: uC-osflm202106c06b1
gtaatttgtttgacgaacccaccaaatctgcatgcgatgatgcgtcatctgatcagtccatggtcatcgtcgccgtcacggacggaggacggcgccctccctgccgccgtgtgccgtccagagctttttcgtccgcgaggctttctagtcgttgtgccaaccacacagaaaacgagaaggaatgtactatccacaatgatgtcacactataacagtgttcctcttcggaccgaaacagatcacactggccgagacaactggtggcacattcagggagtacattgtcacattcgatggctactccttggtatacccaaagagctgtatccacgaacagggagctgatgctgacatattctctatagaccgaggattactcgacgagaacatgttggtcgagatatagtctccttcatcggcgaagtacatgacggctgaagatct

SEQ ID NO: 28840 - DNA, 539 bp, Oryza sativa
  Clone ID: uC-osflm202106c08b1
gtaactctccgaaactgattcgatatatgatacagagaaattggctgagaggattgcaaagctttctggtggtgtggctgtcatcaaggttggggctgcaactgagactgagcttgaggaccgccaactacgtatcgaggatgcgaagaatgcaactttcgcagctattgaggagggcattgttcctggaggtggtacagcgtatgtgcatctttcaactaccgtccctgcgatcaaagaaacaatcgaagaccatgatgagcgccttggtgcagacattattcaaaaggcgttggtagctcccgcttcactgattgcccacaatgctggagtggaaggggaagtggtagttgagaagatcaaggacggggagtgggaagtcgggtacaatgcgatgaacgacaagtatgagaacttgattgaggcgggtgttattgacccagctaaggtgacgagatgcgcgctccagaatgctgcctcggtggctggaatggtccttaccacacaggccattgttgtcgagaagccgaagcccaggg

SEQ ID NO: 28841 - DNA, 523 bp, Oryza sativa
  Clone ID: uC-osflm202106c09b1
gattatccctacaccggccaccaccagtcacacaacacaacaatttaggattggtagagcccatctctgagccctgccttgctggccctgagctctctcttgctgcttcttttaatgggttttttgtctccttggatttgtgcttgtgctcacctgggcgtggagttctctgcatgagagagagagagagagagagagagagagagagagagagagagagagagaggacacctctgagctgtttcttcaacaagtcttcaagatttggcagagctactgagagagagcaaaggagaggagggctatagggaaaaaagtattttttttttgggggtacaaatttcttgcttgattctcttcgatcccggagagcagccaccagttgaggcacaatccttgctgttcgtgtgcctgggtttgatagctgtccagatctgcggcacttgcccgatagattccaagaatccgagcacaaactctcgtttgctgcgaaaagatagtaggtggaataagttgagcaata

SEQ ID NO: 28842 - DNA, 388 bp, Oryza sativa
  Clone ID: uC-osflm202106c10b1
gttaccaaaaatcgtggacaacaccactaatcgatcatgggaattaacaacaagtataataaataaaataaatgtacttccacttagtaggtagctagagagcatgcatggaaggctatatatatagctggattattaaagctttatgtgattaatgagggagctagctgtgtcgaaagtatatccaagggttttctgggcggggagatcatcgctataagtgaacaggtaacctatctcgcaaccggatgctttcccgatcccaccgttgtagggtttctccacccctttgatccacttttgcgcattctccagatcctccttgctgcgcttgccatttccggcggtggcgaggcggccgaggctctgcagcgccttcctggtgatg

SEQ ID NO: 28843 - DNA, 527 bp, Oryza sativa
  Clone ID: uC-osflm202106c11b1
aagagctcggtttggagaagggttggggtgactgtgcaaagcgtgtgcttgacaccatccacttgcttcttgaccttcttgaggcccctgatccggccaacttggagaagttccttggaactattccaatgatgttcaatgttgttatcctgtctccgcatggatactttgcccaatccaatgtgttgggataccctgatactggtggtcaggttgtgtacattttggaccaagtccgcgctttggagaatgagatgcttttgaggatcaagcagcaaggccttgatatcacacctaagatcctcattgtaaccaggctgttgcctgatgctgttggtactacatgcggccagcgtgtggagaaggttattggaactgagcacactgacattcttcgtgttccattcaggagtgagaatggtatcctccgcaagtggatctcccgttttgatgtctggccattcctggaaacatacactgaaggatgtgcaacgaaattatgagggaaatgcaagccaaacctgatc

SEQ ID NO: 28844 - DNA, 543 bp, Oryza sativa
  unsure (1)..(543): unsure at all n locations
  Clone ID: uC-osflm202106d01b1
cggacttgttgattctaccggaaaggatatgcccctagcttccatttacagtgatgggatgctccaatcactcactagtgatggccagccagtcttcactactgttcttcaatttaataagaaggaggaagaattcatatttaacaacatacctgagaaaccagtgccttccttgttgaggggatacagtgctcctgttcgtcttgattctgatctgactgagagtgacttgtttttcctacttgccaatgattcggatgaatttaacaggtgggaagctggtcaggtgctgtcacgtaaactgatgctcagtcttgtagctgacttccagcaacagaaaacactggccctgaaccctaaatttgttgatggacttagatcaatcctgcggaacacaagcttggataaagaattcattgcgaaagcgataactttgccgggtcaaggggagattatggatatgatgccagttgcagatcctgatgcagttcatgctgtccgtacctttattaagaaagagcttgcccttcaactcanagatga

SEQ ID NO: 28845 - DNA, 410 bp, Oryza sativa
  Clone ID: uC-osflm202106d04b1
ggcggtggtttggcttgctcacaccacgacgctatgggggggggagaattcatagtgttggttattcatcaaatgctcatgactggaagatcctaatatgtgacattgagccttattcgaataccagttagaaggcaaggcgctcattgagcctgtaaacgacaaaaagctgaaacatcgcgcgggcctgttgatggttggcgtgcgtcacgaatcttgagggaagggcccatctgtacattaccacaagcaccagacaacctggggggaagtatcgatgcttaggcttgtattgatagagtcgtctatactaagcctgcaagcgatcttacacgcgagcattgagtggcacgaattcctgcaatattcggatgacactgactaatggtatgttcttggcaggccccgcc

SEQ ID NO: 28846 - DNA, 454 bp, Oryza sativa
  Clone ID: uC-osflm202106d06b1
aagcttgttacgcaacgccgcgtgcaaatggcgtcgaggacgatgacactggaggtgacggtggtgtccgccgaggaggtcgtgctgtcgccgacgaggcgcccgctcggtcgcggcgcgtacccagtggtgcgcacggcgtgcgtagcgatctcaacggcggcggcggtgtgcacgcgcgtcgacgaggaatcgggcggagactgcaacgggtacccctactggaaggagacgctgcgggtggcgttgccggagggggcgcgctggctggacgtagagatctgccggaggaggccgaacggtcaggtggaggcggtggcggaggcgagcgtacctgtaggcgacttcaccgttggaccgccgggccacctgcattgcctcagctacaggctgttcgacgcctccgggtgcacgacgcgccgtaacggcatcgtcaacatcaccgtcaggagga

SEQ ID NO: 28847 - DNA, 536 bp, Oryza sativa
  unsure (1)..(536): unsure at all n locations
  Clone ID: uC-osflm202106d09b1
ttactcatcatcgtgtagttttaggccatctgagggcctttgaatggctctcggcctccttcatttttcatagcatttgtgtagtgtgtgcaaatccatcatcgcatcttcatatctgaagaaatgaaggtgaccactcagctcaagcccatggcctcctcgtcgacgtcgccgtcgccgtcgcggctgccgcggagcgcgagcggcaaggcgcccacctcgccgccgtccagctccaacgcctcgcgccgccaccaccagcagccgccgcgggcctcggcgtcgacgcccgccaccccggcgccgtcgcgccaccacctcaggtcgctgtccatcagctgcatgacgatcaggaccgacgacgactcgccgccgccggccgccacccacaaggacaaggcggcgacggccaagccgctgtcctactactcgtcgatgctgtcgccgaggaagctcatgcagcgcgcgtcccgcgcgttccgccgcagcaagtcgtctcgccggaggaagagcaaggacgacgtcatcgtcngcgt

SEQ ID NO: 28848 - DNA, 527 bp, Oryza sativa
  Clone ID: uC-osflm202106d10b1
ttgcctaagtcgcgtcgcaccgaagcagagtagagaaggagaggagcggagcgccatcagccgtccgatcgagtgatccgatggctctcgctctctccacctctgctgctgctgccgctgccgccgcggcgcgggcgctcgcggcgagggtgacgacgacgaggggttacgccgcgtcggcggcgtcgtcggcgatgaggcgggcggtggcggcggtggaagggaagggcgctgcggggatgacgcaggcgaaggacgggtcgtcgtcgtcggcggcgagggaggtgtcgtgggtgcccgaccccgtgacgggccactaccggccctccaacttcgccggcggcgccgacgccgccgacctccgcgccgcccacctgggccgcagctacgcccgcgcgtgatgcgcgcgacctcgccgtcgtccgaccgacgacgacgccatccatccatatatatctgctccgcgtcaactactcatcacctcttgaccgcgccgggcggacgccgatacgctccggtgcacctga

SEQ ID NO: 28849 - DNA, 477 bp, Oryza sativa
  Clone ID: uC-osflm202106e01b1
ccccaatcttgcccttcctcctcctccgatcgatccaggccccgcccctccccgcccctcgccgcgcgcgcgaaggagagagagagagagagggagagagggagggagatcgcctcgccgccgcggcgtgggatccggaggtggtgtagcgaggatgtcgtctgattcgtcgtcgtgggcgcgcgcgctcgtgcagatctcgccctacaccttctccgccatcggcatagccgtctccatcggcgtctccgtcctcggcgccgcctgggggatcttcatcacggggagcagcctcatcggggccgccatcaaggcccccaggatcacctccaagaacctcatcagtgtcatcttctgtgaggctgttgcaatttatggtgttatcgtggcaatcatcctccaaactaagcttgaaagtgtaccaactgctctagtgcatcatccagagtctctccgggctggctatgcaaactttgc

SEQ ID NO: 28850 - DNA, 565 bp, Oryza sativa
  Clone ID: uC-osflm202106e05b1
ctgagttcttgcctgttaatttctcctcttcctccggcgtcgtcgtcgaggagatcgttcgatcgactgatcagcgattaggcgtgagatagaggaggaggaacggattgtggttttcttgaattgttaggttgggttgtggttatgatgatgcaggggggtaggattgcgaggagagggttgtcgaggctcgcagcggcggtggagacggccgccgtcgcgccgccgagaatggcggacttcaaccacgtcccgctcccctacgacggcccgtccgccgccgagatcgcacggaagcgcgccgagttcctcagcccgtccctcttccacttttattccaaaccactgaacatcgtggagggtaagatgcagtacctgttcgacgagcgcgggcggcgctacctggacgcgttcgccggcatcgccaccgtgtgctgcggccactgccacccggacgtcgtcggcgcgatcgccgcgcaagccggccgcctgcagcactccaccgtgctctacctcaaccacgccatcgtcgactttgccgaggcgctcgtcttcaagatgcccc

SEQ ID NO: 28851 - DNA, 286 bp, Oryza sativa
  Clone ID: uC-osflm202106e06b1
gcgttcgtttggtctaagtaactctagagcgcctgcaagggggtggcgtgatttgagcccttgagcgacaacagttacatatcgacgcctggtgcctctgggcatcgttgataggaggacatgcatcatcacgatggttcaacccactgtgctatcataagtgtgacggcaacatccacttttgtctgaccctgttgatgctgctaacgggcgccctacatcggcacatctcgcattgtaggatgacacgtgctggaccacaaggagctacatgacccacggcctt

SEQ ID NO: 28852 - DNA, 509 bp, Oryza sativa
  Clone ID: uC-osflm202106e07b1
tgaagatctccccttggagggaaccccgcccaagaatggcgggtctcggcggcggatggggcggcgggtacgacgacgacgacgactgggggctgagcgcggagcagctcgaccagctcgagcgggacgcctaccgcaagctcgccgagcgcaaggcctcctcctccgccgcctccaccgccacctcgccgctcccctccgcggcctactcgccggtcaagaacagccaccaccacccggcatccagggtttcccaggagtcttgcttcggcaaggtagaatcactttctccttctcggcttagtcaaccaaatgcatcgggaaatgcagttaataatagtcagggcaatatgtctaaggtatcagtacatcttttccttcattctactggtgtgatcgcagcgaagttccagtaccaccagaaacttgtggatgcagttcacaagatccccaagccagctggaacgggaggagagggtatgatgttccacactcatcatatcagagca

SEQ ID NO: 28853 - DNA, 408 bp, Oryza sativa
  Clone ID: uC-osflm202106e08b1
ttgctgctctcccttctcctctcctcaattaccacgccgcagccgcagccccccaaccctagctagtacggcgggcgacctgagggggtagctgcctacctctatacctgctatctccgttcgatccgggtcgggctcgtgctgctgggggcgggggcaatcaatcggcgagctcggtgatccatggccgtggctgtggggtggctgtgagggtgcccccggcggcgctcccctccgcgcctgccggcgagggggctcggactgaagggatctaggcgagctgaaaattgaagtgcaggcaaggagataagagcagcgtccaaattgtgagtacttcattagcaggaggtagtggttgggcttgctttgcttctttgcaatttggctttggcgaggtaacaatggctg

SEQ ID NO: 28854 - DNA, 471 bp, Oryza sativa
  Clone ID: uC-osflm202106e09b1
tgatttctcgccaccacacccacccacccaccaatggcgtcctcccgcctcctcctcctcgccgcgctgctcgccacggcggcggtgctggcggcgtcgcagaagccgaaggccgccacgccgacgaaggccacgccggcgtcgcccggccccgcggcggcggcggccgacggccccgcgccgacgaacgtgacggcagtgctggagaagtccggcaagtacaccaccttcctccggctcctccacgagagccgggtggacacccagatcaacagccagctgatggacagctacaacgggctgaccatgttcgcgcccacggacgccgcgttcgcggcgctcaagccgggcacgctcaactcgctgtcgtcgcaggaccagatccagctgatgctctactgcgtgctcccgcggttctacagcctcgccatgctcaccacccttggcgggcccgtgaacacgcaagcgttc

SEQ ID NO: 28855 - DNA, 557 bp, Oryza sativa
  unsure (1)..(557): unsure at all n locations
  Clone ID: uC-osflm202106e10b1
tttatgtgtttggtaatgatcatgaagaaaagagtaacagcttccttgattgtgactggggtaatatcggagattttgatgattttgaccgcttatttagcaatggtgactccatatttggtaatgagatggttgctgatggcagtaattttctctcagcatcttcagatctggtggatactactgtacaatcaatcccctttccacatataccactgaataaacaactatcttctgatcatggatcttcgcttctgattaatgaaacatctggtggaactaccgaacaagaaagcaagggagatgtgcagaagaagtcagtgaggtcacggagaagaacagaagaaagaggcaaaagtaaaatgtccaatagtacaagtggcttctcccagaaccaaggacagcatcgaccagccagttcgcattcattggccaaagcccctgcgcaaccccttcagactcctcaatacttgctattacatgataacangaacatgggacaacttcagcaggctaatcaagttattttccctgactatggatatccttcatatcaa

SEQ ID NO: 28856 - DNA, 474 bp, Oryza sativa
  Clone ID: uC-osflm202106e11b1
ctcactgttcagttctaccacgtacaacaacggaagtgagagagggagaagaatacacgggaagaggaggagcttagctagccagccatggcgaggcgctctccttgcctcgccgtcgccatgcttctgcttggggcgttggcggtggcgagcgccttcattgatgaagcggcggctgctggccgggggctcggccatggcgcccgcttcatgagcaagcagggtcgtgtgacatacgagaagctgccggagccggagccgaagccaaagccaaagcctaatcctaaacccacgccaaaacctgagcccaagccagagccggagccaaaaccagtacctgagcctgagcctaaaccggaaccaaagccagaaccaaaacctgagcctaagcctgaacctaaaccatacccagagccaaaaccggagccgaagccagagccaaaacctgagccggagcctaaacctgagcctaag

SEQ ID NO: 28857 - DNA, 553 bp, Oryza sativa
  Clone ID: uC-osflm202106f12b1
gtggattttaccaaatgttttgcagacagacatggtggatgagttgctacggacatcaacagatgcccctcttacttcggtgcccgtgtgggctcgggattttgattctcctgaagagcttatcacagagttctgcagagaatgcagagttgttcgcaaaggtttggctggtgatttgaagaaggccatgaaagatgggaagccaattatcatcgagggaattcatttggatccaagtatttatttgatggacgaggaaaagagagatgataattccaaaatggagaagaaggtagctgaatctgaaaattcaccagcaactgtaaagagcaagacagaaaagcaacaagaaaacgaactacatgagaagagaatggatgacagtcaggagtgcatgtctgaggagggtagaataagtgaagggctatcttgtgctaaaagccacgtaattagctcttctgatcctgcatgttctaaagagaaaaatcccagagctgaaggtgaaggacatatggatttggacctacagaaaaacaacgccaccaagaaggac

SEQ ID NO: 28858 - DNA, 427 bp, Oryza sativa
  Clone ID: uC-osflm202106g01b1
ggtgcctctgttccggagccgaactccgacgccttatcgactcactcaccaagtgctcgacgcaattccccaccggggagcccgcccgccatgccggagagcaacggcgccgcgtgcggcgcggcggagaaggtgaagccggcggccagccccgcgtcggaggagccggccgccatcgccggtaacatctacttccacgcgcagtacagcccccacttctcgccgctcgcgttcggccccgagcaggccttctactccaccgccgagagcgtccgcgaccacctcgtccagagatggaacgagacgtacttgcatttccacaagacggatccgaagcagacgtactacctctccatggagtacctgcagggccgcgcgctcaccaacgccgtcggcaacctcggcatcaccggcgcctacgcggagg

SEQ ID NO: 28859 - DNA, 530 bp, Oryza sativa
  Clone ID: uC-osflm202106g07b1
gtatttcttacatggcttggctggttcgtagctgggcaattcgacatataccctcgagaatggattccaaaggcaatggatagctttgagcttgctctgcagtttggaatatctgttcttgttgttgcatgcccgtgtgctcttggactggctaccccgactgctgttatggttgccactggaaaaggtgcttctcaaggtgttcttattaagggtggcaatgcacttgagaaagctcacaaggttaaagctatcatatttgataaaactggaacgctgactgtcggtaaaccttctgttgttcaaacaaaggtgttctccaagataccgctactagagctgtgtgatttggctgctggtgcagaggttggcttcttagatgcaaatgctaataatttttgttgaatgtcgtgtgatgttcctagtttgctgtctcatgtcatctaaccttaacttttttttaactttgtcaggcgaacagtgagcattctctataaaggcttttgagagtacacaaagagctcaggaac

SEQ ID NO: 28860 - DNA, 520 bp, Oryza sativa
  Clone ID: uC-osflm202106h03b1
cgccattcgtttccctcctccgcacctccacctccttggagaggggcctgtgccgccgcatgctgctgcctccgcgcggccgtctcccggcggcgggcagccgcgcagctgctctccgccgccggattcttgatcgccgtctcgccgccttcgctagccgcgcggaggggccgcatggtcgtgtcgctggaggactacgtcacttcacctgatggcctgaagtactatgatcttgttgaagggaagggtccaactgctgaaaagggctcaactgtgcaggtccattttgattgcatataccgtggcatcaccgctgtgtcaagccgcgaagccaaactactggcagggaaccggagtattgcgcagccttatgagttcagtgtcggatcgctgcccgggaaagagcgaacgcgggaatttgtagacagtgccaatgggttatactcagcacaggcgtcaccgaaacctcctgccggatgtacacaaaactgaaaggatgaaagtgggggaaagaggaagt

SEQ ID NO: 28861 - DNA, 383 bp, Oryza sativa
  Clone ID: uC-osflm202106h07b1
gtatattcctttttctgcagcgagggaaaactggattctcgcatttgacaagtttcatatgcagaatcatgatatctatgctcagctatcaggtaatagcaaggttcccaacgctaagagcttgccatccagatcagttggtagggccagaggaaggggtgagacaagatttcagcccaaaggttctagtacagaagaaaattcaaaggagcgagagcacagtattcaagaaatactgaaggctttctatattcgatttgttcgcctcaatggaattcttttcacaaggacaagcttggaaacatttggggagttgtctgctacagttatcagcgatttgcaaattcttctttcatctgggccttacgaggagcttaattttg

SEQ ID NO: 28862 - DNA, 154 bp, Oryza sativa
  Clone ID: uC-osflm202106h09b1
ggtttgtttttagctcgcacagacggcaacgcaactctgataatacttccataaaaagagaaagccacagaaatctatccacgatctgatagcacgctaagcccatagggaactaccgaatgagacatctcgaacaaaatggcggtgagcccag

SEQ ID NO: 28863 - DNA, 496 bp, Oryza sativa
  Clone ID: uC-osflm202107a03b1
gaaaaagattaaaaaaaactcgagctcacgcgcacacgcacgcgacgcgacgcgaccccgaatcggaggcgaggtcgccgactccgagcggatcgggccgaggtcgacggcatgggcagcggaggaggcgaggccgggggcggcgacggaggggagtcctctcctgctgcggctgcagcggcggcggtggcggaggccgcggcgctgcacatccggtgcgcgaacgggtccaagttcaccgtgcgggccgacctcgacgccacggtgggggcgttcaacgaggtggtggcggggagctgctacgtgccggcggcgcagcagcgcctgatctacaagggccggatcctcaaggacgagcaaaccctagaaagctatggtgttgaaacagatcataccattcatatggtgcgtggcgctggtcccccagccggatcagctgcacctgctgcagccagcccccaagcttcagctgctcctagcagccgcccaacagatg

SEQ ID NO: 28864 - DNA, 272 bp, Oryza sativa
  Clone ID: uC-osflm202107a05b1
gactatcgatcatggcgctcgcctccacctcctccggcgcgggcgcgtccgagctcaagacggccttcctcggggcgaagcgcgcgctcgccaatgccgagggagtcgcgggcgccaagcccgcgccgcgccgagcgctcgttgggttggccaagaagtcgtggatcccggccttcaagagcgacgccgcgttcatcaaccccgtcgtggctcgatggctcgatccccggtgacttcggcttcgacctcgttgggcttggcaaggacccggc

SEQ ID NO: 28865 - DNA, 286 bp, Oryza sativa
  unsure (1)..(286): unsure at all n locations
  Clone ID: uC-osflm202107a06b1
cgttatatttcaagatgcgccgccagcccngctgggagtcggacagctgtggatatcatggcgatgatggctatctttaccggggtcctgggaaaagtgagtcattcggtcccaaattcacttctggtgacacaattggtgctcgcatcaactatttctcacaagaatttttcttcactaaaaatggatctctagttggatccttacgaaacgaaattaaaggcccactatatcctaccattgctagtcatacccaagatgaagacgtgacagtcaacattggaaa

SEQ ID NO: 28866 - DNA, 480 bp, Oryza sativa
  Clone ID: uC-osflm202107a09b1
atttactcatgcttttcctcctctgctccagccgggtccatgcacaaagcgttctacatatatagagttagtgcgaaattcctacctacttacataaacaaacgcattcagatagccagcttcttgatcggcaacagcagctagttagagagcaacaagaggtagcactcacaatactttttggcaagctacgcaaaagctgatctaggagagcaatcgagcaggtgttgatcgatcgctgccaggaaacagaaacaatattcccacacaaactgcgatctggtagcaccagcaatggccggcagcacattcctggaggacatgctgaacaagcagatcctccatgaggcgacctgcagggacctcttggaacacatcgactacctgctcaactgactaaaagaggagtcagccttcaaagtgctgctgctagacacaccatcgccagtgaatcacatgtactagtgcatgatcgattga

SEQ ID NO: 28867 - DNA, 487 bp, Oryza sativa
  unsure (1)..(487): unsure at all n locations
  Clone ID: uC-osflm202107a10b1
tttgtgtttcatagaggagtaacagcctaccagggaagggaggagtctgaagactgtctgctctcttgaatttcttgtgtaatgtacaccacctaagcaggatgtaacagcaacaagtcgatgttgactggtacttgatctgttcgtcaggattcattaccaggttattggagctcgcaggactgtctgctctcttgcagtcccaagttattggagctaactatagatacgatgagaatgacaagaatgatgacattaccataagccagttatatcgaaaatgctcattgccgggcgtccagcagggggagcacgatcggatgctccccccgngcgtaccttctcacgtgcgtatcttgtggaaccactcatttctctctccctttttctacaaaagatatacacctagtgacttacaatgttcactatttataatctaatgttggagttacttaaatactcttttgcacaaaaaaaccacattttt

SEQ ID NO: 28868 - DNA, 231 bp, Oryza sativa
  Clone ID: uC-osflm202107b04b1
gggtgacatagctccagaatttaatctgttggattctgggggtttcttaaactaccatggcgttttttcaaccccggcaatcagctgaacatgcaccacgtcctcgtctgcgtggcgtccgtcgtcggcgcggttgacaatttacacgacccgtgcaccctgacacttgtgcccaaggagtgcattcagtcgctgacgaccaactctgatagccggacaactattatgcga

SEQ ID NO: 28869 - DNA, 535 bp, Oryza sativa
  Clone ID: uC-osflm202107b08b1
ggttcattttgctcctgctttgtctatccgagctcccttaattattggagggtgaagacatgaaggcagtagttcattgccttcacagagcttaaacttagaccttaatcttaatcaggctgatcagtttgattctgaggatgttgatatgattcagagtaatggacaaccagggataaacgcttttcctctcaacaggggcctttccattcctgagcatgttctgcgccatacaaattcttccagtgctacaagaaatccttcacaggttgcaagcttttgtgatggaatgacaggccaagaagttaacctgtttggtgggcatcgttcatcttgcaagagaaagaatattgatgggagtctcgcagagtcttctgccaatggtagctcacgtaataatcagcgaagtaatattatactggaaccttctccatgcagtcatgaaagcacttctagtttaactgcacctgcccctacaaaccatgttttttcatactcgtctgtggaacaggtaaaccagaataccaatatgtct

SEQ ID NO: 28870 - DNA, 252 bp, Oryza sativa
  Clone ID: uC-osflm202107b09b1
ttgccttaggcgtgaccgaatcggctagctagtgagaggggaggttcagttcacaggtgcagttccacgctcacagcagtgtccatagcagagcgcgaagggaagagggcgcatagaggaggaggagaggcagtcatgggcgaggaggagaaggtgaaggaggaggcggcggcggagaatgggaaggaggcggcggtagcggaggagaggaaggcctaatcatgttctgctgaatacaaattcttccaggga

SEQ ID NO: 28871 - DNA, 407 bp, Oryza sativa
  Clone ID: uC-osflm202107b10b1
tttgttacctccaccccagcttgaaatagctttgaataagtaccccaatctacgaactcctctttgttcctttgttaatcagcggaacatgcacagcatcttgcccagacagattttgaaagttctgggcttcatcaatgaaccgcaccaggcaccaattccatttgtgcctgctgcaatgcaaacggcagatgcaacctcctctcttcctggtgcaactcttatgtgaaatgtgatgtataaactccaatcagatgcgagaaggctttcctgatcacaagtacacacactgccttgtgaacaacgatgatatgtgagtaaaacagagcccagacaaggacagcggtgtcactcaaaagggtctgcgtttgctggacttgtttcaacaaaagtacaggttgtcagca

SEQ ID NO: 28872 - DNA, 413 bp, Oryza sativa
  Clone ID: uC-osflm202107b12b1
ggttatactgccagcttcttctcaactcgacataagagctccctggcttctctgtaggggggtcactttggtcgatggagggggggacgaagaaagttttcacagttcaggtggaggatggaaagcccaggaaggacggccggccggcggtagggccagtgttcaggagtgcactgtcaaaggatggattcccgccacttgagcctgacatgaaaacatcatgggacgtgttcagggtcgcagcaggcaagtacccagataatcggatgctcggatggcgtcctgtaaaagatggagtgatagggccatacatatggaaatcatacaggaagtgtatgaagaagtcctgcaagttggatctgctttgcagcagctgggggtgaagccaggttccccgattggaatatatggat

SEQ ID NO: 28873 - DNA, 543 bp, Oryza sativa
  Clone ID: uC-osflm202107c02b1
gactgctttcgccttctgggcggcggcgccggcgtcgcggcggtgctggcgtccggcgcggagcgcggcatccgcggcgacgatgccgacgtggcgcgccgcaagaaggcgttcggatcgaacacctacccgaagcccaagcccaaggggttcttccgccacgtgtgggacgcgctcgccgacgtcttcctcatcgtgctcctcgtctgcgccgccgtctccctcgccttcggcatcaaggagcacggcatcaaggacggctggtacgacggcgtcagcatcttcctcgccgtgttcctcgtcgccgcggtctccgccgtcagcaaccacagccagggcaagcggttcgacaagctggcacgggagtccgagaacatcatggtcagcgtcgtccgcgccgcgcggcgccaggaggtgtccatattcgacgtcgtcgtcggcgacgtggtggtgctcaagatcggcgacgtcgtccccgccgacagcgtgttcctggacggccacgcgctgcaggtcgacgagtcgagcatgacccgcgagccg

SEQ ID NO: 28874 - DNA, 454 bp, Oryza sativa
  unsure (1)..(454): unsure at all n locations
  Clone ID: uC-osflm202107c04b1
aaataataatactttattcctctctcttaattttatttttttactttgtttgagagagagaggatcaataatttcttgttgaaaaatggagattattagtcctagtagtagcagcaataacaattcacctgttcttgcaacatttcttgtggttcttgtagtgctcctagcatcatcacggccagcctcgtcgcagaaccagcaatccttcaccatcaaccccggcggcgccgcggcggcgaggcccggcggcggtaaaggcggcggcggcggcggcgggccgggcagcttcagcgacttcctgacccagaacgtgcagcactacgtgctgagcgagcagaagtacgccgggaaggtgaaggcgctggacgcggaactgtcggcagcggaggcccgcgcgccaggtacctggtgagccgcgacgggaggggaagttcangaccatcaccgaggc

SEQ ID NO: 28875 - DNA, 331 bp, Oryza sativa
  Clone ID: uC-osflm202107c11b1
ttgtaatggggcacatgatactgctaagctggctggtctccttgagaacttcatcaagaagtatgtccaatgctatggatgtggcaaccctgagactgaggtcctaatctccaagacccagatgattacactgaagtgtgctgcctgtggttttgtgtcagatgttgacatgagggacaagctcacaacttttatcctgaagaatccacctgaacagaagaagggtgctgggaaagacaagaaggcaatgaggagagctgataaagagcgtctaaaggaacgtgaggctgctgatgatgactttacgaagctaaagaaggacgcaaacaag

SEQ ID NO: 28876 - DNA, 445 bp, Oryza sativa
  unsure (1)..(445): unsure at all n locations
  Clone ID: uC-osflm202107c12b1
tgggctggtggcataaggcagcagcgattctcgccggggccgccgcccgccgccgcagtgccacgatggaccgcccgcccgcgccagcgccagcggtggcgctgctcctcgtcgtcgtcgtcgtcgcggcggcggtaatgctggcggcggtggagggagcgggggcggaagcaacaggggtgttccacgtgcgccgcagcctccccnccggtggtgcgggggcggcggcggaggcgtaccgagcgcacgacgggagccgaggggggaggctcctcgctgccgccgacatccccctcggcggactcggcctccccaccgacaccgggctgtactacacggagatcgggatcgggacgccgaccaagcggtgctacgtgcaggtggacaccggcagcgacatcctttgggtgaactgcatcntctgcgatcgatgcccacgncagag

SEQ ID NO: 28877 - DNA, 553 bp, Oryza sativa
  Clone ID: uC-osflm202107d01b1
ggagtcctgtgtcgcgagttcggccgccgctgccctgcgccgatctccatccccgtcggttgtcctgctgcttccgccgcatcctggagctgccgccatgtccgacatggagtccatgacagcccttatggagtctacaggctccaagctgcagctgcttcagcgtgcatttgccgagcttgagagccagagtgctgtttcattgaacttaaagtggaagcaacttgaggaccatttccatggccttgagcagtcgcttaagaaaaagtttgatgagctgaaagagcaggaaaaggagttcaaggagacagtcacgaaatcggagcagatgcttgagcaacaagaggctgctgtcgtggcaaaggaactgacttctcttgaaagactgcagcagaaaagggatgctgcgttggctatgatcttcggcaagtcaaagctgaacttgactatgcctgtaatcaacccaatcagcaaatctgtgagtaacaatgctgtgttaaatggcaacatcgctagcctgtggcccaaacctgcaactgcgcatggtgcatac

SEQ ID NO: 28878 - DNA, 225 bp, Oryza sativa
  Clone ID: uC-osflm202107d08b1
tttgttggattgcctagctttgctgctttgcttgcttgctgtggtgtggtgtggtgtgaattttgttgattggtcggagcttgcagttgtgtatggtggtggtggtgctggagctacattatgctagctgatagattgtcagatcggcgacgacataaatggtaagagcagcgcacggtatctggccgaaaaaattaatcaccagggattttatacgtggctgca

SEQ ID NO: 28879 - DNA, 443 bp, Oryza sativa
  Clone ID: uC-osflm202107e03b1
gcttcagatgaagcagctgtttgtagacaaggtgtttgtggaaatgtcgtcgtcgtcgctgtcgccggcggggtcgtcggacggggactcggcgggggtggtggtggcggcggaccaccggagggagaagcggcggctgtcgaacagggagtcggcgaggcggtcgcggctgcggaagcagcagcacctggacgagctggtgcaggaggtggcgaggctgcaagcggacaacgcgcgcgtgctggcgcgcgccagcgaaatcgccgggcagtacgcgcgcgtggagcaggagaacacggtgctccgggcgcgcgccgccgagctcggcgacaggctgcgcagcgtcaacgaggtgctccgcgtcgtcgaggagttcagcggcgtcgccatggacatccaggaggagtgcccccccgacgacccgctgctccggccatggcaga

SEQ ID NO: 28880 - DNA, 430 bp, Oryza sativa
  Clone ID: uC-osflm202107e06b1
aatttaaggaaaaaaaaacaaaacacaccaagccaaatagaagcgacaatgggatcgctcaccaccaacatcgtcctcgccgtcgccgtggtggcagcgctggtcggcggcggttcgtgcggcccgcccaaggtgccacccggcccgaacatcacgaccaactacaacgccccgtggctgcccgtcagggccacctggtacgggcagccctacgggtctgggttcaccgacaatggtggtgcgtgcgggatcaagaacgtcaacctgcctccctacaacggcatgatctcctgcggcaacgttccaatcttcaaggacggcaggggatgcggctcatgctacgaggtgaagtgtgagcagccagtggtgtgctcgaagcagccggcgaccgtgctcatcacggacatgaactacgagcccatctcggcgt

SEQ ID NO: 28881 - DNA, 441 bp, Oryza sativa
  Clone ID: uC-osflm202107e07b1
tcgattgttactgagattgaccccatctgtgccctccaggcccttatggagggtctccaggtcctcaccttggaggatgttgtctcggaggctgacatctttgtgaccaccactggcaacaaggacatcataatggttgaccacatgaggaagatgaagaacaatgccatcgtttgcaacattggtcactttgacaatgagattgacatgctcggccttgagacctaccctggtgtcaagcgcatcaccatcaagcctcagaccgaccgctgggtcttccctgagaccaacactggcatcattgtccttgctgagggtcgtctcatgaaccttgggtgcgctactggccaccccagttttgtcatgtcctgctcattcactaaccaggtcattgctcagcttgagctgtggaaggagaagagcactggctagtacgagaag

SEQ ID NO: 28882 - DNA, 548 bp, Oryza sativa
  unsure (1)..(548): unsure at all n locations
  Clone ID: uC-osflm202107e08b1
tcggttttgtccggcgaccgtacactcggcggaggccgcagagcggcagcggcaggcggcggtgccgccgagggcagtcggctcggctcccgcggcaaagcgggaacgggagagagagcagggcggcacacgcgcgcgctgaggctgcgcgcggtgggcgcggcgtccggcgatgcccgggcaagagctataggaaggcgaagtcgtgggctacagccccagtccccagtgctaaggcagtttctgattacccaagtgtagatgtgatggacacccatcacagcgatcaatatgcaaagagcagcctgcagctgcaattcagggacacctctgtttcctttgaaaacaacaattctgttttggataagcatgatattacaagccctcaagttggcatgacttttgagacagccgatttggcatatcggttctacttagaatatggctaccgtgcagggttcggggtctcaaagaggacttnccatagtgttgatggggtgaaataccgcgcaacatttgtttgttacaaaggcggcattgctaggatc

SEQ ID NO: 28883 - DNA, 457 bp, Oryza sativa
  Clone ID: uC-osflm202107f01b1
atgtagctgtgtcaaatggtgacacaaggcatgtgggatcgtgattctgttcttttacaacttccacatttcaccaaggagttggcacggagatgtcaggagaatgaagggaggcccattgagagcatctttgatctggctgagatgagcatcgatgagatgcgggatctgttgcagcaatcaaaccctcagctgcaggatatcattgaattcttcaagcgtttccccaatgtcgatatggcttacgaagttcgcgagggtgatgatatcagggctggtgacaatgtaactgtacaggtgaccctggagcgtgacatgacgaacttgccttctgaggtggggccagtttatgcccccaggtaccccaaagccccaagaaagaggctgggtgctggtaattggtgatagctctaccaatcagttgcttgcaatcaagagggttgcacttcagaagagg

SEQ ID NO: 28884 - DNA, 438 bp, Oryza sativa
  Clone ID: uC-osflm202107f02b1
ccatgatgctcgacgccggcaagagcttcggccgcccgcacggggtggtcatcaacggcaagtccggcaaggccgccgccgacccgcccatgttcaccgtcgaggccggcaagacgtaccggctccgcgtctgcaacgtcggcatcaaggcgtcgctcaacttccgcatccagggccacgacatgaagctggtggagatggagggctcccacacggtgcaggacatgtacgactccctcgacgtccacgtcggccactgcctctccgtcctcgtcgacgccgaccagaagcccggcgactactacgcggtggcgtccacgcggttcatccacgaggccaagtcggtgtcagccgtcatccgctacgccggctcgagcacgccgccgtcgccggccgtgccggagccgccggcgggatgggcgtggtcgatcaaccagt

SEQ ID NO: 28885 - DNA, 490 bp, Oryza sativa
  unsure (1)..(490): unsure at all n locations
  Clone ID: uC-osflm202107f03b1
gttttaccatcaatggaggtcgccgccatggagatctctacctcattgctcctcaccaccgtggctctctccgtcatcgtgtgctacgccctggtcttctcccgcgccgggaaggcgcgtgcgccgctgccgctgccgcctggccccaggggatggccggtgctgggcaacctgccgcagctgggcgggaagacgcaccagacgctgcacgagatgaccaaggtgtacggcccgctgatccggctccggttcgggagctccgacgtggtggtcgccggctcggcgccggtggcggcgcagttcctccgcacccacgatgccaacttcagcagccggccacgcaactccggcggcgagcacatggcgtacaacggccgggacgtcgtgttcgggccgtacgggccgcggtggcgcgccatgctgaagatttgcgccgtcacctcttttncgcgcgcgcgctcgacgacctgcgcgcttttctggagcggga

SEQ ID NO: 28886 - DNA, 487 bp, Oryza sativa
  Clone ID: uC-osflm202107f07b1
tcgatctatcggcgatggtcgccgccgaggagaacccggagtccttcttcgcggcggcgccgccgctgcgggacgccgacgccgtggccgcgaggctgggggaattcatcgcccgcaactcctccgcagcgggcgcgggcggcggcggcaggcggatcgtgtgcgtgacgtcgggcgggacgacggtgccgctggagcagcgctgcgtgcggtacatcgacaacttcagctccggccaccgcggcgccgcctccaccgagtattttttgaaggctggctatgcagttatcttcctccatcgacgaggaagctgccaagcttattgtaggttcctccccgatgattcattcctcaaattctttgatgtcgatgcagaatcgaaggttcaagtggcggagtgccacgcgccagtggtcaagaaagcattggagattatgcaaggcattgagggggtatctgttgaaactccattcactaccatattgat

SEQ ID NO: 28887 - DNA, 499 bp, Oryza sativa
  unsure (1)..(499): unsure at all n locations
  Clone ID: uC-osflm202107f10b1
tcgcatgctacgaggtgaagaagctgagagtgatcgatcgatcgagtgttcgacggcggcggcgaggtcgaagatggtggacatgaacgacgtgctgctggtggtgtcggcggcggtgctggcggcgatgtggtggcggcggtgttccaggaccggcggcgccgacggcctcccgccggggccgccggggtggccggtggtcggcaacctgttccaggtgatcctccagcggcggcccttcatgtacgtggtgcgcgacctccgcgagaagtacgggcccatcttcaccatgcggatggggcagcgcacgctcatcgtcgtcaccgacgccgacctcatccacgacgcgctcgtcaagcagggcgcggcgttcgccagccgccccgaggacagcccgacgcggctgctcttcagcgtcggcaagtgcaccgtcaactcggcgccgtacggcccgctctggcgcgcgctccgncgcaacttcgtcgccgagatcgtgtcg

SEQ ID NO: 28888 - DNA, 252 bp, Oryza sativa
  unsure (1)..(252): unsure at all n locations
  Clone ID: uC-osflm202107g01b1
acgattttgccattcccgncgtgccatgcccgcgagacccctccgcggcgacggccatggcgaacagcaagagcctgctcctctgctggtgctcgctcctcctcctcctcctcgccgncgcagcgccgcacgccctcgccctcccgttctggaccgactacagggcgccggtgccgctgaacgggacgacgctgggcttctgcngccggggggggagccggaagcataactgctgcggcgccgcggatgatg

SEQ ID NO: 28889 - DNA, 392 bp, Oryza sativa
  unsure (1)..(392): unsure at all n locations
  Clone ID: uC-osflm202107g02b1
acgcattctgtttatggttccttaaagcacggaaatttgatgttgagaaagcaaagagtatgtggtcagatatgcttaaatggagaaaggaatttggggctgacaatatagaggagtttgactacaccgaggcggatgaggttatgaaatattatacacaattttacgatggagtggatatagaaggaaggcctatctacatagagttaatacgaaaagttgatgcgaataagctaatgcaagtaactactatagagcgatatgtgaaatatcatgtgaaggagtttgagagatgctttcaaatgagagttcctgcctgctcgattgctgcanaaaggcccatagattcatctactactattctggacgcgcaaggcgtgggtttaaagaac

SEQ ID NO: 28890 - DNA, 498 bp, Oryza sativa
  Clone ID: uC-osflm202107g05b1
ggtttggttttccgccatggccaccgtcagcgccgccgcggcgacctccgtcgttgcccgcgccgtcctcgccgggccacttgggctgtcgcagatgagggcgaggaggagcgagagggtgaggtgcaactactccaaggaggcggtgacaccggcggcggccgtcaagggagccggcgcgtcgctactggcgatggcggcgacagatgcgcccgcgatggcgctcgtcgacgagaggatgtcgacggagggcaccgggctcagcctcgggctgagcaacaacctgctggggtggatcctgctcggggtgttcggcctcatctggtcgctctacaccatctacaccttcgacctcgaggaggacgaggagttcggcggcctctcgctctagagagcctctatacatgtaaacatgtggttgtgaacggtgtaatttgaggagaacgtacatggctgtggtgtatctaaaactgtcctattctgagagatgttttagca

SEQ ID NO: 28891 - DNA, 531 bp, Oryza sativa
  Clone ID: uC-osflm202107g09b1
tcggcttaacagaaactcatagagtgtgagcaggtcatattgaatgatcctttccttggaaagcgcattgaggaagggaattttgtcactgttcctttgagagatgaattccttgaaaatgctcgtctgtttatctttgaaacttactgccgtattcatcggtgcattgatattggcatgctttctcagaagctgaacatgagctacgatgaggcagaattgtggattatgaacttagttaggaattcaaagctcgacgccaagattgattcagtgtctggaactcttatcatgacgaccaatcatgttaacatccatgagcaggttatcgaaagcttaaagaatcttaacatgcggactttcctgctagcaaagaacattgtggagccggctcaagcagcacaacaggcagctcggtgagattgacagagaagaccacagttttgaggcgcccggaattatttaagtagagacaatcctctaaacttttggagttttgttgtttagcattgactccgttatcagtaccta

SEQ ID NO: 28892 - DNA, 481 bp, Oryza sativa
  Clone ID: uC-osflm202107g12b1
aataaaacaatagagaggacgggttttatgaacaaagcgacatggtgcttacattgtaaacacatatgtgaattataactgaatagacatgtgttctaaaaaaaataactgaatagacatacaaaggtctacttatgagtaaagaaaatgaatttaatcctgttaaaccaatggtgttttaatcgacaaagccttggcctttgctttgactatatcactattctatacagactaacactacatcatttctaggagaaatgactaccggtacgatctggaatcgcacatcccactggattgttatacatggttcgtcgggttctcgccttatcaatcatgcatcatgtgctgcctttggatctcaccaatatatgatgtcaaagaagatccagaagaattggccgtcctattattgacactggattgcaacaattgttgctgaagattctggatgggcttatttaatagccgaatcattttt

SEQ ID NO: 28893 - DNA, 54 bp, Oryza sativa
  Clone ID: uC-osflm202107h02b1
ctataggttaagctcctgcgcctggggtaccgattcccaatttccagctacacc

SEQ ID NO: 28894 - DNA, 499 bp, Oryza sativa
  Clone ID: uC-osflm202107h04b1
acagtagccgccgccatcgccatctctcggacggaaaccgtagacgagcgaccatggccaccatgccaagcacttgcgcctcctcctcctccctcttcctcctcctccgcagggacaggaggagcagcaggagtgccagcctccccggacccgcccgccgtttgggggttgtgcgcgcctccgccaaggagatcgccttcgaccagggatcgcgatcctccctccaggccggcgtcgagaagctcgccgccgccgtcgccgtcaccctcggtcccagaggaagaaatgtcgtcttggatgagtttgggagccccaaagtggtcaatgacggagttaccattgctcgagctattgagctcgctgatccaatggagaatgccggtgctgctttgattcgtgaggttgccagcaagacaaatgactcagcaggtgatgggactacaaccgcatctgtcctggctcgtgagatcataaaattgggcctgctgagtgttacttc

SEQ ID NO: 28895 - DNA, 339 bp, Oryza sativa
  Clone ID: uC-osflm202108a04b1
ggcttttcattctgctcaggcaggagatgcattccatcagatgctgaatggtctcgctcgcaagcttccacatggcgaaaacgtcttcttgaagccaggggagagggccatgaactggactgctggaccggtgggcgacctgaagccttggtagcatgcatctcactgcctatagagatgtaaaaacttttgtgaaaaagatatatttacagacatgatatatacttgcgccttgagatcaccatggttgcatagtgctgaccataaatcaacaaatgtacattgtgttgtatctttttccctgatagctatataccatatatctgcattccaaaacaa

SEQ ID NO: 28896 - DNA, 220 bp, Oryza sativa
  Clone ID: uC-osflm202108a07b1
tttcttgtctagctagatcctctgcagctgagaccggggtggattggaagagctcgtgagtgtctgatcactgacagctgtgcatatttttttgctgtatgcgtacatgcactatatgatgctaacacgcgtatcactagcggacatcgactggtactagtgtcacgactgagatgttcggcatatgttcttttgtcatgtaaatatgaagaaatcaagt

SEQ ID NO: 28897 - DNA, 101 bp, Oryza sativa
  Clone ID: uC-osflm202108a12b1
ttcatatatgcatgcattactgtgtcatatatactacggtcaaatacgtactccatgtatgtgaaagaacagttaattaataagctatatatcctagttct

SEQ ID NO: 28898 - DNA, 483 bp, Oryza sativa
  unsure (1)..(483): unsure at all n locations
  Clone ID: uC-osflm202108b06b1
gcctttttctgtgggggcggccgatctactactgccggagggctatcgtactgccctgtctcgctttgctggtcaggcttcttgtgcgctcgcgcactcgatgagaggctgctgcaccttggaaactggatgagtcaagtcggcatggctcatcatatgcgggaagcagccagcaacacctgcgactgcgataaatagtgtgcatcaatactgccagttgttgtctgggctgtttctgaaaaggagcacattccgacatctgacgcttatcatgacacgaatggcgatgaacctcatggaggacatgcctctggaaaggaaaacacggtggcngcagacccgtgtgtttcagatgagagagcacctacccactcgaatgctgcatgtggccatggggtgatcttgactagagcggaagctgctgctgcatacgacaagggtcgcatgcatactatggaagatgcaggctgctgctcctgatgc

SEQ ID NO: 28899 - DNA, 508 bp, Oryza sativa
  Clone ID: uC-osflm202108b10b1
tccgtctccgcgtcgccccgccgcgcgcctcctccccgcctcgccgccggcgcgcaccttctcgcggatcgcgatgcacaagacggcgcaggcctggttcaccggcggccccgccgtccccgccgcctccgccggcgagtcgcagccgtccctcctcgccgactggaactcctacgccgtctcccgccccgacgcctcctcctcctcccctctccctttcgacatcgaggccgccgtccgctccgccaacgacaccgtctccggcaccttcagcgtggtgaccaagggcgtgcgggagctgccggggagcttccagagcgcgacgagcagcttcccgtcggggaaggcgctcatgtacttcggactcttcctcgccaccggcatcttcttcgtcttcatcgcgttcgcgctcttcctccccgtcatggtgatcatgccgcagaagttcgccatctgcttcacgctcggctgcgggctcatcatggcatccatcttcgcgctcaaagga

SEQ ID NO: 28900 - DNA, 534 bp, Oryza sativa
  unsure (1)..(534): unsure at all n locations
  Clone ID: uC-osflm202108c01b1
ctactttctttctccggctcttcttcagtatcgaatgctctcttctccttgtgcccaccaccaccaccgtagcaatggcgggcaacgggccgatcaacaaggaggacccgctcaactggggcgcggcggcggccgatatggccggcagccacctctacgaggtgaagcgcatggtggcgcagttccgcgagccgctggtcaagatccagggcgccaccctccgcgtcggccaggtggacgccgtcgcccaggccaaggacgccgccggcgtctccgtcgagctcgacgaggaggcccgcccccgcgtcaaggccagcagcgagtggatcctcaactgcatcgcccacggcggtgacatctacggagtcaccaccggctatggtggcacctaccaccgacgcaccaaggacggccccgacctacaagtcgagctgctcaggcatctcaacgccggaatcttcggcactggctacgatggccacacgctgccgacggagacagtgcgggcggncatgctcgtgcgcatcaacaccc

SEQ ID NO: 28901 - DNA, 278 bp, Oryza sativa
  Clone ID: uC-osflm202108c05b1
atccttctattatcaagaaacaaacaagattactccagctaactagctaccttggcaatggcctccttatcctccttcctgctcgccgcagcagtggcgacactgtttgtcgttggctcatacgccaccgagcttaccttcaaggttaatgagggctctagcgcaactagcctggaactcatcaccaacgtcgccatctctgaggtggagatcaaggagaagggtgccagcgactggacggcgctgaaggaatcatcgtctaacacctggacgatcaa

SEQ ID NO: 28902 - DNA, 560 bp, Oryza sativa
  unsure (1)..(560): unsure at all n locations
  Clone ID: uC-osflm202108c07b1
cttgttatgtaatctagggttttgctccttctctcatccagtagcggcggccggcggcgagggcagcggcggcggcatggcgaaccgcacggaccccctggcgaagagcatccacgggacgaaccctcagaacctggtggagaagatcgtccggtccaagatctaccagagcacctactggaaggagcagtgctttggcctcaccgccgagaccctcgtcgacaaggccatggagctcgaccacaccggcggcacctacggcggcaaccgcaagcccacccccttcctctgcctcgccctcaagatgctccagatccagcccgacaaggacatcgtcgtcgagttcatcaagaacgaggattacaagtatgtccgtgttcttggtgccttctaccttcgcctcactgccaccgtcgccgacgtctaccaatacctcgagccgctctacaacgactaccgcatgatcaggcacatgctcagtgatggaaagtttaccctgacccacgtcgacgagttcattgacgacctnctcaccaaggactactnctgcgatacggccc

SEQ ID NO: 28903 - DNA, 536 bp, Oryza sativa
  Clone ID: uC-osflm202108c12b1
ttgtccttctccccctccctccgagggcgagatcggaacaaggcccccacccaaccaccgtcgccgccgccaccggcgatcgccggcgacccccgggccacgggaggcgccccgccctcctcgccattggagaggaccttctctcctgctcggattcgtttgctctggtggtggtggtggggctttgctggcgcgaggccgcgcctgccatgccggagaccgggccctacggccacaagaagaccgacggcatctgcgacggcgtgtgcggcgagcctgcgtcaaaggcagttctgaccatgtcgaggctgagatgtgcacttcggggatttgatttcagagcactattggccctattgataggagtgccaattctaattttaatgatatatgctcatggtcagaaggtcacatacttcctcaggccaatatgggagtctcctcccaagcccttgaaaactatccctcattactaccatgagaatgtcaccatggcgaaactctgcaagatgcatgggtggaaaagtccggagacc

SEQ ID NO: 28904 - DNA, 441 bp, Oryza sativa
  Clone ID: uC-osflm202108d02b1
gtgctctctttcccttcacctctcctccctctcacccttccattacatggatcagggagggaggaaggaggcctgaagtggcgcagagtaggcgcttgtaaacaaatccccccatttgcttcttttgcactgaagaatccctgaagaatccagcaggatggagaagaaggcgtccatcctcatgaaccggtatgagctcggccgcatgctcgggcaaggcaccttcgccaaggtgtaccatgcacggaaccttgcatccaaccagagcgtcgccatcaaggtcattgacaaggaaaaggtattgcgtgtcggcatgattgaccagatcaagcgagagatctccatcatgcgcctcgttcgccaccccaacatcgtccagctgcacgaggtcatggccagcatgagcaagatatattttgcaatggagtatgtccggggtgg

SEQ ID NO: 28905 - DNA, 303 bp, Oryza sativa
  Clone ID: uC-osflm202108d04b1
ccaaggcgagtttttggccctacattaaagccttcctttacaaaaaatactgggggttacaacagacaaagggggaatttgtccattttcccttggattttactccttccaatagggggcactgccaagcaacgcgacattgtatacaagggctttttgctaatccgtttaggggtagtcctttctagctgttacaggggggaactaccggaccctataattgtttgcacccacaaagaatgcattggcatttggcaaacccctaaacaaataggggcacatcagcagcttttcacatgcaaa

SEQ ID NO: 28906 - DNA, 531 bp, Oryza sativa
  unsure (1)..(531): unsure at all n locations
  Clone ID: uC-osflm202108d06b1
gtgctgttgtggacgacgacgacgagcaaggcgaacatgggcaaggtgatgggcgtggccgccggcggcgaggtggccggcgggttcgtggtgtggcagaagaagccggatctgtggtgcgtggagatggtcgtcgccggtggcgtcaagatgagcgccggcagcgacggcaaggtcgcatggcgccagacgccatggcaggaagcccacgcctcccgtggcccgccacggtcgctccgccgatgtattcagggcttggacccgaagtcgacggccgacctgttctcgagcgcggcgtgggtgggcgagaggtgcgtcgacggcgacgactgcttcgtgctccgcgtcgacgccgaccacgccgcgctgcgcgcccggagcagcggcgacgtcgaggtggtccggcacgccgtgctcggctacttcagccagaggacggggctgctcgtccgcctcgaggacagccacctgctgcgcatcggnctcgcccacgccgccgccgagagcgcctactgggagaccaccatggag

SEQ ID NO: 28907 - DNA, 431 bp, Oryza sativa
  Clone ID: uC-osflm202108d08b1
tggcttttgacattcttggtcccaactgagatatgtccacttgagatcagatcagcagggcagagtattgttgttgcagtggtcttcctgatgacatttgtgattggacagacattccttgcagttctatgccgcatcaagtcagggacttcttcttctttgcaggatggatctgcttgatgacagtgtttgtttatttcttcctgccggagacaaagaatctgcccatggagcacatggagcaggtctggaggaagcattggttctggaagaagattgttggggaggaggaggaaaaacaagcagagaaaacaggtctccctagcatgtaaagccctatgaattggaatgtatttgaccatacaaaaaccatacatagtgtagggttctaattagcaaatgtacgtttgtaattctactgtctatatgta

SEQ ID NO: 28908 - DNA, 580 bp, Oryza sativa
  Clone ID: uC-osflm202108e02b1
gttctgtcatttaataggtgatttcatcagaggtgtatattctgttttccaagacttggatttctcattccttgagatgaatccgttcaccatggtgaatggggaaccatatcctctagacatgagaggagaattggacgacacagctgcctttaagaactttaagaagtggggaaacattcagttccctctgcctttcggaagagtcctcagcccctctgaaagctttatccatgaactggatgagaagacaagctcatcgctcaaattcacagtcctgaacccgaaagggcgcatttggacaatggttgcaggtggtggtgctagtgtcatatatgctgatactgttggagatttgggatatgcgtcagagcttggaaattatgcagaatacagcggcgctcccaacgaggaggaggttctgcagtatgctagagtggttgtggattgtgccactgctgatcctgatggccgtaagagagctcttctcattgtaggtggtatagcgaacttcactgatgtcgctgctacattcagtggcatcattcgagccttaagagaagaggaatccaaattgaag

SEQ ID NO: 28909 - DNA, 487 bp, Oryza sativa
  Clone ID: uC-osflm202108e05b1
catgtttgctgtaataatccaagctcaataaacgagccaatccgtcgaagaaggaagcagcggcgatggcggcgaggtccggcgaggtgcgggcgacggtgctgggcatggcggtgctggcgctgcttctgctgctcggccaccacgcggcggccatcgaggccaacgtcggcgtcacccgccaggccagcttcagcctgaacggcggcgccggcgccggcgccggtgctcgcgctggcgctggtgctggcgctggcgctggcgtcggcgctggcatcggagctaacgtcggcgttggcgctcgcgccggcgtcggtgctggcgtcggcgctggcgtaggtgcgaaggtcggtgctggcgtcggtgcgaaggtcggtgctggcgccggcgttggagcacgcgctggcgttggtgcgaacgtcggtgctggcgtcggtgcgaaggctggtgctggcgtccgcgttggcgctggtgctggcgtcggtgc

SEQ ID NO: 28910 - DNA, 491 bp, Oryza sativa
  Clone ID: uC-osflm202108e06b1
ggctctgagcgcgcgcgagcgcgacatgcaccccacgttcgcgcgcggtttaaattaggcaagaggcgcgccacggtcgcgccttctttgtctctcccttgttttttttaaaatttttttataagctgcgaggccgcgtcgtccgccattctcttcttcttcttgttgcacaccgccggccggccgtgcgtagtgcgtggcatgtccgtgttccccctagcagctgattgatttgatttggtttttttctttgcttgattacttccttcgatcttgccctggttggttggtggtggtggtgggttctttgctatctctgcgtgcgtgttccggccgtgtcggcggcggtgagcgaagctcgaggcggtgggctgggtgatggtgcggttcctccggcgccatagcctcgacaagaacagcgcgcagttccatcgccagctgagccacgacagcagcagcagcagcagcgacaccgccgacatgcacgagcc

SEQ ID NO: 28911 - DNA, 529 bp, Oryza sativa
  Clone ID: uC-osflm202108e10b1
taactgcccaaacatttcatttgagtcggtaaggcttcctatgttggtagacctgagactactaagttgtgaggggatcacgtctgcttccatggctgcaatagcttacagtcgtctgcttgaggcattacaacttgataactgcagtttgttgacatctgtgtctttggatctgccacatctcaagaacataagtcttgttcacctgcgcaagtttgctgagttgactttgcgaagtcctgttctttcttacattaaagtttccagatgctcagtacttcatcgtgttagcataacatcaaatgctcttcagaaattggtgttgcaaaagcaagagagcctatcaagtttgtcattgttatgcaacaacttgatcgatgtcgatcttagtgactgcgaatcattaacaaatgcagtttgcgaagttttcagtgatggaggtggttgcccattgctcagatcattgattcttgacaactgtgagagtctgagcactgttgaactgaatagtagtttcatggtcaatctc

SEQ ID NO: 28912 - DNA, 467 bp, Oryza sativa
  Clone ID: uC-osflm202108f06b1
aaatcatctaggggttttgtatccctatccattcccccatgagcaagacactgccatgtcagacaccatagcctacaagaattttatttacggcaacatcgcctgctcactgaacacgcacctcctttctaacggatggaaggaactctggcttgggcacgctcaccaacctggggaggaagaccctccgaacagtttacgcctacttctaccaccacaactcctgcgtcgccgccaacggatggctcgctgccatccccgccgctgtttacatgctacaggatcaggaggcgcatgctgcagagatggagcgcacctttatcgccatcaagcctgacggcgtccaaaggggcctgatttctgagatactgtcccgatttgaaagaaaaggattcaagcttgttgccatcaagctggtggttccatccaaagaatttgctcagaagcactatcatgatttgaaagac

SEQ ID NO: 28913 - DNA, 499 bp, Oryza sativa
  Clone ID: uC-osflm202108f07b1
tgattttcccagggatttcgccggcggctaggatcgggtcgggggtccgccatggccgacgtgttcgagggctacgagcgccagtactgcgagatctccgcctccctcgcccgcaagtgcaccgctgcctccgctctccaaggagagaagctgaagcagaaggcgtcggagatcaagtctggcatcgatggggccgaggcactgataaagaagatggatcttgaagcaaggaaccaacagccaagtgtgagggctgggctgctggcaaaactgagggagtacaagtcagatcttaacaacctgaaaggaacgttgaagagggtcaccaccggtaacgcgcagcatgggtcgagggaagagttgctggagtcaagaatggctgaaacgttgggggtatctgctgatcaaaagtcatgactgctcaggataactgaaaagcataataaaacaaccgataggatcagagatagccacagaactatgctggagactgaagatc

SEQ ID NO: 28914 - DNA, 322 bp, Oryza sativa
  Clone ID: uC-osflm202108f08b1
ttttatttagggtttctagggttttgggttgcggcggcgagtgggcgagggcgaggtctagatggcgtcggtgagggtgaaggggacagtgaagtggttctactccaccaaggggttcggcttcatcaccctcgacgacggtggataggatctcttagtccaccaattctcgctcaagttcgacggctaccgcaacctaaacgaccgatacttgcgcgtgttcttcgcttgatccggtaactacggccgttccaatgccgtggacgtcaccgagcctgtgggcggtgcgctcagcggcagatcccgtgccagctgaggaggt

SEQ ID NO: 28915 - DNA, 547 bp, Oryza sativa
  unsure (1)..(547): unsure at all n locations
  Clone ID: uC-osflm202108f11b1
tggattttcgcagaggtgatgttgttgcatggcctactaacctcggttggatgatgggcccatggcttgtttatgcctctttactgaatggagcctccatggctctttataatggctccctgaatagttcaggctttgcaaagtttgtacaggatgcaaaggtgactatgcttgggttggtacccagcattgctcgttcatggaaaagtacagattgtacagctgggtttgattggtcaaccattagatgttttagctcatccggggaggcatccagtgtggatgattatttatggttgatgggaagagtttgctacaaaccagttatagagtactgtggaggcacagaaattggtggtggatttgttgctggatcattgctgcaacctcaagcattatctgcattcagtacacctgcaatgggttgtaacctgtttattcttgacaacaatggaaatccattaccacaagattctgttggtactggagaacttgcgctngatccaacctttcctggagcttcaacaacattgcctgatgctgatca

SEQ ID NO: 28916 - DNA, 549 bp, Oryza sativa
  Clone ID: uC-osflm202108f12b1
tgtactatccaatccaatccaatcaaatcacatcgagggacgccgcaacccagcagcagcagcggaaccctagccaagccaccatgagcaagctctgccagtcggcgtgcaaggccgccaagtctctcctctccgccaccgccgccgtctcctccccgcgcacctccctcctagccgaggggaggaacgcggcgctggccaccctcaccaacctggggaggaagaccctccccacagcttacgcctactcctaccaccacaactcctccgccgccgccgccggatggctcgctgccatccccgccgctgtttacatgctacaggatcaggaggcgcatgctgcagagatggagcgcacctttatcgccatcaagcctgacggcgtccaaaggggcctgatttctgagatactgtcccgatttgaaagaaaaggattcaagcttgttgccatcaagctggtggttccatccaaagaatttgctcagaagcactatcatgatttgaaagacagacctttcttcaatggattgtgtgactttcttagctctg

SEQ ID NO: 28917 - DNA, 180 bp, Oryza sativa
  unsure (1)..(180): unsure at all n locations
  Clone ID: uC-osflM202125h01b1
cattggcaaagcagccagcgagagatcgaggcggggcggccgacatggccaccgtgggcgccgccgcggcgacctccgtcgttgcccgcgccgtcctcgccgggccacttgggctgccgcanatgagggcgaggaggagcgagagggtgaggtgccactactccaaggagggggcgacac

SEQ ID NO: 28918 - DNA, 359 bp, Oryza sativa
  unsure (1)..(359): unsure at all n locations
  Clone ID: uC-osflM202125h03b1
tatcctatgtcactcggtgccgccaccccacagcaggtgggggaggaggagtaagatgatgtcncacatgaagtaatagcacccgaggcacgggtccttcggttacatgccgaggaagcgctcctcccggcaccgcggcaaggtgaagtcattccccaaggatgacgacaacaaaccatgccaccttacctgctttgtcggttacatggctggaatgacccacattgtgcgtgaggtccagaagcctggttccaaactccacaagaaggagacctgtgaggctgttaccattattgagacacctcctattgtcgttggtggacttgtggcctatgtgaagactccacgtggcttacgca

SEQ ID NO: 28919 - DNA, 490 bp, Oryza sativa
  Clone ID: uC-osflM202125h06b1
gtgtgagttaagaatagaatagccagcaggagcggggcggctcctcgatctcaatcataggccggctcgaggcgccgcccaattcgttcctccacgatttcttttatccatcttcttcttctttctttcttttcttcctcttcttgggagttgaagagaaagaatcgagttgttgctttgtttaattttgtgtgttgctgggggtgcgttaatggcggttgacccaatgacgacgacgacccccgcctctccgcccctttaaataaatcgcgcgggaaggagagttcgccgaggacacccatcccgtcgctagctcgtcgcatcgatctacggctccgatcgatcgatcgatcgatccagcaatggcggcgtcgtcgtcgaagaagaaagaggaggaggaggtcgcggtcgtggcggcgaggaaggggaggctgaagcagcgctactacggcgagtaccgcctcgtcgccggctgcgtgccgtaccgtgt

SEQ ID NO: 28920 - DNA, 388 bp, Oryza sativa
  unsure (1)..(388): unsure at all n locations
  Clone ID: uC-osflM202125h09b1
ctttccgattgaggaaaaaaaaaagagaggaaggaaagaaaaaaaaagaagaagaggagagaactcgaactctcgcctaccatttcgcccccctccgcaagcaatccaccactgcatcggcggcgagggctcaccggcggcgagccatgtgcggcggcgccatcatccaccacctgaaggggcacccggaggggtcgcgccgggcgacggaggggctcctgtggcccgagaagaagaagcccangtggggcggcggcgggaggcgccacttcggggggttcgtggaggaggacgacgaggacttcgaggccgacttcgaggagttcgaggtggacctccgggactcggatttggagctcgggaggaggacgacgataacgtcgtcgag

SEQ ID NO: 28921 - DNA, 76 bp, Oryza sativa
  Clone ID: uC-osflM202125h12b1
ttgctttttctaaccctagccgccgccgcagccggaggcgtagtcgcgcgtcgtctgctccgcccgcgagctcctc

SEQ ID NO: 28922 - DNA, 367 bp, Oryza sativa
  Clone ID: uC-osflM202127a01b1
cggtgcgcaatatccttttcgacccacacgcccgatatagatccgccgctttcgctctcctctgctttcgtctaattataatgcgggcgggcggctatctcacacagcaaaagcctacttgggatgctccactgatcgtcttctacttactcctctttcttccagcttggccggtgtgtggctgattattccagaattcccattaactaaatcaccggatcaagaataatgatataaaggggggagaggctcttttctgagggatgacagattccgtttcgtatgaacagcgcaccattttagatttcttcctccttctcttattctttccgttgtgcatgctgcttttctctactaccttttccac

SEQ ID NO: 28923 - DNA, 446 bp, Oryza sativa
  Clone ID: uC-osflM202127a03b1
taatcgcttggcatgatattcaaactgtggaagggtgtagtttttcgataactctgggtggtctagaactgcaaaacaaagttgaatatgttaagaaagaaagagcaacacgtactggaggcataaagccatcttcaagggcttcagctcttaatatgaaaccaaaagtttcttcattcaatgccaaaccagtaaagagtgccttgccgaaatcagcagtacttgaagaagactctgaagatagatgaatctcttttttctgcaaaatcatttgaagaactcggtttgccacctttgcttatagataggttgaacaaggaaggtcttactgctccaactgaggtccagtctgctgctatttctatcatttcacaaaagcacgatgcagttatccaatcataatacctggctagggaagacacttgcttatcttctccctatccttt

SEQ ID NO: 28924 - DNA, 287 bp, Oryza sativa
  unsure (1)..(287): unsure at all n locations
  Clone ID: uC-osflM202127a07b1
ctgatcctctcctctcacctcgcaatcacatgctcttcccttctcttctccatcgcatctaccaccgagcgtgcaaggagggggggggggggggggnnnnnttnaannanggncactnnanctacggcagcggaaaggactgctcagtgtacgagatgccgtgggcgactgcatggttgctactggggagcggatggtgctacccttagttttacggagtggacgagtgggatgaccagatgcaagtcgactccttggattagagtgaagagagattcaaggataac

SEQ ID NO: 28925 - DNA, 494 bp, Oryza sativa
  Clone ID: uC-osflM202127a12b1
ttttgccctagccgccagccgactcgaccagggcggggtggcggagcacccgccgacgtcgccctcgccatcgtcggcttcacccctcatcggcaacctagtgcaggttgttttctgaagatggctgacgatttgggccctcccactgtgctccagaagatacatgggcagtccatgatgttcagcaagatctcaccttattctttgatgaagaatcccgcactctacaatgccaacacttcttacagtgtgcctctgaagtcatacaatgggatggatgggaacaacgggttctcatctgtgacatctgtatccccagtctttgcttgtgccccaaaggagaaaggtctttctgggtttatgattgacttcatgatgggtggagtttcagctgctgtctccaagactgctgctgctcccattgagcgaatcacgcttcttatttaaaaccaggatgaaatgatcaagagtggtaggctcttttacccatacaa

SEQ ID NO: 28926 - DNA, 489 bp, Oryza sativa
  Clone ID: uC-osflM202127b11b1
tgtgctcgtcttttctctctcgcaggactcgagggggattttggatgaggtggcggcggcggcagcggtgccctacttcttgctgaagaaacggaagcggaaggagcagtgggcgactgacaggaaggagaaggcgctcgccgagaagaagaaggccgccaagagccgcaagctcatcttcacccgcgccaagcagtacgcccaggagtacgacgcgcaggataagtagcttgtgcagctcaagcgtgaggctcggatgaagggtttgttctacgtcagccctgaggccaaacttctgtttgtggtccgcatacgtggtatcaatgccatgcaccccaagaccaggaagatcttgcagcttctgcggttgaggcagatcttcaatggtgtattcctcaaggttaacaaggcaaccattaacatgctgcgcagggatgagccatattttgcatatggatacccaaacctgaaagtgtcatggaattgatc

SEQ ID NO: 28927 - DNA, 513 bp, Oryza sativa
  Clone ID: uC-osflM202127c05b1
tgtgttcaagatcaccgtacttgggtaatatatgatgtgagtccatgacaagcttatcactgccttttccaagaaggtctttggagaggccacaagaaggaggccgcatggatgagggtagtgatatccggtcaactaggagattcccccaaactcaaaactatgttgacatgccctacagagatgccatccacagagattcacataataatcatgttccaaatttccagagacctcttctaaggaagcaagtaatgtcaagggcttctgccagcatcaggcacagctttgacgatagccaagtacagtcaggtgacgtgtctggttatacggatgcactggcttcactaagtgatgctctttctgagggtctcagccctagttcggattgggtagtgagagtctcagcttttgaatttattcggaatcttctgcaacaaggccagagaggtattcaggaaattacacagaattttgaaaaggtcatgaagcttgtttttcgtcatttggatg

SEQ ID NO: 28928 - DNA, 408 bp, Oryza sativa
  Clone ID: uC-osflM202127c06b1
cccgctcggcctcgccgacgacccggagacgttggccaagaaccgggagctggaggtgatccactccaggtgggcgatgctcggcgcgctgggctgcgtgttcccggagctcctcgcccgcaacggcgtcaagttcggcgaggcggtgtggttcaaggcggggtcgcagatcttcagcgagggcgggctcgactacctcggcaacccgagcctgatccacgcgcagagcatcctcgccatctgggcggtccaggtggtgctcatgggcgccgtcgaggggtaccgcatcgccggcgggccgctcgcgaggtcgtcgacccgctctaccccggcggcagcttcgacccgctcggcctcgccgacgacccggaggccttcgcggagctcaaggtgaaggagatcaagaac

SEQ ID NO: 28929 - DNA, 498 bp, Oryza sativa
  Clone ID: uC-osflM202127c09b1
ttttgagcttagctatggcaatggccgcgccgctgacgttggtggtggtggcggcggcggtggccgtcgtcttcgtcggcggcggcgtggaggggtgggtgctcaaggaggggttctacgagcagagctgcccgcgcgcggaggcgctggtgaagcactacgtggagcagcacgtccccctcgccccctccgtcgccgccaccctcatccgcacccacttccacgactgcttcgtcagggggtgcgacgcgtcggtgttgctgaacgggacggacggggcggaggcggagaaggacgcggcgccgaacctgacgctgcgggggttcgccttcatcgaccgcattaagagcgtggtcgagagcgagtgccccggcgtcgtcttctgcgccgacattcttgcgctcgccacccgcgacgccatctccgtcatcggcgggccgttctggcgggtggcgacggggcggcgcgacgggagggtgtcgatcagcaggaggcgct

SEQ ID NO: 28930 - DNA, 545 bp, Oryza sativa
  unsure (1)..(545): unsure at all n locations
  Clone ID: uC-osflM202127d08b1
tttatggctcgtctcagtgaagctcactaccctttttctcttcaattcatcgttagaagttaaaaatttacaaagttgaatttcttcccaaataaatgttctcttgcttgctgcaggcctatctcataattttgcaaggccaaccttcaccgagtgaaatctttaaatcaccacccttctcttcaattcatcattagaagttatatacctcacaaagatatatttaagtccaatctattgctcactgcaggtttctgcataatttctatggccaatctgcaggtttctacataatttctatggccaatctgagtgaatcctttaaatcatcacccctttctcttcaatttaccatcagaagttaattgcttgcaaagttgaatttcttctcgaataagtggtctcttgctcactgcaggtcctagttcataattttgcatggccagccttcactgagtgaaatctttaaatccccttattcaattcatcattagaagtactcaccaagggtagaatttaagtgctggnatttatctgcagaaatg

SEQ ID NO: 28931 - DNA, 553 bp, Oryza sativa
  unsure (1)..(553): unsure at all n locations
  Clone ID: uC-osflM202127d10b1
tttatccatctagctcactcacacagtctccactggggacgcattgcagaggagaggcgacaatggaggggaaggaggaggacgtgcggctgggggcgaacaggtactcggagaggcagccgatagggacggcggcgcagggcgccggggacgacaaggactacaaggagccgccgccggcgccgctgttcgagccaggggagctcaagtcgtggtctttctaccgggccgggatcgccgagttcgtcgccaccttcctcttcctctacatcaccatcctcaccgtcatgggggtctccaagtcctcctccaagtgcgccaccgtcggcatccagggcatcgcctggtccttcggaggcatgatcttcgcgctcgtctactgcaccgccggcatctccggaggacacatcaacccagcagttacttttgggctgttcttggccaggaagctgtccctgacccgggccatcttctacatagtgatgcaatgcctaggggccatctgcggagctggagttgtgaagggcttccaacanggtctgtacatgggcaa

SEQ ID NO: 28932 - DNA, 496 bp, Oryza sativa
  Clone ID: uC-osflM202127d11b1
ttttcctcctcctcctccgccgcccgcctcgggggctcccgagagctccaccctcgcctccggcgaaatggcaccgaagcgaggcggcagggcgccggtgccggcgaagaagaagacggagaaggtgaccaacccgctgttcgagaagaggccgaagcagttcggcatcggcggcgcgctgccacccaagaaggatctgcacaggttcgtgaagtggcccaaggtggtgcgcatccagcgccagcgccgcatcctcaagcagcgcctcaaggttcccccggcgctcaaccagttcacccgcaccctcgacaagaacctcgcaaccaacctgtttaagatgcttctcaagtaccgccctgaggacaaggctgccaagaaggagaggtttttgaagagggcccaggctgaggctgaagggaaaaccgttgaggccaagaagccaattgttgtgaagtatggtcttaaccacgtgacttacctcattgagcagagcaag

SEQ ID NO: 28933 - DNA, 426 bp, Oryza sativa
  Clone ID: uC-osflM202127e09b1
ttttcgtggcggcgtccatgctggaggcctccggcgtggcggacgagttcgaggccgacgagcgcggcgccggcatcacggtgttcgcccccaccgacgacgccttcgccggcctccctgccggcgaccgcctccagtccctccccgccgagcgaaaggccgtcgtactccgcttccacgtcctccactcctactacccgctcggctccctcgagtccatcgtcaaccccgtccagcccacgctcgccaccgagttcacccaggccgggcgcttcaccctcaacatcacacgcgccaacggctccgtcgccatcgacaccggcgtcgtgcaggcgaccatcacacgcacggtgttcgaccagaaccccgtcgccgtgttcgccgtctcaaggtgctcctcccgaggaaatgttcagccgcagcgac

SEQ ID NO: 28934 - DNA, 414 bp, Oryza sativa
  Clone ID: uC-osflM202127e12b1
tatggcttctactccccctctttaccttttggtgctcggttcggttccgtggtgcgtctagggtttagtgggttgagatggcggcgccggatgtcgagtaccgctgcttcgtcggcggcctcgcctgggccaccgacgaccgctccctcgaggccgccttctccacctacggcgagatcctcgactccaagatcatcaacgacagggagacggggaggtcacgtgggtttggcttcgtcaccttctcctccgagcagtcgatgcgcgacgccatcgagggcatgaacggcaaggagctcgacggccgcaacatcaccgtcaatgaggcccagtcccgccgctccggcggtggaggcagaggctacggcggcggcagtggcggctactgcggccgttgcggaagcggtcgatact

SEQ ID NO: 28935 - DNA, 461 bp, Oryza sativa
  Clone ID: uC-osflM202127f02b1
agtaaaagaaaaaaaaaaaggaaaatcgtgtggggtctcgtctcgtcttcgtctcccccgattcccgagcagcttctcgaaaccctcgcggcctcgattccggcgatggcggagcccaacccgcaagtggagagggaggtggaggtggaggaggtgaggaggcctaatctgaggtacttggagttcgtgcaggtggcggcagcgcaggcgacgatctgcctcgcggggctctacgcgcttgccaaggaccacgccggcccgctccgccccggcgtcgacgccgtcgagtccgccgtcaagggcgtcgtcggccccgtctacggtcgcttccatggcgtccccctcgacgtcctcgccttcgtcgaccgcaaggtggatgacacggtgcaagagctggaccgacaccttccgccgacgctgaaggccgccttcgtcaaggcttgcgctgtggccccagaatg

SEQ ID NO: 28936 - DNA, 413 bp, Oryza sativa
  unsure (1)..(413): unsure at all n locations
  Clone ID: uC-osflM202127g01b1
atttctgtgtggcaggggaaatgttgctctttcgggactgatgacagcagcaagcacttttgctgcagcgttcttaactcctcttctgacatccaaactggcgggacaatatgttgcagtagatccaatgggattgtttgtgtcaacatctcaggttgtcctagcacctgtgctacttggtgctctacttaatcagtactgcaacggtttagttcagttagtttctcccttgatgccattcattgctgtggcaactgtagctgttctttgtggcaatgctatcgcacagaatgcttcagccattctatcatccggtctacaagtggntatgtctgtttgttggttgcatgcatctggctttttctttggntatgttctttctagaacgattggcatcgatatctcttcatcac

SEQ ID NO: 28937 - DNA, 443 bp, Oryza sativa
  Clone ID: uC-osflM202127g03b1
ctgtctcgtgggcgggagggttggttcgatcctgagtgggctcggcgccgcgggcgagtcgcttgttggagggggatggggaattgctgtgggtggggcgcgcggatcaaggatgggagcccgcaaccgggagcctctgggatgttctcaaggagtggtgctaaagatgggagtaggcttagtggctgcagtagtcgagcctcttcagcttccatgcctccaactgcgaaaactgaatgtgagatactgcagtcagccaatgtgaagatcttcagttgtagtgatctcaggatagccacaaggaacttccgtcctgacacgaatgctaggagaaagagggatttgatctgtctataaaggatggattgatgagaatacattatctgcttgcaagcctggcactggaattgctgttgctgtgaaaagactcaaccagagagttt

SEQ ID NO: 28938 - DNA, 541 bp, Oryza sativa
  Clone ID: uC-osflM202127g04b1
gtttttcagcaaaaaaaatcaaacaaaaagaaaaaagtattccccatctgtgaaattcgcaaaaccctagcgcggcggcgatgtcgaacacgagggtgttcttcgacatgaccgtcggcggagctccggcggggcggatcgtgatggagctgtacgcgaaggacgtgccgcggacggcggagaacttccgcgcgctctgcaccggcgagaagggcgtgggcaagagcggcaagccgctgcactacaaggggagcaccttccaccgcgtgatcccggagttcatgtgccagggcggcgacttcacccgcggcaacggcacgggaggggagtcgatctacggcgagaagttcgccgacgaggtgttcaagttcaagcacgacagccccggcatcctgtccatggcgaacgccgggcccaacactaacgggtcccagttcttcatctgcaccgtgccctgcagctggctggacgggaagcacgtcgtgttcggccgcgtcgtcgagggcatggacgtcgtcaggccatcgagagggtggatccc

SEQ ID NO: 28939 - DNA, 522 bp, Oryza sativa
  Clone ID: uC-osflM202127g05b1
gttgagtcacgcttggaattcattaacggggcatcatttgggtcagaactttgtacaacctcagctccttgtaagtgcaaactttcatttggttattctttgttatttgcctctgccagtaatcactaaatgtgagcatccgtgacagattgagctcatactacttaaatgccctcctcttctcatgataatattcttcattacagatccagagaaatctatttgtgctgtaactggacttcctgccaagtatgttctctgagcgcacatttgaagtgacctatattggcctttgatgttccttttctgaagccgaaactgttgctgtgtttattgcattgatctaaataaaattgtgcacacgtgcaccttttgtttaacatctccacattattagcagagtgtttatccttagacattgcattgcttgaaatgctgtttgccacatccattgtattggttgccatcttgttctggtgaaatagctacattattttgacttggcaatttgaatgatcccac

SEQ ID NO: 28940 - DNA, 510 bp, Oryza sativa
  unsure (1)..(510): unsure at all n locations
  Clone ID: uC-osflM202127g06b1
attttaccagtgtgtgtgattagtaccgtaccgggagtctagtgagatcgggtaccacgagatatacttcttcttgtcgcgctgcttaccgttgatgcgcttagccgccgcctgccatggcctccgccgtcgcgagtaacttgcctgcagctgcgcccgcggctgtcatgccgttcggtggatggcatggtccgcgtgtctcgttcagccgcgacgccgccggggctgaggaggctgccgcggtggtcgtgtgttcttcgcccctggccgccgcggcggcggtggcgacgacgacgacgccggagccggcgatatccaaggacttcatcgacttcgagttcagcctcgggggctccgccaccatgctcccggcggacgagctctttgccgacgggaagctgctcccgcttcggaaggcggcggctgtgccggagatggatgccgnggcgccacggccgccgcagcctgaggcaatgccggcgccttctgagccgatgaagccactacggg

SEQ ID NO: 28941 - DNA, 453 bp, Oryza sativa
  Clone ID: uC-osflM202127g07b1
gtggcgaccacctcgtcgtcctccacgtcctgggtcacggtggggaggaggccaagcacgccctgtggggcaagtccggatccccgctgatccctctctccgagttccgggatccgacggcgatgcagcagtacggcgtgcactgcgacgccgaggtgctcgacatgctcgacacggcggcgcgccagttggagcttaccgtagtggcgaagctgtactggggcgacgccagggagaagctctgcgacgccgacgaggagcagaagatcgacacgctcgtcatgggcagccgcggcctcggcttcgatccagaggattcttctggggagtgtgacaaactacgtgctgtcaaacgcatcatgccctgtaacagtcgtcatggggacgtgatcgatgattcgactcgagtggatatactgccactggtgctactgtatctgaataaagcgtgta

SEQ ID NO: 28942 - DNA, 458 bp, Oryza sativa
  Clone ID: uC-osflM202127g08b1
tttcagaaaaaatcccctttctcgacccctctggctcctcgattccggcggactcgtcaccggcggcgggaggaagaggggtcgtccccctcccctagtttagtacagtagtcgggctaatctcgttaggtcgggttcttcccgttcttttctcgttggtgcggtatggaagctggagacggcggctgcgacgtggatgcagcttgtgacggcgatggcgacgcggaaacgacccgagacgatggcgacagcgcggatccggtccgcggcggtggcggcggcttggaggcggtccacggaggcggtagctgctcggatgcggttcacggcggcgacttggttgcggtccacggaggcggcggctgtgcggttgcgacccgcggtcgaggcggcggctgcggctgcgcggctgctgcccgtggcggcggcggctgcacggatgctgctcgcggcggcgg

SEQ ID NO: 28943 - DNA, 499 bp, Oryza sativa
  Clone ID: uC-osflM202127g10b1
tttatgccctggtaaagatgagccctactcgaacgaagctattgctttgatgaggaggagaattctacagcgagatgtggagatagaggttgaagcagttgatagaactgggacattcttaggttccttatgggagtccaaaaccaacatggcttctgttcttctggaggctggtctggccaagcttagttcatttggcttggataggattccggatgcaaatgttctaatgagggctgaacagtctgcaaagcagcagaaactcaagatctgggagaattatgtagagggtgaagaagtttccaatggatctgcatctgaatccaaacaaaaggaaattctcaaggttgttgtaactgaagtccttggtggtggaaagttctatgtccaaacagttggtgaccatagagtggcttccattcaacaacagcttgcatctttaaaacttaaagatgcacctgttattggtgcttttaatcctgtgaagggggaaatagtt

SEQ ID NO: 28944 - DNA, 419 bp, Oryza sativa
  Clone ID: uC-osflM202127g12b1
taataattgatactggctattaagtcagcgggggtttctgtactgtgctattactgatcgatgcaaatgcccttctgcccgtagctctggagttcggtggcgccggcgccggcgcagccggggagcgtggtcatcaatggcacggtggtcgtcgccaaccacttcggcctctcggctcccggcaagtccaccaccctccgcctctttagcggcacggaggtcgatcacgagacgaggaaggggaggctgagcgcggaggcggcgttgaggggagggaagaagacgaggcatgggaaggcgagcacgacgatgtaccaggtgacgttcttcgtcgacggcgagtacgggacgccgggcgccgtggacgtaaagaacgggaaccggaacgaccagttcttactccggccgtacagctggac

SEQ ID NO: 28945 - DNA, 506 bp, Oryza sativa
  Clone ID: uC-osflM202127h03b1
ctcttccatggcatccattccactcctgcggctgcggctccctttaactcttcggggggacctctagccaagccaccaccggccaaacgatgccggcgtctgagccggcgatctccacctgatcttcgttgtacctggggttggctgcatcaacctggaggcacggctcaccgaggcgtaccggccgtcggtgcatccgagctgcggcgcgttgaaggggaagggttggttcgggctgtgggacaacagcttggacctttcgacgtaccactacggcgactgcttcaaggagcagatgagcctcgtctacgatcccgtcagcaacgactatcggaacctccccggcgttgagacccgcgtgggcaacttcggcattgcgagagggttccactcgaagaacactttacacccagaaaggtgcctttgcaaagctattgaatagctggaagagattggataccatgatggagacaactgcacggagttccctacgatttccgtacgct

SEQ ID NO: 28946 - DNA, 485 bp, Oryza sativa
  Clone ID: uC-osflM202127h04b1
tggtggtggtggtgtgggttgtggtgcggcggagggtgaggcgcgccgcggcgcggagggaggaggtgctgcggctcacgcggctggcgcaggaggagtcggagatggcggaggtggagtgcgcgcgcgcctactactcggagctgttcccgagcgtcgtgcacgcgacggagatggtggatgaggcggcgtggggggcgccgccggccgtggttccggctcaggcggaggcagaggcggagatggaggcccgggcccagccgcagccgcagccgccggtgggtgccaagggggtctgcgcggtgtgcttccggccgacgacgttcaggtgcaagcagtgcaaggctgtcaagtactgttccttcaaatgccaaatagcccactggagacagggtcataaaaatgaatggccgccaccaagcactgatgctaatcatgatgatgtggctgaactttctgttgcaaaggaaagggaaaatgagcag

SEQ ID NO: 28947 - DNA, 480 bp, Oryza sativa
  Clone ID: uC-osflM202127h05b1
ctttaatacccctcatccccaaaagccccaaacccgaggaggcgagaggaggaggaggaggagctcgtcggcggcgagcgatggcggcggcggtggcggagctgtgggagacgctgaagcaggcgatcgtggcgtacacggggctgtcgccggcggcgttcttcaccgccgtggcggcggcggcggcgctgtaccacgtcgtgtcggggatcttcgcggggccgcccccgccgacgccgcggccgagggacgagcccgaggcggagccgctcccgccgcccgtgcagctcggggaggtctccgaggaggagctccgccagtacgacgggtccgatcccaagaagcccctcctcatggccatcaagggccagatctatgacgtcacgcagagcaggatgttctatggacctggtggaccttatgcgctattcgctggcaaagatgccagcagagcactcgctaagatgtccttcgagcccc

SEQ ID NO: 28948 - DNA, 473 bp, Oryza sativa
  unsure (1)..(473): unsure at all n locations
  Clone ID: uC-osflM202127h08b1
ttataaaaaagagaaaaagaaaagaaaaaaaagaggaagaagagagaactcgaactctcgcctaccatttcgcccccctccgcaagcaatccaccactgcatcggcggcgagggctcaccggcggcgagccatgtgcggcggcgccatcatccaccacctgaaggggcacccggaggggtcgcgccgggcgacggaggggctcctgtggcccgagaagaagaagcccaggtggggcggcggcgggaggcgccacttcggggggttcgtggaggaggacgacgaggacttcgaggccgacttcgaggagttcgaggtggactccggggactcggatttggagctcggggaggaggacgacgatgacgtcgtcgagatcaagccggccgncttcaagagggccctcttcagagataactngagcacattaccactgccggattgatgtcctgctgcaaatctgccaaagaaagag

SEQ ID NO: 28949 - DNA, 469 bp, Oryza sativa
  unsure (1)..(469): unsure at all n locations
  Clone ID: uC-osflM202127h09b1
ttttgatgaggcttattatgatcaatatgctgtgggattctctggagtactatttggtatgaaggtcgtgctgaatgcctggtcagacgattatgtctttcttcatggggtggttattccagcaaaatatgctgcctgggctgaattactcctcattcaggcttttattcctgggacatctcttattggccatctcggtggaatacttgctggattggcctacctttggcttaagcgatcattctctgggccagacccgctttctcttctgatttcaggaattggaaaagctgtgagatggccagtagggtttgttcagaagcttttcaggtctggcccgtctcagggttacaccccaagtcgaggcanaatttgccgtggttcagcaagagagaatggtcgaggtatatggagatgctcagcctgcacttatgacaactcggcgtcgacagatatctgtgaaatgtgc

SEQ ID NO: 28950 - DNA, 466 bp, Oryza sativa
  Clone ID: uC-osflM202131a01b1
caccacatccagttttctcgatgatacacggtcgttcactctatcgagggtgtgtacttcacccccggcgatacggagaggaagaacccgtaacagcgatattcctgctcacttgacgacaggcgttcccctctcacagacgctgctgctggcttctctcgacatcgccctggccttccggactctctgtcagcccgagcgctaaggcggctacctttcctacacccatttacaacgcctagcgcggccagcaccatcaacctgctggagccttagtgtcaacgctccgaagccctatgccattgcaccaccacctgcagactacatgttgcatgatacagcatgacgatcatgaccgacgacgactcgccgtcgtcggccgccacccacagggacaaggcgttgacgggcaatccgatgttctactactcgccgatgctgtcgtcgaggaagctcatgcagcgcg

SEQ ID NO: 28951 - DNA, 506 bp, Oryza sativa
  Clone ID: uC-osflM202131a02b1
ttttggccaacccgccgctggctcgctttatatcccgcgtgagctccacaccgagcgaagcggaggtccggaggaggaagcggcgagagaagctcagctaggcagggcgacgggcagaaacgcgaccacggcaacaaaccccgccgcgcgcgcccaccgtgccggttacatgggagtagaggcgggcggcggctgcggtgggagggcggtagtcaccggattctacgtctggggctgggagttcctcaccgccctcctgctcttctcggccaccacctcctactagctatacacacccatctcaccataacacacatacatagatagatagatagatagatacatacacacaaacataagtagctaggtagagaaagagatcatagcgttaggtgatcgatcgatggctgctgctgaggcggcggcggcggtggggaagcagcagcagaagggcggcggtggaagtggaggaggcggctgttggtccgcgcccttcctgacgaaga

SEQ ID NO: 28952 - DNA, 527 bp, Oryza sativa
  unsure (1)..(527): unsure at all n locations
  Clone ID: uC-osflM202131a03b1
ctgttagagagagagagagggagagagataaatagtatacagaaatgagcaggtcgagctcgagcatggccaccgtcctcgtggtgttgatggtcgtcagcgccggcggcttatccccaccatgtgcgaccgctgcgaaggaggagaagccagtggtggtgctgccaccagcggcggcgccaggggaggcgccctccgcggacgcggcagcgtttgtccgctcctgctgcgacaccgccctgcaggccgaccgcgacggctccagcttctgctacgaccatctcctcccctacgctgccttcttcgagggcaaccaggtgaaggtcgccgaggtggccgccaccatcctgagcaccaacctctgggtctacgtcgaccaattgcgcaaggtccagggaggggccggcaagggggacccgaacctgaacgcctgcgtcgatgacttcagcgtagccgtcggcgagaacatcaccagggaggcgctgcagagccttcgacgnctcgccgtcgtcggaaagggcaagcgc

SEQ ID NO: 28953 - DNA, 501 bp, Oryza sativa
  Clone ID: uC-osflM202131a04b1
gttgtataaaaaaggatgtgaatagaaggaatgaggattcaccgagctccttgaagtctaatgcaaaaggcaatgaggacgattttgatgattttgatcctcgtggatcttcttcaaatggtgcagctaatacaaacaccagtggcgtggatctttttgccccaaacttattggatgatttcatcgatgtgcctgcagcagcaactcatgaaacaaacgactctgcagacgctcaggttgatctgtttgctgatgcagatttccaatcagcaataccaagtacagaaacagctgcgggttcagatgtccagggcaatgtagacctttttgcggaacagccagccttcacagcagcctttccaccacagacagggtttattccaccaccaagttctgggacatctgaagcaaatacttccacgtctaagaacacaactcctgaaccttttgatccttttggtgctattcctataaacagctttgatggatctgatccatttg

SEQ ID NO: 28954 - DNA, 451 bp, Oryza sativa
  Clone ID: uC-osflM202131a05b1
cttcattggcggctcaggctcttctctctgggaggcagctgctggggaggccattgcaatcttcagtctccaggtcttcttcctccaggaaggcacccttcatggtcagggcagaggccactccccctgccaagcaaggtgctgacaggcagctgtggttcgcatccaagcagtccctgagctacctggatggcacgcttccgggagacttcgggttcgacccgctggggctatcggacccggaggggaccggagggttcatcgagccacggtggctggcctacggcgaggtgttcaacggccggactgcgatgatgggcgtcgtcggcatggtcgccccggagctcctcggcaagctgggcctcgaccccgccgagacggagatcccatggttgcagaccggcgtgatcccccccgcgggcacctacacctactgggccgacccttacac

SEQ ID NO: 28955 - DNA, 518 bp, Oryza sativa
  Clone ID: uC-osflM202131a06b1
ctcaccccagcagcagcagcagcagcagctgagcttgaagcagcagagcgaggtagacatggccgccgccaccatggccctctcgtccccggcgctggccggcaaggccgccgcgaaggtgttcggcgaggggcgcatcaccatgcgcaagtcggcggcgaagcccaagcccgccgcgtcggggagcccgtggtacggcgccgaccgcgtgctctacctcggcccgctctccggcgagccgccgagctacctgaccggcgagttccccggcgactacgggtgggacaccgcggggctctccgccgacccggagacgttcgccaagaaccgggagctggaggtgatccactccaggtgggcgatgctcggcgcgctgggctgcgtgttcccggagctcctcgcccgcaacggcgtcaagttcggcgaggcggtgtggttcaaggcggtgtcgcagatcttcagcgagggcgggctcgactacctcggcaacccgagcctgatccacgcgcagagcattc

SEQ ID NO: 28956 - DNA, 522 bp, Oryza sativa
  Clone ID: uC-osflM202131a07b1
tgttgttttaggccatctgagggcctttgaatggctctcggcctccttcatttttcatagcatttgtgtagtgtgtgcaaatccatcatcgcatcttcatatctgaagaaatgaaggtgaccactcagctcaagcccatggcctcctcgtcgacgtcgccgtcgccgtcgcggctgccgcggagcgcgagcggcaaggcgcccacctcgccgccgtccagctccaacgcctcgcgccgccaccaccagcagccgccgcgggcctcggcgtcgacgcccgccaccccggcgccgtcgcgccaccacctcaggtcgctgtccatcagctgcatgacgatcaggaccgacgactactcgccgccgccggccgccacccacaaggacaaggcggcgacggccaagccgctgtcctactactcgtcgatgctgtcgccgaggaagctcatgcagcgcgcgtcccgcgcgttccgccgcagcaagtcgtctcgccggaggaagagcaaggacgacgtcatcgtcgcgt

SEQ ID NO: 28957 - DNA, 529 bp, Oryza sativa
  unsure (1)..(529): unsure at all n locations
  Clone ID: uC-osflM202131a08b1
ttctctcctcctcctcctcctccctgcgcctggcacttgcagcgattcctgctccccgcccgctcttctcgaaccttctggaaccttcccccatcccccacaagaagcagcagatgggcatcgtcgtcgtcgtcgtcaaccaatcctaggcgacgagcgctgcggcggcgcgcgccatctgctcccctccgccgtgctccggtgctccccgatctgcgcctcccgctccggttggtcggctgtcggaacacgcagctgcaaaaccctagccgagctgcggcgatctcaacgctggcggcgaggccctcctcttcgtcggcgtcgacggaaaaatatggcgcatgttttatttacttccccttgctgtcactgaacacatttcctaaagtcaaggacaagacatggtgttgcagaagaggttggactatggatcccatggccatcgtgctcccattaagccacgtgtcgcaacattggcgccggttaaacgctccacangactaaggaaaaagcagatgtatgcacttga

SEQ ID NO: 28958 - DNA, 521 bp, Oryza sativa
  Clone ID: uC-osflM202131a09b1
tttgcacccccccccccacacccgcagcaggagggagaagacgacgacgaagatgatggatctcgccgacccaaaccaccggctcatcgccggcgcggcgctgctggtggccaccctcgccttcatcaagctgctgctgagctccgccggcggcggcaagaagcgcctcccgccgaccatcccggcggcgccgctggtgggcgggctgctccgcttcatgcgggggccgatcccgatgatccgggaggagtacgcccgcctcggcagcgtcttcaccgtccccatcctcagccgcaagatcaccttgctcatcggccccgaggtgtcggcgcacttcttcaaggggaacgaggccgagatgagccagcaggaggtctacaagttcaacgtgcccaccttcggccccggcgtcgtcttcgacgtcgactactccgtcaggcaggagcagttcaggttcttcaccgaggcgcatcgtgccaaccagctccgcagctatgtcgaccagatggttgtcgaggctg

SEQ ID NO: 28959 - DNA, 56 bp, Oryza sativa
  Clone ID: uC-osflM202131a10b1
ttcgtttaatcgcgacagcgacacgcaaataggggggtatgttgggacgaccagtg

SEQ ID NO: 28960 - DNA, 373 bp, Oryza sativa
  Clone ID: uC-osflM202131a11b1
tctccaatggcgctggtgatgcctttgttggaggcttcctctcacaattggttcaacaaaagagcattgaggactctgtgaaggctggttgctatgccgcaaatgttatcatccagcgttctggctgcacttaccctgagaagcctgatttcaactagggctaacccaaccacatattgaggaacaattattcgcacatccaacctactagtggtttggtgtgttctacctgtaccatctcgaggctttccatatgatccggccaatatttttttgccgtgattcttgtttcactgctgcaaaccttactttattctcggtataaggcacaattgccaatcggtgtgttgttttggtcatatctactgctctg

SEQ ID NO: 28961 - DNA, 348 bp, Oryza sativa
  Clone ID: uC-osflM202131a12b1
ctcacttcagcagcagcagcagcagcagctgagcttgaagcagcagagcgaggtagacatggccgccgccaccatggccctctcgtccccggcgctggccggcaaggccgccgcgaaggtgttcggcgaggggcgcatcaccatgcgcaagtcggcggcgaagcccaagcccgccgcgtcggggagcccgtggtacggcgccgaccgcgtgctctacctcggcccgctctccggcgagccgccgagctacctgaccggcgagttccccggcgactacgggtgggacaccgtggtgctctccgccgacccggagacgttcgccagaaccgggagctggaggtgatccac

SEQ ID NO: 28962 - DNA, 536 bp, Oryza sativa
  Clone ID: uC-osflM202131b01b1
ctttcgcgtggggcagggttgctaaccataataggagctggaactacacctttgcagaagcccaaaaatccaattcatgttgtacgagactcttttgaagaagttgaaaaagagacgtgcctctaatttgaagggagctgatggactgactgctcttgaaattttccttcttggtgctgttgccaaactgggtgcgactgttgttacatatcctcttctagttgtgaaggcaagacttcaggtgaagcaaataattgatgatgacaagaggcaccgctacaaaggcacatttgatgcgatcacaaagatgatacgttatgaaggtttgtcagggctttataaaggaatgagcacaaaaatcgtacaaagtgtttttgcttctgctctcctttttatgattaaggaggaactggtgaagggcgctcgattattggtaaccggcaacaccagccttgttaagaagttaccatcgaagccattaagatgatctaggttgtacaagagttagttccctacttataccacaattgtttcca

SEQ ID NO: 28963 - DNA, 505 bp, Oryza sativa
  Clone ID: uC-osflM202131b02b1
ccctctctccgtctccgcgcacgctccaatggcggccacggctgtgaccctgccgtcctcgccggcccccttccccgtcaccaccaccgtctcctcctcccgtaacgtccgcctcctcctccgctccccgcctcctcgccgagccctccgcgtcgccgtctccgccgcggccgacgcgccacccaagccggcgccgccgccgacctcgccttcgggcatcgtcctcgtcgaccccaccgaggcacagaaggtgcaccgcctcaaggctgtatacgaccagaaggtggtccccctcatcaccgaggagttcggctacaccaatgtccaccaggtgcccaaggttgagaagattgtagtgaattgcgggttgggggctgaagccggtaactccaaggggctcgaatccgccatgaaggacctcgccatgatcaccggccagtggcccgtcaagacgaaggccaagaagtccgtcgccagtttcaagatccgcgagggggacaccatt

SEQ ID NO: 28964 - DNA, 467 bp, Oryza sativa
  Clone ID: uC-osflM202131b03b1
ctcttcctcttcttcttcttcttccctcttcttgtggtggtgggtttgacccaagaacggaggagggatagggcgggcggcgatgggggcagttcgggggattttggtcgtggcggtggttcttgcggtggcggcgattcttgctggggcggcggaggggaaggtgaacgggaaggcgaaggggaagtacagggcgctgttcaacttcggggactcgctggccgacgccggcaacctcctcgccaacggcgtcgacttccgcctcgctaccgcccagctcccctacggccagaccttccccggccaccccaccggccgttgtcccgacggtcgcctcgtcgtcgaccacctcgccgacgagttcggcctgccgctgctgccgccgtccaagctcaagaactccagcttcgctcacggcgccaacttcgccatcaccggcgccaccgcgctcgacaccccctactttg

SEQ ID NO: 28965 - DNA, 533 bp, Oryza sativa
  Clone ID: uC-osflM202131b04b1
cgcgtggaggcggcgccgcggctcgcgcaatggcgcgtcgacgtgctcccctgctacacctaccgcaagtccgagcccttccgcatcggcctctggaactggtacctatctgtggagagaaataacaagcaaacttgtgttaaggtctttgcggagttatcgaattctgccaagaatacaaccccagcccctattgcttgcttcatcacaaaacttctcatatcttttcctccaaatcagaagaccatagttcatccaggaatttttgacaagccgctgaaacacgaaggttttgtgtgggcaattgatagtactgttacaggaagatttgtgattgagatagagtttcttgacctgaaaattgcagatccatctggtggtgaaccagcctcaatttgggcttcccaccaaatcaagaaatcttcagacaacactgcactgtcatccttggcgagaatgctgcaagaaggcatcctcaccgacatcacagtcaacgctaccgacggcagcattatggcccaccgtgcaatcct

SEQ ID NO: 28966 - DNA, 267 bp, Oryza sativa
  Clone ID: uC-osflM202131b05b1
tgactgctggtctcaatggaagtagtctccataattttttaatcatttctgctcatccgttcagttagatgtgcaattgttaatctgattgtatattctgccattaagcatagtgaaggttaccatagaaaattttattcttgtatggcgacttgattgtactgagtgccgatggtatggctcaagtagaagtggttgcgatcaaaacaaaattgaaaacaccaacgaagacgaatccatcgtgcataacatatataccactacaaa

SEQ ID NO: 28967 - DNA, 338 bp, Oryza sativa
  Clone ID: uC-osflM202131b06b1
gtgatttgctcggaaagaacagaacgcaaaccagaggttccagagagaggaggtacaaaaagatgcccaatgccatgatcccttcacacacccgcacgctgtatacttcgactacgatcacggcaccagtatctggggagcccgggaccaacctctacggtggcaggggcggcgaccgagatccacaaagccttcttcggagcaacaggcctgaaccctgtggcctcttctacgcatcgacacgcatgtgctacactgcacttgctcgcaccgggtcaagccatacaatctccatacacacctacgatcatactactaactgcatccaatgtgtcttg

SEQ ID NO: 28968 - DNA, 521 bp, Oryza sativa
  Clone ID: uC-osflM202131b07b1
tttggacaccagggcatagatctttgtagttaatagttgctcttgccctctggactgaggagtaaatagttgtgtgccagtggtctcttgcttcatcttggtcttgtggttctgattttctggtgattgttggagacttggaggagtaaagtaaagggtgaaaaaaagaagggaaataagaagaaaaaaaggtgacagattgaggttgttcttagtgtgtcaagatgaagtatatgaagcttggatcaaagccagatgtgtttcagacagagggaaacaatatcaggtttgtcgcaactgagttggcaacggacatcgtaatcattgtaggggaagtgaagttttatcttcacaagttccctcttttgtcgaagagttcgcgattgcaaacattggtggcatcgacaaacgaagagagcaacgactaaatagacatctccgacatcccggtgggacctgcagcattcgagatctgtgccaagttctgctatggcatgatcgtcaccctcacgcgtacaacg

SEQ ID NO: 28969 - DNA, 410 bp, Oryza sativa
  Clone ID: uC-osflM202131b08b1
cgcgctcccccaccctgcctctctccgcaccggtctggcacccacctgagaccggccgccgtttctcggtgtctctctctctctctctctgcccgctccggcgagagggggtgtcacacacacgtacgtacgggaggatcagggcaacaagtgaccgcgcgcgtgcgtgctctccccccgaccgatgacaacgatgcgcgcctccaccgcgctggtgctggtggcggcggcggtcctcgccgtcgtgcgcgccgaggacccgtaccacttcttcgattggaaggtgacgtacgggaccaggacgagtatggacatggcccagaaggtgatgctcatcaacgacatgttccccggcccaaccatgaactggagctccaacaacaacatcgtcgtaaacgtcttcaaccagc

SEQ ID NO: 28970 - DNA, 504 bp, Oryza sativa
  Clone ID: uC-osflM202131b09b1
ttttcgctgataccggccttcccgccggccgcggctgggtctctgttcgccggcgggagggggaggaaggacccgcagacagtgttcgtcgcgggcgccacggggcaggcgggagttcgcatcgcgcagacgctgctgcggcaggggttcgccgtgcgcgccggggtgccggacctcgcgtccgcccaggagctggcgcggctcgcctccgcgtaccggctcatttcccccaccgaggcgcgccgactcaacgcggtggagtccgatttcgaggaccccgaggcgatcgccaagtccatcggccctgcaactaaggtggtggttacagtcggcgcagctgagaaggggcccgacggcggtgtggtcaccaccgacgaggcgctccgagttgtgcaggctgctgaccttgccggcgtgacacacgttgtggtggtgtacgacctgtgggccggtgaccccagtggtgagtcgacgtacaatgtgctcgacgggttcacgttcttt

SEQ ID NO: 28971 - DNA, 528 bp, Oryza sativa
  unsure (1)..(528): unsure at all n locations
  Clone ID: uC-osflM202131b10b1
gctgtttcccatcgccccccaaatccccatccgattccaagccctaaacctcccgaatcggtcgaggcggtgctcgatccggccgctgcatctccggattcgagcggggggcgttgccgcggtgcccggatccggaggaatcgcgccgcggcgggttttctagggttccacaccgtcgcgcgtcccggcgggtgttcatgaaggccatggggtacaataacccctacgattccagcgggactgacgacgatctccctccaacacaaaatagaggattaagagtgcgatcttttagtgcgaatggcagggcatctgttatgccattttcttacattaggccgcacggtgatttggagagtgaaatacatcaggttgagcaagaggcgtacactggtgttcttagagcatttaaagtgcaatctgatgctatatcctgngaaaaagaaagtttgatcactgaactcaggaaagaattaagagtctctgatgatgaacacagggaactattaaacatagttaatgaagatg

SEQ ID NO: 28972 - DNA, 533 bp, Oryza sativa
  Clone ID: uC-osflM202131b11b1
ctttcttcttgttgttcttatccctcatttgagctgagatgttaagttggaaccaagaactatactagttatattatgtagaggaaacatcacaaaagaatatcagaaaataaaaagaaaccgttccatgccaccctgagattctcctacaagctagcccaaccaaggaaacagcaatttttaagctgtttctcttgatactcgatctacatcttttcccttagtttaacactctttttcagtgggtttactactcttgtgtggtggtggtagtggtagatcaagagccaagaagtccgggaaaaaaattctacttgtttcgtccatttggtttagtctgccaaagcagaagtcagtggcgagatcttgtttctactccattcgcatcattctgctgccaatttgccctcagagaagagggagattcggcagcggaagagagcggagtatctacggcgatggcggcagcactagagtgctggtcgggccagccgagcaccgacgaggagatggtggagcaggtgctcatgaag

SEQ ID NO: 28973 - DNA, 396 bp, Oryza sativa
  Clone ID: uC-osflM202131b12b1
ttggtttcttcttcttcttcttctccctcattggggctgaaaagttaagttggaaccaaaaactatactagttatattatgtagaggaaacatcacaaaagaatatcagaaaataaaaagaaaccgttccatgccaccctgagattctcctacaagctagcccaaccaaggaaacagcaatttttaagctgtttctcttgatactcgatctacatcttttcccttagtttaacactctttttcagtgggtttactactcttgtgtggtggtggtagtggtagatcaagagccaagaagtccgggaaaaaaattctacttgtttcgtccatttggtttaatctgccaaagcagaagtcagtggcgagatcttgtttctactccattcgcatcattct

SEQ ID NO: 28974 - DNA, 536 bp, Oryza sativa
  Clone ID: uC-osflM202131c01b1
cttccgtgcccctccgccgcacgcgttccccatccccaccaaagcttcttcccccgagaggcggcgaaatccccaaatccgaacaagccaaagccatcgtcgagctccttcacccaccgatcgattcgatctgaccgcgccgccgcaagggaggaggaggaggaggacgacgagcagcagccatgtgggcggcgtcttgcctggcgtcgtgctgcgccgcgtgcgcgtgcgaggcgtgccgtacggcggtcggcagcatcggccgccgctccgcccgcatcgcctactgcggcctcttcgcgctctccctcttcgcctcctgggcgctccgcgaggtcgccgcgcccctcctccaatccatcccatggattaaccacttccacaagacgcccgaccgcgagtggttcgagaccgatgccgtgcttagggttagcctcggcaacttcgtcttcttcaccatcctcgccatcatcatggctggcatcaaggaccagaaggacccccgcgacaagatacaccatggcggatggatggcc

SEQ ID NO: 28975 - DNA, 525 bp, Oryza sativa
  Clone ID: uC-osflM202131c02b1
ccctaatccgcgagcccgggcttggtgcaccccgcagcagctttgcctggcaacgtaaaaacgtactacggaaacttgtacactatcaagctcagcaactgcctgcccctctctttccctcgccattaagttttctcgtccggcggcgtcacccctgcgaattaactaactagctaggccggccatggagacggtggccgcggccagctacacccgcggggcggcgacgcgctcgccagcgtgctgcgccgccatgtccttctcgcagtcctacaggcccaaggccgttagaccgccgagcacgttctacggcgagtcgctgcgggttaacacggcgaggtcgctgccgtctgggaggcagtccaaggcggcgagccgggcggcgctcagcacccggtgcgagatcggggacagcctggaggagttcctgaccaaggcgacgccggataagaacctcatcaggctgctcatctgcatgggggaggcgatgaggacgatctcgttcaggtcaggacggcgtcgtgc

SEQ ID NO: 28976 - DNA, 445 bp, Oryza sativa
  Clone ID: uC-osflM202131c03b1
gtttttcaggggcaaggaggacgcggccaacatctgtgcccgtggacactacaccattggcaaggagatggttgatctgcgccttgaccgcatcaggaagcttgccgacaactgcactggcctccagggcttccttgggttcaacgctgttgcaggaggaacggtctatcggttcgtgtcccttatccttgagcgtgtttctgcggactatggcaggaagtccacgcttgggtttaccgtgtacccgatcgctcatgtcttcacctatgagggtgagccatacaacagtgtcctttacacccactctcttgttgagcacaccgatgacactgtgctggtcgacaatgaagccatacatgacatgtagacgccgtacctggacattgagcagacaacctacaccaacctaaacagggttgtgtcccaggtcatctgctgactgact

SEQ ID NO: 28977 - DNA, 333 bp, Oryza sativa
  Clone ID: uC-osflM202131c04b1
gtttttcgcattggacgtggagagcatgaaagggggattttttagagtgatgcggaaaaataatatccccaatctcatcatgctttcacacacccgcatcagtcttctcaaactgcaacccgagctacacatctgcagcgccggcgaccaacctgtcctgctgcgggagcggcagctgacatccacaatgcctgcgacagaacaagccgccttgcccctgcgccggctactccgtgtggacggcctcgtccacccctacacttgctcccaccggcttaagccttgggatctctatccacatctactgtcatcctgcgaacgccatccaatctt

SEQ ID NO: 28978 - DNA, 98 bp, Oryza sativa
  Clone ID: uC-osflM202131c05b1
tgtttttcccattggaagtggtcaacatgattctgggattttttcgagtgatgcggaagaaataatatcccaaatgccaatatgattgcatactctgg

SEQ ID NO: 28979 - DNA, 203 bp, Oryza sativa
  Clone ID: uC-osflM202131c06b1
gttgttgccagggggagggattagcaccctacgggggttttcttgtaagctgcgcgagaccaatgtgctctaatacgctactgactgaaccactccgatcaattttgtcaacatgtagttctagcctgaaaactaggctggctgacgcggaatctgtgtggagagctggccgcaatggtgattgaggcgatgtgcctgagaag

SEQ ID NO: 28980 - DNA, 484 bp, Oryza sativa
  Clone ID: uC-osflM202131c07b1
tttggggcaagggggggggagtagcaccttgctctgctttgcctgcagcgtgaccggaagcaatggcgtctgctactctactgacgaaatctatcgttcccaggatgtctgaatgggttgccagccgccaggctgccgcgcctaagccggagactgtctgcatggctgcccgcactggtgcctacgacgatgagcttgtcaagaccgatagaaccattgggtcaccaggaaggggtatctcgtgccatgcgatgagatctaacgcgacctgccctaagaggccagagtcaattgccctcgacaacaccgaggccaacctccaggcttaccggaccgtacttgtcaccgcaccttgcttgatacagtaggatctacggtgctatcctctgtgaggagactctgtaccagtcaactgtacatggcaagaagagtgtccacatcctcactgagcataaaagcgtccaggtatcaatgtcgacagggg

SEQ ID NO: 28981 - DNA, 271 bp, Oryza sativa
  Clone ID: uC-osflM202131c08b1
tttgtggcggggagagaggaaagaacccacaggggtgcttttcgtgcagccaccgtagaaccgacggtggctgatccgccactttccagatctatcgatcccacccacatcagatgtgtcctccaggggttcacatggaaggctgctgtggagagcaggaacgagctatggtcgcagttctgatatggatgatgagctcgctgagaactatagaaccaatttgaaggcagacactggagcctgcgggaccgataagtcttcacgaatgctg

SEQ ID NO: 28982 - DNA, 410 bp, Oryza sativa
  Clone ID: uC-osflM202131c09b1
ccctcttgagttgggatcgttcgcagatgcgacaacgatgtcaacctccgctcttgcacaacacacactatagcaaatcggacctatgacaaacttatggagtttgcttacacttgccatgattttgatgcgttccaaggatcatccgctgtggaagcatgaacgtgtactccttgcagctgtgattttggtgagggctgttatgacgactatggctgctattgcaagctagggattagggtgtaccagcacaactaatgttctagctgtgatgtcgcgcgcacacaacaggatagtttgcattcgctctcttaatgagcactccaaggatacatgtgctggtcgcaatgctgtcatcgatgacatttggaagccctgcactgagtttgataacaacactctactctata

SEQ ID NO: 28983 - DNA, 240 bp, Oryza sativa
  Clone ID: uC-osflM202131c10b1
tgttgacgagggggtgcgaaatccacgaacgggggcttcacgttagagttcctggagaccactgagggaaacaagatcagtgcagcatatattgcgagatcactggtggacagagaggcggtgcctgactacgacagcaacgtctgcagcgagagcatgtaggggatcaggctgctgtgcttacaggtgggtgatgccaaaggacctggatagcacccgtctgtacgaatcgattgggac

SEQ ID NO: 28984 - DNA, 262 bp, Oryza sativa
  Clone ID: uC-osflM202131c11b1
cttccctccacactgcctcgccaaccaaccacggttacacacgaggcggcgcgtggccgctgagcgagaaaaggcgacgtacccatcgatagcgagaaattaagttgccggagaggaggaggatgacgatgaggttggcggcggtggtggtggtgatggcggtggtgaaacatcaattattaagcgtgttgtcttgatactcgatgtacatctacttgctgagtttaacactattgttcagggggtttactactcttgtgtg

SEQ ID NO: 28985 - DNA, 461 bp, Oryza sativa
  Clone ID: uC-osflM202131c12b1
tgtttctggttcatcgtcttctgcgccatgggaggtgagatggtaagtggggaccatgtactatactagttatgtggtgtagaggaaacatctcgaaatattatcttaacttaaaaagaaaccgttgcatgccgccctgagactatcgtactggctagcccaaccaaggcaacagcagatcttaagctggttctgttgatactggatctacatcttttaccttagtttaacactatttttcaaggggattactactcttgtgtggtggtgggagcgggagatcaagagccaaaaagtccgcaaaaaaaattctacttggttcattcatctggtttagtctgccaaagcagaagtcagtggcgagatcttgcttctactccattcgcatcattgtgctgccaatctgacctcagagaagagggagattccgcagctgtagagagcggagtatctccggcgat

SEQ ID NO: 28986 - DNA, 531 bp, Oryza sativa
  Clone ID: uC-osflM202131d01b1
ctgtgattccttgcactcgtaggaggaagccaaaagacatttacaccgtcagggacgttgcaagcacgccggacaagctcatgatcaggaaggctgcacgctcggttgttgccattgagaccacctattctggttaaaagatgatctcactactcacaatcctcaactgcaatctatctcctctaattaattaccagcagctagcttgcatatggtttgttttcagatgggaaaatcattgctgtattttctggcatcgttgtcagttggaatgagacaactaggtctgcaacaattgtaacttgttctgaagctgtgtgcgatgatggtgcattgatcgaccccaaacccaaggtgcttgtgcacttgccaaacaataccattctagatggacagttgctgtttttcaatgaccactaccgcattatgttgttggaggtcgtgtcagacactccattgcagcctgccaattttggttctaccccataatttggacaagatgtgtttgctttgtcagggattatgaatcat

SEQ ID NO: 28987 - DNA, 442 bp, Oryza sativa
  Clone ID: uC-osflM202131d02b1
cttctgagaaaggcgtcttcgtactcgcctctggccgcgcctacgcgcttttcctcctcctctcccctctctcccttctccgccgccgtcgcagcatcaacccaatccgccgccatgagggagtgcatctcgatccacatcggccaggccggtatccaggtcgggaacgcgtgctgggagctctactgcctcgagcatggcatccaggctgatggtcagatgcccagtgacaggactgttggtggaggtgatgatgctttcaacaccttcttcagtgagactggtgctgggaagcatgttccccgtgctgtatttgtcgatcttgagcctactgtgattgatgaggtgaggactggttgctaccgccagctctcccaccctgagcagctcatcaatggcaaggaggatgcagctaacaactttgcccgtgggcactacacca

SEQ ID NO: 28988 - DNA, 526 bp, Oryza sativa
  Clone ID: uC-osflM202131d03b1
gttggcacacagtgtggttcatggagccatgggtggatacactggtttcactgttggccaagtaaatggtcggcattgctatatcccgttttacaggatcacagagaagcagaacaaagtttcaattactgataggatgtgggcaagacttctcttctcaaccaaccagccaagtttcctcagcaagaaagatgtggaggacgcaaagatggaagaagagagagcatccaagtttttcgatgggccgcctcccaaccccaaggttgaagacaaagtcgcttccaatggcaaggctgtgaagtgaggcagaaggctactgatctattatgtgcagatggattaattattactcaataatgtcagtaatctatctatggctagtgagatggattagtaaataatattagtatatctatggcaagtgatgctcagctcttcctgtccaaattaaaatgccgagaatagatctcctctagcaggttatcgtcattatatttatgttactgctgtttgcttgcttgttatg

SEQ ID NO: 28989 - DNA, 272 bp, Oryza sativa
  Clone ID: uC-osflM202131d04b1
acattggctgggaaaagcacggcagggggcatttcttgcgagaggagcagagccctactgccgacagaccacgattactctagccactagcctctatatccgtaacctgtgtcgctggcttgataactgcggcggcggaggcaactgtcggacttcgtcgtggcggcgaagctcatggacgaggtgttcgtggtgccaatacctcatcagccactggtagcaccatgcgagtatgcgtgttattgtgctcgtttgctgggccacaccgggtt

SEQ ID NO: 28990 - DNA, 51 bp, Oryza sativa
  Clone ID: uC-osflM202131d05b1
gtttttgcgagggggtgggaatatcacgttagggggctttttttgtgtcat

SEQ ID NO: 28991 - DNA, 65 bp, Oryza sativa
  Clone ID: uC-osflM202131d07b1
gttggagcgacggagtgggaataacacggggcagcgtttttcttgctccgtgattaaaactaatg

SEQ ID NO: 28992 - DNA, 254 bp, Oryza sativa
  Clone ID: uC-osflM202131d08b1
gttggagcgagggagtgggaatatcacgggggtgtgtttttctcgctccgtgcttaacactcatgtgaaggtatacttatgttgcctgaatctctcgcacctaggctgtcagaatgctttctcggccagaaaacatccgcgtctgacgaataatctttctgcagctatggtcgctgtggtgattggggcgatgtgcatgagaagatacgattgatccatgtgagcagaataatgtggtgctggtgttcactaaa

SEQ ID NO: 28993 - DNA, 439 bp, Oryza sativa
  Clone ID: uC-osflM202131d10b1
ctacatgtgggctgacgatctccctgcaggggggactacctttgagtccctcgaggctatcgatggaaaggacaagcttgtggcatagacttcctgctcactcatgcacacgcggtgcgtatcttgtacataagaccaagctcgatagcaagattaagtcatggcgtcggttgcgttgcccaaaaggtgcttgaagtgaatgcccttgctaaggcaccgactgcacagaatgatgaggcttactttgcaccaaacgctgctgctcaagcctccatgaggtcatcacctcgggtgacaaacgaggaagtgcaaaatgctgctgcagctctgtaggggtctgaccaccgccgtgctaccaatgttagcgctagactggacgcacagtatatgaagctgaaccttgcagtccttcctacaaccacaattggctcattcccac

SEQ ID NO: 28994 - DNA, 501 bp, Oryza sativa
  Clone ID: uC-osflM202131d11b1
ttaggcgtcttcgtactctcctctctccgcgcgtccacgcttttcctgctgctctcccctctctcccttctccgccgccgtcgcagcatcaacccaatccgccgccatgagggagtgcatctcgatccacatcggccaggccggtatccaggtcgagaacgcgtgctgggagctctactgcctcgagcatggcatccaggctgatggtcagatgcccagtgacaggactgttggtggaggtgatgatgctttcaacaccttcttcagtgagactggtgctgggaagcatgttccccgtgctgtatttgttgatcttgagcctactgtgattgatgaggtgaggactggttgctaccgacagctcttccaccctgagcagctcatcaatggcaaggaggatgcagctaacaactttgcccgtggtcactacaccattggcaaggagattgttgatctgtgccttgaccgcatcaggaagcttgctgacaactgcactggtct

SEQ ID NO: 28995 - DNA, 409 bp, Oryza sativa
  Clone ID: uC-osflM202131d12b1
gtgccgatgtcataattctggacgacaacttgtccacaattgttactgttgccaaatggggacgctctgtttacgtcaacattcaaaagtttgtgcagtttcagctgactgttaacgttgtggctttacttgtcaacttctcttcagcttgctttacaggaaatgcacctctgacagctgttcaacttctttgggtgaacatgatcatggacacccttggcgcccttgcattagctaccgagccacctaacgatgacttaatgaagagagagccagtgggcagaacagggaaatttatcacaaatgttatgtggaggaacattctggggcagtctttctaccaattcattgttatgtggtatctccagacgcaagggaaaagcatgtttggccttgatggccctgatgc

SEQ ID NO: 28996 - DNA, 536 bp, Oryza sativa
  unsure (1)..(536): unsure at all n locations
  Clone ID: uC-osflM202131e01b1
ttgttttgctgaggctagaatggtatacaatgtgccttcatatgctcaacagactgacagatcatgtttggatgtgggcgattgttcaaatgttgctagctcttccaaaactaagaggactgattcatgctttctagctgatgatggttttcagttacctgatgagaaccatgttgacaagaagcaaaagagtgtgtgcgaaaaggatgtgcattgtgtgtcatcgccacatgtagatttggatgacaggtttactgatccattggataacagagaagacgagctttgctctattacacaatatgacgttcataactttgagaatgatagggagatagtgaatttcgctgctggtcagatttgggcagcatatgactgggagaagttccctcgcagatatgcacggattaacaagattgtggctgacaaagagcacttatatgtttcatggttcaaaccatccccacaatcccatgacgagaacaggtggtttagtgcatgcttngccattgttgtggaaattttattgccgatga

SEQ ID NO: 28997 - DNA, 534 bp, Oryza sativa
  unsure (1)..(534): unsure at all n locations
  Clone ID: uC-osflM202131e02b1
ttccgcccatctccctggcgggcagcctcgggctcgcgagggaggggaggaggaggagagtggcggcggcggcggtgcgccatggcgttcctgctcggcgccttcctcgggctggtgctcggcgtcgccgttgtcatggcgttcgcgcgcctcgagaacacccgcgctgagcagcgccgcgagctggctgctactgtttcatccttctcaaagttgactgtagaagatttaaggaaactaattcctcttgagttatatccatcatgggtgtctttcactcaaaagcaaaagcttaaatggctgaatcaagaattggtaaaaatctggccatttgtcaatgaggctgcatcagaactgataaaaacttctgtggagcctatttttgagcagtacaagtcattcattttgtcctcactccatttctcaaagttgacacttggaacangtgcccctcagtttacaggagtttcaattttggatagtgatagttctggtatcactatggagcttgagttgcaatgggatggcaatcca

SEQ ID NO: 28998 - DNA, 196 bp, Oryza sativa
  Clone ID: uC-osflM202131e03b1
tttggatctactgcctatgacactctcggcagggcgaatttggcgtgtcatgattgacactcacatgaagggtggctctattggttgagctactagcaactatactagaaacatgtgttcctggatagagatatacatcggcggacaaatactagtgagatcgatacggtcgcaatgaaaatggagcacatgtacc

SEQ ID NO: 28999 - DNA, 100 bp, Oryza sativa
  Clone ID: uC-osflM202131e04b1
gtgtgttctacggaggatgaacataacgtcagggggggttttttgagccatcagggatcctaacaacgaggaaccctccttctgactaactgcgtgcacc

SEQ ID NO: 29000 - DNA, 52 bp, Oryza sativa
  Clone ID: uC-osflM202131e05b1
tttgttgcgacggggtgggacgaactcgtcacagggctttttttgttccatc

SEQ ID NO: 29001 - DNA, 67 bp, Oryza sativa
  Clone ID: uC-osflM202131e06b1
tttgtatcgagggggagggacgaactcgtcagggggctttttttgttccatgggcggaactaatttg

SEQ ID NO: 29002 - DNA, 203 bp, Oryza sativa
  Clone ID: uC-osflM202131e07b1
gttggagcgagggagggggactaacacggggctctgtttttcttgctccgtgattaacactcatgtgatgctatcctctattgcctgaatctctcgcacctagactgtctgaatggtttgtcggccagaaatcatccgagtctgacaataaatctcgctgcagctatggtcgctgtggtgattgaggcgatgtgcttgagaag

SEQ ID NO: 29003 - DNA, 79 bp, Oryza sativa
  Clone ID: uC-osflM202131e08b1
ctcactatatgggaaatgtctggtatcgcgctgcatggtactcggtctcggtaattctccgggtcagatcccacgcgtc

SEQ ID NO: 29004 - DNA, 197 bp, Oryza sativa
  Clone ID: uC-osflM202131e10b1
tgttgttgaggggggggagggcgaatcagtcacagggtggtttttgagccagcgccaggcgtatccatgagcccatacactagtgcagcagaatggatggcgatcaatcgctggaagaagtacctagtgacgacatggcagtaagactggccacacatacgctgtggagtaccggacgcatcgctcaaaggggcgat

SEQ ID NO: 29005 - DNA, 525 bp, Oryza sativa
  Clone ID: uC-osflM202131e11b1
tctaaatggaaggaaacgccaaatggacagcatgttgattatgatcaaaggccagacatatttaggggtacaataagatatgctagtgtccatgcccatttaggccgtactggtagcagaagggatgatctggaatcattagcatatacattaatatttcttctcagaggaaggttaccttggcaaggctaccagggtgagaacaagagttttcttgtttgcaagaagaaaatggctacctctccagaccttttgtgctgtttctgtccccctccttttaaacttttcctggagagcgtgacaaacatgagatttgatgaagaaccaaactacgcaaagcttatttccctttttgatgaattgattgagccccagcatttgaggcctattagaatcgatggtgctctaaaggctggacaaaaacgtggaaggctgcttgtaaatcttgaagaagatgaacaaccaaagaagaaagttcgacttggaagcccagcacatcagtggatatcagtctataatgctagg

SEQ ID NO: 29006 - DNA, 567 bp, Oryza sativa
  Clone ID: uC-osflM202131e12b1
tgctgcgccggctggtggtgccggtccagttactggggggtccgacgccgcgtccgttttactgcagaaggtgaaggtgaaggaggaggcggccatggcgagggagcaggcgctgctgttgacggagatcgtgaaccgtggcgtggagccgtcggtgccggacgccgggtcgccgacgttctcggtgcgggtgcggcggcggctgccggacttcctccagtcggtgaacctcaagtacgtgcggctcgggtaccactacctcatcagccacggcgtgtacctggccaccatcccggtcatcgtgctcgtctgcggcgccgaggtcggcagcctcagccgagacgagctgtggcgcaaggtctggggcgaggccacctacgacctcgccaccgtcctcgccttcctcgccgtcctcgccttcaccatcttcgtctacatcatgtccaggcctaggcccgtctacctcatcgacttcgcctgctacaaaccagccgacgaactcaaggtgtcgaaggcggagttcatcgatctggcgaggaagtcgggcaagttcgacgaggatagcct

SEQ ID NO: 29007 - DNA, 495 bp, Oryza sativa
  Clone ID: uC-osflM202131f01b1
ccacacatccgctttttgctgctatcatctgtctctcaccgacggggaggcacggagcgggagcggcggctgctgcacggcgcggcagcgtggcagcggcgggctcggcaccggcagccgaggcctttctctacctcgcatccagcgcggcagcggcgggctcggcaacggcggtggccttccttgaccaacctaccatgcacaggactccctttctcgacagcagcgggcacagcgacgacgacggggggcacggggacaacaacagtggatctggactgcagccgcacatcagtaacggtgacagcagcagctgctgcggccgcgcatctggacggcagtggcgctcttggctctactttccaccgagcgtcgtcgacaaccctagatccgtcttgatcttcttcgctcctgcagccaacagcgacggatgttccgtcatctggccatacactccactgatgacgagcgcgtggtgtcacatgaacgttggct

SEQ ID NO: 29008 - DNA, 512 bp, Oryza sativa
  Clone ID: uC-osflM202131f02b1
gtctaggccaacgccaccgccggcgccgccggcgtggggctcgacgatgactacaagtgcaagaagcagtgcctcggcaactgcttcaaggacgtgccggtcgtttgctaccacaagtgcgtcgactactggtgcgcgaagctgccaccatatagctccgcgaaggtgcagtgctacaagaagtgcggcgataaatgcttccaccacggcccgaagcctgggcccaagcccaagcccaagccgagcccaccaaaacccaagcctggaccgaagcctaagcctcccaagcctgggccgaagccgaagcctcccaagccagggccgaagccgaagccgaagcctgcaaagccagggccgaagccgaagccgaagccgtcgaagcccgggccgaagccgaagccagggccgacacagccctggtggcctataccattcccgaagccgtcgtgtacccccggcgccgacgggtcgtcgtcggcggtcgacgacatgaccactgatcacacatcata

SEQ ID NO: 29009 - DNA, 107 bp, Oryza sativa
  Clone ID: uC-osflM202131f03b1
gttttagccactgactatgacgatctcggtagtgcgatttttgcgtgccatgattgaaactcacatgatgtgtgactctattggttgagctactagcaactagactg

SEQ ID NO: 29010 - DNA, 193 bp, Oryza sativa
  Clone ID: uC-osflM202131f04b1
gttgttgccgccttctatgactctcacggtagaggggtttttttgtttcaggattgaaactgacatcgagatatactatattggctgagacttctcgcatctataatagtagaatgtgtcccctgaccgaaatctgcctcgtgggacgactaatctaaccgtcgttatagtcgcagttctgatcgaggagatg

SEQ ID NO: 29011 - DNA, 89 bp, Oryza sativa
  Clone ID: uC-osflM202131f05b1
gttgtttctagggggtgggactatctcgttaggggggtttttttgttccatgaggggaactaacatcaggtgatactctgttgcctgaa

SEQ ID NO: 29012 - DNA, 203 bp, Oryza sativa
  Clone ID: uC-osflM202131f07b1
gttggagcgagggagtgggactatcacgggggggcgcttttcttgctccgtgagtgacactaacgtgatcgtatcctctgttgcctgaatcactcgcacctagattggctgaatgtcttctcggccagaaaccatccgagtctgacaattaacctcgtcgcagctgtggtcgctgtggtgattgcggcgatgtgcctgagaag

SEQ ID NO: 29013 - DNA, 519 bp, Oryza sativa
  Clone ID: uC-osflM202131f10b1
tgtcattgtggtggtggtggtcgcagtcacgggggcggttgtgtgcgagtgcgaggcgaatccacgagcctttttcgtgtttggcgactcgctggtggacagcggcaacaacaactacctgatgacgacggcgcaggcggactcgccctcctacggtgtggactaccggacccaccgcgccacggggcgcttctccaatggcctcaacgtccccgacatcatcagcaggtacctggtgcccgtatccgcgctgccttacctgagcccgcacctggacggacccaagctgctccacggggccaacttttgctccgccggagtggacatccttaacgacaccggaatccagtttgccaacatcattcggatcgagaagcagcttgggtacttcaatcagtaccaggatcgaatgctcgggctgatcggtggcgcggcggcgcgaaggttgatggagggcacgctggtgctcatcacgctcggctggaacgacttcagaacaactactacctggtgccattc

SEQ ID NO: 29014 - DNA, 429 bp, Oryza sativa
  unsure (1)..(429): unsure at all n locations
  Clone ID: uC-osflM202131f11b1
tatttacggaaggaagcgccagatggacaggaggctgattttgatcaaaggccagacctatttatgagtacaataagagaatgctagtgtgcatgcccatttaggccgacactggtatcacaagggatgatctggaatcagcagcatatactttaatacttcctctaataggaagagctcattgacatgggtatcaggtgcgaaacactaattatccacgtgttgcaagcataaactggatacctgtatagaccttgtgtgctgttgctgatgccctcattctaaacttttactagctagcgcgccagacatgagactagatgaactaccaaactacgaacagcttattctcctttttgatgaattgattgagcaccagcatntgatgcactatcagaatctatggtgctctaaatgctggacaaaaac

SEQ ID NO: 29015 - DNA, 499 bp, Oryza sativa
  unsure (1)..(499): unsure at all n locations
  Clone ID: uC-osflM202131f12b1
ttcacggcataagatatactcagtgtcaactgggcattactttgcttttggtgctcttgtatctgaggaactctcctacaaactcaaagagttgcccaaggtccgctgggttcttccagactcatatctggatgtcagaaataaggactatggaggagagccttttataaatggagaagctgttccttatgaccctaagtaccatgaggagtgggtgagaaacaatgcacgtgccaatgaaaggacccgacgcaatgataggcctagaaactttgacaggtcaaggaatttcgagaggagaagggagaacatgcacaacttccagaacagagatgtgcctcctgggcagggattcaacagccctcccccaccagggcagggcccagtcctgcctcgtgatgctcctccgatgcctccacctccatctccaccaaatccaggtgctcctncaagctaccagccccatgcaccaaatccgcaagcaggctatacaaactat

SEQ ID NO: 29016 - DNA, 246 bp, Oryza sativa
  Clone ID: uC-osflM202131g01b1
taatctcaacgatccagtttaccctcgccgtggggggcgtcttcgccgccggagattccgccggcgttcacgcgtggaagctgcggacctgctcctccgcccccatccgatctccctggagcgaccgccacctccagagtccagaagctcagcttcgccgcccgagctcgatcgccgtcgcgcagcgtcgcatctcgagtgcccccccccgacgccccccccggctacgatttgttgggggtgggg

SEQ ID NO: 29017 - DNA, 195 bp, Oryza sativa
  Clone ID: uC-osflM202131g02b1
tttgtttctaccgactatgacaatctcagcagggcggattttgtgtgtcttcattgacactcacatcatgtgaagctctattggctgagctactagcaactatactagaaacatgatttgttggacagaaaaaaacatcggcggacgaatactggtgagataagcacggtcgaaatgaaacatggagctcatgta

SEQ ID NO: 29018 - DNA, 154 bp, Oryza sativa
  Clone ID: uC-osflM202131g03b1
aagctggtgcgccggctggtgccagctccggcattattgcgtcgtcccacgcgtccgcctgtgtgaacggactaggaggatctaaccagtgcatattttgtgtggcatgcttgacactcacatcgtggtggccgctgttggttgagttactagc

SEQ ID NO: 29019 - DNA, 450 bp, Oryza sativa
  Clone ID: uC-osflM202131g04b1
gtttttccccaactgttggagtgagcccttaatgcgattcttgtgctcagacattgagctctgacatccagtcaagaagtgccacctacccctggccgaccagttaaagagccgatgttcattcctattgctgtcttgacttgtctgattataccgccaaggagatgcccgtaactcgcattcacagggagggaaggctccaatcagtcactagtgacggccagccagccttcactactgttcttgactttactaagaaggaggaagaatccacctttaacaacatagctgagaaaccagcgccttgcttgttgagggcatacagaggtacagttcgcattgaccctgatctgactgacagcgacttggatttacacttgccaatgattcggatgaactttaacaggggggaagctgatcaggtgctcggacgttaacagatgctcactc

SEQ ID NO: 29020 - DNA, 206 bp, Oryza sativa
  Clone ID: uC-osflM202131g05b1
gtttttgcgacggggtgggactaacacgttactgggctttttttgctccatgatggagactcacatcaactgatcctctattgcctgaatctctcgcacctatactggaagcatgcgttttcggccagaaatcttcacagtctgacgactaacctcgctgcagctgtggtcgctgtggtcatggaggcgatgtgcatgagaagaaa

SEQ ID NO: 29021 - DNA, 206 bp, Oryza sativa
  Clone ID: uC-osflM202131g06b1
gttgttgccagggggtgtgattaactcgttagtggggtttttttgttccatgatgggatctaatatgatgtgttcctatgttggttgaagcactagcatctagactggcaagatgctttctcggccagagaagcagcctagtctgacgatcaatcttgtcgcagctatggtcgctgtgctaatggaggcgatgtacctgagaagaa

SEQ ID NO: 29022 - DNA, 207 bp, Oryza sativa
  Clone ID: uC-osflM202131g07b1
gttggagcgagggagtgtgaataacacgggggggcgtttttctcgctccgtgattgaaacaaacgtgatgtgagcctctattgcctgaagcactcgcacctagactggtagaatggtttctcggccagaaaacatcctagtctgacaaataacctcgctgcagctatggtcgctgtgctgatggaggcgatgtgcatgagaagaaac

SEQ ID NO: 29023 - DNA, 60 bp, Oryza sativa
  Clone ID: uC-osflM202131g08b1
tttggagcgacggagtgggaataacacgggggagcgttattcttgctccgtgataaaaac

SEQ ID NO: 29024 - DNA, 250 bp, Oryza sativa
  Clone ID: uC-osflM202131g09b1
tttgaagcgacgggggggaattaaacccctgggtctcttctctcgttccccgtcaagtccccactgaatggcgcccgcaatcgccgggaacggacgcaccaagcccggccgcctttctttgccgccggtgaacattcaagtcgactatccatcctctctggtgctcagctcgcttccctccgctgtaaaatgcaccccgctagctacgttctatcatgttagccccctgccgcgatataccgtggtccct

SEQ ID NO: 29025 - DNA, 486 bp, Oryza sativa
  Clone ID: uC-osflM202131g10b1
cttgggtcctggaagaaacaactggtgatagctgaagatgctcgccggttggatgtattgcgtcatcggatttttttgagtcataagattcttgcgtccacagagaagtactcggtcttgcatgaaattgttcacacagcgatgaagaaactggaggctgaggttggtcctatatctggagttgcaaatatgggccgtggaattgtgagccggcttgctgttggtgctgaagttcataaactttgcgctcgagcaatacaaaccatgcagctctctgttttgtggatctccttctaacttgcaatttcaacgttcacggatgataccatcaaacttcataaagtttgaagctataacccaaacatgtgtcactgtagttttggattcgtgtactatacttgctcacgatgtaacatgctttaatgtatggcacatagtgtcagccacaggctcgttctcatcaagtccaactagcatcatacttgc

SEQ ID NO: 29026 - DNA, 439 bp, Oryza sativa
  Clone ID: uC-osflM202131g11b1
tgttgaacactgccctcctccacacgacatggggtctcatgtagagaagacgtgcgttaagtccgcggaggccttgatggcgtgcgaggagctggcacatgaagctagagctacgccgtcgtgcaggggtgtgccgacggtcaaccccttactctactgaaccatgatgaactggctgaatgatccgagcttaaaggagacggatgtacagatcgccagggaccccaggttcacggctatggtggaacgactagataagacatgtgccagcaccgccggcactgtgggcggcgcaagaggctgaggcagcagttgcacctgcgatggacccgagcatgagcgtgtcgaccatgcagtagctgatgcagtaccccaagattgtggatatggcggagcatgtgatcaatgctctgatgcaggacccggacatgtacagcat

SEQ ID NO: 29027 - DNA, 514 bp, Oryza sativa
  Clone ID: uC-osflM202131g12b1
tgtcgccgccttcaaaaatactaataaaaaagaaaaaaaacgcaaaaagaaaagggagggtaggagagaaaaaaaaaagagaaaaaaacctcccgaattccccatcctcctccgcgccgcctcgccggaattcgcctcgaggtccggctaatcgaagcggcggttgatttctaggtcggatcgggggggcgtcgggagaatggacgagttcgagctggaggataacctagagttactcctccagagcatccaggagctcatcgaggaccagggggagaacaaccccttcggcgcggccaaccacgacgagctcatcgctagcctcctccacaacaaccaggagaatccgctgactgatgtgtccgtggaggacgttagggatgggaaggacatgcaggggatcccctgggagaagattgtgttccggagggatcagtatcgggagatgaagatgaagaattacaggaattatcagaacctgagttatgcccgggaggaagctctgaaggactgc

SEQ ID NO: 29028 - DNA, 112 bp, Oryza sativa
  Clone ID: uC-osflM202131h01b1
gttggttccactgactatgaggatctcggtagggcgggtatggcgtgccatgcttgacactcacatgatggttaactctattggctgagctacaagcaactatactggaaac

SEQ ID NO: 29029 - DNA, 195 bp, Oryza sativa
  Clone ID: uC-osflM202131h02b1
gttgtttcaactgactatgaggatctcggtaggggggatattgtgtgccatccttgacactcacatcatggttgactctattggttgagttactagcaactagactggaaacatgctttcctacgatagaaaaatacatcggcggacgacaagtgttgaagtagctaggctagacatgaaaatggagtccatgta

SEQ ID NO: 29030 - DNA, 191 bp, Oryza sativa
  Clone ID: uC-osflM202131h03b1
caacggactatgatgatctaggtaggggggatattgtgtgtcatgcttgacactcacatcagggttaactatattggttgagttacaagcaactagactggaaacatgctttgtaggactgaaaaaaacatcggctgacaacaaatgatgaagcagctacggtagaaaaaaaaatggagttcatgtacatc

SEQ ID NO: 29031 - DNA, 202 bp, Oryza sativa
  Clone ID: uC-osflM202131h04b1
gtttttgctaccgactatgacgatctcggtaggggggtttttgcgtgccatgatggagactcacatcgtgtgcgacattattggttgagctactagccactagatttgaaaactactttctcctccagaaagctgcagcggatgaccaccagtggtgagatgaagaggctcgcgacgaccatggaggcgatgtccctgatgg

SEQ ID NO: 29032 - DNA, 101 bp, Oryza sativa
  Clone ID: uC-osflM202131h05b1
gtttttgcaacggactatgaggatcacggcagtggggattttttgtttcatgctggacactcacatcatgtgtgacgttattgcttgagttactagcaact

SEQ ID NO: 29033 - DNA, 146 bp, Oryza sativa
  Clone ID: uC-osflM202131h06b1
gtttttgccactgactatgacgaactcgttagtggggattttttgttccatgcttgacactcacatcaaggttaacgttattggctgagccactagcacctagactggaaacatgctttctacgccagaaagcaacactcgctgac

SEQ ID NO: 29034 - DNA, 106 bp, Oryza sativa
  Clone ID: uC-osflM202131h07b1
gttggagccactgactatgaggaactcgggagggcatttttggtgttccgtgcttgacactcacatcatggttgactatattggctgagccactcgcaactagact

SEQ ID NO: 29035 - DNA, 107 bp, Oryza sativa
  Clone ID: uC-osflM202131h08b1
tgttggagccaccgactatgattaactcgggggggcatttatgttgttccgtgcttaacactcacatcatggtgaacgatattgcctgacgccactagcagactaga

SEQ ID NO: 29036 - DNA, 214 bp, Oryza sativa
  Clone ID: uC-osflM202131h09b1
gttggagccattgactctgatcaactggggggggctattatcgtgcttgcggctggtctaccaccgcatgttgacagctattgcatgactcattggtatctagaccagaaacctgtttatctctacggagaccaacagatggaggcaaataactgcggagcagatcgtgttgaaacactccggtggtaaatgaaccaaggtcgcaacgatcgcg

SEQ ID NO: 29037 - DNA, 265 bp, Oryza sativa
  Clone ID: uC-osflM202131h10b1
gttggagccattgactctgatcaactgtgtgcggctattatctcgcttgatgcaggtctaccaccgcatgttgctagctattgcatgacttatgggtatctagcccacaaacctctctatctctacgcagaccatcagcttgaggcaaataactgcggagcagatcgtgttgaaacactccggtggggaatgattcagggtcgcaactatcctgtttttgttcattataacactatatatcgtgtccaataaaatgtgcttacaa

SEQ ID NO: 29038 - DNA, 269 bp, Oryza sativa
  Clone ID: uC-osflM202131h11b1
tgttggagccattgactcccatcaaatgtgtgggggtattatcatgcttgatgcaggtctaccaacgcatgttactagcaattgcattacctatagctatctagcgcgctacgcgttctatctctgcgcagaccaactgcttgaggcaaataactgcggagcagatcctgttgaatcactctggtggggaatgattcatggtcgacactatcccgttatggtgcatcataacactatattcgatgtccaattaaatgtgcttacaacat

SEQ ID NO: 29039 - DNA, 522 bp, Oryza sativa
  Clone ID: uC-osflM202131h12b1
gtactccaactgttaaagtgagctcttcatacgatgcaagttctcagacattttctctgaaatttagtcaagaagtgccacctacccctggccaaccagttaaagagccgatgttcattcctattgctgtcggacttgttgattctaccggaaaggatatgcccctaacttccatttacagtgatgggatgctccaatcactcactagtgatggccagccagtcttcactactgttcttcaatttaataagaaggaggaagaattcatatttaacaacatacctgagaaaccagtgccttccttgttgaggggatacagtgctcctgttcgtcttgattctgatctgactgagagtgacttgtttttcctacttgccaatgattcggatgaatttaacaggtgggaagctggtcaggtgctgtcacgtaaactgatgctcagtcttgtagctgacttccagcaacagaaaacactggccctgaaccctaaatttgttgatggacttagatcaatcctgcgga

SEQ ID NO: 29040 - DNA, 479 bp, Oryza sativa
  Clone ID: uC-osflM202132a01b1
ttccaatccactcggaatccgcctagggtttcctcctcttcctcttcccctcgcggctgctgctcggcggattctgctgctgcggaggagggcggcgggggttggggctgcaagctggtccgatcagcttttcctgctgctgaggtagcgggagcgacaaccagggcatttcttgtacaaggatgaacagcctgccccggctcaaataatatttgcggttggatttattttttttcgacatgaacgggcagccaaggtttcacgatatgataggcggtggtggcaagggaatgcaagataatgagatcaatggcctcttaacatgccgtcttaccataagtttgtggagggctcccagatgtctgttgacagcgccgacggcttcaacatggccaactacgttgggggttcccgtgccatgtcggtggacaacagcagcgttgctcgaacgagtcccgcacggttatacttaagcaccc

SEQ ID NO: 29041 - DNA, 355 bp, Oryza sativa
  Clone ID: uC-osflM202132a02b1
ttggttttggagcgcgcgggggaacggaaatggccgacgtgcggtcgccgccgccgccgccgagcaggcagcggcgaagcgtcgggccggcgatggacgcgctgggctcgctccccctcgacgtcctcgacaacatcctctcccgcctccacatccacgacgtggtccgcacctccgcgctgtcccgagcgtggcgccgccgctgggagtcgctccccaccgtcggcctcctcaacagccccggcatcggcgcctccgacgtggacgccctgctcctccgccgcaccgcgcccgtccgctccttccgcctcgccacgcgcgaccgctcctggtcccccaccgccttccacgactg

SEQ ID NO: 29042 - DNA, 482 bp, Oryza sativa
  Clone ID: uC-osflM202132a03b1
gtacgcacccctccgcgccctcctccctcctcgccgacggcctcctcagggactggctcgcgcgccaccccgccgcgctcggccccgccgtcgccgctcgctggggaggcgacctcccattcctcttcaaggttctgtcggtggccaaggcgctgtcgatccaggcgcacccggacaaggacctcgccgaggtgctgcacgcgctgcgtccggccacctacaaggacggcaaccacaagcccgagatggccatcgccgtcaccgagttccgcgtcctctgcggctttgccggtatccaggaacttaaggacgttttaagaactgtgcctgaagttgaagaccttgttggacctgaagatgctgccagcttttgtctgtgaagagtaccatgtgtcatgaagaaaatcctgtctgggtcagctttactagctatgacgctagaaagagcggttctgagcattacaaatgattttcgctgatgc

SEQ ID NO: 29043 - DNA, 261 bp, Oryza sativa
  Clone ID: uC-osflM202132a04b1
tattcacaccgatcgatcgagcaacagtagtaggaaccatggcccgtgcacagttggtgttggtcgccgttgtggcagctctgctcctcgccgccccgcacgccgccgtggccatcacctgcggccaggtcaactccgccgttgggccctgcctgacctacgcccgcggcggcgccggtccgtcggagggctgctgcagcggcgtgaggagcctcaaggccgcagccagcagcaccgctgacaggcgcaccgcgtgcaact

SEQ ID NO: 29044 - DNA, 316 bp, Oryza sativa
  Clone ID: uC-osflM202132a05b1
tttacacctcaccaccatcacctcctcctcctcctcctcttcctccgcgcgcgcgagatccagggagagggagagggagagatcatggcggggacggtgacggtgccgtcggcgtcggtgccgtcgacgcctctgctcaaggacgagctggacatcgagatcccgacgatccgcaacctggacttcctggagatgtggcggcccttcttgcagccctaccacctcatcatcgtgcaggacggcgacccgaccaagaccatacgcgtccccgagggcttcgactacgagctctacaaccgcaacgacatcaaccgga

SEQ ID NO: 29045 - DNA, 217 bp, Oryza sativa
  Clone ID: uC-osflM202132a06b1
tatagatccagccattccagcggcagcctctcctccgggctgcacgcgaggaggccgcaccagccactccggtagcctgcccagccaccaggcgcgcagcgcaccgccgactcctccttcgtcccaccccctccgtcgatgcgcggccgggactcggaagccctgccgggagccgccgggaggtgtcgtcacgcggccgggagtcgggaggcgccgc

SEQ ID NO: 29046 - DNA, 405 bp, Oryza sativa
  Clone ID: uC-osflM202132a07b1
tcgttcctccccctctttaccttttcctcctcgtttcggttccgtggttcgtctagggtttagtgggttgagatggcggcgccggatgtcgagtaccgctgcttcgtcggcggcctcgcctgggccaccgacgaccgctccctcgaggccgccttctccacctacggcgagatcctcgactccaagatcatcaacgacagggagacggggaggtcacgtgggtttggcttcgtcaccttctcctccgagcagtcgatgcgcgacgccatcgagggcatgaacggcaaggagctcgacggccgcaacatcaccgtcaatgaggcccagtcccgccgctccggcggcggaggcgggggctacggcggcggcggtggcggctacggcggcggtcgttgaggcggccgc

SEQ ID NO: 29047 - DNA, 426 bp, Oryza sativa
  unsure (1)..(426): unsure at all n locations
  Clone ID: uC-osflM202132a08b1
tttatctcagaggcccaggtggccgattcagaaatccatttgaccatggggtgcgtaaaaactgttctgacttcttgctgaaagggtacaatgaggatattgagagggtagaacagacattacaacctgatgaggaattgggaatgattcaaatgacaagaagtgcagtctcacagaatggcgagagcatgtcacttcatgctaatggcacagaccatggttgtgctgatccacaagggaactcaaaatcccatcgtcactcgcacggttcatcacaatgttgcagtcacagtaagagacctgacaagacccccttggggctaggattgggccttggtcgtaacaacccatctagccgctaccacacgttcacttncttccattcattcggagagtagtgcttatttgcccttgtgattcttttgg

SEQ ID NO: 29048 - DNA, 431 bp, Oryza sativa
  Clone ID: uC-osflM202132a09b1
tgttctagatcgcgagcggccgccgctccatacaagtaagcagcagctagttgccgacaaggccagagaaggaagaagaagctctcatcatcatcaccatgtcgtgctgcggtggcaactgcggatgcggctccagctgccagtgcggcaacggctgcggcggatgcaagtactctgaggtggaacccacgaccacgaccaccttccttgccgatgcaaccaacaaggggtctggtgctgcttccggaggatcagagatgggggcggagaacggcagctgcggctgcaacacctgcaagtgcggcaccagctgcggctgctcctgctgcaactgcaactagaagaaacttatctccatccaattcatcacctcatcaacgagctaccagtaccactacatatgccatgtactagctacctagcttgcatgc

SEQ ID NO: 29049 - DNA, 266 bp, Oryza sativa
  Clone ID: uC-osflM202132a10b1
tcttgtgcaccgtaagagcagcagcagctgccttctggtacacactgcactacacaatagatgaactagcgatagagtatgaaacttactggatacgcagaacagcctgtaccgcagaacaagcagctgagcgatcaataaaggagagcaaaccgataaacacaagcatcgccaatgtctgcctagctattgccagctgtggtccaggggcatgccgctaatacatgaactgaactggctactacaaagagcacagagtgagcgca

SEQ ID NO: 29050 - DNA, 309 bp, Oryza sativa
  Clone ID: uC-osflM202132a11b1
gctatcctcctcctcctccttcctcccctaaatctctagagaaatggaggacaatctaccagtcaatgtccgggagtatcaagaactcgccaaaaaagcgttgccaaagatggcttatgattacatcaatgggggagcagaggatgagcacacactgagggagaatatcgcagcatacacaagaattatattacgacctcgcgttcttgtggatgtgagcatgatagacatgtcaacaactttattaggatacaccatgcgttcacccataattgtggctccaactggggggcacaaattaacacattc

SEQ ID NO: 29051 - DNA, 327 bp, Oryza sativa
  Clone ID: uC-osflM202132a12b1
tcgctcctttgtgtaaaaagcgggttccatcgcgtcacccgcacggctcgtccgatcgaaaagcagcttgaagaagaaaaagtgagagttcttgattcgattctggtcgtagcagcagcagcagcagcgtcttcactggttcgttctttgtttatttataaggagcagcgcccaatccgagctgctgctcctccaccgcggcggcggcggcggcggtgtttgatcgatgctcgccgcgctgtcctgcgtctgcccggtggtgtcctggatgcgtcccaaggccgacggcggcagcggcggcaagtctgcccgccccgtgctcgatga

SEQ ID NO: 29052 - DNA, 378 bp, Oryza sativa
  Clone ID: uC-osflM202132b01b1
tgagcgagttgttgggagggagaaaggccaagaagaggaggaggaggaggaggaggaggaggggatcaatggagatggagagcccgcggagcccggaggcggagatcgggcacagggtggaggacctgtgggaggtggcggagccgcagctgtcgccgtccgagaagctcaactcctgcttcgaggacatcgtcgtcggctccttcccccgcccccttggctcgcaagtaatcgagataccttcaaatgctagtctggctgatactgttgaaatattatccaaaaacaaaattttgagtgcacccataagaaatgttgatgctccagaagatgctagttggattgacaaatacattggcattgtggaatttgctggta

SEQ ID NO: 29053 - DNA, 285 bp, Oryza sativa
  unsure (1)..(285): unsure at all n locations
  Clone ID: uC-osflM202132b02b1
ttttaattcatctccatcgacaaagctagctaagcccagtcatggccgcctctcccgcaatgccgtcactcctcctcctcctcctcctagccgttctcgtctcggcggccgatgcctacgactccgccgccagcgccaacaccaacgccggcgccatccccgaccccaacatcttgaacatggaggccatgtgccccaagacgacggacgtgaaggcgtgccagcaactggtgaagaacatgccgtccaacatcgtcgcggngaagaaggacgccaggagcatcg

SEQ ID NO: 29054 - DNA, 465 bp, Oryza sativa
  Clone ID: uC-osflM202132b03b1
gtttcttgctccatccatctatccatccaaggagtgtggaacgccacacgtattttttttttatctatgctaatctgatcattagcagaggagagttttagcagtaggattggattaaattggagtagtttcatagtttgtgtgtagtgatcttaattagctttgattagacagacagtacagtagagtagaggatgttggctgtgttcagcggcgcggtggtggaaggtgccggcggagctggtggccgccggcagccggacgccgtcgcccaagacgcgggcgtcggagctggtcggccgcttcctcgccgccgccgagccggccgtgtccctgcagctcggcgaccttggccaccttgcctactcccacgccaaccaatcccttcttcgccaagatcctttgcatcaaaagatgacattttctgcctgtttgagggagtcctggacaatctgggcaggctga

SEQ ID NO: 29055 - DNA, 340 bp, Oryza sativa
  unsure (1)..(340): unsure at all n locations
  Clone ID: uC-osflM202132b04b1
ttttccctggctcctcctcctgcaattccacttccatccgtcggcacaggaggaaggttgctaaggggggatcggctccattcctcattcttcattccatttgcgcgcgtgattcgggtttcttttccttcttgtcacctgtttcttggtcggtttcccgccttctcagaggtcggtcgattggatttggagcccggggcccagccttgcctcaacgtctgtgttgtcgtgttcttattggattcttgaccggattggattttggcggttccaatttttgatggtttgctccgattcttggttgatttagtcngaagatgatcaagtggggcatcggtag

SEQ ID NO: 29056 - DNA, 348 bp, Oryza sativa
  Clone ID: uC-osflM202132b05b1
tttaaaaaaaaggaaaaaaaaacaaaacacaccaagccaaataaaagcgaccgtgggatcgctcaccaccaacatcgtcctcgccgtcgccgtggtggcagcgctggtcggcggcgggtcgtgcggcccgcccaaggtgccacccggcccgaacatcacgaccaactacaacgccccgtggctccccgccagggccacctggtacggccagccctacggctacggctccaccgacaatggtggcgcgtgcgggatcaagaacgtcaacctgcctgcctacaacggcatgatctcctgcggcaacgtcccaatcttcaaggacggcaggggatgctgctcatgctacca

SEQ ID NO: 29057 - DNA, 287 bp, Oryza sativa
  Clone ID: uC-osflM202132b06b1
tgttggcttctcctccccctctttaccttttcctcctcggttcggttccgtggttcgtctagggtttagcgggttgagatggcggcgccggatgtcgagtaccgctgcttcgtcggcggcctcgcctgggccaccgacgaccgctccctcgaggccgccttctccacctacggcgagatcctcgactccaagatcatcaacgacagggagacggggaggtcacgtgggtttggcttcgtcaccttctcctccgagcagtcgatgcgcgacgccatcgagggcatgaa

SEQ ID NO: 29058 - DNA, 390 bp, Oryza sativa
  unsure (1)..(390): unsure at all n locations
  Clone ID: uC-osflM202132b07b1
tttcctctcgaatccacgggtcaaaaattgcctccactcgcgcccattttcccaaaccctagccggacccggctcgccgccgcccgccgcccgccggctgcctacctcggcctgtcgggatccgtgcgcggaacatgcgggatcccggaccatggcgaccggacccgatctgaccccacccgccgccgccgactccgtcagaagcgcacgccgcgtcggcggtcaagaaggaccgccacatcgcgagttggagcaccgaggaggatgatgtgcttcgtactcaaactgcgcttgatggaactgataactggacaattatagcggcacaattcaaggacangacggccagacagtgcatgagaagatggtacaactatttgaactcggagt

SEQ ID NO: 29059 - DNA, 372 bp, Oryza sativa
  Clone ID: uC-osflM202132b08b1
ttccacctcccgtaccctcgtgctcgcccgccaccgctcgccgccggcgtctagggtcgcggcgacaagccgcgggcgtccgttctcctccggcccccatcccctcggcggctctcccgtcacccgcgcccccgccatggccaccgacggcgccgccgccgccgccgcggcagggtcaaagaagaagaaggaggtgctcatcttccacgccgaggaggacctcgcggtgtccctggcgaagtacacggcggagctgtccgcgaagctcgccgacgagaggggcgccttcaccgacgagctctcgcgcggatccctcatcaagaacatcaggaagcttgcggagccaccgtacctggattcgagggattggaa

SEQ ID NO: 29060 - DNA, 333 bp, Oryza sativa
  Clone ID: uC-osflM202132b09b1
tcggtgctcacaagcccaagtcgcgtcgcaccgaagcagagtagagaaggagaggagcggagcgccatcagccgtccgatcgagtgatccgatggctctcgctctctccacctctgctgctgctgccgctgccgccgcggcgcgggcgctcgcggcgagggtgacgacgacgaggggttacgccgcgtcggcggcgtcttcggcgatgaggcgggcggcggcggcagtggaagggaagggcgctgcggggatgacgcaggcgaaggacgggtcgtcgtcctcggcggcgagggaggtgtcgcgggtgcccgaccccgtgacgggccactaccg

SEQ ID NO: 29061 - DNA, 319 bp, Oryza sativa
  Clone ID: uC-osflM202132b10b1
ctgacgcgtgggcggacgcgtgggtctcgatcgatcgacaaagctatagctagcccagtcatggccgactctcccgcaatggcgacactcctgctactcctcctccatgctgtcctcgtcgcggcagccgatgccggcgccgccgataaggaggcctatgcggcaacaggatcaaccgctggcaaggagaccgctgcggcggccgacaaggagacctctgcagcggccggatcaaccgcgggcgccgtccctgaccccaacatcttcaacaaggaggccgtgtgccccaagacgacggacgagaaggcgtgccagcaac

SEQ ID NO: 29062 - DNA, 301 bp, Oryza sativa
  Clone ID: uC-osflM202132b11b1
tttgtccaggaaggtggcaccaggcggcgccatggaggaaaggatggcggccggtgaggcgaatacggatgcttcaggcggcgccatggcggaaaggttggcggccggtgaggcgaagacggctgctgcggcctccgaggatgaaaaccaagcggcagctggtggcgccgccggcgatgaggcggcggcggaggaggaggggaccaagtccaacaagaagaaggccgagcgggtgaccgcagaagtacctgccgacgaggcggcgccggcggcaaagaagccgagggcgatgggcggacaa

SEQ ID NO: 29063 - DNA, 273 bp, Oryza sativa
  Clone ID: uC-osflM202132b12b1
tcgtctccccctccccaccaaagccgcgttcgcatccgccgccgcagccgcagccgccgccgccgacgccgacgaggagaggaggagagggaaggcgagagggaggtaggtaggtaggcagttagccatgtcgccggcggagccgacgagggaggagagcgtgtacaaggcgaagctggcggagcaggcggagcggtacgaggagatggtggagtacatggagcgcgtggcgcgcgcggcggggggcgcctccggcggggaggagctcacggt

SEQ ID NO: 29064 - DNA, 451 bp, Oryza sativa
  unsure (1)..(451): unsure at all n locations
  Clone ID: uC-osflM202132c01b1
ttcacgcgtcgatggcggcggcggcggcggacccggacgacttcgacctgacgcggatgctgaaccaccggccgcggatcaacgtggacaggcagcgctccttcgacgaccgctccctcgctgagctctccatctccggcacggccagccgcggcggcggcggaggagggtacccggcgatgatggagagctacgagagcatgtactcccccggcggcgggctccggtccctgtgcggcaccccggcgtcctccacccgcctctccttcgacccccaccccctcgtcttcgacgcctgggacgccctccgccgctccctcgtctgcttccgcggccagcccctcggcaccatcgccgncgtcgaccactcctccgacgaggtcctcaactacgaccaggtgttcgtgagggatttcgtgccgagcgcgctggcgttcctgatgaacgggga

SEQ ID NO: 29065 - DNA, 427 bp, Oryza sativa
  unsure (1)..(427): unsure at all n locations
  Clone ID: uC-osflM202132c02b1
ttcgatagaaaaagaaagaaattaaaaagaaaatcacggcgcgtgagcttgcagagacagcaatggtgagagttggtgccgccgcggcggtgctcgtgctggcggcggcggcggcggccatggccgccgagccgcccaccgatgacggcggtccgggtggcggcggggctgacgaagtgcgtgtccgggtgcggtagcaaggtgacctcctgcttgctcggctgctacggcggcggcngcggccgccgccgccgccgcgacggcgatgccgttctgcgtcatcggctgcaccagcgacgttttgtcctgcgccaccggctgctccacctcgctctgattaagtactaatgaagtaattaaccgcgctaattaataataaatcgcacctacgtatgccacatgtggactcgcttgactaattaaatac

SEQ ID NO: 29066 - DNA, 444 bp, Oryza sativa
  Clone ID: uC-osflM202132c03b1
ttgacgcgtgggtgactcctcaaatgcatgctacggtggaacagctgctttatttaattgtgttaattgggtcgagagcaactcatgggatggacgttatgggcttgttgtttgcacagacagcgcggtttacgctgaaggtccggctcgtccaaccggtggtgcagctgctattgcaatgttgattggaccaaatgctccagtttctttcgaaagcaagtatagaggatctcatatggcacatgtctatgacttttacaagcctgatcttgctagtgaatacccggtggtcgatggaaagctatcacagacatgctatctcatggcattagattcctgctacaatgtcttctgcaaaaagtatgaaaagcttgagggaaagcaattttctattcatgatgcagactattttgtatttcactccccatacaacaagcttgtgca

SEQ ID NO: 29067 - DNA, 419 bp, Oryza sativa
  Clone ID: uC-osflM202132c04b1
ttgggagagagagagagagagaggggatggaaatggcggatgagctggggcacttgctggtgttcgggttcctcttcaacctgggcgtttacatggtggcgccggcgatgaccgacgtgaccatggacgccctctgccccggccaggacgagtgctccctcgccatctacctcaccggcctccagcaagccgtaagctacctaccttagctagctcatcatccatgcatatcatgattcatcatctgttcaatttcgatctcttcagctgtaaatgatccatgatatgcatccataatccatctatccatccatccatccatatcatcattttagaagttaagctcaaatcaatcgataattttttttaagggaaaacagcatgagactgtgctttttcattatatatagcgagagaaa

SEQ ID NO: 29068 - DNA, 276 bp, Oryza sativa
  Clone ID: uC-osflM202132c05b1
ctccgttttggtgggggttttagcgagcgcgtgggaggcctgaggcgacgactacgaccgcgcccccgccggagaagaaggccgcggaagcaccagtaccagcacccgtatatgtgttctagccccttgtccaatgtggcggtaggcgtgctcctcgtgtgcgccgacatcgccgcaggcgtcctcctcaccctcgtctgcgcccgccgatctatgcaccagaggctccacggctggaacaggtccacgtcgatgctcaagtgcgacctggtgccc

SEQ ID NO: 29069 - DNA, 385 bp, Oryza sativa
  Clone ID: uC-osflM202132c06b1
tttcagaaagctctccagaccatgctacaacaaaaagctgatggaacaggcaactctctatcattcttactggatggagagtattctggtctgatttttgcggcaaaacttgatgagtatacttggttgacaaatgcggagaatggatttgatttctacattcctcttacaagagcagactccgaggctgacaaacagaaagccgatgataagtcttcacaagatgatggctcaatcagtgatataaggaatctgatggttgggctgacgcctacaagaggtcagcgagcgaagaataaagctctgcaagaagatatcctacaagaaattgaaaggctaagcgcagaagcttatagcatttttaggagccccacaattgatactg

SEQ ID NO: 29070 - DNA, 391 bp, Oryza sativa
  Clone ID: uC-osflM202132c07b1
tcgctcctccccctcctcctgctcctcgccggcgtcgtcgtcgacggggcgccactggtcgacaccggccagctgtgcgccgacttctactgcttcacctgccccaacgtcgagaaggtcgtctccaccgtcatcgatcgcaagttcaaggaggaccctaccacctgcgccctcctcctccgcctactcttccaggactgcttggccaatggatgcgacgcgtcgatcttgatcgacccgctggcgaaccagagcgcggagaaggaggcggtgccgaacatatgggtgaagggctacgacatcctcgacgagatcaagactgagctagagaaggagtgcccggaagtggggtcccgcgcggacattgtggcgcttaggacgcgcgacagcg

SEQ ID NO: 29071 - DNA, 293 bp, Oryza sativa
  Clone ID: uC-osflM202132c08b1
cttcgaagctgtgaaaagaccagaatacccctcatgctcaaaagccccaaacccgatgaggccagcggaggaggaggaggagctcgtctgcggccagcgatggctgcggcggtgtcggagctgcgggagacgctgaagcaggcgatcgtggcgtacacggggctgtcgccggcggcgttcttcaccgacgtggcggtggaggcggcgctgtaccacgtcgtgtcggggatcttcgcggggtcgaccgcggcgccgccctggacgatggacgagcccaaggcggagtcgatccc

SEQ ID NO: 29072 - DNA, 335 bp, Oryza sativa
  Clone ID: uC-osflM202132c09b1
ttccaggctggcgcccccaagccggtgactgtctccatgggtggccgcgctggtgcctacgacgatgagcttgccaagaccgcgaaaaccattgcatcaccagtaaggggtatccttgccatggatgagtcgcacgcgacctgcggtaagaggcttgcgtaaattggccttgagaacaccgaggccaaccgccaggcttaccggaccctccttgtcaccgcaccgggcttgggacagtacatctccggtgctatcctcttcgaggagactctgtaccactcaactgtagatggcaagaacattgtcgacatcctcactgagcagaaaatcgttcc

SEQ ID NO: 29073 - DNA, 341 bp, Oryza sativa
  Clone ID: uC-osflM202132c10b1
tctttgagagagcatctagctagggagagaaaggcagagacgagaggagagagatggccactgcttatgctcccatggcgagccacctgattaagagcagcttggtgtgctccaagcctagggggctgtctggtgcttcgctgacaaggaggccccgcttcacagtcaaggccatccagcctgagaagccaacgtaccaggtggtgcagcccatcaatggcaaccccttcatcggcagcctggagacgccggtgacctccagcccacttgtcgcctgatacctcttcaacctcccggagtaccgtaccggcgttagcccgctgttacgaggtatcgaggtc

SEQ ID NO: 29074 - DNA, 446 bp, Oryza sativa
  Clone ID: uC-osflM202132c11b1
ttcttcccacgccgtctcgccgcaatcgctcgctcggtcgcctcctcttccgccgcgagacacgaagagcagcagctcacaggtaggcctgcgcgtcggcggccatgggagacagccagtactccttctccctcaccaccttcagcccgtcggggaagctggtgcagatcgagcacgcgctcaccgcggtcggatccggccagacgtccctcgggatcaaagctgctaatggtgtagttatcgccactgagaagaaattgccttctattttagtcgatgaaacatctgtgcaaaagattcagtcattgactccgaacattggagttgtctacagtgggatgggtcccgatttccgtgttcttgtgagaaaaagtcggaaacaagcacagcagtattatcggttgtacaaggaaactatccctgttactcagcttgtccgagaaact

SEQ ID NO: 29075 - DNA, 412 bp, Oryza sativa
  Clone ID: uC-osflM202132c12b1
ttttcgatattagcgtgtagcatcgcagaagaatttggaagtacccttaagaaagcacatggtttcataaaaacttcccagattatggacaatccttctggtgacttcagcagaaagtaccgtcacatatctaaaggaggatgggccttccaggttgcagatcaggggtggcaggtttcagattgcacagcagaagctcttaaggctttgctactgctgtcaaagtgtttgtcagatggtgcagattatcaaatggaaacctactgctactttgacgcggtgaatgtattactctcgttacagaacccaaatggtgggtatggagcatgggagctagctcgcacatatccatggatggagattttcaacatgacagagatatatgcagacatcattgtggagcatcagtacg

SEQ ID NO: 29076 - DNA, 396 bp, Oryza sativa
  Clone ID: uC-osflM202132d01b1
ttctaagcaaatcagccaaccacttgagcttctccctccactgagctccagatccactcgccctcggcaatggcgcatccgcatcggctcgtcgcggtgctcgcgctgatcctcctcgcctcgccggcggcaatgcgcgcggcggaggcggcgtgcgccggcgagaagttcccggcggggagggcgtacgcggcgtgcgaggacctgccgagcctcggcgcggcgctgcactacacgtacgacgcgtccaagtcgtccctgtcggtggcgttcgtggcggcgcccgcgggcgccggcgggtgggtggcgtgggggctgaaccccaccgacctcgtcgtcgacgagggcagcggcggcaagatccgcctctaccgcaagctgcagctccacaagggg

SEQ ID NO: 29077 - DNA, 430 bp, Oryza sativa
  Clone ID: uC-osflM202132d02b1
tagttccaaccttttcctcctcttgaccaagccaagaacaccaatccccgcatcaccaatccacacaagcttcgcagctcgcgcgccgcgggaggggagggagaaaagctcgcccccgagatttttctcctctcctctctgctcgtgtttcttggattggtccatatatccacggttcttgggggcgcggcgcgccgccattgatctggttttggttttgtgaggaggagaagctgcggcggtgctggcgctggtgctttcttgatctgatgatggcgagcacgacgtcagcgacggccgccgggggcgcgttcgccgccgcgaagacgcgggcggtgtcgtcggcggcgggcggcggcacctgcgccagggtcgccctcggcagacggaagcggtcccgcgtggtggtgccgagcgactcccgcgtgga

SEQ ID NO: 29078 - DNA, 510 bp, Oryza sativa
  unsure (1)..(510): unsure at all n locations
  Clone ID: uC-osflM202132d03b1
atcttcctttcccacatcctcctccgccgccggctgcttcccaccggctcccgatctccgaggcaagcagcgccgcacccggccgctgccgccgccgccatggcgttcgagaagatcaaggtcgccaaccccatcgtcgagatggacggtgatgagatgaccaggatattctggcagtctatcaaggacaagcttatctttccatttttggatctggacattaagtactatgacttgggagttctccaccgtgatgcaactgatgacaaggtcaccgtggaggctgcagaggctactctcaagtacaatgtggctattaagtgtgcgacgattactccagatgaggctcgggttaaggagttcaacctaaagcaaatgtggaagagccccaatggcacaattaggaatattatcaatggcactgtattcagagagccaattatatgcaaaaatgtcccaaggcttgntccaagatggactaagcccatttgcattggaaggcatgctttt

SEQ ID NO: 29079 - DNA, 187 bp, Oryza sativa
  Clone ID: uC-osflM202132d04b1
gtttgatcttgcatccatggagtcgggctacggcttccgcttctccgacgacgacgtggtgggagtcggcgagctcgctgacggtgggggagcggctgagcgcggctgtcctggcgatcgccgccattgccgtggacgagttctacggggtcacctacatgctcatctacctagtccagctgaacga

SEQ ID NO: 29080 - DNA, 208 bp, Oryza sativa
  Clone ID: uC-osflM202132d05b1
tttctcctctccttgcgcggcttgctatattctggtgatcatgggaggctccagcatgcaagaagagaggctgcggtggagttgtcggaggaggagctagcgagcctgtgcttgctgatccgtgcttagctgaagaagcagttcgagcgagcggcctacatggggaggacaagagtcgagctcaagcgcatccagaacaagatcaaca

SEQ ID NO: 29081 - DNA, 97 bp, Oryza sativa
  Clone ID: uC-osflM202132d06b1
tttttgcacgtactccagagcatgctaccacaaaacgctgacgggacaacactggttgtcacaggctagctttgtggcgagttttatggcttgatat

SEQ ID NO: 29082 - DNA, 108 bp, Oryza sativa
  Clone ID: uC-osflM202132d07b1
tttctgaccttcctcttgaccctagttccagtaatcactgatgcctcctcactggatgacaccggctagctttgtgtcgactcctattgcttgctatcaatggcgatg

SEQ ID NO: 29083 - DNA, 202 bp, Oryza sativa
  Clone ID: uC-osflM202132d08b1
tcgtttcggtacttgtactagccccaagatacaggtatcattaataccgcctgagtggactaggacgaatggcttggagtgcacgccttatgtattgtaccaatagccaagtgacaggttggcctgtgtgagacacacacaaacaggaccgttactctcgctcatatagggcttgtgaactcacaagacgattggcatgttt

SEQ ID NO: 29084 - DNA, 317 bp, Oryza sativa
  Clone ID: uC-osflM202132d09b1
tcgattcagtacttctatatgagcatgtatatggctgctatatacgtcttgaaagaggaaaacgaactctatgctagtatgcacacatgttatatcgtgtcacgagtaaacttattacgtgtcctggatatgttaacttacaccatctgcctaactctgtgacatcttgggttgcagaactgcagagttaattgtgccaggttgtgccaactgcatgtcatctgacccggctactgacactgcacagtcaggtatacgctctcccaggtgaacttgcacaacccgactatgtatgtatagaccactgccttcaccgt

SEQ ID NO: 29085 - DNA, 165 bp, Oryza sativa
  Clone ID: uC-osflM202132d10b1
tttaaatacctcgataggaacatgagaagcgtcgctatagatagcttccacgtggaccacgacaactatcgtaccatggacaccttgagtagagtgccacgaggagcccgaacccatgtcgtcggtatcgtagaccacatcgtcgtcatcacacgcggacatctt

SEQ ID NO: 29086 - DNA, 397 bp, Oryza sativa
  Clone ID: uC-osflM202132d11b1
gctctcacagctcactgcatcaatggccgcggccaccatggcgctctcctccccggtgatggcccgcgcggcgccgtcgacctcctccgcgctcttcggcgaggcgcggatcaccatgcgcaagaccgccgcgaagcccaagccggcggcgtcgtcggggagcccgtggtacggcgccgaccgcgtcctctacctcggcccgctctccggcgagccgccgagctacctcaccggcgagttcccgggcgactacaggtgggacaccgcggggctctccgccgacccggagacgttcgccaagaaccgggagctggaggtgatccactcccggtgggcgatgctgggcgcgctcggctgcgtcttcccggagctcctcgacggaacggcgtcaagttcg

SEQ ID NO: 29087 - DNA, 408 bp, Oryza sativa
  unsure (1)..(408): unsure at all n locations
  Clone ID: uC-osflM202132d12b1
tcgtacccacccaccctctcgccgtcgcagatccgatccaggaagagctcgccgccgccgctgccatggcgctctccgtggagaagacctcgtcggggagggagtacaaggtgaaggacctctcccaggcggacttcggccgcctcgagatcgagctcgccgaggtcgagatgccggggctcatggcgtgccgcgccgagttcggcccctcccagccgttcaagggcgcccggatctccgggtccctccacatgaccatccagaccgccgtcctcatcgagaccctcaccgcccttggcgccgaggtccgctggtgctcctgcaacatcttctccacgcaggaccacgccgccgncgncatcgccagggactccgccgccgtgttcgcctggaagggggagaccctcg

SEQ ID NO: 29088 - DNA, 459 bp, Oryza sativa
  Clone ID: uC-osflM202132e01b1
gtcgccggcgagagctcttcgtcttctccaactcgaccggaagcaagcgcgcttccgatccgccatggtgctctcccacggcgtgtcgggctccgatgagtccgtccactccacgttcgcctcccgctacgtccgcacctccctccccaggttccggatgccggagcagtcgatccccaaggaggcggcgtaccagatcatcaacgacgagctgatgctggacggcaacccgcggctgaacctcgcgtcgttcgtcaccacgtggatggagcccgagtgcgacaagctcatccaggcctccgtcaacaagaactacgtcgacatggacgagtaccccgtcaccaccgaactccagaaccgatgtgtgaacatgattgcacacctcttcaatgctcctgtaggggactctgaaacggccgtcggagtcggcactgtcggctcgtctgaggccatcatgct

SEQ ID NO: 29089 - DNA, 365 bp, Oryza sativa
  Clone ID: uC-osflM202132e02b1
ttaaaaaacaaaacacaccaagccaaataaaagcgacaatgggatcgctcaccaccaacatcgtcctcgccgtcgccgtggtggcagcgctggtcggcggcgggtcgtgcggcccgcccaaggtgccacccggcccgaacatcacgaccaactacaacgccccgtggctccccgccagggccacctggtacggccagccctacggctccggctccaccgacaatggtggcgcgtgcgggatcaagaacgtcaacctgcctccctacaacggcatgatctcctgcggcaacgtcccaatcttcaaggacggcaggggatgcggctcatgctacgaggtgaagtgtgagcagccggcggcgtgctcg

SEQ ID NO: 29090 - DNA, 316 bp, Oryza sativa
  Clone ID: uC-osflM202132e03b1
tttcaactgtgcgagtgagcgcgcggatatatgcgttgccatcgggacagcctgctcgaagcgtatggactgagacgtgtggcgttctcctcgtgagccggacggcgcgcccgtcagacggactataggcggtcggcataaccgttcttcgtcgtcgtcacctgcctcatggccgactaccgcgggcgtatctttggctacgacatcggaatctccagtggagtgacggcgattgactccttcctggcggccttctcgccgggtgtgcaacctcggatggcggctgctcgtgtgtacgagtactgcgtctacgaca

SEQ ID NO: 29091 - DNA, 130 bp, Oryza sativa
  Clone ID: uC-osflM202132e04b1
tttttcctgtccttcggcggcttcttttagagggatactctcgagagctctctgctttggatcagctagcatcctttcttattgtaggaccgactactaatgatgctagagcctgccatcctgatcctgt

SEQ ID NO: 29092 - DNA, 98 bp, Oryza sativa
  Clone ID: uC-osflM202132e05b1
tttttatcctccttctgcggcttcttatacagagatactcatgggagctctctggtttacataagctagcttcctgtcgaattttaggattgacgtac

SEQ ID NO: 29093 - DNA, 102 bp, Oryza sativa
  Clone ID: uC-osflM202132e06b1
tttctaaacttcttccggggcatcctaccaacagacactgatgcgaccacactggatgtcacaagctagctttccgtcgagttttctgaccgggtactcatg

SEQ ID NO: 29094 - DNA, 110 bp, Oryza sativa
  Clone ID: uC-osflM202132e07b1
tattcagtccttctacaagcccaaactaaccgtagtcatggatgcctgctcactggaatacaacttctagctttgcgtcgagtcctatggcctggtaccaagagctacgt

SEQ ID NO: 29095 - DNA, 235 bp, Oryza sativa
  Clone ID: uC-osflM202132e08b1
atgcagtccatctacagcgccttgcgaatcgccgtcaagcatgccggctccgtggactaccacctctagcttaccgagcagacctttggccttgtaccatgagcgaccttatcacttggtctgtcgaacgtccaacctacgttttcggttagtgtccaacatttaggagtgaaatagtcgggggtgtctccggttctgttgaagccaactcagaccagattaccatgatccatgt

SEQ ID NO: 29096 - DNA, 184 bp, Oryza sativa
  Clone ID: uC-osflM202132e09b1
atcgagtacttagacgggaacaagccaatagtggttgtgcatgcgtatggcgtggacaacaaggacttgctgaacaaggagacgttgagactagtgttaggagctagcttaacatacctcatgtagaaggtggacaagatcatggaatctactgttggacatcttgttgtctgtagtgaagggg

SEQ ID NO: 29097 - DNA, 379 bp, Oryza sativa
  Clone ID: uC-osflM202132e10b1
tctttggctttcacgctggcgctcgccgcggcgctcgtccgcgtgccgctctccttggccaacttcaacgccgtcgtgctcctcacgctctcgtccctgctcctcgcgctccgccacggcgcgggcggcggcggcggcggcgcggacgccaccagcccggactacctcgtcggcgtcgcggcgaccctcggcgcggcgttgctcttcgcgctctacctgccggcggccgagctcgtgtaccggcacggcggggtgacgggcttccggatggtggtggaggcgcaggcgattatggaggcggtggcgacggccgccggcgcggccggcatggtgtcgtccgcggggggcaagtggcccggggacggcgtggaggccacgt

SEQ ID NO: 29098 - DNA, 379 bp, Oryza sativa
  Clone ID: uC-osflM202132e11b1
tctcgtcgtcgtcgttgacgtcatcaatggcgggtggtttcgccgtcgaggccaaggtcgccggcggcggcgagcggcgggagttcaaggggaagatcacgtggtacgtgtggctgtgcggcatcatcgcggcgacgagcgggctcatgttcggctacgacgtcggcatctccggcggcgtgaccgccatggacggcttcctgatcaagttcttcccgtcggtgtacgcgcggaagcaccgcgcgagggagaacaactactgcaagttcgacgaccagcggctgcagctgttcacctcgtcgctgtacctcgccgcgctggccgccagcttcgcggcgtcgaggctgtgcacgcggctggggcggcggcgcacgatgca

SEQ ID NO: 29099 - DNA, 370 bp, Oryza sativa
  Clone ID: uC-osflM202132e12b1
taacaaccttgccctgcacactcacactcccagttcagaaccgagtggaacaaccccgagcggagagaacaccccaccctctccgaaatccgatgccggagatcagcgcagtacgcggaactcggattccgcggaggcagcggatgcgcggatggaatggaaggaatcctccccatcggcggaggaggggaggagaggagaggagaggagacgggagagagctatggcttcgatacctcctcttctccgcagcgggccgcgtcgggcgatggaatggatgggccccttctcttcctcctcctgctcccgtctcatcttctccgtcctcacgcgccatcacgcgtacgcgcagggggaaaaaagtcgggtc

SEQ ID NO: 29100 - DNA, 353 bp, Oryza sativa
  Clone ID: uC-osflM202132f01b1
tttataatccccttttgggggagagggttggattgctagtgtggatgatttagaagatataattgggggacatgtatggttgggcttcatttgtgtatttggcggaatttggcatatcttaaccaaacccttcgcatgggctcgccgagcatttgtatggtctggagaagcttacttgtcttatagtttaggcgctttatctgcctttggttttatcgcttgatgctatgtctggttcaataatacagcttatccgagtgagttttatggacctactgggccagagctttttcagctccagcatttacttttctagatagagatcagcgttttggagcttatgtgggatctgc

SEQ ID NO: 29101 - DNA, 394 bp, Oryza sativa
  Clone ID: uC-osflM202132f02b1
gttcaaagctactgcaatggaactaatttccgttcttgaacagaagcagaagacagttggtaggactaaggtgcttcttgagacagttcctgtgtacagactagctgatatttttgtggctagctttgaaataggttttgaggagcagttgtcaatgctggattcagttgacttaaaagttagactttccaaggcaaccgaacttgttgacaggcacctgcagtcaattcttgtagctgagaaaataactcaaaaggttgagggtcagctatcaaagtctcagaaagagtttttgcttcgccagcagatgcgggctatcaaagaggaacttggcgataatgatgatgatgaggatgatgtagcggcattggaaaggaagatgcagaatgctgga

SEQ ID NO: 29102 - DNA, 129 bp, Oryza sativa
  Clone ID: uC-osflM202132f03b1
ttttaactgtccttctgcgggtccttttatagagatacacccgagacctctctgatttggatgaactatgctaccttttgattctctggctgactaccgacgatgctatgcttggccatcctgatcttg

SEQ ID NO: 29103 - DNA, 101 bp, Oryza sativa
  Clone ID: uC-osflM202132f04b1
tttttatcgtccttctgcggctacttatacagagatactcacgagagctctctgatttgcatcagctagcttcccttcgtattctatgaccgactactaat

SEQ ID NO: 29104 - DNA, 99 bp, Oryza sativa
  Clone ID: uC-osflM202132f05b1
tttttatcgtccttccgcggctacttatacacagatactcacgcgagctctctggtttacatcacctagcttcccatcgtattctcgggccgactacta

SEQ ID NO: 29105 - DNA, 96 bp, Oryza sativa
  Clone ID: uC-osflM202132f06b1
tttttatcctccttctgcggctacctatacacagatactcatgagagctctctggttgacatcacctagcttcccatcgtattctatgaccaagta

SEQ ID NO: 29106 - DNA, 228 bp, Oryza sativa
  Clone ID: uC-osflM202132f07b1
attcgctccttctgcaggcgctacctaccgacagtcagggatgcgagctccgtggacgacaactacttgattcgcatcaaatcctctggcgtagtaccaagggcgacatacacagcttgcatctcgtaggtacaactaaacactacgttgtctttccgacatattagatcgatatagcagcgaatgtcgcatcttctattgtagcgaatctggacaagatgagcatat

SEQ ID NO: 29107 - DNA, 310 bp, Oryza sativa
  Clone ID: uC-osflM202132f08b1
attcgctcattctggtgactcgagatagtgaaagtcaggtatacgagctagctggcgtactactacttcattagcaacatgtcctttggtgttgttctaggagctacattccgaacttgtttttcttaggtgcaactagactatacttcttcgttcccacaaaaaagatcgacctagtatggaaggtcatattttctagtatagcgaatctggacaggctgcccatattccgtgtaataggaaatgacaccttaatactaggctggcttcttttggtccgagggaagaggacagtagttgctctactagg

SEQ ID NO: 29108 - DNA, 408 bp, Oryza sativa
  Clone ID: uC-osflM202132f09b1
tcttaaaaaaaaaaaaatgttatctgtatttttatggtgcaatgcaacttgtgtaaccattgtcaacttgtctgccaaaagaagttgcatttttctgttgaaaaaaaaaaaaaaaaaaaatgttatctgtatttttatggtgcactgcaacttgtgtaaccattgtcaacttgtctgccaaaagaggttgcatttttctgttgaaaaaaaaaaaaaaacaagaaggtcatctgtatttttatggggcaatgcaacttgagtaaccattgtcaacttgtttgccacaggaagttgcatttttttgttgtacaaacaaaaaaaaaaaaatgttctctgcatttttatggtggcatgcaactggagtaaccattgtaacttggttgccaaaagaagttgcatttttttgtt

SEQ ID NO: 29109 - DNA, 393 bp, Oryza sativa
  Clone ID: uC-osflM202132f10b1
gagagagagagagagagagagagcgctgcggaggagaccgatgccgccgccgccgccggagccggagccggagccggtggtgatccacgcgtggtcggcgccgcgctccctcagcaccagcctcatgtactccttcgcccagagggatgacatggaggtgctcgacgagccgctctacgctaatttcctgcgcgtcaccggcgtcgacaggccgtatcgcgaggagcttctgtctaacatggatcctgatggtaacaaagttatcagtgaagtcatttttgggccagggaagagaaaatatcgttactgcaagcacattgcaaagcagcgcctccctaacctgtcaagtgacctgatgaaaaagggaaaacatttcatattgatacgcaaccc

SEQ ID NO: 29110 - DNA, 500 bp, Oryza sativa
  unsure (1)..(500): unsure at all n locations
  Clone ID: uC-osflM202132f11b1
ttagtactggatcggagcttcagcagtgaatatcctgcaagcagcagaactgaggggagatcatgtagttggaaaagagtctttgtccaaactgaaaatggttatgtcctgggcattgaactggagaggggagaaaatgcacacactgtgaaaaagaagctccaggtagccctcaaggtacccacagaggagagctcactgacctttggtgatctggttctgaataatgatctcagcagtattcgcaatgactcaccactgctcctcagaaagaatcaaatgcaccggagcagctcaactccttgcctctctcctactgctcatgatgtgcaggagcaagatcacagcgaacccattgaaatccttggatgtttgagcccctcttcttcgatgaagcagcttgctaaggatgttgtggaagccataaggatggtgttgacccggtaccttgtaatagtggcatgggtggcgcatactacttcaagaacatttacngggaa

SEQ ID NO: 29111 - DNA, 379 bp, Oryza sativa
  Clone ID: uC-osflM202132f12b1
ttacgaacagatagcgacgcgcttcactggacggacctgaactacatatacgctcaagacggcagggactcgcatggacccaactgtacctcctgcacagatagacggtccatatctctcagcacagaggttcgaccttccatggaaggaatcctatcgttacgatgacatcctttgattcacctggagaacggctgaggcgacgaccaaacgatggaaatggacatcaggctgatcatgagcagctacatgagctcgatgtagaccgaatagctcgtcgcgatcactgccgaactactcttatgataaagaatatcctaaacaagcgcacctccagatgcttctagctgctattgatgaaaatcatcaacagacttat

SEQ ID NO: 29112 - DNA, 427 bp, Oryza sativa
  Clone ID: uC-osflM202132g01b1
gtataaaggattgtagaagtagatggaacattgacgactcaaccagtacttgaacatgttgggatttcgacatggccaggaaggttaacacttactgatcatgctctttacttcgaagcacttcgggttgtgacctatgataagcctaaagcttatgagcttgccgaagatctaaagcagtctgttaaacctgagctgactggtccatggggctcacggctatttgacaaagctgttatgtataaatcaacaactttaacagaaccagtgatcatagaatttccagagttggctggccactttcgtcgtgactattggctggccatcatatcagaaattctctatgtccacagatttgttaggaagtttgacataagtggagttgacaaagaggaaacaattttgaaggctgtactaagcattatgc

SEQ ID NO: 29113 - DNA, 438 bp, Oryza sativa
  Clone ID: uC-osflM202132g02b1
gtttgatgatgatgctaggagtgatgtgccagagttagccaatgaggatcatgatgatgaaccagctgcggatggatccataagtgatgctgcagctgctgaactggaggccagcatgtatggcttacagatcataagaaatgctgaccttgaggagttacgtgagttgggatccggcacatttggaacagtataccatgggaagtggcgaggaaccgatgttgctatcaaacgaattaagaaaagctgttttgctgggagatcatctgaacaagagaagcttaccaaagacttttggagggaagcacaaattctttcaaagttgcatcatccaaatgttgatgctttctatggggtggttcctgatggaactggaagaacattggcaactgtgacagagttcatggtaaatggatcactacagaatgtcttttaagg

SEQ ID NO: 29114 - DNA, 184 bp, Oryza sativa
  Clone ID: uC-osflM202132g03b1
tttttatcttccgtctgggggtccttctaccgagatagtccatcgagtgctctgatttgcatcaactaagctagcatagcattatcaggctcaggaccaatgacgtgatgctcggtcagcctgatcctggctgatgtgaatatggatcagtagcagatgcacaagaatgtgaaggtcaaagcca

SEQ ID NO: 29115 - DNA, 101 bp, Oryza sativa
  Clone ID: uC-osflM202132g04b1
tgtatatcctccttcggcggctacttatacagagggagtcatgagagctctctggtttacatcacctagattcccttcgcattgtcgggcagactactaat

SEQ ID NO: 29116 - DNA, 102 bp, Oryza sativa
  Clone ID: uC-osflM202132g05b1
tttttatcctccttctgctgctacttatacagagatactcacgcgagctctctggtttacatcacctagcttaccttcgcattctctggcagactactaatg

SEQ ID NO: 29117 - DNA, 102 bp, Oryza sativa
  Clone ID: uC-osflM202132g06b1
attttatcctccttccgcggctacttatacacagagagtgacgcgagctctctggtttacatcacctagcttcccatcgtattgtctggccgagtactaatg

SEQ ID NO: 29118 - DNA, 363 bp, Oryza sativa
  Clone ID: uC-osflM202132g07b1
ttttgctcatccacgagggcgtacaggccgagggggagttactgaagttaggcagggtacctgtcctggattccaccgacatcgtcgggtacaagatcgggctcaccatcattcgcgacggcctcaaaggcgaccccagcaagtacctcgagatgaccgtaaggcttgtcggagtctccgcggagaccaccaccggtgtgatgaggcttttgcagatgctagacaccggcgccctcctgttagacgacatcaacaatcatcgactccgtgaccaatagcaggttggacaacctgtatggttgccgacactctctacctgatggtcttatgagggctacctatcttatgatcgctgacaaggat

SEQ ID NO: 29119 - DNA, 264 bp, Oryza sativa
  Clone ID: uC-osflM202132g08b1
gtagaggggggggggggggtggatataaatatggtaaagtataagagctaggtagattaatactagctcattcacagcatatcctttggtgctgttctaggagctccattccagacttgttcttgttagtttcaactagactgtactctttggttcccacaaaaaatatgcccctagtataggaggcaatattctgttgtataacgaatctggacaggctggccatcttccctgtaataggacatgtcaccttaatactaggct

SEQ ID NO: 29120 - DNA, 425 bp, Oryza sativa
  Clone ID: uC-osflM202132g09b1
gctaatcacagtggtgaatattctgtagaaagcagacagccagccaaaatcaatggatctcacccacatgtgaaacgcagtaacttctgggggaggaataatgcaagaaagagtcaacactctgaatcagtcgactcatctggtgaagaagagcttgctattcaaaggctcgaaatagcaaagaatgatctgcagaacagaattgccaaagaggctaggggtaatgcaattctacaggcaagtttggaaagaaggaaacaagcactgcatgaacgtcgtttggccctggaacaggatgtgtctaggttgcaagagcaactacaggcagagagagatcttagagctgcattggaggttggattgagcatgtcttccagtcagttttctagttcacgtgctatggacacgaagacgagagctgaact

SEQ ID NO: 29121 - DNA, 399 bp, Oryza sativa
  unsure (1)..(399): unsure at all n locations
  Clone ID: uC-osflM202132g10b1
tgcaaagttggagcaagatgttactcagactactgctattggcagtggtgcaactccagttgataatggcacagaatctgcagctgctaatcccaaggaattatccaatcccgattcagagaaaaaggatggtgttaagcagtcagcaaaggttgccaatggagcttctgctgaaacatcagaacgtgttgatggctcaccagctatggtcaaatcaaaaagaggtcgacctcctggactaaagtcattggagaagaaggctgctggaaagaaagttctaggtctgaaaaaggttgaggagactactgattcaacagggaagttatcgaagcagtcatctaaagatgattccaagtcatctacagaaaggcangtggagcagggtcataaaaaaagcac

SEQ ID NO: 29122 - DNA, 363 bp, Oryza sativa
  Clone ID: uC-osflM202132g11b1
tttccactacaatggatcactccaccttcctgctccggctcatctggctcgcgctaggagcagcccttgtcgtacttgtcgttcgctccgtgtaccgccttcccagcaacatcgacacgactacgaccgctctgttcgatgatggcaacaggggcagctgcaccaggttctcgacgggggcgtaccggcaagggcggtgcgacccgagggacaagcctgacaagccgcggccactcggccacgagatcgacgtgcctgggcagccgatcgacccactcaccgtgagggaggagaaccgtgttgcggagctcctgcgtgcgcaccctgtgaatgcgttggagcagaactacctgaccgcgcact

SEQ ID NO: 29123 - DNA, 296 bp, Oryza sativa
  Clone ID: uC-osflM202132g12b1
ttgtactaccttatcgcatctcgcgcgcggcgcgcggccttagagacgaattggcgctggctcagaagacgaacgaggcggcgatcacgcagcaggattcgatggttctgacaaggaatctgctgcgaattgctatatacaacatcaggtacatgataggtctattgcctgcgaagtactccaatgatgagtcggttccggcactacagatgaatattaagaagctcctgccccttgatactgaagcacggaagctgattgattggctggcaaaaggtgtctatgactcactacat

SEQ ID NO: 29124 - DNA, 452 bp, Oryza sativa
  Clone ID: uC-osflM202132h01b1
ttcataaattagttaattgtgatctctgaaaattgtgagctgctcctgcaaagctgcagtgcccctgctttttcttagaaaaaaaattctaatgcagtgtggagtaacggtatgatttaagcaatgactacttttaaacttcacatcattgttaatcggcttctgatcagaaatatgttatgtttattgatagtatcacaaccttttggttggaacactctgcacgctcagatgtttctcattgtttatgagttcatttcatgaattaggaagtgtgcacacttgctttcacaaacatggctattttctgctatttgtgttattatttattactatgacaacttctatatgatcagtgtaccatcatcttttctttttactgcataaccagcactgatctgttttagctctctttttttttcttaaagataagcaggcaccaggttactcta

SEQ ID NO: 29125 - DNA, 448 bp, Oryza sativa
  unsure (1)..(448): unsure at all n locations
  Clone ID: uC-osflM202132h02b1
ctctttcctctcgcgaggttgccatgcctcccccaagatcctagaacgcatccccacaacctcacctcgctcgcaagaatcttcttcccaccatcgccctccctcgggatcgatccaacccgatcatcaatcggggcggggaaggaggaggaggggatggaggcggacgccgggaagctgttcatcggcggcatctcgtgggacaccaacgaggaccgcctccgcgagtacttcgacaagtacggcgaggtggtggaggccgtcatcatgcgcgaccgcgccaccggccgcgcccggggattcggcttcatcgtcttcgctgaccctgccgtcgccgagcgggtcattatggagaagcacatgatcgatggccgcatggcggaggcgaagaaagctgttcccagggacgatcagcacgctcttagcaagagcngcgggagcgctcatg

SEQ ID NO: 29126 - DNA, 232 bp, Oryza sativa
  Clone ID: uC-osflM202132h03b1
ttctttattctacgagcccaagatgtaattagcgtgggtcctgggacgcatccgtataacatcagctcggttggcagagcattatcaggaccagggccgatgttgagatgtatggcaatcctgattcagtccgttaaggataaggagcaggagggaatgatggcgaacacaaggacgctgccaatacgcgtcgtattgtggtacaccaacgggcactgtatcggctagtaca

SEQ ID NO: 29127 - DNA, 101 bp, Oryza sativa
  Clone ID: uC-osflM202132h04b1
tttttaactgtccgcggccgatatgtaaacagagagggtgacgagaggtctctgatttccatgacctagattcgcatagcattgtctggtagagtgctaat

SEQ ID NO: 29128 - DNA, 105 bp, Oryza sativa
  Clone ID: uC-osflM202132h05b1
tgtataccctcccgccgccggtacttaaacacagggactcttgcgagctctctggattacatcacctagcttcccatcgtactgtcggaccgactgctaatggag

SEQ ID NO: 29129 - DNA, 254 bp, Oryza sativa
  Clone ID: uC-osflM202132h06b1
tgtctatccgccagcagcggatacttatccagggggactggtgaaagtactctggttctcatcccctagcttcttgtcgcactgtctgactgagtgctcatggtgacatccagcgccagccctaccgaggctgacatggacattgcgcgaacctcacaccttattgagtcgatggcccagccaatgccaaacgttctgttaacatacgactggacattcaacgcacctggccatcgttgtgtgagcaaagatgg

SEQ ID NO: 29130 - DNA, 364 bp, Oryza sativa
  Clone ID: uC-osflM202132h07b1
ttccgccgcagcacaagcgcattcagatctcggtcgcttggttttccttcttgatttcctctccgagtggtaattgcttccgtgtttttctctcttttttttttctcgttgaacgattgatctgcttttgcttccattttgtttgtttgaagatttcaattcatcgcatcgttgatatagtttttgaatcgcgtttgggatgcaaatgatttggtggtgagaataatagggctctatattatgagtcaacagcaggcgccgtttcaatggtgccctgtctgccgctaggagcccagatcgatgcctaagccaggagaagattgtttggagatccatcttctttaagtcccagccacaatacctg

SEQ ID NO: 29131 - DNA, 387 bp, Oryza sativa
  Clone ID: uC-osflM202132h08b1
tattttttggaaaaggaaaaacttatggagcaacgcaacgagtgggaaatgcttccgagtactgatgtctatacttgagcacgatgaaccaatgacatgctatagcttacattaagtctgcaagaagaatgcagaacgatcgcataggtaatactagatcacgaaacacgcatggcaagcaaaggattcgatggcaagaataatagtgctatagactgggaggcaacaaaaggcgcctgctctaagaagcccagactaacacaaggagcccagatcgatgcctaagccaggagaagacagttggaagaaccatcttctttagagtcaaggcacaatacctgcccacaaacccaaaagatgcctcaagctacaacattggcatccatc

SEQ ID NO: 29132 - DNA, 460 bp, Oryza sativa
  unsure (1)..(460): unsure at all n locations
  Clone ID: uC-osflM202132h09b1
gatccatccctctattatcaagaaacaaacaagattactccagctaactagctaccttggcaatggcctccttatcctccttcctgctcgccgcagcagtggcgacactgtttgtcgttggctcatacgccaccgagcttaccttcaaggttaatgagggctctagcgcaactagcctggaactcatcaccaacgtcgccatctctgaggtggagatcaaggagaagggtgccagcgactggacggcgctgaaggaatcatcgtctaacacctggacgatcaaaagcggctcgccactcaagggccccttctccgtccgcttcctcgtcaagaatggcgggtaccgcgtcgtcgacgatgtcatccccgaaagctttacggccggctctgtctacaagagtggtatccagctctaagaacatacacgtatgnctttttttggtgagtcgcatgagatttt

SEQ ID NO: 29133 - DNA, 442 bp, Oryza sativa
  Clone ID: uC-osflM202132h10b1
tcgtttccatccctctattatcaagaaacaaacaggattactccagctaactagctaccttggcaatggcctccttatcctccttcctgctcgccgcagcagtggcgacactgtctgtcgttggctcatacgccaccgagcttaccttcaaggttaatgagggctctagcgcaactagcctggaactcatcaccaacgtcggcatctctgaggaggagatcaaggagaagggtgccagcgactggacggcgctgaaagaatcattgtctaacacctggacgatcaaaagcggctcgccactcaagggccccttctccgtccgcttcctcggaagaatggcgggtaccgcgtcgcgacgatgtcatccccgaaagcttacagccggctctgtctacaagagtggtatccagctctaagtaacatacacgtatgcttttttttt

SEQ ID NO: 29134 - DNA, 457 bp, Oryza sativa
  unsure (1)..(457): unsure at all n locations
  Clone ID: uC-osflM202132h11b1
ttattagcgctgccagtgggatcaatgaatgggttactgatgggatggaaagagatcctgctgaagggcgtgatgaagaagcaacaaatgagggtaaatcattatcaaatgctggagtggacctgaatctaacaatggctggaggattaccatcaattcaatcttctataccaattgcatctgagcgtttcaacggaggattgggaagagatctgatgattggacaacctactggaagtgaagttggtgatcatgcaacttcatacgagtcccgaggtccaagctcaaggaagcgcaaccatgaggaaggtgggagcacagttgacaagcccaanggacaggcttcagcatgctgatagcatagaaggaagtgtgatagatcgtgatgggaggaaagtgatgatgctgcgcaagatcngacatcccgaataaaggtcacgtgggtttgatctatttg

SEQ ID NO: 29135 - DNA, 331 bp, Oryza sativa
  Clone ID: uC-osflM202132h12b1
tgaaacctagctccgcctccgccgccgccggggccgccgccgccgcaactcgagcggcgaatcggcgatgccacccaaactgaggtcgtcgaagggggtggcgccatccccttccaccggcgagggtggagaaagccacacatcgaaaaagaatcccgctccggctacggctcccaccgccggaagtgttactcgatctagagcgagggatactactgagcgcgctagagctagtggcgggggcacggcactggatccgaagaagagaaagaggacagaagagtcagcggcgtcatcagcagcggcggcaggtccggctccgaagaagatg

SEQ ID NO: 29136 - DNA, 585 bp, Oryza sativa
  unsure (1)..(585): unsure at all n locations
  Clone ID: uC-osflM202133a01b1
ttatccgcagcagcagcatcaggggaagggtctagaagcttctagaagcttcttccgagatgaaggtgatcgagaagatccaggaggcggcggcggatgggcggacggtgttctcgttcgagtacttcccgcccaagacggaggaggggctcgacaacctgttcgagcggatggatcgcatggtggcgcacggccccaacttctgcgacatcacctggggcgccgggggatccaccgccgacctcaccctcgagatcgccaaccggatgcagaacatggtgtgtgtggaaacaatgatgcacctgacatgcaccaatatgccagttgagaagattgatgatgccttaacaacaataaagtctaatgggattcaaaatgttctggctcttaggggtgatcctccacatggtcaggacaaatttgttcaagttgctggtggattcgcttgtgctcttgatttggtacaacacattagagccaagtatggtgattatattggtattcactgtgctggntatccagaggcccacccggatgcaatacanagtacgggaggggctacaccagaagcatacagcaatgatc

SEQ ID NO: 29137 - DNA, 497 bp, Oryza sativa
  unsure (1)..(497): unsure at all n locations
  Clone ID: uC-osflM202133a02b1
ttttagcaagtgatctctttagctcggatcatctctgcatttgcatttgcagctgctcgtcacggcaatggcatccaccaacagctggacccacgagatcgagtcgccggtggccgcgccgcgcctgttccgcgccgccgtcatggactggcacacccttgcccccaagatcgcctcccacatcgtcgccagcgcccaccccgtcgacggcgacggcagcgtcggcagcgtcaggcagttcaacttcaccccagccatgccattcagccacatgaaggagaggctggagttcctggacgtggacaagtgcgagtgcaagtcgacgctggtggagggcggcggcatcggcaaggcgatcgagacggcgacgtcgcacatcaaggtggagccggcggcgaacggcgggagcgtcgtgaaggtggagtccacgtacaagctcctccncggagtggaggtgaaggacgagatcaccaaggctaaggagtccctcaccggca

SEQ ID NO: 29138 - DNA, 546 bp, Oryza sativa
  unsure (1)..(546): unsure at all n locations
  Clone ID: uC-osflM202133a03b1
ttcgcgcgcgcgcgtcaggcgcgggcccgccgccggccgctctcgcatccccgcgtcgcttctcctccaaccctctccccccggcgcttcttctccaatccacccccctccggtgcttctcctcccccccaatctttgtttcatccgagctttcacttctacgaggttgtgtgttcttctatgggattctctccccggcgattctctggccgcttctcctccctcagtatatctattgggtcgagtgatggatgccacaggcgatttgtgttcttgcttcctatcttcagtccctgcatgtatcgttcaaaattgaggagtttctatcaggctgtctgctcctgctgctgcagaaacgagtgaatctggtataagttcattcctattcctattcctattgcctactatcattgtagcagcagctatgggctatcactgaggtcagtccccataacattcccatccaaagcagcggcttatttggtntctccatatgagttctctatcaagaaatatccccatatatttggtacacatattcgtcat

SEQ ID NO: 29139 - DNA, 222 bp, Oryza sativa
  Clone ID: uC-osflM202133a04b1
tgttcccgagcccgagatttcaggggagcagatagcaaattcgtacaagttctgaaattctgggcggagaggagacagagagagagagagggggaaaggcgccgcgccgccgccgctgctctcctccggtggtggacggtgtgtccggtccggttcgccgcgccgcccttgcgtgagcgcgagcgtgcgtgcgtgccgcggagaggaggaggaggaagagga

SEQ ID NO: 29140 - DNA, 453 bp, Oryza sativa
  Clone ID: uC-osflM202133a05b1
ttctctctctctctgtgcacaccccgggaggaggaaccgagggaggaggacaagtcagagcaaggggcctcgacggcggcgaagccctccaactcacaggcgccatgtcgatgtcactgttccctgggatggatcttacgaaaatggatgctcctactcttaccctccttggagcagcctgctgtgtaatgctatcgatgcattttacagtacagttggtgtcgcagcatcttttctattggaagaatcccaaggagcagaaggctatacttattatcgttctcatggctcccttatatgctataaattcctttgttggtcttctggatatcaagggaagcaaaacatttttcactttcttggatgctgtcaaagaatgctacgaggcactggctattgctaagtttatggcactgatgtacagctatttgaatatatctattagtaagaaca

SEQ ID NO: 29141 - DNA, 330 bp, Oryza sativa
  Clone ID: uC-osflM202133a06b1
tggtcgcgtgggctcgaacgtacacacacgcatcccaaatggcccacgtcatggccgcctccgagctcgtcaccgccaccatcaagcgccccttccagaacgacgacgacaacagcagcaacggcaacggcaacgccgacgggaagcccaaggcgcggcgccgggaggccgacccggcggcggcgctggccgcggcgcgccacgagttcggcgagcacggcggggtgaacatgtgcatcgaggcgtcgctcacgttcacggtgatggagccggacaccatgcgccagctctgtgccggggagcttggcccggagcgcggcgacctgtaca

SEQ ID NO: 29142 - DNA, 545 bp, Oryza sativa
  unsure (1)..(545): unsure at all n locations
  Clone ID: uC-osflM202133a07b1
ttaggtatctggtgagcattgaaatgtcatgtttttaatcaaactagtgttaacatcatagtgatcctgaagttccatccaacctatgctattctatttaaaaatagaggagtccttagatgggcatatgctatgattttctttgcaataagtcctatgtttttttttgtagttataaactattttgaaaattggactgcaggtatacaacagggtgatcgtcggttgaaaatgccatctgcatccaaatccaagtccaaagacaggtcagctgccaaggcaccaaaagagcaacctaaggttgcagcaaagcctatggggaatggcacagttgcaagtgcctataacaacttctctggaaaattccatctgttggagccatcatcttctttgctggttagccagggcaatgacaaattaaggaatacagacgagatagatgaacattctcgtagctcccatggtacaggagactntgattgtgcctctaacaatggtcagctgtctggtgagtcagaagatccaaaggaaaaatcacgagtact

SEQ ID NO: 29143 - DNA, 485 bp, Oryza sativa
  Clone ID: uC-osflM202133a08b1
tcgtggacgcgtgggttcatctccatcgacaaagctagctaagcccagtcatggccgcctctcccgcaatgccgtcactcctcctcctcctcctcctagccgttctcgtctcggcggccgatgcctacgactccgccgccagcgccaacaccaacgccggcgccatccccgaccccaacatcttgaacatggaggccatgtgccccaagacgacggacgtgaaggcgtgccagcaactggtgaagaacatgccgtccaacatcgtcgcggggaagaaggacgccaggagcatcgcccgggggtgcatcgccaccgcctggttcgtggcgagggacggcgccaaggactgcaccgccgccgtggacgagtgcaaggacaaggtcgaccagtgcctcgacagctgccgccacgccttcgccgccgtgaacgacgccctggagccccagggcaccggcgacgacgccgtcaaggtccccgaggacgag

SEQ ID NO: 29144 - DNA, 386 bp, Oryza sativa
  Clone ID: uC-osflM202133a09b1
caatccccaaatccactcctccctgccggctctcccctcctcccttcgctgacgccgactcccctcctccctccgccggcgccggctctcctctcctccgggcggtggctcccctcctccctccgccagcgccagtgccggctctcctctcctccgggcgtcgtcctcgaagaagcgacggcagcgtcctctgagccgtgcggtggcgtcgtcctcggggccgagctacgacggcgccctcgaagacggcggtggcggcgcggatctggagcgcggaggacggtgcaagcgcgggacggcggcggcggcgcggatctgggctcctcctctctcggccggcgacgaggagacgaagccgctcgtgggtcgttgtcctcctcgctttg

SEQ ID NO: 29145 - DNA, 414 bp, Oryza sativa
  unsure (1)..(414): unsure at all n locations
  Clone ID: uC-osflM202133a10b1
gcgatccgcaggcgccggcggagcagcatgacatggggttatctcccctgacgctcctcggcttcgccttcctgaccttcaactcgggaatggcagtgtacagatcagatagagacttggcaaccatcttcttcgtggtcttctcctacgttgacctcgtatcgctcttctacttcctccgattatttgagaagacgccgccggagtcgcctcgccgccaccacatcaagacgggcggtgtggctcctgacgacgatgctaccgncgtgttttcatataaagtggcggccatcatgcctttaccggttcaggtgctggtttgggccatggccgcagcaactgtgcttggaaggttctacgcattcttcctccactccgatgaaaaaaagcctattgagggatagggcaaatact

SEQ ID NO: 29146 - DNA, 441 bp, Oryza sativa
  Clone ID: uC-osflM202133a11b1
tcggtctctgttcgtgtcaaggatctgctcggccggatgactctcgctgagaagattggccagatgacccaaatcgagagggagaatgccacggcggagcagattgccaagtacttcataggtagtgtactgagtggtggaggcagtgtgcctgctcctcaggcatcagctcaggcttgggcttcaatggtgaatgaaatgcaaaagggtgccctttcgacccgactaggtattccgatgatctacggcattgatgccgtgcatgggcacaataacgtctacaaggctacaatcttcccccataatgtcgggctcggcgctaccagggaccccgacctagtaaagaggataggagaagcaactgctcttgaagttagagctactggaattccctacgtctttgctccttgcgttgcgggttgcagagacccaagatgggga

SEQ ID NO: 29147 - DNA, 346 bp, Oryza sativa
  Clone ID: uC-osflM202133a12b1
tctgcataggggcttgagttcctgcacgagaaggcggagcctcgtgtcagtcaccgtgacatcaaatccagcaacattatgctctttgacaacgatgttgcgaaagtcggagacttctatgtatccaatcagtccccggacatggcggctggcctccactccactcgtgttcttggcaccttcggttatcatgctcctgagtacgcgatgacagggcagcttagcacgaagagcgatgtctatagcttcggagtcgtgttgctggagcttttaactggtcgcagaccggtcgatcatacgctgccccgtggccagcagagtcttgtgacatgggctactacaaggc

SEQ ID NO: 29148 - DNA, 420 bp, Oryza sativa
  Clone ID: uC-osflM202133b01b1
ttcctggctctgtggcggctcccgccttcggtatgcagcctgaagaggctgaaatacctcgacatttcgcagtgtgtcaacctgacggacctccctgaggagctcggtcacctgacaagcctggagaagatcgacatgcgagaatgctcgcgactgaggagcctcccgaggtcgtcctcatcgctcaagtccctcgggcacgtcgtgtgcgacgaggagacggcgttgctgtggagggaagctgagcaggtcatcccagacctccgggttcaggtagcagaagagtgttataacctggactggcttgtagactgatgttcctggatgcttttggctccaagctcacctttgtacagatgatgtgtatatttttccctgtctaatacaggatggaggaacaatccactctgcaattttgac

SEQ ID NO: 29149 - DNA, 539 bp, Oryza sativa
  Clone ID: uC-osflM202133b02b1
ttcttgttcgataatcatgaaaacatggtgtattgtgagatgtgtggggtttttcgagaatcctttatgaaatctgccaaggatggttcaataaaagtccatgggataccaagtgattttgggacaccttcgatgccgaaatctgattcttcaaagatgccagtgaatactcgtactacagactttggtggtgaccctgagataaagaatgctagcatatctcatgagaaagttggttccacacagtacgcatctgttggtagctcatcaggcgctgggaaaaagctgaaggaggaccagagtagtagggctaccagttctgcacagaatgaggatgtggcccagaaactttcttctgacatacagaagctaggtttagaaaagaatgaagtagatactgcaaaaccttatttacctgaagaatataagcctgagaagtggatgtttgctaatgaggaatcaggagtgctgagccaactaaaccttgcaatagttactgtctacgaacaatttgtttaggtaggtcatgttgattctgg

SEQ ID NO: 29150 - DNA, 549 bp, Oryza sativa
  unsure (1)..(549): unsure at all n locations
  Clone ID: uC-osflM202133b03b1
tagaatataagggggaagacttgggccgccgctaaccctaacccctggcgacggcggccgatcgtcgtcgacgaagtcaggcgcggaggctgcgaccggattagccggtcgcccctggatttggagctcccgtgtccgtgtgggggcaatgctagcgcgggcgtttggcctcgtgggcaaaacatggaagcgaacgccgactatgtccgtcgaggcttccgcctcgccgcgccgccgctcccagatgccacagcagcagctttgtcatctccacggcagcacgccgtcacaacggcaaaagttccccgaagaacagctcccgggggatactgttgaggggaagttttgacctgaggtttgcagcactgaagagcattggggaggatcgggtcaacgatcgtgagcttaagttactgctaaagaagaaacatgcccccatttgttatgtttggtgtgatccatgcccctggatgcacatttctcaggggatcatgaagacactcaatattaataaaatggtntgatctggtttcaaagctaaaatcttaa

SEQ ID NO: 29151 - DNA, 495 bp, Oryza sativa
  Clone ID: uC-osflM202133b04b1
taacttcacagaggctgcatgatctaggagatcagtttaagtcacttccactttggagacaggcagaaccaagatttctttggaacggttacttgttggagcctctaattgagaacaaactgcaccaatacttactaccagtcattcaaggaagttttcagagtatccatgcagaagttgggtcagagaaggtaaatgtgaccctgattgcacgtcggtgtacacgtaggataggtacccggatgtggaggcgaggagctgatccagagggttatgctgcaaattttgttgaatcagagcagataatgcaatcgaaagaatttacagcatcatatgtgcaagttcgaggttctatgccttttttgtgggaacaaattgttgatttgacatataaacctagttttgatgttgtcagagtagaggaggcgcctcgtgtacttgaacggcattttcatgatttacaaaagaaatatggagctgtcgtggcttgtgatc

SEQ ID NO: 29152 - DNA, 509 bp, Oryza sativa
  Clone ID: uC-osflM202133b05b1
ttacgatttccagagttgtacttcaagcaaaatatggaggaaatttggatgatagtttgcaagttgctgatccatccccattcaatgttgcgtaatatatccagctctcttgtggcctcatatttctcttttgtagagaagagtaagcgtgaaaagaaatttgatggcaagtcctcactgcttatccaaccaagcatgctattcctaatagctgtttcgttgatgaaacaattgagagcagaactaagtgatactacagcgaacaatctaattgtacaaaatctttcgtattctgtctgtaacttgcatacattggttaagcaaacaacctcgccacaccagttttggtctagccttagttcttctgatcacagtgcattccttgagggttttgaattgcttggttcaacaaaagcaaagaacgcatttctcatctgcacttctgcatctactgatgtaaatggatctaaccttgatggaggtgaagagcttacatctttgtcagttct

SEQ ID NO: 29153 - DNA, 298 bp, Oryza sativa
  Clone ID: uC-osflM202133b06b1
tctatgtgagaccgcttcgtcacttaaaacagggcacacaggttacaacatctaggttttgaagcccattaagccccaaacattagatcaccacaagcgaccagtttcgaagacacacgcacacggtaacaggataagtacacactggcagattaacggatagcaacagttatcaatgaggccttgtcacacataacaagaccgcctcatacgacgacggcttctctatgcttcttttcgagcgcttcggtccttattctcgttgcactaaccataagaagagcaataccccttctta

SEQ ID NO: 29154 - DNA, 363 bp, Oryza sativa
  unsure (1)..(363): unsure at all n locations
  Clone ID: uC-osflM202133b07b1
ctccctctctcttttcgtgagcagggaagagcatcccctctctcttttcgtgagcagggaagagggggggggggggggggnccaccccttcccaccccctgcgaaaccaagccatcctgggacaccatcgacacccaaaactgctcctaccagataccactcaatacttcgaccacaaactttagtggcgaccctgccataaaaaatgctagcaaacctcatcaaaaaagatggttccacacacaacgcatcccctggtagctcatcaagcccttgaaaaaaacttaaagcggaccccactataaacgctaccacttctgcacaccacgagctgcaagcccaccaccctccttctgacataca

SEQ ID NO: 29155 - DNA, 424 bp, Oryza sativa
  Clone ID: uC-osflM202133b08b1
tcggctacaaggaggtgaagggcgcgacgtcagacttctgcgtgccgaacgcgcgctggccgtgcgcgcccggcaaggcgtaccacgcccgcggacccatgcaaatcgcatacaactacaactatggggcggccggcgaggcgatcggcgcggacctgctgggcaacccggagctggtggcaacggacccgacggtggcgttcaagacggcgctgtggctgtggatgaccgcgcggtcgccgagccagccgtcgccgcacgccgtcgtcacggggcagtggactccgactcccgcggacagcgcggccggccgcgcgccaggctacgggctcaccacgaacatcctcaccggcgggctccagtgcgccggcggcaacggcggcgccgaccgggtcgcgttctacaagcgctactgcgacgtgct

SEQ ID NO: 29156 - DNA, 550 bp, Oryza sativa
  unsure (1)..(550): unsure at all n locations
  Clone ID: uC-osflM202133b09b1
tttttagagagagcgccagactctccccaggtgaggattcagccatgaagggggccaaatccaagggcgccgccaagcccgacgccaagttggctgtgaagagtaagggcgcggagaagcccgccgccaagggcaggaaggggaaggccggcaaggaccccaacaagcccaagagggctccctccgctttcttcgtttttatggaggagttccgtaaggagttcaaggagaagaaccccaagaataaatctgtcgctgctgtaggaaaagcagccggtgataggtggaaatccctgaccgaagcggacaaggctccctatgtagccaaggccaacaagctcaaggccgagtacaacaaggccattgctgcctacaacaagggcgagagcactgccaagaaggcacccgccaaggaggaagaggaggacgacgaggaggaatctgacaagtccaagtccgaggtcaatgatgaggatgacgacnagggcagcgaagaggatgaagacgatgacgagtgagccttccagtggacaagatgggagcagcaaga

SEQ ID NO: 29157 - DNA, 502 bp, Oryza sativa
  unsure (1)..(502): unsure at all n locations
  Clone ID: uC-osflM202133b10b1
tcgtccactctcacaccaaaaccagtaaaaaaatatcgtcaccttcgccggcgagatggcccaccgccgcatcatcctcctcctcgccgccgccgccgtcgccgcgacctccgccgtcgccgccgcgtcctccggcttcgacgactccaacccgatccgctccgtcacggaccacgccgcctccgcgctcgagtcaaccgtcatcgccgccctcggccgcacccgcgacgccctccgcttcgcccgcttcgccgtcaggcatgggaagaggtacggcgacgcggcggaggtgcagcggcggttccggatcttctccgagagcctcgagctcgtccgctccaccaaccggaggggcctcccctaccgcctcggcatcaaccgtttcgcggacatgagctgggaggagttccaggcgaggccgctcggcgcggcgcanaactgctcggcgacgctcgccggcaccaccggatgcgcgacgccgcgctctccggagaccaagact

SEQ ID NO: 29158 - DNA, 438 bp, Oryza sativa
  Clone ID: uC-osflM202133b11b1
tcgtccacgcgtccgctcgtacttggctcctcacccttaccaccacctgctaagcttcagtggtcaggatcagtaccacggtgatgacgtctttgggttacagtattacggcggcgatcaagtaattccggcggtggttccgcagaagtccagcccgaccaccgagtgctcctcctccgtctcctccatgtcgtcctcgccgacggccaccgccatttccagctctaagtcaccggccttcaagaagaagggatcgagaggttgtgatcagaggaaggctactgctcctgctgctgccacaaccacaaacaagagacccagggtgaggagggagaggctcggagagaggatcatagcgctgcagcagctggtttctccgttcgggaagtctgatacggccttcgttcttcacgaagtcgtgggatacatacgctttct

SEQ ID NO: 29159 - DNA, 424 bp, Oryza sativa
  Clone ID: uC-osflM202133b12b1
tcgattctctcctcctccgttcctgactccaccactcacattcattcccttctctctcctccctccctcccccgcccctctgctcccctcgccggcgagcccaatggcggcgtccgccctcgactccgcctgggagggcctcaccggcagcttcaccgagttccagctcgccaccgtcgtcaccttcctcctccacgagaccgtcttcttcctctccggcctcccctccctcctcttcgagcgcttcggcctcttcgccaagtacaagatccagaagaagagcaataccccttcttaccagaatagatgtgtgctgcgtctcattctgtaccatgtctgtgtgaacttgcctgtaatggttttatcctaccctgccttcaaattcatgggcctgaggagctctcttcctctgccacactggacg

SEQ ID NO: 29160 - DNA, 503 bp, Oryza sativa
  Clone ID: uC-osflM202133c01b1
gtctacgaccccgcggtgttcctgacgtgggaggacgtgcgcgtgacggtgcccggccgcactcgcggctcgccgccggcgaggatcctcgacgggatcaccgggcacgcgcggccgggggaggttctggcgatcatggggccgtcggggtgcgggaagacgacgcttcttgacactctcgcaggacggttaggaccagaaatgaatcaaaccggtgtgattttaataaatggccggcaggaaaagcttgccttcggaacctcggcatatgtaacccaagacaacgtgctcatgtcgactctatcggtgagagaagccgtctactactcggctcacctgcagctacctgacacgatgctggcgtcagagaagcgcgcccacgcggagcgtgtaatccgggagatggtgcttagcgacaccatggacacgcgcatcggcggccgtatcaccaagggcatcagcggcgggcagcggaagcggatgagcatctgcattgagatgct

SEQ ID NO: 29161 - DNA, 411 bp, Oryza sativa
  Clone ID: uC-osflM202133c02b1
gtcgtcgaccccggggtgttcctgacgtgggagggcgtgcgcgagacggtgcccggccacactcgcggctcgtcgtcggcgaggatcctcgacaggatcaccgggcacgcgcggccggcggaggcgttggggatcatagcgccgacggggtgccggatgacgacgctacttgacactctcgcaggacggtgtggaccagaaatgaattaaacctgggtgattttattaaacggccggtaggaaaagcttgccttcggaacctcggcatatgtaacgcaagacaacgtgctcatgtctactctattgttgagagaagccggttactactctgtttacctgcagctacctgacacgatgctggcgtcagagaatcgcgcccactcagatcgtgtaacacaagagatggggctt

SEQ ID NO: 29162 - DNA, 443 bp, Oryza sativa
  Clone ID: uC-osflM202133c03b1
tgttattcacggatgactgctcaaatgcatgctggggtggttacagctgctttatttaattgcgtcaatcgggacgagagcagctcatgggactggtcgatacgggcttgctgtatgcacagacagcgctgttcactctcaaagtccggttggtccaaccggttgcgcagttgctgtcccatagatgtttgctccaaaagcttcagataatttagagagcaaaagctgacgatgcaatctgggccaaggagatggctcccacctgcctgatcttggtagtgaaaacccggtgaactgaggattgcttatcacagacatcctatcttaagacattaagactcctgctacttcgtctccaagggctcgtatgaaaagacttaagggaagccattccctttacatcatgcatactatttaggatttcactccccatacaacaagct

SEQ ID NO: 29163 - DNA, 66 bp, Oryza sativa
  Clone ID: uC-osflM202133c04b1
ctagagggcgaatgaggcgggagataggttcaatttacttgcccactcggtatagtcgcaaaaata

SEQ ID NO: 29164 - DNA, 89 bp, Oryza sativa
  Clone ID: uC-osflM202133c05b1
tatttatctaaaaagggaaaatcgcgggaagtagcttcttttttttgtctcacacgatatcagggcacaaataataatcctttgcggtt

SEQ ID NO: 29165 - DNA, 357 bp, Oryza sativa
  Clone ID: uC-osflM202133c06b1
tctttttcttcccaaccgagcaagggggcgaaaggacgatctattgaccgaaccatgtatgaaggcaaagctcgttctttcctgcgctggacatcctcggtttgaattccatgaatctacgaaaatagattatgccatcagtttttgcacacgagcatcaaatttgacgtaggacaggcaccatggagaaagtcacagccaatgggaacttcattgatacgggcaattggaagctgaatggagcactatggaaccaacttgacagagcaggtattgaagcaatggatgacattcttgcacttgaagctaccactgctggaaacagtgctaaactagttgcattgagtgccttgcgca

SEQ ID NO: 29166 - DNA, 324 bp, Oryza sativa
  Clone ID: uC-osflM202133c07b1
ttaaggcctagaagactggccacgggagaggaagctctctctatttcatccagcatggatgagtgccgagggatgtgtcttttgcactgttcgatctgccaattcacgccatatacccacgggagagggccctgcgatcggtgttgacctcagacaaactactcgagagaccgcgcgagggagcacgacggggtggacaatatcgccttcgaccaaaggaaccacacgacgccctggtatgcagcatgcaccgacttcgatcaggtaatcggagacagcctcgagaaccaagtactccttgaccgcatcaacactggattcaat

SEQ ID NO: 29167 - DNA, 403 bp, Oryza sativa
  Clone ID: uC-osflM202133c08b1
ttaaagtgcggaggaggggcatgcggtggtacaacttagtcgcttcacgtcagatgtgcagcgtgctgaccagactctagcttcgacgacggacagttgtgaggattgacggatcgtataccctgagtggagactataaaggcctgcttagccaactagcggacaaggtgagggagctcgatatgggacctgcagagatactctctatagaattgtggaaaaggtgccagtagaagggcagctaagaagttagatactacttgtctgatgaagtgagatatactctatgagacatgatgactccttgacagcactacagttggagacatgacgatctatgctgagttcatggctgaggggtctggtcacgcagcataagaggtgacgttgcggtgaggacatg

SEQ ID NO: 29168 - DNA, 563 bp, Oryza sativa
  Clone ID: uC-osflM202133c09b1
tttttaaagtacaaagaggaagctcaagcaaataaaagctacatgcttcagtacaaagaaattgcaaactcaaatgaatctgcattgaagcaaatggagtctgcacttcaggatttcaaaaccgagtctgagactatcaagaaaagcttggaagatgagattacaaagttgaggaccaagatatctgaactggagaagtgttatataatgaagtgtgaagaagctgccagtgcaattgaagctaaagagaaggataccacttctctcatgaaggaaatctcagttttgagaaatgaagtttccgagaaagtaatacagattgaaaaattagaaactgaactggcttcctcgaagagggctcttgacgagcagtataagcgttggcgtagcgctcaggacaactatgagcgtcaggttattctgcaatcggaaacaatacaggagctgacaagtgcttctaggagctatcttctttgcagcaggaaatcatagtgcttcgtcaaacagtagaaacacagaaggcttgaaatgatggtctaagaacccttgagagcaagaaaaga

SEQ ID NO: 29169 - DNA, 397 bp, Oryza sativa
  Clone ID: uC-osflM202133c11b1
tctttttgatggtaaattgtctccatttaggaagcttgaacctattcctgaggtcaacgacgagcctgttaaggttgtggtcgctgataacgtccatgattttgtcttcaagtctggcaaaaacttccttgttgaattctatgcaccatggtgcggacactgcaagaagctggctccaatcttggatgaggcaactacaacgcttaaaagctacaaggatgttgctatctctaatatggatgcaactgcgaacgatgtgccaagcgagttcgatgtgcatggttaccccaccctgtacttcgtcacccccagtggaaagatggttccctatgaaagcggcaggacagccgacgagatcgtttacttaattaagaataacatggaaaccgctggtcag

SEQ ID NO: 29170 - DNA, 490 bp, Oryza sativa
  unsure (1)..(490): unsure at all n locations
  Clone ID: uC-osflM202133c12b1
tctctttgatggtaaattgtctccattcaggaagtctgaacctattcctgaggtcaacgacgagcctgttaaggttgtggtcgctgataacgtccatgattttgtcttcaagtctggcaaaaacgtccttgttgaattctatgcaccatggtgcggacactgcaagaagctggctccaatcttggatgaggcagctacgacgcttaaaagcgacaaggatgttgtcatcgctaagatggatgcaactgcgaacgatgtgccaagcgagttcgatgtgcaaggttaccccaccctgtacttcgtcacccccagtggaaagatggttccctatgaaagcggcaggacagccgacgagatcgtcgacttcattaagaagaacaaggaaaccgctggtcaggcgaaggagaaggcagagtcggccccagccgagcctctaaggatgagctctaacaagtgagtngagagggcatgatgcttgtgctgagacatg

SEQ ID NO: 29171 - DNA, 347 bp, Oryza sativa
  Clone ID: uC-osflM202133d01b1
tttttcaactggctgaaataccgaaagcaaaatggctgcgcccgggttatacaactcgactcacattagacgactccttgatatctgagaacagttcttggagtgcagagcgcggactctgatagcagtgttccgagcttcaaattatcctataataaaacactgaatggtcagaaagcagctggtgagcaactaatgcaccacttctgtcaacccactcatggagactcatgatgctgagcgcggacagacacataatcagatgccaatgtctaccttgatactctggaaaggcctccacatggttctattcctagggatattatcgatgtctgtggacaacaaac

SEQ ID NO: 29172 - DNA, 560 bp, Oryza sativa
  Clone ID: uC-osflM202133d02b1
ttttaagtaaacctaaatatccgtgagtagtaccattaccatcgatgaatacttgtgatggatgctctacattgtcggcaccttgatttgttaaacacatattttctgttgaaagaacatgattagtactataccagaatatatgttcctcaaaacatgaaatagatgtatatagttggcacactaaccggtatttgttatgcttggctccttaggagggtctatgctgttggatgtttgtgtgcatatcgaaggatcttctcctagtgacacagaagttctcgtgtcccatctaattgtgaagctttcattttgacgatataccagtgcttgtctttcttcatgtgctacatttttcctatgtaatctagtcaggacttgaggtgatgtatctagtgcaatatacgtaggactctccatttcaatggaatatttgcttggagtgttgcgtcgtaatgcacgattagcattgacctgttctctcttagctttcttttggtctggtcccatatttctgtatttcatcctttgaggggcgtttttttcttggtttggaattg

SEQ ID NO: 29173 - DNA, 174 bp, Oryza sativa
  Clone ID: uC-osflM202133d03b1
tttttatctaacgtacatatccggggggaggaagcttaccctttttgttcacttctgcctgatggtgcaaatagtcatcccctggatttgacagacacataatgtatgttctagaaccacgactaatactatatcaaaatgtttgtttatcagaacatgacatagatgtatatc

SEQ ID NO: 29174 - DNA, 95 bp, Oryza sativa
  Clone ID: uC-osflM202133d04b1
tcctattctaccaaacaaagaaggggggcgggaggttccttttaatgttgaccccggtatgatggcacaaataggcatcctctgcgatgcaaatt

SEQ ID NO: 29175 - DNA, 93 bp, Oryza sativa
  Clone ID: uC-osflM202133d05b1
ttttgtttctaacgaacaaagaaggggggcggaagcttcattttttttgtcaagtcggcatgatggcgcaaataggcatcctctgcggtggac

SEQ ID NO: 29176 - DNA, 96 bp, Oryza sativa
  Clone ID: uC-osflM202133d06b1
ttatattctacaaaccaagcaggcgggcaggagcttcctcttttgcttccagcctgcatcatggcgcaaataggcctcctctgcgattgacagccc

SEQ ID NO: 29177 - DNA, 138 bp, Oryza sativa
  Clone ID: uC-osflM202133d07b1
tcgtgagaatctggcaaacggagaaggcaggcgggagcttctacttttttatcaactatgcatgatggccaaagtaggcgtcctctgcggttcaaaacctatgtatgtatgacataaatccaccagtatcactccagc

SEQ ID NO: 29178 - DNA, 273 bp, Oryza sativa
  Clone ID: uC-osflM202133d08b1
ttcaaccccgacctacgcacaaacccgggggtaccttaatctgtccctctcacgctgcaccaccgccgaagagaccgtcctctactgcggacggtccgtcgatgtcgtaaccggagcctcgacggcaactatccccaacgccgggtggacctcaaccaaaccacatcggcgacgacgcatacgtaaccctcaacctacccgaggaagcatgccgcatcatcgtcgccgcgcagccgacgaccccctgtccgaccctcctgacctgattgagaa

SEQ ID NO: 29179 - DNA, 457 bp, Oryza sativa
  Clone ID: uC-osflM202133d09b1
tctttagaataatctggaacagaagcgtgtgcctgtgtcaattgatgtcccagatccggacttctatgattttgataaagatcgcacagaaagaacttttgacaatgatcaggtgtgggctacatatgacagcgaagatggcatgcctcgtctatatgcgatggtgcagaaagttatttcaaggaagcctttcaggatccggatgagttttcttaattccaagtccaatattgaactgtcaccaattaactgggttgcctcgggtttctcaaagacgtgtggtgatttcagggttggaagataccagatttttgaaacagttaacatcttctcccacagagttagctggagcaaaggcccccgaggaattatcaagattgttcccaagaaaggtgatacctgggctttgtaccgaaactggtcttctgattggaacgagcttacacctgatgatgtg

SEQ ID NO: 29180 - DNA, 499 bp, Oryza sativa
  unsure (1)..(499): unsure at all n locations
  Clone ID: uC-osflM202133d10b1
ttctcatcagatcagcgtgaagcagcggcaagaacacaaaaatggcggacgagaagctcgccaagctgcgtgaagccgtcgccggcctctcgcagatcagtgacaacgagaagtccgggttcatcagcctcgtcgcccgctacctcagtggcgaggaggagcatgtggaatgggcaaagatccacacgccgacggacgaggtggtggtgccgtacgacaccctggcggcgccgccggaggacttggaggagaccaagaagctgctcaacaagctcgccgtgctcaagctcaacggcggcctcggcaccaccatgggatgcaccggaccaaaatcggtcatcgaagtgcgcaacggattcacattcctcgacttgattgtgatccagatcgagtccctcacaagaagtatggcagcaatgtcccactgcttttgatgaactcattcacacccatgaagacacctttgagatngttgagaaatacaccaattcgaacattg

SEQ ID NO: 29181 - DNA, 401 bp, Oryza sativa
  Clone ID: uC-osflM202133d11b1
tcgtctcaagttgtccccctccgtggccggcctgactagtacaaaacaatggggactcggctcttgtcgctcgcaccatggctgctgctgctcctcctgcacctcagcggcagcgcccatgtcgcccaccggagcctcaaggccaagcaagcgccaagctcgtagccggcctccattggcagacccctgctcacgacaggataccacttccagcccccgatgaactggatcaacgaccccaacgggccactgaattacaagggactgtaccacctatgctaccagtacatccccaaggcagctgtgcggggcaatctcatgtgggctcactctgtatcacatgacctcatcaactggatagcccttgagcctgccaccaagcccgacatgccctgcgacca

SEQ ID NO: 29182 - DNA, 450 bp, Oryza sativa
  unsure (1)..(450): unsure at all n locations
  Clone ID: uC-osflM202133d12b1
tcgtgcagaccaagagcaaggagacgacgacgacgacgacgatgcaatccctcctctcctcctcggtgctcgccaacccatgcaccaccggctccccgctcttcccgccgaccgccgctaagctcgccgccgctgcctcggtcccggtggccgcggcggcgaggagtggcgccattgctgccgtgtcgaggagatcggccagtggcggccggtgcgtggtggcggctgcgtcgtcgtcgtccccggcggtgaccacggcggaggccggcgaggtgcccgcgacgatgaaggcgtgggcgtacgacgattacggggacggcagcgtgctcaagctcaacgacgccgcggcggtgccggacatcgccgacgaccaggtgctggtgcgcgtcgccgccgncgcgctcaaccccgtcgacgccagcgccgcgcccggcaagtcaggccaccgac

SEQ ID NO: 29183 - DNA, 467 bp, Oryza sativa
  Clone ID: uC-osflM202133e01b1
ttgttttctagcagtgacagaagttgcagtctgaccttggactgccctgtctccactgatgctgccttttcaagcgaaaagctgtctatggctcatgatttgatgggcagtgagttgcaggcagtccataattcaaaggctgaggttgtggccagtttgactgatgtcaagggtgctaagctcaatagcattcataccacacaattacctcatgaatctccaagcagtgatttcatcatttcagaaggtgcgcaatctgcttcaacaactgcaattcccagaaaaaatggaacatccatgcacacagagtcaaattcaattgatattttacttggagttctagccgatgaatctaaggtctcttctggaaaggatgaggttggcaaagcttccttgacattgatgacactggctggcaatgaccaatctgcagatgatgtaactcaggatgaaattgcagagatcac

SEQ ID NO: 29184 - DNA, 130 bp, Oryza sativa
  Clone ID: uC-osflM202133e02b1
tctttttctagcggtgaatgcaggggggagagagcttacttttatggttcacctcgggatgatggcccaaataggcagggtctgcagtgattaaacgctgaatgttgtgtatacaaaaaggagtaatacc

SEQ ID NO: 29185 - DNA, 107 bp, Oryza sativa
  Clone ID: uC-osflM202133e03b1
tgttattctaacaagcaaagaaggggggagagagcttcattttttgcgtcccatctgcatgatggcacaaatagtcctcttctgcattggaaaggcccagaatgtag

SEQ ID NO: 29186 - DNA, 85 bp, Oryza sativa
  Clone ID: uC-osflM202133e04b1
cttacaatcgaacctcgcgggcgctaggttcaccttttatgtccagtatgtatgacggcgcaattaggggtctgctgctacttag

SEQ ID NO: 29187 - DNA, 85 bp, Oryza sativa
  Clone ID: uC-osflM202133e05b1
tctttatctagcaagcggacaaggcgggcaagagcttccatttttgtttcaagtcagcatcatggcgcaaataggggtcctctgc

SEQ ID NO: 29188 - DNA, 90 bp, Oryza sativa
  Clone ID: uC-osflM202133e06b1
ttattatctaccaaacaaacaagccaggcagaagggtccattatatattgcacccttcatgaaggcgcaaatagtcatcacctgcgattc

SEQ ID NO: 29189 - DNA, 126 bp, Oryza sativa
  Clone ID: uC-osflM202133e07b1
tcgtaagactctaccaagccgagctcgcgcgcgggagcttccacttcttcttcctctttgcatcgcggcggatatggggcccatctgcgattgaaaggtcaggaatgaacggcctcgatgaccaag

SEQ ID NO: 29190 - DNA, 503 bp, Oryza sativa
  Clone ID: uC-osflM202133e08b1
ttctttgtatgctgctttctacaagtccctgacaaacgactgggaggagcatcttgctgtcaagcacttctctggggagggtcagctggaattcaaagctgttctatttgttcccaagagggcaccattcgacctctttgatacgaggaagaagctcaacaacatcaagctctacgtccgccgagtcttcatcatggacaactgtgaggagctgatccctgagtggctgagctttgtcaagggcattgttgactccgaggatcttcccctcaacatctcccgtgagatgctgcagcagaacaagattctcaaggtcatcaggaagaaccttgtcaagaagtgcgttgagctcttcttcgagattgctgagaacaaggaagactacaacacgttctatgaagccttctccaagaacctcacgctctgtatccacgaggactccaccaacagacacaagattgccgagcttctgaggtaccactccaccaagagcggcgatgagc

SEQ ID NO: 29191 - DNA, 526 bp, Oryza sativa
  Clone ID: uC-osflM202133e09b1
tcttttctcgcccaaatcttcaaatccaaatccgcagcggaggcggccggggcgcggcggccagatcctggaagagaatccattccgggaggggaatccgcgcatgccaatgtcggatcccacggcggcggtcatccccaagccggggggcatcggcgtcggcggcggaggcggcgacgacgaggagccggtggagatccgggaggtgtgggcggacaacctcgaggaggagttcgcgctgatccgcgacgtcgtcgacgagttccccttcgtcgccatggacacggagttccctggcatcgtgtgccgccccgtcggcgccttccgctccccggccgactacaactacgccacgctcaaggccaacgtcgacatgctccacctcatccagctcggcctcaccttctccagcccgcgcggcgagctccccgcgctcggcccaggccgccgccgatgcgtatggcagtttaatttccgcgagttcgacgacgcccgcgacatcttcgcctctgacttcattgagctc

SEQ ID NO: 29192 - DNA, 526 bp, Oryza sativa
  unsure (1)..(526): unsure at all n locations
  Clone ID: uC-osflM202133e10b1
tcttaatgatttaatgggagcacttatggaacttgattaattgccctttcaggtatgtcccatctgtgctacaagggttggagtggacttgataggtcacttgacaatgcagcatggaagttactttaagatatccttttttcttctctataatgctggcaatgaacatatgcaattttacatttttacatcatattcagttgaagatacatggcattattggtacttgggaaaacaactgcacatggctttccttaatgaataatacatgcaacgcaggcgaagagtccgaaaaatatcttcagggtcccattctttgttgtctttgttgagaaaggacttaagagatggcagtctgcagtcctttcttggtggatcatcctatgtatctaatcctcctgctgctgcaccagatccatttttgtcatctttaatttgtagtttgcctgtggctgaaccatncaagatttacattccgactcatctgacaataacttttgctaaataaatcccagatgacaagact

SEQ ID NO: 29193 - DNA, 482 bp, Oryza sativa
  unsure (1)..(482): unsure at all n locations
  Clone ID: uC-osflM202133e11b1
ttttattgcagtaataatccaagctcaataaacgagccaatccgtcgaagaaggaagcagcggcgatggcggcgaggtccggcgaggtgcgggcgacggtgctgngcatggcggtgctggcgctgcttctgctgctcggccaccacgcggcggccatcgaggccaacgtcggcgtcacccgccaggccagcttcagcctgaacggcggcgccggcgccggcgccggtgctcgcgctggcgctggtgctggcgctggcgctggcgtcggcgctggcatcggagctaacgtcggcgttggcgctcgcgccggcgtcggtgctggcgtcggcgctggcgtaggtgcgaaggtcggtgctggcgtcggtgcgaaggtcggtgctggcgccggcgttggagcacgcgctggcgttggtgcgaacgtcggtgctggcgtcggtgcgaatgtttgtgctggcgtcggcgttggcgcttgtgctggcgtc

SEQ ID NO: 29194 - DNA, 488 bp, Oryza sativa
  Clone ID: uC-osflM202133e12b1
tagtactcgagcaaagaaggagagagcttggtgagctgcagagatggccccctccgtgatggcgtcgtcggccaccaccgtcgctcccttccaggggctcaagtccaccgccggcatgcccgtcgcccgccgctccggcaactccagcttcggcaacgtcagcaatggcggcaggatcaggtgcatgcaggtgtggccgattgagggcatcaagaagttcgagaccctctcctacctgccaccgctcaccgtggaggacctcctgaagcagatcgagtacctgctccgttccaagtgggtgccctgcctcgagttcagcaaggtcggatttgtctaccgtgagaaccacaggtcccctggatactacgacggcaggtactggaccatgtggaagctgcccatgttcgggtgcaccgacgccacccaggtgctcaaggagctcgaggaggccaagaaggcgtaccctgatgcattcgtccgtatcatcg

SEQ ID NO: 29195 - DNA, 508 bp, Oryza sativa
  Clone ID: uC-osflM202133f01b1
tatcaaccaaagcctgatgaaacctctctctcagacgaatccgagtccgtcctcttccgggtgcagatgcgcggccggatctacgactccggcgacgtgatcctggagtacgaggtgagccccaagaacgacctgcctcctcttcctcgcgtcggcgtcgtgttcaacgccgacaagtccctgagccgtgcaaaatggtacgggagggggccattcgagtgctacccggaccggaaggccgccgcgcacgtcggcgtgtacgagagcggcgtcgacgagctgcacgtgccgtacattgtccccggcgagtgcggcggccgggccgacgtccggtgggtggcgctccaggacgccgacgggttcggcctcttcgcgtcggcctacggcgagtcgccgccgatgcaggtgagcgccagctactatggcgccgcggagctcgaccgcgcgacgcataaccacaagctcgtcaagggagacgacatcgaggtgcatcttgatcacaagcaca

SEQ ID NO: 29196 - DNA, 73 bp, Oryza sativa
  Clone ID: uC-osflM202133f02b1
tctatatctaacagcgaggaaccagtgcggagcttcatcttagctgacacaggtatcatgacccaagtggtcg

SEQ ID NO: 29197 - DNA, 108 bp, Oryza sativa
  Clone ID: uC-osflM202133f03b1
tcttaatctaacaaggaaagaaggggggcaagagcttcatctttttcttcccgcatgcatggtggcacaaataggcgtcccatgcactgcaaatgccctgtatgtagg

SEQ ID NO: 29198 - DNA, 90 bp, Oryza sativa
  Clone ID: uC-osflM202133f04b1
tctttttctaacgaggcaagcaggcgggaggtaggttctttttttgcttccacccggtatggtggcacaaatagtcatcctctgcgttgc

SEQ ID NO: 29199 - DNA, 85 bp, Oryza sativa
  Clone ID: uC-osflM202133f05b1
tctttttctaacgagcgaacctggcgggaggtagcttcttcttttttttcaaccctgtatggtggcacaaatagacctcctctgc

SEQ ID NO: 29200 - DNA, 246 bp, Oryza sativa
  Clone ID: uC-osflM202133f06b1
ttatattcttccaatcgatcctctcccgagctggggcgactttaaatggctgggaggattgacagcgcaattagagacatgttgatccttagtggctattactgagctgtatatgccaaaaagtatgaggccatggacgctagtgctgctggcataataacaacggtgaacacgatcttcgaaatcacgtcagcacagcgccggcgatcacggtaagacagatgacaccaaagctgactagaaatg

SEQ ID NO: 29201 - DNA, 466 bp, Oryza sativa
  unsure (1)..(466): unsure at all n locations
  Clone ID: uC-osflM202133f07b1
tcgttattatatagcacaaggatgattcaggactcatccaccatataactataactctctcagggctccaatcatatagcacaaaaaggattcagaactcatccataaacagtgacgatgacccgcaaccactgcgagaaaaccttgaccacggacaacgtcagagattttagccacaggataacaaactcacaggaaatggaaggaaagcgagaaatatctgcagccgccgtcagcctcaggcctcagccgctggcaaacgcaccgcatcagcagcagcagcagcagcagccatcccaagcgagagagctttgctttcgcgagtcgcgcgactccgccaggacaggaaaaaaccggaaaaaaaaaaaccccgcaataaaatttccccaacttccgctttttccttgcctntncccaccacaccacaccacccccatntccaatctcaccatcccccttttccacc

SEQ ID NO: 29202 - DNA, 471 bp, Oryza sativa
  unsure (1)..(471): unsure at all n locations
  Clone ID: uC-osflM202133f08b1
tcgtgaagagagagcctttgtgttgaagttctctgcgattgaaatatataatgaagttatacgggatcttcttagtgcggaaaatacccctcttagactctgggatgatgcagagaagggcacctatgtagagaatcttacagaggttgtattaagggattggaaccatctcaagggacttatttctgtgtgtgaagctcaaaggaggacaggggagaccttcttaaacgaaaaaagttctagatcccatcagatacttcgattggtttgttctttactcaaatctatgaattactccctccgtcccaaaataagtgcagccatggttttctgcgcccaactttgaccgttcgtcttatttgaaaacttttttaaaaaaattaaaaacagaagtcacgagtaaagtactatntatgttttatcatctcataacaataaaaatgcttaatataaaaaaattcaaataagacg

SEQ ID NO: 29203 - DNA, 499 bp, Oryza sativa
  unsure (1)..(499): unsure at all n locations
  Clone ID: uC-osflM202133f09b1
tcgtggcttctttcccctcctctccggaccagggaagcagctaactgtctgcgcaagaaaggtggttcaagcacgatgggacggaaccatctttgcctggtcacttgcttgtggattctgtcatgcgcagttctgcttcatgcttctcctgatggattgctgagaattagcctgaataagaagagattggacaagaagaccttggacggtgcaaaattggcaagggaggaaagccatcgtctgagagccgacggtttaggtgatgacatagttcctttggacaactacctggacacgcagtactttggagagatcggcatcggcactccaccacagaacttcactgtgatattcgacactggaagctccaacttgtgggttccatcagtgaaatgttatttttcgatagcatgctacttacaccacaggtacaagtcaaaagggtcgagcagttacaaaaagaatggagaatcttgcagcatttnctatgggtctggat

SEQ ID NO: 29204 - DNA, 495 bp, Oryza sativa
  unsure (1)..(495): unsure at all n locations
  Clone ID: uC-osflM202133f10b1
tcgcagaagccagttacattcttcagggaggttattgctctttgtgatcatccatgcttgttggaaaaggaggaaaccaaatcattgttcagtgctgatgccatttatggagctacatcaatttttgcctggattcctggaacagcaactggagcatacagtcactgccagggcatctaaggtctgcgtgatgcaattgctgttggaatggcatcacgtgacggataccctgcaaatgcagacgacattttccttactgacggagcaagccctggagttcacatgatgatgcagctactgataaggaacgagaaagatggcattctctgcccaattcctcaatatcctttgtactcagcctccattgctcttcatggtggagctcttgtcccgtattatcttaatgaatcaacaggctggggtttggagatctctgaccttaagaagcaactcgaagattcnntcgttgaaggcattgatgttagggctttggta

SEQ ID NO: 29205 - DNA, 394 bp, Oryza sativa
  Clone ID: uC-osflM202133f11b1
tttcctctctctctctctctctctctctctctctctctctctctcctgagcgccaatcgatctcgtgatctagagctcgcttcctcgacttcgtgtcaaacaccgggaggagcggaggccgatcggagcctaagcggggctcgcgccaggagctggctaaccacaggcagggatacggcggcttgcggcacgcgaggcgtctgcgccttggtcggagctggcagagctggaccgtgcaagggatcagacggaggatcaggacgccatgttcctggtgcagaagctgtacgaggtgctcaactcctgggacactcgcagggcgcatgatctgctcgcgcatgacctcaagtggtggatccatatgcctccggatcaccagcccatgattcgcttt

SEQ ID NO: 29206 - DNA, 468 bp, Oryza sativa
  unsure (1)..(468): unsure at all n locations
  Clone ID: uC-osflM202133f12b1
aaggaatccgatcgagcgtttcccgagcagtagcgacagaaaatggctgtgacgatggacaacgtcatcaggttcatgttcatccttagcgtcgtctacggcgccgcatatgccaaaaagtctgaggccaaggtcgctagtgctcctggcctagcagcggcggtcaacacggtcttcgacatcaccgagctcggcgccgtcgctgacggcaagacagatagcaccaaggcggtccaggatgcatgggacgcggcgtgcgggttggccgggtcacagaaggtggtgatccccaagggagaattcatgaccgggcccctcaacttcagcgggccgtgcaagggctacgtcaccgtccagatcgatggcaccatgtttggctccaacgacatccccaagtacaacaagggcaactggatcgagatcctncacatcgacaacgtcctcgtcaacggcttccgcaccctcgac

SEQ ID NO: 29207 - DNA, 485 bp, Oryza sativa
  Clone ID: uC-osflM202133g01b1
gatcattccaacacacgcgtagagagagagagagagagagagagatagggggtgcgggaggtacagtgggagagagatttataggcgatttctccgcggtgaggagtgcggctcgcccgtgcggagatttcgtcgtgccggtgctgatctgtgtcgtgtttgagtttgcttttcagccgtgaggagctcctgctcaacgcatttttccactgtgtcgagttattcgccgttgaagattcatttggccagtttttttttgtttattttcatgttcatcactgcctcctgctctattttttcgccatgccggtgccgatctgttcgttgacatcgtttttgtcgcttaggagggtatgatgtaccacgttttccactgtgtccagctggtcatagacgtcagttctttttttggcgatttgctcatgtcgctctccattttttccttccaatagatatagcttggacatgcaccattaatgtttgat

SEQ ID NO: 29208 - DNA, 432 bp, Oryza sativa
  Clone ID: uC-osflM202133g02b1
cttgagctcaatcagcaacaacatgtatctccttcttgcttaggtaagtccttcgccctcccaagaagaagaagatgtcttgctgcggcggcaactgcggctgcggcagcggctgccagtgcggcggcagctgcggcggatgcaagatgttccctgatgtggaggccacagccaccaccaagaccttcgtcctagctgctccatgcaacaaggcgagctctggaggaatggagatggcggtggagagcggcgagaacagctgctgcggctgcaacacctgcaagtgtggcaccagctgccgcggctgctcctgctgctcctgcaactgaatctatcgtcgtcgtcgcccggctgcatgaggatttatcgtatggatgctgctactgtcgatcagagctgtgatcgaggccttaatttgcttgcattagtacc

SEQ ID NO: 29209 - DNA, 90 bp, Oryza sativa
  Clone ID: uC-osflM202133g03b1
ttttaatctaacaagccaacaaggcgggcaggagcttcctcttttgtgtccaatctgcatgatggcacaaatagtcctcctctgcgatgc

SEQ ID NO: 29210 - DNA, 154 bp, Oryza sativa
  Clone ID: uC-osflM202133g04b1
tctttatctaacaagcgaaccaggcgggcgatagcttccactttttcgtccaatctgcatcgtggcgcaaatagtcctcctatgcgttgaaaatgctatgaatgtaatgtctggatcaacaaccatcgcctcagcaatatgtttcagtaccaga

SEQ ID NO: 29211 - DNA, 124 bp, Oryza sativa
  Clone ID: uC-osflM202133g05b1
tatttatctaacaagcaaaccaggcgggcgggagcttcttcttttttttccaatctgcatcatggcgcaaataatcctcctatgcgatgaaaagtccaagaatgaaggtactgtatcaacaacc

SEQ ID NO: 29212 - DNA, 125 bp, Oryza sativa
  Clone ID: uC-osflM202133g06b1
tgtttatctaacaaggaaagaaggcgggaagtagcttccttttttttttccagcctgtatggtggcgcaaataggcctcctatgcgttggaaatgccatgtatgtaggttctggatcaacgagta

SEQ ID NO: 29213 - DNA, 351 bp, Oryza sativa
  Clone ID: uC-osflM202133g07b1
ttatattctaccgaggatactggggggggaatatctaacacggttaagcctattatgtatggttgcacatgtgatcatcagatgcagtggaattgacaggtatgatcacatgctaacatcaaatataaaatctgcaatcagcttctatacaagagcttgagatgtgagatgtggcacatatagagatgccatgactaactggaggaacatgctgaacgagatgacttgaaagaacaagggtgaaaaatggattgctccggtttgatcaagtgtgactgatgcctgcagacacatacaacgtgaatggcatactgctggaactactatctatgcttttgtaatgcaagccac

SEQ ID NO: 29214 - DNA, 447 bp, Oryza sativa
  Clone ID: uC-osflM202133g08b1
gtccgcctcggcggcgtggtcgccgccggggggccactgctcgccaccgcccagctctccgaccacttgtactgctacacctgccccagctgacgagaaggtcgagtacaccgtcatcgagcgcaagttcaaggaggaccctaccacctacgagctactgctccgcctcctctgacacgactgcttcgacaatggatgcgacgcgtctatcttgatcgacccgctgccgaaccagagcgcggagcaggaggcggagccgaacatctaggggaagggctacgacatcatcgactagagcacgacggaactggagacggagtgcccgcaggtggtgtcgagcgcggacatagtggcgctcaacacgcgcgacagcgtgcgcctcgacgggggccccaactccgacgtgcccaccggccgacgtgactcgatctgctacaaccgcgagga

SEQ ID NO: 29215 - DNA, 574 bp, Oryza sativa
  unsure (1)..(574): unsure at all n locations
  Clone ID: uC-osflM202133g09b1
tcgtgcgtcttcatcgttcagcacatatcaaagaaccagcacaaaggcaaatccttgcttagattcacatgatcagacattagctggtaaggtttcagctgagcctaccatgacccacccatcttatacgacagattgtatgagcccatcaatacaaactcagcttccttcaccatcaaatcctattttgagattgatgggcaagaacttgatggtgatgaacagtgaggagagtggacatcctcaggcacccagttcagattacatcatgagaggaaattacatggcacctggttgttttatgcctcaaaactaccaacatattggtgatcctgcatttatgaacacaacaccgtcaacagccaatcatcaaattcctctgtcaagtgtacaagctggcaacttttctgctcctacgttgcataatggttccatggtgcaatctgattatcattctccacaaaagccatacaggaacctncttccagtcatgcatcatccatcctacatgaatgaagaagtaatcatgatngatgactctnctgagcacagaagcgatccacaaatcagtatg

SEQ ID NO: 29216 - DNA, 418 bp, Oryza sativa
  Clone ID: uC-osflM202133g10b1
tcggtcctcgacctagtccttgcggattccggcgatgacgccgtggtgggggaggctggcagccgccgactgcgccggcagggcggtgcgttgttcaacgtgacggagatcctgggtcggataccggagttcgggctgatcagctacctgatcagcaagacgcacgtcgaccgtcacatcaacagccgcaacacggcaaccgcactggggccggacaactccggcatggactggctactgcgcctgattaccaggctggcgttggctgacctagtcgagcttctatacgcacacgactggctcgactactttgactccgcgaagatcgccgcgctgacggcggtgaagcctaccgtgtccaccaccctgatccagaccacggagaacgcgcgctgacgaccaggttccttgacatacc

SEQ ID NO: 29217 - DNA, 538 bp, Oryza sativa
  Clone ID: uC-osflM202133g11b1
tcgtcctcccatcaacttcttgcacacaccctccctttggctttcatctgcatctattcagttgcagattgagagccaaagacattatattgattctatcaggagggttgtgctagcgaattcttgttagcaacaaattgacatattgctcggcacatccccaccgagaataccaagatgacgttctctggtacacaggacaagtgcaatgcttgtgacaagaccgtgcatttcattgatctccttaccgcggacagtattccctaccacaagtcttgcttcagatgcagccactgcaaaggcacactttcgatgtgcagctattcgtccatggatggggttctttactgcaagacccattttgagcagctattcaaggaaacaggcaccttcaagaagaacttcccctcaggtacaaaggcaaacagtgaacaggctaagattcccagcaagctgtcctctgtgttctgtggaacccaggacaagtgtactgcctgcaagaagactgtgtatccattggagaagatgaccatggagg

SEQ ID NO: 29218 - DNA, 570 bp, Oryza sativa
  unsure (1)..(570): unsure at all n locations
  Clone ID: uC-osflM202133g12b1
tcggcggctcatcgccaactacccttctccgtcggagcgtgcgtcgtcgtcaccggcgatccccacccacctcctcactgcgccgcctcgccgtccgccccttctccaccttgccctcaacccgccacagatccctctccctcccttcctcgtccccggccttcctcgccgcaaacactgccccctcttctccgctttccttcctcctctccacctcagccgccggccacgatctcagccgtggtgagcctctttctgattcatctctctctctgtctctcccgtcggaactacttttgtctggatgttgcttgcgttcgttcgttcgttaaccctagcttctcttctagatctggaagaggctcttcttttaatttcagagccttaaccttaatacaagtaacagcttggggggttcaactgaacccncatgtcccaagttggatccgcccctgctcccatggtgacatcccatgaagatgctaagaaggcgtatgctgatttcagaagagggtcagaggaccatctatttgatctctttccctcaagtacgagctcagactaaagcag

SEQ ID NO: 29219 - DNA, 433 bp, Oryza sativa
  Clone ID: uC-osflM202133h01b1
tttattagaagaagaagactatcatcttgagcttattcttccatttgctccatcttgaaatcatcagtaaccatggctaggaagtgctctagctgtgggaacaatggccacaactccaggacttgcagtggccaaagagttcttgatcacagcatcagcagcagcaacagtggtagtactactgctgctgctgctactgcctgtggtggcttgaggttgtttggggtgcagctgcaggtaggaggaggctcatctcctctgaagaagtgcctcagcatggagtgcttggcatcaccagcatactatggagcttctgcctcgccgtcggtttcgtcgtcgtcatcttcgcttgtttcgattgaggaggacactgacagggtctccaatgggtacctctctgatgggctcatgggaagggttcaggagaggaaga

SEQ ID NO: 29220 - DNA, 471 bp, Oryza sativa
  Clone ID: uC-osflM202133h02b1
ttctgtgtgaagttactttctctagagagtggcttattttcatctaaagagcggcaagctttccagtcagaggttgttcggcttgctcacagtgaaatgaagcatcctgtgccccttgatgtctcatcacttattacatttgctggaaatcctgctccaccactagagttgtgtgatggagatcctggtacactatctgtagctgtttggagtgccttcccggatgacatcacacttgagtctctcagcttaagattgtcggcttcctctagtgcagatgaaggtcttaaggcgataaagagttcagatgctcgagttcttgtacccggtagaaatatcatcaccttcgacattcctcctcaaaagcctggatcctatgtgttgggtgctctgacgggccagattggcaagctatcattcagatcgcatggattttctcaagatggtccagtggacacttgatgattcatg

SEQ ID NO: 29221 - DNA, 368 bp, Oryza sativa
  Clone ID: uC-osflM202133h03b1
ttttactctgggaaggagcacactgtgccaaatggttattctttgatgcaggagaatactcttcacgacaatactcatgccctgagttttgctgttcaaggatagtgagactgataccccaaccatgggcccttcgatgtgaataagtatcagacgattagaaacgagggtagcaagaagaatgaggttgctagcaatgtggccaacaacacttctaaggctgacacaaaaaataattcgaagaaaaataagtgttgggatgacacacctgatgacaagaagaagctgaatttcacagactcaactgatgacagatgggatgaggtgctagaccaggtggatgccaagcagggggatagcatgatgga

SEQ ID NO: 29222 - DNA, 90 bp, Oryza sativa
  Clone ID: uC-osflM202133h04b1
tcttttctcgcaaggcacccttgcgtgcgggaggttcctttttggcttcgcataggcatcctggcgcaaatagtcctcctctgcgttgta

SEQ ID NO: 29223 - DNA, 75 bp, Oryza sativa
  Clone ID: uC-osflM202133h05b1
gttttatctaacaaggaaagcaggggggcgggagcttcctcttttgtttcgactatgcatggtggcgcaaatagg

SEQ ID NO: 29224 - DNA, 103 bp, Oryza sativa
  Clone ID: uC-osflM202133h06b1
tattaatctaacaagcaaacaaggggggcgggagcttccacttttttttccactctgcatcgtggcgcaaatagtcctcctatgcgatgaaaatgccaagtat

SEQ ID NO: 29225 - DNA, 258 bp, Oryza sativa
  Clone ID: uC-osflM202133h08b1
ttcgttataacgccatagatagatagctcgatagggtagcacgcactcatggcgtcgttttacacttgaggctctgtcgccgtggaagatgtggtggtcctagactgtacttctctgagagatgcaggcataaacagccaaggggcccgcctagtggataaataacttccgaccgtcgacatccaagcgaaatccagactccccgaagtgcagccggtggtaccccgcctaccgttgaatctagctgtgcccggagtg

SEQ ID NO: 29226 - DNA, 442 bp, Oryza sativa
  Clone ID: uC-osflM202133h09b1
tcgttcgagctcaaaagacacacattccaaaagcatctgtggccatctcctcctagtcctaggctcgcgacaatggcggcgtccaccatggcactctcctccccttgccgcctcgccggccaggcggtcgccaatgccaaggtgctcggcgagggccgcgtcacgatgcgcaagtcggcggccaagcccaagcccgccgcggcgtcggggagcccgtggtacggcgccgaccgcgtgctctacctcggcccgctctccggctgagccgccgtcctacctcaccggcgagttccccggcgactacagctgggacaccgccgggctgtcggccgacccggagacgttcgccaagaaccgggagctggaggtgatccactgccggtgggccatgctgggcgcgctcggctgcgtcttcccggagctcctcgcccgcaacggcgtg

SEQ ID NO: 29227 - DNA, 312 bp, Oryza sativa
  Clone ID: uC-osflM202133h10b1
tgcgagcgcaagagacacacagcccagaagcatcacgcggcatctgcttctagtcctagactcgagacaatggcgccgtccaccatggcactctgctcccctgccgccctgcccggacaggcggcctccaatgccaaggtggccggagagggctcgctaacaatgcgcacgccggcggccaaacccaagaccccccctacgtggaggagcccgttccaccgtgccgaccgcctgctctacctgtgcccgcactgcggctgagccggcggctacctcatcccacgagataccctgcgactacggctgggacac

SEQ ID NO: 29228 - DNA, 460 bp, Oryza sativa
  Clone ID: uC-osflM202133h11b1
tctttcgcatgccggcgcaccactgcacggagcgcgcacgcgagcgatgggtctgtcgagctatgcaagaactagccgccgcaccggggagcacgcccacgacctgcgtcttgttcggactaaaggcctaacaatgctacctagccggaatacgctgacttaacatggaaaacgccgaccgcagaaccatgacgcctccctcgacggagtagccgcgccaaacgtgatcagcaaccgtgtcaggtgtggtcggcatgttgctcacgccattggccgcggagaacacgggatatcctcgactggccggtggagacctctacctcacagggcctatattgaggcgctgccccatactcctcacgcgcagctgtcttcaagtgcggacgtgccatcctacacctcatcgatgtttgctgcgttaacccggagaaggccatctccgtagcctcttgctgtcatg

SEQ ID NO: 29229 - DNA, 537 bp, Oryza sativa
  Clone ID: uC-osflM202133h12b1
tcgtgcgcatgccggcggaccaaggcaccgatcgcgcacgccagcgatggctctctcgagctatgcgagaactaacagcagcaccggcgagcacgcgcaccacgtgcatcgtgctcgtactacaggagcaacaatgatacctagcgggaataggctgatttactatgcaataagcggacagcggaaccatgacgcatccctccacgtactgggggctccaccttgaccagcaaccggatcaggctgtgggcggcatgttgctatggagatggccgtggataacacgggatatcctcgtctggccggtggcgacctctacctcacagcgccttcatcggtgcgcgccgtcatactcctcacgcgcgctgtcttcaagtccggacgtgccatcctacacctcgtcgaggtttgctgggttaacccggagaaggccatctccgtgccgtcttgctgtcatgccccgaactagtaccgaccggaactagcccgtgacgcttcatataacctgttgatcgataccagtcccagaaaacagtg

SEQ ID NO: 29230 - DNA, 131 bp, Oryza sativa
  Clone ID: uC-osflM202139a02b1
tctatgtgcatcctaacgtcgtcgtcgtgccacagtcaccctgcattagcagtatcgttttccaacaacatgaagaagaggtgcccttgttggtttttattgtgttttattcgttttttttttttaatttc

SEQ ID NO: 29231 - DNA, 169 bp, Oryza sativa
  Clone ID: uC-osflM202139a04b1
gtcttgatcgccaggcgccatggacgcgtcgatcggcgatccgaggctgacgtcggtggaggcggcgttcgagaagaacccgctgccgggcttcagctggctggtgacgccgcgggccatggccgtcgcggtgctactcgggatcgtgtcctgcttcgtcggcaggagg

SEQ ID NO: 29232 - DNA, 340 bp, Oryza sativa
  Clone ID: uC-osflM202139a06b1
gttgcaactaactccaccaccaccaccaccacctcccccaccaccggcggcggcggcggcggcggcgacgaggaggccccattgcgctcgcggaggcgtggtgttgacgggggaggcgctggatctcggatggcatcggccaagtcgtcgcggtcgaggccggccgggcattccggggtgttcccggtgagcggcgccgtggggggaggaggaggacactgattctatcatgaccggggcattccaagaagttgctggaagcaaggacactgtggcgcagagtgaatgacacattggattcaccccttctgggctttaccgtagtgagcatggcatagat

SEQ ID NO: 29233 - DNA, 62 bp, Oryza sativa
  Clone ID: uC-osflM202139a09b1
tgcaggagccatcgggcttttccaggttcagggcgacttttacttcctatggacgctgttgc

SEQ ID NO: 29234 - DNA, 54 bp, Oryza sativa
  Clone ID: uC-osflM202139a10b1
tccggggtgatgggcgtttatctctttttctgggacggctgttcaccgcgcgcc

SEQ ID NO: 29235 - DNA, 406 bp, Oryza sativa
  Clone ID: uC-osflM202139a12b1
cgcgtccgtctccatccaataatccccatgcttgcgcaccactcccggctcacatcccgcgcgaggaggaggtggaggtggagggtgtgcttgatccgcgctcccgctctggctggtggtggtggtgtgtggtccttcttttttccgtctgtttttttttgttgcctcctattttttttttttcttgttttgtttttctctctttcttttcttctctctatctcacttttattttcctttcttctttcttttcttcttttttcttcctctttctttctcttcttttttctttcctttcctcccttttttattctttttcttctttttttattttttctcttttttctttttattttctctttttctttgcttctttttttctttttttccttccctcttatctttt

SEQ ID NO: 29236 - DNA, 83 bp, Oryza sativa
  Clone ID: uC-osflM202139b03b1
catactttttagcttctcagccttttgcctctctggctactttaattcttggtcgcctttattacacatctaaattataacca

SEQ ID NO: 29237 - DNA, 64 bp, Oryza sativa
  Clone ID: uC-osflM202139b06b1
ttttgctctcacagctcactgcatcaatggccgcggccaccatggcgctctcctccccggtgat

SEQ ID NO: 29238 - DNA, 183 bp, Oryza sativa
  Clone ID: uC-osflM202139b09b1
tctgtaagagctgtccctgccaaaggcaaataataccagatgaacacggcagcctctcgatcttgacaacttggggcggaattatacagtagtataataataattattataattatattttaatcattttaaattatatatattataatcatatttatttataaattatatatatcaatttta

SEQ ID NO: 29239 - DNA, 486 bp, Oryza sativa
  Clone ID: uC-osflM202139b10b1
gatcggcatcggttgccggctagcggtgagcggcgaggatggggcggaggaaggtgcagctgaagcggattgagaacatgatcaacaggcaggtgacgttcttcaagaggaggaatggattgctgaagaaggcgcacgagatctccgtcctctgcgacgccgaggtcgccgccatcgtcttctcccccaagggcaagctctacgagtacgccactgactccaggatggacaaaatccttgaacgttatgagcgctattcatatgctgaaaaggctcttatttcagctgaatccgagagtgaggtaaaacacagtaggttgtatgatatataacttttacatgaagggaatattattgttccttttctattgcattagcatttcaatcatatcatttccttgtggccttttaaatcacatgttaacaaagcagtttttctgaattctatcgttctacttgccaaaactagatgttggtaacccttct

SEQ ID NO: 29240 - DNA, 519 bp, Oryza sativa
  Clone ID: uC-osflM202139b11b1
ttctcgaacagatctcgatctcgatctcgatctccgcacgcaccaaggcgaagccaattccactaccaccgctcttccttcttctcactccttctcgcgactgcggcgagggtgagtctcctgtcgtgagaatttcggtctaccggcggcggcggcggcgttgggtgttcttcgcgtcgtcagacgtcgggatctgaattactagacttccaataagaaggaaacaccttagggaatgcagaaagatgtgcttgcatgctagagagctaccttgtgagggaattggcagggtagcaagccatatttctccttccacaactcttcatgacattggaacacaagagtatatacagcgcttgctccatgtgctctcgcactatggggttcgacgtggcaactcaaccatcttcttagatcaccatcttgggggagacggttgaagtcacctaataattttaggctcctggttaccaactttgagctttgggattactgcttctttggcgggtgggaggtcat

SEQ ID NO: 29241 - DNA, 136 bp, Oryza sativa
  Clone ID: uC-osflM202139c01b1
ttcggcgcaaatcacaaccttagtattatttcctgctctctctacccctccctcccttccctcttcgaccctcctaccctaccccccgccgcgatcgagacggcggggaaaccaacaccggaatccgaggggggat

SEQ ID NO: 29242 - DNA, 88 bp, Oryza sativa
  Clone ID: uC-osflM202139c04b1
gctcagtggaagagttgccacctcgtggtccctctacaaatcctaaagttagaatagtttttgccgtgattggagtgctcaatcttgc

SEQ ID NO: 29243 - DNA, 135 bp, Oryza sativa
  unsure (1)..(135): unsure at all n locations
  Clone ID: uC-osflM202139c05b1
ncggtcngcaaaaaccaagacatacacacagaatcaagtaataacaaaggtttcctagcctcaaaggatacatatatatagtttgcctacaatacaatggagcctgtcaatgattgccaggaaggcatttcatca

SEQ ID NO: 29244 - DNA, 564 bp, Oryza sativa
  Clone ID: uC-osflM202139c06b1
tcccgggtcgtccctcgcgtccggtatgaaaaaaaaatggagcatatgatacgtggtggaatgctaagaggttgtagcgagtctctctccttcactttttctttttctcttactcctctctttctcctttttccttctttttcccctcttctttttttcctctccccttttcctttcccttcttttctccttcttttcctttcttctttcctcttccttcttcctttttttctcctctctcctcttttttctttacttcacctctcttcttccttccctttctccttctttcttttctttcctctcttcttctttcttttctccttttctttctttcttctctctttctttccctttttctttcctctctccccttttttctctttcttttcatctcctttcttcctcctctttctttctcttctttctctctccccctctcccctctttcttcatcttatcttatcttcttttctctttctcttcctcttctctctttcttttcctttctctcttcctttttttttctcttctttctctcttttcttcttctccttctccttc

SEQ ID NO: 29245 - DNA, 390 bp, Oryza sativa
  Clone ID: uC-osflM202139c10b1
ttacatactctactactactagccagtaagctagctaactaactacgtggctatggcccccaccgtgatggcctcctcggccacctccgtggctccattccaagggctcaagtgcaccgtcggcctgcccgtcagccgccgctccaccaactcgggcttcggcaacgtcagcaatggcggaaggaccaagtgcatgcaggtgtggccaattgagggcatcaagaagttcgagaccctatcgtacctgccaccactcaccgtggaggatcttttgaagcagatcgagtacctgcttcgatccaagtgggtgccttgtctcgagttcagcacggttgtgttcgtctaccgtgagaaccacaggtcttccggattctacgatggcaggtattg

SEQ ID NO: 29246 - DNA, 296 bp, Oryza sativa
  Clone ID: uC-osflM202139c11b1
ttagaagtggaaattagtataccgccaagggttggaaggtggaagcaagtatgccataaagaataggactacctggtcttgatcaagaggcattgcttacctgggtaaatttcactctgccccctgcagtttagcatggttttgctttgccactgtgctgtccattttcattgcactttgctccattgtggtattgacattctgcaagaacgagtcccagtatcaagtcactgttacggtgttgctggttccatttgttaacataacacttgacggtcattcttggtcatgtttgt

SEQ ID NO: 29247 - DNA, 53 bp, Oryza sativa
  Clone ID: uC-osflM202139d02b1
tccgttagatcagtgtctacaagacagtgaagtcgggggggatttgaaattta

SEQ ID NO: 29248 - DNA, 131 bp, Oryza sativa
  Clone ID: uC-osflM202139d03b1
tgtcgccccaaccccaggacaagcttctcggaggactactctctgccgcattcgaagaatcctcatgtcagagcagatacaaatcatctctctaccggaagaagttttcgtctcctctttcccctttacct

SEQ ID NO: 29249 - DNA, 248 bp, Oryza sativa
  Clone ID: uC-osflM202139d05b1
gtcaaactgagctgtgagaagtaggtaggctgcctttcagatttcagattcttttccacatcttcccctttctccccatcgcttttctgcatttgtacctgtcgctgctgattcttgaaatccagaatttatttggatgaactgagaggtgtgaatgacagtgacagtggggagaaagattcttacatcttttttctgtaaatcccccctgtccaggatttagaaacctagtggaatttttttccatt

SEQ ID NO: 29250 - DNA, 65 bp, Oryza sativa
  Clone ID: uC-osflM202139e01b1
attgtaccctccataagccttctcccccccatggagacattcttaaagctcctttcccccttttt

SEQ ID NO: 29251 - DNA, 62 bp, Oryza sativa
  Clone ID: uC-osflM202139e04b1
ttggtatgttaaccggaacctccaacattctcccgaaagcagttagagcatatgaaactgaa

SEQ ID NO: 29252 - DNA, 464 bp, Oryza sativa
  Clone ID: uC-osflM202139e06b1
cttcgttcgggtcagtactacacccctcaaaacaagaaatcctctcccctcccacccccagaaaaatctgatttaattggtttctttttttattactggagaattgttttggctatggggctacactactacggcctacgcgctaccaatgctggatacaccgtcaatttcctaaatttggtccccgtcgttacctttcatcattgcagcgattcttccgattggagaagctgatgctgaagacgcggccttgcatgatattggtgattggcacggtgatctgtgtttgtatctcttttgtggattgctattttacatttttcttctttacatacgttatttctctttttttttatgtttttctcttctcatttttgttctctaccttttctctcttacttttctaatttccatcctttttctttcttcacctcacatcttctctcttcttatttttttttttt

SEQ ID NO: 29253 - DNA, 404 bp, Oryza sativa
  Clone ID: uC-osflM202139e07b1
tttgagcacgagcggatggaggcgcgctggttccagatctaagcgccatccctccatcccctgcgccggcgggagcaacggcacgccgcacgcgccgatcgaccggacccatccctccatcccctgcactggttccagaggggaaaatccctatgtgtgcgccaacaaatcgtagagaaaggaaagaaaacaaatcagggagaaaggaaagagatgcctcggtgcgacagaaaggaaagagatggctcgatctgatcccggcgaaaatcagagaccccttctccctcgatacgcgaaattaccccccccccccccccctgtacgcgcgtgggaccccgcttccaattcaaccttagccgtgggagatcgacgtggacttgcttgttgctcttgaacacttttac

SEQ ID NO: 29254 - DNA, 228 bp, Oryza sativa
  Clone ID: uC-osflM202139e09b1
tcggcttctcctccccctctttaccttttcctcctcggttcggttccgtgggtcgactagggattagcgggacgagaagtcacacgccaagagaacaccaccatgcagacctgcgtcgtcgcatgcacctcgatcacatctaccggtggatatgggacatatattctagcaacgggaaagaaagcagctgtaggggatgacaatgcacaaactaacattgaggagcca

SEQ ID NO: 29255 - DNA, 116 bp, Oryza sativa
  Clone ID: uC-osflM202139e11b1
tatctatcgaatacaattacgttccgcccctgggagagataaggccgtgatgcccatttaaccctcacaaattccatcatcacttcttttcataccgaggcaatagatgttatttt

SEQ ID NO: 29256 - DNA, 52 bp, Oryza sativa
  Clone ID: uC-osflM202139e12b1
taagtgcaaacctaacacattagcaaaaaaggggaccattttaacgagaaag

SEQ ID NO: 29257 - DNA, 442 bp, Oryza sativa
  Clone ID: uC-osflM202139f02b1
tgctaccaaagaacaagatgaagaagacaggcatgatgcagttcttggtgatgcacatgaagaagatcacaaagaagctgaacaagattatttgcctgtctctagttttctgatgaacctaatattgggaaaagacaatgatgatccaaagaaagattcagaaaccgaggttgaaaaggagcaagaagaaacaacgaaggatggaagttgtttgatcgcttcttaacaagaagaaaattttggtggcatttcctatagaaaaattggtggatgaaaaactcacctttgaacaagaaaaagataaggttgtaggcttctgatgaaacatatgatccagtttatgaacagagttatgatgtctcgatggtattccaaaaatcattgggaactgttgtagagctcaataggaacacctgggttttggaagccccgttatccacga

SEQ ID NO: 29258 - DNA, 265 bp, Oryza sativa
  Clone ID: uC-osflM202139f03b1
tgtgagtcttgttgcgaagtgatcatgaagccgcgtccgtctccggcggcggcgtcttccggcggcgttccggcgaggctccggccgcacctcacccggctcaccgtgttcctgatcgtcttctccgccgggtactcggttggcatcatgtcgtcgtccatccggccgcctgcgagcaagccgtcgcagacggtcatacggtcgcgcgccgtgcacctctccggcaccgcctcctccacggatgtcccggcgagcaacggcacgt

SEQ ID NO: 29259 - DNA, 74 bp, Oryza sativa
  Clone ID: uC-osflM202139f05b1
ctactagggctctactacctacgaggtgaagggggagttttataggcgtcagtgcagtcgttgacgacctagat

SEQ ID NO: 29260 - DNA, 389 bp, Oryza sativa
  Clone ID: uC-osflM202139f06b1
tttgtctattttatcgagccacaacatccagcaaaattcttttggagggcacaatactatggagaacacgatgactttaaacgttttgcatacttcagccgtgcagcactggaattactttaccaatcgcagaagaaaattgacatcatccattgccatgactggcagactgcatttgtggcacctctttattgggaagcatatgcaaatctgggcttcaactcagctagaatttgcttcacctgccataattttgaatatcaaggagctgctcctgctcaagatttagcatgctgtggcctttgtgttcagctacttgatagggaagacaggatgcgggacaattcacatggcagaattaaatgttgtcaagggtgcaattgtgtatt

SEQ ID NO: 29261 - DNA, 516 bp, Oryza sativa
  Clone ID: uC-osflM202139f07b1
tgttgtgctggcgcggtggcggaggtggtgggacctggttctggtggtgggtgccgcggtggtgaggatgaggatggtggcggcggtgatcgaggacgttgagcacgcgctgttgaccccgacggttctgctgcggggcctgtctgacgccatggtcaccgacttggtttctggcctgcgcggcgtccgccacgccatggttaagatgctcatcacctactttgacaaccttcctttcgtatatgtacaggtgttgtttttatgtattgaatctttttgttaccaactctttttgtccttacatttctatctttctgctttgattatttcttcctttcttctactctttctagtttatcttctttttatcttttctttttacttttgcttcttcctttactattggttttctccttttatcttcttcttttttctttactgctctttctctattttttttttttttccctcttttttcttattctttcttttcttctgtcatttcttacttctttt

SEQ ID NO: 29262 - DNA, 374 bp, Oryza sativa
  Clone ID: uC-osflM202139f10b1
ttaaaaaaaggaaaaaaaaacaaaacacaccaagccaaataaaagcgacaatgggatcgctcaccaccaacatcgtcctcgccgtcgccgtggtggcagcgctggtcggcggcgggtcgtgcggcccgcccaaggtgccacccggcccgaacatcacgaccaactacaacgccccgtggcttcccgccagggccacctggtacggccagccctacggcttcggctccaccgacaatggtggcgcgtgcgggatcaagaacgtcaacctgcctccctacaacggcatgatctcctgcggcaacgttccaatctttaaggacggcaggggatgcggctcatgctacgaggtgaagtgtgagcagccggcggcgtgc

SEQ ID NO: 29263 - DNA, 113 bp, Oryza sativa
  Clone ID: uC-osflM202139g04b1
tcgtatctatgttccttcgatcccgaccacttgctctggggatgttttcattccacatcacgctttccccggacgacgacgacgaggagcagttccggctggaggaaggagga

SEQ ID NO: 29264 - DNA, 411 bp, Oryza sativa
  Clone ID: uC-osflM202139g06b1
atgaaatcaagcaagcatgaagagacgagacgagggtgagaaggagaagagggggccggccgcgggcgtcgtcgtgttcctccccccctctctctcctctcctctcctctcgatctccatccttccttccatccattcctccccgcacccttcgcattgctctcgtcgtctcgattcggtcgaggatctccaggaaaagaggaggaagcgatatgggttgcttttcatgctgcggagcggatgatgtcggcaagaagaagaagcgcgacgatccttacgtcccgatccctgatccaggtggttactatggacgtagcaagcccgggcccccagccccttcgcgttctccccccaccagccgaaaatctgtcaattgcagtaccgggtaattccccctgatgaaataaaggg

SEQ ID NO: 29265 - DNA, 137 bp, Oryza sativa
  Clone ID: uC-osflM202139g10b1
cgcccgacaaggatacgtaggggcggcagtgggacgtatactcaccgggggtttttaaaaggaggtccccaatttttcccctcatttatattaattaaaaaatcattttaaaataaattataatattaataatatta

SEQ ID NO: 29266 - DNA, 420 bp, Oryza sativa
  Clone ID: uC-osflM202139g11b1
ggccaccatggctccaaggttgctcatcgtcgtcgtctccgtcctcttcaccgccggcataatcgcctccgccgccgccgcgcgcgacctcaccgtcgacccggccggccaggccccgccggcctacgacttcggcatcccggcaggcttcttcgtccccggcaccaacaacccgtacaacggcgatcctgcagcgtgggcagctgggtacggcagcgccgccgccggcgacgtcggcgggttcgggaatggtggggcggaggcgccgtcgatggtttgctccgacaaggggccatgcaacggcaagaagctgacctgcccgaagaagtgcttcgtctccttcagccgctccggcaagggctacgccgccggcggtggcggcggcggctgctccttcgactgctcgaccaagtgcgaagc

SEQ ID NO: 29267 - DNA, 341 bp, Oryza sativa
  Clone ID: uC-osflM202139g12b1
taacaactacattttagatcagagcgagtaaaaatttatgcccgttccgatttgtatggaatttataggagttttatatgattccaacccattagaaaagaatattctatagatcactttgaaacataagattacatattattttctatttcgaaacttctgatatcaagtgacaattctacatagagattttggagtagatttttcatgaggttggcatacttggggaaatttttgccagctacaacttttcctagaattcgaaactcccttagataatttagttctttattctaatttcaaagaagttgtagttgttaaattaataaaatatattttaa

SEQ ID NO: 29268 - DNA, 224 bp, Oryza sativa
  Clone ID: uC-osflM202139h02b1
gttttaggcgaggttgacccttcgagccactgcggggccgagtgtagctacaatgctgatctgacaccgcatagcttggcatcagaaataggttgacaacgattcgaccaccctcttcaacataagatagtgcggatacgcagaccggcccgacctctacgacaaccgccgcgagatgtgcacagggacccttgtgacagctagcgctcacataataacgaccg

SEQ ID NO: 29269 - DNA, 407 bp, Oryza sativa
  Clone ID: uC-osflM202139h04b1
cttgtgtttaggagcatgagtgtttggtagaaggacctttgtacaacttaaagcagagtatggtgcaatttcaaaagccaaaaaagatctacaatgatcgacgactcttcctgggtggcggtcaaggtgttatgcaaggagctagttttggtgctgcaggcacaaacccagtggcagataagagaagtgggcattccttggttccattgggccaaccaatgggggctaataaacctggggtgcacccatcgggctatccttaacctggatggcctttccctccattggctggggctaattctaaaccctatgctattccaacccggggttcattgcacggaccgattggggctgttccacctgtgcctcaacctggaaacagaaactttggacctcgtggaaatact

SEQ ID NO: 29270 - DNA, 167 bp, Oryza sativa
  Clone ID: uC-osflM202139h05b1
tattcatttaacatggagcctcttggatccaaggaggtttcttctattgatctgactgaaactatggcatatctagttaggcaatctggaccctttttggatctacttgaggtcaggcgtgacctacgttaccaccttgagtgtacatatgttaatcaacctatttt

SEQ ID NO: 29271 - DNA, 323 bp, Oryza sativa
  Clone ID: uC-osflM202139h06b1
ttctgctcgtgctgtcgcagccgtcgtcgtcgctggggcgcgcggtgtccgtcaagacggtggcgctgttcggcaggtccaagaccaaggccgcgcccgcaagaaaggctgagccgaagccaaagttcaagaccgaggacggcatcttcggcacgtccggtgggatcggtttcaccaaggagaacgagctgttcgtcgggcgtgtcgccatgctcgggtttgccgcgtcgatcctgggtgaggccatcaccggtaagggaatcctggcgcagctgaacctggagacggggatcccgatctacgaggcggagcccctccttctt

SEQ ID NO: 29272 - DNA, 337 bp, Oryza sativa
  Clone ID: uC-osflM202139h08b1
ctgggctcggcctcgtcgacgacgtgttcggtgaccccgcacggctggcatcgctccccgggccagccgccatcgggcacgtgaggtactccaccgccggcgccgccgcgtcgctgcggaacgtgcagccgttcctggccgggtacaggttcgggcaggtcgccgtcgcgcacaacggctgccttgttaactaccaggcgctgcggaacaagctggtggctaggggtttcatctttaacacctcgttggacgaaggggatatggattaaacctgtccagagagtttaggtctaggtcaatgctcgggaaaaaaagcagaagtctagtgcttcatttg

SEQ ID NO: 29273 - DNA, 463 bp, Oryza sativa
  unsure (1)..(463): unsure at all n locations
  Clone ID: uC-osflM202139h10b1
gtggaaggtgaggtcgccgggcgcccaccattgccgtcgcgtggcgaggcatgaagatcctagtggcggtgaagcgggtggtggactacgccgtcaaggtgcgggtgaggcccgaccggacgggcgtcgagacggcgagcgtcaagatgtccatgaacccattctgcgagatcgccgtcgaggaggcgctccgcctccgcgagtccggcgccgccaccgaggtcgtcgccgccaccgttggcccctcccagtccgtcgacaccctccgcaccgtgctcgccatgggcgccgaccgcgccgtccacgctntaaangatctcgaccccttccgtccccttcttcccttngtcgtcgtcaagatcctccgcgccccttggcttcaggagaaccccgggctttgcattcttggtaagcaggcaattgatgatgatttgaaccaaacaggacaaatgccagctgggtt

SEQ ID NO: 29274 - DNA, 330 bp, Oryza sativa
  Clone ID: uC-osflM202139h12b1
tttcgtcttcgtactcgcctctctccgcgccctcctccgtcgccgctcgccgccgttcgtctccgccgccaccgccgccgtcatgagggagtgcatctcgatccacatcgggcaggccggtatccaggtcgggaacgcgtgctgggagctctattgcctcgagcatggcatccagcctgatggacagatgcccggtgacaagaccgttgggggaggtgatgatgcttttaacaccttctttagtgagactggtgctgggaagcatgttccccgtgctgtctttctcgatcttgagcctaccgtgatcgatgaggtgaggactggtgacta

SEQ ID NO: 29275 - DNA, 51 bp, Oryza sativa
  Clone ID: uC-osflM202140a01b1
ttcgtaccctgaatgtcactgaatcgactctggccgtatgaaatgctgagg

SEQ ID NO: 29276 - DNA, 178 bp, Oryza sativa
  Clone ID: uC-osflM202140a02b1
aaatccccccacctcgagctctagggtttcgcggatcgaggggcgccgcggctagggtttgggtggggggtgcctgcacgatggacgctccaaagactaaacatcgaaaattaatgtaaaaaacaaacatatacaataaattataaaataaaaataaaacaatataatccttttaaaa

SEQ ID NO: 29277 - DNA, 133 bp, Oryza sativa
  Clone ID: uC-osflM202140a04b1
tttattaacataataaaacggggcagaatgacgcgagttcgtgaaggggcagacagggctctggagctaatcaccagtttcctctgagcagttacattgtcggacatagtgtacagcgcatgcaacagtgagc

SEQ ID NO: 29278 - DNA, 478 bp, Oryza sativa
  unsure (1)..(478): unsure at all n locations
  Clone ID: uC-osflM202140a05b1
tagggttccgcgcaatcggggcaggagtcgtgctgtccgccgtcggcgccgtgttcatcaatggcggacttgggcccaagacgataccggagaacaccaagactggtctcaagttacccatatacgtcaagaacatccacaaaggcaagcatggaagcgattcaggcgtgtatgatgcgaatggaaggtttgtcccagaaaagttcgaggaaatattcaagaagcatgctcacaccaggcctgatgccctaacagacaaagagctgaaggagttgctccaatcaaacagggagcctaaagatttcaaaggatggnttgggtggcttcacagagtggaaagtattgtactacctctgcaaagacaaggatggatttcttcacaaggatactgtatgggcagtctatgatggaagcctatttgcaaagatggagcaagagaagcagtctgctaagaagaaatgattagaccatactgggt

SEQ ID NO: 29279 - DNA, 330 bp, Oryza sativa
  Clone ID: uC-osflM202140a06b1
ttttctctcacagctcactgcatcaatggccgcggccaccatggcgctctcctccccggtgatggcccgcgcggcgccgtcgacctcctccgcgctcttcggcgaggcgcggatcaccatgcgcaagaccgacgcgaagcccaagccggcggcgacgccagtgaggccgggatactgcgactggcaggttctttacctagaacctctctgcaataagcacgacaggttctcacaccagggattgatgccctaacatacaaagagctaaaagagttgctctaatttaacagggagcctaaagatttcaacggatggttgggttgtgctttc

SEQ ID NO: 29280 - DNA, 106 bp, Oryza sativa
  Clone ID: uC-osflM202140a07b1
tcgttgatacttcttcagtgaatctgcctagtagtactagataagatatgcttccttttcagcaagtttaggtatctaattcttgatgttaggtagcatcatgtat

SEQ ID NO: 29281 - DNA, 170 bp, Oryza sativa
  Clone ID: uC-osflM202140a08b1
ttgtatgacttctcctccccctatttaccttttcctactagattagatttcgtggtttttttaaaagataaagaataaaaatattgatataataatacaatataaattaataaaataattttatataaattatatatttatattttacaatatataatttttcatttata

SEQ ID NO: 29282 - DNA, 61 bp, Oryza sativa
  Clone ID: uC-osflM202140a09b1
acctgaagaaatccattcctctctcacgcgcgggcgtgttattttaattcggggacgccta

SEQ ID NO: 29283 - DNA, 73 bp, Oryza sativa
  Clone ID: uC-osflM202140a10b1
ttcttacgattgctgtggttatacttgccagggcggatttaaaacatatacatccccctttcctcacttaaaa

SEQ ID NO: 29284 - DNA, 83 bp, Oryza sativa
  Clone ID: uC-osflM202140a12b1
tttgtatcagcaaagcctggccagaagtgggggagggactatgaaactcagtcagccggagcaaccaatggttacccttgaaa

SEQ ID NO: 29285 - DNA, 70 bp, Oryza sativa
  Clone ID: uC-osflM202140b02b1
ttagtggcgaccgctcgccgatcctgatcaggcacgctttatccgagatcctcaccagctcctgcacgtt

SEQ ID NO: 29286 - DNA, 105 bp, Oryza sativa
  Clone ID: uC-osflM202140b03b1
tgtataataattttagttttttttttttttggggttagatatatttccaatccccaaccttccaataatccgatctttttcagttctgattggatcaaggctgtg

SEQ ID NO: 29287 - DNA, 128 bp, Oryza sativa
  Clone ID: uC-osflM202140b04b1
atcgtacacgcgtacgatccgggctaatccggggcaaatctgaaatgcacaagcaggatttcctatgcccctcaattattatataccgagtggcagggtgctagacgtactgtttctaaaggaggttc

SEQ ID NO: 29288 - DNA, 382 bp, Oryza sativa
  Clone ID: uC-osflM202140b05b1
ttatgatcttgatgaatgatgaatcaaactccgtttgtaggttctcatttcccccttcaaaatccacataatactcctggctccccccttgaaatcttaccatctttttttggctattctgagggcaaacataagtgcctctgcagcgggatatagctagtatagcgccaatgagtttggaggttttctaatggcataaaacgttggatggcagtagcagactaacagggaaatggaggcacaggcaattccattcctgttctgtcagattcttttcccccttaattgatgttgagaaccaagatttttttgctctgtattttctctttcctaataaagaaggggacataacctaattgctcttgtttgatctcccccaaaa

SEQ ID NO: 29289 - DNA, 250 bp, Oryza sativa
  Clone ID: uC-osflM202140b06b1
ttcttccttcattttttgtctgttccaatctaccaccatacttactgcactgcgacctcaccacactgaactcaagtcagtaatactgccattgtcaagagggagctctagctttcctttcccaaaggcagaggcagcagcgtggcgtgcattcacttccctccctgtccagtactccagtccataacactgttggctgggtgcctgcctgaatgaattcagtaggagtagctcaataggttgacacaca

SEQ ID NO: 29290 - DNA, 554 bp, Oryza sativa
  Clone ID: uC-osflM202140b08b1
tcgtaaagagtgcgtgcgagtggcaatggcgatgccgttggttggtatcttctctatttataataactttttttatatatttaatttaattttttatcttttttatttttttttttaattttacattattttttttttttttttatatttttttttttttttttttatttttttttatttttttttttaatttatatttttttttttttttatatattttttttctattttatttttattatattatttattttttttaattatattttataattatttttattttttcatttctatatattatcataaatttttatttttatatattctttttttatattttattttttttatttcttattattttttattctttttttatttactatttaaaatttttattttttatttatctttactttattacatttatttataattttttttatataatatattattatttttttaatatttatttaattaatctattcttattattattctttatcttttatttaatttatattatttattatttttattaatttatt

SEQ ID NO: 29291 - DNA, 395 bp, Oryza sativa
  Clone ID: uC-osflM202140b10b1
ttcttgccccatgaaactgtgctctcagattggtctctgtgcatttgatggtactcgttctgtcagaaacaatatagagtctgctgttgataaagaaaaggtgggcttagatctttactgcacttgttgcgagacggctgttgattgaatactagaatttattttcttcatttccaaactagggagcttattttgtattattttttaaaagttctttattttttttattaatttatttattttatatataattcttattattattttactttttattataattttctctttatctttttctattttttgtatcatttattattttttatttttttctctctaatatgttatttcatactaatttatttttattttttaatttctttttttttaat

SEQ ID NO: 29292 - DNA, 169 bp, Oryza sativa
  Clone ID: uC-osflM202140b11b1
tcgttttgaaccaagcgaccaggggattaagctgggtgtgatcgatcgaatttccgccttcaaaatccacataatacttctggctccccccctgaaatcatactatctttttttggctaaatctgagggcaaaacataagagactatgcaattgtatatagctagttta

SEQ ID NO: 29293 - DNA, 384 bp, Oryza sativa
  Clone ID: uC-osflM202140b12b1
gtcgtaaacacaggagttggggggaagaagatacgggaatagagacggagagagagagagagaggggggtactcaaagcagcttatactagctattgctagccatggcgaggagctctccttgcctcgccgtcgctgtgctcctccttggagtggtggtggcggcgattggagcctctgctgatgaagaatctgccagcggttggggactagggcatggcgcccgttttctcagcaggcgaggcctctctgcgtatgagaagtctgtctgagccagaggcaaagcctgggtcgcagcaggagccgaagtcggattcttactcgcaggcaaagcctgggccaaaagatgagcccaagccggagccagaggcaatgtctgcgtcac

SEQ ID NO: 29294 - DNA, 386 bp, Oryza sativa
  Clone ID: uC-osflM202140c01b1
agcaaatcgttatagaacttaactccccagaacatcgcagtatcatctaaaatagaaggaataaacttcatcagagaaagagagagagagagagagataaaggaacgtattacaagtgcactccaattttcttaaataaaggagaacagtttgtaaattgacttacttatcttgcttccatatggagtaagtggcttgtagttgaagctaaacagctgggtgatattattgaagttaggatgttgagcgaccaaattccactgtgtgtaattcatgcggtagttgaagttcgtaatcgtgaacttcactctccaatattccttatagttgaggttcacatgccaggggattcttgacgggcacatgtgagaagtacattggacaag

SEQ ID NO: 29295 - DNA, 161 bp, Oryza sativa
  Clone ID: uC-osflM202140c02b1
taaaaaaatattataggaaataaaaaataatttcctggttagaataaacacatttttaaaaaaaccaagaaaagattttcctcttctgttacattccttcttccttctccggccaccggagccgtagccgtattgtgcctttttttcggcgaggttagtgt

SEQ ID NO: 29296 - DNA, 51 bp, Oryza sativa
  Clone ID: uC-osflM202140c03b1
taactacgccacgccgaatcgtccgtcgtcctagatagtgcttcgctagct

SEQ ID NO: 29297 - DNA, 70 bp, Oryza sativa
  Clone ID: uC-osflM202140c04b1
gctgaacgcaaaccgcatcgatcaactcctttccgaagtcgaagcaaaatccctagcgatgttttattcc

SEQ ID NO: 29298 - DNA, 534 bp, Oryza sativa
  unsure (1)..(534): unsure at all n locations
  Clone ID: uC-osflM202140c05b1
tcgtaggtacgcaaagagcccaagcctcctggcagtggagctgatgaatgaaccgtttgcaccccgtgccaccttggagagtctgatgaagtactaccatgatggatacaacgccgtcaggaaatactcatcgacggcttacgtcatcatgtcgaaccgtctgggaccgcatgatccaactgagtttcttcaatttgccaacggcttcccccgtgccgtcatcgatgtgcactactacacggtgttcaatgacctgttcaataacctgactgtgcagcagaacattgattttatcaaatcaaacttctcaagtgagctaaaaaatgtcacaacacaaaatggccctctcacctttgtgggagaatgggtnggctgagtggaagagtacccaatgcaacaaaggaagagtaccagagatatgcataggtgcaattggatgtttattggcaggccaactttggatggtcccatttggacttttaagaatgttaacaacactggaatctagagtggatgatcaacaatggcttcatt

SEQ ID NO: 29299 - DNA, 155 bp, Oryza sativa
  Clone ID: uC-osflM202140c06b1
taaaatttcaggacaagagcaattccacgccccttgtggaatgcagcttcgcaaatcctgatggccgtgggctatgttgtgatggcagttggtatgccaggctccctcttcgtcggctccgttgtggttggcatctgctacggtgaccgtttgtc

SEQ ID NO: 29300 - DNA, 535 bp, Oryza sativa
  Clone ID: uC-osflM202140c07b1
gacccacctttttttaaatcgttatagaacttaactccccagggcatcgcattatcatctaaaatagaaggaataaacttcatcagagaaagagagagagagagagagatataggtacgtattacaagtgcactccaattttcttaaataaaggagaacagtttgtaaattgacttacttatcttgcttccatatggagtaagtggcttgtagttgaagctaaacagctgggtgatattattgaagttaggatgttgagcgaccaaattccactgtgtgtaattcatgcggtagttgaagttcgtaatcgtgatcttcactctccaatattccttatagttgagtttcacatgccagtggattctgatcgggcacatgtgagaagtacatttggacaagaggctgaccggtccatttgccagggccatcaatggcagattgtaaataaggtgaattctcactgtggaaatgcatggaacttggtagcaattttgcagaaaagttgggcctcaccaagaagcgaagtaagagtttt

SEQ ID NO: 29301 - DNA, 502 bp, Oryza sativa
  Clone ID: uC-osflM202140c08b1
ttcaaaccgttatagaacggaactccacagaacatcgcagtatcatctaaaatagaaggaataaacttcatcagagaaagagagagagagagagagataaaggaacgtattacaagtgcactccaattttcttaaataaaggagaacagtttgtaaattgacttacttatcttgcttccatatggagtaagtggcttgtagttgaagctaaacagctgggtgatattattgaagttaggatgttgagcgaccaaattccactgtgtgtaattcatgcggtagttgaagttcgtaatcgtgatctttactctccaatattccttatagttgagtttcacatgccagtggattctgatcgggcacatgtgagaagtacattggacaagaggctgaccggtccatttgccagggccatcaatggcagattgttaataaggcgaattttcactgtggaaatgcatggaacttgtagcaattttgcataaagttgggcctcaacaag

SEQ ID NO: 29302 - DNA, 409 bp, Oryza sativa
  Clone ID: uC-osflM202140c09b1
tcgtagggttccgcgcaatcggggcaggagtcgagcatgtccaccgtcatctacaatagaatgaataaacttcatgagagaaagagagagagagagagagataaaggaacgtattacaagtgcactccaattttcttaaataaaggagaacagtttgtaaatcgacttacttatcttgcttccatatggagtaagtggcttgtagttgaagctaaacagctgggtgatattattgaagttaggatgttgagcgaccaaattccactgtgtgcaattcatgcggtagttgaagttcgtaatcgtgatctttactctccaatattccttatagatgagtttcacatgccagtggatactgatcgggctcatgtgagaagttcattggacaatatgctgaccggtttatttt

SEQ ID NO: 29303 - DNA, 82 bp, Oryza sativa
  Clone ID: uC-osflM202140c10b1
ttgtgattttgaaacggggaggcggaatgctcgaccgatccttcaggccgccgcagccgcatcaggctgcggtggtggtgga

SEQ ID NO: 29304 - DNA, 352 bp, Oryza sativa
  Clone ID: uC-osflM202140c11b1
tgatcgtatcgtatagtcgtctgtacaaaccaaccgacgcgatcgtactacgctagctaagacaggatgagcagtgagaatggagagaacggacacggttcctgcgactaggtggtgctgtcatttttatattttattttttcttttattttttttttccttattaattattttcatcttttcatattattttattttcaactttttaactttacttctattaatttaagtctcttttttattttttattttcttatttctttttatttcttattttttattttttttattaattttatattttctatttataatttttttttttttttatatattatttttttattatttt

SEQ ID NO: 29305 - DNA, 395 bp, Oryza sativa
  unsure (1)..(395): unsure at all n locations
  Clone ID: uC-osflM202140c12b1
taaaaaacccctacattcctccctcttctttgccgcggcgccgacatcgatccatccctaacaaataacacgatgtcgcgcgccacggtcgccatcctcttctacatcctcacagccgccgccgccatcagcgcggcggcgcaggccccagcggagtcgccatcgccaaagccatcgaagagcacggcagctgccacccctgcaaaggcacccaccgtcgcatcggcaccgaggaaggccggaccagctgccgcgccgacgaccaccgtggctacctccgcgcctgctggtggcgacgaggtgtccatcccccctacgccgttcgccnncgtggtgtctcccgtcgccgatggacctccgatgccggctgacgccgatttctccggtgccggtgc

SEQ ID NO: 29306 - DNA, 466 bp, Oryza sativa
  Clone ID: uC-osflM202140d01b1
cccgcacggcgacgaagaggaggaaggagcggcgccaccaccaccaccaccaccccacgccatggcgaacccagcgcaggggcctctgagagcgaggacgaagcccgcggggaggaggggcggcgctccgccgcccgccgcggaggatccgtcccgggcggcggcggcggcggcgaggcgctcggtgcggaagtggagcacgtggacgatgaagacggcgaaggtggcggcgtactacggcttcatccccctcgtcatcgtcatcggcatgaacttcgaccccaagccctccatcggacagcttctctccccgctgtgattccgcttcgacccccactcgactctgccttcgcttttcttgggctttgctacatgatcgtacttactgcgtagttgatctgaattaagactattttgctactagtaattcgctctgggttagcaatatcggcctggtaatttgctg

SEQ ID NO: 29307 - DNA, 293 bp, Oryza sativa
  Clone ID: uC-osflM202140d03b1
ttgtgtctgttagaccaacagagtctgtaaagccaaaattgacattcgaggagaaagaatcatttgggaactgtttggcatctttgtctgaggatccggaggtaccttcacacatcattgatttgttgcagcaatgcattgacaacaacacagatcagcttggtgatggagagatagagattgatatccatgctgtcagtgatgacctactattcgagttgaagaaacatgttgaccagtatttgcaagagagagagcaaagccagcatgcaaaatctgagctctttgagaat

SEQ ID NO: 29308 - DNA, 275 bp, Oryza sativa
  Clone ID: uC-osflM202140d04b1
tcgtagactagtggcggcggcggcacacgagtgcactcggcgcgcgatggcttccagctccaagcgccggtgaggcggacggtggccggcgatgggacgcgacgcgcggcggcggcgcgccggcactgcagcagccagggcacgcggctcaccggccactggccgctggggcatgggggcgccgggcggcagcaaggcagccaggcagggcgcggcgcgcgggcggtctggcggtgggacgcggcggcgtgccgtcacagctgtagccaaagagg

SEQ ID NO: 29309 - DNA, 460 bp, Oryza sativa
  Clone ID: uC-osflM202140d06b1
tcgtaatttcttcttctccgctgctgctcctcccgtgccgccgccgtctcgcgccagtgcgtctcttcctcgcgcggcgatcatggcggagcagactgagagggcattcttgaagcagcctaaggtttttctctgtcctaagaaaaccaccaaggggaagaagcctggcaagggcgggaataggttctggaagaacattggccttgggttcaagacacccagggaagccatcgaaggaacctacattgacaagaaatgcccattcactggtactgtatcaattaggggtcgtatcatagctggaacatgtcatagtgctaagatgaacaggaccattattgttcggaggaattatctgcactttgtcaagaagtaccagaggtacgagaagaggcactccaatattcctgctcacatttcaccgtgcttccgtgttaaggaaggagatcacgtgatcatt

SEQ ID NO: 29310 - DNA, 64 bp, Oryza sativa
  Clone ID: uC-osflM202140d10b1
agaaaaacaaaacaaaaaaacaaaacataatacagagccatacaaaaaaaaaacaccataaaca

SEQ ID NO: 29311 - DNA, 69 bp, Oryza sativa
  Clone ID: uC-osflM202140d12b1
gtgatcttcctggctgcgcgctttccggggtgggatttaggttagctgaagacatattaaaggaacacc

SEQ ID NO: 29312 - DNA, 223 bp, Oryza sativa
  Clone ID: uC-osflM202140e01b1
ttctatctatagcagcaagcaagcagagaagaatatcatcagaaatcggagattaatcgatcgggcggagatcagagagatatattagattgttttgtttgatcgatcgatcgatcgggatggctgctgcttcatctgctgacatggagaggatcttcaagcggttcgacaccaacggggacggtatgatattgctgtcggagctgactgactcgcttttaac

SEQ ID NO: 29313 - DNA, 391 bp, Oryza sativa
  Clone ID: uC-osflM202140e02b1
tcttatcaccaccaatccgatcctcttctcttctcttcttccccacatccagttcgattctcatctctcccacaacaaatcacgccatggatccctacaagcatcggccgtccagcgggagcaattccaccttctggaccaccaactccggcgcccccgtctggaacaacaactccgccctcaccgtcggagagcgaggccctatcctccttgaggactatcatctgattgaaaagcttgcacagtttgacagggagcgtatccctgaacgtgtcgttcatgcaaggggagccagtgccaagggattttttgaggtcactcatgatatttctcacctcacatgtgctgattttctccgtgctcctggtgttcagaccccagttattggttc

SEQ ID NO: 29314 - DNA, 460 bp, Oryza sativa
  Clone ID: uC-osflM202140e03b1
ttcctctgcacatatatatagctcccaccaccacgagtaatctaacagaataaatcatgggaccagcccacggacacctcgttcttcttgtcgcctgcggtgatctaattgtccagttgttgtttttctatcttctttttctttaatattttcttttttttacttgtatatttacttatttatttctttattttatatattttcatttcttttttcttttttttcttatgtttattttttttttttcattttcttttttcttctctttttttactattttatattttctattttttcttttaatcttatttttcttcaatttttttttttttttttttctaatatttattttttttatttatttttaattttaaatcatttatttatttttattattttattattcttttattatatacttctataactttttttttatttctttatttttttctttatt

SEQ ID NO: 29315 - DNA, 213 bp, Oryza sativa
  Clone ID: uC-osflM202140e05b1
ttcgttgcacatatatatagctcccaccaccacgagtaatctaacagaataaatcatgggaccagcccacggccacctcgtcctcctcgtcgccgcggtggcgttgctgtcagctggcttcctcccgcacgctgtggcgaataagggcggcgcctgcctttcttctttttctattacctttttctctttttcttttacttttgctctctttct

SEQ ID NO: 29316 - DNA, 230 bp, Oryza sativa
  Clone ID: uC-osflM202140e06b1
cttcttgacatacaagagaagcttgaatatattgcgtcttgattatgaacaggatctgtagactgcctagagcctattctctgctgagaagagctatcagttcacagatggacaagtcatcacaatcggcgcagagaggctcaggagcccagcatggctgtgccagccatggctgattgtgaccgaagctccggtgatccatgagaccacctacaactgtatcatgaagt

SEQ ID NO: 29317 - DNA, 169 bp, Oryza sativa
  Clone ID: uC-osflM202140e07b1
tcgttctcctcttcctcccgatcgctaccgcgctcctctccagctcacacccaccccccacgcaaatctagaaccttctggatccgccgcttcctcgatccgatcgcctcccccgccgtccgcccgatcggatcctcaagggttctcggtttgactgctctttttttta

SEQ ID NO: 29318 - DNA, 326 bp, Oryza sativa
  Clone ID: uC-osflM202140e08b1
tcgttcgattcgaggcggcggcggcggaggaggaggaggtattagaatatacatccttaatctaattataaactaatgtattttattaatttttatatatttttactattatacacattcattatttcatatatattttcattaattttttatttaaatatattataattattttatatataaatttttaaaaaatttttatataatataatattaattatattaataataatacaattttatatttatattacattctaattattaataaatttatttttattcaatattctataattattaaaatatttaaattattattttat

SEQ ID NO: 29319 - DNA, 65 bp, Oryza sativa
  Clone ID: uC-osflM202140e09b1
taatattctaactgacggcagatgaggaggagtaggtttataaacccctctcttcatttaaaata

SEQ ID NO: 29320 - DNA, 277 bp, Oryza sativa
  Clone ID: uC-osflM202140e10b1
tcgtccaattcaatcagaggtgatccaactggaaaagcttgccggaacttgttagaagaaattcgtaagaagattgagaagtggcaagaaccgcctcctgcaaagcttccaaaaccacttcctgttccagactctgagcctaaaaagaagagaggaggccgtcggcttcggaaaatgaaagaaagatatgcgcagactgacatgatgaagcttgcgaaccgaatgcagtttggggtaccagaagaaagctcatttggtgatggcttggggtaaggct

SEQ ID NO: 29321 - DNA, 77 bp, Oryza sativa
  Clone ID: uC-osflM202140e11b1
tattcttccttcgaggaggaggagctatatatagacggggatggttcatctagcctccttaccggatttgatcttat

SEQ ID NO: 29322 - DNA, 468 bp, Oryza sativa
  Clone ID: uC-osflM202140e12b1
tcggagacatacaagagaagcttgaatatatagctcttgattatgaacaggagctgtagactgccaagagcatattatctgctgagaggagctatcagtcgacagatggacaagtcataacaatcgacgcagagaggctcaggagcccagaatggctgtgccagtcatggctgattgtgatggaagctccggtgatccatgataccacctacaacagtatcatgaaatgagaagtcatatgaggaaggagctctatggcaacatcgagctcagtggaggaactacgatgtcacgtggcataggtgacaggatgagcgaggaggattactgcccttgcaccaagcagcatgatagataagagtcagtggcacctactgagagaagtacaggggtctgcatggggaggttctatgcttgccttcctcagcacattccaacagatgtggatatctaagggagagtatgatg

SEQ ID NO: 29323 - DNA, 206 bp, Oryza sativa
  Clone ID: uC-osflM202140f01b1
ttaataccatggcacaacgtgtccaagaagaagatgagcagatgatgagcaccgatgacttgatccaagctcagatcaagctctaccaccactgcttcgccttcatcaagtccacagcactttgggccgccatcgacctgcgcattgcggatgtcatccaccgtaactggcggagccgtcaccttatccgacctcgcgctcaatgt

SEQ ID NO: 29324 - DNA, 502 bp, Oryza sativa
  unsure (1)..(502): unsure at all n locations
  Clone ID: uC-osflM202140f03b1
taaaattccctcatatacaagataaaggtaggaggagggccgggagctcgacggatttcgatcaattgtggtttttttttttgtggtaaccgtataagagaggagattttgtttaacgtagctagatcatatctgagttgagttttagcaatggaggtgctgatccggtggagcaaactgccggcggccggctccttggtgctgtacgccgtcttcttgctgtcggcggcggccacatcggaggccaacatcggcgagtacgacgagtactggcagaagcgcaagctcatggctgatgccgccgccgaggctacctacaagcgtgaccccttcgaggtcaccaacagcttcaaccgcgccgtccacagatcggaggaggagagcgggaggagggagctggcgatgacgaagaggaaagagttcgcggngccgtgcaaggcgacgaacccgatcgaccggtgctggaggtgccgcgccgactgggtgacggacaagaagcggc

SEQ ID NO: 29325 - DNA, 56 bp, Oryza sativa
  Clone ID: uC-osflM202140f04b1
tcctaggcaaactacaaagggctcaagtagggatagtatgataaggacaagagcac

SEQ ID NO: 29326 - DNA, 353 bp, Oryza sativa
  Clone ID: uC-osflM202140f05b1
ttattttcactcatgtacaagataaaggtaggaggagggccgggagctcgacggatttctatcacttggggtttttttttttgtggtaacctgtataagagaggagattttcgtttaacgtatctagatcatatctgagttgagttttagcaatggaggtgctgatccggtggagcaaactgccggcggccggtttcttggtgctgtacgccgtctttttgctgtcggcggtggttacatctgaggccaacattggttagttctacgagtactggcagatgctcatgttcatggctgatgctttcgtcgaggtttcctacatgcgtgaccccttttaggacaccaacagtttt

SEQ ID NO: 29327 - DNA, 81 bp, Oryza sativa
  Clone ID: uC-osflM202140f07b1
tcgtatccctccctcccaccaacccaccaccagcgttacccatggcggtccagcgactcgccgtcctccacgccgccgcgc

SEQ ID NO: 29328 - DNA, 372 bp, Oryza sativa
  Clone ID: uC-osflM202140f11b1
tcgtaaagatgctgctcaagcctgacaaaactattgttacggaaccacatcatatttggccaaccttgactgatgagcaatggctgaaggttgaatgtgcactcagggacctcatcctgtctgattatgcaaagaaaaacaatgttaatacgtctgcgctgacacaatctgaaattcgtgacattatacttggtgctgaaatagctccaccatcacagcagaggcaacagattgctgaaattgagaaacagtctagagagacgactcagctgaccgtagttactacaaggacgaccaatgtgcatgtagatgagctcatcatcacaacgaccagtccatacgagcaacaagcatttgcatcaaagactgatt

SEQ ID NO: 29329 - DNA, 463 bp, Oryza sativa
  Clone ID: uC-osflM202140f12b1
ttcatctgctgtgggatatcaaccaactcttgctactgatcttggaggacttcaagagcgaattacaactacaaagaagggttccattacatctgtccaagctatttatgtgcctgctgatgacttgacggatcctgctcctgctactacttttgcacatcttgatgctactactgtgttgtcacgacagatctctgagcttggtatttaccctgctgtcgatcctctggactccacatccagaatgctctccccccatgttttgggtgaggatcactacaacactgctcgtggtgtccaaaaggttcttcagaactacaagaatcttcaggatattattgcaattttgggtatggacgagctcagtgaagatgacaagttgaccgtcgctcgcgcaaggaagaatcagcgtttcttgagccagcccttcatgtggctgaagttttaacggtgctctgggaag

SEQ ID NO: 29330 - DNA, 105 bp, Oryza sativa
  unsure (1)..(105): unsure at all n locations
  Clone ID: uC-osflM202140g01b1
tttatactctcctctcttcgtccctgcgtagagagggagagagagagaaggacccctttttgcctcctntttcctgccaagaaccacatttttccctaatctttc

SEQ ID NO: 29331 - DNA, 96 bp, Oryza sativa
  Clone ID: uC-osflM202140g02b1
tgtcatagaaaaagataattgcaaagcttaagaacagttttgaaaaatcattatggctggagaatgaagacagcataccttgattctttttattct

SEQ ID NO: 29332 - DNA, 156 bp, Oryza sativa
  unsure (1)..(156): unsure at all n locations
  Clone ID: uC-osflM202140g05b1
gtcgcctcgaaagagagagccatggcggacgacgctgctgttggcgtaccagagcctttgggtggtgtacggcgacctgagcatntcgcccctgtacgtgtacaagagcaccttcgcggaggacatcattcaactcgagtccaacgaggagatctt

SEQ ID NO: 29333 - DNA, 472 bp, Oryza sativa
  unsure (1)..(472): unsure at all n locations
  Clone ID: uC-osflM202140g06b1
tcgttctccccctcctcctcctcctcgccggcgtcgtcgccgccgcggcgccactgctcgccaccgcccagctctccgccgacttctactcctccacctgccccaacgtcgagaaggtcgtctccaccgtcatcgagcgcaagttcaaggaggaccctaccacctccgccctcctcctccgcctcctcttccacgactgcttcgccaatggatgcgacgcgtcgatcttgatcgacccgctgtcgaaccagagcgcggagaaggaggcggggccgaacatctcggtgaagggctacgacatcatcgacgagatcaagacggagctggagaaggagtgcccgcaggtgngtgtcgtgcgcggacatcgtggcgctcagcacgcgcgacagcgtgcgcctcgccgggggccccaaccncgacgtgcccaccggccgccgcgactcgctcgtctccaacgcgaggaaggcgactc

SEQ ID NO: 29334 - DNA, 98 bp, Oryza sativa
  Clone ID: uC-osflM202140g07b1
tcgttttatgccttccactatatgaaaaagggcagcattatcaattatccatacccccctctccatactcatataaatttactcatttcacctcttct

SEQ ID NO: 29335 - DNA, 154 bp, Oryza sativa
  Clone ID: uC-osflM202140g09b1
tcgtgcatctaaagaagttgcaaatgagaagactgagtctgtggttattcgtgcaccaaggtctccaactcattatttaaagatgccaattgttgataatattcctgaaattaattatcttttgtatttttaaatcagttacttatttgaaaat

SEQ ID NO: 29336 - DNA, 293 bp, Oryza sativa
  Clone ID: uC-osflM202140g10b1
tttttgccctgatcatgctgtttaataaatgcaagcactgacaggagcacaacactaaacaatgatagagggacagataagggtagggctgaacatggataattgggtccacatgaaaattggtctggtgtgatcaatgacaaaaagactgagctctactttgtctaaaaaactaaaatacactatataacaaaagatatagctcggtatgacacaatttattttgcttgttaggacaaacaaaaacgaaaaaacaataatggggcggacgatttaaaggatccaaggtttcg

SEQ ID NO: 29337 - DNA, 317 bp, Oryza sativa
  Clone ID: uC-osflM202140g11b1
tgcgtctcgaaagagagagccatggcggacgacgctgctgctggcgtaccagagcctcggggtggtgtacggcgacctgagcatctcgcccctgtacgtgtacaagagcaccttcgcggaggacatcacccactcggagtccaacgaggagagattcggcgacctctccttcgtcttttggaccctcaccctaatactgcttatcaagtacgtctccatcgtccttcgcgccgacgacaacggcgaaggagggacgtttgcgctctactctctgatctgcaagcacgccaatgtgagcctccttccaaaccaggcag

SEQ ID NO: 29338 - DNA, 85 bp, Oryza sativa
  Clone ID: uC-osflM202140h01b1
tttagaaattaaaaagaaaatcacggcgcgtgagcttgcagagacagcaatggtgagagttggtgccgccgcggtggtacttgtg

SEQ ID NO: 29339 - DNA, 111 bp, Oryza sativa
  Clone ID: uC-osflM202140h02b1
tcgacccacgcgttcttagcacaaccgatggcagcagaggccggttggtctctaaaggcgcggacggaggatatttacctccccttggatcgagcaggctcgtctctattt

SEQ ID NO: 29340 - DNA, 467 bp, Oryza sativa
  Clone ID: uC-osflM202140h03b1
ttccttctctcttccatcgccgctgctcgcttcctccccctctcccacgaaagatggcgtctcacattgttgggtacccccgcatgggccccaagagggagctcaagtttgccctggagtctttctgggatgggaagagcagcgctgaggatttggagaaggttgcgaccgacctcagggccagcatctggaagcaaatggctgacgctgggatcaagtacatccccagcaacaccttctcgtactatgatcaggttcttgacacggctgccatgcttggtgctgtcccagagcgctacttatggactggtggagagatttgggttcagcacctacttctcgatggctaggggcaatgccactgtccctgccatggagatgacaagtggtttgacaccaactaccactttatcggccctgaacctgggcccaacaccaagttctcctactcttcccacaaggctgtg

SEQ ID NO: 29341 - DNA, 444 bp, Oryza sativa
  Clone ID: uC-osflM202140h04b1
tataatcccttctccctcccgtccgtcctcctcctgctcctctcttccatcgccgctgctcgcttcctccccctctcccacgaaagatggcgtctcacattgttgggtacccccgcatgggccccaagagggagctcaagtttgccctggagtctttctgggatgggaagagcagcgctgaggatttggagaaggttgcgaccgacctcagggccagcatctggaagcaaatggctgacgctgggatcaagtacatccccagcaacaccttctcgtactatgatcaggttcttgacacggctgccatgcttggtgctgtcccagagcgctactcatggactggtggagagatttgggttcagcacctacttctcgatggctaggggcattgccactgtccctgccatggagatgaccaagtggtttgaccccaactaccaattt

SEQ ID NO: 29342 - DNA, 143 bp, Oryza sativa
  Clone ID: uC-osflM202140h05b1
ttccttcgtttctcccgccgccgcctcccacgaccgccttcttctcccctgctccccgcgccgactcccccgcccccgaccccgccctcgcgtgcgcctacaccgcctccgacaacgggttctccgactggctgcaggagcac

SEQ ID NO: 29343 - DNA, 123 bp, Oryza sativa
  Clone ID: uC-osflM202140h08b1
tcgttgtcgcaaccgatggcagcggaggccggctgggcgcgagaggcgcgggcggaggagatgtaggccggcttggcccgagaggcgcgctctatggagggaggttcttattttctctatatt

SEQ ID NO: 29344 - DNA, 311 bp, Oryza sativa
  Clone ID: uC-osflM202140h09b1
tcgttcgacgatacacaagcagaacgacttcaagcagcccggggagaggtacaggtcgtggtcgccggatagacaggagaggtttatcctctcgtttgtcggcgagcttgtgcaccccaaggttttccctgagctccgtgccatttgggtcaacttcctctttcagttgtgatgagtcgttgggggtgaagttattctatctatttcctttcttttttcttattcattctcatattattatcctcatttctttttatttcttttttttattttctttttttttcttctttttttctttatttttctttctt

SEQ ID NO: 29345 - DNA, 247 bp, Oryza sativa
  Clone ID: uC-osflM202140h10b1
tcgtaccgtttcctcgccgttttcacggccctcccctcgtcgtctcgtctcatcctcaacgccaccaccacccaccctgcactcccccttctttattcccccgcacatgccattgccatcgccattgccaacctcaccctgctcctctccatctcctccctctccattgtcaactcgcctcggttccttcatgtcgccggcgacgacggctgagtagaggtaacagcggcggcggcggcgatgaggg

SEQ ID NO: 29346 - DNA, 68 bp, Oryza sativa
  Clone ID: uC-osflM202140h12b1
tctagatccctttgctgttgttgtagcttcgggaggagtaggaggaggatcctttactttcttaacac

SEQ ID NO: 29347 - DNA, 473 bp, Oryza sativa
  Clone ID: uC-osflM202141a03b1
ctttcgcgtggttcagtgcaaggctgcctctgatctgcccacgcttgctgagggtctgaagcgtgtggcgaagcatgatcctatggtgctatgcactattgaggagtttggtgagcatatcattgctggtgctggagagcttcaccttgaaatttgattgacggatctgtaggaagatttcatgggtggtgctgaaatcattgtttccccacctgttgattctttcgcgcgagactgtccttgagaagtcgtgccgaactgctatgagcacgtccccgaacaagcacaaccagtctctacatggaagctagccccttggaggagggaccggctgaggccattgatgactgtcgtatcggcccacgtgatgatcccaaggcgcgctccaagatcctgtctgaagagctcagctaggacaaggatcttgcacagcatgattgtgcgcttggacctgagacagctggcccccacat

SEQ ID NO: 29348 - DNA, 468 bp, Oryza sativa
  Clone ID: uC-osflM202141a05b1
gctacgctgtcgacgtggtccctggcgtcggcggactgctgcgagtgggaccacgtccggtgcgacgaggccgggcgcgtgaacaacgtcttcatcgacggcgccaacgacgtccgcggccagatcccgtccgccgtggcggggctgacggcgctcatgtcgctgtcgctgttccgcctcccgggcctctccggccccatcccggcgtgcctcaccgcgctctccaacctccagttcctcaccatctcccacaccaacgtctccggcgtcatcccggactcgctcgcgcggatccgcagcctcgactccgtcgacctctcccacaacagcctgaccggccccatcccgaactccttctccgacctcccgaacctccggtcgcttgaccttcgcagcaacaagctgacgggttgcattccggcagtgctcgtgcaggggcagttcaggtcgctgatcctttctacaaca

SEQ ID NO: 29349 - DNA, 458 bp, Oryza sativa
  Clone ID: uC-osflM202141a12b1
tttacgaagagaaggattcgaaagaacagattaacctgcttagggtggatttgaaagaaactgaagcaaacataagtgacgaggataaaaaaggtttatcagaaaagttatcccagatggaaagggaactggagcgtcttacagttgagttggacaacatggttcgatttgggcaaagacctggttctggatctggcaaggatactgcacatttaagtaattcaccagacgaatcacagattacagagtcaatggaacaaccacgttcccgtagcagcatagaccaaaatcctaaaccagcagaagaaaggtgggggtttcagggcaacagggacagaggctcatttggtggtaacagaaatacagacaggtcgttaacagggcagagatggtgaactcttctgccatccatggttttgggcttttgagcactggtaatcttgacagatctttttttt

SEQ ID NO: 29350 - DNA, 337 bp, Oryza sativa
  Clone ID: uC-osflM202141b05b1
tcgagtctcccacactccttcggcgcgcgcgtacgtactcgatcgcacacgcgtcgacgagctaagccggcccgggaaacccaaggcccatctcccttcctcaagcgcgccggcgggcctagccggagcgcgacattgagctaaacccccccgtcgtagtcgcacgtcgagcgccaccaccaccgccagcgcgtcgcatcgtacgtactccacgcgcggcgccgtgctaggcaacctactgtggtgatcgaccgcctgctcatgagcgtgtgacctgctgacgaatggtgcagcgggacctgctgcgcggacacagcctgaacaggttcctgccgat

SEQ ID NO: 29351 - DNA, 567 bp, Oryza sativa
  unsure (1)..(567): unsure at all n locations
  Clone ID: uC-osflM202141b08b1
tttttctgcaataagacaaatggcgccgcatatagtcccgtccatgccacaggataccagttgcaaacaaaatccaggatcttcagattctatggacaagaaggcaaaggcgcgccaacgccaagctgcaatcatggcaaaaatgaaagcagaacagtcgaagtttgctgaaagtatgaagtcatcaggaagtgaggggcaggatgttccaatgtctgagccagatgtgtcctgttcaactggtgtagtctcagaggagtcgctgccagtttgctccctgtgcagggattcagattctaaaagtccattgtgctatctgattcttcttcagagatctcgacttgcaacctttgttgagatgggtcatccctcctgggaaaatccaactaaatcaaacaagatatctgggtccatcagaagggaagaatcagctgatccctcaggtgcttcttcttttagttcggaggaattcattgctgatacagcagtagagccttcatttgattcagatgctatggaagttgatgcgttccttgatttctcaaatgagcaacatncactcattcg

SEQ ID NO: 29352 - DNA, 405 bp, Oryza sativa
  Clone ID: uC-osflM202141b09b1
ctcttagcgcagaagacgaatctttgacacacccgatacctatgaaggatgatacagatcctcgggaagacgcacacgcgcgcttccttgagcctgtcattactgaagtcgatcagaacaagaacgagaagcggaacaagggcaaagagagtgtggaccaagaggtgggacggaataactcggagctgcttcggaccgaaggagtgtacctggaactcccagcgaagatgaatctctgcctggggatgtatgcgcagccttcgcagtggggcctccatagaggatgtgcacgagttccagcagtatattatagacgagttgcaacactcttgggctgtacatacgcaagaggctacctgtgattaatgaccaacggggacgctggccaggaggaggtccgggtgc

SEQ ID NO: 29353 - DNA, 498 bp, Oryza sativa
  Clone ID: uC-osflM202141c01b1
tatctagctaagctagcacgcacccatggcgtcgtcttccacctcgagctcgctcgccgcggcagcgatggtggccgtcgtcctcctcctcctgggtgccaccgccacgtccacccaggcggcgcgcctcctcgacgaagaactccccaccgccgccatcccggcgatccccggcgtccccggagtgccggcggtcggccccgggatcccggtgatccccggcgtgcccggagtgccggtggttggccccgggatcccgttcgtgccggtgatccccggcgtgccggtgatcgtgccgatcatccccggcgtgccgatgatcgccggcatgacaaccctgccagtgccgccatttgtgccgccgattgatcccggcgccggcgccggattccccggcgtgccgccggcgtcgtcgaccaccgtgcaggaagacccacagtcgccgatgccgttcgtcgtccacccgtgccataggtgttaatcaacttcggcgagcca

SEQ ID NO: 29354 - DNA, 445 bp, Oryza sativa
  Clone ID: uC-osflM202141c03b1
gcttcagcagcagcagctgagcttgaagcagcagagcgaggtagacatggccgccgccaccatggccctctcgtccccggcgctggccggcaaggccgccgcgaaggtgttcggcgaggggcgcatcaccatgcgcaagtcggcggcgaagcccaagcccgccgcgtcggggagcccgtggtacggcgccgaccgcgtgctctacctcggcccgctctccgtcgagccgcctagctacctgaccggcgagttccccggcgactacgggtgggacaccgtggggctctccgccgacccggagacgttcgccaagaaccgggagctggaggtgatccactccaggtgggcgatgctacgcgcgctgggctgcgtgttccccgagctcctcgcccgcaacggcgtcaagttcggcgaggcggtgtggttcaaggcggtgtcgcagatc

SEQ ID NO: 29355 - DNA, 482 bp, Oryza sativa
  Clone ID: uC-osflM202141c08b1
ttagaagagacctacctacctacctacctactctaggcgggagagatggtggggaagagcggtgtggcggaggagggcggatcggcggcggcggcggcggtgaggaggtgggtggaggccggcggcgggaggctggtgatggacggcgggctggcgacggagctggaggccaacggcgccgacctgaacgacccgctctggagcgccaagtgcctcctctcctgcccgcacctggtccgcaaggtccatttagactacctagaagcaggtgcacatatcataatcacagcgtcataccaggctacaattcaaggctttgaatccaagggattttcaaaagaacaaagtgaagacttgctcgcaaagagtgttgagattgcacgtgaagcgcgtgacatgtttctgaaggaacattcagatcgtcccatacaacatcctatcctggttgcagcttccattgcaagttatggcgcctatcttgc

SEQ ID NO: 29356 - DNA, 439 bp, Oryza sativa
  Clone ID: uC-osflM202141c10b1
gttaagacgatccagggttacaagaagagggagatcgagaggcagatggctgcagccaagcaattcgcagaggaacagcttgcggaggaggttgccctcacgaggggtatctctgtgggtgctgccaccaacatgttgtttgccggtggagagagggacgaagacatcatcttctgatcatcttcggtcatacagtgattcaatcgtggtggaaataataagttgtgatgctggagctccagaatcgcacctgtttatagagtggcggaggatttgtttcaggcggtagtctggactctgttcatccaaaagaccacaaatcatttgtacttggtaccaaccaacggatggattgcttatgtgcagttttcgtagttcattcaattgggctgtattttcttgccatgttccgtttaactatatatttgtttggaaaggt

SEQ ID NO: 29357 - DNA, 499 bp, Oryza sativa
  Clone ID: uC-osflM202141c11b1
gtccgaccgtacttctggttccccgtccacctgctccccaccgcgcgatccatggcgttcgccggcatccgctccggcgtcctcagatcggtggcgggtgtggacggtctcgccgccgccgccgcggcgcgccccactcctctcctcccgcgcgtccacctcgccggcgacggcacggggcggatggcgaccaccatcgggttctgcccccgtctcagagccgcgccgccgtcctgcaagaaggcggaggcggacccggcgccgtctctccaggatgcggtggcggcggtggatgctgtgctgcgtgcccctccacctccccaagagcatggcggacagatggcggtgattctggagtttctgaagaaacactcgctcaatctactgatccttgccctgtgcctcttcgcgggtgcgctcgctatcaagggagaggagaaggtgatcgttgcggtgactgacgaggaggaggcgattatcgcggtgaaagtgtgcgaca

SEQ ID NO: 29358 - DNA, 518 bp, Oryza sativa
  unsure (1)..(518): unsure at all n locations
  Clone ID: uC-osflM202141d07b1
ttcagcctcagcatcagctgcatcactccccgcctctccgcgatcgcaagggccgcgccgatcccccccgcaccagaagccctcgagattccgatctcccagaaaacctccgcctcgcagcgcgacggatccatccatctcgccacctttctcccacaaggaatttactagctctcggagaaactacggttgaggcttgcggtttggatgcaccttcatgtttataagaaggctcagagctacctgatataactcctgttctgtcataaacagcttatcaacatgggaatctacctcagtacccccaaaaccgataagttctctgaagacggggaaaatgataagcttaaacttggtctttcgtctatgcaaggatggcgtgcaaacatggaagatgctcattcagcattgctaaatcttgacaatgagacatcgttctttggtgtttntgatggccatggaggaagagtggttgccaaattctgtgcaaatattacactctcagttctcagaagtga

SEQ ID NO: 29359 - DNA, 488 bp, Oryza sativa
  Clone ID: uC-osflM202141d08b1
ttcacgacctcaaaaacccaaaccaatctactccgccgccgccgccgccgccgcgatggtgttcgtccgcgcgccggacgggaggacccaccacgtcgacctcgacccctccaccgccacgctcgccgacctcacggcctccgcctcccgcgtctgcggcggcgtcccgccggagcagctgcggctctacctcgcccaccgccgcctcctcccggccgagccgtccccgctgctgtcctccctccgggtctcggcctgctcctccctgctactccacctccccctgctcggagggatgaccggcccgacgacgacccccgcgtgacccccgcccccgccgtcgacgtcggcgcagccgcccgcccgccccgcgcgctacgactttctcaactccaagccgtccccgaactacgtggccggtctggggcgtggcgccaccggattcaccacccgttcggatatcgggccggaccgcgcggtgcccgatc

SEQ ID NO: 29360 - DNA, 472 bp, Oryza sativa
  Clone ID: uC-osflM202141e01b1
ctttcttcgatacgactaggatgagctatctggttattcgatccccttggtattacaatcgatcctgctggagaagcactctataattgcagcggcaagatccattctttacaaaccaacaaagcagaaaggattcacgcgccgtcggttgcgatttgtcaattgcagtcagaaagaggctgatggatttcaaagtcgcttgctttctgctactcgtgttaatcgttacctgcggagctggtcaaggtcaaggcaatgattatgttgaacttgatctaaaaacaactgaggtcggggatgatgctagcgcaatgcacatagagcatattgcgttgaccaagatacctgtaactctactgaggagcatgcacagcttactgtgctcggcttgtgaacacatgacatgcgaagcactcaactttcttagtgagaaacaaattcaagataagatactgactatccgtcatgacac

SEQ ID NO: 29361 - DNA, 472 bp, Oryza sativa
  Clone ID: uC-osflM202141e04b1
gtttgcggccaggacgagtacgagaggtacaagaaggaggagaagcagcacaagcacaagcagcacctcggcgaggccggcgccctcgccggcggcgccttcggcctgtatgagaagcacgaggcgaagaaggacccggagaacgcgcacaggcacaagatcacggaggagatcgcggccacggcggcggtcggcgccggcggctacgccttccacgagcaccacgagaagaagaaggaccacaagagcgccgaggagtccaccggcgagaagaagcaccacctcttcggctgatcgacctcatcacaacgtcgccggcggcggtgacgacctacgcgtacgtagccggtcgccgtgtcgtcgatttgtgtgtgtaataatttgtcttcttctgcatgcgtggagatgctggttttcacaagagtctacggcctcgaccagtgagaggctgacaggtggagccgtgagttca

SEQ ID NO: 29362 - DNA, 353 bp, Oryza sativa
  Clone ID: uC-osflM202141e05b1
gctcccgtcccaggggcggcacggacggcgcctgatcctcctccgccgcctcctgccttctcctcccctttgcctcgccaccgcccgagcggcgcgtcggcaaagccgaccggccacaaggacggcggtggcggggccctctcccctcctcgaggaagccagcggcggggacaccggggctgctcgggagcggcggtccgcggcgcgggaggcggcgccggggggttggcgcggcggatccggccacgccggaggcggatccgtcttccccggcagcggatctggcccctccgtgtccagggccgagcaacaacgagcggctgtcagcggcgcgggaggcggagccgagggga

SEQ ID NO: 29363 - DNA, 542 bp, Oryza sativa
  Clone ID: uC-osflM202141e10b1
ttccaaccggattcgcgacgcgagcgcgaggctcatcaccgacggcggcgcccgcaaccgcgggagcgatcccctctccccccgccgcccggcctgcggagagtagggactccctccctctctctctctccggaagtgcactggctgtagatcgtcagtcaagacaacagtttattggtcagcggagcgggctagagcaatgttctccctggcgtatggtctatggaagtacatctttaacaagacagagtttcatgttcttattctaggtgttgacaaggctggcaaaacgactttgctcgaaaagataaaatcgatttatctgaaaggagaagggcttacacctgatcgcatcgttcccactgttggacttaatattggccgtattgaagatgcaaatgcaaagcttgttttctgggatctgggaggtcaggttggacttcgcacaatctgggaaaaatattatcaagaggcccatgctataatatatgttattgatgctgccgctgcatcatcatttgaagatgccaaatctgctctag

SEQ ID NO: 29364 - DNA, 488 bp, Oryza sativa
  Clone ID: uC-osflM202141e12b1
ttggtggccctccggtaggccgtcctcccagcagaccagccgtgctccgcgcggcaggatgcttgggcggccttgccgccgtggctgcgtagcgtatgagcagctttggaccggtgtatgctcgcaggacccccgccctcgtgcggccgactgccggctcccgggccccgtcactccacggccgtccacgcgccgtgccgccccaggcttcaagagatgcttgcgcgctgctacccgtcccacgggcagaggtgctcgcacacgtccgtcgcgccgcgggcgccccaccgtgcgtcccgcggcggctcgacggcgcgagcggcgtggcctcgcggtgcccggcacccaagcgtgccggtgctgacaaggccatctcgcgcgtgccattgttcccggatgccggccacgatacatgcttacggttggtcccgacccgtgcctacccataagcgagaagctttcggaagacgacagcccgcccggacgcc

SEQ ID NO: 29365 - DNA, 511 bp, Oryza sativa
  Clone ID: uC-osflM202141f01b1
gttgcagcgtggcgacgcccaaatcgcgcgattcgatcgaggcaaccctccccaattccctcaaatcccctatccgaaatccgccaattggccgcgtccgccacgccaagagaataaaggaaaacatcggcgtatcaacaagtgaagctgcattttcttagagctcagatgaagcggcctcgaaggcgtctgtggtgggatgactgatgagggatgatagtgacattgatgaacttgttacgggcatgctggagaccatcatccaaccagcatgcccgggcaggctcagatgttgccggcaggcaggatggacttctatggtacaaggacactggtcagcatgtaaatggggaattctctatggctgtggtccaggccaacaacttacttgaggatcagtgccagattgaatcgggtccattgagctttcttgactctggtccatacggaactttcgtcgggtttatgatggacatggtggcccagagacggcttgctatatcaacgatca

SEQ ID NO: 29366 - DNA, 499 bp, Oryza sativa
  unsure (1)..(499): unsure at all n locations
  Clone ID: uC-osflM202141f02b1
agtgcggcggcggcgacgccgaaaacattcttcaggcagggcgagaaggtcgtcggccatgtcaacgaccttctcggacttcgatccgatcactgagcgccgccatgtcgagaggcagaggcaagagcgcaggcgcgtcatggttgcagccggcgccgcgtcggtcattcttatcatcatcgtcatgggcggcgcggccgtcgcctacaacgcgagcttcggtgatggtggctcctcttcctcctccggttcagcgtcaggtggcggcgcgcagcccagcctgcacggcgtgtccaagatcatcaaggcgatgtgcgcgcagacggactacaaggacacctgcgagaagagcctcgccaaggccgccgcgaacgccagcgcgtcgtcgtcgtcgtcgtcagccaaggacgtcgtgcgcgcctncgtggccgtgatcggcgacgccatcgagaaggcgttcgacaggtcgagcgtgatcgtcagcgacgacccgcgggtc

SEQ ID NO: 29367 - DNA, 487 bp, Oryza sativa
  Clone ID: uC-osflM202141f03b1
gttttcatcttattgtcacttccatctcattctcctaattgtcatcactagcttctagctagcttaattaattaattagccatggcggaggagaagcaccaccaccacctgttccaccacaagaaggacgacgagccggccaccggagtagactcctacggcgagggcgtctacacgtcggagacggtgaccaccgaggtggtcgccggcggccaggacgagtacgagaggtacaagaaggaggagaagcagtacaagcacaagcagcacctcggcgaggccggcgccctcgccgtcggcgccttcgtcctgtatgagaagcacgaggcgaagaaggacccggagaacgcgcacaggcacaagatcacggaggagatcgcggccacggcggctgtcggcgccggcggctacgccttccacgagcaccacgagaagatgaaggaccacatgagcgccgaggagtccaccggcgagaagaagcaccacc

SEQ ID NO: 29368 - DNA, 533 bp, Oryza sativa
  Clone ID: uC-osflM202141f05b1
tttcaagctcgtcgggatgaagaagacgctcgtcttccactccggtagggcgcccaagggccagaggaccaactgggtcatgcacgagtaccgcctcctcgacgccgacggcacccaggatctgcatgtggtgtgtagaatcttccagaaaaatggatctgggccacaaaatggtgcacagtacggtgcgccatacttggaggaagattgggaagaggaggatgatgcaattgagaacatgcctgccagtggcgctttcgctgaaatggctgcagtcacagatactgcagatgagtcgactgaggaagatgggaatttttcccttaaaactaatgatgagcctttacaaacgcaagaataccagccagagataactcctgtgaaagctcaaggttcaaatgaggagaccaatggcggtggttacagttgtgatgttttttctctggacgagattttgcaggaacctgaaaatgtctgcaaaaatgaagagcagaatgccattgatgacaagttcactatcgcaagagtatctg

SEQ ID NO: 29369 - DNA, 502 bp, Oryza sativa
  Clone ID: uC-osflM202141f06b1
ttttgttagaactcaaggaggaaatgggattccttcaaacaatcagtccacttcgtctcttcaccaaaatcctagggctcctacacaccagcaaagtcacacatgagtcgcgcaccagatgtcagggcaagtgcaaactcaatctgcaatgagaataccaactcagcagttgaaccatcgcactggcaacccgtcaaccactcagcatctacctgttagatcaactgaaagtgctgagaatggactgtctcctagctcgaacaaatcaaatgcatcatctggggcaggaaactccaacagtcaggaagcaggaaggcgttcctttatgtatggaggagcccaggttattgaggctgctggcgctattggtcttgcccagggcgaacataattttcctggcactccagctctgcttccagacatgcatcgtgccagtcagcatcctggtggtgttggagatactactgttgaatggccctcctggctatgaggctaacagcag

SEQ ID NO: 29370 - DNA, 551 bp, Oryza sativa
  Clone ID: uC-osflM202141f09b1
atggtcgccaaccccatcgtcgagatggacggtgatgagatgaccaggatattctggcagtctatcaaggacaagcttatctttccatttttggatctggacattaagtactatgacttgggagttctccaccgtgatgcaactgatgacaaggtcaccgtggaggctgcagaggctactctcaagtacaatgtggctattaagtgtgcgacgattactccagatgaggctcgggttaaggagttcaacctaaagcaaatgtggaagagccccaatggcacaattaggaatattatcaatggcactgtattcagagagccaattatatgcaaaaatgtcccaaggcttgttccaggatggactaagcccatttgcattggaaggcatgcttttggtgatcagtaccgagcaactgatgcagttctgaaggggcctggcaagctcaagctggtttttgagggaaaggatgagcagattgatctggaggtgttcaacttactggtgcttgaggagttgctttgctatgtacacactgatgagtaatccgagct

SEQ ID NO: 29371 - DNA, 535 bp, Oryza sativa
  unsure (1)..(535): unsure at all n locations
  Clone ID: uC-osflM202141f11b1
ccacagggcacgataccgccgtccgttcgcggcgcgacccttcgccgccgcgccgccgcgccggcgctatgcagcgcctccaaaagcagctccttcccgccctgcgcgccgccttccctctccctgcctcccacttcagcagccgccttctctccgcctccaccgccaccttatcccccacccgcttcgtcgacgaggacgccctcgtcgccgcctgcggcctcaccggagccgaagccctcaaggcctcgaagcgtctacagaaggtaccctcaaatctagacgccgccctcaccttcctcgcctttctcgccgacttccgcctctccaaagacgacatcgccgccgcaagctcacggtacccgcggttcctccatctcaaggtggacgaaaccctaacctcccaagtagcccggctccgggatatcggcctatccactcccgagattggccgcctcattaccatcgccccctgcatcctctccaatcctcgcacgatctccngnctngaattctacctctcctttttgggctc

SEQ ID NO: 29372 - DNA, 471 bp, Oryza sativa
  Clone ID: uC-osflM202141g03b1
tatttccactcgtctcaattagtctccaccaattctctctttctctctcaattagtctacgacatttcgttctgtcctcgatcgaatcaggaggttcgctgaagaagagaggagagagatcgaggttggatatttgatatttctttcagatcagtaggtggcttgtcgctggagcttgacaatggacgtggtcggcggctgctagtaaccctaggacgtggaggcggctgactgcgaccagcacgagtcgtcgatggagatcggttggcccaccgacgtccgtcacgttgaccacgtcaccttcgaccgggtccatggcttccagggcctacaccgccagctccagtccgaggtcgtcggcaacgcccacagcgcatgcaagactgtgttcggcgtgtcaaccgtgtcgatgcattgctcggacgacgcgcggtggaacagcgtaccgagcattctcctgctgatgcagcg

SEQ ID NO: 29373 - DNA, 448 bp, Oryza sativa
  Clone ID: uC-osflM202141g04b1
tgtgattgagggtgggagcgagcgcactagcgagtgaatgtgagagcttgagcgatggtggaactgatgccttcatggtggcggctgtcaagagccctgtatgtctattctttttcaaccgaggcatgcagcttccaagccttaaggccttctgcaagaagcttgccaactctgcattggatacctacaaggttaagctcatcacaccacaaaggcatgagcacgagctctaggctccggatgacacctacatgcttgatgccgacgagaccgctggagtagagcttccctactcatgccgtgctggagcatgctctacctgtgccggtaagatcgaggctggcttcgtcgaccagtcggatggatcattccttgatgatgcccaacatggagaagggttttgtgctgacatgttttttctaccctaggccgactgcgtcatccatac

SEQ ID NO: 29374 - DNA, 350 bp, Oryza sativa
  Clone ID: uC-osflM202141g05b1
ctttaccagtgctgcgtcggcggcgggtccagcacggtgatgttcggcccgcgccgccgccgcttcctcggcggcggcgcgcggcggcgcggcgcggcgcgctctggaatggccatggctgttgccctgcagcctgaaaggagaactgttgaaaagaaacctgatgttaaacaaagaagggtggttatcactggcatgggtgtagtaacaccgttgggccatgatcctgatgtgttttacaacaaccttctggatggtgttagtggaataagcgagatagaaaggttcgactgctccacgtttccgacgagaattgcaggagagataaaatccctttctactgatgggtg

SEQ ID NO: 29375 - DNA, 446 bp, Oryza sativa
  Clone ID: uC-osflM202141g09b1
aaaaaagaacatctttctattggaggaagtacgcactgagaataatcaatttactgaacaataataataataagtgacataatacaaagatcaattaaaacacaccccacgtatgcatctcgtgcggctaaattaattaagctttttaactagctagattcattctacgagttgatgacgtagcacttcttcctgatctctccttcctccccggtgagcacctggacgttgcccatcttggtcatggactcgccgaagtcgctgaagaactcggcgtcgaacttgccggtggcgatccgccgcacgtagtccctggtggtggcgtcggtgagcagcgacgcgtcggaggagaagagccccctccgcttcgcgacatggcggtagtagctggtgtcgaacgtcttgtagctgcccgggtccatctcggagatcatgccggactcgtc

SEQ ID NO: 29376 - DNA, 545 bp, Oryza sativa
  Clone ID: uC-osflM202141h01b1
gtttttgcaactcgacaacacagaaagcttttatagaagagcagtgtagggaaaatgaactatcaaatgtcgagataattgtggcagacatcagcaagtttgagatggagcgatcttttgacaggatcatttccatagaaatgtttgagcacatgaaaaactataaggcacttcttaagaagttatccagatggatgaaagaggacagcttattgtttgttcactacttctgccacaaaacatttgcataccactttgaggacaacaatgaagatgattggataacaaggtatttcttcactggaggaacaatgccatcagcaaaccttctgctttactttcaggacgatgtatctattgccaatcattggcttgtcagtggcacgcattatgccagaactagcgaggagtggctgaaacgtatggacaaaaacatcacgtccataaggccaatatttgagaaaacttacgggaaggaatcagctaccaaatggatagcttactgggcgcacgtcttcatctcagtcgccgagctttttggatac

SEQ ID NO: 29377 - DNA, 352 bp, Oryza sativa
  Clone ID: uC-osflM202141h06b1
cgtacgcgtgggcggacgcgtgggctgaaatccgaattcgattccaatcctctcgaccagcgagaggcctcgccttcctcctctcccccacgttggcgtagctcgcgcgcgcgcgcgcgcccgcgcccgaatccacaaacagcgtggtcgcgggcgggggttctcgatgaggcggatgctggaggtggcggcggacgccggctcgtctgcggcggcggcggcggcaaacggcgcggtggactggtggcgcgacgtgaacgagtcgccggtgtggcaggaccgcatcttccacgtcctcgcggcgctctacggcttcgtctccgccatcgcgctggtccaattgatcagaatc

SEQ ID NO: 29378 - DNA, 523 bp, Oryza sativa
  Clone ID: uC-osflM202141h10b1
ttccaatgcagctctgtgccagctggcctgcagcagtaatcttgtggtactctagatcctgttgctaactgtatttttcttattgagctaggcatgtagaaattttttttatcgaacacgcaggacagctgcatatcattgcgttaaagaagggtaaaaggaccttagaaacacacacctacacactacagaactgattacatgcacatccttgctaattttatgcaatattaatagtcctacatctcccagtatctttcataccatgtcagcctatttcaattcttttgtgcaactgctatatcacaattaggcaatgttccacatatttcctttttaggaaaatgggaactctattgttgcattgaattgtttgccaagttgccaatatagactattgtaggtgaccaaaaccttgtggtgctgaccctaagttaatacaaggctgtggctcagaccatattactccttgttgggccaacacctagccctcaggtcacatggcacctgtagtcagatctga

SEQ ID NO: 29379 - DNA, 447 bp, Oryza sativa
  Clone ID: uC-osflM202141h11b1
atcggtgatcggtctatgccgttgctgccgatgacgaagctggagctcggccaccgcggcgaggcgtgggagcccggctgcctccgcgccgtcgccggcgagctcctcttcaccttcctcttcgtcttcatcggcgtcgcctccaccatcaccgccgggaaggcggcgggtggggccggcgaggcggcggcggtgacggcggcggcgatggcgcatgctctggtggtggcggtgctggcgacggcggcgttccacgtctacggcggccacctcaacccggccgtgacgctctccctcgccgtcggcggccacatcacgctcttccgctcggcgctctacgtcgacgcccagctcgccggctcctacctcgcgtgcctcctactccggtgcctcaccgtcggcgccgcccatccgtagacgcgctggccctctgttttgtgccttctt

SEQ ID NO: 29380 - DNA, 437 bp, Oryza sativa
  Clone ID: uC-osflM202145a04b1
ggtcctgatctatggggagcctactgaaatgttaaccttcggttcttctgacggagagggaagcggtgagagtgctggtgcgtacattgtgcgcattccgtgcggtccaagggacaagtacctccgtaaagaggccctgtggccttacctccaagagtttgtcgacggagctctcgcgcatatcctgaacatgtccaaggctctgggggaacaggttagcaatgggaagctggtcttgccatatgtaatccatggccactatgccgatgctggagatgtcgctgctcttctttctggtgcgctgaatgtgccgatggttctcaccggtcattcacttgggaggaacaagctggagcagatcatgaagcaagggcgcatgtcgaaggaggagattgactcaacttacaagatcatgaggcgcattgagggtgaggagc

SEQ ID NO: 29381 - DNA, 204 bp, Oryza sativa
  unsure (1)..(204): unsure at all n locations
  Clone ID: uC-osflM202145a09b1
gcaagacaaggagaaggaantacacctgggactatcgactggttgttcggattttctattggatctatacatgctcgctctgtgcgccggggattcgatcgatggacagggcagcgatctctgcttcgagggtttcgacgaattgaactgcatattcgttgccatatcttcgcataggggtttctgcctctcccttggggaggg

SEQ ID NO: 29382 - DNA, 516 bp, Oryza sativa
  Clone ID: uC-osflM202145b01b1
gcctctcttcacccacctcctctcctccccttcccttccccgcgagctccaacgcccacaaaccctcaccctcccgcaaaaaccctaatcccacctcctcctcctccccccatggcggccaaggcggcggcgctctcctcctccccgttcgtctcctcccgccgcctctcctcccccgcggcgtctctccgcgcccgcacgcctaggtgcgtgatggggagcgagcaggtgagggtggtggtggaggaggaagggaagacgaagaagaggatgggggtggcggagccgaggagcgcgccccccgcggtgtggacgccgcgggcgcccgcgcaggaggcgaggctcgccgcgctgcgcaccgatgggcgggattccaggttgaagatcttctccggcacggccaatcgccccctcgcgcaggaaattgcttcttacttgggtgtagacctgggtaaggtcctcatcaagcgttttgcccatggggaaatctacgtgcagctgcaggagagtgtgagg

SEQ ID NO: 29383 - DNA, 511 bp, Oryza sativa
  unsure (1)..(511): unsure at all n locations
  Clone ID: uC-osflM202145b02b1
ctcttcctaattcaaagcaaagccgccattactgctcctcttccattccactggggacgtacgagctccgcgcatcccttccattccattactgaccttggctgctgcggctgcagtgcagagggggtttggtggtgcggttgatttgagcaataaattctctaggggggagggaggtatcggtcatggctgccgctgctgcaaggaggggctcatcgctgctctctcgctgcctgctgtccaggcccgccgccgccgcctcgcctgctgtcccctctgcgctccgcagggcagatgggacacaaggattgttgccgggaatccttcagaggttcagcactgcagcagtagcagaggagcccatatcacccccagtccaagtgaactacactcagctcctcattgatggaaaattcgttgattcagcatctggcaaaactttcccaactctggaccctcgtaccggggagctgattgcccatgtggctgaaggcgatgcngaggatattaa

SEQ ID NO: 29384 - DNA, 444 bp, Oryza sativa
  Clone ID: uC-osflM202145b04b1
ctcagaggggaagaacccagacggtgtggtttttttaaccaaacacgccgtgtcccacccaacaggaagctcagaatgcctctcagacaccagatgaaacaaactatcacacatccccaccagatcagaaggcattgcaacaagctgctggtaataatgatgagctttctttgaagcagaatcaggcaacccgtgcagaacatcttacagctacagcccatgggaaacaacagcaacaacaacgtttcccaagtgtggtttctgaatccactcatgaacaaaagttacaggttgtggaatccaatgtaaccgaacatttagtttacaatgagcaacaaatggcccaggattcatccttaattgtcagccctattcgaaaatttgaactttaagaggcaaccaaatgaattccagggttgaaaaagttgcatccggcaaccagtc

SEQ ID NO: 29385 - DNA, 388 bp, Oryza sativa
  Clone ID: uC-osflM202145b05b1
ggcggtggctacggaggaggtggcggcgtcaaaaacttgttcttttttaaaaaaacctgcattttgccccccaaaaatcattttcattattatcccccctcaccacatttaataaactatcacatttatctaccataaatcaacgcattagaacgagctgctggcaatatgcgatgagccggggttggtagcagaaggagagggcggcggcagaacatgagacatttacggcccacgttagtcagtagaatcgtggactgtgtcaaaacgaggtgtttgaatgcactcatgaacaaaagtgacaaggagaggaatccagatgtactgaacatctagtctacagtgagcaacataaggcccaggatcgatttcaaagtggtacccctat

SEQ ID NO: 29386 - DNA, 510 bp, Oryza sativa
  Clone ID: uC-osflM202145b10b1
tttttgttcctcagtttggtagtttccagtcacagtcgacaattcaaccaaacatgcagtggcccaatcaacaggaagctcagaatgcctctcagacaccagatgaaacaaactatcacacatccccaccagatcagaaggcattgcaacaagctgctggtaataatgatgagctttctttgaagcagaatcaggcaacccgtgcagaacatcttacagctacagcccatgggaaacaacagcaacaacaacgtttcccaagtgtggtttctgaatccactcatgaacaaaagttacaggttgtggaatccaatgtaactgaacatttagtttacaatgagcaacaaaaggcccaggattcatcttcaattgtcagccctattcgaaaatttgaacatcaagagcaaacaaatgaattcaaggatgaaaaagttgcatcgggcaaccagtcggaggagcaggtagctaggcatcagcatatagcttcagaatttgatgcatcaactactc

SEQ ID NO: 29387 - DNA, 124 bp, Oryza sativa
  Clone ID: uC-osflM202145b12b1
ggatctctgccacggggagcccaccgaaacgaaaagggggggtcccacagacggagagggcagcgccgccagaccagcaagaaacaaagagcgcaagacgagcggaccaagggaacaagaaccc

SEQ ID NO: 29388 - DNA, 408 bp, Oryza sativa
  Clone ID: uC-osflM202145c01b1
ccggtgttctataccccaacggccaactgggtcccggttgcctactgacgggccgtgcaggttctcaccggcaaagggcagggcggccccgagcaccgtcaacggcatgctctggtcggaccaccacctgcgccgactacatacagtggaggctcctcagttgggtcgaccggggtgctgcagcccggacgacaacatggcccggtgacaactacactacgaacagggtgaccatagaagtgagaacttaactatggcacgaacggaccctgcacctgcaccaatgtcatcaaaggcgatgaatccggcccccaccggcagcggaaggggcgggccgggagtgacccatacgatggtgctggacacggagagctacgtgacatgggagcagtgctcgacaagccccaa

SEQ ID NO: 29389 - DNA, 570 bp, Oryza sativa
  unsure (1)..(570): unsure at all n locations
  Clone ID: uC-osflM202145c02b1
cttttcttcccttctcctcttcccccccctctctctcttctctctttttttatataatcaactaatttcttgctaatttttttcctttgctcctatctctcttatggctgtgtgggagtaggagagagaaagctgggatggatagatagagaggaagagagggaagccaacaaaatcggcagtagcctctcccccattttttttctcccctctctctctattcttcttctttctcctctccagcaaccgctctcctcagtcctctcctccccaccaaatcaagctgctcttcgccgcggaggtcgtcggattccgggccctctcaccgcgtggatctgccggcggggagggagatgggggctcttgcgccgcggcggcgcgggtcggggatcgaaaggtggtggatgagctgctgagctaggaagcaaaagctttcttgctttcacgaggcgtactcaaccatcttgttatgctggaggggcaggataagagcaggcccaattgcttcagagctctggngttcttggtgcggactgtagcagcagcagaagcagtagatctggaggggtc

SEQ ID NO: 29390 - DNA, 164 bp, Oryza sativa
  Clone ID: uC-osflM202145c07b1
ggggggcccttaaaaaaaaaaccaccgaacccccccgccaaaaccaaaaataagacaaaaccaaacaaaaggatgagcgggagaaggacagagaaagcagggaaggcaagacagagaggaagagagggaagccaacaaaaacggcagaaggccacccccccaca

SEQ ID NO: 29391 - DNA, 386 bp, Oryza sativa
  Clone ID: uC-osflM202145c10b1
gcagctaaaaagcctattatgggggaggagaggcggatgagccggtgcctgcactgacacacaacgatgacctacaaccgtgctgatgggagacatgggctaccgggatcctggggcggctgcctgtcaagcacctactgcagtacaagccctcgtgcggaggatgactagccatcattgactacccggtggaaacgcgaacttacctgcactcgtataggtgcaggcggtagcagagacacagtttaccaataaacggtcacagcagggtcaaagctcgtcgggtccggtgtgcatggcgatcctattgccacccattacattagtggcaacttgaacagagtatcgacacgacgtctaccagaaacaataatgtggcggggctg

SEQ ID NO: 29392 - DNA, 465 bp, Oryza sativa
  Clone ID: uC-osflM202145d07b1
ctgaccccgaccccggactcgtggaagctcaaggggatcttcgccacgggcatcgtgctcggcacgtacatggcgctcatcaccgccctcttcttctacctcgcgcacgacaccgacttcttcacagagacgttcggggtgaggtcgatcaagacgaacgagaaggagatgatggcggcgctgtacctgcaggtgagcataatcagccaggcgctcatcttcgtgacgaggtcgcggagctggtcgttcgtggagaggccaggggcgctgctggtgatcgcgttcctggcggcgcagctggtggcgacgtgcatcgcggtgtacgcggagtgggagttctgcaagatgcaagggatcgggtgggggtggagaggggcgaactgggcgttcagcgtggtgacctacttcccgctggacgtgctcaagattatcatccggaacgcgctgagcgggcgggcgtggaac

SEQ ID NO: 29393 - DNA, 513 bp, Oryza sativa
  Clone ID: uC-osflM202145d09b1
ttgtaaggcgtcttcgtactcgcctctctccgcgccctcctccgccgccgctcgccgccgttcgtctccgccgccaccgccgccgccatgagggagtgcatctcgatccacatcgggcaggccggtatccaggtcgggaacgcgtgctgggagctctattgcctcgagcatggcatccagcctgatggacagatgcccggtgacaagaccgttgggggaggtgatgatgcttttaacaccttcttcagtgagactggtgctgggaagcatgtcccccgtgctgtcttcgtcgatcttgagcctaccgtgattgatgaggtgaggactggtgactaccgccagctcttccaccctgagcagctcatcagtggcaaggaggatgcagccaacaactttgcccgtggtcactacaccattggcaaggagattgttgatctgtgccttgaccgcatcaggaagcttgccgacaactgcactggtctctagggcttccttgttgtcaacgctgttgga

SEQ ID NO: 29394 - DNA, 255 bp, Oryza sativa
  Clone ID: uC-osflM202145d11b1
gctccggacggatgacaggcgccggcacaccgggggggattggtcccgggagaccccggtcccaaccccccgggcccgagcaagaagccagagcaccccccgaggaccaaaccgatgagcaagaccaggcgaggagggcgaacctgggcggcagcgaggagaagacccccgaggccagcaacaagaccgaaaccccccgacgccaggaggccgcccggagaaagaccggccccctccaacaggacagaggcaccc

SEQ ID NO: 29395 - DNA, 559 bp, Oryza sativa
  unsure (1)..(559): unsure at all n locations
  Clone ID: uC-osflM202145e01b1
gtcgtgtttagaagagggcgttcgcgcatggggaaggcggcgagcatgagggtggcgctggtgtccgtggtgctcgtgggcctgatcctggtttccacggcccacgccgcgcggcccgagaagctgcccgccgtcgtctccccctccatcgcccccgccgtcgccgaggtcgtcgatgccgccatcaacgccgtcgacctcctggcagggtttcaaaaaccgtcgggggcccggttaccgccacccggcggtacggcggttaccggcggtaaccgcgcaaaaccgcgacaaatttacaaatcgaaatttgaattcaaaaattcgggcaaaccgcgcggtttgacgcggtaaccacgcgtgttggcgcggttaccgcgcgatgtgtaatgggttgcacagtaacgggccggcccatntttttttctttttccaattttcaatttattctcccgtttgctctcaaatttgaataaatattanctctttttgagaaattcttcaccataaaacactataatataagcactaccttcactattttttttgatttttttctttt

SEQ ID NO: 29396 - DNA, 574 bp, Oryza sativa
  unsure (1)..(574): unsure at all n locations
  Clone ID: uC-osflM202145e03b1
tcttcgtttctctctctctctcgtcgcgttggatttgacgagctcgtcaccaccggctgcggcggcgaggcaggcatccgcactcctcggcgtcgggccgtcgtcgttgtccgctacctggaaaagatggctggtggctttagggtattgcatcttgtcaggccttttctggctttcctgcctgaagtacagagtgctgataggaaaataccatttagagaaaaagtgatctacactgttatttccctattcattttcctggtatgcagccagctaccactgtatggcatccattcaactactggagctgatcctttctactggatgcgtgttatccttgcatcaaaccgtggtactgttatggagctgggtatcactccaattgtgacatctggcatggtaatgcaacttctagtgggatcaaagatcattgaagttgacaacagtgtgagagaggatcgtgctctgctgaatggcgcacataagttanctggtatcctgatggcaattggggaagctgtggcatattgtttgtctggaatgtatggcagtgtaagccagcttggaactggaa

SEQ ID NO: 29397 - DNA, 294 bp, Oryza sativa
  Clone ID: uC-osflM202145e07b1
acgcgcaaggggaagggggggagctttagggaggcgctgccgttctttccgctcgtgggcctgaacctggtttcaactgtccacaccgcgcgttccgagaagcttgccgccgtcttctccccctccatcgcccccgacatttacaaggtcgttgatgccgacatcaactccgtcgacctcctggcagggattcaaaaaccgtcggtggcccgaataccagccatccgatgatacggcggttaccgtgcggtaactcgcccaaaaccgcgacataataacaaaatcgaaatttga

SEQ ID NO: 29398 - DNA, 383 bp, Oryza sativa
  Clone ID: uC-osflM202145e08b1
ctctctctatcgacgcgtcggatgggaggagctttttaccaccggctgcggctgccaggcaggcatccgcactcctcggcgtcgggccgtcgtcgttgtccgctacctggaaaagatggctggtggctttagggtattgcaacttgtcaggccttttctggctttcctgcctgaagtacagagtgctgataggaaaataccatttatagaaaaagcgatctacactgttatttccctattcattttcctggtatgcagccagctaccactgtatggcatccaattcaaccactggagctgaacctttctactggatgcgtgttatccttgcatcaaaccgtggtactgttatggagctgggtatcactccaattgtgacatcc

SEQ ID NO: 29399 - DNA, 423 bp, Oryza sativa
  unsure (1)..(423): unsure at all n locations
  Clone ID: uC-osflM202145f01b1
ggatacttagcgatccttcttgcgctccggcgccgccgtctccccctcgcgcggttgcctgagccaagaacaggatcggaggccacgccccatgcatgcatgttaattagtctgtcactgatcacttcatcccattagccattagctgtttctcatccagacggacgcgccatccaacacacatcgatctatcggaggttgattgcccggccatgacgacgactgccggcggccgagccaccctgtgcgcggctagggatgagctggagctcctggccacccgcctgtatgtgaacggcatcacgacgcacgattgcaccagtgaatccatccttatctaccttaccgngccggggctctgcatgatgcccatgcgggtgatggcctccgactccatcgtctacgtcaagctccgcgtccaga

SEQ ID NO: 29400 - DNA, 494 bp, Oryza sativa
  Clone ID: uC-osflM202145f02b1
cggtcgtgtgggcttccttccttccttccccttctctgtgtctctctccccctccctccgatctcgccgcgtccgtgtcccctcgccgccgcagccagcgtcgagggctcggcgaccggaggaggagaggccggaacccgccgccgtcgccgccgcctccgcctgtagcgagatcgctcgatccggttcgcctcccgcgcgccagtccgccagcccagttcgatccgttgagggggaggggacgctctagtgtggggattgggggaatcgatggcggcgccgccggcgagggctcgggccgactacgattacctcatcaaagctgctcctcatcggcgacagcggtacgtagctgaatctgcgccatcccgctcgctctcccctcgccgcgcgctcggcgatcgatcccgcgcagcgcgcgcgagatctggttgtgtttcacctgcgaatttgagatccgattcggtgggattgctggtgtgaggtgagtttgg

SEQ ID NO: 29401 - DNA, 525 bp, Oryza sativa
  unsure (1)..(525): unsure at all n locations
  Clone ID: uC-osflM202145f03b1
attattttaaagacaagctagatatatggagtttttaaaatataacctctattattagttattggttctcgctggtaaagcaagtatacagttaatcaatctgggcactgcaaccttaaagcaaaagttttccttacttagttttccttacttgttcttgcttttcttcaaattaagttgaaatctaaatattcatccagtgattttggaagatgaaaaacactcgtgtgtatgatggagtttataggagagtagcacagttacttgcaagacatttgtccccttttgaaacaaagtacttatttattttatatagtacaagatatttgttcagtgagtagataaaaatccagtttgttgtgaaggctttcaaatgggctaattttgcactatatgattagccctttgcttatatatgaactttntttttaacattctcttgctgttgctgctgcttagtgacatttctcattctgtgctttcagcagggcagctttgctcttatgcaagtgacatgttaacact

SEQ ID NO: 29402 - DNA, 499 bp, Oryza sativa
  Clone ID: uC-osflM202145f04b1
catgtctttcctcctcccatctccgcttcccttcttgttcttcttcgttgatccactcacccgccgcgcgcagaggaggccatggcggatcagctcaccgacgaccagatcgccgagttcaaggaggccttcagcctcttcgacaaggacggcgatggttgcatcacaaccaaggagttgggaactgtcatgcgttcactagggcagaacccaacggaagctgagctccaggacatgatcaacgaggttgatgctgatggcaatggaaccattgattttcctgagtttctcaatctgatggctcgcaagatgaaggacactgattcagaggaagaactcaaggaggccttccgggtgtttgacaaggaccaaaatggcttcatctccgctgctgagctccgccatgtgatgacaaatcttggcgagaagctaactgacgaggaggtggatgagatgatccgtgaggctgatgttgatggtgatggtcagataaactatg

SEQ ID NO: 29403 - DNA, 528 bp, Oryza sativa
  unsure (1)..(528): unsure at all n locations
  Clone ID: uC-osflM202145f05b1
agcttatcagatgaccgcagagatgagctgataggctttgtaaccacgagaataattgcagcacaagatagcgaggtatgacatgcaagattgcatcgatcttactgatgagctcggtggaactaataatttggcttgcagattgaggacttgtttaggtataacagctcacgcaaagatctgacacttctgtatatcctgacgctcggtgtagtggagagctacagaaacctcggcataggttgttacctgctcgtccaacttagttttacagtttgtgattatgatctgattaatcctcacaagcattcgcgcttgcagcatcctcactggtccgagaggtgattaaatatgctgcaagtatctcaaattgcaggggtgtctatttgcatgtcatctcatataaccaacctgctatcagctnttacaataagatgctatttaagcttgtcagacgacttccacatttctattacataagagggcagcattatgattcatactngtttgtgtactatgtcaatgggg

SEQ ID NO: 29404 - DNA, 528 bp, Oryza sativa
  Clone ID: uC-osflM202145f06b1
cattcttgttaccaatgtatagtgaagcaaagctggcatttatcgtgtatctatggtatcccaagacacagggcacttcctatgtgtatgagtcattcttcaagccgtacattggcaaacatgaagctgaaattgatcgcaatctacttgagttgaggactagagctggtgatatggcagttcattacttccagaagatcgcagactacagtcacacaaggttctatgaaatcttgcaatatattgcttcgcagtcagaggctcaaagatctcgtcctcaggcacagcaacaccagcagcgtccaccacctccacggactcggcaggtgaaccctgcaccgccgtctgttccttcaccgtcagcgcctccgctgccgccacagcctccgccgtcaaggaaccaagctcaagctgacaaggccccaattccggtcgcccctcaggcgccgccgtgcctcctgcacagccacagccacagccacctcaagcaggcgctgaagccgtcacatcggagagcaccgaggcgac

SEQ ID NO: 29405 - DNA, 457 bp, Oryza sativa
  Clone ID: uC-osflM202145f07b1
caataaaataggcagccgtagcgatcgaccttctccgacgagttctctctttcttctccttcccccggcaacgagcctgacgccgctcgcgcccgcggaggggaggggaggggaagatctagaaccgcggggaagacgacggctgatggctagctatagctgattgatttagcggctcaacatatataccaaggcggcgcggccggccggcacgccggcagggtggtcgccggcgaacctcgcgtagagctcaccctcccctcctccggtggtctgcctccccctgcattggcggatcgaggacgcacgcacgtacgactcgttcgttcgttcactgccatgccggcccgtgccctcgccgtcgaatcgtcgtcgtcgtcgtcgtccctgcgcgtctgtgacgtctgctgctgactcgtggatgtagcttgattgctcgccgtacgtcgtcgacatg

SEQ ID NO: 29406 - DNA, 438 bp, Oryza sativa
  Clone ID: uC-osflM202145f08b1
attttctaattacaagctagatatatggagttttgaaggtatatcttctattattagccactggtccccgctggtaaagcatgtatacagttaatcaatctgggcactgcaaccttaaagcaaaagttttccttacttagttctccttacttgttctttgcttttcttcaaattaagttgaaatctaaatattcatccagtgattttggaagatgaaaaacactcgtgtgtatgatggagtttataggagagtagcacagttacttgcaagacatttgtccccttttgaaacaaagtacttatttattttatatagtacaagatattttgtcagtgagtagataaaaatccactttgttgtgaaggctctcaaatgggctaattttgcactatatgattagcccttcgcttatatatgaactttttttttaacattct

SEQ ID NO: 29407 - DNA, 241 bp, Oryza sativa
  Clone ID: uC-osflM202145f09b1
tcacccattcgacggcttgtataagagggcgacgcgcagggaaggggggagctttagggggcgctggcgttccgcgctcgaaggcctgacctagttaaacatccacgccgcgcggcctgagaagctgcccgcgctaatacccttcattactgctgctcgcgccgaggtcgtgatgccgacataacgccgtcaaccttctggagggataaaaaacacactggggcccggttaccgccacccg

SEQ ID NO: 29408 - DNA, 470 bp, Oryza sativa
  Clone ID: uC-osflM202145f10b1
agctcttctatgaccgcatagatgagctgataggctttgtaaccattagaataattgcagcacatgacaccgaggtatgacatgcaagattgcttcgatcttactgatgagctcggtggaactaataatttggcttgcagatagaggacttgtttaggtataacagctcacgcaaagatctgacacttctgtatatcctgacgctcaagtgcaacggagagctacataaacctatgcataagttggtacctgctcgttcaacttagaaccacagatttgtgattatgatctgattaatcctcacaagcattcgcgcttgcatgattctcactggtccgagaggtgagtaaatatgctgcatgaatctgaaatagcaggggtgtctatttgcatgagatctcatataaccaacctgctatcagcttttacaatacgatgctatttaagcttgacaacaactttcacatttt

SEQ ID NO: 29409 - DNA, 398 bp, Oryza sativa
  Clone ID: uC-osflM202145f11b1
accaccgtatagtgcaactgggcggggagggatcttctgagcaaagtgccccaagacacagggcagttggtaatgatatgaggcattcctcatgccggacatggtcgaagatgaacctgcaattgatagcgatctaccggtggcgtggagttaacgtggccgagcgggagctcactactttgcgaagatcgcagaccacagtaacaggagagctcatgaaatcttgccatatgttgcttcctggtcatacgcctaaagatctcaggctgagatactgaaccgacagatgctgacaacacctccacctagtaagatggtgaacgctgcaccaggggctgttaatttaccgagggagcctacactgccggcacagccttctgcgtgaaggaaccaagatc

SEQ ID NO: 29410 - DNA, 483 bp, Oryza sativa
  Clone ID: uC-osflM202145f12b1
atactgattccaatgtatagagaagcaaagctggggtgttatcgtttatctatggtttcccaagactcagggcacttcctatgtgtatgagtcattcttcaagccgtacattggcaaacatgaagctgaaattgatcgcaatctacttgagttgaggactagagctggtgatatggcagttcattacttccagaagatcgcagactacagtcacacaaggttctatgaaatcttgcaatatattgcttcgcagtcagaggctcaaagatctcgttctcaggcacagcaacaccagcagtgttcaccacctccacggactctgtaggtgaaccctgcaccgccgtctgttccttcaccgtcagcgcctccgctgtcgacacagtctccgtcgccaaggaaccaagctcaagctgacatggccccatttccggtcgctcctccaggcgccgccgtgccttctgcacagtcacagccacagccacc

SEQ ID NO: 29411 - DNA, 470 bp, Oryza sativa
  Clone ID: uC-osflM202145g01b1
accttactgagcgagcagctagctagctgcggcgatggcctccagagcggcggcggtcgccgtcctcctcctcgccgtggcggcggcgccgctcttcgccgaggcgagcgcgcatggccgaggctaccttggtgccaagtcctggcctactgacggcagcctgagctcatcaagctccggcgaggctgcagcggcggacgtcgacaacggccacacggactggaagagctactcctcctgcatgagcaagtgctgacaccgccacgacgacgacgacgacaacaaggccaatgccaaggccaacgccaccgccggcgccgccgccgtcgggctcgacgatgactacaagtgcaagaagcagtgcctcggcaactgcttcaaggacgtgccggccgattgctaccacaagtgcgtctacgactggtgcgcgaagctgccaccatatagctccgcgaaggtgcagtgctaca

SEQ ID NO: 29412 - DNA, 446 bp, Oryza sativa
  unsure (1)..(446): unsure at all n locations
  Clone ID: uC-osflM202145g02b1
tagtttttcactcaagcaccggagagagagagagccgacggccagtggaccacgacccggtcagcggcggaggagatccggcgtccggcggcgtggtgagcttaagcgatggtggcgccactagcccgccggatgcggtggcgagacagattcccccgggtggctatggagaccggtggtggacctctccctggagcaacgcgagtggaggtggacgctgaggtcggcgcagaggggatagaccggcgggagtcggcggcggtcggcgcggagttgtcgggacgcggaggatggcggtgcggcaactcggcgggaccagcgagcgtggtggccaggctgtcaccgggcaccggccgacggtccatggacgttgaggtctaccagcccggtgacgtgcgccagcggctgcggtggatttcttcggngggcggccacccgattttttt

SEQ ID NO: 29413 - DNA, 559 bp, Oryza sativa
  unsure (1)..(559): unsure at all n locations
  Clone ID: uC-osflM202145g03b1
gcatgattaagatcctgtgcaagccgtccctggaatccatggaagccgtcatcgagatcgccaagctcgacgccatgaagacggtgttcttcgacgacagcccacgcaacatcgccgccgggaaggccgccggattccacacggtgatcgtggggagctcggcggcggtggccggggcggacgtggcgctggagagcatccacaacatcaaggaggcggtgccggagctgtgggaggccgccggcgagcacgtccaggcccagctggcccaggccgccgtcgacctccgctccgccgccgtcgagaccaccgtgctcgcctgagctgctcagacgccgtcctccatgtcgccgtgcatgctccctttcccatggtattaattaattagtggatgatttttttttcctcaatgacactagcttactgcaaaaatcaagagagggaggaagacggtgaacaatggcgtgaggtgtactcggtgatntgtgtgatgaatgaacctgtcatgtaatgaactactgatgtgaatgaatgaatggatcaataagaattgcctcat

SEQ ID NO: 29414 - DNA, 504 bp, Oryza sativa
  Clone ID: uC-osflM202145g05b1
ctccctccttcctcggcccttccttcccttcttccctgggtggtggttgcggcggctcgcaatcgcgaggaggagaagacggtgaagaagagcaagaagagcaagagcaagcgcgtgacgctgcggcagaagcacaaggtgctccgcaaggtgaaggagcaccaccgcaagaagcgcaaggaggccaagaaggaagggacgagccacaggaagaaggtcgagaaggaccccgggatccccaacgagtggcccttcaaggagcaggagctcaaggccctctaggcccgccgcgcgcaggcgctccaggagctcgagctcaagaaggaggcgcgcaaggaaagggctaggaagagaaagcttggattgcttgaggacgaggacattgctaatttggcctctgcagcttctgctcagggcagcgagtttgcagagaaggaagctacaaaggagaaggcctctctagacgtggtttagagccaagatcattcagagagagccttctac

SEQ ID NO: 29415 - DNA, 520 bp, Oryza sativa
  Clone ID: uC-osflM202145g06b1
gtctcatttatcttagaggaacagttctctcgcatggatgctgccaaccacctcctactcgtaaaagactatgtcactcttctgggtgcaaccatgaagaagtatggataccaaaccacatcattgcttgaaattcttgagaagaatagggacaaattctatcaacttcttctttctgattgccggaaaaagatagatggcatcttcactaaggactcatatgagcagatgatcattaagaaggaaaatgagtaccacatgaatgtttcagcatttcaacttgaacccattggtgtagttccggattttccatatgttgcaccattttcctcttcagttccagatgcttgccttatcgtgcgctcttttattgatgattctgtgaactacttgtcatatgatcctatgatggacgcctatgatgtggtgaaaagatacctagacaagctcttgattgaggtactaaatgatggccttctgaattgatacatggtggttgttggagattacacaatggtgc

SEQ ID NO: 29416 - DNA, 79 bp, Oryza sativa
  Clone ID: uC-osflM202145g08b1
accggaccggaaggaaccgggtcgacccactcaacgaaattctcagaacccgggcaaagcgaacccggaagggggggaa

SEQ ID NO: 29417 - DNA, 395 bp, Oryza sativa
  Clone ID: uC-osflM202145g09b1
ttttctgcaaagtcctcaaggcgaacggcctccatcttctccttccagctcctcccatggcgtccctcgtcgccatcgccatcgccatggctctcatggtggttcaacctggccggcagatgactgcctttgctgctcggacgtcgccggcggcggcggcggaggcgttctggcgtgccgccatgcccggcgctcccatgccggacgccatcgtcgagctcctccaccatgagcacggcgttgctagcgccggcggcaaggccaacggcggcggcgactgtccaccgccgccgatgaacttcaactacgacgactacagggccctgcctcggagcgacgccccttccccggatgcattgaaccgcgtcgccgccgtacagaacgccgacgagaac

SEQ ID NO: 29418 - DNA, 481 bp, Oryza sativa
  Clone ID: uC-osflM202145g11b1
gttttagatggacttgaatttccaactattcgaaacagcaacgctcttcataacagtactagtcgtggcatttatgctacaggatggtgttgcgaactacttgaaaggacttatgctgatcttgtgttatctaatagttgccgccagtttcttcgttcacgttgatccacaatccagcgatgattgatgccacggacactgtaattattgtaccaaatacccttgaagcctttactaatcttaattctggtgagttgctcctccgtagcagagctcagcctgctggcaggagctggcagaatgttgacacggccgggaaaatcacgtggtgtcggttagtttgtccatgatctgcagcagcaattattgcacgttgcaatagtcaaaagatctgaagggcatctaggaggaggggtggttgtaatgtatacagattacagaaacatggaaatgcaatgcaatgtcgcccatgtaaaaagtc

SEQ ID NO: 29419 - DNA, 369 bp, Oryza sativa
  Clone ID: uC-osflM202145g12b1
ttgttaagcactcaagcaccggagagagagagagccgacggccaggggaccacgacccggtcagcggcggaggagatccggcgtccggcggcgtggtgagcttaagcgatggtggcgccacgagcccgccggatgcggtggcgagacagattcccccgggtggctatggagaccggtggtggacctctccctggagcaacgcgagtggaggtggacgctgaggtcggcgcataggggatagaccggcgggagtcggcggcggtcggcgcggagttgtcgggacgcggaggatggcggggcggcaactcggcgggaccagcgagcgtggtggccaggctgtcaccgggcaccggccgacggtccaaggac

SEQ ID NO: 29420 - DNA, 343 bp, Oryza sativa
  Clone ID: uC-osflM202145h01b1
ctcttgtgttcttcaactccggcagtggcacgtaccacaccggcatcgccagagggcgaagacgacacagcaccaagaccagcttaggtagacccccccagggaggctctctccttggctaaggaggaacgtgctccaccttggggcgctggcgggggcgagcgcctccactgatgaaacgggggctgctggccgatggctaagacatggcgcccggttgataagccagcaaggtcttgtgacatacgagaagctttcagaaccgcacccgaatccaaaaccaaagactgatcctagaccgacgccataacctgatgccaagccagatccggagcgaaaacca

SEQ ID NO: 29421 - DNA, 206 bp, Oryza sativa
  Clone ID: uC-osflM202145h02b1
gaatcctatagttcagtgataccacgtacatcaggggacttgttatagggataggcggacagggtccgaggaggagcaccaagcccaagcccaagccgggtactgttgttgaacccgcgccggcatgctcctgcttgaggagttggccgtggctagcgacttcaccgacgatgggcccgccgacgcacgcgcgctcggtcatggcg

SEQ ID NO: 29422 - DNA, 387 bp, Oryza sativa
  Clone ID: uC-osflM202145h03b1
agcgtctctcggttcgggcctcagcgggcggtgtgtgtgtgtgcgcctccgcgagaccagacaccaacctctctctgtctctctgccatccttgccctgctcctcctccgcctcaccgccgccgccacacgccgtacggtctctctccccgagattcgagggcggcaggaagcgcatggggagaaaggatgccagagttgcgtagtggagtccggcaagctcggttgaaggcaaagaaggttgaggaccttgcagcacaggacccagctgagaactcgatagtggtggcaccgacggtggcaggaagacgcggcataggaaggggtggcaggggctgaggtatagcaacacgctgaggaagggcacccggaagagggtgaggcgttc

SEQ ID NO: 29423 - DNA, 563 bp, Oryza sativa
  unsure (1)..(563): unsure at all n locations
  Clone ID: uC-osflM202145h04b1
atcttttcttggttcgacccagctcccagatgatttcatcctgaatcatcgtcgtcgtcgtcgtcgtcacaggcaagaagaggagaaggaattacacctgggattatcgattggttgttcggattttcttttggatctattcatgctcgctctgtgcgccggggattcgatcgttgggcagggcagtgatctctgcgtcgagggtttcgacgaattggactgcagattcgtcgccatctcttcgcagaggggattctgcctccgccatggggagggtcaagctcaagataaagaagctggagaacagcagcggccgacatgtcacgtactcgaaacggaggtccgggatcctcaagaaagccaaggagctctccattttgtgcgacatccctctcatcctgctgatgttttcacccaacgacatgcccacgatttgcgtggcgatcacagcagcatagaggatgtcataacatagtatgcacagcatactcctcangaaagggctaaaaggaagttggagagcttagaagccctaaagaagacattcaagaaactagatcatg

SEQ ID NO: 29424 - DNA, 543 bp, Oryza sativa
  Clone ID: uC-osflM202145h05b1
gaagattgtgaacatttacaagtatccgatcgggagattgcgtgttcagcctgttgggatcatcgtcttcgcggccatcatggccactctaggtttccaagtcttgatccaagctattgaacaactggtggagaacaaggcgggagagaagatgacaccggagcagttgatatggttgtactcgatcatgctttcagcaactgtggtgaaacttgccctctacatatactgcagaagctcagggaatagcattgtccaggcatatgcaaaggaccattacttcgatgtcgtaaccaatgttgttggtttagtggctgctgtgcttggagataagttcttctggtggattgacccaagaggggctgtgctacttgctgtgtataccattgtgaattggtctggaactgtatacgaaaatgcagttacactggtgggtcagtgtgccccttcagatatgctgcagaaactgacatacctcgccatgaagcacgatccacgtgtgaggcgggttgcacggttcgagcttacagctttgaagctctc

SEQ ID NO: 29425 - DNA, 559 bp, Oryza sativa
  Clone ID: uC-osflM202145h06b1
cccccgtccggggtctcttgggctgctgctcatcagtagttcatcagtagtagtggtaggggagataattcgtcgttcgttttgtgcatccatccagaattcgttccaaatccagccagccagccatctcaagcttctctcttctcttgttattaagagcaagcaaacagtagtctagcgaagcgagactgcgagagcagagcattgttcttcttctctagctattagtggtggggaataatggctcccgccaccaccgcagcaatggccctcgcgccgcctccttcccatcaccatcaccatcaccatgtcaagcagctgcagctccctccgtctgtctccgtctccgtgcccctccgctccggtttccttggccgcgcactgcctgctgctgcccacccacagccgctgctcgccgccgagagccgccgcagcagcgccgtgtccgtgcggatgtcgtgggacgggcccctctcctcggtccgcctcattatgcagggccgcaacgtcaggttctcctccctactgtaccactagtttgctccctggaatttctcgt

SEQ ID NO: 29426 - DNA, 509 bp, Oryza sativa
  Clone ID: uC-osflM202145h07b1
gattctcacagttcagttctaccacgtacaacagcagaagtgagagagggagaagaagacaagggaagaggaggagcttagctagccagccatggcgaggcgctctccttgcctcgccgtcgccatgctcctgcttggggcgttggcggtggcgagcgccttcattgatgaagcggcggctgctggccgggggctcggccatggcgcccgcttcatgagcaagcagggtcgtgtgacatacgagaagctgccggagccggagccgaagccaaagccaaagcctcatcctaaacccacgccaaaacctgagcccaagccagagccggagccaaaaccagtacctgagcctgagcctaaaccggaaccaaagccagaaccaaaacctgagcctaagcctgaacctaaaccatacccagagccaaaaccggagccgaagccagagccaaaacctgaaccggagcctaaacctgagcctaagccagaaccaaaaccagaaccaaagccgtacc

SEQ ID NO: 29427 - DNA, 349 bp, Oryza sativa
  Clone ID: uC-osflM202145h08b1
tattatcttcactcccctgagctcaccttgatcaccctcctcgccatcgccatggccgacaagcctccgccgccgccaaccaagcccaagcccaagccggctacggctgctcaacccgcgccggcgccggcgacggcgaggacgacgccgccgctcaagaagccaccgccgctggccccgcccacgcaggcgcgcccgctcaagccgccgccggcgcaccagtacaggcagcagcagcagcagcagccggctaatcggaagcggcagtacgggaggcaccgcggcggaagcggcgggtgctcggggcggcgggtgtgctgcctcgccacggggttcgtgctcctcgcgc

SEQ ID NO: 29428 - DNA, 447 bp, Oryza sativa
  Clone ID: uC-osflM202145h09b1
gtttgatccatcacactcacacaacacaaccctccccaaaacctcccgaagagagcaagatgttcggcttcgggcaccacggccaccatggccaagaccagccgccccagcaccacggcggcggcggcggcggcgcgcaccagcccaccttcaagatcttctgccgcgccgacgaggggtactgcgtcgccgtgcgcgaggggaacgtcgtcctcgccccgaccaacccgcgcgacgagcaccagcactggtacaaggacatgcgcttcagcgccaagatcaaggacgaggagggcaacccggcgttcgcgctcgtcaacaaggccaccggcctcgccatcaagcactccctcggccagggccacccggtgaagctggcgccgttcaacccggagtacccggacgagtcggtgctgtggacggagagcggcgacgtgggcaagagct

SEQ ID NO: 29429 - DNA, 246 bp, Oryza sativa
  unsure (1)..(246): unsure at all n locations
  Clone ID: uC-osflM202145h10b1
aaagatccttaacacgaacaagcacccaaacgaggggggggcttttttatccangtgggctcattttccacacgcacaaaaaggacactgtaggacaccaaggattgatccatgctagtgaacatctggtggtgaacaaagcaatagacaagatgacacccgagcattcgatccggaggaacgtaagcattcttctagcaaatggggtgaaacaagccctctacatatactgcagacagctatgga

SEQ ID NO: 29430 - DNA, 346 bp, Oryza sativa
  unsure (1)..(346): unsure at all n locations
  Clone ID: uC-osflM202145h11b1
cggcgtgttggctgctgctcatcagcaantcatagggggtattttttaggggagataatccgttttccgcccagcgcatacatccagaattggttccagatccaggcagccagccatctcaagcttgtctcttctcttggtattaagagcaagcacacagtagtctagcgaagcgagactgcgagagcagagcactgcacctgttctctagctatgagtggaggggaacaatggcttccgacaccaccgcagcaatggccctcgtgccgactgcttcccatcaccatcaccatcaccatgtcaagcagctgcagcttcctccgtctgtgttcgtctccgtgcccct

SEQ ID NO: 29431 - DNA, 475 bp, Oryza sativa
  unsure (1)..(475): unsure at all n locations
  Clone ID: uC-osflM202049b06a1
taaaaaccaccctttatttttttttttaatattatataaaataaatatattaaaaaaaaattatttataaaattaatatataataaatttattaaaaattaaaaaaagaaaaattaaaaataaaaaaaataaaaaaccaaaggaaaaaaaagcaaattggagggaaaaaaaaaaaaaaaaataaaactaaaaaaaaggccgcaaaaaaaaataaaaaaaaagaaaataatcgtattaaaaaagngggaaaaaaaccaaaaacctaaaaaaacaaaaaaaaaaaaaccaaggaaacaataaaaaaaaaaaactaatgaaaaaaaaaatattaaaaaaaattcctaattttgcaaaaaagaaaaaaagggtaaaaaaccagaattaaaaaactttttttaaaaaaactaaaaaaataattttttcaaacctaaaaaaaagaaccgaacctccttaaaaaaaatttaaaaaaatttaa

SEQ ID NO: 29432 - DNA, 512 bp, Oryza sativa
  Clone ID: uC-osflM202049b08a1
atggtcagtgccgggagcaccgggatggcatggcccgaggtacggcccgcacaatcccgggttgccgacgaaggatgtggcattgaagtagctgaattgccctgtggccggcacgagcccggacaggttgttgtacgagaaatccacggcggtgaggctttgcattgcggcaatggtggccggaatctcgccgtcgagctggttccttgacaggttcagatagttcagtatccgcatcccagagatggccggcggtatctcaccggagaggttgttcctactgaggtcaaggtaggtgagcagccggcatttcccaatctccggcggcacgccgccgtcgaacgaattgccactgaggtcagccttggacagctgctgcagccggccaatctccggcgggatttcgccggtgaacgcgttctgatcaaggagcaatttctgaacaccggagaagctcccgatgaacgccggcaatgctccggtgagctggttgttggagaggctaatctggc

SEQ ID NO: 29433 - DNA, 509 bp, Oryza sativa
  Clone ID: uC-osflM202049b09a1
gacgttaactaggattcaacattgcatagtgcttacaacaaaactcgttttcgaccaagtggtgattcttcttaccaaagaaaaccaccatggtctcgaagaattatcttttacttgtagtactacatgaggaaaaaaatatgcatggttttccaccaccaattcagaatctaaaatgcaacggtactctggattggtactcatctagttacaggaagtagcctggcatcaggagattgcccaccatccagcaagccagctcactctagccatccactcctggtgcatacgagctccattaatctgggacaaggttatgtacattaccataaaaaggaaaggctctcgcatcatgtagctgaggcgcttgtcacggttgattcgataactgtgatatcgtccagttttccacaaagtttggtccccaacttcttgagcagcagctgtaaagggtgattgcctgttcctattcattgcctttgctgggccagggtcgcgactttctttgc

SEQ ID NO: 29434 - DNA, 390 bp, Oryza sativa
  Clone ID: uC-osflM202049b10a1
agggatcacttattcattatagttcttccatgctgctctaccacagcaaaacgttttagacaccattaaaccagacttaaggatacacatttcaggtaaattgctcacactgtaacgggacacgaccaaggaccagaccagacaaccatagattcattggggaggacaaatcggcagacttgagaaccctagaacagcagcagctacatggctggggactcactggccaccacggaggcggtgcaccaggtggagtgtggactccttctggatgctgtaatgcggaagggtgcggccattctaaaggtgcttaccagcaaaaatcaaacgctgctgggtcggtgggatgccctccttggcccggatctttggcttaacgttggcaatagt

SEQ ID NO: 29435 - DNA, 196 bp, Oryza sativa
  Clone ID: uC-osflM202049b11a1
gcaactaattgatagtttaatataataacaaacctaaaagtaaaacacagtacatacatatacaagggagacggcgaatccacaaaagggaaaaaagaaaaggaagaatgcacaaatcacatcggaaagagaaaggaaagaaagaagcattaagtaatggaggaagatccaaggagcaggttgataaaaagtgaat

SEQ ID NO: 29436 - DNA, 333 bp, Oryza sativa
  Clone ID: uC-osflM202049b12a1
gctagttatatcatatatattagatgaagtttagtctcccttgtatcacatcttacagtttcccaatcccaatacattgcagcttacgcctgtacgcgtgtatccaactatccatattgtaccaaaccagcgttgataacaaaactgaaaccgtctccgcttgctcctgcccaccggccatggcggcccggccggtcagccgctcgcgtcgcgcagcaagcaatccgtccgctgtccggaaaggacggcggcgagctcagacgctgacgagcttcttgccgaggatcatgtcgtcggtggtgaagtcggccgccttcctgaacgtgccgcggc

SEQ ID NO: 29437 - DNA, 291 bp, Oryza sativa
  Clone ID: uC-osflM202049c01a1
acgagaaacccttttaattacttgatagcaataacgaaaaacagtttgcaattcaaaaggcagagcgcgtgacaaatccgacaataaggcccagtacaaacaacaaaaaacaagaaccaacattttttctcactgctcatcagaaccgatttacaagtctctctctctctctcactaccaaatcatctctcatcttgctgtttccaaagctttatgcgtttccagtttatgatgcttttcaggttgaagacagcggcaggcgacgacatgattctgctgcattctcgaggg

SEQ ID NO: 29438 - DNA, 302 bp, Oryza sativa
  Clone ID: uC-osflM202049c02a1
ggcaacaaccctcccggttttatttacgtttttgggccaaaacgggcgctcaaaccttatacccgattttttgggccccacctgcagggggatcgaccgatcgatccatcgtttggttttcccccccaaaaaaggaaaccaaaattttttccccggggggaaacaaaaaaagaaatcctggaaaaaggggccccactatgcggggggtaattcgatcacggacgggctttggggatgctggcgaggccggctccctgtttggcgggggggtttttggggaagacaacgccctactttacccg

SEQ ID NO: 29439 - DNA, 234 bp, Oryza sativa
  Clone ID: uC-osflM202049c03a1
tttttttttttttttttttttttttttttttttttttttttttttttttttttttttttttttttttttttaggaaaacaggggtttcctttaaaaaccttaccctagggaaaacaaaaaaggaacaggggggatggacaatttacatcacaaatataaaaaaaaagaagcaacggaatcattcctggacagacacaacgaaaggccaacccgggaattctcttttttccttgg

SEQ ID NO: 29440 - DNA, 408 bp, Oryza sativa
  Clone ID: uC-osflM202049c04a1
gctacaaggaacagtaattaattaataaaaacaagaaactgaaagggaaaaaacagagaggaagagaacgaggggaaattaagccactctctttcccccattgagctagctacaaattgaacattcttattggctctatggaactatacttaacccaacaaggatccaactacaaggaggtgaaaacaaacaacaagaacaatagcaacggcattaacaccaaccccaccgagagcaacaagggtcatcacacgcgtgcactcgcactagccttaattacttaattagtcagagaggacgcctctcttcctgactaaaccccaagttttccaggtcatgatatgcttgaagagctagcttagtataacttttatcccatgcatgcttgcacaccagctcatgcgatcg

SEQ ID NO: 29441 - DNA, 339 bp, Oryza sativa
  Clone ID: uC-osflM202049c05a1
ataatgttataagccaacgggataactattaataacttctaagaaaatcatgtgtaaagaaaatttaacataattttttatgtacgctagcgagtagccgtgctactgcgcgggactttatttacaaaagcaacctttgaggttaacttgctttggacgggcgccggcagtgatgaggttcactgtgcggttgtacatgcggctggttgaccacttgcgagcttcgtccagaccccacccggcgaacacgcgaggatgaagcgtcccaacggtttcggctctcgaccgaggggcgcgcacggtacccattcccattggttcacggcgcttgcccacccc

SEQ ID NO: 29442 - DNA, 357 bp, Oryza sativa
  Clone ID: uC-osflM202049c06a1
aaccagtctggagaattgtatttgcaatgacaacatactggacttgggtatatacaaattttttactggttcctgacacttttattcctaaacatgcaatgcaagatatcactgcaatgggggtcccaattgaaggccatgcttagaaacagccaaagggggatgaattgacctggttaacactgttttaagacttgatgtagccaaagttattggagagcttcccaaggggggaccagagggggctcccgggggaggacctcggcctttcctggccctccgccgccgggggtgccgccggcgttgccaccgccggagccgttttgggggggggggccggcacccttgtttttctca

SEQ ID NO: 29443 - DNA, 453 bp, Oryza sativa
  Clone ID: uC-osflM202049c07a1
agactcagagcatccaagtttttaaccgaatagaaataaacgagttttaaacgactaacatagtgcacattgcgagcagatattaacggtccatgcaacgagtgccatggccgtgggcaaaacttaacgaacgctaagatatctcaaatgcagccagcataaccaccacttcaacgatgctcatttcttcttggcggcagccttggtcaccttggcaccggttgggtccttcttctccacgttcttgatgacgccaacagccaccgtttgcctcatgtcacgcacgggaaaacgaccaagaggagggtactcagagaaggtctccacaaccatgggcttggtgggaatcatcttaaccataccagcatcaccgttcttgaggaacttgggctccttttccagcttcttgccggatcgtttgtcgatcttggtcaccaggttagcaaacttgac

SEQ ID NO: 29444 - DNA, 510 bp, Oryza sativa
  Clone ID: uC-osflM202049c08a1
ggaggttgaatcttacagttcacacaaggtatttgacaagaaaggtttggtgctaaaattggttggtagatatggcgtacaagataccatcactgtgccaagcgctaaatcaggcccaaagctgtccatacataagtacattctcagtgtgtttctccagaaacggcatactgagcatctcaaccaaaggataggaaaatacttgagaattgtaccaaatacaggaaagaacacacctcatcattctataaagcaacatataaaaccatacaagaatgactaggtggccagcttttcttctctgatcatacgcgtaccgcactaatcatcttccaaatgtgccaaactgaatcacgctaagcattacggcaaagaccagtttcctgccttgaactttctgtaaaaggcggattttcttgaaacaacaaagaacacaggaattgcagggatgatgaagcctttatgctgcagcacttcttgaagagtttttccttttttacattgatccac

SEQ ID NO: 29445 - DNA, 510 bp, Oryza sativa
  Clone ID: uC-osflM202049c09a1
ctgcaagtgttggacaactttacaacagggaagcaacatccatttctttcagtaactttactttcatacacattgattgatacaagcacagatcgaagatgggaaatggttggaatacaataggtcttcttcatgccttttagatcgtgggaaaatgagttgatgagctaccatcacagctttctactcagacgtaatcttcctattgaagctattcatctgtggtttgcccttctcccgagccctcaaaaggggcgtctgatgataatggccctaagatgccctctgaactgagagttaatccactctcaggctggaatcttaacatatcagcacgagccattgcctctgcttgagctatcctctgcctgaatatctgagccatcttattagccttttcaaaaacaagctttggattgcgaatcatgtcaccaggtgtcggctcaagctttttagtagaaagactaacacgggctttttcacggtcatggcttaaaatcataaccttga

SEQ ID NO: 29446 - DNA, 465 bp, Oryza sativa
  Clone ID: uC-osflM202049c10a1
gcacgttgaaaatactaccattgaacatagcaacaagttctacaactgcagttggaaaacacctgaacaatttaaaccagttctagcaatcagatatgcagatcacaggactgtcaaaacttttcgcatataggaaaccacagttatagtctattttaggaagagtagcagcatttgcggccaaagatagccgtcgactaactatgacatggtttacgcagtctcggtcatggggtagtcgaacacgacgtccttcccacagagcctcctgtagacagagctgaaagtgtcgagcttgtactcggtgttgttgcgctcctttgggtccaggaagatcttcatgatttttctaccatccaagtggtatctgacacgcttcccaacaatctctgctggatacacaacatccttcaagatgccatcatgaacagcagtaagtgtgcgggtacgagggcgaacaacagc

SEQ ID NO: 29447 - DNA, 405 bp, Oryza sativa
  Clone ID: uC-osflM202049c11a1
gttctcaaggtaaaattaattaatgcagtatagttttaactttgtccatcgatctcaacctgtaactgtgacgacacactggctacagtgccctcgaggtactagcagtatagcagtagctgtagtacgtagcagcagcagcagcaggttcactgtcttgattggattggatcggattagtagacgtagttcttgacgaacatgccctccttggcctcggcggcctcgccgtcgctggtgtacttgccgagctgcgccagcgagttggccttggcgcggaggagcagcgcgttctgcgccgccttcacgttctccggctgcccgccccacgtcttgaggcacgtgttctgcagcgccctcgcgtacgagaacgacacgtgccacgggttgggcccctggttcatc

SEQ ID NO: 29448 - DNA, 365 bp, Oryza sativa
  Clone ID: uC-osflM202049c12a1
gattcagaaactaatgccagtaatcggcagctcacttataccacgtacagaatccactataattaagcgtcaagggagaggggaaaaaaaatcaaagcaacaaaatcgtctaagaaacgtacacgaaggagaaaagaaaagaaaatcgtctaagtagcataaagggaaaagaaaagaatcacaaattaattaagctcagtgcacgacacattaatcggagctagctaagctagtgtctttgttgcttgctaggtgcatgcttgccaagacagcatgcaaaaaattaacgatctcgtcacagatcgtcgtcatggggctacgggcacggcttggggttctggaagccggcgtacttggccctgacg

SEQ ID NO: 29449 - DNA, 491 bp, Oryza sativa
  Clone ID: uC-osflM202049d01a1
aggggaaaggtcgcgtgatttgctattaagtgcaaaatttcaatcagtttcaggcggtcacaagtgcttatcatgttacaaggtcctttgaaactcccagcctgaatgactgagacaggttatcaacaggaaatctacgagtatttgattcgaattcgagcatatcaaattcgcacaatgagaaaccaggtgatccattctccagtctaattgctaaattgacataccatgcagcgccggattcgctcagatctcactgatgtactctaaaagagattcgacctcttgcctcagggcagcaactttctgctgctgggcagcaatcctgttctccacatcttgccctcgcaacttcttttcaaagctgtcaaccacagtggaatgccttgtcatgagcttatcctgcaactctctctccttggcaaccaattcctctacctttggccatatctggtaagactgagaggatgactgcagggatgtcaacaatg

SEQ ID NO: 29450 - DNA, 452 bp, Oryza sativa
  Clone ID: uC-osflM202049d02a1
aagcagcaactttgcattttactagaagatagattaacaaaaataggatgataattcatacagatcagttagacagtaacagcacatactcctacgagtacaaggcaacagggtattgggcctatcatcaatcaaagctgagtaataataatacatcaagtagagtagagtagcagctaggagtaataattaagaacgacaacacttgagaagatagcctaagcaacacaagaagtgaaccgaaccccattagattggacattgatattgcagtagagtagtaattagtcctggagatcagcctttttttcctcatcctcgaattcaccctcgtcgtcgggggtggcgtcctggtactgctggtactcggagacgaggtcgttcatgttgctctcagcctgggtgaactccatcttgtccatgcccttgcccgtgtaccagtgcaagaaggc

SEQ ID NO: 29451 - DNA, 154 bp, Oryza sativa
  Clone ID: uC-osflM202049d03a1
gacaaaccagtttggggaattaaagaatcggaatcaatttgatttaagcacagatggaacaaaacgggtatattaaactaccaaaacactctatatggactacaacaaaaggccacacaatatatgaagttacataagtcttccagtcccacac

SEQ ID NO: 29452 - DNA, 399 bp, Oryza sativa
  Clone ID: uC-osflM202049d04a1
ggggctggaattttttttctctttacaaaatagtcctagtaaaaaaaatgtggaaggaaattgacaaaaaaaacctcgtgaggtcctgtaattacagggggctagttctatacgcctacgatccaacggtacagcgtgacgaatcccggcttgtcgtcgtccaccccgcgcggcgccgacatcaccgccgcctccgggtcccaccgccacgagtcctcctgccggttgctgtggtggctctggctccaccgtgcgctccaccgtccgttccaccggccggagagggacgaggcggaggaggcgaggcggtccacgtactcgcgcagtcatccccgtgaccccgccgcctccgtcagcgcctcttcgggggccggcgtcacagaaccggttcgtgacttg

SEQ ID NO: 29453 - DNA, 195 bp, Oryza sativa
  Clone ID: uC-osflM202049d05a1
aaggcaacaactaaccaaaaattccataaataacagactgcagccctccaaccaactgccgaggcagtaaggcaaagggggcccccggcccctggcatggaggcactcaggtacaagtacaattgttatgggcaactggagtactggaccaaaaaattcacatcaaaaacagaaagcataaaaagcacataaaaa

SEQ ID NO: 29454 - DNA, 288 bp, Oryza sativa
  Clone ID: uC-osflM202049d07a1
gcgatctagaacggtcgttcgagcttttcctgggagcatggcatgggttacatacttcagcgccgtagcgcctggtatgagcctcgtggagaagcaatggcctagcccacggggcctcatacctctcagcgcctgcagccgctctggatacctcgagaccttcggcctcgaggcaatttttctctacccccttctttacccccgcaaaaagccagggcccaccctccggcgatcccttaaaacccctataacccatccttttccgagcttaaccctagccctcccctc

SEQ ID NO: 29455 - DNA, 468 bp, Oryza sativa
  Clone ID: uC-osflM202049d09a1
cctcccaggtatttcccttgtattcaaactaataaaagtgatatatcctccatataaaatttcaagagaactgctagtacatgacagcagcatgagaacgacaaaacttaactctgaatttctggtaccgatattccgtacaaaatcatcgtggaaaatcctatcattctatactaagcatgcttttggtttggcctgaaaaacgaacacgtagaaaaggctctgacgttgcattggtgatcatggagatgtctagtaagttgggatggaagaatcggctttaacggcataagcgtgaatcccacccgcaacattgtaaacttttctgaacccctgtgattgcagccatttagctacctgcattgagcgcataccatggtggcacagaacataagtgtccttctgaggatcaaattcatctgtcataactggtccccaagttccaaactgtcgaagaggtagaacttt

SEQ ID NO: 29456 - DNA, 415 bp, Oryza sativa
  Clone ID: uC-osflM202049d10a1
caatcaactccggttctcaatcaactccaagttagtacattccaacatcaacatcacatcacatctcaccgaagcaagggagggatgctcctgagaacaattaacaatcacacgtaaagggccaaacggccctgcacagacaaaatccattacatcctactactactctccgccgtcaaagacggcgaacggcagccatagcttttgacctgctaatctctgaacatgttagacacgacggggtcgagatgacatcgggcatcacaccagtcactggcatcaggttttgatccagatactccattcatctacctgctgtgaatcacccaacaaaagatagcctgcagttttagcgatcttgggggtggcggaaagttatttattcatctcggtaagagttagcagctggggtgga

SEQ ID NO: 29457 - DNA, 298 bp, Oryza sativa
  Clone ID: uC-osflM202049d11a1
ttttttgtttttttttttttttttttttttttttatttttttttttttttttttatttttaatttttaataatattttattaaattataaaaaaaaaaaaataaaaaaaaaaaaaaattaaaaaaaatagaccaaaaaaaaaaaaaaaaaaaaagaaaaaaaaaaaaaagaaaaaagggaaaaaaaaaaaaaaaaaaaaaggaaagcataaaaaaaaacaaagaaaaaaaagcagaagtcggaaaaaaaaaaaaaagggagggatattgtcaaaacacaaaaaagaaacagtagacgc

SEQ ID NO: 29458 - DNA, 423 bp, Oryza sativa
  Clone ID: uC-osflM202049d12a1
tgtcctcctccgcctccgccgcctccctcgctggcaagccgcgggggggcgggctcctgctcgggcggtacgagctcggccgcctcctcggccacggcaccttcgccaaggtgtaccaggcgcggagcgcggattccggggagccggtcgcgatcaaggtgctcgacaaggagaaggcgatgcggcacggcctcgtcccgcacatcaagcgggagatcgccatcctccgccgcgtccgccaccccaacatcgtgaggctgttcgaggtgatggccaccaagtccaagatctacttcgtgatggagctcgtccgcggcggggagctgttcggccgcgtcgccaaggggcggctcaaggaggacaccgcgcggcgctacttccagcagctcgtctccgccgtcgggttctgccacgcgcgcggcg

SEQ ID NO: 29459 - DNA, 450 bp, Oryza sativa
  Clone ID: uC-osflM202049e01a1
ggtgaaacttatttttaacttcttggaactttaattttaaaggataggcacttgagcccttctgcattcggatttggcagacattatcatagccagtgaaacaggatattatatcaacatgagaagggccccttatccgccaaaggaaaagacaaatgcacgcaaggtttatgctggtgtagctgaactcccagaataatgatcacatgaacactgctctttaacctgactacaaaaaccctgagggccggtctaaggcaggctaatagtctggcaccagccattgcgtgctaatactaagacttcaagtagtcgggagtccaaaggtccaaaacgcatcgtaaaccaaaagaacacttgcaacgtagatgtgaaccaaaaccaaagctttgatgctgacaacggcaagaaaagtaaacgcctcaaggccaaggagagagccctgggaaa

SEQ ID NO: 29460 - DNA, 412 bp, Oryza sativa
  Clone ID: uC-osflM202049e02a1
ttggccgcggcggaccaggccgctgctgagggcagggatggcctgctgcggtggcgggacctcgcgcggagccacgccggggagctgtccgtcgccgtcgtgcaggggaaccacgtgctcgaggaccagtgccgcgtcgagtcgggcccgccgcccctcgccgccacctgcatcggcgtcttcgacggccacgccggccccgacgccgcccgcttcgcctgcgaccacctcctccccaacctccgagaggccgcgtccgggccggagggcgtcacggccgacgccatcagggacgcgttcctggccacggaggaaggcttccttgcggtcgtctcgcggatgtgggaggcgcaaccggacatggccaccgtcgggacgtgctgcctcgtcggaatcgtgcaccaaaggacgc

SEQ ID NO: 29461 - DNA, 428 bp, Oryza sativa
  Clone ID: uC-osflM202049e03a1
agctaatgtctgactgacttgcatcaattaggctgtgtttagttccacgccaaaattgtaagtttgaagaaattgaaacgatgtgacagaaaagttgaaagtttgtgtgtgtagaaaagttcgatgtgacggaaagttggaagtttaaagaaaaaagttgaaatctaaacagggccttagtcgaatatgtcaacacaacacagtcacaaccgatcgactcaagttaagttttactacaattagccaatcaatgcttgagaaccgtcaccatcttaacccggaacagaagggctttcttttacaacgctgcctttggagccattcccagtgccttgaggataaacgcataagtaaacgcatcttttcgtagtttctcaaaccttcccgattttgagaagtgcccagcaccaagttcgcacttgaataac

SEQ ID NO: 29462 - DNA, 303 bp, Oryza sativa
  Clone ID: uC-osflM202049e04a1
aaggcagaagccagtggagaatagcaataaacaaggagtcgatactgcaatagttttaagtgggtagaagaaagtggagaaaagcaataaacaaggagtcaatactgcaatagtttcaagaaaaggaaattactcttagttcccaaagacactcttcaagatacattacgacaaggtttccataagctgcaaaaaattattcctagggccaaaacatcacccaaacgaaacgcttcattcaagttctcgggtggttctttaggccttatcgctttcttggaccacacccgacagtttttaccc

SEQ ID NO: 29463 - DNA, 466 bp, Oryza sativa
  Clone ID: uC-osflM202049e05a1
gaacaagatggagacccttcatgatctctgcatcaatatactccaattttgcaaccgtacaatacagacaggctactatctggttttcttttcaccaacttataccaaccaaccaaggcttaattaaacatgtctcggaaggtactgacattctcactgtattatataagactgctgaaagaaacgccacatgacccaaatacaaagttagcatgacaactacaacaacaacaacaacaaacaacccccgcaaaaaaaaaaaaaaacatcaacaacaaacaacaacagcggcgacgaagaacagtagctgaagccgatccagattccttcggtggagaattgcgtctggatcacagcaccttgatggccgccttgatcgcgcaatgaggaggcgcgatactgagctttagactgctgatggatgatgatgccatttccagtccagagatcatggagagcgacatgt

SEQ ID NO: 29464 - DNA, 251 bp, Oryza sativa
  Clone ID: uC-osflM202049e06a1
acaggcaaaactatacatagcataaattccaaactttgtacaaataaacttacagtgccttatttttcttttattcgcatactcgatatctcagtttatttaccaaggaactaaggaatatagaatatgcttattatgccaacgattggccgtataatggactaggattgaactatgtgtttcaatgacggtataatttacagttgatattatcatctggagctgctgttggactatctagcaactttgtg

SEQ ID NO: 29465 - DNA, 331 bp, Oryza sativa
  Clone ID: uC-osflM202049e07a1
ccaccccaaaatcgagtttaaagacagtcaaccacttgtttccgacgacaaagggcagcatcggattactatataactaatccagaccacgagaataaacatattccaaaagtaaactggttgggcatacacacggcaaaaagagtagaaaaagtaaactaagagcttaaggtagtccgcagctgaggaatccacggattgtcattattcggcagcaaaaatgtactactgttcatcaaccgacacaaagctaagctgagcgttgctgatacttagtatccatagcttgggtaggtggtgccacccgtagctgcctccattgtgaggtgcc

SEQ ID NO: 29466 - DNA, 303 bp, Oryza sativa
  Clone ID: uC-osflM202049e08a1
accaaaaaaaaaaggggtgggacaggcccatacaaaaacgggcccgggggacagccccccaaaaagggggtttggaaaatttccacagcctttaccccgaatttacattggcgcccctttccacgtttatccccccccccttagcccctttgttccaaaatagtaccccaccgggggccaaaccgaaaaatggcccaaaaaaaagggggggggggtcccggggcccccccccccttagaaagattaaaacccccccaggaacccccccggggagcttcccccccccggcggggggggctggga

SEQ ID NO: 29467 - DNA, 414 bp, Oryza sativa
  Clone ID: uC-osflM202049e09a1
gtccaagagttttatctttgccgaaagacgaatacaaatctttttaccactgccgcctcatgtcagctgacaaaataacatatcgtcattatcaatgtaccatttctctgatggtgcaaaaggagagaaaaaagatgcgggcagaggtaaacaaaacaagatcaaaatacaaacaacacatcgccttgctttgttccagtttccacaccatataatcatagtgtggcccaacttatttgtgtgcctgtaattcaaagcaaacctagcaagcatctagatccctgcacggaggaggtttcggctcaccgtgcaaggtggtattccctccagcagggccccagtttttccgctctgggcgttgtgcgccgcgaggaggggcttctcctcttttcagcatcttgacgatctcacaac

SEQ ID NO: 29468 - DNA, 221 bp, Oryza sativa
  Clone ID: uC-osflM202049e10a1
caggaattgaaccagaaactttgatacaaccactatcccatcttgcacgaagaaacctatgtagtaacaggaatgtcaaaccgaccaattttttccgggcagcaagtacaaagcaggacacacttcttataaaaaaaacagcaccgcatctgaacgagtccatgtatggtcgtgcattagaaaaggtctgacaagaatccgaccctttatctattctggac

SEQ ID NO: 29469 - DNA, 448 bp, Oryza sativa
  Clone ID: uC-osflM202049e11a1
acctgtcgctgctcgtccgccagcgccattggatcttccggtgtccgtggcaaggaggaagcgtcgacttcggcggcggactccgagccggataagaagaggtggaggaagaagaggttctggaggaagaagaagaagaaggccaagaaggatcactacggcgacgccgccgccaccgagcacggcagcgagcgcgccagctgcaggcgctacgagaacgacgccgtggccgacctcgtgaacgacatatcgtccaagtcagatgtctgcaacgtgtacgcagccgaggggattctacggatcacccaccagaacatccccagcatggtgctcacgtacaggcagctatgcaacgccaccgactccttcagcccgaacaacctgctcggtgaaggcggcttgggagggtgtacagaggccacctcgaagagatcaacgagatcgtcgc

SEQ ID NO: 29470 - DNA, 402 bp, Oryza sativa
  Clone ID: uC-osflM202049e12a1
aaccccaaatgtcacgatcgcaactttattacactcttccatggtgatgtaattaggtaaagggagagaaaatgaaaaaaaaacaaaacaaacaggggagatgattcgccggttagttgaccccgtagatccacttctcttcgttgctggtgtaagagaccagctccctgggctcaaaccagagaccaatctcagcctttgcagtctctgggccatcgcttccatggatgatgttcctgccaacaacaacagtaaggtcacccctgatggttcctggttcagacttctgtgggtctgtagcaccaatcagttttctcccgtacttgataacacccttttcttcccaaaccatggcaagcacagggccagagctaaggaagtcacacaatccattgaagaaag

SEQ ID NO: 29471 - DNA, 195 bp, Oryza sativa
  Clone ID: uC-osflM202049f01a1
cttaatgctatctatgttgatttcactggatgtaatcttcattggagctgtcactgatcaccgaaacgaaccgctcgagccatggcagctggtgaaggtccttcatggtgtcaatgatatatgaatcggcgcagtggtggcggcgaactggctttggaaggctcaccccaggtttgaaacccccctgaagaggaa

SEQ ID NO: 29472 - DNA, 194 bp, Oryza sativa
  Clone ID: uC-osflM202049f02a1
attaaataccattacattacaaaaaaatgggaatccaatgatacattacaaacttctagcaattacaataataatggtaatgatatgaccagcaataattcaaccaaaaatggacagaacatttaagaaaaggaacaccctttttaacaaccaaaagaaaatttaagaggagagaaaaaaaaacaacccaaaaa

SEQ ID NO: 29473 - DNA, 415 bp, Oryza sativa
  Clone ID: uC-osflM202049f03a1
aaaccaccgctgattacatgtacactcaattgtcagctgcacaaaaagtttataactcaagtacactagtacaaccttttcctctgtcccttttaattagtttagctcggccctttttattgacgttatttatctacgatatgagcagagggcgggcaaccagttaatcttgtatacttacattactttttttttcttggataattcacccagacggggatccatggattgagagacagactgcaggaaggcagcttcatcaccaacatcgagttcaaccttacggatgatctcctggatgacagactccttggtgagcgtctgcctgcacaagatgctccccatgtcgaacgcggtgagggccgagtcgacgcccttcttgagcagcatggtggtgacgcgcatgacgggctcg

SEQ ID NO: 29474 - DNA, 93 bp, Oryza sativa
  Clone ID: uC-osflM202049f04a1
tattgatgagcgagaccaccacgcatgcatcgcgtaccgtacagcttaggatgccctctatgagtctgagccagccctcttctcttttctttt

SEQ ID NO: 29475 - DNA, 369 bp, Oryza sativa
  Clone ID: uC-osflM202049f05a1
ggcccgggaaaggtttgccctttcaaggttttgaattggtttatgttttccaaagttgcccgtctaaaattttgcccccgggggccggatttccctttttaacatccccaattgggggtcgcaggtttttaaaggtcttgcatttggttgagggggggccccgaaaataatttttttccacttgtgccccaatataagggttaggagcaatcaaggtgttggggttttggaaccgttttagggcaattggggcgttccgggagtcttgtgcccgggggggtgatctcccgctggttttttttaggcttaccccctgggtttgcccccccttgatcctgggcttgaaaccccccgtttaattgtttttgg

SEQ ID NO: 29476 - DNA, 437 bp, Oryza sativa
  Clone ID: uC-osflM202049f06a1
agctaagaatctacctttattcccatactaacattcaatggcacaaaatgggaatgagatcccatgaacacatgaaaagcagtagcagcagcatcgcgaaatagttactggtaccgatacaacagatggatcgaaaatctcttacgcgcaaagcagctcttgcaaggagcctaattatgctatgatgaagaacagagaccattcctactgaagacagcatcaaaataccataaccaccatgagtcaaattaagggttcctggcttggaaatccttcatgaacgcgacgagcttttccacaccggcgagcggcatggcgttgtagatggaggcgcgcacgccgtcgaccgacctgtgccccttgagctgcaccattcccttcttggccgccttggcgatgaactggttctcaaaaaccccaccttggcgagggtgaac

SEQ ID NO: 29477 - DNA, 481 bp, Oryza sativa
  Clone ID: uC-osflM202049f08a1
caggaatctcatctcactagtgttttcattcaggttgcattgccattgttataggttcaaccataaataaaaaaaaacccgtactctggtgtggaatggaacagtacgcaaaaaatgcgatggacagtaatctgcatgggatttgagtctgataattacagttgaagcacatcagcacgagtcacagaagtcacttcatctatacatcagataccgtagcattggtggactcgattttaacttacttctacagttctttgacgtgactgtactgctggattaactatgagctaacctacttttttactggcaaaattgctagcaagatcagcacattacacctttggtcgtttgttagcacctctgtggtccaccgataaattaacctttatatgtaagggggctgctgctgctgctgggtttttcttatacgcaggtcatcagcaagctgagcacacttcttttttgtctccgctagttg

SEQ ID NO: 29478 - DNA, 545 bp, Oryza sativa
  Clone ID: uC-osflM202049f09a1
gaaggcaaaggaaatttcccgcaaatacttattcatatgttttgacaacatttctcccgacgcatgctcattgtggcagacgcagctgaccacctagagcttttagttcaccattattatttagaccaagcatacgtcccaagatcagaacacatgcttacaagcgaaaatactaatagcctggctggctgcttcacagaataaccaaacgacaacctcaacagataaaaatgccacggaatgaaaacaaagcagcgaatcgtcaccagaagtcccatcttactcatcaaacactccatcattctcctccaacgcatcctctccccaggggagaagattgcccagtttaccttccttaacaggagcagggttcaccatattctcagcctcgaagcagtgcagaacagatttgggcgacccaacagcaacaggtacgtcttcagtagcgtcgaagctctggtagatgaggaggccaccacagggcagctcctgctctaccatgttgttgcatttgtaagcatcagcattgagctcctttgcccatg

SEQ ID NO: 29479 - DNA, 462 bp, Oryza sativa
  Clone ID: uC-osflM202049f10a1
aatgtaagcctgtggttttattgcatgatttgtcgggtaaaaaaaaattactaattgtacatcacttgacaggcctctctcactgaaagctgaaaccccctaaaccccgaagaaattaacagttgaaacgaatgggtaaataataaactcagacgaggccgacgagcttctcgctgaggtcccagagcttcctggccttctccgggtcgctggcctcctgcgagagctggttctcgaacgacgccgagtccttgttccagctccagtacacgccggacttggtcaggctcgggtcgcccaccacctgcgccagccgcttcccggactccgcctccgacacgaacccctttcgtcacgaaccgctggaacggcgggaacagcagccggaacagcgggatgtgctcgcggaacaagcccgtcgtcgcgatgcaccccgggtacagcgacgcgaacgtgatcccg

SEQ ID NO: 29480 - DNA, 376 bp, Oryza sativa
  Clone ID: uC-osflM202049f11a1
aaactccaaacaaaggcagccaggtttgcttccaatgtacatgtaataaggggatgctaaaaggtttggacacgcattcagttaatcagattgctctcggtgctgcaagggctgtctgcacaagtacaaacatgaaagcatttaatcctttcataggttaatcagattgtcttagatgttgaatgttatcgctgattctgcaagagctctgtctgcaagcacaaaaacgaaaccatctcgttctttcatagatgtgggaccatggcccgttgttcataagattcggaaatggccatcccaaaagtccttttccgtgccactttcttggtgtaacagttaagttcattgatgatccctggcgaatgatgactagaga

SEQ ID NO: 29481 - DNA, 288 bp, Oryza sativa
  Clone ID: uC-osflM202049f12a1
gattctaaacttcattaaattgacggggttccaaagacaatttcgaatgacaaccccggaaggggccccctgccctcagcaatgcacctactcaaatatgtaagaaaaagttccacgtatagaaatttggtaaactccttaaaaacgttgattaggccaaaatttttgaaaggaattttcgttggggtccccaaaaattttggaagagttatttaaagttcctatagcatcctccaaaatatgaaatccccaatgtttggaattaatcataagttgccacgggaggag

SEQ ID NO: 29482 - DNA, 251 bp, Oryza sativa
  Clone ID: uC-osflM202049g01a1
acttctcccagcacaaatgcaattcaccagatcgtccgatcaatggagcacccggagcgacacggcgagctggggaggaccatgacgaggatgtcggggcgtcaagaagccgcttcagggcttccagatgatgggggtctcggcgatcatggaggggaccatgtaagggcccatgtgggacgccggccggcgatccttgaaggagcccttgccgttttgttccgtttcccggccgacggggaccgaggcgc

SEQ ID NO: 29483 - DNA, 496 bp, Oryza sativa
  Clone ID: uC-osflM202049g02a1
aagaattaagaatcaacaatacgatcacgacaacgttaacaagattctcacataaacttggcaaaacagatcattgtgcacagtgctgcttagctaaacagaacaaaatgccttaggtatataacttgctcaaaaaacaagtgatactggaaggacaagccatgggcgcttaacactgaattctgattctggatggctagaagctgcatgactcatttgagagggatgaaccgagaggagtgggtggcaccaataccgtgcctaccgtgcttaaccggcttgtaggagatggagaactccgcaaggtagtgaccaatcatctcaggcttaatctcaacctggttgaaggccttgccattgtagacaccgacgatgctttcgatcatctcagggacaatgatcatgttgcggaggtgggtcctcactggctctggcttctcgccagcaggggcatcctttttggccttgcgcaggttcttgatgagcgccatgggct

SEQ ID NO: 29484 - DNA, 57 bp, Oryza sativa
  Clone ID: uC-osflM202049g03a1
ggtagtgatacatcgcgcgcacattttgaatggcatggggattcattagagcttaaa

SEQ ID NO: 29485 - DNA, 412 bp, Oryza sativa
  Clone ID: uC-osflM202049g04a1
agaagaaagatgacagtatcatgggacaatcgaacaacacattatgggcatgtgtcctgttctgctatagtattctcaaagcagcactgcagggccaacaggattattctcattaacagcattgcaggcctgaggcctcctcacctctgcctaataaaacactactagccttacaggattcctagtttcaaaccagcagcaagattcagagctgcaagaaagaatcataaaatctgcttttaattatttcgctgaacccatttattcgatcctcagtaacaacaatgctgactgctgagcgcatcggaccagcatctgatatcaccacgtttcggtatccaaatgagtccacagctccaagcttttatattcatcatatggccatcaattaagtacctgcactacaaacacc

SEQ ID NO: 29486 - DNA, 512 bp, Oryza sativa
  Clone ID: uC-osflM202049g05a1
aaaatggcaatatatagctgtctctagttgcatcttccaaaccagatgtagacaatcgtccagcactgaaccaagatgtcggctacagaagttcagtttgtccccagaaattgagaaaaaggtccgtcagattacccacaagaagaggaaacaccctctagttttgcccatcactagcagcagcaaaagcaaatgccactaaaacaccaaagcttcaggcatcggaaatcttatacatttcagtactcccaagacgcatctttgatcctagaagctcgatcatctgccagatttcttaattctaatctcaatgcccagcacaataagacctttcttccaattgggtcctttaccaaagattctgatgttcacgtttccatcttcaccttcctcgttgaagaactcgcctagctccacctccatccagccgtcagctcttgtccgagggaacagtactgcactgatctctttttcaggacgacgacgggatcgagtgagagcaacctcgcgac

SEQ ID NO: 29487 - DNA, 166 bp, Oryza sativa
  Clone ID: uC-osflM202049g06a1
ttttttttttttttttttttttttttttttttttttttttttttttttttttttttttttttttttttttttttttttttttttttttttttttttttttttttttttttttttttttttttttttttttttttttttattttttttttttttttttatttttttt

SEQ ID NO: 29488 - DNA, 500 bp, Oryza sativa
  Clone ID: uC-osflM202049g07a1
atgtgagatctcactttgctctcgatacatccaagaagattgtggcaccatgcatgttttacaaatccatgcaaagaaatgctattttgtttcgaaaagaatacggtctagtacttctgatcacttgtaggtttctataggtgggtatctgtccttgaacaacggtgtgccttcctttggcttggaccaagggtacttcatggttggatcccttgggaacttcctgaagttgacgaatggtgcccacaacatcatcccggggaagaggaggtacgtgaacatgaactgcaggtacgtctcgacgaacttgcgcttgaaccacctcagcctcatccagttcatgataatcggctgcagaaacaaaggaaaaaaaaaaccatcacaaacctgtacacccgatctctgaattagcctcgcaagaaaccaagaatggcggcccgtatctcaccgggagacgaacaggaaacgaaggcgatggcgccaccgtcgcagatccccag

SEQ ID NO: 29489 - DNA, 438 bp, Oryza sativa
  Clone ID: uC-osflM202049g08a1
tcgcgatctagaacccgcctcttcccgccgccgtccgccgcgcgcacgccgccgccgccatggggaggagacctgcaaggtgctatcgccagatcaagaacaagccgtaccccaagtcaaggtactgccgtggtgtccctgaccccaagatcaggatctacgatgtcgggatgaagaagaagggtgtggatgagttctcccactgtgtgcatctcgtctcttgggagaaggagaatgtcaccagtgaggctcttgaggctgcgcgtatcgcgtgcaacaagtacatgaccaagtctgcaggaaaggatgccttccacctcagggttcgggttcacccgttccatgtgctccgtatcaacaagatgctttcgtgtgccggggcagataggctccagactggaatgaggggtgcttttgggaagccacaggaaacctgtg

SEQ ID NO: 29490 - DNA, 522 bp, Oryza sativa
  Clone ID: uC-osflM202049g09a1
acatgaaaacttgagatgccattagaacgtggaaatatacaacaaccgtcctgtactagattacactcagatccttgaccccaggcaacctaaattgccataaaagaaccaacttacatcacagagcatctctctctctccccctcctttcttcagcacccatgttaccactcggccagtgtacctctccctgcttcatcaaatggtttcagtgcagcatgggaggtaaatgaagtagcggagtgaccattgcgaagccttgaagggcgcagctcaggtgaaaatctcgttgaaagcgcaccgcgacacagtcaatatgataattcatggccacgcagtgatatgtacttcttaacccagatggctatatcttcggcgcaagcctgagccagtggtgttttcagcaagacgttcagcgtggcgaactcatggaccgcatccttgtactcgagaacaggggcattcacatttaccttgcggagctcctccgagtaagcgatcgcgcggtctttattcagtcca

SEQ ID NO: 29491 - DNA, 53 bp, Oryza sativa
  Clone ID: uC-osflM202049g11a1
aaacacagccataggagtagaatgcatatgcccttgagaaggggaagatgtgg

SEQ ID NO: 29492 - DNA, 335 bp, Oryza sativa
  Clone ID: uC-osflM202049g12a1
atgccaactgctcaactttcataacgacagaggtgattctcaggctgggcaatcaggctagtaaagatcaccgtaaacaagcaaaggggttcaaggactctagataagtctaaaccgtcatataacaacaacaacggcaaataaaaaaacagagaaaggtttgcctcctgcctgttacctctggtttggccaattaccgtcaaaatacatcactggcagcctctaacgtctacacactccaggaaatattatctactggaggattatgggcattatgtacatatcttaaatgaaacgtgacaatccacggtatgctgcaggaagttcaattggga

SEQ ID NO: 29493 - DNA, 342 bp, Oryza sativa
  Clone ID: uC-osflM202049h01a1
gccggaaacactttctggcaatcggcatgatcatgagtcacaggattacaaacaaaatgttaacgaccgtttaccaatgggcttaggttttgtcgatcattattttttaaccgggtactgaaaaacaagttgacagtttgatgcacaaaacctgttgattctaaccaacatggctttcatgccgaagaaaagaacccatttataccacttaagtcgcacagaccaaaaatttggttttgaatgtaacattgctgggtgaaacgccattggtgggttaactaatgcctctttctttggccttgatggggtttaccccgacctccgtttaggaaatggggttcg

SEQ ID NO: 29494 - DNA, 335 bp, Oryza sativa
  Clone ID: uC-osflM202049h02a1
aacttaaaacatcaatcaatcaaatggaacaaattagtgaactcagtacaaaatgattaacgtaaaaggcccttttcttccacgttaaaagacctacacaacaaacgcaggtcgggtcgtgataattaacaaatttagacactgtcaagaaaataaaacacaaaattagtaaatgaatttctgtaaaagaaggaaaaaccaaacccaggtcctccccaaatccgtggacatcctgatcgaatgacgtgacatctcatattcttatcgattcaggcctttatgagtctcatatcatgctggccagtgtcatgcagttttgtgccatctggttgagc

SEQ ID NO: 29495 - DNA, 121 bp, Oryza sativa
  Clone ID: uC-osflM202049h03a1
tgagtcgagccgccacgcacctgctgtctcgtccgcgctcgtcagctagctgcatccgcgccagcggcattcatggatgtaaccgccagacttcccagtctaccagctcctctactcgctc

SEQ ID NO: 29496 - DNA, 144 bp, Oryza sativa
  Clone ID: uC-osflM202049h04a1
atggaggcacagggccacaattcatacatgtatagtggatacgtctcgtcggcagacactcacggtatagtagggtagtcgtgtgtccagtgttatagtcatatctgcgcgtcttttaatgcctgttgttgactttgttcacag

SEQ ID NO: 29497 - DNA, 432 bp, Oryza sativa
  unsure (1)..(432): unsure at all n locations
  Clone ID: uC-osflM202049h05a1
ccgcatcccacaacaggggaggggcaataataagtcttaacatccaagtttaaaccgaacagaaaatagagttttaaaggactgacatagggcccaaagggggcagattttaacggtcaatgcaccaactgaaatgcccgtcgacaaaacttaacgggtcctaaaagagctagatttctcaaatgcagatttggaaggccccacttgaacggggctcatttttttttgggggcagccttggtcaccttggccccggttgggtcctttttttccacgtttttgatgaccccaacagccaccgtttgccttatgtcccgcccggaaaaacgcccaaggggggggtcctcagagaaggcctccacaaccaggggcttggggggaattattttaaccataccagcatnaccgtttttgaggaacttgggctccttt

SEQ ID NO: 29498 - DNA, 378 bp, Oryza sativa
  Clone ID: uC-osflM202049h06a1
gatatatatctctatctatctatgtgcaggttcatatacacatataatctatttagagaacattatgttacacagtacaaagtaggatacgaggagagaaaaacgcagagaaaacatctgttagtacaatgccatccatcaagatcgtcgtcaatggaagccatgagatggcagcagtatcagaaacaggtgaagcgacggtcggcggccagcacacggttagccaccggtcgccggcgctggatctcgccgccgccgccgagctgctgctgtcggtgggcttcgccgccgtcgccgcctcttccggtgggctggcaatggcgacaggcggcaacggcgggtccagcacgtctcccggttccagcaccggcgccggcg

SEQ ID NO: 29499 - DNA, 339 bp, Oryza sativa
  Clone ID: uC-osflM202049h07a1
ctatgacgaatctgattgagctgaacttccagagttcttttctggccagatcagcaggatcagtaaaccaacattcgtaatacaatcatcacatcaataatctacacaccacccataatcactctgtaaaatccggccttagtactgtactcctccctgcacaaccaaattaataatctatacagtaatcaacaagcgaaatgaataagcaattaatcagccatcttcactgactaattcttgtgaggacgaccacacgcaaagcaagacagcaacttggaagcaaaggagctagagcctgaggacgacgtctacggcggcggcggcggcttcaccacc

SEQ ID NO: 29500 - DNA, 135 bp, Oryza sativa
  Clone ID: uC-osflM202049h08a1
tcttagctgagcggcccgcccctgtttgttcgtcgtgtataaaatgaggtacatgacctggattaaggcttgatacacacttcgatgatcgcacttaatccttgctaacacatcttggcttacattttgcgcacg

SEQ ID NO: 29501 - DNA, 244 bp, Oryza sativa
  Clone ID: uC-osflM202049h09a1
gttgagtattttttttttttttttgactaaaagcgttcttttttacttaccccagcacaaatgcaatccaccagatcgatcgatccatggggcaaccggaccaccagggcgaggcgggacggacaacatccaggatgtcggggcgtcaagaagccgctttagggcttccagaagatggggggctgggcgatcagggaggggaccatgtaagggtccatgtgggacgccggccggcgaccctcga

SEQ ID NO: 29502 - DNA, 433 bp, Oryza sativa
  Clone ID: uC-osflM202049h11a1
gaattcaatctgatagtaattgatactaatataataaatttgtagcaacatcaaaagaggtgttcagatttcagctgctccgtttcttggccaagccaaactaatactaatctagtggtacagattcagtgattcctccttgtataggtctaagccattccaaaaacacatcacgttgatgcatctgccttttgcttcttgtccgtcccatggaatttcctcccggcttcaaccgcctccctgaacgcgctcacaagctcgccgttctctggctcaagctgcaccccctcatagaaggcattcgcggcttcttcgaacctctgcagcaggcgcagtgccgcgccttccctgtagcaagctttcgcccagtctggcctcagcgctcgacatgctcttgcatcctccagagcacgttcagcttgccctgcccgta

SEQ ID NO: 29503 - DNA, 369 bp, Oryza sativa
  Clone ID: uC-osflM202049h12a1
gatgcttatcgtcgctaaattaaatgggagtacaggctaaacacatgagacatccctcgatttaaaaacagattacaaacacatggatgttcacttcacacacacgacaagcaggaggaggagcagctgctgaaacaaaacgaccagcggcgaacttaatttttttgaaaaagggagaatcataacacggtagaactcatcatcatggccaattgcttcatcaacgccttccagccattatcccccaacaatggctgctcgaactcctttgatatcacgcgttgctcctgaaggagccgagggctttgatggcgccggcccggaggatgtactggtggtagaacgccgcgaaggcggcgccgactaacg

SEQ ID NO: 29504 - DNA, 370 bp, Oryza sativa
  Clone ID: uC-osflM202050a02a1
ggggggccccaaaggccctctgatatacattccaaaaaaagggggccaacccaagaaaggttccaacccggcaatataccccccggcccttggggatccggggctcaacaaaggggtataagaccgggtctccaaccaaacaaaaggggccgaattttcgcttcccacagaaggaagggggaggtttatccaaggggggggaaggaaggcccccccgggggccccggcaggggggcacccctggcacccaagtggcttaacatcgcccccaccgggggggagtcccccctcgtttttaaacctgacgaattaactggggcggaactggggaaaaccccactttttaccctaaagggtctttgggggacca

SEQ ID NO: 29505 - DNA, 418 bp, Oryza sativa
  Clone ID: uC-osflM202050a03a1
aaatgggatttccccctcatatcacataattcatttgtaaataaaactctgtccagtcaaatgcatgtgttgatttggacattgttacagatacaaaggtattgatttggacacgttgagatgtccagtaattatttcttgatgcatatgcgagttcatgctcatgcacattgatacactccatccaatcatttactctgcactatcctcatcttcctcgcggtccatcagagtccagcggccatcggggcctctcaccatgcccctgttcgacgggatccaccacccggccggcacggcgtgctcgtcgcgcagcgcgccgtaggacttgttcgccagcgccacgtcgcgctccacggcgagcttgaaccgcccggtctcgccgccgtgcgcgccggccacgccgtgcaggtagcac

SEQ ID NO: 29506 - DNA, 250 bp, Oryza sativa
  Clone ID: uC-osflM202050a05a1
atgggaagacagatcggggagatcttatcataggtggactttcacaggacacaagggaggggggcaccagtccctctaggggaagggagacaagcaaggccatgttgccatgaatgcctcaatgttaaggattgggtttagggatgcacaaaatttcgggggtttattgagccctttagttgcctctgctaccccgaccgtggaaaccacgcccggcaccttgggcaccaacttgaaggtactgcctaac

SEQ ID NO: 29507 - DNA, 327 bp, Oryza sativa
  Clone ID: uC-osflM202050a06a1
ctaacttatctctctctctttttaacattcttctatcgtctcatttttcttactctcttctttctcttttaaaatatgcttatcatctttttatctccttatttacttttatacgttgttttattggaccccctgaagctgaggtggattgcatgcttgaattggcctccggccggcgatgtcaagatgaatcctgcccctgctccttagctgttgagtgtaccatcgaacgccattgcccacgtttcgttgtcgatctggctgtctgattggttatcacgcatggcccacccagatgcacactcggcgagtacttgggactcgacg

SEQ ID NO: 29508 - DNA, 357 bp, Oryza sativa
  Clone ID: uC-osflM202050a07a1
aaaacccaaaaaaccgggggcccggatttgggttataccccccggaaaaccgggtggtggtgttctgaaggggggcaagattcccaagaagaattcatttttgggggccttttggagcaaaaaaggggttggcccccaccaacctggggggggctgattgaccttcaggggggggcagctttgaaattcccccttgccatcgggggcccggggggggcccccctgacccggggccgggggggccccccccttgggggggccgcaccccgggagggccccccccgggggcttccccttttttattggcccctgggcccaaaagggggggaaccccaccccgcccttgggctttattgg

SEQ ID NO: 29509 - DNA, 433 bp, Oryza sativa
  Clone ID: uC-osflM202050a08a1
cctggtctggtcttagaagttctccttgtggaaatggaaccgagtcgttgtcgtctggctgaattctagtgaaagatccctcagcattttcgtaagtgttggagacccacagtagaaaacgcctatacgagagttctggtgggcattggccagatctgagaatacctttctccagttcggccttgcaaaatgtgtccggatcttgctgccagagacgatatccacaccatttttggcatgttgaagtgattggaccatggcaatcagagctgatcttgcatctccttcttcatacacgcttgtcaggtaattgtgcatctctattacattatcatgatcactttcagcaacatcattcatcacgcctttaaaccattcaaaggaaccttgctctctggtgacccagtagaaataagctcttcctggcccattg

SEQ ID NO: 29510 - DNA, 407 bp, Oryza sativa
  Clone ID: uC-osflM202050a09a1
tttttgttttttttttttttttttttttttttttttttttttttttctttttttttttttcataatttttttttttttaaaaaatttgtcataaaattgtttattttgtttttggcccccaaatcatgttaaaacaaaaagaaaattttttgaaaacaaagggggagcccccaaccctttaaaaaaacagggggggggaggcccccccccccaaaaaaaagggatttttggacccaaaaggaatcacacaacaaggggatgcctcaagggggggggggttggccccccccaaaccaagaacgacaccccaaccccctgggggccaaatcgaaaaaaaagccctcccaaaaaagctgcagcaatcttttgttaaagaaagaggggggggcccttccgaaaaacccccg

SEQ ID NO: 29511 - DNA, 251 bp, Oryza sativa
  Clone ID: uC-osflM202050a10a1
gaaaaaccaaaaatttttaaactgggtaaccaaaacaaagggttaaagcccacagggaaacattggtaaaagaaacaacaaaatttttcttttaagggaccacaaaaaaggggcccagcaaggtcaaaaggtcacaagaaaaaaaaaaaggggggggaataaaaccccccccccgcccctggtccgggggaagtgaaaacaccggagcttgaacacggtgggggccttgggggaggcaaacacccggagcc

SEQ ID NO: 29512 - DNA, 440 bp, Oryza sativa
  Clone ID: uC-osflM202050a11a1
gggaacaacatgttaactttggatcagcaccagatatgcagaattttacaagccatggtacaaccataccgaaaacagattgtaacaattaaccatacacacagataagtatatctgtgagatgacaagggaagcacccaaacctgccggtaaacaaggcataaacacgcatgcagaggtaaacacacaatgctccacggaaggaaaccaataactcctgctgatgaatgacagataacttataattctatgcatcaaactacctagctgaaggtactgtctcacttgaatcaactgcctcgtctattgtatctgcttttgagttcttctcttctgtgatgcagtctgaactatcaggatgagacgaatgagatgagtcctgcaaggagctggtcagatcaggcttgaacatctcatcattctccaagtttgaaagcttc

SEQ ID NO: 29513 - DNA, 277 bp, Oryza sativa
  Clone ID: uC-osflM202050a12a1
cgcaatcatcgtgcagagcttatttgagcatgataaatgcatattcaatagttgcatacatagcagttgctagttgctacaagaagcatggagggcatgagactagagttgtcctaggtgggatttatcctatttgaattatgtgcaggacagacacaacctttagctgtttgccatggcacatatgagcagcatctactggttgtcttcctttggttagtggctgagctccgagtaatgccctcccatcatgtggaatatctcggcccagtgacat

SEQ ID NO: 29514 - DNA, 427 bp, Oryza sativa
  Clone ID: uC-osflM202050b01a1
aaaaaggaacaaaattattgcctgtggctgttgcatgattcagaaggacaacaagcttattgagtatgctctgcttctcatacacaagaaaaattcacagaccaagttttgctgctcttcaaaatctaagggcagtccaaattatcctccaatttccaaccaagcatgcaacaactggggaaatttggagcaaaaacaaggaactaaaatcttttctgccgatgaatagcttccgaaaggtgtagatttcacttcttcaacaaggttgcactgcattgggccattatctttgaggctcttgggattgcatcagccatatagaagttctccacaacagttttgaatggagtagagcttacttgttgctttaccggaggcttcacttcagaggaaatagtgcacggctccctctcatctacatgcacat

SEQ ID NO: 29515 - DNA, 100 bp, Oryza sativa
  Clone ID: uC-osflM202050b02a1
tttttggaaggcaaaaacatgaaccgaattatttcctgacggaagattccatccagtacatgtcagagggacggggttccaatccaaacacaaatatatc

SEQ ID NO: 29516 - DNA, 396 bp, Oryza sativa
  Clone ID: uC-osflM202050b04a1
caaaaaaaaaatgggggggttgtcacttttcactactcaaaagaaaccaatagttgcagacgaaatgctgcaggttacagacatctcagggaaatggtaatcgtcaaggttcagaaactaacagaactcaaaattcctcatctccgaaggggcaactgcaaataaagcacgggtaaacagatatgggggattgattgggtctaagttttagaccaacaccatgcttcatgcccaactgaactgcttggctccatccgctagcttttaaatctcacattggcagacatcaggtagtcgtttgtcccccaccctattgacaacaaaattcatacctccaaggatgtaaagatggtgactcaaaattttgtactcggcctctgtaggtggatcatatct

SEQ ID NO: 29517 - DNA, 418 bp, Oryza sativa
  Clone ID: uC-osflM202050b05a1
ggcaagataataaagcattcctttggtatacaagtttgtccatatgacaggattccagcttatgttggaacactctaagtatgtgccgcaatcaccactgcacattttattcaaaaaccaagacctaatacatgtaggaattaaactaaaatctgaaaccttcacaaaacgtttgtattcgctcctctagcatgggggggtccataaaccacacctctggttagctagaaacaattaactaacccgtatattaacctgatatcaccaattcatagtcatgcacctgaatacctgatataatgcttctttcatctatcccaagtcatatatgaatataataggcctctcgctaggaagtgatacctctgcttgtctgattattattaacagtatagttgcccatgtaacttgctggtat

SEQ ID NO: 29518 - DNA, 428 bp, Oryza sativa
  Clone ID: uC-osflM202050b06a1
caagcatcatcactagatttaattaaaaattacaacatgcgaaggacggattagatcataagcacttcaatgaaaaataaaggttgctcggaatacatctaataacctaaacataatatttctaagccatcctttcatacatcagcttgcatgcaccaaccctgttcagaaacacaaaggaaagcaaacctagaagaactcgaactctagataattgtctgagcccttctggttggcagccggggcaaccttctcagtagctggtgctggctttggtgggcgctcgagctcaactggcttgggtatctcaggagggcttgcacatcgtatgagcgcccaattcacgccctcaaagaatggatgctgctttatctccgtcgccccacgcttgtaggcaagacggtgctgcgggtccttgaccagcaatc

SEQ ID NO: 29519 - DNA, 346 bp, Oryza sativa
  Clone ID: uC-osflM202050b07a1
atggaatacatgaatgatggattaatatggcaatgaccttatcttgttccaatatcaatttgcagttccgtcgaactggcatctaggagcttaggagcaaacctagctgaattttacatatacattcagaagcaaatttggcagttctgtaaccaactgaacccgtttttttagattttatgtacacgagaaatctattataaaagcagatatacttagtgcgcagggttcgccgccgagctgcgcaatcgtcttcgtcagttaccagctgatcatttgatgatgcaaccacgctggctctggacggtctgatacggttctgaaattgctcaagcgctgctcttct

SEQ ID NO: 29520 - DNA, 435 bp, Oryza sativa
  Clone ID: uC-osflM202050b08a1
atcattgttaaaactttttctttccatgtaaattatctgcaaagtaagaaagtaacactcccaagttacaacagcacaccatccatatatccatgcaggcagcctgtttgtgcccttgtgcagatgcatttcatttatacaagtagaaggcactcaaatcagccaccacatgaacacacacatgttccatcatcgatcgatctacacatgcatcacccggtcatgcacttacaaacaaaagatctacttgaagaagtacgggaggtcgagcacgtagaggaggaagtaggcccagaggacgccggagatgccgccgaagaagaagccgccggtgaacttggcccagccgtcggcggtctgcagcttgtcggcctccttcttgcggccggtgagcgtcagcgtcggcgccgtggacggctcgccctcgccgaagga

SEQ ID NO: 29521 - DNA, 430 bp, Oryza sativa
  Clone ID: uC-osflM202050b09a1
tttttttttttttttttttttttttttttttttttttttttttttttttttttttttttttttttttttttttttttttttttaaaaattttttttttttttttttttttttttttttttttttttttttttttttttgttttttataaaaccaagggccattttgaagggaggggggaaaaaaaaaaaggggcccaaagggttaattttaaaaaacaggagggggtttttaagggggggaaaacaggctaaaaaaaaacccccaaaaaaaaaaaagggggcaaagggctctaaaaaaattaaaacccgtaaaaaaaacaaaccccgggaaaaaaaaaaaaaaaaaggggggggcccccggccggaaccccgggggggggccaaaacccaaaaaaaaaaaaaaggggggggttttaaggggtaccccctc

SEQ ID NO: 29522 - DNA, 402 bp, Oryza sativa
  Clone ID: uC-osflM202050b10a1
agcaattagattatgtccccttctttattacgaagagaaaatacagagcaaaaaaatcttggttctcaacatcaattaagggggaaaagaatctgacagaacaggaatggaaattgcctgtgcctccatttccctgttagtctgctactgccatccaacgttttatgccattagaaaacctccaaactcattggcgctatactagctatatcccgctgcagaggcacttatgtttgccctcagaatagccaaaaaaagatggtaagatttcaaggggggagccaggagtattatgtggattttgaagggggaaatgagaacctacaaacggagtttgattcatcattcatcaagatcatccttaaagctagtcgatctcggcatacctggagtgcgaggctg

SEQ ID NO: 29523 - DNA, 392 bp, Oryza sativa
  Clone ID: uC-osflM202050b11a1
aattggaaatcaacttatagaatacatttataggcgttgtatattccgtttaagcacatgtaatatataagataatatatttcatttacatcagatactgcttattttcctggataagcttatcaaccactatgtcgtatgccttttcggtaggatggaagctatcccagaaaatataatcataaacatttggacatgcactgggatatttaatgaatatagcagcatttagcactgggttgccgcagcatccatcagatgtatccttgaaaccataataaccaggattggggatcaggtcgagcaaattgtagtatatgtcaaaataaacaacccttaaaccatcaatattatgttcgacatttagtcgatcgatttcctgcttcattcta

SEQ ID NO: 29524 - DNA, 419 bp, Oryza sativa
  Clone ID: uC-osflM202050b12a1
agaggagatcaaactgtgtttatagactgaactgaaacttgattatacagtttgccacgactcctaactcaagcccctatgacgtggatacatatgtacaaaagttttgacacctgagaaaatgatctagtttccctacatggatagctagctagtagctatctcatgtcatggagtgttgccaagaaggcgtccaacttgacattgtcacctcgagacaagaacttgatgcagatgggcgccctggcacccatgagtgtcagcatggacagcaagatcgagccgacgccgtcgccgcagatgagccccgacgccagcgccggcgagagcatccgcccgcggccggcgtccatcttctcccacaggtacgccaccaggctgccgatgcacatgccgacgggcacgcgcggcggcatgaa

SEQ ID NO: 29525 - DNA, 346 bp, Oryza sativa
  Clone ID: uC-osflM202050c01a1
ggggaggaacaacccccccttgaaaaaaaaggttggaaaacaggttcacacacaaccggggggccccggcccactagttaaataacttccataattggaaatcaggggaacagttccatagttgaaaggccacagggatcaaaaaaaaaattcctgggaacattggggaacaaggggaaaagggaacaagagttcgggggcagggggggaaaactaaaccggggggctggggcttctccagggggggggaggggggaaacctcccggggggggcaacaggggccaagagcattcgccggggggagaaacggcccaaacccaagggatccagggcatccccctttgg

SEQ ID NO: 29526 - DNA, 365 bp, Oryza sativa
  Clone ID: uC-osflM202050c02a1
aaggggccaaacctaaccggtcatttccccccccaaaaactaagcattgggtccctaccccaggaaagaaattaggggggaggggggaaacatatcctggagaacacacaacacaagggggatttgcactacgggacaagccccccggtgggccctaaaacacttaggtaaaaaacccttggggaggtcttccggaaccccccggtggaccccgccaacggggggggggcccccatttgggacaggcccggaacaaaaacaaaaaaaaaggggcccgggctcccaagggaagacgggacccgggcatcaggggctccgccctggaagagctcctgaacaaagggcaggagcggaccccggggcca

SEQ ID NO: 29527 - DNA, 150 bp, Oryza sativa
  Clone ID: uC-osflM202050c03a1
agaaaacaaatgagcagtgatatctctgaactttcgcttacacatagatagcaagcagtctagtagtggaccaatccggccttctgcacgcatacagtcactcacacgctactaccctatctttacatggagaacataaccaatatttgc

SEQ ID NO: 29528 - DNA, 438 bp, Oryza sativa
  Clone ID: uC-osflM202050c04a1
agtagcagataaaactcgatgcagaataacgtttgcattgttgacaaaatttggatattcttcagcccatgttgtcatcagacaaatgaactaccaacaagagcatagttacaagaccagaaatacagaaaaaaaaaagatggtggaatacaaggtttaagcttgcatgttcatcagatagtgtaagcagagataataacttggctagcatatacaaagggctcactcttgaaagaatttctgctccagaaaattctctatccctatcaccttttactcctggtcatcgtcgtcgtcatcatcgtctcccttcttaaggcgggtagttccaccctctttgcatataggtattttcatgtgtccaaaaggagtattgacatcaatgtgcccctttatggtgtaaccagttccctttccccttatcatatcccacataga

SEQ ID NO: 29529 - DNA, 119 bp, Oryza sativa
  Clone ID: uC-osflM202050c05a1
tttttgtggggtcttttaagctacaaggaaactccgcatccctaatccctaccattaccatactctccagattgacagctcaatacaagtacagtaatctcctggaaagtcacttatta

SEQ ID NO: 29530 - DNA, 312 bp, Oryza sativa
  Clone ID: uC-osflM202050c07a1
aacacaaaaactagcgctgtattaaaatatcccagtggctgccgccttgttcagcgttcttctaaatttagtacacatattatatgacaaaacagaaaactcataccaatcaggtgtgagtaaaaaaatattatacatgcaagcatccgacatatatacaaaatcatttctatgctgccgtgctagcaacaaacagtagcctggtagttttgaagaaaacctctaagctgttttcacaaaggccacacggagcccatgtattctctatcgcgccgatttcttttgaatctttgctttgggatgtcgccttcc

SEQ ID NO: 29531 - DNA, 227 bp, Oryza sativa
  Clone ID: uC-osflM202050c08a1
atatatcaggagcaaccaatccacccaaaacaggacccaaactgggagattaggaataacagtacacacatggtgatttgttatggcccctccacaaggcttgtatttctagccgtctccaataagaaaaattcagggaaattccttgaacccatatccgtggagccacacgcaacaatgggcatttggcattctggacatgcccaccggttgccttttaatcacct

SEQ ID NO: 29532 - DNA, 406 bp, Oryza sativa
  unsure (1)..(406): unsure at all n locations
  Clone ID: uC-osflM202050c09a1
atgaagnccccgaagtgtgtaatacatgcaagaattgtagcagaaagaacattttttctgggacaaataggatattgatccatccattcatgcatgatatcgttcaacctttcttaaattaaaaagaaaaagacatcattgtattcagctatgggttcaaagaaatgtgagtacatcatagcacaacaatgacatgaccggggaggcatgctccacctgttaactttggcacgcccaaccagataatgcttgaattaccatccacgagagctgaggtatgcaacaagtcgtccgagagtcttatccactcccttgttccatacgtgagccaattcagttgagcttgttctacttctggtttactaggctggcaggaggagaagggcgacggggcagcggcagcgtc

SEQ ID NO: 29533 - DNA, 435 bp, Oryza sativa
  Clone ID: uC-osflM202050c10a1
gcagggaaccaggtttattattgatgggaataatcacatttcatgctgatacaaaagaatggcgacagcataaggccgtgatacggtaacaacatttacactcatacgggtacatcagtttgtgcatttctgccctgggacgcttctgtccaaggcgcgcaccaaatacctcatcaattttcttccgtattgttcacttattctgcttagagcagaagttttctcaggaagtcttcggagatgctattctaaaaccatcatctccacagtactgaggagacatgaaaataccaggtctcctcgacggctctgagagtaatttacatgagttttgtttcttatgattcgattgctgcgacccttactggcttcattacttttacaatgttcctcatatgctcaaaccccatcagtatcactcctgatgaattctca

SEQ ID NO: 29534 - DNA, 268 bp, Oryza sativa
  Clone ID: uC-osflM202050c11a1
ataatatattttttatattaaaggggaggaaaaaaaaaaaaaaaaaaaaaaaaaaaaagaaaaaaaaaaaaaaaaaaaaaaaaaaaaaagaaaaaaaagaaccgaaaaaaaagacaaaaacaaagacaaacaagaccaccaaggactcggcggaaaaaacaaaatgaagaacaagccgagaagagccaaaaagatggacaaggagcgaaagaacaacagaaaaaagcaccgacaacacaaacaacggaagaacgacaaacgaaaagag

SEQ ID NO: 29535 - DNA, 434 bp, Oryza sativa
  Clone ID: uC-osflM202050d01a1
ctagaaatgcaattattatgggacggaggtagtaattgttagtacaaggaattatattacaagttgcattttaaagacaaacacgtttagttttaccagtagaagatgcataaagtatctgcttgcatgatgaacttaatgtttccatacttgggtaacccatctccccgtgttaccatccatctttctgcaaccctccattcatagcacatcgcatttccgtcggaacatgaaaccaccattcttttattccattacaccttgttgctacaagataagtgaattaactgtacagaaaaactaatgtacaggcaccgtaggggaagaaatatttatcagctgcttgacgtgatgtatctacacagattttactggtcccgatcacgatcacgataaattggctgcggcgtccacttgaagtgcaagttcagctt

SEQ ID NO: 29536 - DNA, 465 bp, Oryza sativa
  Clone ID: uC-osflM202050d02a1
tgcacgctcactttacgcttgtatcctctttattggccgccctttattttttttttgttgtgagcttaaacaaggtctcataacattatttccccacaaacaagaaccacagtaaaagaagtatcataacaacagggacaacagaagtaaatacagaactgacagaaagtgcctattatagagaagcctaattcagatattggctatcctcttttgcagctcagttcatctcccttagatcggcatgcctttgggcacaatcttggtactttattcacatgtcaataggcaccagaacatagtatagtggacatattgtacccatgaggaagcggaagaggaaggtgataggataaacaggtttgctaccttcctcaaccttttggaccaagtctgttaaggggagtccacctgtccctcttttgagggcgcgcgcatatgattcaataattaggccatgctttt

SEQ ID NO: 29537 - DNA, 426 bp, Oryza sativa
  Clone ID: uC-osflM202050d05a1
aaatgacgatttaataagaatatgcaccattttcaaacttgcaactcaaataaaacatcaacaggaatgagatgcaaatgagcaaattgagcacatatttaggttcaaatccaacttattcataaagcatactgctgccccacaggaaactgtttcataaaactaacatatcatacggactcgatggtccattaaaccagacacaagttgacatcagcaccacaaatacttgacgaacagaggcttgggacgaccaggcacatcggcagctccaccaaactggctgattactgaccaccacggaggcggagcaccaggtggagggtggactccttctggatgttgtagccggcgagggtgcgcccatcctccagctgcttgccagcgaagatcagacgctgctggtctgggggaatcccctccttg

SEQ ID NO: 29538 - DNA, 385 bp, Oryza sativa
  Clone ID: uC-osflM202050d06a1
gagcacaaaaggatggaactgcctaagatgaattatacttattttcttgaattacagcatccattcctgatctgtaaaaatttgtgcaacatgatttcacccgaaaggcgcctttctctaacccaacgagaataaactccatgctgattggtttactgtttctgtagttctctggctgaaaacatgatgctaagtgaggaacagatcaagactcaaggcgtgacaagattggagggcctattcatctctacctattgatggctcgacctgaacaatgctacagaccagggggcttgagaaatgggatagggaagaggctctccacattgacctgggtaccaacaacgatgttcacattcctcgtttgaaacactcgtgccctttt

SEQ ID NO: 29539 - DNA, 421 bp, Oryza sativa
  Clone ID: uC-osflM202050d07a1
gggttaaatgctatttatttccttttttttctcacctttacaaacctgcaaactcatttctgcaaagaaaaaaaaatgaaaatatgttgcagagtattcctaattgcctactatgatacaagaaaaaagaaaacacacactgaatttcagtttcaggctttcacactgaatttgaggccttaactgaatttcaggcggtttcggaggaggcgatctcaagctccgcccaccacaggggcttctccctcggcgccgcctgctccggcgacaacccggcgatgcccctcaccagcctcgccacctcgcccatgcttatcgctctcttccccgcctccggcctcctcacgcactgccgcaccacgtcgcacagcgccgccacatctttctccggcgcggcagacgacgacctcaccagcgtccg

SEQ ID NO: 29540 - DNA, 433 bp, Oryza sativa
  Clone ID: uC-osflM202050d08a1
gaaatgaagaaatcaggactatttatacaatcaaatctaacaggctggaaaaatcgttactgctaggaactttacagtgctaccaatcttggtgtcgaattgcggtgaaaactttccgctagggtaatctttcttgcttggtcagtagtgcactattggtttgataagggccaaaagtgcaaagaggaaaacccagtcatcgaaaaagttcagggaaggaccacatgataaacttggcgtagatgtcagtctccaggaactctatgtgcgctgctctgccaatcatggtgtttaggttccgtccttgcgcggactgatcaaagttcacatcacagcgcatgaagatccgggtttcagatgtgggtgcgcgcatctgatctaagcaattgttgagcatttctgtaaagacttggcccttccttgagttatctga

SEQ ID NO: 29541 - DNA, 400 bp, Oryza sativa
  Clone ID: uC-osflM202050d09a1
caaacaaggcatagtttaacagggaaaaaaaaacaggcggggtccacgtccacatccaccataatatttgggtggctcaggggacatacagggaccagaaccggcatttggtttctacttaaaaaggttttcatcagcccataaaaattcaccagttttggggggcattaaataaacatccacataagggtttaaacaaatcaggggggctgcatttcgtatccagagatgagctccatcagttggcattatttttgggaaagaaatcaggaaactagggcaggatcgtcattgacagggtcctaagccgaagctgccagtagctccctttgggctcgctcacggattctcctttccagttctggcctgaagggcctgataagtccctgcacaggccatg

SEQ ID NO: 29542 - DNA, 383 bp, Oryza sativa
  Clone ID: uC-osflM202050d10a1
cgagcaaaaaaacgatttaaaggctatagacccacctttccgaagaaagggcttcgttaaacgacaaaccacaaactgggatataaaagacgccacaaagaaggtccacaaaaacaccacaggccacagcagccaaggcaacaagcaaaccctgcaaaaccaaaaaggaaaggtttttaaaaaccagccacacaaacggaaagatagaagcccacacggacagaacaaaggaaagcagcagaaatcaagcatggccaaggacccaggcaggaaccccgaacctctttagaactggacaccctcataaccctagtacccatagccaaactcggagccgacctccacggagacccatcaccagcgcggggaggcccccggggccc

SEQ ID NO: 29543 - DNA, 400 bp, Oryza sativa
  Clone ID: uC-osflM202050d11a1
ggctggttatatcatggaaattttaaaaagggaccaaaaggatagcttaaaaacagagctgaagggaacgtaatgttttcacgtggatacaatttcactgccctaataaccaaagcgaaaagaaatcacttatcgacaataacaatggcctccctccgttttacaatataaggcattctagcatttttcatattcatattgatgttaatatatctagacatatatatctatctaaattcattaacatcaatatgaatggggaaaatgctaaaatgacttccattgggaaacggaggaagtatcttatactacacacattgtacacaacaatcgctagagatcactgatatcatcagctgacaggatcacgttgcggtccacgattgtagagcgggagctc

SEQ ID NO: 29544 - DNA, 387 bp, Oryza sativa
  Clone ID: uC-osflM202050d12a1
cgactcataaatttctattaagatcttgattgtctgcataatcataaggatgtgctagtttatacagatatgctgtcacggaacctacatcaaggaggaccattcactgatcgaggattctacaatgcagttcgacatcaacgcattctacaaggagaaggacatgctgcacggcgtactacacctcattaggcagtagaccgccatacttcgtcacgcactgcaccccaacattaagaggatgactgaggtgatggacaacaagcaaaagaattattatgagatggttctcttacactttgactagctgatcactctgataaaccgggtgcgggatctggatgacaccattacattgcttcttacatgatggtcgcctccgcacga

SEQ ID NO: 29545 - DNA, 423 bp, Oryza sativa
  Clone ID: uC-osflM202050e01a1
agggatcacttattcattatagttcttccatgctgctctaccacagcaaaacgtttcagacaccatcaaaccagacttaaggatacacattacaggtaaatagtacacaatgaaacgggacacgaccaaggaccagaccagacaaccatagctccattggggaagacaaataggcagacttgtgaaccctagaacagcagcagctccatggctgaggacttactggccaccacggaggcggagcaccaggtggagtgtggactccttctggatgttgtaatccgcaagggtgcggccatcctcaagctgcttaccagcaaagatcagacgctgctggtccggggggatgcccttcttgtcctggatcttcgccttcacgttgtcaatagtggcggacgactcaacctcaagggtaatggtctt

SEQ ID NO: 29546 - DNA, 433 bp, Oryza sativa
  Clone ID: uC-osflM202050e02a1
actatatattaaacaccttacattagcactttgcattggagatgcgtgcagttaatgaaacaacaatgtagtttcagtacaatacatttaaaacaatcaatgaaaaaaaataattcctgccctatggccttctgcataaatgcgcatgtcctctatcatgacaatgcattggctcttccgtgatcaccatcaacaattagacctatacgcacaaacatgcatgctcctcgccctatcgccctctaaatttgcatcgccaccgcttccaaaaatgcttttaattaatacaacttttttatatgtagaacctataggatcacattgaccagaacccggccggccacagatcaagatttcttgagtaagtacgtatgtgtagaagaaaaaataagctcacacaactacaaaataagaatcatctccggttaggcgg

SEQ ID NO: 29547 - DNA, 430 bp, Oryza sativa
  Clone ID: uC-osflM202050e03a1
gaagagaagggatgtcagttgacaacatataagcttcactgtgccagcttgtaagacaattacaagataactcctattgatttcaggtaacagaaccaaacttggaaattaattaacagtagccaagtagcagctcattattctttactagaaggtgtccaacaaagtagagcaacaaaaaggtgaaacgtcaaaccaacagagaatagaagtgccataagattttaaaccctgtggtcaatgtaatctcagccgatgagcaatttgttctcttccagaaatgagtaggtcgggacttcgaggttgtatggtgcagggcccttacggattctacctgatatatcataatgtgatccatggcatggacagaaccagccaccaaagtcaccagcgttgggaagtggaatgcagcccagatgagtacacaccc

SEQ ID NO: 29548 - DNA, 391 bp, Oryza sativa
  Clone ID: uC-osflM202050e04a1
ccacacaacagctgttgatcaaccagcaaatacagttgtttttatttcacaagatagctcatttgggagaattacataacacggttttttgttaagatatacaatcatacagggtcccatccatatttgataaagtagaaatcagcatttttaaaccttgagggccagggatgagacttccatatgggcacgcaaacgcgaccgatataagggggccctctctcttttcttttttcttttcggaactctatcctgcattagttccagcctggggtcattggccccgaaatacaacaggggaaacgtgccctggggacatttttcataacctttatttgggcattctaaagcatgacaacgatctcggcaaatgaggggcgaacttcagggt

SEQ ID NO: 29549 - DNA, 343 bp, Oryza sativa
  Clone ID: uC-osflM202050e05a1
agttctacatggcaaaaacaaaacactgggggaaaggacccaacaacgcttccaaggggggaaggacaaagtaaactgcgaacacctctgatattgaaagaaacaaaggacccgcctttggggaccccgggggaacgcaaaacccgccagggaacgacggctaaatttgctgggggacttctaccataattccatgagagcatgaaggtcacctctaaaccaaccaaggataacaataagccctaatggacatggaacaagggacagcagcgcaggttgaccatgcccgtccatcaggaagagcgcaagacaggtaaggaaaaggccaacagcatatcccacc

SEQ ID NO: 29550 - DNA, 324 bp, Oryza sativa
  Clone ID: uC-osflM202050e06a1
ggataatgattatttcgacacaactgaaagaatacagtgtgtgttccccgtccacccagttacatacatacatcccaaggagttcattttctccttttttcaagagaactcacaactgcttggtacaaaccagtactagctacatgatcagtagcaatggcgtcgaattgcaggtattgcagatgaaaccacctttgttcttttccccctctagaatcaagatggagacggaagaaaaaaaaagaattcaatagtaattacctcccagcattaattggcattggtaagaagagattagatgctgcccagattattacttaagct

SEQ ID NO: 29551 - DNA, 416 bp, Oryza sativa
  Clone ID: uC-osflM202050e07a1
aacaaaaagattagtttgaaacaaatgaaagaatacagtgtgtgttccccgaccacccagttacatacatacatgccaaggagttcatcttctccttttttcaagagaactcagaactgcttggtacaaaccagtactagttacatgatcagtagcaatggcgtcgaattgcaggtattgcagatgaaaccacctttgttcttttccccctctagaataaagatggagaaggaagaaaaaaaaagaaatcaatagtaattacctcccagcattaattggcattggtaagaagagactagatgctgattagattaataatcaagctgatctctactacagtggcgccgttgatctctagtgtccgccgagttcggttatgtacagcgtgcaagaaagcggctgcgccggtcatcttg

SEQ ID NO: 29552 - DNA, 436 bp, Oryza sativa
  Clone ID: uC-osflM202050e08a1
tccaagctgggcctcgcccacaccaccgccagcctcaaggacgccgccggccaagtccacctcgccggcttccccgcctccgccgccgccgcggccaaggacttcgccaacgacccgtccgacgtggcgctgttcctgcacacctccggcaccacgagccggcccaagggcgtgccgctcacgcagcgcaacctggcggcgtccgtccagaacatccgcgccgtgtaccgcctcaccgaggcggacgcgacggtgatcgtgctcccgctcttccacgtccacggcctcctctgcggcctcctcgcctccctggcgtccggcgcgtccgtgacgctcccggcggcggggcgcttctcggcgtccaccttctgggccgacatgcgcggcgccggcgcgacgaggtacacggcggtgccgacgatccaccagatcatca

SEQ ID NO: 29553 - DNA, 382 bp, Oryza sativa
  Clone ID: uC-osflM202050e09a1
ggtgaaatgaaataccatttctttccactgttgcctcagggtaaagcttctaattaatttaaacagtttacagcatacagcatacatatttggtgcttttttataaaaaaatcaaacaaaaattggacaatttccgagcttgccaaggcggcacatcaagctggcactctaattgcacatctatctgtctgcacagttatgcacatttcacacacaaacataggaacatctgatatatttcgcgtattaaatcctttggattaacatatgtataccttcattggcgcatgaaatgaatgaatcatggggccaacagttaccaaatgtaaccatccatataatccagggtagaaacctttcacctagggcacctgcactgata

SEQ ID NO: 29554 - DNA, 271 bp, Oryza sativa
  Clone ID: uC-osflM202050e10a1
tttttgttttttttttttttttttttttttttttttttttcattatttgcttaaacaagggggaaaaaaccaaacaacaggaacgccggagcgggcaaacaagcacacagaccaaaaaaaccagggggggaccaggaaacagcaggacactcctttaaaaaaacgtacccgagaaaaccggggtcccaagggcctagagagaaacgacacgggggccacagaaaagcaacccaaaatgacccaaggaaaagcacccggggaaaacaaaaga

SEQ ID NO: 29555 - DNA, 424 bp, Oryza sativa
  Clone ID: uC-osflM202050e11a1
atagtgaatatgcttattttaaaaaataaaaataaagagcaacacttatgttagtacaatgcagcactgaatagtactacattactaaaactatatactgcaggtaagcaaatcacattgcatctaacttttcttgcaaaaagtaaactgtgtacatttctgatattgttccaggagatccactgggcaattagtatctcaattgtccgcagattcttctatggttcgtcgactaaattttctgtttgacttctaccataattccatagatcatgaagttcacctctaaaccaaccaagtataacaataagccctaatgtacatggaacaaggtacagcagcgcaggttgaccatgcccgtccatcaggaagagcgcaagataggtaaggaaaaggccaacagcatatcccaccgtcagccata

SEQ ID NO: 29556 - DNA, 416 bp, Oryza sativa
  Clone ID: uC-osflM202050e12a1
tttttgtgtttttatggtttcttctttttttttttgtattatcttttcctaggtttttttttttatttataggtaacattccaataacaagaggagacagagaaccaaccacacaccacaggccattgaactcacccccaccaaaaaaaaagagaaaactcccaaactcaatcgaccttactcccttaaggaaaaagagcagagcctaggaatgcaaagcaaccagaaatatcgcacaaaaaaatacatgggtgaaaccagagaaaggaaacaaagcaaagaaactccaaggcgctcctgtatcagaggctcagccggagatgaaggccaggccactgggtcgacggctcgccctcgacggccaacgggacggagctagccacggagcggaacttgagggcacacagcatcacaag

SEQ ID NO: 29557 - DNA, 321 bp, Oryza sativa
  Clone ID: uC-osflM202050f01a1
tccgcggcctttcgccattgctcggtctgcacgcgcaggcgccgcatctcggcctccagcgtctcccgagcggcttccgacgccctcagctgctcgcccatgcgggcctcccgcgccgctctctccttcaggtcctgctcgaccaaggacgccttggccgccgcctcctcctcagctttcttggccgcctccgcggcttcaccaacctgcttcttgagctcggcattgtcggccgtgagtatggcgacctccatgtccttcgccatcagcttggcctttagttccgcgacctccgggttctccttctcgccggagtcaatg

SEQ ID NO: 29558 - DNA, 426 bp, Oryza sativa
  Clone ID: uC-osflM202050f02a1
cgccttgcaaaaaaaaaggtgattttttttcctttgaacttccttgacaacttagtactacaatactcgagatgcttatatttatctcggctttgcttgttgacaacctcaggttgatcaaactcaaccatactacagtaagttcttctccaatcagaccaggttctcatggggggctccactgcccatgaccattcccggcttctgcgagtgcatcacgaagtcgcactccgccaccgcctcgcccaccgtggggaagatccactcatggccgatcgcctcaagcaccttggagctgtccaacttcttcatgatctcgctccccgggatcgccaacacaatctgaaggcccctcctgtccagggccttcctgagttcatccagcatgcctcgcccgctggtgtcgatgcttccgaccgcacccat

SEQ ID NO: 29559 - DNA, 449 bp, Oryza sativa
  Clone ID: uC-osflM202050f03a1
gcagtgcctgcagcgccagcagctgatgccgggctcgagcgccacgcggtcgccgacggcgaggtgcgtcacgccgctgccgacctcctctatcacgccggcgcactcgtgcccgatcaccatcggctccttcaccacgaaatgcgcaatgcgcatctcctgcacgcactcaaacaacaaacatatataagccacattatctttcattctttctgtgagcgaacaacagatcaccctgaggtagtgcacgtcgctgccgcagatgcccactgccttcatccggacacggacatcataaggccctgaaaatggtcatctatctcagtgttgtttcatccaacatttttactgaatttcacactcacatttgtagccatatacagcagacgaatgcaaatgcttgacgcttataaagaaacaaatatcataaaaaacatatcaaaattcag

SEQ ID NO: 29560 - DNA, 403 bp, Oryza sativa
  Clone ID: uC-osflM202050f04a1
aaattacaactgcactggacggcttatattcttcacaagcaaaaaagtagactcaggtccatatcatcagcatcgttacaacttacaagtaggtagattggaaaacaaaatgcaactcattatcccaactagcattaacagagggggtgggtcctgatgaacaccgtccacgttttattctcagcatagacaaagcataccggtatctccggctcggcggccatggaataccatggcaagcaaaaggattctactgggtcttggccatgtggcggatcaggtcgatgacacggatgctgtaaccccacttggtgccggaccaagcgacaagcttgacaaagttatcgtcaagagcaattccagccttggcgttaaagatgctcgacctgctgtcaccaacaaa

SEQ ID NO: 29561 - DNA, 396 bp, Oryza sativa
  Clone ID: uC-osflM202050f05a1
ctacatcatgcacggtgattttgatttcccgcgctggcagttcaatgattaggccttatttttgcaaaaaccactggtcaagcatagccgcaccacgtagtggtaatagtcctataacaatatggtccacaatttccttactactggaaaacctgctatgtcacaggcaggggccagccaacgcagagcagaaacgactcaacaagcgtcacgtcactagggagcaaataacacacagttccgactcgaaacacaaggtttccatgcagactcgcccgggcatgcttgcatgcccccgaggatcagctgcatcctcgaggtgctgtcatggatggatgccaatgcaaggcaagataggagtaccagcaggctggcacatatccatttttattgggg

SEQ ID NO: 29562 - DNA, 436 bp, Oryza sativa
  Clone ID: uC-osflM202050f06a1
ggaagcaaagctacattccacaagtagcttcaataaattaatatctacagaacaaaaagtataaaatgtatagtagcatcaaatacagagtacaggatggctaaagttctcttgttacggtcgctgcttcaacatgtactttgtgcacatatatacagaattttgaagtgaaattcccatgacgacagtcttttaactcctgattagctcaagctgctttcttgcttttgtatttgtttgcgcagatgacatatatcacaaagttcagaaaactgagcccagcaagaagccagaagaaataatctaggtgaccttgattcaagttatcaggaatccatccaggatttcctcctcttgttgtgaagtacgcaaccaatgtcaaaatgaatgcactgagataattcccaagagctgttgtgacaagctgcagtgcgct

SEQ ID NO: 29563 - DNA, 406 bp, Oryza sativa
  Clone ID: uC-osflM202050f07a1
tttttgttttttattttttttttttttttttttttttttattatttttttttttttttttttatttaaaataatattaattggaaaataaaatataataaaaaaaaaaaaaaaaagaaaaaaaagacaacaaattgcagagacaaaaaaggaggaaagggaaagaaaacaaagatcagatacaaaaaaaaaaataaaaggaaaaagacaaaaaaaaaagaaaagaaacagacaaagataaggacagaaacggagagggagaaaaaaaggaccccaagggggaaaaaaacaaaaaaaaaagagaaaaggaaaaaaaaaaaaaaacaccacccatgtaaaaaaaaacaaacgaaggaaaactaaccctccgaaaataaaaaaaaaaacaaaccggggaagaaaacaaa

SEQ ID NO: 29564 - DNA, 431 bp, Oryza sativa
  Clone ID: uC-osflM202050f08a1
aaaacaagcacgacattcggtattaaaacaagcaagacgttcggtacaacatattacaagtcaatacgttttaaaagatcagctcatcaagctgataatacatttggttcacacacaaataccaacacgaaacgttgctaccatagcacatcatatgatagcaactgcataatgatttatccttaagtgtatttaatgactttgcagtaacaatgtaccacaatgaacaatatagctggaaagaacatccacaagcatgaagaagtcatcaccaactttattcatagctctgatcgacaagagtaccaccaaaaacagaatttcatccattcgttcgtgaaggcttcagtttccacggcagcaaccaatccacggacttacctgacgcattttagtaactgcccgtatgcagaattgcagattactcatta

SEQ ID NO: 29565 - DNA, 429 bp, Oryza sativa
  Clone ID: uC-osflM202050f09a1
atagtaacaaatttattattagtaagggtacaaaacaccagataagaaaacaaacattagtttaacctaagataatattttgttcaaaacatcttcctcatgtattgcctttctccatctaaatcatgtattctgcactttatgaattacagtattgatatccaatatctgagcgatggtcaatcggattaccatggaaaagttgtttccatttcagttttttaacaatgagtttccctttcatttatgcccatgaagacatggtcacagactaactgtgcccaaaaatagttttatcactgccccatgttattgccttttgctcttgagcagcaacctgattttttttttcaatctcaaacaataaaagccacaaatggatcaattttgatttaacaaaattcatagaagtaattaaagcaccttatg

SEQ ID NO: 29566 - DNA, 433 bp, Oryza sativa
  Clone ID: uC-osflM202050f10a1
gattcaacaaggcgtgaaatatacgaacatccaaaattcaacacacttaactcagtctgggctataataattcaataatgcatcgctacttcagttagattcagaaggttctacccccacaaacctattacatcttaaagtacaataaaaatggagaaagagtttccaccttgtgctagggaaagattctattcaagtgtggtgttcagtactgctcttcatcccatcataaacttaacttaaaccatgcagtatccccgtgtagtatgtctagctgcttgctcttgctaataggccagagaaggatggaacaggggagttcctcatttgttcttgagcttgctttatctcctcgggatctatgttctccatcattttgggcataacgaagaccattatgaccataaaaccaagcatcatacccatagggctc

SEQ ID NO: 29567 - DNA, 433 bp, Oryza sativa
  Clone ID: uC-osflM202050f11a1
acagtaataatagcaatagtatatatttattattattatttgattgctgcagacgcgctggtcatgcactcatgcatgcctgcatggtgcataaacaactggacaagcatagccgcaccacgtagtggtaatagtcctataacaatatttgacatagtagtagtagtactgtagtagctgcgatgtcacaggcaggggccagccaacgcagagcagaaacgactcaacaagcgtcacgtcactagggagcaaataacacacagttccgactcgaaacacaaggtttccatgcagacgcgcccggccatgcttgcatgcccccgaggatcagctgcatcctcgaggtgctgtcatggatggatgccaatgcaaggcaagataggagtaccagcaggctggcacatctccatttttattggggtatgagattcac

SEQ ID NO: 29568 - DNA, 433 bp, Oryza sativa
  Clone ID: uC-osflM202050f12a1
ggaaacaaggatgctacaatatattattgcagaaacggcaccaaggccgtttctattattcataggtaacatcccaataacaagaggagacagagcaccaaccacacaccacattccactgaactcacccccaactaaatcaaactagaaaactcccaaattcaatcgaccttactttcttaaggaaaaagagcagtgcctaggaatgcaaagcatcctgaaatatctctcttctcttttcatctctgaaaccagagaatggaaacaaagcaaagaaactccaatgctctcctctttcagagtctcagcctgagatgttggccagctcacttgttcgacggctcgccctcgacggccaacgggacggtgctagccatggtgcggtacttgagggcatacagcatctcaaggtagcggcgggtttcacgcctct

SEQ ID NO: 29569 - DNA, 394 bp, Oryza sativa
  Clone ID: uC-osflM202050g01a1
acattagaatatgtacttttctcttggataccaggatattgtttgttacctcagcccatctgcaggttagcataacatttccttgtcaacagtgaacaatatcatcttcatctttttacccatctgcacatgcatacatatgatatgatcctctcatgcagtgatgcctaatctggtagcaataattaatttaactatggctgtatcaggattagccgagttggtctcggttttttcccttcatcttttcccgccaaaaatgtcttggtcaggagcagagaggcactagttgcggcggcagaaggttgggcagctgcagctgcagcggctgcaccaccgccaccggcagcagcagccgcagcactcgccgcagcagcagcaccaccagctccgc

SEQ ID NO: 29570 - DNA, 423 bp, Oryza sativa
  Clone ID: uC-osflM202050g02a1
ggagcatggcatgcaaatatatttatatgcacacaattgcatgcatatatatcagtaggaagcactaggtacgtgctgatgattacacaaagacacatcctgatccttgctcataattaatttcttgcaaatcatatgtagcctgtagggtagggggcagcaggcaaacacatatataagaatagcttaatcgctaggtttgtttttttgagatcaatttcattttaggagaatcatatatattatcgctaggatcgataccaatgacttcaattcattcaaggttgctcccatgattcacggtgcatacggcagctgtttggccgacgacgacgacgatgatcatcttaagcattgaggtggctcagcatccatggcggaagacctccgatgcggagttgcacctggccctgcgccgccacc

SEQ ID NO: 29571 - DNA, 450 bp, Oryza sativa
  Clone ID: uC-osflM202050g03a1
gccgccgacgccgacgacgccgcccggacctgctcgaagaagaggacctgcacgacgacgcggagcgggaggcgctcgttctgcacggcgtgcatgctcgcctccggcgacagcttcttgcagtccatcagcccgcacaggctcttcttctcccccttcgttaaacccggatgctccttgagatacatgtcgatggcgcggtatagcccgtcgtgcacgggccgagttgcgaggggaaccatctcagtgagggcgatgaacttcgagagtgggaggttggggtccttcgcaatctcagccagatacccatcaaccagcttcgcgatcgcgagcttcgagctgcgggagacaccattcaggttgtcatcatcaccatccatggcttcctgatcatcatccctttgcagcttggcggcatcatctgccctcgcggtgctgccccacgaacct

SEQ ID NO: 29572 - DNA, 404 bp, Oryza sativa
  Clone ID: uC-osflM202050g04a1
gacatcaatcatcatcatcatcctcatcattttatcgttagaaaatggcaaattttccaatgctccttgttcactgggccacaggatgacttatgcagctggagacaaaagctaaagaggaccagagaaaattctgggatcaaaacacaaggttggaacctggaactagaacaaaaatgggaaatcaagtagacaatggagtcatcaactcaaggagcaaatcatgacaaaatagtctacatattttgctcatccccaacaaaactatggcctttgttacacccaacgtcgccggtttagaacaacttgaagaggatcccaccgtgggtggcgaaaaagggggcgaaaaccagggattcgaccgccatgagcttgatgaggatgttgagagagggtcctgaagt

SEQ ID NO: 29573 - DNA, 414 bp, Oryza sativa
  Clone ID: uC-osflM202050g05a1
cagatgaaaggatcaatacattatatcagaataagcattgttcctcttctcaaaatttgtatgacaaatttcttcctagctgagaaatgaacaagggaactactattacatcaagcggactggcactacattgccagggtcttagacctagacacggatcgacacatctattgagactcagatcggtgtattgttagccccaggattagcttagctaatatgaatctaatatatccgcaaaatccacctggggagtgcaatagatgagcaatgctcgcactgggcgcttggagaccggacagacatcacaccaccagacggtaagcacagactgtgcacatgctactggaccaaaaagaatcaaggtcagccaatcaagtcaagactagcagatgctatctagcctggatggat

SEQ ID NO: 29574 - DNA, 270 bp, Oryza sativa
  Clone ID: uC-osflM202050g06a1
gttgaaaaaagaaactcggatatatttcagaatccacaatatgatcagaggattatttctcagactgcatcattcaatttatacacatcaggtagatcatacatccatgtctgttcttcttttttcttcagaaagaagcaaccaaagaggtttgtccgtgtactagctactatatatcataaaaccatacatgtttggtttcagcttatgaaatatacaggctaatctccgtgatctgaagagtgatctacatacactcttcatgcagat

SEQ ID NO: 29575 - DNA, 443 bp, Oryza sativa
  Clone ID: uC-osflM202050g07a1
gcaaagaacaagagtgacccatgcattagagatttacagtacacaggcggaaataatcctagcatcagaaatatgagatgctgcacttgcacctagctctattgtttctttctaactaaagaccaaattaaagattatcaagggcgcgcctagctagcttcttgagcacaaccttcatgtgccaccaagaaaatatgcatccatattgcagagatccagattacaaaaaaggaaaagtggacaaaaaaaaaagagcagtcaccatctgttcgccttaatgtatcttctgcccttttatgcagcaaatgttacgaccaattaactgcaagctccttatcttggaaggtaatctgtggttctcttttgtagggctgcaccaccttgatgatctcatctgcattgagaatttctttctccaatagggcatttgccacagcctgcac

SEQ ID NO: 29576 - DNA, 439 bp, Oryza sativa
  Clone ID: uC-osflM202050g08a1
aacttcaaaaccagggatgcaaacccaggacaggggtaatcgcccctaagccgttcgatcgtaaattttctacaacgtcaagtagaagagttacatatgaaacatttcacaggctaagggctatgaggtgctacaactacaagatggcttcatgtagatgctgacaacttctaacaagttaattcagtgcctcagtccagctccatggcattatcttgtgccctgcttctgcaggaccaaatcttgatcgttctatcatgtgacacagtcacaatatgctgtgcatctccactaatatccaaactagtaacctttgactcatgggccaccaaactcttgattggtttgtaatcacgagctgaccacagtgctgctttggtgtcatctgacgaagttgccagatcctggccctgctgcggctcaaacttgacatgtgaga

SEQ ID NO: 29577 - DNA, 436 bp, Oryza sativa
  Clone ID: uC-osflM202050g09a1
acgcaacatagatcttattaatccatcaagttccagtcacagcagtagataagaggcatagagcagctaagcccatagtaattacacgcagtttacctggcaaggtaaccgctttttaagaggcgcgcacgcgcacttaacacatatctccgcgacaaatataccagtcgcacaacaccacacacagttcataagcaagcaggccctgagactgtagcagcagccccggcggccggcgctagccttacacctcgtcacattatttacgcatatacacacatagttaggttatagatagggatggctcaagagcacacgatcttcactgggtctttcttctccctagcgatgaggtccatcacagcccgcttgatgctttctccgttcttctcgagcatctccttggttatctcagtgtcctcaaagcccatttcct

SEQ ID NO: 29578 - DNA, 422 bp, Oryza sativa
  Clone ID: uC-osflM202050g10a1
agtattaaacggggcaatcagttcaccacagttgatcgaatcaacaaccatacataccacgagttcgagtagagatatatgagtatatgacgacgatgatcatgatcaggtcagagataatcacatatatatataacagagcacaagaagaaattaaaaagcactcatcactatatatttagctggagagataaaagtacttattattattacttaatcatgctctcgcctagctagtagtagtacccaagcacgcagcagctcaagcttagtagctggggatgtcgcggtggtggtggtcgtctgggaggtcgacttcttcttcgtatccggtggcggcggcgatcagcgggggaaggcggcgatctcgacgccctttgtgcccagggaaggctggggcgggccgtaggcgctgaagaggc

SEQ ID NO: 29579 - DNA, 432 bp, Oryza sativa
  Clone ID: uC-osflM202050g11a1
gcagtgggtctagaacaagggcacaacagttctcaagttgcaaaaaatctacaggccctgtgatctctttgaaccctctttgaaagaggatgcaaaatttgcaaatgttcatgaaattgagcgagtgacaactgacaactgacaatcgatcatttagcaggcttgttgcttcatagaagcaacatctcaaatgatgaaaatgcaatgccacttcacatcaccaatcagctcagctgcaatggctggcatcatctccatccataaccggaggcacggactgctcggcgacggcggcggccaacgcgttgcaggccgcgtatatcgccgagcgctcgtcgtggtacgagtcgccggcgaggaaggtgtgccttttgccccggacctcgacggcgctccaggccggatccttcttgattcccagcgaccgcatcg

SEQ ID NO: 29580 - DNA, 384 bp, Oryza sativa
  Clone ID: uC-osflM202050g12a1
atatgacacatgttgtgagagaggaggaaaagaaccataaaagaagacaaaataagaaaacaaaggcaaataggacaccggcatccaaaaaaaccactccaagacctataaggggggcgggttgccacaagcccaggtggtaaaggaagacggaaatgggagagaggagcgtaacccaaaaaaaagaaagaaagtacaaatgcctgctgatccgatacaccaggaaataaaaccgaggcacgcgaggacacgaacaacggcgagctgaaccggaccggcctggaccgaagttatgagaaaaggcgaaccggtacaaaacagaccacgaatgaaggcgagacaatgcaagggaaaaaaaggctgggaaatgaaagaaaagcaacc

SEQ ID NO: 29581 - DNA, 148 bp, Oryza sativa
  Clone ID: uC-osflM202050h01a1
aaatggaatttaatggttttataaaaataatctgatatatacaacagtgtgaggatggcatccaagcaagtgatgtctaaatgctacaaacaggttggtgcagtggtgcaaaagctgctgccaggcttaaaactttgaaagccacttg

SEQ ID NO: 29582 - DNA, 449 bp, Oryza sativa
  Clone ID: uC-osflM202050h02a1
tattaacgagcattccgatgcacgcacgcgtacgatggttgctcctatttgccggccgtcctttttttttttttttattaaaccatccaagaggggagctgccaaacagttgccaacccggaaattctgcttgatgcggttcacaatataagtcattctagtatttcccacattcatattgatggtaaggaccgtagacatatatatctatattgatggactgacaggaatttaaatgtgagaaccggtacaattacttacattgtgaaacggaggaagaactcgaaagggtattttgttacatccgatccacccacagaggaggggctggaccaaatgggacaggaccagggttcagactccactggtgtacagacatgttggaccaacatgaatttcaattacatgtgtagatgaggctgctactactactactgatggctaggaac

SEQ ID NO: 29583 - DNA, 492 bp, Oryza sativa
  Clone ID: uC-osflM202050h03a1
tgcacgcagcgcgtacgcttgcatcctctctagttggcgcccttccttttttttttttttttaaacaaggtacgtctttacacctacacgtacacagtacatatacacttgaaagaaagtctcaatgatgcgcaagcacaacaatggcggcgaaacctcggtagatcgatcgatcctcgtaattctactcttcgtcgtcgtcgctgacgaacttgccggtgccggggttgatggcggcgatgaagaagaagacgacgttgaagaggacgagcggctcgatctcgttgatggggacgccggtctcgatgttgagctgcgcgagggcgcccttgccggtgatgatctcgccgatgatggagaaggcgatgccgagctgcgcgagccggccgacgaacagctcgttggccttggtgaagccgaacagcgggccgccctcgctgaggcccagcgcggagcggaagcccttgcccggggcgatgacggccttgtcga

SEQ ID NO: 29584 - DNA, 351 bp, Oryza sativa
  Clone ID: uC-osflM202050h04a1
aaaaaggggaactggccccaattttgggaaaacccaagggagcagctggaaaatcctccgctgaaatttttattacaaaaacattttttttaccagattcggccccccacccaggggagatctctcgcaactccaaaaatcccgcccaaaacccaaattttgacccccataaccccccgccgggattaacaaaaaagctggggggtgaccgaaaaaaccaaaacaaaccctttttttcccaaatttttttcggctgggcggaaaaaaaggggggaagaaaaaaacaatcccccgcgggggggggaaacagaccctccacccgtttcttaaaggggtgggggcttaccccac

SEQ ID NO: 29585 - DNA, 437 bp, Oryza sativa
  Clone ID: uC-osflM202050h05a1
aaataataggcgctgcaagcaccacaataattaaatttctcacgcaattcatagttgtcatagagctcccaacgcagttcttcaattcaaaaagactgcccaaacagaccaagggtatcatcatagcagcaaagttttttaacacgcaacatcaaagagacactaatgcaataagataacttgaagcgcggatcactagcaaatttcgcgcttagtcgacctcctcgatcttggggccagcaccgctgccgcctgccgggggagcatcgtcctcgtccatgccgccggccatgtccgcgccagcgccctggtacatcttggcgatgatggggttgcagatgccctccagctccttcatcttgtcatcgaactcatcagcctcggcgagctggttgccgtccagccactggatggcctgatcgatggcatcctcgatc

SEQ ID NO: 29586 - DNA, 428 bp, Oryza sativa
  Clone ID: uC-osflM202050h06a1
gcacacggaaaagaccaaggtatatatatcaccgacagcaacaagtgagtggtccacatgacaaaatgtatatagagcagagtaccactggacaccatttcccaactacacaaacccaggcacataaagcagcttccaaacataagacaatggaagataataatatcgcctaaaagaatcccaccgggtaaatcctgaaatccctggagcacactctgcacaccccctgtaccgcttcatctgtatgactcggtgcgcttcggcttgctttggaccaccgtttcgatcttgtcgacgacttctggggttagcagcggaatgacatcgagggccttcatgttttcaacaatctggttttcttttgtggctccagtgatcacagatgagacgtttgggttcgatgcgcaccacgcgatagcatgttgggc

SEQ ID NO: 29587 - DNA, 336 bp, Oryza sativa
  Clone ID: uC-osflM202050h07a1
acggataaaacaactttcacccattgccagatcgccccatctccctcttatttgggaggacccgcctactcggatctcaacctatatggaccgcttgtttcgacaacaatttgtaccgatgctgtaactgttcattcaatccagaaacagaactcgaatggtaatggtgatacaaccaaaatgactttaaaagaaggaaaatgaagcactgagcttagcaagagtatcttgtaaaaagctcacttggctgacactcttgaccgaagcttcgcagcaaccgcatcaatgaactcttcacagttcaagacaccgcttcttgagacgcatgaagacccg

SEQ ID NO: 29588 - DNA, 440 bp, Oryza sativa
  Clone ID: uC-osflM202050h08a1
ataaaaggttccatttttttttcttttttttttttttatattttctctttcttgtatgttttattgatctatcaggccttacaggaggtcctatataaacaatattggtgggtcctcgcatccttggtaggaaacattatggactgaatccaaacacaagaacccttccaactcttgctcgggaatggaaaccatcgtcagcacccttttacgttgcggggatacatttttaagcgctaatttaggaaggcaactggggctttctcatttgttggagacaattcactaaagctaaagttaaaggaagccatgaacggccccgcggaataaccataaaggctaaggttttactggagaacccctgattcattgaggggttagaataccggcccgcaggcataacatgaaaccttcccgacctgcaaatttaggggggaccg

SEQ ID NO: 29589 - DNA, 113 bp, Oryza sativa
  Clone ID: uC-osflM202050h09a1
cgccctatcaatcaaaatgatcatgattctcaaaagggaaaaaaaaagaagggttcagtttttcaatttttgccaatccatacccgggggggggtccccgtttaaatagccac

SEQ ID NO: 29590 - DNA, 409 bp, Oryza sativa
  Clone ID: uC-osflM202050h10a1
ccttgcttgctttttttttcttataatacatttccaggtttaactaaggaaaaggggtaaccagaataaattcacgagcatacagcagtgctattttgccaagagacacacggtagccttaataaaaaaccaatttgaggaaatgctttgctcccccccaaaggggggacctttataaggtccaaaaaacctgcggaaaaccccaaattttggcagccgggaacttaccacagaagtggaaaaaaacaccatggtgtaacagacaaacaactgaaacaaagcgaatgcccatcaagcttcagaaatggccatacaggcaacatcccaatgggaagaaaccccccaaagcctgactgaaaactgaacaatctccccaattttttcttgggttgatgtgccccacaacaaa

SEQ ID NO: 29591 - DNA, 432 bp, Oryza sativa
  Clone ID: uC-osflM202050h11a1
acaggcaacatggaccactttgtatatcagttcatggctgcatgcagatgcattacaatgcaccacaggcatggcacagagagagccatgagctcttacatccactgttttcataatccactaatcgcattcgcatggccgtatttaattagacacgcgtgcccacatgtggcatgaggcggggcgaactattattaattagcgcgggtaattacttcattagtactgacccagaccgaggcggaccagccgggggggcaggacatgacgcatgtggtgcagccgatgccgcacaacggcctggcccgaccgggggatgatggggtttgagatgccctccagctccttcattttggcatggaactcatcagcctgggcgagctggttgccgtccagtcactggatggcccgatcgatggcattctctatctt

SEQ ID NO: 29592 - DNA, 425 bp, Oryza sativa
  Clone ID: uC-osflM202050h12a1
caccatattctcataatatgccagcaaattatatgacacatggggggagagaggaggcagagctccatagaataatacaatttttgtaaacaaattcaactcggccaaccgcctcccaaaaaaaccactccaagacctataattgtttttgtttttcagcagcccagcttcttcaaggaaactgaaatggagcagaggatagtaacccaaaaaaaagaaagaaagtacaaatgcctgctgctccgatacaccaggaaataaaaccgatgcacgcgaggacttgtacaacggcgtgctgtaccggaccggactggaccgaagttttgataaaaggtgaactcttacaaaacagaccaagaatgaatgcaagacaatgcaagtgaagaaaatgctaggaaattaaagaaaagctaccagctaaggga

SEQ ID NO: 29593 - DNA, 138 bp, Oryza sativa
  Clone ID: uC-osflM202051a01a1
aaccaaaaaaaaaaccttgaacaaacctttatttcataacttttttttcaaatctttttcctaacttttaaggacgaaaactccccgaaaaccctcttttggttttctttttttactacttattacattagggttttg

SEQ ID NO: 29594 - DNA, 241 bp, Oryza sativa
  Clone ID: uC-osflM202051a02a1
accaataaaaacctactaacatttatttttaaaataccataccctaacacttattatacttttaaccaaacaatataataggccataacatgcaatgctaaacccctaactccggctctggctacacattgaaagaaaaagtattgacctttacctttggctattgtcttgcctcggctggctagatccgacacccaaatggtgaaacagtggagctctaagtgtctaagtcgatcgaaat

SEQ ID NO: 29595 - DNA, 469 bp, Oryza sativa
  Clone ID: uC-osflM202051a03a1
aaacttctaacttttttttcaaactaccaactttcttcaaacttcccactttttccaccaactaaacacagcctaagaatgcttaacacagctcaggccacatatatcttgaattcattcttaattccattgttcttgggaagtttttcccccctgtaatgctataccattatcacccttttggatatatataaaagcggtttaccctcgtttacaacacaaagaagtgaaaattgcagactagtaaactttgatctttcaggaagtgaagtccaaaacagaatcaagaaattgtatagatggtggtggctggcaaccatcatatggcatctgaaaaattctgaaaccagtagcactatatcatgatgatgcctgtttcctgcccagggtgagagctcactcctttccatcagcagcacggagggagcccagctgcaccggcgcctgggtctgcactaccttggatgac

SEQ ID NO: 29596 - DNA, 278 bp, Oryza sativa
  Clone ID: uC-osflM202051a04a1
tttaggaatttttttatggacaagcaagaattatatatattcatccatttctcaaactactacaagaggtcgagaggaacacataatcaggagggatggctacaatttacagcaacaggagtctgggagaccgagggaagaacaagagaggtcagaagcaagagctatccctacttgattttgcacttgaatattttacacatttgggaatgcaagggtaaaccgagaccttacccttccgttcgtgagaggatgagcaaccggaagaaccggatgag

SEQ ID NO: 29597 - DNA, 432 bp, Oryza sativa
  Clone ID: uC-osflM202051a05a1
ccccatattcagccagtatgtatccactgtcccaccgatctttacatgtcaatttcaacagtaataataaatttatagtataccaattaatcagccaaatgaacatgaaaaacctttgataatcttaccaagaaagaatcaaactttccattcaaaatgttgcaacaacccaaatgcatatatatgtgaattgattcattgatggaagatgagatcatcacttggtgtggaagagctcctccatgtcctcgaggctccgccccctggtctccggcaggcaggcgtagcatgaacacgaaggaggcggcgggcgatggcggcgtagaggtagaacgcccccgccatggtgatggcgccggagagcgagatgaacgtcatgggggccacgccggtgacgacgcggttcatggcggtgcccacgccggcgccctg

SEQ ID NO: 29598 - DNA, 377 bp, Oryza sativa
  Clone ID: uC-osflM202051a06a1
aaaacaatatgattgattatgttttatttcagttgctagtaatatgtcatagttgtagtttgacataaagaaggaagcaaaaaagataaattagcctataaaaacataactaacaaatgtagacaaatcattcattcccattacattaaaaatgatctagttctacatatggacggatgtaagcagagtttcagctcccaaatctttagcgatttggcagtgactctaacatttgtggcattgttgaaaagaaagattttggccgactcgtagatggctttggtgggatacacacgcgaggtaatgcatgttccttccttcttgagcgaagcccttaactatggagtgattcaaccaaaatccttattgacaggttt

SEQ ID NO: 29599 - DNA, 405 bp, Oryza sativa
  Clone ID: uC-osflM202051a07a1
atgaaaacccactgaacattgttcaaccacaactgaacagttctcaaggttgttatacacatccacctccttgtcaactgcaagaaacctacactaaaatgaccatgaattgaatctgccatccctgctatagttgatcagttagaatgaagttattccaatggcaagtgagtacacacaacacattacacacctccatttgttctcccccaagttccggttcactactccagtttgcaccggcgtttttcccggccacaggcaggaactcgtaggcgttcggccgagaacccggggacgtcaccccctcaaagggggacaaccaaacttttttccaagaaacttctttttaagttggcgccaccgcgtttgaagaaagcaccggctctttgcttggatcagacc

SEQ ID NO: 29600 - DNA, 152 bp, Oryza sativa
  Clone ID: uC-osflM202051a08a1
ggccttaattcgacctccccttcatttttttatcagtaaatttatcatgaatgcttataaatagagctatagaagagaggtcaagaactccaggaggagaaatgaaagaatagcagctacacacgcacaatgaagacttgcgatttcaagaa

SEQ ID NO: 29601 - DNA, 122 bp, Oryza sativa
  Clone ID: uC-osflM202051a09a1
ttttttttttttttttttttttttttttttttttttttttttttttttttttttttttttttttttttttttttttttttttttttttttttttttaaaatttattttttttttttcttttt

SEQ ID NO: 29602 - DNA, 268 bp, Oryza sativa
  Clone ID: uC-osflM202051a10a1
accccaaaaacagccagaaagacacccatgccccaccgagcaacacatggcaaactcaacagtaaaaataaatttataggataccaattaatcagccaaatgaacatgaaaaacctttgataatcttaccaagaaagaaacaaaccttcaatcaaaaagttgcaacaacccaaaagcatatatatgtgaaatgattcactagccggaagaagaagacatcacttgggggcggaagagcttcctccatgtcctcgaaggctccgccccc

SEQ ID NO: 29603 - DNA, 224 bp, Oryza sativa
  Clone ID: uC-osflM202051a11a1
tttctaagcgaacaacatgtcaacgatatgcagcccaccagatatgcaaagtctaacaggccatggtacaaccataccgaaaccagattgtgacaattaaccatacacacagataagtatatcctggaagaagacccggtgaagccacccaaacactgaccggaaagacaaggacataaaccaccgcatgccagaggctaaacagcacaactgtctcacacggc

SEQ ID NO: 29604 - DNA, 469 bp, Oryza sativa
  Clone ID: uC-osflM202051b01a1
aatataacatatataataatataataaaccctttattacttaatattattggcaataagccacacacataaattcagggtccgataagatacttaagcacacccagaagagtacaacatcaaacttattagcctatataattggctatagctacaaattcactacaacaaacaaaccactggtttcattcgtctctcatccatatactgctatattaattaatcactccatatgtagatctcaggctcttcaaggagcagccacgttctccttggcgagcggcgcgatctcgtcgccttcgatccccggcgcgctgccggcgacgcccaggcccaggagcacattctcccagttcttcgcaggccccttccaggagaggtcctggttcatgcagttcctgaccatctcctcgtacgccggcgtgccgacgaccttgatggcgcgcttcagggtggccgccacctttttc

SEQ ID NO: 29605 - DNA, 445 bp, Oryza sativa
  Clone ID: uC-osflM202051b02a1
caaatatcttccttcgtaatttgacagccgttccagttacaccacaatttttgctatagtgaccctgtttatttcacttcccatgggaacaaatcaaattgtctcgaaactactcaaatctcaccaaaattcagattcaagcctactacccaaaaatttgacggccagtgcaccttcccggagaaacaagtaactgtaacttagtcatcagtacccgtagtccggagttgtccatcggagttggtgacgggcgcaggctcaggctccttgatctcgacgacgacgacatcccgatgtgaggaatgctcttggcccacccaacgcagcatgcttcaagacaaccatttcaccaccttagtgggggtcaatgataccagcaggccatcaaatccttgtactgtccagttgcagcattgtaaccaaacttgaagttatcgttagagag

SEQ ID NO: 29606 - DNA, 474 bp, Oryza sativa
  Clone ID: uC-osflM202051b03a1
aatcgaaagtccaaagcttgcacttctaaagtaacatttgcagcagtacatccaccataaatggtggtcttttcgatccagtggcatctcatgttggtccatactagtggtacagtttaacaatagactgttgtataaacacagcagtatctgggacgatactcgagtaatacataaattctattctacatatatatctccatgccaagtattttcgaagactggcatagcgggcagaagctcagcttgctttcgcactccttgcaaaggcaaagatgccgacaaggcaacaatagcatgcaagcctcgcttgacttgcagactctacatgcggtcaaatctttggagtgtctgttctccttcggcattagttgcaaattggcggcaccaccattgcaacaggatgccgtgtcatccacctcgctatcaccacaaccttctttgaaatccttgctttgatgggcacatacctgt

SEQ ID NO: 29607 - DNA, 114 bp, Oryza sativa
  Clone ID: uC-osflM202051b04a1
ccccaaaaaagggcctttttttggggcggaaacaccaagaaaaaaaatgggggggggcattttttcccttttccctgaaaaagggggcctcataaagagctttcgtaaacccag

SEQ ID NO: 29608 - DNA, 57 bp, Oryza sativa
  Clone ID: uC-osflM202051b05a1
ggaaccccacctaacaatggacctttggtaacgtgaattaaaaaccaaatctctcct

SEQ ID NO: 29609 - DNA, 400 bp, Oryza sativa
  Clone ID: uC-osflM202051b06a1
acagaagagcacatgttctgttctgatttttaatctgatggtagatacaatgtttgcctagaaatgacattgtgagtttttttgtcggtccgccttatgatacagatgggggcgaactgagtaatttaaaatattctacaccgaagaaaatgatcaatgttatggctgtacagtttaggaagctgagttactcccggatcacaacaaagtgagcaacaaatacaggtagcagaatggtctaccgtttcttatatacaaaattgagctgaatatttgtcggaagtaaataactaataagattattcctgttcgttatccacttcttcttccggttgacaaagctgtcgtcttgcaaatggggcattaattctttaccattaaccattggtttatgcaatct

SEQ ID NO: 29610 - DNA, 478 bp, Oryza sativa
  Clone ID: uC-osflM202051b07a1
gtcattccattcgacgtttagttattccgccatgaacaccacaagcgttttacaacagcaagcaacggacggagccaactcaatgacagacaaaccgcacaagacacgtcgtccacacggacgccgaccatgacaacacctaaaccgaacaatggcggagggaaaaaaacgatggaaataacacgacagggaaccaaggcttgcgacaccggaagctcagcagctgacacatacatagactacaaatccacaggcatgacacacgcctgatccgccctactttgcacttgatggcaactttagcaatggcactgcaatagcccttcctctgggcccaagtgccctctcctatctaaagagactaaccatagatagatgcatggatagatagacgattgttcatgggttggatggatggatggatacttgctacgacgatttccgaagaccctatcttctcttcccttgtaaacttctt

SEQ ID NO: 29611 - DNA, 395 bp, Oryza sativa
  Clone ID: uC-osflM202051b08a1
aactctaaaactttctggggcaaccataaggcagcctaaacagtatgaataagactaccaactaccaagaccgacaacccggccaacaaaggtcaaaagatagccaccctgggagtctgggcctaatgagtttatgacctgagactccacgcagtaagaggtaaactaagaacagagagagacccccggacccttgcgacgaagggcttgtcgtcagagtgaaagaacatgtggccccaccagaaccctcgtggcagcgccgggaaagctccctgaagtccggaaagcgcccggccccccggaggaggtatgccccgacgacgccgacgcccggggaaaagacggttggccggcttggcgacattcattcatggcccttcgtagtaagagcctgc

SEQ ID NO: 29612 - DNA, 440 bp, Oryza sativa
  Clone ID: uC-osflM202051b10a1
atagtatagcccatatctttatattatattattattaacaaaaacttgtcatgcccagctatggcttgggcgcgatctgatacacagaacaaagagaaaacataaaaaggagaaataattaatagcaagcgtcaagccggcctgcttaaaaggtgtaaaggcagctgccgtcgtcgctcctcgccgttgggtcgaagttcttggcaacagggttcggtgcaaccttccggcacaggcaggttacctgcttgctgtgctccttgcccgtagaaggaaccagtcttcatggcgtcggagttagcgtcaccaagagcagcctcgctcaagtactgcttcaccccgctgcacacgcttgacgttctcctgctccttcacaagcctgtatccgtactccatgagcttttcgatcgtcatcttgggcctgttgaacttcggtgggc

SEQ ID NO: 29613 - DNA, 318 bp, Oryza sativa
  Clone ID: uC-osflM202051b12a1
aggaacaccaagatcttcaccagaggataaatataagttgagtgaaacacatgcaaatataaaattaagttttgtttatttgattacagcaaactgtaggtaggtagtaatactatgagctggaaacagtaggaaactgtaaggtctaaatctcattgtttgtgacattttctccatcgagaatgatatgcatgtgaggaagtttaatttttcatgtaaattcacagacatgagcttgagtttggcctgcagccttggcagagggtccgtcggttggcaatgattttccctttgggagagtgatataaaatagcctat

SEQ ID NO: 29614 - DNA, 455 bp, Oryza sativa
  Clone ID: uC-osflM202051c01a1
gtgtgaaggatcaaccagccggggttggtggtatcagacggtcacgcgctgttcatgctgaagctgttctgcctgttcgcgcgcacgcccacgccggcgccgacgttggcgccgacgttggcaccgacgttggcgccgatgcccgcaccagcgccagcgccggcgccagcgccgacgttggcaccgacgttggcaccgatgccggcgcgagcgccgactcccgcaccagcgccagcaccagcaccagcaccagcgccgacgccggcgccgacgttggcaccgacgttagctccgatgccagcgcgagcttccagcgccgactcccgcaccagcggccagcggccgcaccagcaccagcgccgacgccagcgccgaccgttcgcaccgacgttagcaccgatgcccggccgagcgccagcgccgacttctgcgccagcgccagcgcccgcaccagc

SEQ ID NO: 29615 - DNA, 473 bp, Oryza sativa
  Clone ID: uC-osflM202051c02a1
attcaaacgatttccagcatctctataaaacattggtctcttacatttcgagtggttgaagaggtgccagaaaggagtagaatatagcaagtttagaatggtacatgaagaagatgcaacaaaatgaaacttagcctcatacggccacagtgacagcttcatcaagtgcaatgactccaggaagttcctttccttccaacagctccaagctagcaccacctcccgttgaaatgtggctcataacatctgcaactcccacctttctcaacagcggcaacagaatcacgctcctccaataatggttgtaacacccttgccgctaaggtctgccaacttctttgcaatagcctcagttcctactgcaaacttgtcaaattcgaagacacccataggtccattccaaatgactgtctgggttgtttccagggtagagctgaatgacgcgactgaatctggaccaatatccagaccca

SEQ ID NO: 29616 - DNA, 51 bp, Oryza sativa
  Clone ID: uC-osflM202051c03a1
attaaataacattttccattttcttgcaaaaaaaaaaaaaaaggtcaaaaa

SEQ ID NO: 29617 - DNA, 408 bp, Oryza sativa
  Clone ID: uC-osflM202051c04a1
aggatctcacccccaccacattacatgcccccaactacaagattgatgggggtcttttatttatctactatggataaatacataagtccccatatattgcctttacccgatctcttaatcgatctctgactctctttttacagaactagatcaggctagctgcgtgccatgcatattctcatggcgtctatgcaactttatctttttctcactttatcaacaaaggaagattttgaagagggagatgggccagaaaaaagttagttgattacaagccgggactagctagttacagctgctgatgctgctgtcaatgggcacgggaacaaaaggggagacgggtccctttgcattttgccctgagcccggtccactttgaccctggtcattttttcctcgcaccaatgc

SEQ ID NO: 29618 - DNA, 362 bp, Oryza sativa
  unsure (1)..(362): unsure at all n locations
  Clone ID: uC-osflM202051c05a1
caaaaccaccatcaaagtccgatttaattgagagttgagacaactggtccacacgatggaccttgccgacgacattgagagtttttttgcctcttggcagaaaattttcaagaaaaagcaccttagtaaaggtctccttccttgggagtatggatgacgcagtccggacttagggtaggagacacatgttcagcacatagccttcttcctgctgcgcatcatcaaggaatgatccatccgactgngtcgacggagcccagcctcgatcttaccggcacaggtagagcatgctccagcacggcatgagtagggaagctttacttccagcggtctcggcggcattaaggatgtaggtggtcatc

SEQ ID NO: 29619 - DNA, 193 bp, Oryza sativa
  Clone ID: uC-osflM202051c06a1
acaaagaatgccttttttataattgcaatagagtatttatacaggatcataaattattaatcaacatcccaagccccctgtatgaataaaccgcttgggcaaccctttgcctagccgcccttctaagaaaaacgctgacatggcacctaaccagggccagggtacaagcctccccaatcgatgctacgtctgt

SEQ ID NO: 29620 - DNA, 429 bp, Oryza sativa
  unsure (1)..(429): unsure at all n locations
  Clone ID: uC-osflM202051c07a1
gcaaaaacatcatcttcttcttcatcttcttagtgtacacaacaccaactcgatcatcatctcgtcgcactaaacccatcttccccaacccaaagacaacgaactcgctggccacaaatccatccaaccacaattaaccactgctaagctacggntcccccacttcacttgccgggngacgaagtttggtggcgtacgcccaggcgttgttgttgacgggngtcggcgaggtggtcggcgaggttctcgagggggcccttgccggtgacgatggccctggacgaagaagccgaacatggagcaacatggcgaggcggccgttcttgatctccttcaccttgagctccgcgaacgcctcggggtcatcggcgaggccgagcgggtcgaaggcgccgccggggtagagcgggtcgacgaccttgccgagcg

SEQ ID NO: 29621 - DNA, 465 bp, Oryza sativa
  Clone ID: uC-osflM202051c08a1
aacatgtaaacacttgcatttaaatagaatacattacaagcatttttcatacacttgcagcctagaaacaaataggtacagcaaacagaaccccttcatttacacacaagccataaaataaaataagataaattgaattttacacaagataaagacatctgggaatactcttaaactggttatccgaagatgtgttagaacttggaaccttgataatattacttaatctaaagcctataaggtatcaggtggtggatgcttctccctcctcatacaaaaggcttcatttttcatcgagcatgtttcattcagcaatagataccttgctcatgaagcatggcaattttcccttctctatctccgtttcgctttttacgcctcatctgcgagctgcttttgtagaagctcaagcactcgggaagtcttcttccaactgttcattcaggccattgatctcacggtcct

SEQ ID NO: 29622 - DNA, 375 bp, Oryza sativa
  Clone ID: uC-osflM202051c12a1
ggatcaccaacatttgacctaattgagtttcaacaaaaaatgccaaaatgcgaatttctacatgcaccactgtacactgaatcttaactgataacaattctggaaccagcagttactcgaaacgtcaatcgaaaaccatctgaatttttttaacatgaacaaaacaaggccaagatggttaacatatacagagtaggagaccttgcctacgccaatatgatacatgtgtagaatttggatgaactacacataacaaaggacaaccttattgccttagaacgagaacaaggggtgacagaaccaatattggctcttcaaagtttgatgaggtaattggaacggctgtattgctcttaacctaaaactaaactaatc

SEQ ID NO: 29623 - DNA, 94 bp, Oryza sativa
  Clone ID: uC-osflM202051d01a1
atccaccatatttttttctttgttcggaatggtttttatatatcacaattccttgccagttcggaacttaaaactccaaatgtcacaataactt

SEQ ID NO: 29624 - DNA, 454 bp, Oryza sativa
  Clone ID: uC-osflM202051d02a1
gctacggggtggaattacaccatccatctttattgcagaaagcccaatttattcagcgtcacgcaagaaaaggtccaattcatacgcacacctatccaacaaggcaataaggtctcacaattatatcaacaggttacataaagggtatttcaacccatatgcttgccaaaggtataactagacgagcacaatgtacgatggcacagaccaaaatttcctctcaaataagcaccgcaaacacttcaaacgagagctcatttctgattatggttgtagtatacttcagcgagcataagtaaaccgactgctaaaagggttcattgccagagaagtctggcagactttaaaccaagttcacaaccccagcctccgaaagtagtttgcgccatctaggagtttcctcatcaaatatgcaggccagctttgtcaccaagactccactgcccccaataga

SEQ ID NO: 29625 - DNA, 238 bp, Oryza sativa
  Clone ID: uC-osflM202051d03a1
gcactctgtttacaagtttccattattcaattccaggccgaagtgcaaagtgcccacgtatcctcctaactatacacaaaaaaccatctctgacgaaagggcggctgactacagagaacaggccagcaaatttcaccaagataatatgctgccatagggcgaacaggaaactccaaaattttgaagggctctgatccgggccaccacggtactgaccgtgacgagcactaaaacccag

SEQ ID NO: 29626 - DNA, 472 bp, Oryza sativa
  Clone ID: uC-osflM202051d04a1
ctccatgcgactgcaagaatattgtcgcctcgatattcatgtccaacaaaatcaacagccatgtgattagtacagtatgagcatgtggcttttcaacgagctcagcattttccatgatatttccatctagtgctccttgtatatttatgattcaatcgtaatcttcagaatgtttggacctatatgatgttagactgactgactctcctccagaaggtcagaaactccccaggtgatctgatatactcacaacttggacgtggcatttcagcaaaattctcttcagagttcagacatagggatcagtgctccaaactcaaatatcagaaactgttcttttgctcaaggaaagaacagcttggagtagagcagctcattccatgtgtcctggagacctgggaggcaccaatgcgtgcaatccgcgtagctcttcgggttcgcgatctgctccggggttagcgggttccactgc

SEQ ID NO: 29627 - DNA, 488 bp, Oryza sativa
  Clone ID: uC-osflM202051d05a1
ggatctgcgaacgccgccatacatcaacaacaatgtcacaccaacagcctatcggctgccagattagttcttacagcactgactcggttacccccttacaaaacctcgacaaatttacaacacggaataccacatggttctctgtaccaaggtttcttacaaggagcaatgccaaaaaaaaataaatccagcaaacaaacaccactgtttgtcccgggacatcgtatgccggtcattcggtcgatggtgagggtattaaatttaaaatcgaaaaaaattgccacggggaaatggggaaatggcatcatgaagtttaggtctttgtaccaggcaacatttccgcaggcacccctggcctttttcccacatttctttcattggacgccccttggtccgcttctggggctttttgccggtttacctccagtttcttttggaagccacttctttttggaggaaccatttgggccccctgcctgtttaaacct

SEQ ID NO: 29628 - DNA, 145 bp, Oryza sativa
  Clone ID: uC-osflM202051d06a1
ttttttttttttttttttttttttttttttttttttttttttttttttttttttttttttttttttttttttttttttttttttttttttttttttttttttttttttttttttttttttttttttttttttttttttttttttt

SEQ ID NO: 29629 - DNA, 478 bp, Oryza sativa
  Clone ID: uC-osflM202051d07a1
gacattacacagccgtgtctgcagaacgaaaacctgtacaacaccttgagtatcaagatctccattaattcatctaccctaggactagcagctggggaaaaaagatatcctttttgataccaaagtgacaaaaactggaaaggaagcaaattaacctaacattacgatgaccgaaaagaaagacggcaatcaacctaacattctgaaaatatcctaggaaaatgttcagcatctgtgctgacagttcttctcctgaaactccccggttcaatgggagcagagatgatccaccttctggctttctgctcgttgcagcaacgtgacattatgtttagatcctacaggaagttgggcacttgacttgagaatttctcctgcaattcccttatcttggaagagagctccaccttctgctccttgtagctttgaagcaggaagtccttcccttggataacttcctttagcttaccgacctccc

SEQ ID NO: 29630 - DNA, 447 bp, Oryza sativa
  Clone ID: uC-osflM202051d08a1
tttggccgccggaggacccggcgaacccgtacgggttcctgcggttcccggcggggtacaacccggagctggacagcctggcatccaaggtgcggcgcgacgtgcggcgggcgtgctgcgtggtgtccggcggggtgtacgagaacgtgctcttcttcccggtggtgcagctgctgcgggacaggtaccccggggtggtggtggacgtggtggcatcggcgagggggaagcaggtgtacgagatgtgcaagaacgtcaggtacgccgacgtctacgaccccgacgacgactggcccgagcccgccgagtacacccaccagctcggcgtgctcaagaacaggttactatgatctggatcatatcgaccaagttggccgggataggggcacgcgctcttcctcttcatgtcgtcggcccgcgacaaggtcggctatgtttaccccaacg

SEQ ID NO: 29631 - DNA, 368 bp, Oryza sativa
  Clone ID: uC-osflM202051d09a1
agagcttaagtatcaaggttttattcactttctaggatttaatcacctgtacaaacattttcagatttcacaagaacatgcacaagaattagctagctaacctctacttctacatgacatcacaaccgttgtgaggaaccctcttcttatacacgtaaacgcgcgacacgaacacgaacgcgacgagctcgacggtgcagaggccggcgaggagcccagtagaagtagtcgaggtgggcgcggttgaggttgttggcgaaccagctcgccccgctcttcttggtggcgccgttcaatggccggagtatgatgaagcttgctgaagaagttgacccaccccgaatatgctgaggaagaaggcgagcccc

SEQ ID NO: 29632 - DNA, 110 bp, Oryza sativa
  Clone ID: uC-osflM202051d10a1
ttttttttggatttcatactggggccagagtcaataataccaaggattagagtccaagcagttcataatcaatggaatccttataccaggccattaaaaaaatttcaccc

SEQ ID NO: 29633 - DNA, 190 bp, Oryza sativa
  Clone ID: uC-osflM202051d12a1
aaaaaaactcacatgctaacttgacattaatttctagaaaaaaaaatttccaagcgaattctcatagggaattattttgaaccacaataagattaaaatagctttcccccgttgcaacacacagggcatttttttcttaggattaattataatattatataaaaacattcaacaaattatttttaaaaat

SEQ ID NO: 29634 - DNA, 472 bp, Oryza sativa
  unsure (1)..(472): unsure at all n locations
  Clone ID: uC-osflM202051e01a1
ctagaatgaaattggggattcaactgttcatccattgagttggccctaagggctaatatgttgagaagagtacaacgcaaaaagacagaaataccccttaacacatacacactaatacatatattcttaacacccccactcaaatgcaatgtgtatacaataacattgcatttggagtgaaaactaaacaagagaacacaaactaaatattagcctatctccaaangtcttgatgatatcgtcgaagtgtgccaattcttggatgatgggagaagaaaagatgtatcccctcctcaatgaagtggcaccttggagccttcacaaactgttcttcggccctcgataccttgaagccttcacgaaccgttctttggctcttcattgattcagagatgttgttgatgatgatgacaattgaccttcacaaattgttctttggtcctttgactgatgatgagacattgatgttgat

SEQ ID NO: 29635 - DNA, 434 bp, Oryza sativa
  Clone ID: uC-osflM202051e02a1
cagttcaaaattaattgattgatcatgtttaaatggacctcatacaggcataatgtccattgaaaaaagagtgcaacgaggggggaagtaaatataataaataaaaaaagaacagccataaagctgtaaaacagtgattgtgatctactaccgatataaatatttacaaacgaaaagaagaaaattgtaaagttaatctgcaaatccctcccaagtgcacgatttcagcttttctgtggcttgagcacagatgcagaagcagaacaacaagcaatgctgtcaaggtaatcctgtgtcaaatagcagtgagccttatgattcaattccaggcttccagcatgggtttgctttcccattcaatcatatctgaaaggatttttattatcttctttagttccacgaggcaaatccacacccagctgcctcccgaagcc

SEQ ID NO: 29636 - DNA, 397 bp, Oryza sativa
  Clone ID: uC-osflM202051e03a1
aaacaaggtaattttataattaattcacaacaccatatttcattgatcaggatcagaacctgcacagaaatacacactaccggtacagatctcaccttctgtccaatactcggacatccatccacgcggaccacacgaatacgatacatctatacgggacacggacgcacatctactggaccgtgtacacacacgcacactttcctgcagagacgcacattgtcgaaaacctagctagcttagctgaaggcgatgcgacgccatgggatcacggcggcggaggagctcacttgccggggactaagatggcggcgtaggcccaggcgttgttgctgacggggtcggtgaggtggtcggtgaggatctcgagggggccgttgccggtgacgatggcctg

SEQ ID NO: 29637 - DNA, 423 bp, Oryza sativa
  Clone ID: uC-osflM202051e04a1
acactagtacaaggatatatatttataacaaattaatggagtgaaggatgaattagcaccccacacacacatacatttcggtaattatttatcacaaatcgcgaggtttgcatatgaaataaacaaccaaacacttgacggataaattaaccaaactttgattaacaacaaacaatcgactgcgaatttataaaaatatggatcgccggagccgctgcgggcggatggagtcgtggcagatggaagccgcggcgcgctcgatcgattcgatcgaatctcacacatgcaccttgggggccacgccggcggcgccctcagcggcgccggtgagagacccggcgacgttggcggcggcttccaaattccagcttccaactccagccccggcggcgccggccggcgccggcgccaaccccgagggcg

SEQ ID NO: 29638 - DNA, 439 bp, Oryza sativa
  Clone ID: uC-osflM202051e05a1
aaaaccatcaacagcccgatcgagtttgcattactagatacccacattgcagccttccttccctttctccatgtatcgatatatcaacccggccacgcacaaaacatttgttcattccctactcgagctgcgcgtaccacaccccttggatcttgacatccttgggcaccttggcgccgaggttctgggtccgacggctgcacgctttcgaagacgccaatcacctcgccggtctctggcttgctcttggggacgctcaacgtgatgttgcccgtcgacgacgaggcgttctttgacgttctccttagcgagctcctcctcgtctcctctgcctccggcggggagcgccacagcgttgtcgtagccggtagagccaccgcggccctttgggtcgaggaaggacgaaccacggtagctgggcccgaggaagggcccgccg

SEQ ID NO: 29639 - DNA, 438 bp, Oryza sativa
  Clone ID: uC-osflM202051e06a1
gggaaacgaataaaatcattattgcaaaaacataattttattcttaatattgttagtgtacacaacaccaactggatcataatttcgtcgcactaaacccattttccccaaccgaaagacaacgaactcgctggccacaaaaccattcaaccacaattaaccactgctaagctacggtacccccacttgacttgccggggtacgaagtaggtggggtacgcccaggcgttgatggtgacggggtcggcaaggtggttcggagaggttctagagggggcaccttgccggtgactgatggacctggtacgcaagaagtccgaacataggagaacatggcgaggtcggccgatcttgatcttgtttaccttgagactccgagaacgcctcggggatattggtgaggcccagcggagtcaaaggcgctgacggagtagagcg

SEQ ID NO: 29640 - DNA, 183 bp, Oryza sativa
  Clone ID: uC-osflM202051e07a1
ggggaaaaacaggatcataattttcaagttagcccgaaaaaaatcaaggtggccaaaaaggttttctcaagtcaagggaaaaggggactaagttaacccatttatggtaaaattgcctgggatccattaacaaacatgaatattgggaaattcatattcaaactttgaatggccctgtttttt

SEQ ID NO: 29641 - DNA, 502 bp, Oryza sativa
  Clone ID: uC-osflM202051e08a1
gcgtggtccgcgcccgtgtcgccgcgcccggagccgcccgtgctcgtcatcccggcgcgcgcgcgcagcaaacggtctaggccgtccgcgttcccggctgtccgcggcgcgccggcggcgacggagaccaccatcctggtgccgacgccaatgtactcgtccacctcgtcgcactcggatcccgagagcattgccgagtccaacccgcacccgccgccgatgaagaagaagaagaaggccaagaagccggccgctccggccgccgcctctgacgccgaggccgacgccgacgcggcggacgccgactacgaggaaggcggcgcgctcgcgctcccgccgggcaccgtgcggcggtgcacgcattgccagatcgagaagacgccgcagtggcgcgcgggcccgctcggccccaagacgctctgcaacgcgtgcggcgtccgctacaagtccggccgcctctttccggagtaccgcccggcggcgagccccaccttcatgccgt

SEQ ID NO: 29642 - DNA, 419 bp, Oryza sativa
  Clone ID: uC-osflM202051e09a1
ctctccactttgccagtaaatgattacacatggtaaaattgttgtcgggcatggaaaagaaactagtagtaacaaactgaacctacacgcttcagtaaaaaaacttcacccgattataccgataagtatcaccaattttgcttcaatctccatccgagcagttcacatttcacagcttctagactgattgatcactcttcaccaatcaccattggcagcctgacgatctgagggcgtccaagacacgtttctcacctgtccagttcttccacgagcccgttggcgaagtcctcggcaggtcgtgccgcccgacgaccaggttcggtcggccaccgcgcggtgaaacgcgtcggcggcgagcaccgccgcggcggcgccggcgccgcccccgatgcggtggtggccgacgagccagcacc

SEQ ID NO: 29643 - DNA, 122 bp, Oryza sativa
  Clone ID: uC-osflM202051e10a1
ccactgtaagaattagaacactatattttggagagaataaaaggcacaaaagggacccgcaacagggcgagactttaactgatggcatgaaacgaaatgggaaccccggccactgccacaac

SEQ ID NO: 29644 - DNA, 426 bp, Oryza sativa
  unsure (1)..(426): unsure at all n locations
  Clone ID: uC-osflM202051e11a1
aataataaaaaaactatatgatccatcctagcatgctatctgagtagccgcttcttattatattgcatgaaactctagcttgtgtttggatcgtttccctggagaagatttgattttctggtctagtagggntctcccgttccatgaaatcctcttctggtgagcacggaaggaagccaaattccaacatgaggctgtcaaaaggtagcatgctctcgggagccatgtcgctcgcgtcgcagaccgagcctccgttcccttccttcccttgacgtccatgacctgaacacaangcccttcgctccaccaattcatcgccacgatcaaaggccactcgtcggcgtcggcgtacgtttccgctctcgccgtcgacggtgactcgctgtacatcgcctcgtcggacgggagcatcaggctgtgggcact

SEQ ID NO: 29645 - DNA, 437 bp, Oryza sativa
  unsure (1)..(437): unsure at all n locations
  Clone ID: uC-osflM202051e12a1
atccttgctcatcctgcagccttaattatatatattacatatggtacataccctgggaagaaaaataaaaaaaaataactccttgattaattcccccatttggttcacgcacaccacccaacccaaaagcggccactgaacacaacaaggatacattttgctactggctcctccgaccctccaatcgttcgattccgaggcccattgcacgcgccccgatcgatgcaacagcctagcgatcaaacacgaaggcgcgcattgccaagcgaaacccaactttggggtgtcagaatccattggcgagacgagaagcggggtttgaattgctcataggcccgagggcgccccagcggccgttcttgcccctggcccggccctcgnaagtagaagatgagccctgggcgagcctggctgaggcgggcgtgcttgatctcggc

SEQ ID NO: 29646 - DNA, 116 bp, Oryza sativa
  Clone ID: uC-osflM202051f01a1
gaggaaaatgttgggacatgggaaacacccccaaagttaacagggaattacccaaaagacttataaatatatgggcatgtttcctgcccctattttaatttcgtgtacctggaaaa

SEQ ID NO: 29647 - DNA, 140 bp, Oryza sativa
  Clone ID: uC-osflM202051f02a1
actactatatcatctatattagtgcaggaaaactggtagcacagctaacatttgatttcaagacagcatccccgaatacattaacaattgacaacatttttttttgttatttcctaaacaacaatccctcaaagcaaata

SEQ ID NO: 29648 - DNA, 65 bp, Oryza sativa
  Clone ID: uC-osflM202051f03a1
atggaacaaagtcacccaacaccgggcaaatcagacagttacaaagcgatgggttaaaaccaaaa

SEQ ID NO: 29649 - DNA, 294 bp, Oryza sativa
  Clone ID: uC-osflM202051f04a1
gatggctgagcaatcacaacttcacaaggggaaggaagtgtgatgacggtcacgttagtcgttagtacaaacttggacacgggtgtccttgtcctctttggcacgttcgttctttcggcatggcagacaccaaaggccgacaagaggcccgtttgaatgtacacttcttgtgttttcgtacttttgtttgttttccgatatctaaatccctccccttttttttttctgatttataccaaaaaggaacttctcaacagaattgccataagcagccaaggggagaattaaaattga

SEQ ID NO: 29650 - DNA, 404 bp, Oryza sativa
  unsure (1)..(404): unsure at all n locations
  Clone ID: uC-osflM202051f05a1
aggttcaaatccaacttattcataaagcatactgctgtcccacaggaaactgtttcataaaactaacatatcatacggactcgatggtccattaaaccagacacaagtagacattcagcaccacaaatacttgacgaacagaggctcgggacgaccaggcacatcggcagcttccaccaaactggctgattactgaccaccacggaggcggagtcaccaggtggagggtggactccttctggatgttgatagtcggcgagggtagccgtccatcctccagcctgcttgcccagcgaagatcagacgctgctggctctggngggaatcccctccttgtacctgggatcttggcccttcacattatcaatggtgttcggagcttttaacctccaaagtgatggttc

SEQ ID NO: 29651 - DNA, 470 bp, Oryza sativa
  Clone ID: uC-osflM202051f06a1
aagtaattaattaattaattaatcatcttccctgcacattaacaacgttcgtacactcagctcaactcaaccgctaatcactacacctacccccttgctgcactaccaaatcttttgattttcattatgatacagctttaattaattaatgcccaacaacatctgcgtcacctcttcccttcttctcaggcgccggcggcgtctgcgcggcctcgttcgtcggccctgcaacggcctcgagcgacgcgacgatgtcccgcatgagacggccttcgccttggggtttccggtttcaggcaagtggttaacgccagacaattcgccgcccttggtgacacccgcccttcgcccggcagcttcgcccgcctgcggccgggcgggcggtcgggcggccgggcggaagaaggcgggggttcgacgaatgggacaatgacccttgcgcttgtgggttgaggagggggaggcgcccc

SEQ ID NO: 29652 - DNA, 171 bp, Oryza sativa
  Clone ID: uC-osflM202051f07a1
aaggaccattgataaataggaaaaatccagcatcattaaattacagatccatgaactgcaaaactgggaaatttaacaacagaatggaccgggtttataggagcactttttattccactttgtttaaccccacaaacaaacggaatatccttttgggggaacaagccaaag

SEQ ID NO: 29653 - DNA, 361 bp, Oryza sativa
  unsure (1)..(361): unsure at all n locations
  Clone ID: uC-osflM202051f08a1
gaacgactcgcacgagacggtccgaagttctattgatagagcaggaaaaaaatttcaagatcacaaccctaaagggtcgtacccaggaaaaaggaaaaatttaccaccnacccacacacctgacagtttccaacactacaagtaccgggagaaaggcttaacaccggcacccggccgccgttaagcttgaccgactgccgtttagaccacacaagagaaacattagatgagtatcgcccaaaagaacacgccttacaaaccaatccacaaggccaaacttcctagaagttgtgcctttgccaccaattcgattcgagaggcctttcggttatggggtatcccaaaaacgacgttatttcaa

SEQ ID NO: 29654 - DNA, 420 bp, Oryza sativa
  Clone ID: uC-osflM202051f09a1
aaagaatgtaggccgcactttttattggcaataaaagaacccaatggaatattaacatttggtacaatggttatttatgggcagaaaactaattggccaaatgggaacccgggggccgaatttacttaatatttattagccttacaccaaaataaggggggatgccccccgatgggccaacgggcacccaaaaaattattttgccacgaatcattcgtagcaaaggcaaaaaatgatgctgctaggccctttcctgatgaaggaacaaactggaggtttatgattcttccgtgataaatacttgacgctttgagaaaaaaggacggccccaagaaattacacgcttcaattgatgcaataattgcgcaaactcagtcttcctcttcactgaatcagtgcgaaagagaagggcgcaaactt

SEQ ID NO: 29655 - DNA, 271 bp, Oryza sativa
  Clone ID: uC-osflM202051f10a1
aaaacatcaacaggaatgagatgcaaatgagcaaattgagcacatatttaggttcaaatccaacttattcataaagcatactgctgtcccacaggaaactgtttcataaaactaacatatcatacggaactcgatggttccattaaaaccaggacacaagttagacattcagtcacccacaaaatactttgacgaaacaggagggctcgggtaccgaccaggcaacattcggccagctttccacccaaaacttggctgaattacctgaacc

SEQ ID NO: 29656 - DNA, 337 bp, Oryza sativa
  Clone ID: uC-osflM202051f11a1
aggtaaaaactagtctctagatttcatcacggtctctggtaggtacatttttcacatgagcaatttgtaactgaaaaaaattatcaagcaaacaaggctctggtatccgacgatgtactaaacgtgcacaaagcccataacatgttgcatcctgctgcatttttacaccacttccagacggtatagccgaaggcacaagtttgccccaccaaaaaacacctcttcacattagtaagtagccagaaattcagccaaggtatgaaccgtcttgaacgaattttcagaggagaagccaccattcgaaagggcccagagaacccatagcccccagaagcag

SEQ ID NO: 29657 - DNA, 189 bp, Oryza sativa
  Clone ID: uC-osflM202051g02a1
aaacagataggaatgctttgtttgggcaatccaacaaactttgaacctggaattgccctggtcaaacttcagagggatcttcccaaaaggaaatttgttggcttcacattacatagtaaggagacttgttttacattacacaaccaccaaagggtttcaagggaccaaatccgattatagtttttacag

SEQ ID NO: 29658 - DNA, 443 bp, Oryza sativa
  Clone ID: uC-osflM202051g03a1
aagcaaaaaaaacatcgatatatcgcttatataaagtaccctcttcagtttcagaactgacaacattatcgccgcacactttaccggacctgcagcagaaacgcagtattggcaagaaaacgagaacagttgatacatacacgtttattcggggagagatgtaaaaaggctatcaaacaggaggccataaagaaagttcatgggtagcctcaaaagcattctagaatggctcttgaaaagtttatgtgatgacggtgggagcagatcggccagtgtactcttgcatctttgacagcttcagtgcaacatcaaccagaggagcaagggcatcctgcgaatccctgccggtcttggaagaatccttctcatactgctcgatgtagacacggatagtagcaccaacagagccagttccagagaggcggaacaccagccgggaacca

SEQ ID NO: 29659 - DNA, 473 bp, Oryza sativa
  unsure (1)..(473): unsure at all n locations
  Clone ID: uC-osflM202051g04a1
ggggggaaaatccatataatataacccgaaaagcatgcggattaacataatttgatacagtgagacaacctaggatcacagaattaacagtacaaaaacagatacagttgctcggcaattacagcgagattcaagctcacatgtntctcacatcaacagaccgcaattaatttcgggccacaatgttctctccctaaaaactaggttaaaaacaagcagcagcttaccgtacaagtttgtcatgactgcttgtgaagtttgaagccaaaaactttttggaacatactgctgagatggcttttgtggcttcaagtgtggaatatggtcatcaggaagagatgtggggaatgttgtcccaaagtacgctccgtcaatgttgccttggtacttggatcttggataatgtaaatcttcacattttggacagtatatctttactgtgcctgacctaagaatatctgattgccctgcag

SEQ ID NO: 29660 - DNA, 96 bp, Oryza sativa
  Clone ID: uC-osflM202051g05a1
ggaccaagggaccttttttttaaacggaacatggtttcagggaaaaaccttttatttttggtgcccaacaaaagccccttggaaaaacccagttcc

SEQ ID NO: 29661 - DNA, 473 bp, Oryza sativa
  Clone ID: uC-osflM202051g06a1
cagacgcgaaaaacacattccatttacatagatatatatatcagtagaggtctaagatcacgacgttcatccagcaaaaaccagctttcgactttgcccatatcaccggtacttcctgaatttctatttatctgtttcaggcagtacaaatttcgacgacggcaaaataacttaacgagcagtaaatctaatcatgtagctgcaaaaaaggacatctggccatctaccagttgttgctgtaaccggtgtagctgctgcggtgccgcaacccatcttggtcatactgcggatcgccatggttcatgggtttgatctccacagcgcggcgcttgctgtctacctcctgcacggctccaaagacaatctcgtttgttgcctcacagcttggctcatagaaagtttgcggtcctgatgaatactgcctatgatgctgtaagtactgctggtgatgtatttgctgctgctgctgctgt

SEQ ID NO: 29662 - DNA, 460 bp, Oryza sativa
  Clone ID: uC-osflM202051g07a1
gcaacgttgcaacatactttttgcacatcttctgaacgaagatttgttgcaattatattccattttccacactttcacgaaacagagatgagatgggagcatccacatctttgaaagactgcacatttcaaactgatttgagttagacacaggttacaggtgcttgatgagaagccaagcaatgaccgcaagaaacactatagcaacgacagatatcagcagggccatgcacgagcagccacctttgacgcgcttattcagaatagcaagcctcttttgcacgcgctgaagacgtgagtttgtaacatcaacataatcatccaaatcatcaatcaatcttgtatgcagggtaagttcttcattgactgctagagcaatatgttttgtgctcagtactgtctcttccagcttctcaagacccttatcttgttctttcataacttgcctctaagtgaaacga

SEQ ID NO: 29663 - DNA, 481 bp, Oryza sativa
  Clone ID: uC-osflM202051g08a1
ggtggcgtcgtccatcgattctttcttgggcaccatcatcgccgtcgccggcggcggcgcaggctggaacgccgggaacgagtccagctccgggaaggggtcgttgtccacgatctccgactccggcgtgcgcgtctcgccccacgagtgggtgtgcgagtgcgactgcgacgtaaccatgtcggacgcctcctccttcacctccttcccctgctgcatcttctcccactcgttcttcttgttgtacagccgacacagcacccaatcatccaactgcacaaacaattcacaccagatcagatcagaccacgatccaattatcgatcatcactcccaccgaataatcttcgatcgaagcaaggatcattgctagtaattcggatgaatctgagctaagcttaccctgagagatcccttcttggcgcccgcggcggcgcggcccgcatcggcgagccggtactcatgcatgatccaatcagtc

SEQ ID NO: 29664 - DNA, 456 bp, Oryza sativa
  Clone ID: uC-osflM202051g11a1
tttagttgccgctcgcgatctagcaggtacccctttgttgaaggtcgttcgagcttttcctgggagtatggcatgggttacatacttcagcgccgtagcgcctggtatgagcctcgtggagaagcaatggctagtccacggggctcatacttcagcgctgcagcgcttggtactcggacctcggcctcgaggcattttcttctaccccttcttaccctgaaaaagcagggttcaccttgtggtccttaaacctataaccatctttcggctaacctagcctcctccgtccctccgtaccaacaaggggctagctacaggaactattgaacctggttgttccattcgactaccgcctttccgggcctgatcttaggccctgactcaaccctccgtgggacgaaccttggcggagggaaaccttgggtttttcgggggcattggaattcttaccaatgt

SEQ ID NO: 29665 - DNA, 175 bp, Oryza sativa
  Clone ID: uC-osflM202051g12a1
gacccggaaggccaaaagaggacacggggaaattttccactgagcggtaattttacagagaggggatgaacacaaaacgccaattgaatttaaccatgtccatcattttttttaccctaattctaaaagaacaaaaccgaactggaatcaatttaagttaatcccccctaaccta

SEQ ID NO: 29666 - DNA, 69 bp, Oryza sativa
  Clone ID: uC-osflM202051h02a1
ttttagtcggccggccctttttttttttttttttttttttttttttttttttttataaaatataattag

SEQ ID NO: 29667 - DNA, 430 bp, Oryza sativa
  Clone ID: uC-osflM202051h03a1
agatgcaaacaaatattatttttctgaagcataaaaattcgtaacaactcccaggaaatctggactccaacaactattgtcacaaaaaactgggatctcctgttctctccttctctttatcccttcaaaagctcaaggtcacataagttgcaaaataaaaaggaacacaattagtaagcaacaagaccaaatgtcatgccactagtacactgtaataattgtcatgcacttgaaacaaaaatctgcacttcacggaattctgttcgtaatcaaacaaataaaagaattggggtaatcaaggaggcaatatcagcctgatcatttgtttcttgcaactgaagaacaagttcacagaaatcacaaaagttataacccatgagtattcttgcgagcatctgccttgtagatgtgctccaagagcaaagttgtc

SEQ ID NO: 29668 - DNA, 152 bp, Oryza sativa
  Clone ID: uC-osflM202051h04a1
ttttttttttttttttttttttttttttttttttttttttttttttttttttttttttttttttttttttttttttttttttttttttttttttttttttttttttttttttttttttttttttttttttttttttattttttttttttatt

SEQ ID NO: 29669 - DNA, 269 bp, Oryza sativa
  unsure (1)..(269): unsure at all n locations
  Clone ID: uC-osflM202051h05a1
ataggatcaaaacatttctattaccacaactttttaaggatggaatcgagtagcaatactttcaccccaaaatacagtttagcgacaatatcttagaaaagccgcttgctttgccgccatggctggcaagctgagcagagcagtctaacacaaagaacacngagatcactataaaccaaacggtcaaccgaacgaaagaaaatacagggttcttttttgttctgaagataacacgaagtcggtttcgtttttcttttattttttagttc

SEQ ID NO: 29670 - DNA, 463 bp, Oryza sativa
  Clone ID: uC-osflM202051h06a1
gagaaaacccaatgctgtccaaagaaaatgtttgcagctgcatgaaactcttcacaccacatgacatcattgagatgctagccagaattactcctggtagaaaaaatcaatttattcccatgaattagaactaaacctactcacagtcaaagtatacaaaaacattgtacagaggggtctgtaagcattgggagaagctacagaaaacgacctctcatgcctttttctaataacaaagaaagacggaccaaaaattatgaagggatctttaagtaagttgctagctatacccgttatgtatagaacctgctctgttcttggtctagccatttctgataccacagggcaatatacagaggcaaatctttcttatctatgctccaagcttgccaagaccaaaacaatttagtaccaaaagcaggcaccgaaaagtatcagcaatgaaatggcacacattacagtt

SEQ ID NO: 29671 - DNA, 197 bp, Oryza sativa
  Clone ID: uC-osflM202051h08a1
catgcactggcacacgtaagctaggatgctactatagttttagcggccttcctttttttttttttaggactctatgagcaagaccatggagaccgaacatagcgcagataattccaattgcgaactactttttttcccttagagacgaacggaacaattcttatattattgcttccttctttttttgggcccttact

SEQ ID NO: 29672 - DNA, 207 bp, Oryza sativa
  unsure (1)..(207): unsure at all n locations
  Clone ID: uC-osflM202051h09a1
gaccgccgtgccgtgcgttacgctcaactcgggccacgcgatgccggtgctgggcttcggcaccggctcggcgaccccgccggccgacctggcggcgaccatcgcgcacgccgtgcgcctcggntaccgtcacctcgacaccgcggcggtgtacgggaccgagggcgcgggtcggcgcccgccgtcggccgaggcccgtgcgctgcg

SEQ ID NO: 29673 - DNA, 464 bp, Oryza sativa
  Clone ID: uC-osflM202051h10a1
aaacaaaagttggaagatactgctaaattgctaactgaacctggctgcttccactattttcaccgtcttacttcgtgctgcatgtgtcgaattcacagtggtttgctacttggtgctaattgctaccagttgctagctagctagttgctattacaggacttggtgagcctactcggggttcctcttcccacggattttgcctggcccgcccatgggggcggcgccggaagggtctccgcgggcgacgggttggcacttcccggtccaagcttgacagacgccgcccgaatgggtttggattgaatggtcggagaagaccccctgccttgtccgaacgccgccctgttcggggcttcacttccaagccccccaaagaaatccttagtgtttgcccggctttggcaactgaaacattgtggaactgaccccattcatggagctttcgggcaaagctcaccgggacc

SEQ ID NO: 29674 - DNA, 442 bp, Oryza sativa
  Clone ID: uC-osflM202051h11a1
gcttaagacagaatacatatcccagctaatttggagataccacaaactcacatataggacttctatgggactccaccgccagctaagtaactagaaacacaaggtaaactactactacaacaagagataatgccacaagaacaataacgacaacaagagcggtaagggtcggtccctgaaacatctgttttgacccagctaaacatacagcatttctccagcacaacaaatgccatagcccattacagcatccgcccaagattgtcaaccctcaagaagggcaagtttctgcaaattccctaaaatatcttccgatggatcgacatccagatggaaggtgcccatgtccacaaccccaccgttgacattcccccttgcgtgaacatgtcccctggtagcaccatctgtagactgtgcctctttattgatgttaatccccctt

SEQ ID NO: 29675 - DNA, 500 bp, Oryza sativa
  Clone ID: uC-osflM202052a01a1
atcaaaaattgatcatcaattggttctacacatacacggacaaaagctggcactctgtagtctgtacccgtatacacacggacagttcgtacctataccattaccattacacccactctcaagtctcaactggaactagccaagctccgtacgcgtaaaccgggggagctcgccgcgccgaggcccaagcgaccaccgtccatccttgcacgccggcgtcgccacgacgccaccgccttcgcggcgcgccgggcacggcaatgcgaggctgctccggcgagaccggcagaacggcggtgggcggtgagctatatgacgcgggcgccgtcaccgggctcgcagaccagcacgcggcggcccggcgggatcttgctcaccagctccggctgcgccttctcgtactcggcccggacgaacgccgccgacgactcgcgtggccgctctccacgacggcgaggcagcagcctctgaagccggcgccgctgaaccgcgcgccgagg

SEQ ID NO: 29676 - DNA, 426 bp, Oryza sativa
  Clone ID: uC-osflM202052a02a1
aaaatgggaagggccaaggaatcaaccacaaaggagcaggtttttttcgggggcttggtccccgaataattaagaaacctgcctaaagattatcatataaatgggcttgggtactagcttgcccgatattaccatttataatttacattcttggccctgaaaatgaaaccaaaaaaaaactcccaaattaatgccctaggaagaaatctgaatctttccttgcatcgggtacaaaaagaaatccggctggttggctatttgcccatgcaactcctcaaaataaatcacaaagggaacaatcaggatcttcctctttgaaactggagtttcattcggggaaattaaatcacctcttttaaaaacgatcgggaaacgggatctagacgcctactactggatttggagaagattggtaaaaggaaatgg

SEQ ID NO: 29677 - DNA, 370 bp, Oryza sativa
  Clone ID: uC-osflM202052a03a1
aaaaaaaaacgggggttaataaaaaaaaaccttcccggggaaatagatcctcaaaaattataggggttttaaacattttacaacttacaaggggggggaaaattcccagggcaactatttaaaagaaagctgatggaggaaaggggacccattataacaccgggaaaaatatcgggtatagaggggaaccatttgaccaaattaaatgggaaataaattaaggggatcggttcccgccgatttaaaaaaaacgggacgtttggaacccaagggggggggggcatccaattgcccgggaggcccggtttgggggggaggggtttgggggactggggggggacgccaaggggaaagggggccccaggggggg

SEQ ID NO: 29678 - DNA, 409 bp, Oryza sativa
  Clone ID: uC-osflM202052a04a1
gaacgaaagtacgtatagaattcatccataggagtaggcatgcatatgctgatatgccaggtttacagatagatcacttgacaattaccgtgcatatgccatctatacaatagttaatttgcagcaatgagacgtcgccctggctgtatttactctgtaaattctttgatctcaaattaatcatatgtataatttaggtatgatgtgtgatcagttgttcttgtcgtcgaccgccgacgacgacccgtcggcgccggggggacacggcggcttcgggaatggtataggccaccagggctgtggcggccctggcttcggcttcggcccgggcttcggcggcttcggcttcggcttcggccctggctttggaggctttggcttcggcttcggccctggcttgggaggcttc

SEQ ID NO: 29679 - DNA, 384 bp, Oryza sativa
  Clone ID: uC-osflM202052a05a1
tttttttttttttttttttttttttttttttttttttttttttttttatttttttataggatacatattttatttttaataaaaaaaataattatattggttatattaggttcttttttgggggggaggatacctaagaaaaaaaaaaaaaaaaaaccttccaccgtaagcaacagaaacagttttttttcatgaaagaaaaaaaaaaaaaaaaacccaaaaggattaaaaaacttttcacaaaaaaaagctaggaaatagctggttggaagcaatttattaaaaaaatttaaaacaactgtacttaaatgtttgagaaaaaaaaaattaggggggttttgtacccaagaaaaaaaaatttgatcaaaaagggggggtttgttc

SEQ ID NO: 29680 - DNA, 345 bp, Oryza sativa
  Clone ID: uC-osflM202052a07a1
ttttgttttttttttttttttttttttttttttttttttttttttttttttttttatttttatttttttttaaataaaaaaaaaaaaaaaaataaaaaattaaaaaataaaaaaaaaaaaaaataaaaaaaatgaaaaaaaataatcaaaataattggagggagaaataacgtggaaccagtagccagttaaaaataaaaaatcattggcatataaaaaggaaaacacaaaaaaaatattccaaatttaacgggcattagaaaaaaaagaaaaaaattttttttaaaatagggaaaaaaaaaaaaaaaaacccaatggttggaaaaaaaggccaaaacaacctgc

SEQ ID NO: 29681 - DNA, 533 bp, Oryza sativa
  Clone ID: uC-osflM202052a08a1
ttttgtttttttttttttttttgttttttttttttagaaaaagaaatcaagaagtattatccattttcccggggttacattcaagttctttatcacagcagacacaatcaaacaacaaaaatttttacttggcagacaatgacacatcgtttggatttcaaatgggaccgaagtggcagttgaaggcccctttggtcactccccactgccattggataacctcacattttcacttagcagcaacacggggtttgatcagcgcaacagcttttttgattttctccatagcagtttgaagcgtagatagggctgcagcatatgacatgcggatgcatttggcgtccccaaatgcattgcccgggacaagtgcaacctgggctttctccaagaggaacatgcagagggactcagagtccttgatagggccaaaaccctttacttcagatccattgtaggagctgaagtcgatgaacaaataaaaggcgccctggggctttgattttttcacacctggcaggttcttgaaacttttt

SEQ ID NO: 29682 - DNA, 237 bp, Oryza sativa
  Clone ID: uC-osflM202052a09a1
gccgggtcggcggcggctagcgcgggcgccgggaagatgacggcgccggcgccgggggtgtagaaggaggcgatggacatgcggttgaccgccgggcgcgtgaggacgcggcgcatgacgctcttgtaacctgccgttggcagagcaccgtgcagctgggtccccgatgctctggcgaccaatggccggggcggcattgggcggacaccgtgcacgccactgccccgtcccttgaga

SEQ ID NO: 29683 - DNA, 515 bp, Oryza sativa
  Clone ID: uC-osflM202052a10a1
ggtaaaggactggaaattaggccaggatgattttcacaacacaaatacaggatacacaaatttttgtttagtaaaaacatacggagatgggcagggagaggtccttcttgccttcgtaagctctttctgtgcagtctgtatcctaattacttgtccagtatgcccctgtaatcagtaactgccagaagaacaggttaaaacttcagacccaaaaggtatcctgaaacaataaacatgataagctaggaatagccagcctgcatacaatcaatttccaactttttattccaactgtactcccatctttcagtcagtgacacatatcaggaatacgtaaaagatttgcagtcgctgacaaccatgtgaatgactgagaacatatttgagagcaaagtaagacaggcaagctccctgattattatatcaggcttacaatatttgtgcatacaaactaaaataattctcaacactgtttgatctacctatcatctccctttgaattcatggccgtgctg

SEQ ID NO: 29684 - DNA, 234 bp, Oryza sativa
  Clone ID: uC-osflM202052a11a1
tttttgggtttttttttatgggtctgggcgtgtatcacttgatcaattagataaaaccaacattgcaactttacatgatctgcagccggtaaggggatcaaaacgtctgaaacttttattttttggctacctatgtatgtatctttactctgaacccacacaggttcaagcaaagcacatatgcacccaaaccttaaatgaacaattcatatacacaatttcacaaaacccaat

SEQ ID NO: 29685 - DNA, 590 bp, Oryza sativa
  Clone ID: uC-osflM202052a12a1
cgatgctgcacgcgtaagctggttggctccttttgtgccgccgcccttttatttcttgttggggttgataacattatttggccatgcattatcgcccacttgttccagcatttcctcattgggatgcactgagctcgtcgtaacattggccacagatgcaggctgagagcaattgtcctccgcctacattttggcgacaaagaaagcagaggagaagcaaacagatcagtcgtagtacttgtacagcattagcacactctccctccagctagccgctgactgataattcaccagctgggccatatacatatactatcagttcatcataagatcgcatcgtgtacgtacactacaggttgtgtacgtacaaggatccccttttctgctaagactatttggctgcatcgatctactacgtacacgtacgtattgtatacggaggaagtacaagcatgcatacgtttatacatccttggctacaaaaacggccggttggaggagtgcagatagctgaacactgaacattttatgctctggatccgacagctgcacttccctgaaaaagggccgattttggggttttttttttt

SEQ ID NO: 29686 - DNA, 532 bp, Oryza sativa
  Clone ID: uC-osflM202052b01a1
accaaatacgcacgataatacatactttaaacagactgagtttaacgtacatcacgtcacatggaacattggccgtcctctaaaactggaatactacatcacacacaaacaaactaccaattggggcgcacaaataaatctgcaacaacagatctagtaggagtactagttaacacagccaacaacagcagcacccgttttattctgaaccctctctgcttctgaatcatttggttgcaatgaacagcccccacctctgctcaccggcagagctccgcttcagcttcgcgttccagccgttcacaatgtcatcgtagtcctcctgggtgaagtctgccatgaaggcttctttgttcttctcaacttcagcaagctccctttgaagaacacgcaggaactggtccgtgcggtcttcagcaatgacatgatggaaaccagcatcctcaagcatctttgcgtaagtcttcacattcgggaggtcatagcctctctgcttaatgaagcagcaaattcttctgatggtttccaggat

SEQ ID NO: 29687 - DNA, 474 bp, Oryza sativa
  unsure (1)..(474): unsure at all n locations
  Clone ID: uC-osflM202052b02a1
ggtaaaacaaagaacaaacttgcatttcttgtacaggcagaatcaactaaagaaatgttttgtacatcagttccttttcttcagtacaaggtatatgatacaatttttagctacaactgattactcacagcgccaagacgggcgtactgcttgtttggcaattggcatactgcttgttcttcacctcagacgggcggcattgctgcagtttaacgccaattttcgacatctttgctggggctatggatttcaagatagacaaacgactgcccattttcaggttcatgttcttaaacagcttcatgattcctcattgttttttcagaccatcaagccggtcgattaagtccaaagctttggtcctatccatctggaagtcgatgacaggaagcatggatgatctcctgagtgaaagcatgtctttcctactgccactggttggagattgactgttgctctttatcagnctaatct

SEQ ID NO: 29688 - DNA, 460 bp, Oryza sativa
  Clone ID: uC-osflM202052b03a1
gcgtattgaatacgtttgtttctttatttgttttttttgttctgtccccttatctttctttcatagaaaggaatgaatggctcggctagatagaataaccgagccagaacagaaaaaaacagtagaacaggtataaataagaaaatcttagttaagaggggtcatgtaaagaacaggctccaaatcacgatcgattcccttttcaaatcctgctgcagcagcccgggctcttcctgcatgccacaaatggcccacaaaaaagaagaatcctagaacaaaatgggaagtcgctaaccaacttctaggagaaacataattaactgcattgatctcggtagctacgccacccacagaatttaaagagcctaaaggagcatgggtcatatattctgccgaacgtcgttcttgccaaggttgtatgtcttttttcaacctactcaagtccaaaccgttggggccc

SEQ ID NO: 29689 - DNA, 235 bp, Oryza sativa
  Clone ID: uC-osflM202052b04a1
acgcgtacacaaccaccatggtataatgctggctcatgagacatacatggaccagcaaccggattttgattatacttaaaaaagctttcaacatgtccatcaaaattcaccaggattatgagtgcattaaataaagattcacatcaaggcttaaacaaaataggggagcatgaatttattatacaccgatgagctccataaggataggtaatataaacatccacataaagggtat

SEQ ID NO: 29690 - DNA, 464 bp, Oryza sativa
  Clone ID: uC-osflM202052b05a1
gcacacggaaaagaccaaggtatatatatcaccgacagcaacaagtgagtggtccacatgacaaaatgtatatagagcagagtaccactggacaccatttcccaactacacaaacccaggcacataaagcagcttccaaacataagacaatggaagataataatatcgtctaaaagaatcccaccgggtaaatcctgaaatccctggagcacactctgcacaccccctgtaccgcttcatctgtatgactcggtgcgcttcggcttgctttggaccaccgcttcgatcttgtcgacgacttctggggttagcagcggaatgacatcgagggccttcatgttttcaacaatctggatttcttttggggctccagtgatcacagatgagacgtttgggttcgatgcgcaccacgcgatagcaagttgggctaacgaaacaccaagctcagaagcaattggttttag

SEQ ID NO: 29691 - DNA, 466 bp, Oryza sativa
  Clone ID: uC-osflM202052b06a1
ctagaaaacgttttattgcaggtttatttttttaaaaaaaatggaccaaattatatacaaagctcattttataccactaggcactagcgtacaaggatcatcgcaaaaacaagaggcaatgatcacataacccgtactcaatccatcccataaagtacatagctagaagttgatattttttttacaagacggaggatgtacgttgcatgagggatgtgactgagtctcccatagctggttattttgtgggccgagccagattccccaaagagaaggcccggatcgtttcttggctggcccttggggcccaagaacagcctggtaatgtaacaagacgtttgctctaaccacaccatgtccacgggaaaagcacatcgatatgtacagcatgtacagttaatatgaggaactttcaccagcgttgctgtatatatggtcccaattctgagactgagcttgaaatcat

SEQ ID NO: 29692 - DNA, 510 bp, Oryza sativa
  Clone ID: uC-osflM202052b07a1
cggttcagtacctctcaaaatattaacttaaaaatagtacactgtttccccgtatgttacatatgataaagtttaccaaagcgaaatagacatactgaacaaaagcacggaggttaaatataaatagcacagcgatctaactatataaatcatcatcgtcagctgcggcggcagcggatgcgaaggggtcagcggcggcgccggcgccagacgctggctggtcagcgaacctaaactcggtgccgaacccacgagactgctgcagagtctgggcgaaggcctggtacttgcggatgtcggcgtcactcacactccggcgtgcgtacttcatcgactcctcgaagtgagccgccttgatctcagcaatatcatcaacctcgtcctcctccatggcttcagggttgtccttcctccgcttctccatctcgatgtccttttcaatgttctctctgatggcgtatttgcatgcacgctggcagatttctgtaatatcagcaccactgaaacctt

SEQ ID NO: 29693 - DNA, 185 bp, Oryza sativa
  Clone ID: uC-osflM202052b08a1
aaaggaaacatgaataaaaagcatctatacgagtctacaatcacatttgcggtagcagtagcgtaaagttaatgagaaacatcagctgatctcaaaagagatctctcaacatcgacgagagaaacatgtccaaacaagttcatagacaagggcgcttctacagttcacagccccccacgcgtccg

SEQ ID NO: 29694 - DNA, 377 bp, Oryza sativa
  Clone ID: uC-osflM202052b09a1
aagtcacaaggttgtaagtaacattagatgaatgaagatgtacatttttcatgtttttggacagatatgcttagattctgccttttacggatacatccatgctattttgcaagccatgtaactgatttataattaatgcagcctctccggtggttccatgacgatcatcgcattactcgttatcatcatcagccaggtcgaactgcttgagcagcgcgccgcaaacgggcagtgggatgtccttgaggtagccgagtgggttggctaagcgcaggttgtcacagatgccgacattcctggtgagcaaaacacgggcacgatccctttcggcctcgatttcagagcagtttgcaagggggctgtggacgaggacaacc

SEQ ID NO: 29695 - DNA, 425 bp, Oryza sativa
  Clone ID: uC-osflM202052b10a1
aaagaattcaattatattcagatgcatgactggacaattcagaattgcaaacttaacaaagggataataaagcaaacatccaccctgcaaaccatactacacacttaaagacctctttatggttttgataataaggcaagctccagcgatatatgaacaaatgaggggaaaaaacaagcaccacacactctacttcatatccagcgataaaaagatttgaatctgaagtcggtttggttgttctagatttcttgggctatgccaagatccattggcatttcactgtcccccatattctccttatcttcatttgtcacctccttcaccacatcaacaggttcttgctctgtaccaactggcaaagcctcgctgcctccattgcaatcttccttctgccccttgacctggttcttggctttcttacc

SEQ ID NO: 29696 - DNA, 408 bp, Oryza sativa
  Clone ID: uC-osflM202052b12a1
ttgtttgtttttttttttattttttttttttttattattttttatttttttttttattttttcttttttcaggaaaattacaagagggtaaaaaaaaatgtgaaaacaaggcaataatggatttgcaagttacagggtcagaagggcacaaattcccccattcaacaaacagaaaactggaaaaaaaaacacgttatatttgggtgaaaaattttccaagggcccaaaatttttattttgaaaaaaaaaaaagggaaactttatgaggggctttttgccccccaaaaaaaaattggcaaaaaggggggggccaactcccttcgaggttgactcaaagaattatggctttaatataaagcccaagaagacccccatcaagggtacaattttggctcattttaaggggaa

SEQ ID NO: 29697 - DNA, 402 bp, Oryza sativa
  Clone ID: uC-osflM202052c01a1
gcaaaacacccattgttagggggaaagtacaatccaagcccatgttcatgacattttacaccaagcaggcagttcattcatactacagcaaaacaactaagcccaagcccgtgcacatgactgcccgattgagagaaaaacaaaactaaacaggcggggcaaccgaaacagtagcatgcaacacgtacgggggttactcgatcgatcgctagcaggagaaacaaatagcaacttaactaattaagttcacaggagttgagtacagtgtttgagaagcaaaaccgagagcaagaagcttgtagcgcttttggctgtgcatgcgtccctcattttcaagaaacggatggatggatcacgagatgagctggaggccctggaggaggagggcgtaagcaagcacct

SEQ ID NO: 29698 - DNA, 425 bp, Oryza sativa
  Clone ID: uC-osflM202052c02a1
gaggcaaaaaaaaaatgatgggctttatttaaggagtctgttcattttgtatgtacggtatagcatggtatgaatatatacattatcatgaaaatgaactttaccagtgaaataactaatttagccgtccagggaagagctataactataagcttaaatagctttcggagcaaaaatattactgacaataatcggaagccaaaagaaagaaaaatgtctgaattcaaacctaagaagttaacgactaagatagctagtcacctttgtaagttgtcaagggctcgtatcttcagggttttgaaggtgcccatgaaccgttaactgatatcctcttgaagttgatggggagttctgattagaggtttcagggattccatgatactggcaaaagacggtcgtcgccagggttcttttgtccagcagga

SEQ ID NO: 29699 - DNA, 480 bp, Oryza sativa
  Clone ID: uC-osflM202052c03a1
gaacaagcgaatgccacaagccaaaataaagacataggaattagcaatgtaaatacccgcattccacaacagccgaagggcaataatcaggctcagaacaagtttaaaccgaacagaaaatagagagttttaaacgacacagtgcacacagggagcatatgataataacggtcaatgcaacgagggccatggccgtgcacaaaactaccacttgaacgaggatcatttttttttggcggcagccttggtcaccttggcaccggttgggtcctttttttccacgtttttgatgacgccaacagccaccgtttgcctcatgtcacgcacggcaaaacgaccaagaggagggtactcagagaaggtctccacaaccatgggcttggggggaatcattttaaccataccagcttcaccgttcttgaggaacttgggcttcttttccagctccttaccagatcgtttgtcgatcttggtcaccag

SEQ ID NO: 29700 - DNA, 123 bp, Oryza sativa
  Clone ID: uC-osflM202052c04a1
ggcacaaaaccacatggttccaaataccaaaacaaaatcacaccatgaacagttccaccccccttgattttaataatcatgttcgaatcagcaccaaccttataaactgatgaatcctaccat

SEQ ID NO: 29701 - DNA, 474 bp, Oryza sativa
  Clone ID: uC-osflM202052c05a1
aaaggaaacacaactcattttttattgatatatgttggatgaatccaataaaaccgatacaagtcacgaaaaatcagactagatgaatccttcgagatcacatgagcaaaagctttcgacgaaagctgtcctatagtcgtggaagcaataacacttgataaagataggaattcagacacgagaggttgcagactataagatgtcatcaaatctccttgaacgccgcgaagagatcaccgttgatgtagtcgttgtccacaagactaaccaagaagtagctcttctggaccttgtctagtatctccctagatgagtcgccctcagggaacaggcaagcccaaccctttgaccaaatttcgaaagcttcgtctttccaaaccataaagctggctgagtcaacgacagttggctggactatttccttgccagggaaaacaccccatgtgaccgcattcacagcgtttcgtggaatgt

SEQ ID NO: 29702 - DNA, 389 bp, Oryza sativa
  Clone ID: uC-osflM202052c06a1
cattccgatagatagcaacaagcagttcaaacaccataaccaaagcgaactcaattcatggtaacatcacggacgaagaacacctaacactggatggatggatagagggcttctcgactcgagagagccactggacacgataacgactcgactcgatgataagatgattttgacacggatagctaaggataactggccacgatgggccccaccaatcagttcctccagttcccgccggagtcgccggcgtagccgccgccacggctgccaccgtagccgccgccgtcggcgccacggtcgccgccgtagtcgtcgtcgtcaccgtagccgtccttacggcgcccgtagacgacgacggcacctcctccctagccgtcgtctccacgacc

SEQ ID NO: 29703 - DNA, 368 bp, Oryza sativa
  Clone ID: uC-osflM202052c07a1
ttttggggtttttatttttttttggggttttttttttttttttttttttattttttatgtttttttttggatggaaaaagggaaaacaaaaaaggggggatttggcacaaaggagcaataactttattatttccccaaagaagaaattggccattcccaaaagggggatgttggtgaaaaaaaaaaaatggggtaaacctgatggcaaaggtatttagaaagggggggaaaaaaaaggggggggaagaaaaagggagaggtagttacagaggtaagggggaaaggtataaaaggcacaaggtttgggtagaacttattgggccggcaaaaggggatctttaagtatttgggggggagttcatggaagg

SEQ ID NO: 29704 - DNA, 474 bp, Oryza sativa
  Clone ID: uC-osflM202052c08a1
atatgcaaccaaacaagcttatttgatgttcatttctcaattctcacgttacatatgtataatcaattacttgactgctttaaacctatacatgagaattctggactatgcacatttcgagccctcgaaaccctatgtcagctgattaccttcaaaactttgcgccctatgttggagatcagtaatacctccactcccatttggggtataatggcacgaaaaggaaacaactgtatacatcaaatatacaagctatctagggatctcatgaaaaccactgatttcatcaaggagcaagtacaagaactttaatggtgccctgactgttagcagttaacatggtagggctatcgctcttccagcagactgcgctaataaaataagagccaggatcatcatctgcatcatcgagatcagatgatacaaatctgtggttggcagcatggtttgagatagccttgtggtaaacaaaaa

SEQ ID NO: 29705 - DNA, 491 bp, Oryza sativa
  Clone ID: uC-osflM202052c09a1
aacatgaatcgtgaaagcatttgctaacgtgggagtaatattattatgtccatctgcacaagggttcttttaaccctcaacagagcatacttgtagaatcaccactaagatatatttacaaataataacaataatcgagagggcacacagatactgtacaaccccgatacaagggggaaaaacagatccgctgcttgggctgctactgtggttgatccgatgatggttttaggaaattgtagcactccagctgcagcatctctcctccgtttacagggtcgaactggcatcggtagaagcttccatccatgccaacaactgccacggtattcttctcatggccaaatgcaacaatatattgctccccctcgtggagtctgaactgagctacagaccactccgagtggaaatattttggtagtacacccttaatgaaagaaagagatggactgatatgtggaacatcaggatcttgagcaggcaggggctta

SEQ ID NO: 29706 - DNA, 412 bp, Oryza sativa
  Clone ID: uC-osflM202052c10a1
agggaccaaacagaagagcagctgcattgcctgcatccatgatccatatccatccaacagatcgattataacccgtcacagatacatgcacgcgcgcgtggtgcgtgcagatccaagcatgcgtacgttgtgatactgcatgtgtgatgtgcatatatgctgcatggtttgtgttagctagcttcgatcttgaggatctttgcatggcaagatatatagcatatgtagctacacagcggaggagtagccgtacttgggcagctcgagggcgcccttgttcttggccgccgacccgtagagtagcagaagtagaggatcaactgcgcccggcccagcagcggtcccatgccggtcggtatcgggatgaagatgtcaaaatggatgaacgcgtacattgttcagaatatgccgt

SEQ ID NO: 29707 - DNA, 412 bp, Oryza sativa
  Clone ID: uC-osflM202052c12a1
gaggaagcgcggcaataaaacattgcattgaattctgaacgataaacaccaggaaccggcgtttatttgaggcaagcactgcccaaaatctcgcaaaagtactgaaaccttagacatagtacacatccatggcaaacatggatgccaaatgacaactacagaaaattatcaaattcgaatgcagctgacggcttctcctgctgaagatgcatattttcccctccattacttggatgtgctctctccatcgacagccaatgggacggcgctggccaggctgcggtatttcagagcatagaacatctcaatgtaacggcgagtctcgcgcctctcaaggttgcttacgtacttccagattccgtatacaccagtcaaggtcatcagcctcttagagtacagcttccaggtgtac

SEQ ID NO: 29708 - DNA, 463 bp, Oryza sativa
  Clone ID: uC-osflM202052d01a1
gacagaatacaacctttgtgaaattcaaattgcctctagagcttacaccattttttgtcaatactataatcacgcacgattgaatcggccttttgtaaaaacgaaagaagaaacatcacatttttgttaggtacccttaatatatttattattatttttcgccggaacggtggaaggacgccgacgccgatctatcttgaatattattgcaagtgagctccttccaagccggccacttctgatgaatttatcagatcagacattggtcgtccaacattttcggacatggatatgagtgttgttaatggcctcatgcctcccatcccctcaagagggtggcacgtgcaacccggttgactcccagggtgaacgcccccatcctcaggttgcaatcatgagatttacacatggccttgatgtgctggaaagaattgttcatgtacttgtggagctccatgttcac

SEQ ID NO: 29709 - DNA, 314 bp, Oryza sativa
  Clone ID: uC-osflM202052d02a1
cccggggggggaatttatcaaaaaagcataggggcaaaaaaatgggatttgaacaaacccctcgaaccagaaacgaaaaccttagattcaggtggggtaacgacaagggggctaaaaccccaaaaaggaaaattttaattggcacaaaaaaaagaagggaaaagcccccagaaagttacaggggggaaggtggctttatgccaagcgcaaaagctaaagggggggccaaaggaacaactgggaaaaaagacacgaggggctccttgttctcaaaggaaaaatggcacgaagggcaataggggcaaacacggggg

SEQ ID NO: 29710 - DNA, 474 bp, Oryza sativa
  Clone ID: uC-osflM202052d03a1
aaaggcaagaatattattcataaatgacgcatgatttttatcaaaacgcttgcaaatgatatcagataagtagagtcaacaagacaaaactgtatctgccaaagcacacctccccaactccacccaattacgccattatttctgggcaaaagcaaacggcttcccattcctccccttcaccagtctcaaaccataaaccccacaacaaatcctcctaagtgacggcatataagatgatgaaaacaaagcaggatactccagagtcgtcatggcgaacttcaagttgacacttctcatgccacagccgctagtcgtgctgggcagcctagtaccggtagtgcgcgggcttgtagggaccctcaactggaacgctgatgtagtcagcctgcgacttggagagcttggtcagcctggcaccaagcttgcccaagtggagggcggccacctttcttgtgaggtgcttgggaagaacgt

SEQ ID NO: 29711 - DNA, 426 bp, Oryza sativa
  Clone ID: uC-osflM202052d04a1
aaaaagaaatgaacatttaaccggaactgaatggatttttggaaacgataagagactgggggcagtttttggtggacatggaataatgggccagcctttttatttgggggggcccacatttttaaacctgcactggataaccctaagggaaaaggttgcactggaaaattccgtaattttgggggaaaaacaggggaagaaaaggaaatgttttttcaccggaatggggggaaattgccaaagaaccttatccaaataataccgaaggggaaaaatttatgttccaacttaattggccgaatgggaaaatgggacccttcaataactggagggggagctaagggttgggattttgcaattaaaagatcacctgtaaaaacaaattgaaggtaagtttggcgggttttaacctgttaaaaaacaggg

SEQ ID NO: 29712 - DNA, 350 bp, Oryza sativa
  Clone ID: uC-osflM202052d05a1
gatggacaagcggatgcattaattcataatcttgggggtttttatttttcaaattaccaccatgcaagtagccgttaaccaccaacccatgaacaattggctatctatccatggatctatctatggatagttcactttagataggatagggcacttgtgcacataggaaggctattgcatcgccattgttgaaggtgacataaagtggaaatatggcggatcaagcgtgctgcatgcctgcggatttgaagtctatgtatgggaaaactgctgagctccggtgtctgagccttggtccctgtcgggttatttccatcgattttttccctacgacattggtcggattaggt

SEQ ID NO: 29713 - DNA, 347 bp, Oryza sativa
  Clone ID: uC-osflM202052d06a1
agaatccaatgggaaaaaaaaagtacactctagtaagtatatcacataaattacaaatacaaatcaacaggaaattttataaccccaaaaaaaataggagaaagaataaagccgatggacatacagagcagcacaacaatatcggtacacggttcaattgatctcgatcaattcggattcggattcggttcaccacttcagttcagtcatcgtgcatacggtatgcatgggcgatgcatttgttcgtcggcgtcgtcgactccttagcttacagggcggagagaatggcgccggccaagacaccggcgggggcgactacccacctggagaccgtagtggaggccgcg

SEQ ID NO: 29714 - DNA, 507 bp, Oryza sativa
  unsure (1)..(507): unsure at all n locations
  Clone ID: uC-osflM202052d07a1
gaaaaaacaacattctattgcccagtttcgcctatctgaatgggattacaagtttacaaccgttgaggcgaaagtgtactatgatatctgcaatttttgtttcttttcccatcagaagaacctgatgctgcattagtcaacttgtgtagttcttttctcatgggatctgaactacaatacaggtgaggagttgccatcggcgaaaggaaagggcaaggaaaaagctttctgaatgtcacattgacatatcagccaagatcccaaccaaaaaggacatcagatactgcctcattatgctttttgtacaaggatacaaggattggttcttcctccctcctctgatcaatcaaaggccaagaagaaccaagctccaggttagaatctcaaagcaaacaatctacctaaaacttccatcatcatcatcatcatctgttggaacattaacctcctctccatgctgctctttcagagnagcccgctattgcaaacaagaaagagctttgccag

SEQ ID NO: 29715 - DNA, 464 bp, Oryza sativa
  Clone ID: uC-osflM202052d08a1
ctcagtatgatcggttcctcagattcactagaatcctcttgttttttggggacaacaccaccacttcgagtacgtcttacacaagtgttcttcaaggaagtatcactgccagttccatcatcatcggattcattctgtgatagcttagattcgtttttattggagcaattcacagatgtactcaacttagctgtttgactctgatgttgccgtcttgtcgacatacctttcttacttgagccacagttatttctggtaagtttctttccagaagacatttttggttgctctagctcagtgtctgaggatgtatctcttgccttctttagggatggtattgcaactggtgactctccactagctttatcaagtcctgattccaatatcctcttcttactggcaacaatcttagcgccaactgataatattgacttcctcacagcggcctttgtctcagatttaac

SEQ ID NO: 29716 - DNA, 463 bp, Oryza sativa
  Clone ID: uC-osflM202052d09a1
gggaggcaatgtttttgaactttttaagaactgtaaaagggtaaaatcatgaagtgtttctatgtacaatggactcagcaatggcgtacaacttttggagaatcacctaagtatgcttatagtacaatcgaccaaccaggatgaataatcctcgtcagctcatacagaatcctcatgctccaaaccaggcttttcaccatccccagcagctttgggcttctgtgctaaaggcggtttcttcccggttgtcgtcgactctttcagacccagataggtgtagacggacatgccaccgagagcgacgatggctccgcaaatgctggtgattccaggatccgagctgaagatcaggtaacctgagagcattatgactatggtcttgaattgccccagcacaacgtgtgacagagctgatgttgcgccaagtgccaaagcgccagaccattggagtaggaagccaaac

SEQ ID NO: 29717 - DNA, 523 bp, Oryza sativa
  unsure (1)..(523): unsure at all n locations
  Clone ID: uC-osflM202052d10a1
aagaagaacagcttaacgttaagggagtcctttggtcatcaaagatgaaaacaaaaggaattcaattctataaatattccagacacacaaattgtagcatggctggtcatgaatgtttgccaaaccaaaaaatgaaccgaagcctaatagttcaaaatgttttgactccaacagggcttcagatcacatcccagtattatcttgtggatagatggtgatcaagtcttgttatatggtgaatccagggcactggggagaaccaaagagtagataatcctatcccaatacgccttagagttagcagctgttagaaagcatagtcgtaaatagcctgtgcgactccatcttcatcattagtggcaccaattatatttgccactgctttggttttctcagacccatttgcaagcgcaacacccaatgatgctagctgtagcatttctatgtcattttttncatccccgatagccattacctcatccggactaatgcaaaggtggtccaaaagaatcttcaccccatt

SEQ ID NO: 29718 - DNA, 523 bp, Oryza sativa
  Clone ID: uC-osflM202052d11a1
aagggaaagtcttcacaactgatttgattcatgcccgagcagttgttacagatatgatctacatggacgaagccctagtaatagaatacgaggatacagcttctgtaatgtaaaaaatgcataacacacagggttatgcttatttattcaaccctctttaatcttcggttttgctataattatacaagccttactccgtatgtaatactatcaaatactgcacactcgatttttgtcacatggcaagaaataactagttccgcagccactcaaagcaacagcagaggccccagcagaatttcgaaggataatctcttatgaaaacatccctattgtagccgacgacgtagaagctgaaacattgcttgcgatgagccattgtgacacggatcacaggcacgacggagatgatgtgcctctcggaaatgaccctcgcggacggtggaactggaagccggctagctacgacttctgaggagaactggttgagctggtacgaaatcgcgaagaatgcagagtgcac

SEQ ID NO: 29719 - DNA, 420 bp, Oryza sativa
  Clone ID: uC-osflM202052d12a1
tcaaggtggacgccatcgcggaggtggacctgtacaaggtggagccatgggacctccccgcccgctcccgcctccgcagccgcgactcccagtggtacttcttcagccgcctcgaccgcaagcacgccaaccgcgcccgcaccaaccgcgccaccgccggcggctactggaagaccaccggcaaggacagggaggtccgcaacggccccaccaccgtcggcatgaagaagaccctcgtcttccacgccggccgcgcccccaagggcgagcgcaccaactgggtcatgcacgagtaccgcctcgacggccaaaccaccatcccaccacaggattcattcgtcgtgtgccgtatcttccagaaagccggcccaggtccacagaacggggctcagtacggagctccttttgttgaggaggagt

SEQ ID NO: 29720 - DNA, 297 bp, Oryza sativa
  Clone ID: uC-osflM202052e01a1
cttcatcaaaacttgcacagtaaaaatggacggatgcactttgacatagcatatgtttcgccattacaggccgttttgcagttcacctacttaaagataagaggcactaatgacaggcatgactcaaaaataaactcaaactagcttttttgtgaaggctaataagaggggatgaaaaatgcttacagaacaaccagtcccaggcccagtttttggataagtagcaacatccccttttgatattttaaaaattgttgaacgcaccaatttctcagctatggacaaattcgttgatcg

SEQ ID NO: 29721 - DNA, 394 bp, Oryza sativa
  Clone ID: uC-osflM202052e02a1
ggaacaagctgcgattaagatggacaggttcagtagttatcctaacaggttcagaagtgcggcatccagcctaataacatccaccccccagctggtacttaaacaaacacgacataaacaagactaccaaaacatccacaagttcaggccataacatagcagccaagcggctgctcagcagaagaacatggagctcctgactttgttatgcaggcgaggcagctcgggcaccggagcgctgcccgccgaggtatggccaccatggtttgacgacgtttccgacattttgttgaacttgatgaactggctgacctgagcagcagcgagatgcgcctagcaaatgggtgcaacgactgaaatggctgtagtgctcctctggtagaaataggaaagg

SEQ ID NO: 29722 - DNA, 479 bp, Oryza sativa
  Clone ID: uC-osflM202052e03a1
gtcaaggccagcagcgactgggtcatgaacagcatgatgaacggcaccgacagctacggcgtcaccaccggcttcggcgccacctcccaccgccgcaccaaggagggcggcgcgctccagagggagctcatcagattcctcaatgccggcgccttcggcaccggcaccgacggccacgttctgccggcggaggcgacgcgcgcggcgatgctcgttcgccattaaccaccctcctccagggtttactcccggcatccgctttgaggatcctcgagggccatcaccaagcctgcttaatgcccaacgtcacgcccttgcctgcccgctccggggcaccatcaccgccttcggtgacttggtcccactgtcctacattgccggcctcatcaccggcccccagaactcccgggccgtcgccccggatggccgcaaggtgaccggcgtccgggcattcaagattgccggcattgagcacggct

SEQ ID NO: 29723 - DNA, 482 bp, Oryza sativa
  Clone ID: uC-osflM202052e04a1
gtagtagaaaacttctttattcaaatctcagcagctatagcaagtgcccatatttaagaggagtacagagtacagacgcatcacaatcagaaaaccaatagggggagtaccatgtggaaatgtacatcaaaactacaaaaatctcatattttgctggcgaactggaggccttccttcttgagctcctctatgttggcaacgggcggctgagttttcgcgaccttggcaatggccttgttctcatcaggtgacccaccctccaggaaggcacccaacaccttgccgtccttgatccagtaggacccgaacttgggcttggcagaggtcgggtcactgtctccgaacaggatggtgtcgccaacgttgtcgacgtagaattgccatcccaggtcgaatgaccgggagtagaagtatggcagatagtcatactccacaacggactcgccggactcttttcccttgattgcctttacagcctgctc

SEQ ID NO: 29724 - DNA, 342 bp, Oryza sativa
  Clone ID: uC-osflM202052e05a1
gaacctgagctcttatgcttcccatgtctctttttgtagtgcgtgccatcactgtcttgagacccatcttaagaactcgactgcgactcactttcccacgagccatgctttttggatgttacatttacattttttatgacaactacactaggttactttttccctgatcggtcaccctttttatgagacttgcgaccatgagaactccctctttcagaactgctaccatcacttccttcgtcaagtacttatgactctttactgtctgaagagtgcttcctcgatgatttccttcccgagtagtgatacctggggtcatccactggaggatatggagggtag

SEQ ID NO: 29725 - DNA, 442 bp, Oryza sativa
  Clone ID: uC-osflM202052e06a1
aaaattattgctttttaacacatgcttcagggcaaacaacagtacgaacactacattctgatgaaacagaaaaattctcaataaaaggagcatttttttccatcccagatgacagaggtaaaagtatgtaattaccacttttaaatggacctaaggcacgttacagtatacacccccatcactcaaaatttaggggtggagactggagacataataatcaaaaaatatgtagtactaaggtgaacattggttgtttggcagaaaaacaatatctatgggcttttccacagagcccttgccaagatatgtttgagcagtttggcaattgtgaacatttgcacacctccaaaatatgcttcaaaagacaaaaaggctgtacgcagtatgaacaggattaactggtaaaggacaattgtgaaaaatcttttgactgagtagacaa

SEQ ID NO: 29726 - DNA, 356 bp, Oryza sativa
  Clone ID: uC-osflM202052e07a1
tttggggttttttttttttttttttttttttttttttttttttttttggttggttgttctttgaaaacccataggagaagtcgtgccaggttgttttgtcaataaaccaagaacagcaaggaggcagttttccccgcaggtacttaaaggctaccgagaccggggggggaaaaagggcattcttggggggttcaaaggggaacgatgacttggccaagccaaaccgaaaccgaggggaaggggagggaacagaaaattggcataaaagagaatgtggaccccggccttgggctcgggggggagggggaacttgaaggggaccggaaacagggggggtccgaaatgggggggcacgg

SEQ ID NO: 29727 - DNA, 491 bp, Oryza sativa
  Clone ID: uC-osflM202052e08a1
agcgaaacatctgttcaactccacagaagcaagcaacaatgacaacagagttctgtctaattgcttgaaatcataaagctcctacaaatccacacttactgaacgtgtggagcccttttttcttaactccctaatgcaagttcgattccgagaacatgacgaaaaccaagcacagctcagcgcatggtaagttggtaactatagccgcatgaagatattcacttcttcctcttctttgggggctgaagtgagtcttcatcatcatcttcctcatcatcctcattgtcctgatcttcctcttcctcatctactccatcatcatcttcaccaccatcatcatcgtcgtcgtcatcctcattgtcatcatcatcgtcatcgtcgtcattaccttcaccacccttctggcctttagggtcttcctcatactcctcaccattttccttaggctcacctcttttcttgtggtatcgatgccttttggattatcatat

SEQ ID NO: 29728 - DNA, 107 bp, Oryza sativa
  Clone ID: uC-osflM202052e09a1
ttttttttttttatttttattatttttttttttttttatttttacttttttttttgcatctttttatttaaatattataaaaacaccaaatagaatatttcttttct

SEQ ID NO: 29729 - DNA, 505 bp, Oryza sativa
  unsure (1)..(505): unsure at all n locations
  Clone ID: uC-osflM202052e10a1
gatgtcaacaatatgtaatttctctttctcatatatgtacatacagtatacaactttgatcgtcaagaaaacagccatcgtgaaaattaagaaacagaaaaaatatatatgcccccggtaatacaaaacaaaacccagttaattgataagcagaagctgtgccagcgaggacgactcttttaacattttccccaatgcactgcagatcaaggcaattaggcaaagctgatcgtcccatgtttccagcctacttctcgattagcttgcgtgcacgttggtttgctcctttcaccctcgagttgagttcatccacatcgccttgcagatcatccagcgctttgttttgcctatcaagctctgaacccatgtcacaagccatgcccttgagctgcccaagcacaccactgagatcatctagggcatcatcctgcttttgtttctccacctgaactttctccatggcgtggtaggctcgcgtanctgcgattagccgacttccactagg

SEQ ID NO: 29730 - DNA, 540 bp, Oryza sativa
  Clone ID: uC-osflM202052e11a1
aaaaaaaaacactgcatttcaacacaagctccagggcaaacaacagcacgaacactacattctgatgaaacagaaaaattctcaataaaaggagcatttttttccatcccagatgacagaggtaaaagtatgtaattaccacttttaaatggacctaaggcacgttacagtatacacccccatcactcaaaatttaggggtggagactggagacataataatcaaaaaatatgtagtactaaggtgaacattgtttgtttggttgtaaaacaatatctatgggcttctccacagagcccttgccaagatatgtatgagcagctcgccaattctgaacatttgcacacctccaaaatatgcttcaaaagacaaaaaggctgtaggcagtatgaacagattaactgctcaagtccacttgtgaaaaatctctttgactgagtagacaaatggtaacaaggccaactggactcaatcaaagaaacaaatggacttgatggatagtaattagtatgaagactaactgagcctctgattttccaa

SEQ ID NO: 29731 - DNA, 473 bp, Oryza sativa
  Clone ID: uC-osflM202052e12a1
aatcagaactgcatctgttcaaacaatcaggaatcccatgtttgatcaaaaagcatttaacattgaaccgtaactgcatgcattcctggtagccatacattgttcagggggttctttagttcgacattgctgaataagaagggtgtaagcaaacattctccgaacattgaaccaaacaccagctctaccagttctctattacacttaaccgtgtcctggaggtaattctggtgctgatgagtggtggatgtctcacatataaagcccttccggtacaccttccttcttcttgaacatgaccttctctttggccttcttgaaatcggcatgtgtcaccttcattctgcgctcccttaaagcgagcaatccggcctccgtacatattgctttgatgtcagcaccagaaaactcatccttggtcatcacaaactcttttaggttaacatcatctgccaatgtcatcttagatgtgt

SEQ ID NO: 29732 - DNA, 392 bp, Oryza sativa
  Clone ID: uC-osflM202052f01a1
aactgaaacgagcagatatgataagaattacattttaaacggctgactcataagcatctcacagacaacacactagaacgatattactgagaacaataaagctatggagtgggaataagatattagcaatggacaactgcagctagaggaaacagggcttctagttcctatatctactgcagggctgcacagaggcttattgcgaagctacacggaaaaacaagctgcaggggacgaggggaacaatgcattattgggagatagctagactgggcagtgtaagaatagatccagtccactgagcgacaagatggctatggagtgcgcgagagctcacaggaacatggcacccaatcagttggcgattgcaatgaactttgagaccttgagtt

SEQ ID NO: 29733 - DNA, 466 bp, Oryza sativa
  Clone ID: uC-osflM202052f02a1
gggattcaacaaatgaattatgtacagaaaattaatatggtagctagttatcaccaacatagcgcagcacagcaaagaccgaaagaaagagcagtcaacaccatagattaaaacataatggccatggattcacgatgttcatagccatatacaggtagcaacgacagaaaactagaacggaaaaaaaagcagttcttgagtctcatagatggctgccatacatagacaggggatagggaacaggtccaatcaccaaggagtttcaggatgcagccttttgcatctaagctaaacataacgatatgctacccccaaggtgccatgcaggtgcctcccaatctccaatagtatttattccttttttttccctgtgtacatgctgcgactagaagacttcgaattcctcaatagaaattgctaacgggcatgtcatcaaagctccagaggtccaagttgctgacaacat

SEQ ID NO: 29734 - DNA, 486 bp, Oryza sativa
  Clone ID: uC-osflM202052f03a1
agtgcaaagtacaatcatgccaattacttagtagttcccaacttcccatcttacaaacggcatcacaacttcacaagcatcattgcatccccgatcttcttcccaactcaaccatgcacagatactgcacttattactttatgattcacaactgtaacaactgctattctgaagaaattctgaacaacggccataccatctcgccaccaaactgaagaagtacagaaggactgacaggagaagccagcagattgtagtgtagtgcttcctcgtctatgaggtgaggatggggggcatgtaatccgacttggcgccgaggacgcgggcccgtgtgtcaggaaagtactccatcccgggcagctcagtcaccacaccatcgctggcgacgccaatggggaagctgaggaggtggccagggaggtcctgctggaggtcgtcgctggagtacatgtcccagtacttttgcgcgaacctggtcaccttctg

SEQ ID NO: 29735 - DNA, 524 bp, Oryza sativa
  Clone ID: uC-osflM202052f04a1
aaaggcaagaatattattcataaatgacgcatgatttttatcaaaacgcttgcaaatgatatcagataagtagagtcaacaagacaaaactgtatctgccaaagcacacctccccaactccacccaattacgccattatttctgggcaaaagcaaacggcttcccattcctccccttcaccagtctcaaaccataaaccccacaacaaatcctcctaagtgacggcatataagatgatgaaaacaaagcaggatactccagagtcgtcatggcgaacttcaagttgacacttctcatgccacagccgctagtcgtgctgggcagcctagtaccggtagtgcgcgggcttgtagggaccctcaactggaacgctgatgtagtcagcctgcgacttggagagcttggtcagcctggcaccaagcttgcccaagtggagggcggccaccttcttcgcgaggtgctttggaagaacgtacaccttcttctcgtacttgccagtgctcttctcctccacagctcaagct

SEQ ID NO: 29736 - DNA, 333 bp, Oryza sativa
  Clone ID: uC-osflM202052f05a1
gctgggtcaaaactgatgatgattgactaaacagtagtatacagactgagttgaggcaaagttgatagactgcaaatctgcaatgggaacaataacattgccaaaaaaaccggcttaaagccaaaatcttacaaataacttgactatactcaaaagtgcaccacctgttgtatcgggaactattccctgttaacaaaatacaaagaagggaagaaacatctatgtcaaaacacaagtcgaaacccccatctccaaataacttgcagatggggaggagtaaaacacaggtttgaacaacaacaacaacacattgatggcatgctgcatgttaca

SEQ ID NO: 29737 - DNA, 474 bp, Oryza sativa
  unsure (1)..(474): unsure at all n locations
  Clone ID: uC-osflM202052f06a1
caaacaaacccaaaagggcacgaggaaactttatgtgtctgctggtagcctggtactcttcaaaggagcgaggcatttttcacataagtgttaaaaggacttacaaatggaaaattgcccttgtctacagaaacaggtgatgaacatggctcacaggcattagccatacaactattacatacacatgacagtacaacagtaagctgacactaatccacggttcacaagatctcagttgctcgctcactaaggaacaaangaaaaaaaaacctcaattgctttggctccccattcctttccctcctccaagcgatgaaagcacatcatctgaatcaaccacaacttgctgcaggtgactaatcagagatccatgttgcaactttttgagcctgtcgcactgatccacgctgtggccagcattttgcatcttttctagctgacaccacaacctctcgatggcagtgtagggaacca

SEQ ID NO: 29738 - DNA, 407 bp, Oryza sativa
  Clone ID: uC-osflM202052f07a1
gggctacaaacaagcgcgagtcttttcttaatcaaatggcagtcgtcctgccgcttcattacattacattacattcctaaacttgctacagaaaacaaaatagctttctcacacgaatccttaataacaaagataaattattttagcacacgatgtagcttattataatttgagcaagcagagcccagtaaacgggcccataaaaccataacagaagccccgggttgatcagcccagcatgacgggcctatcgaagatccagctgaaacgggccatggcgggctcgatgcgggccgccctccggtgggccagctcctccatcctccggatcttgggcgccaacccgcacaggtactcctgcgcgcgtcggccctcgccggagagccccgtcgcgagctccgccaccc

SEQ ID NO: 29739 - DNA, 398 bp, Oryza sativa
  Clone ID: uC-osflM202052f08a1
aaccccgattaaaaaaggtttattatcataaactatttacccaagggggctgaacaacagcaacaaatgttctcaaccaacaatgaaaatacgggcaaggggcacccaacaataaggggcatatttgcccttccatcaggacctatacctggtacgaacaatttcataaatcactcgaaggaaacttttcggggattcgttttaagggaaatgcagaaacttccaaatccgggcatacgaaaactggttttttgggaaagagtcctgggggatatctgcagtctgtttggggagatttgggtttgaaagggcccactggatggcccatattgcaagagggcccatgtaccacaacgaccgggattcatcggcattggtccaagctttaggggtttgaa

SEQ ID NO: 29740 - DNA, 435 bp, Oryza sativa
  Clone ID: uC-osflM202052f09a1
catgtaattacaatgtaatataatttacttgttcataatgcagaaacaatggtgtcaatagatgatattacatgccatagatttccacatctagaacacaaacgaaaactcctaattttctttctgtggtgatatgatattgaattgcttcaaaaattactatatacttttcttttcctaagtcacattcttacataatcaataaggtccaagaatcagttatactccagcagctcgtcctaatcttcttcttagaatcttcactcccatgtatctgcccatcatcatgactgtggcttgcgggttggttcctggtgacctaaataaggtcgacccatcgatcacacgaaggcctgagacaccaatcacacggtattgttggtcaaccaccttgcccacatgggatccgccatggaatgccagatggtgaccact

SEQ ID NO: 29741 - DNA, 421 bp, Oryza sativa
  Clone ID: uC-osflM202052f10a1
gcaaatatacaaaaatctttatttatatataagggggctacaaaagtatacatttaatttaggcgctgttacacttaaatatactggtcatgcacattttgacatcaaggataaattacaacaaaaaagaatcaacaacatttccattcaaaattagaagacccttttgaatgggccttttttttcccgggaccaacaattacaagttaacacatttttcactaaaaaaacaagatcgttaaaaaaaaagaagcgaaagaaaacaaattaaaaagagaagcttcaatcaccagcgctgttggagcgcgcttgctcgttttaacgcaaagggtcgccggccggcggaacccgtgcgcggtgcgcgcgccggcacggtggcgggcggcaagagccatcgatcagatcatgttggagagggagc

SEQ ID NO: 29742 - DNA, 480 bp, Oryza sativa
  Clone ID: uC-osflM202052f11a1
agaataccagtaaagagctgcttaggctttattttgtactttgaaggcactttgtatagccttcacttcagtaagtgctgttctccataccacaatagcacaagaagaattgcttactattaaaaaaactaatggaatggattgtcacaagtaataatgtacaacatatccacatatctattgaagctattaaagacaaaaaaaaaacatttttactacgcagtagccctatagttcctaaaccaaggtcagaaggagaaacaacagtcttcagatagtacttacacctatttaacgccaaggaacttaatcctttgcaaagaacagtgagtctagattcttttccacagaaaggacactacattttagtgatgaagtatgctgcgcaaagagcatcatgtgcggaaatcctctcagtaggattaagaatcaacatgcgatcaattaaatccactgcatgagagtcaagttgtgaaaaat

SEQ ID NO: 29743 - DNA, 463 bp, Oryza sativa
  Clone ID: uC-osflM202052f12a1
gggacaattattgcacactgctgatactgaataatgaatgcactaacacgagtttccaacatattagaacgaacctagcacctaccaaatcaacaaaaacaataaatggcaactaggacagtatttatacaaatcatgcaccccagcaaggaaaggtgcacatagcaacggttttgagcagcagcgctacacaaacaaaagcaatgctaccagggtcccaatttacagagaatgacatcacatcgtcgctggtgtatattaagcagccacataccccaatcaagtacgctcttgttttccttcaaacaaattggcaagcagtagctcaacttgctctggtgtgtgcttgacatattttccgggtgccttgctgttctcgatgagaggcccaaagcgctttaggaaagatctgtatgcaggcaacaggatttcagcaactgcaagtcttagtgactcacgcaac

SEQ ID NO: 29744 - DNA, 407 bp, Oryza sativa
  Clone ID: uC-osflM202052g01a1
gcaagtcatagcatttgctcacaaaatgcacttgaagcaatgtaatccatgaacgttgacaggaaggaagctaacacgcagtaaccagatgcatcggcattcaaaattgattctcacttaacattatgcaatactttaacatggagctacttaaacagatctaccaaatacattacataatgttaagtaactcagttttcctccagtagctgacgaatgatgatccgcacatttcctaccagccagtaggtgccggagcactgccttcctcccatccaggggcggcaggaggtgcaacagcagcagcggcggcaggaggaacagcaactgcatcccacccttctgcagccacaggagctggagcagcaccccattccccagtcggtgcagcagggagggcaggaggc

SEQ ID NO: 29745 - DNA, 433 bp, Oryza sativa
  Clone ID: uC-osflM202052g02a1
ataggaaatagctgcgagttcagttattctcgtccaagcaaaaatagtacagcttaagttcaggacacaggatatgcgcaaaccaaaagtactatttcaagagacatactgatcgaacattcatgaaaagtatgtaacgcttgcagggagtaacaaaattaatttggccttggtgttgcccactcaacacgaaggataagggtatcataaccataaccattgagcttgctgatagccttttcagcgtcctctctgtgaacaaagttgacgaagccgaaccccctgcttgctccagtcttctgatccaccgcaacgtagacacggctaactggaccaaatgtgcggaatagctcaagtaggtcgggttcacgggtgtcctctgatagattggtcacacggacagagttctcatcattcctacgcctcatgtcat

SEQ ID NO: 29746 - DNA, 417 bp, Oryza sativa
  Clone ID: uC-osflM202052g03a1
ggatccaagttgaaattttactgctaggaatttcatcatacagttcgagaccatccaaggttagtggactcaacttttaccaaactacagcacagcagcagccagcgcctccttaccccagatcaaattagtgcaaaacgcgcccaaatttacacacgcacgcacacactttttacaggcaccggcagcattttgccttcaaagatctagaaaagctagtagaatcattagcttacagctgacaggtttgtggttggattggtggccttttttttacagagattgcaaaaaatggggatctggccaccacgaccattactgggagcattgtggattggaatttgggttacaaggagggacaattgaccaaacaaaaagggagggcatggaacatggtggttttttcgaagacctttc

SEQ ID NO: 29747 - DNA, 254 bp, Oryza sativa
  Clone ID: uC-osflM202052g04a1
ggcgaaaaccatgaggcaaatggcttatttcattgcgttcttacattaaccaaatccctagctcactcgtcctcacttatttatttttccacggcaagaaaataatccattttcttccaaaaaagaagataaatttgatacatggtgtgctttgggacaacaatgtattggaagcccacattcactaggataattccgtgtctttttacccaaaaaattattgaaatgcctttggtggcaaaaatggaaagtat

SEQ ID NO: 29748 - DNA, 194 bp, Oryza sativa
  Clone ID: uC-osflM202052g05a1
aggaaagaagaagctcaagaagcacagtgcataccaaatgattcaggtacacaacgaacaagggatgcacctaacaatccgcaagtccaaagcgattgacaatccccaaaaacagaccacatcgaacacgagaaggataggaaagtatatgttgctggaacaggacataaatctacaccacgtagaaaggaaca

SEQ ID NO: 29749 - DNA, 517 bp, Oryza sativa
  Clone ID: uC-osflM202052g06a1
gaggaaccggaatttccacaaaattgtaattaccaaaaaggcagtttcatatctatgggatggaacaacagacagctacagatattctcaagcaaagaactaaagacaattctcaaggtgaagtcaaaatatacatgctacaacaacacaaaaaaaatggcctgcttatttttcttaccactctgctgctttcctcagcaacaacccagggcaggccaaactaagcagcttttgattccacggaagacttatactaactaaatttgcaaggcaaagaacttattgagattgttgaccagacttttccgaggtcgaactctcaggttcctgagacactttgatggccgaaccattcgcagagttctcactggctagagtttcttggagagaaccatttcctgacccaacaacttgagcagttgtttcgaccgtctttgctttcagcattttctccttctcaagctcttgctttgccagtggggagaactgtgagtcaagggaccttacagtacccaac

SEQ ID NO: 29750 - DNA, 421 bp, Oryza sativa
  Clone ID: uC-osflM202052g07a1
gcaagaaacaaatggttcaacttgaactgattgtattgtgtaggatacaaaaacgcgaagtagcatatttacaaagttcatgcatatggcatacagttacagtggcagtagttgcaacatgccacgaatgcctgcctcatcattgtgaaggcaaataattctatccatataatgtaaagctttcttaccagggcacaagtttcgcgatgcatgatgcagatctgtggttctccgggagcgtattccaccaaatcacaaaagaagaacggctcacgaatatatccttccctaaacttccagacatggaccatccgtgagcatcactctcaagcttaactactctatctctcacatcctcgaatgttttgccgttagcaatcttagcctggagttcctcagccattgcccagaagcatgactc

SEQ ID NO: 29751 - DNA, 449 bp, Oryza sativa
  Clone ID: uC-osflM202052g08a1
cgaagaatcaaatattttcggttgctagaaccttggtgattacaacaagggacgaataatcacaaatgtacacacttccagccagccacacatccgcaagaacaatatcgatgtctcatacttcttaacttaatatctatcatacaaaaggtagaccaaagttttatgacccggcattttctccagggttagttgcccgagcattcagcaggggttgcagcgctttcacgacaatgctcatgtttggtcgaaagtccgcttcatactgaacgcataacgccgcaacagttgcaaactttgcgacagctttaggaggatagtcccctccaagtcttgagtcaacacattgcctaaccttgtcttcactaagccttggggtggcccaagtcacaagactctgctgtccccttggaaatgtatggtcaacaggtttccttccggtcaatagc

SEQ ID NO: 29752 - DNA, 482 bp, Oryza sativa
  Clone ID: uC-osflM202052g09a1
aataatcacaaagaatggaacttatttatttccacaagtgtaattcaaaagacacatcactcgtgtcacagccatgagtacagaacttttattaacatagcaccatgtaaaaaggcagttatgctatgcactagacttatttgcaacttcgtcccagccggtcctgtcaccgctcaaagtaataacagatcataatatacagaataacctagcatggctaatcgtgtaggcaaaaaagaatgatttggcattccctgctcagacacaacgaactggggttttctgaatcttcaccaatggtgataaacaatgattattcaagggaaggactcttacgattttacattctagattacatacaacaattcagattcaatcttcctcctcgatgattgatgcgaaagcaaagggtacaaacttgtatccatcaccctcgtaaaacttgttctggaactccacccagtggagcctcagagcatgca

SEQ ID NO: 29753 - DNA, 525 bp, Oryza sativa
  Clone ID: uC-osflM202052g10a1
aaaagtgaattgatgccattttatttgttggagaattgagacttgagagtactattacattcagtagaacagttacaaaattactgaattgcatacagcctgacagaagattattcttcctagttggaactgtaggattaatacgttgtggtagaggaaaatgtgcagtacctgagccaaatgaacaggactggcttgctctatgtacaaaccaggatggaagggtaactggttagttaatttaaacaattaaaagaaaacgaactccaataatgaaaggcgttgatggtgaagtaggtcagccgcctgaatgacatgctggtaatgttgtaaattgcccatctttgaaagcatgaatgaactgctggggtaaggaatgctcggcccaatcgccgtcgctgtttgcatctggaacaagagcattgatttcactagatttagcagttgttatagatgtctctaaagattccttgcttaaataaagttggcagccagagtgttatcaatcgatatagttggacagag

SEQ ID NO: 29754 - DNA, 477 bp, Oryza sativa
  Clone ID: uC-osflM202052g11a1
gctaccatgagatagtttatccccctgtagtactgtacatcagaaattcaccactcaactcaccccctcacccatgcatccagatccatgcatgcaggaaacaattaccacaacacacacagtaagtctgaatctcatcacatccatctctctctctctcctccccccaattcattaacatcttatacatgcatactccacaaaaaaaaaaaaagaagaaacaagaagagaacatcttccatcgcccaatcatcggtttcaccagcctgaactcatcaagctccttgagatgccctggccctgatgaaatcgatcacacgctcagcctgacagcgtctggatgatggtgttgtgccacgggtcagacaggtgctgcagcaggttgtcgaagggccccttctgcgtcacgttgtgctgcaccaggaaccccaagaacgccagcatcgccagcctcccgttggcgagctccttctcctt

SEQ ID NO: 29755 - DNA, 385 bp, Oryza sativa
  Clone ID: uC-osflM202052g12a1
gggccccccaaaaaaaaggggaaaacggtgaaaatttttttaaagggggaggcaaagttttggtgacccggcacaaaaaaccgtaaaaaatgctttttttagaaacaatttcccccaattttggggctttaaaaaaaccccggggtggcccaacccttttaatttttccccaaggttcccccttttttttttcaaagggcccgctttttaaaaattttgggatattaggggcaaaagggggttttttaaggccccaccagttttgggatttgacccacgggggaaatttttgcgttaaacccttgggcttttgtaaaaaatttgggaaggcctttttttttcaaaagaaattttttaaaaaaacccctttttaagggttggtccc

SEQ ID NO: 29756 - DNA, 418 bp, Oryza sativa
  Clone ID: uC-osflM202052h01a1
gggcaaggcgtgggaaacctattcattcattctccctgccagaacggttgaatttccacaatggcgttcagtgcacttgtcaaaatttgcatacgttacaaacaaaataaacaggcagcttgattctgcgcactgttacaaacttgagaaaccgtgaattgtttcatcaccattatttctacccactgcaatcattctcctacctatcgattgactttgtcaaagaaagatgaatctaattacttggagatgagtttgatggtgaactcttagttgcagtagcttccctctctatagtgcccgttgtgtgctccaccaacacatgagccttaggagccttgagcagggaaggatctaccttcttttttgcagacatataccttctgagatctttcttagccatctagagaattgcttg

SEQ ID NO: 29757 - DNA, 419 bp, Oryza sativa
  Clone ID: uC-osflM202052h02a1
gccgtcttccgtcgtgcaccgacgtgcagtgcaggaaccgcgtttacaccctcaagaagaagtacaaggcggagcgcgcccgcatcatgccatccacctggtccttcttccccgagctcgaccgtctcgtcgggaccaccctctgcgcctccgcctccaagaggccctggccgtcgccgtggccggtgccgacggccccttacttcgacatgcccatccattcttccgcggtgaggaagcccccctcgccttcgtcgttgccctatacgccggctgctatggcgttgccgctgcccagctaccgtcgcgggtctacgtttccctgcgtcgttcttatccagcatgaggccgtgggtgcagcacgtgccgcggtgtctgattctgaggactctgaaggccctggcgataacaacaatcac

SEQ ID NO: 29758 - DNA, 476 bp, Oryza sativa
  Clone ID: uC-osflM202052h03a1
aagcaagcatgtgcattgagcttcctctttgcgagaaaatcactgccagattcgagggttttcgtacaacaggaggggaagtgctacagctaaaaagccccccacaaaacacatctttaacaacaacagggccgtatcatcatgatcatcaaacatacatccagctggaagaagaaaataagggggcaaaaaatagaattgaattacagattagcggggtatatagccatcctgtacttcctcgaggagatccaatcaactacgcgttctccagagcacattatcaatctatgctgtcaggtgcgcagcacagctgacatcaacatctaacatctctgaatgaaaggtgacctgctatgtggcgaaacttttttactcctcaaagccatccatcatcgggtgacctccttccgacgaggtgcttttcgatgattgtttccgagttgagccccgcctgttcttggctttctttgcct

SEQ ID NO: 29759 - DNA, 96 bp, Oryza sativa
  Clone ID: uC-osflM202052h04a1
gttcattgtggaacctcaatggcagaaataaacaggcaggaaccgggcataaacaacggcaggagtacaaggcctgcaacaacacagacgccccca

SEQ ID NO: 29760 - DNA, 440 bp, Oryza sativa
  Clone ID: uC-osflM202052h05a1
atgagaaatagcttcatcaatagcgcttttcttattacgcttgtagttaccagcaatccaggagagtatccgtggattcatacaggtgatattatgcatattaaatcaaaactgcgtagcgtggcccaggtttctcaacgggaatagcaacagcttctatatagaactacagattggattcatctcgctgttcgaggacgatgacgcagactggtcgaaagggtttgccacatgatggagttcatatctggctgttcgacgaagatgatgcagactggtcgaaagagtttgccacatgatggctgaggccggtgggaagtggaggcttgttggccggactatcggtctttttgggttcgtcgatgttcttttggcttaggaagcttggctggatggttgaagatagcagccttttccacatcctatcagtgatcttgacc

SEQ ID NO: 29761 - DNA, 499 bp, Oryza sativa
  Clone ID: uC-osflM202052h06a1
gaacacgcataggcatgtgggtagtttaattgaaagccttgggattagcatttggtgtcttcttacaccaaaaataattgcacaacaaaacttacctattcaattacttaatctagtatagttgatcaaataatatcaggtatccctagccctgtagcacactcatggggaatacgtagaagtttaggcattccaagggcctgcctcccttttcgtggaatgaagtatggcatggatattctttggagaagaacacgctgaagccatctcatcctgccacttgattgattatgccataactttccaaaattacaaccactaaactacggccttgggatcattgggttgccatttccccttggcttgataaaaccctgtccatgtccaagaaatacggccacgtctttacgctttcctcatctttcttgctctcctcatatttctgaaccaatgatgtccatagagacttgcactgtgctggtgtacgacttatcccctg

SEQ ID NO: 29762 - DNA, 346 bp, Oryza sativa
  Clone ID: uC-osflM202052h07a1
gggggaacactaggggataactctattgttacagtacaacataacacaagcctcattagtgttctctacttctgatattttgcatcactatgtacattggtcctcttagtctactatgccatactgcacgttgtgtgtaagtacctacaactgatcagcagggccagggattaacttacaaagagagacaacattagcaactacatatgtacatctatattcttgttctttaccacaaacatagagggcttagctcttctatttggtatctggctgaagctttggtgggctcatattaaagctcaccgggggggctatcaacattgcaaattccggacaagcaagg

SEQ ID NO: 29763 - DNA, 311 bp, Oryza sativa
  Clone ID: uC-osflM202052h08a1
aaaaggacaagaccggggatcatcgatcaggcgtagagcatgaacagaaagtcccactacctgcacaaatggaatcttctattgaaaactagaccaaccatccacgctggacacactaagacgcacatgctatacgtgacacgtacgtacatgtactgcaccgtgtgcacacacgcacactttactgcagagacgcgcattgacttcaacctatctagcttagctgaaggcgatgtgccttcttggacagacccatggcagctgagctcacttgacggggccctaacatgcggtcggtggcccattcccag

SEQ ID NO: 29764 - DNA, 483 bp, Oryza sativa
  Clone ID: uC-osflM202052h09a1
cccttgatggggccgtagtggcggaacgggatcagccccccctagaagaagttgggggacctggggcccacgatcagtggcaccgcggtgcttgccatgacgtacttctaggtcactgaccagacaattccttggatataaagattgtacctacacacgctccagcggctccgatgctacagagttcatgtactccctccgctctataatataattatgacgggtactaagattttacttatattgttggaccactcgtattatttaaaagcacttaacactattatgattgttacttactttattatccaacatattttaagcatagcttctttatatgtatataatttttttagatacgacgactagctaaacaatgaataaactcaaaatcctttagaagacggatggagtagcagctgtgactgaccagagaataacatgagtagtcgtaaccttatttctacctgtgagtgcactgtt

SEQ ID NO: 29765 - DNA, 190 bp, Oryza sativa
  Clone ID: uC-osflM202052h10a1
ttttgtgttttttttttttttttgttttttttttcccaaaaaaaggaatggatacgtgttaaaattttttgaatacagggaaacagttattacatcgtgctaggaatccacaaagtaagtcttgtttttatacttatggctcattcacatgtgactaagaattggatgtacaatttttcatattaaaaag

SEQ ID NO: 29766 - DNA, 525 bp, Oryza sativa
  Clone ID: uC-osflM202052h11a1
gataaagatataacaagctttcacttgcataatgtttttccttttttttgcaagtataatagtttttatgtactgtacatacatacgtcaaatgacaagggaaaatcttttttcccgctgacacccctgactaacgaaagaattgttggtctgcttctacaaaaatttacataattaagggctcttggaagaagacgtcaatctcgtcgtctcacgaggaggggctcgcgacggcgcagttcccgtacgccatgctccggccgacgtccaccggcgccgaggggtcgacgccgagctcccgggcgcggttcacgtactccttcttcacgttccccctctgcaactgcagcagccggatcacgctgcggcgcgcgtcgtgccggaacgggcggcccgtccccgtgaacccgtcgatgaggtgcaggtacgcctccaggtcgtggcggcacgccgggccggcgtcggggcggaggcacggcgagttcttgctgtcgatgcgcagttccggcccgacgtgctggtact

SEQ ID NO: 29767 - DNA, 434 bp, Oryza sativa
  Clone ID: uC-osflM202052h12a1
tttttgtgtttttttttcattgtgggagtcaccaaatccctttcaaggtcaaaaggaatagggtccaatattacacctttgacatactcaaatccccgtagcttgttctttgctgcaacagattgcagctttttcaggatatgctctttaaggcctttagacttgcatatttcagcaaaagaacccttgcagccatttgattttgcccacttaatggggttctcttcatggggattaactactgccactaacattgatctgaagctgtccccatatacccagacatctttaacggttggagggaaaacatatactttttccaggtatttaactgcaacatactccccttgtgacaacttgaatatatttttctttcgggcaattaccttcaggattccattgagttcatttttccaatgtcacctgtgtgaaac

SEQ ID NO: 29768 - DNA, 418 bp, Oryza sativa
  Clone ID: uC-osflM202053a01a1
ggagaccaatattgcagtgttttcagcaagtaacaagttcacggactgccggactggccgcacatcacacaaaaagagaactcaattcttccttgaagggcagtaagccaaacaaataggtcactgcaaatccttatttggaaaaaagtggaggggaaaaacatcgatcagcagggccgggcctcctgcatgtaagtacatgtcctggctaacaaacataaaaggcacaacatgttgacctccaaatgttaaaaattgcatcgcttatgaagcggactccttggcaatcttctctgccttggcaatgacctcatcgattcctccaaccatgtagaatgactgctcaggaaggtcatcatacttcccgtccaatacaccctggaaactttgaacgctctccttcagctcaacatacttt

SEQ ID NO: 29769 - DNA, 499 bp, Oryza sativa
  Clone ID: uC-osflM202053a02a1
gacataaacattatcatccattgacaccattgacagcatcatagagtagtgacacataaactaaacatcatagctaaaacatgccgacgaagacgcgacggaacacggtcacatatgtatatgtgcgcgaatcaacggatctatcacacggcacatcatgacacagtagtaataattcaaaacagcaagcagcagcaagcacaccggagcgagcggcggcgggcggtagtagtagcagattcgggtgatgatggattcgattgcggttacttcttgaggctgccgcggacgccgggcttgggcttggaggaggaggcggcggcctcacccgcggcgggagggactgctcacgaaggacatgagacttaccgtccactacacccgggaaactttgaacgctgtccttaaggtgaacatacactccaggagcacggctgaagacttcgacggcgtggaaggggtggctaaggaacccgtgagtcttctagcacgagcgact

SEQ ID NO: 29770 - DNA, 453 bp, Oryza sativa
  Clone ID: uC-osflM202053a03a1
ggtgatatactactgagggtgtcatctatgggaacaacaatttacaaaggtgaagtaccgaacaaaattcaggatagaaataaccaaaaattacatcaaaacaatcgagaggagatactcatggacatatatattatagacacagaacaattaattggtttgaaggacttattaactgggggataaattaattgacgatcaggtagaatcaatactcctactacatgcaacgacgattcgagagggcatctagagcttttgtatgcattacatgcatatcgccggccaatctttctacttgctgtggttgcattctcgttccggtgtgacgacatcaggtaattgaagccgtcgatattgaagcccaattttattccttgaaagagaaagtaaaccgagcaagatgaataaacggggtgacgtacgaaaaaaggaaacggaaaaactcgtgct

SEQ ID NO: 29771 - DNA, 429 bp, Oryza sativa
  Clone ID: uC-osflM202053a04a1
atcatagaaacagtgtatgattctgtcatcaaaagaaaggaaattttacaggatcggtgattgtcccatcgaggaaaagacgaggaactaaccagtcagttagacagttgtttgctgtcaaaacacaaaactgaagggggaaaaatttacagtacaacagaggttaccaaaacaacttgtggtattattagttgtagactctttatcatggttaagaccgttctgatctgggattctcgtcttctggggaagggcatctatacacatgctgttgtactaactccgatcgattctgtgaccttgacgggaattatcaggttttcagctgagcaaccttttttgagaccttattagctgtttcgtccatgctctttgtgagggaatcctcctgatctttgtctggctttggtttttcaccaatacactttg

SEQ ID NO: 29772 - DNA, 226 bp, Oryza sativa
  Clone ID: uC-osflM202053a05a1
cgaaaccgtctatagccaactctaaacaaaagacccccccttacccacaacctagatagaccctggtgataagggggcccgatgtaagcgcttggattgtttcggccctcgctttgggtgattccctcataagaagaatacgcactatccccgcttttcgtgttgctcaaccccctaaaaagagggttgtttgtgaaagcccaaggcttccagaccattgttggtc

SEQ ID NO: 29773 - DNA, 427 bp, Oryza sativa
  Clone ID: uC-osflM202053a06a1
agaaccagcagaaccctcagatatattgaagtggactatctacagttgatccttttccttttatagacaaaactatacagaagaagtacattcagtcactaactagttagtcacagctgatttgggagctgcatgtacgtgcttgaattgggtaggcacccgccaacaatcatccgaccataggcagcataggcactatcagtactgccggaaacactgtaccccctaataagagcgttatatgtgaaaacgttaggcttccagccttttgttagtagctcttcatacattttcccagcttcagcatccttacctgctttgcctaagtggagaattagtgaattataagtgtacaagttcgggacaagatccttcttctgcatctcaatgaatagagacactgcttcctctaatctttttgattttc

SEQ ID NO: 29774 - DNA, 466 bp, Oryza sativa
  Clone ID: uC-osflM202053a07a1
cgagtaataacaatctcgtgtttatttgatctaccttggtatctgtactgttgtacaattatgtacatcgtttcagtcaccaaaacaccagttgcaaaacataaggcggtatggtaccaacttaacctacatatgtacatagtgatagtatgccatccagtcggtacatcatgcctaaacctccccaaacattattttgtgtttactgaagcactagtgattaattagctgcttgctgagctaaaaaaacccggccccaaatcctatcctcttcatcatcttgagaaactcctcgtggtcgacctcgccatcaccgttctcgtcggcggcttcgatcatctccctgacctcgtccagcgtgaagggctcgccggtctcgatggccagccgttggatgtccacgtccgagatcttcccgttgttgcccttgccgatgatcttgaaggccttggtgagctcctccctg

SEQ ID NO: 29775 - DNA, 481 bp, Oryza sativa
  Clone ID: uC-osflM202053a08a1
aatcataagtaactggatatcataagacaatgagcattacacaacaatgtgaaacgacacctcacatatttatgagaaagtacatgtctaatgaagagatctcagaaaacactaagctagcttgaattatcttgtaacagaaaaattgagagcaaaaaactgatttccatatcagaggcagccagaatatgcaagacatccatgtaagcagacaacttttgaattcagcacaaccattcaaagcatatgctcccaagagttgtcacacacctcagaaataaggaggcacattggggtacataggagctctaccacctggtccaggtgacattccaccctcctgaccccggaaaccaggccctggaagagggtagttaccctcaccatacccgccagaaggaagcccacccgaacccttgtgcatgcggtacagtgatgaggctccacccatgcctagaccccataagcccccatcccacca

SEQ ID NO: 29776 - DNA, 453 bp, Oryza sativa
  Clone ID: uC-osflM202053a09a1
ttttggttttttttttttttttttttttttttttttttttttttagaattatttcccctttattttattcgacaccataccaaacgggtcaaccaaaaggaattacaagttcacaacatgagacattgaatggattgggtaaagaggacttattgggcgcgcacataatttggggggaaaccagcaaacttaacgggtttgaacgggaccccttcggacgatatcgcaggggagcctttggaacgccgtggacgaagacccgcccttcttcacgggctttcgggaaacggcccttgttttcgccggctttgcccttgcctttcttcccttgtccgacgcgtggttcattagggaacttaccgggcgcttcagcttcggcgccttcacgaaggtgtccccccttctgtccatgccgagcgggacggggacgcccaggtgggcgaccagggggaa

SEQ ID NO: 29777 - DNA, 322 bp, Oryza sativa
  Clone ID: uC-osflM202053a10a1
agcaatgtaaatacccgcattccacaacagccgaagggcaataatcaggctcagaacaagtttaaaccgaacagaaaatagagagttttaaacgacacagtgcacacagcgagcatatgataataacggtcaatgcaacgagtgccatggccgtgcacaaaactaccacttgaacgaggatcatttcttcttggcggcagccttggtcaccttggcaccggttgggtccttcttctccacgttcttgatgacgccaacagccaccgtttgcctcatgtcacccaccggaaaacgaccaagaggagggtactcagagaaggtc

SEQ ID NO: 29778 - DNA, 468 bp, Oryza sativa
  Clone ID: uC-osflM202053a11a1
aacaattcaaccatcactaactagtattattttgtttaaatatctgaatacagccactaaatcatacccctgaatcaagggtatcaatcacaacacaacctctaaaatgtacaaggttaccaaggatctatatgactaaaatcttaatcaacacacaaagttaaatgcagcgcacaattaaaataagtacactcatatgtttggttgtttgtttcttttcaggggagaatcatctccctcgatcatcggagaaggactctgagcacctactgacgctttgcatcaacagcttccttcagtttcctcccgagggcgaaggcaagaggtggaggcaccgcattgccaatctgcctgtgcttgctctggatgttgcccgcgaactggtagttgtcaggaaagccctgagatcgcgcacattcacggactgtgatgatcctatcctggtcagggtggaagcacatgccaacc

SEQ ID NO: 29779 - DNA, 487 bp, Oryza sativa
  Clone ID: uC-osflM202053a12a1
atgtggtgctcatcccgagcgccggcatgggccacctcgtccccttcggccgcctcgccgtggcgctgtcctccggccacggctgcgacgtctccctcgtcacggtgctccccaccgtgtccaccgcggagtcgaagcacctcgacgcgctgttcgacgcgttcccggcggtgcggcggctcgacttcgagctcgcgccgttcgacgcgtccgagttccccggcgccgacccgttcttcctccggttcgaggccatgcggcggtcggcgccgctcctcggcccgctcctcaccggcgcgggcgcgtcggcgctcgccacggacatcgcgctgacatcagtcgtcatacccgtggcgaaggagcagggcctcccgtgccacatcctcttcaccgcctcagccgcgatgctctccctctgcgcctacttccccacatacctcgacgccaacgctggcggcggcggcggcgtcggcgacgtcgacatccc

SEQ ID NO: 29780 - DNA, 503 bp, Oryza sativa
  Clone ID: uC-osflM202053b01a1
ggttgtcaaactatacaatgatctgacgatgaatacctgcagactacggttacattttttaattctcgtgggctgcagcgttctagagccacgagaaaattcagagttcagaacgggagagaagaacctacagaactttaaacacaaaattctacctacatccgctacaaaccaatgacaaccttacaaagactggccctagcaaagggtttagggaatgcaggagaagcaagatttgcctgatcttccccatctttccagcttgaatcacatccgcgttcatcagcaagctaccggatggtgatgtaccggtttgtaccatgcttagcccagtggtccttgaggtcgaccggcgtcgagagatcatgaccttcggccgctagtcggctcagcagctttgtgaaggcaccgacgttcatcttccgtccccccatgcgagcatgccgcttgatcggcatcactgggagtgggtacatggaaatgttcatggtgcaacatgatga

SEQ ID NO: 29781 - DNA, 492 bp, Oryza sativa
  Clone ID: uC-osflM202053b02a1
aagtaattaaacttcggtatagttatacaaccacgactataccattaccaccagcatgtttttaacatgcttggttttatttatacccaccataagaaatttcaccaacacaaaccatggcatgcataaccagagcccccagacacgacgatacaccagtggcacaagcaaatttagaatcaccacaacaaactaaggtgattactacatacgagttgcacggtgaccaaatcacacgagaaacgagaagaaacacggtcagcttcattgcacgagtcaccaacgtgcaacggccgatcgacaagaacctgcatggcttccacgcactgtctctaccctggctcgcatgcaccgcggccatcagaacagcgcgagcttgatcagggcccccgctgccgcggcggtgacagcgctcgccgccgtcggcgaagaggcggcagagtacgacgggtcaccgttgacgttcacggcgagcttcatgccgctgctgca

SEQ ID NO: 29782 - DNA, 520 bp, Oryza sativa
  unsure (1)..(520): unsure at all n locations
  Clone ID: uC-osflM202053b03a1
gctcttcacctcatcctcgggcatgtattccacggcgccatcggtgatatcgtccatccagccctggaggtctgattcgatctctcttgtgatcgattcatcggatgcacgcactacgaatttgcagatcattgtggttgtttcgtcgcccagatcaacgttccggctgacctcgcttgcaccaaagatcatcatgcccacaaatccaccaaaccaagtcttcgcagcgtagcataactggaacccagctactgttctgatgaaatgagagcaaacttgatggaaaggctttgaagaaatcgacttcaacccactgaggaaaggagagctatcatactgctgagcagcagtggccttgaaaccactgccttcatatgtgtatgtgccagtgcactccaccatggctggcaaacttggccataaccggaaatactcaactggagagcattcatatggcaagagaagttcagcaagagggatcttgtatggctggcagcgcanaacaactggctccccaagc

SEQ ID NO: 29783 - DNA, 428 bp, Oryza sativa
  Clone ID: uC-osflM202053b04a1
aggaaagacacttacacgcaggagtgaatgaacttatgagagaacagggtgaaaaaaaaatataataagatgaccgcccgtttgcgcgacatatcgtaagcaaaaggagccaatgcacccaagtcatgcattacgcacccaactagacaggcctacgagcttacgggtgttttcgtatgacaaagacttattacaacgcgcaaggacctagtatcccggtatcttgcaaaaaaatactaactggtatttctaaaagcttgggaactggtaacacatgcgggtatactttttgacctaataggactcagactctggaggctgctcgcctacgacctgagatcctggtgtttttgaaccgtctgcgacgccaccaccaccagacatatgctgtccaatgtttgaaacaggcttgatggccgcttagatat

SEQ ID NO: 29784 - DNA, 441 bp, Oryza sativa
  Clone ID: uC-osflM202053b06a1
caagcacactggtacgagtgaggattaccatgaaacgaatccataaaacagcattgaccacaatcccgaatgcaaaaacatataaaaacaccaaaattaaacatctccagacatatctttaattcgagctacctaacatggtgccaaaaagtgctaacataaaccaacatctgaaggccaacctgcttgaattctgaaatccagataggcaagctacagaatttgggcccagttactcagcacagaaagttttatgatcattaaggaaacaactagttgcaaacttcttttctcattcctcatcttcctcctcaccgtcaccggcaccggcgattgccttcttctggttcttcctcttcaccctaccaggggggcctccaccgaatgggcttggcagggagaagtcaatgtgcttctcagactcaaccctcaccatgaacg

SEQ ID NO: 29785 - DNA, 530 bp, Oryza sativa
  Clone ID: uC-osflM202053b07a1
atgctgcccattacaatgggagctaaaactatgttcttattgcactctttataatcgatcaaagaatgaaacactggtggtacacatggagattgcttccataacgttacaacaggtgatttatatagacagatacaatgccttgcagcagcaacggccaacggcgacaatggcaacacaacatagcattatcccctactgcattggtaggttttattactgcaaaatttgacctccgcggcgttaccggtagctgcggtatacgggggtgtacatgcagctctctgcgtatttctccagatccctgggttgaggcagccgggtcgccagtccaagttcataggcttttgcagccacgcttgcggcaatgcgagcagaaatctttctgatgtttgtgaagggcgggaagatcgatcccttctcaaagttctcctgagtggcctgatcagctagtgtttccgaggcagctagaagcatatcctcgtgaacacggacagctccagagattacgacaccgaggccgaatccag

SEQ ID NO: 29786 - DNA, 510 bp, Oryza sativa
  Clone ID: uC-osflM202053b08a1
aatgcaactccctctcggagggacctcatttgatatccatttctggcgttcgcttgtacaatgattcaggcagcccaccaaaaatacacagatttagcatagaactcagcagtatccttcctatgtagtacagtactcctatgtgccaacaaattcagcatagaattcagagaaccatatggatgtagtaatcacactaagcggttcatgtggtatgatgttctccaaatgtcaaaatgccaaggacatctgcatcgctctctcttgagtgttttaccagtatcataatatgtcgtaccaatgatggaacaatgtaggcatctgcaatctagtcaaagagaaacctggcaaatctcaccaacgtaaagggctcccccttgctgcaatatttcttaccgtgactttggggaacactgtaatatggaacagatatcttcaacgataaccctgtcatgtagaatacaaagccctttgcaagtttggatttactgtgcagaatcagagtgatta

SEQ ID NO: 29787 - DNA, 516 bp, Oryza sativa
  Clone ID: uC-osflM202053b09a1
ttttgtttttgagcacaaatttacatgttacacccacaccctacacccatgcataataatacatcgtatatacgtacgtacatacatacccctctcgatcacacgcaccatcgatcgtacaaagttgcgtacatacatacgtacacacatatacgcatacgcacgtacatacatacataattaaaaactcgtaattaattaaatacgtagttgatggcatctctaatggaacttgaggctggtgaggatgttgttgtggacgggatcagcgaggtgatcaagcaggttctgcacggggccaaccccggtgaagagcgcctggacggagaagccgaggaaggcgagcatggcgagcctgccattcttgatctccttgagcttgagctccttcatctccgcctcgctcttggtcccgaagccgagcgggttgaagagcgggccgccggggtaggccggctcgccggagccggcgaggtacttctcgaggccgaggaagtactgcttccacatggagcc

SEQ ID NO: 29788 - DNA, 443 bp, Oryza sativa
  Clone ID: uC-osflM202053b10a1
agaaaccaaatacagtcacatatattacacagggcatcatacaatatttatcacctgtagtccaaaattacaccatttatcaccggtcatgcatcgatgattcggcctgaagctagttggaccaacatatttgcgtgcaagcaataacagtaacattattgatttgcatatattctgcacaaatgcagaaacataatattatcccttgtttcaaatataatgcaaaaatggctgctcaaaaagagcatcacccaagagacttttattgttattttcttcatgagatcagggtctgattgctccatctgacgatgataattaattagcgcctcaggctgtgcaggatatattcagcataaagatccatggagtacttgatggcctcctgagcagttgccggtggcaggaaatcgtttacggcgacctctttgttttcattcttc

SEQ ID NO: 29789 - DNA, 413 bp, Oryza sativa
  Clone ID: uC-osflM202053b11a1
ttggtggtttttttttatttttgttttttttttttttttttgttttttttttttttttttttttttttttttttttttttttttttttttttctttttttcaacgaaaacgcggtcgggggggggaaaaaactcccccacagtttgggggggggacacttccccccccgaagggcttaactcaccccctgggggaaaaacctcttaaaaacctgtggtgaaaaaaaaatgtgggaggggtttttttggggggggaaaaaaacatggggagagtttttaaaggcctcgtatgccccctaaaaaaatttttcccccgggtgggggaaaaaaaaaaaaaatgcgggggggggccaacggtctatgtttgacaaagggggttttcccgttgggcaaaggggtctttttttggggggg

SEQ ID NO: 29790 - DNA, 333 bp, Oryza sativa
  Clone ID: uC-osflM202053b12a1
tttggtgttttttgttactggtgtttatctcttttttttttgtttttttttttttttttttttttttcttgtttgcggggagaaactaaaaacggaccccgactttggttctggtctatgtggaaccaaagcaactttctgcggggggccaaacccggggtgcgttttaacccttgtgggcccgtgaaacccgaacccccatttaattttgcccaccttcccattttttaatggcacgcccccccacggtcgagggagaagacccttgcacatctcctggtgggttcaagaggacctatgctagaattggcttcttggccgcagggggggggt

SEQ ID NO: 29791 - DNA, 364 bp, Oryza sativa
  Clone ID: uC-osflM202053c01a1
gtgttgataaacatatataccaacatgcgagaatcagactagatacaagaagaagcgtggatctcaaagtggagtagtatagaaagtatgaactgtatcacgaatgatgcattcaagggtagaacgcattatgaacaagaaactttacccgatttatttccactagatttaaacagatttgcactgcatttacaactggcttcccctatttttggagtgaattaaacgatattcgttattgaacctgttaatggcgatcacataagccagacttatgacacacatatccaagattgtgcttggaaagtataccgacgcttggtggggtgctaatgacttaaatttgcatactatcattatatgg

SEQ ID NO: 29792 - DNA, 487 bp, Oryza sativa
  Clone ID: uC-osflM202053c02a1
aataccaagatcgatcgatcgatgtacaagtggatgcattaattcatcatcttgggtgttcttatattacaaatcaccaccatgcaagtcgccattaaccaccaacccagctttcctaatttaagtagtaatcaacaaaaggatgacctctcctctctccataccctcccagctcgctcgtcatcacaaaactaaacagcgcgcgcgaacgcacaccaacgcatcgatcccgtttgaattgcgcgcgaaagagcttaaattaagaggatgaggagaaggtgtcgaagatggtggtgtggagcgggtcgctgaggtgggtggcccagttgttgaggggccccttgccggtggcggcggcctgcacggcgaagccgaggaaggcgaccatggcgaggcgggcgtgcttgatctccgccagctgcagccgctccttcttttccgggtccgacgccaacccgagcgggtcgaagtaggacccccccgggta

SEQ ID NO: 29793 - DNA, 530 bp, Oryza sativa
  Clone ID: uC-osflM202053c03a1
aagaaacagaagaagtgctcacgcaatcatgcggcaatttccaacgacggagcaacggaagccagagtttttggtcaaccagaaattggatgcagccatcaaagaaaggaacagaacaccaacgcgaaaaagaaagagagaataaaagcatgtgtggattatctgcagggtaatgctagttctacagcatataaatctgaaatctcacttgattttgcaatctacagcagttctcagtttatgtatcaatcagggaagtaatatgaatgacaggtgaacttgtggtggctaccacagggtaatgagctcctctgggaaggtaaccatgccacgaccgagcatacactatgctgtagcctgtagggtcgtgcggtgttagattgcacagtgaaggatgatgaaatgatccatagacactcattccaagcaattatgcagctaagttagtcaatcatatgagatgcaaccgtcacggccagccaatactggacggggagaacatggtaatgacaggcctgcacatgacattg

SEQ ID NO: 29794 - DNA, 523 bp, Oryza sativa
  Clone ID: uC-osflM202053c04a1
gatcacggcgaacttaatttgcacttctgatcataaacactgagagcttatactatacacaaaagggccgaccgagaaagaacacaagcagtgacgtacgcactctgttgctacctgctgaaaaagtgcacacggatcatgcatggagatgcaatagcatcagatacatggcgctaattaagacatggcgcgatttgtttttttgcatcacgataggggccaccagtgggggcaggtactccatgcgtgatgatgaggacgcggtaagacatgaggcagcggatcgtacgggaaggcggcaagaccgaaatccgcgacctttgcttcgaaggcgtcatccaggaggatgttggccgacttgatgtccctatgtatgatcctaggatggcagtcttcgtgcaggtaggtcaaaccacgggctgatccgatggcaatcttcatccgcttgggccaatccatgacggggaggcctcctccgtgcaggtgatggtcgagcgtcttgttggagacgaactcgtagacg

SEQ ID NO: 29795 - DNA, 575 bp, Oryza sativa
  Clone ID: uC-osflM202053c05a1
agcctctttagtgggcgccctttttttttttttttgatataaaataggtttcctcaaatcttattaagagagcattcgcctttacataatattcatataaaccacgatttaagtcatcatgattaaagtcatgcggctatagctccactaccatacaccagcgcttatccaaatatggcattttgtaagtacacgaacaatacctatgatgcaatacaatgtatttgggataacttcatttcccaattactttatacagtactcctaaatgataggctccggcaaactgtactttgtgaagatgccctctcttcctccaacttgacgaacacactaccatcatatatacctctcacactatccttgtgaaaatatccgttcttatcacttgcaagaccataaattagcccccactcctgtataggtgcagccctgtgttttcaaggaaaaggtgtaattaaacttaagtaatcacaggtaaccatttttgttagaaactttaattttgttttaatgaaaaccaagaacttatagcatcaactaagagcatgcattttcttttcatttgatatgga

SEQ ID NO: 29796 - DNA, 456 bp, Oryza sativa
  Clone ID: uC-osflM202053c06a1
agcgcgccgccctttttttttttttacaatgaagcaaacctcatatacaacaaacctttacatcaaagtagacgagatttgtttgtttattcaaaggtactcctatataaaccttactccaataaaaacggaaagtagtatgcatgatagatcctttttacctactaataattgaagtggcatgaatagtttactcggcagcaaccaaccaaccagggagattgattgattgattaatcagcaggcatgataagatgagaaattaagtcgtagtaataatcttgacagcgtccaagatgttcttgccctggagcttgctggagacgacgagcctgacgtagtcctccacgctgatgctacggtagcgcgcctagccgcctcccaccatctcctccagtggtccgtacgttgacccgaacgaggcgttgtggaacgccgtcacggacacccgctcct

SEQ ID NO: 29797 - DNA, 405 bp, Oryza sativa
  Clone ID: uC-osflM202053c07a1
ttttttttttttttttttttttttttttttttttttttttttttttttttttttttttttttttttttttttttttttttttttttttttttttttttttaacaaaaaaaaggggagcgaggtaaaaaaaccccccgcccaaaaggcaaaccaaagaaaatccggggggatccccccccaaaattaaaaaaggccctccccccccaaaaaaaggggggggggaaatatcccccagaagcaggggggcctccaaaaaacccgcccaaaaacaaaggggggggcgaaaaaaacccccaagatgctggccctaaaacaggggcgccccttattttccagaccccagagacgtacgaggggaaacatcccaaaacggctcccttaaaaagggctttatttgcttgcccc

SEQ ID NO: 29798 - DNA, 517 bp, Oryza sativa
  Clone ID: uC-osflM202053c08a1
gacagcaactcaataatctttcgatatttcaccgagggtaatgtatggtaggaaaatcgccagacataacagagccggccagactcaactcaaactcaaccctatgatggtaaactgtttgcgattaacgcctccgcctatgacaatgtttggagataaacgcttccaccaaaaaacgaatgtcggggagtgttctcccctacaagaattattattgttttcaatgttaaaaaggcaaaattcaccagatcccgttagtgcaggaccaggaataaacacttgttcgtcatcattttctgccagtttaggcaccgcccgagccgtacttctttccaaagaagaggatctgcagctggtcatagcctgagagcacaccagcaccagcaatggcacgtaggatgttggcaccagcacccttgaacagtgacttggcaccctcgttcttcaggatctgggagaaagcatccatggagctcttgtacttgacagcctctccagaggtcatcatcatccttct

SEQ ID NO: 29799 - DNA, 528 bp, Oryza sativa
  Clone ID: uC-osflM202053c09a1
gcaaaattggtgatctttcattctcaatatcatgatgggagtacatgtatgtacaatggaattatggcaaaaggaatgatgggctttgcatcattctcatcttgtggcaaacataaacatattactcacattgcaaacaaacagttgccagaacacagcaacacacacaaaaaaaaccattacaacaatatgatcaaacaataaatctaccatgttgtgagtgatcgatcctattattcttctaccaagacagactctacagagttcagaactatactactaaatcgccaatactaactcatccagttctcattgactgcatattcaaccagatccactcttgcatgccttactctggagcatctttccttccatcagcttttgtggaagcaaacagtttgtcagatggaacaacttggtaattccgtgtaagagcacttcttaacttccttctcttgcatgctttgcttgattctgcatcaacctccgcctcatcatcagcaaaattctgatcagagacctctgtac

SEQ ID NO: 29800 - DNA, 511 bp, Oryza sativa
  unsure (1)..(511): unsure at all n locations
  Clone ID: uC-osflM202053c10a1
agccagaattactcctggtagaaaaaatcaatttattcccatgaattagaactaaacctactcacagtcaaagtatacaaaaacattgtacagaggggtctgtaagcattgggagaagctacagaaaacgacctctcatgcctttttctaataacaaagaaagacggaccaaaaattatgaagggatcttcaagtaagttgctagctatacccgttatgtatagaacctgctctgttcttggtctagccatttctgataccacagggcaatatacagaggcaaatctttcttatctatgctccaagcttgccaagaccaaaacaatttagtaccaaaagcaggcacagaaaagtatcagcaatgaaatggcacacatcacagttgtcaaagaatcgctccatcactcttcatcctcagaatctgatcgaacatcctctccaacctgtcctttattggtcaattgtttcattatcattaagcatatgagtttncaccagtaaatatggaaca

SEQ ID NO: 29801 - DNA, 500 bp, Oryza sativa
  Clone ID: uC-osflM202053c11a1
agtaggaaggccatcaaatttactgctcaaattcgcatttgaagcttgtcttttgcatatggggttacaggcttgaggatatacatgggaaaaccttgcagtatgttgcctacatatagcagctgcatggttaacaaactgtacacatctatctgaacatcctgggctgcctaaacaaattctcacaacctgggagtttcagcacacaagcatggaaaccttatagtccaagcttgtggaaaaacctcaattggtcggaatgccatgaattatgagcagaatgcaaagagaccaggatgctactcaatccgacatttgataggattgcgaccatgactcgctcatcatctagttcatacaaccatagggaattgagacgctgggctgtccaattgtgcaaggatgtaatttttcgggacctgctaggggtggcctgaggagggacctgcgctgaggcttgcgactggactgcctgacctcttgctgctgactaggaattg

SEQ ID NO: 29802 - DNA, 475 bp, Oryza sativa
  Clone ID: uC-osflM202053c12a1
gcctgctgagaatttctgtatccactaacactcagattactttcattaaagtattcaatatctccttcgctgcttcctccaatcagactttcacgcacctcactgccaatatcagcagcatcactgctaatgccaacaccaattgacctaactgaaccatgctgatcatcctccacaaatgggtcatcaggatgaggacgttcagaatcattaaggaattttccatttcctaacatgcctaattcactattctgtgaaacgaaaccctgccagactggttctgaatgcatcaaatttagttcttctgggtccaaaagctggccatcatactgagcaatcaaatcattatcaggaattccatgccccattggcccctccgaagtacctatttgtgcaatgttcttcccgtgaaaatattgttcgccagatatgtaagaatcctcctcaacaaatgattggtcatcatcatcatcct

SEQ ID NO: 29803 - DNA, 527 bp, Oryza sativa
  Clone ID: uC-osflM202053d01a1
gggaaaacataataaactcgcatttatacgtgcggaacgtgtcttgcacatgcactattactagtgaagctaaaggtattcgcagatcaattcatctaaagctttgccatgtatatgtggagacacataatgcatttagggtggggagaggacttaaatgtaggattatccccactgacagatacaactgaaaatgaactcaagaaatggagaaagaaaaatattggagggaatttaaggttgatttatttgattatttccatagctgctccattggaagcccgcgctctgcagcaacatccttgaactgcctcatcatttgggtcgccttgatggtagctcttgcattgttgagggggttcttgctcctcagctgtttccccagagcattttcaaccccagccatctccagcacgaccctcacagctccacctgcaattacaccagatccagggcaagcaggccttaacatgaccctggctgttccatagtttgcatatgctctatgcgggaaggtcgaatacttg

SEQ ID NO: 29804 - DNA, 362 bp, Oryza sativa
  unsure (1)..(362): unsure at all n locations
  Clone ID: uC-osflM202053d02a1
cattccgatagatagcaacaagcagttcaaacaccataaccaaagcgaactcaattcatggtaacatcacggacgaagaacacctaacactggatggatggatagagggcttctcgactcgagagagccactggacacgataacgactcgactcgatgataagatgattctgacacggatagctaaggataactggccacgatgggccccaccaatcagttcctccagttcccgccggagtcgccgccgtagccgccgccacggctgccaccgtagccgccgccgccgccgccacggccgccgccgtagccgccgccgccaccgtagccgccctcacggngcccgtagccgccgccgacacc

SEQ ID NO: 29805 - DNA, 504 bp, Oryza sativa
  Clone ID: uC-osflM202053d03a1
gcatatcacatttcatattattagatgggcagaggtaaaatgtcaagctgtaagatgagaccttacagaagttacagttgcggtgctgcagaacaagcagcgacaagagagttgcatgagaaaatttcaaccgaaggagcatcctttgtacaaatctatgagggtttgtagtacttggtcggcacgaacggcatcttggtgacgacggcatcgtaggacttcccacggacgacaaccttgaactctgtcccagccttgtgcaaaccggattttacgtagcccatggcgatgttcttcttcaagcaggggctgaaccctccactggtaacctcaccaatgttctccccggagttgctcacaatctcactatgactccgaggaggcggtccttgcgagaggagaccgacacgcctgatctttgggccttcctggagctgcttgaggatcacatctgctcccaggaagccgccttctgctttcctcctcttgccattgcccatgaga

SEQ ID NO: 29806 - DNA, 498 bp, Oryza sativa
  Clone ID: uC-osflM202053d04a1
ctgaccgggcgatgataatttaaacaattcggacgaggatatatatatatatatatatatatatatatatatatatatatattacaaaatacacgataatcacaaaccacgagttgtccaaagttcagacagttgatttatttacagaagggctatagatatgcccaatacttttatgaaattagcgacaggcacatatactgtagtaagttcagagacaacggggatgggtaccgtacctttcatcctccattggtttatctcagcgaagggattaaccacatgtacctttgtccttccggcctgcgccggacagcgtgaggctctggatgaccgtgggcatgggcgggctcaagagcttagacgagctccttcgtcctgttctccaggttgaatgcgcacaggttgctgtgggagtcaatgaagtagacacaattcgacttcaggttgagatgatcctttccccggtaacagaccgagctgtagtagctgacaaac

SEQ ID NO: 29807 - DNA, 339 bp, Oryza sativa
  Clone ID: uC-osflM202053d05a1
tttgtgggcaaagaataagcacagctgttcatagactatttctttttcttaaggagacgtgctaatcagacttctttcaccataacattggcgtaggcattaacagataacaaatacacttatttattttgaggaagaccatcaaacacataacacttgcatggactataaagctggagagggggggacagggtttacagaactatgggctgggcgcgctgagaatgatagttgaattgtggcgaggaaacaagagcaccaggggcatccggaaaaaaagccttcgaaagggagttttcttgatggagcgggttggacacttgaggggcttgaccacct

SEQ ID NO: 29808 - DNA, 450 bp, Oryza sativa
  Clone ID: uC-osflM202053d06a1
gctgcgagcactctttagtagcgcgcgctttttttttttttttaacattcaaatatggccatttggccattccctcttcaaaagttgtaaaccatttctgggtcccaaaatattacagaagaacatagtacgaactcaacacgagcaatacaaaacttttacaaatcgatcttcttgctgcccccctatgcacaaatcttcagaaatcgctgacgccctctctcagcagttgatgccgcactgcctgacgtcagggcccctggccttgatggtgaagggatcaatcctgacccagagcaaggaaaagatggaggcgagcagcacggaccagatgacaacaatggtgggcgtacggttctgcctccgcatgagccccttgaggaaggggtagaggtgggcgatgacccacaaggtgtacatgagctttccgaagagcgggccccacgcctc

SEQ ID NO: 29809 - DNA, 426 bp, Oryza sativa
  Clone ID: uC-osflM202053d07a1
actgtcaagtttcatcactgaactccatgaagatgcatggcaacagatcaaaaataggattagagcaaaagtgccttcatcaaacttcatcgttaaagaaagcagataacctagcgaatcttacattcccacctatgatcctctttacttacatacatgtcgaactatcctagtgtgtgacgtatacatggctgatggctcaaacatttgctcttgattggaatgcgcagctcttgaaaaattttcgtgcgtcatgtttgcattcaataatcatgagttcatgatcctccaaatctgcaggacctctacatatcctcattcctcaatgattcattgataatatcctcatcgccgtcactgttatcgtcctcgttttgagaggtaaaaatgggagtaaggtaatgctttgccagtaaagcgaaagag

SEQ ID NO: 29810 - DNA, 517 bp, Oryza sativa
  Clone ID: uC-osflM202053d08a1
acaggaaaacaaagggtcctgttctatatacagttgtggagaaatgacagtataccatcacaagcaactgaaaaacataccatcacattttatggtgcagttgtagtgccaacgctgacctatgacagcaacaaaaaaaaaacaaaaaaaaaagtttccaagcatttatgtcttctcacatcgcaaccgcaaaatgctctatacaatctcgacaacaaactcctctctctgacatagtgaactaacacagtgaaggctcatttggctccattctactgtgtcaacagctaaaccatttgggttctgggtaaaattccatgaggtttctcaagctccagttatgaatgatgggaagtaatgctccaaaaccgccaggaaatctctcctgttgttttccatgttgaccggaacgccgagccggccaaccgcctcgaccagttcccccctcagtctctgcggtagcagctgccctcttgcactcgcgcatgcccggtacagcggcaggtacgcgaatagc

SEQ ID NO: 29811 - DNA, 350 bp, Oryza sativa
  Clone ID: uC-osflM202053d09a1
ggtggtggatgcgacggcggctgctgcagggtggatgcgacggtggccggtggccgcggcaggatcgatgcgacgacggctgcgacaggatcgatgcgacgatagccgcggtaggatcgatgcgacggcagccgcggtgggatcgatgcgacgatgggatggcgctatcatggatgcaacggcggcacgacgacgccttggatgcgaaccaccccgacggcatcgggttgtagcttccgtacggcggcggcagacagttgtgtgcggcggggatggcagagtgtagtacacgggcggtggcggcggccggtagtagtctagagttggcatgtccggcggcggcgagctgg

SEQ ID NO: 29812 - DNA, 486 bp, Oryza sativa
  Clone ID: uC-osflM202053d10a1
agaataaccaaaacataggaggtttcatttcttcttctcaaagtagggtagcatctttccttctttcaccattacataagcttaagcaataacagataacaaatcctcctcctcctctaggtaaaatattcaaacacaatacccttataagtacttattattaggaaagtagcgtgcatgggcataaatggcagcggggggcaggttaagaatcacaatgctgagcagcgaggaaacaaaacaccataatgggacagagcaaaagcctccgaaagggagcttttaggcagaaggcttctcccacttgaggggcttcaccacctcccaggtgaagtctgggtcgtcccttccgaagtgaccgtaagccgccgtcttgaggtagcgtccgttgccgcctttcttgaggtcaaggttgatgatgatcatgccaggcctgaagtcgaagttctccttcacaatcttgaggatctccttgtcagggatcct

SEQ ID NO: 29813 - DNA, 400 bp, Oryza sativa
  Clone ID: uC-osflM202053d11a1
accaaattcatctataatatgtccatacaattgaccgattgattatgaaaacatgcttctcagtaaccgagcaaaaaaactctggcattgccattgtgcttcacctcaaacacttatatattttcaggtgaccaaaaattatataacactaccatgtagtagaaagctggagcaggagggacaaagattacagcaattcggttcaagtacacgtaggtgattgcagaattgcagtcaagttaaagcgaaacaggaaaatctggaaaaaaaataatcctcttttttctttctttatggacaggctggatcacacggtgtaagactgctggatggtctcaatgtcgaggcctttgagcttcacaaccgattctacatgccccttgagcgtatgggagctcct

SEQ ID NO: 29814 - DNA, 277 bp, Oryza sativa
  Clone ID: uC-osflM202053d12a1
ttttgggtttttttatttttttttgttttttttttttttttattttttttttttttttttttttttttatttttttttttttattattttataatttttttttttttttaaaaaaaaaacaaaaaagttttttaaaaaaaaaaaggggggaaaaaatgaaaaaaaatggggggcgcaaaatctaaaaaaaaaaaaaatcaccgggggaagtgatgcccccaagaaaaaaaaaaaaaaaggggggggggaggtaatatataaaaaaacataaaaacat

SEQ ID NO: 29815 - DNA, 444 bp, Oryza sativa
  Clone ID: uC-osflM202053e01a1
gtataataacgatacatcattaattcgatcatcccttggatgcggcctgcggcttacattaaatctcgatccaaagaagcaaagatgatgacagacagaaattaattaagctagaaatctcctcgatcgatcacacacacacacacaattaaggtacatacatacatgcactgctgcaactgcaactgcagggtcggtgcgtggctactacaagtgtacacatggtacgttggttggcaccatctcgatcgtgtcgttgtgctcacttgccggggacgaagttggtggcgtatgcccaggcgttgttggcgacggggtcggcgacgtggtcgaagaggttctcgatggggcccttgccggtgacgatggcctggacgaagaagccgaacatggagaacatggcgaggcggccgttcttgagctccttcaccttgagctccgcga

SEQ ID NO: 29816 - DNA, 528 bp, Oryza sativa
  Clone ID: uC-osflM202053e02a1
aatacatgcaaataataatcatagtaaattgtgtgtcatatgtatcttgtgaccaaacagaagctcaaaaatatgaactgaaagttactggaacataagcaactactccatgtgaccgtcgacagtgttctccgtactagtgctccaaaaaaaaacccggttttcggatgctcgagaatcaaaaccatttctatctgatgtcatcccaaatattgctataagatgacagaggaaacccaaatagactactttggtgatgtgctgagctgaagatgaaacatgcaaattaaggggctttggtcttcaaagcatcagttagtgctgtttcttctcagctaacattgggatctttgagagaagcttgtgatcaagcactgcatattgcttcttgagctcgattagggccttctcgcccacgacatcgacttcatcttcgtatttctcatacagcattggcagtgtgtatgccatcaggaaaatggtgtaagacaaagtcaagaagctgaagcagctcccaattatagaaac

SEQ ID NO: 29817 - DNA, 172 bp, Oryza sativa
  Clone ID: uC-osflM202053e03a1
attaattaataaaaaaaaaaggacccaatgggctttataaaaaaaagaccacgagaacactggggaaacaaaacatggaccgaccaaaaagaaaaatcctggaccccaggaaaaggggcaaaaacgggagggtgtcacaacagaattcctggagaaaaaaagaggggcgccc

SEQ ID NO: 29818 - DNA, 453 bp, Oryza sativa
  unsure (1)..(453): unsure at all n locations
  Clone ID: uC-osflM202053e04a1
ggcgcaaccgcctgcgcggctcaggtgctcgcgtggagcatcgcgccgcaaccgccgccaccgcagccgccgccacagcctgaaccgcagccaccggacttggcatgtccaacggtggagctttccatggccacgccgccaccacagcctccgccgcagccgccgccgcagccgccggacttgacatggacagccttggagctttccatgaccatgccgccgccacaaccgccaccacagccgccgccgcagcctgagccgcatccgccggacttgacatggccagccttggaggcttccatgaccatgccaccgccacagccgccgncacagccgccgccgcagcctgagccacagcctgcacacttcgcatggacatcatccttggagctctcgacggccatgggcgccgacccgccgncgncacagncaccaccgcagcccgagccacat

SEQ ID NO: 29819 - DNA, 506 bp, Oryza sativa
  Clone ID: uC-osflM202053e06a1
gaaggatcaagcggccgtggatggtggtgggtgacggtcacgcgctgttcatgctgaagctgttctgcctgttcgcgcgcacgcccacgccggcgccgacgttggcgccgacgttggcaccgacgttggcgccgatgcccgcaccagcgccagcgccggcgccagcgccgacgttggcaccgacgttggcaccgatgccggcgcgagcgccgactcccgcaccagcgccagcaccagcaccagcaccagcgccgacgccggcgccgacgttggcaccgacgttagctccgatgccagcgcgagctccagcgccgactcccgcaccagcgccagcgccagcaccagcaccagcgccgacgccagcgccgacgttcgcaccgacgttagcaccgatgccggcgcgagcgccagtgccgacttctgcgccagcgccagtgccagtaccagcgccgacgcccgtaccagcgccagcaccgacgttagcaccgatgccaacgcgagcttca

SEQ ID NO: 29820 - DNA, 399 bp, Oryza sativa
  Clone ID: uC-osflM202053e07a1
ttttgttgcattaattcatcatgttgggtgttcttatattacaaatcaccaccatgcaagtcgccattaaccaccaacccagctttcctaatttaagtagtaatcaacaaaaggatgacctctcctctctccataccctcccagctcgctcgtcatcacaaaactaaacagcgcgcgcgaacgcacaccaacgcatcgatcccgtttgaattgcgcgcgaaagagcttaaattaagaggatgaggagaaggtgtcgaagatggtggtgtggatgcgggtcgacgaagtgggtggcccatgcccagaggggtctcgtgaccggggtgggcgactggaccgaagaggctatggatggggcccttgccagggacgatggcctgaacgaagaaggctaacatg

SEQ ID NO: 29821 - DNA, 464 bp, Oryza sativa
  Clone ID: uC-osflM202053e08a1
aatggcactgaatcatttttatttcctcatcctttttattcattcctcccagagagacggatccatggaagttttcttgccctcatcaggcaagcagagcacacacacacggtggcagtggaagtgctatgaacaagacgctaatcaacatccagagctaaaacaaacaaggggatcaaaccaaatcccgaaaaaaaaaacacaggggaaagtccacatcttcttctcgtccccaacgcctccgtgtcaccaccacgtcttgcggatttttttttaccctgttctattcgctcaggcgtccacgatctcgccgacgtccttcgacgccaggatcagttccgggtgcgccgtcggcgacgcctggttcttgatcgtgccgtcgatggcgttcggccggccgagcgccttcagcgccaggagcgccgccttctggccggagatcataatggcttcgaacgtcgggc

SEQ ID NO: 29822 - DNA, 457 bp, Oryza sativa
  Clone ID: uC-osflM202053e09a1
agcacttagaacagatataatttcatcaaagaaaaccaatacaacatataacaatattacaataataataaaaaaaatctccttttcccaaaaaaataaaataaaataaaaatctcccatttggggccacatgccatctctcctatatgggcctcatttcttgatccgaaataatcctcataaaccatactaatatttttccccttttccccatacaccattgtaataattatgtcaatggattttctacgtaggcttaatgatcaacccatcataatcttcgctagtgtcaacggattattcaaagaagactggagaaaaagaaatggtgatatgaagaaggaaaaatctgtgtagccatgcatgcgccgtacgtcgctcagtactcctcggaatccggtgcgctggcgccgggtcccggcgcgtcggcggagccggacgacgacggcgatggaga

SEQ ID NO: 29823 - DNA, 378 bp, Oryza sativa
  Clone ID: uC-osflM202053e10a1
attccgatcggagaaacaaccattaagggaaatctaacgttttgagggttaaaaaacaaggacaattcgaacatccacatttttacactttccaaacttactatgcacacattttttttccgggggcattgccgtgataggggaaagtagaaacatcactgtttttaccatgtctaacaggctaactggctattattatctactactatgtacccttgattcacaggattgaaaactgcataaaagcctgatggtttacctagcaggcccgaacctcaacaaaccggtttggggttggatcacaattgttggtaggtttcagagatccaaagagacatgatagccttttgatgatgggcttccggctgactatgactt

SEQ ID NO: 29824 - DNA, 554 bp, Oryza sativa
  Clone ID: uC-osflM202053e11a1
gtgtgaaggatcaaccagccggggttggtggtatcagacggtcacgcgctgttcatgctgaagctgttctgcctgttcgcgcgcacgcccacgccggcgccgacgttggcgccgacgttggcaccgacgttggcgccgatgcccgcaccagcgccagcgccggcgccagcgccgacgttggcaccgacgttggcaccgatgccggcgcgagcgccgactcccgcaccagcgccagcaccagcaccagcaccagcgccgacgccggcgccgacgttggcaccgacgttagctccgatgccagcgcgagctccagcgccgactcccgcaccagcgccagcgccagcaccagcaccagcgccgacgccagcgccgacgttcgcaccgacgttagcaccgatgccggcgcgagcgccagcgccgactcctgcgccagcgccagcgccagcaccagcgccgacgcccgtaccagcgccagcaccgacgttagcaccgatgccaacgcgagctccagcgccgacgccggcgccgacgccagcaccaacgccagcgccgac

SEQ ID NO: 29825 - DNA, 408 bp, Oryza sativa
  Clone ID: uC-osflM202053e12a1
ttttttgtttttttttttttttttgttttttttttttttttttttttttttttttttttttttttaaaatttaatttccaaaagtgaatggtttgtttatttttcctcgtcgagaaaaagagcaaatggccccaggtacacagaagaagggacaagggctcccaaacaaaggcataagccagggggcccaaagacgggagggactcacaatcccggaggggcccccaccccaaactacaaacgagggggcccatttggcccccgccaaccaaaaaggaggcaggaccatccatggggggggcggggaaaccatttggccgaaaacaagaaaacaaaggccaaccataaaacgaatttccaaccggaaagttaaaaaaaaacaaatccaaccccccggggtggggtggg

SEQ ID NO: 29826 - DNA, 514 bp, Oryza sativa
  Clone ID: uC-osflM202053f01a1
ctataaatattccggctgtattttcttcccttgtcgatcatatgttgttgacttatgaccagaagcaatagccaacaagagagtcactaaaggaaggacctattttttatagtagaaagcaaccgtatttctttctacattgaaatatagaagatgtacattgaaatgtgtcaagaagagatgtaggagcaccctcatggagagggatttttagaagttccattgcatggtttcacaagttatgcaatgaccatcctactttcttctagctgtaatatttccaaaactagttacaagaaatgcgaggatgcccattgtcattgatatggtatggtgatgaagagattcacgaaatatgaatgtggagctcattaaacttttgccgcttcagtaggtgcaccggccctctcagcaataatctgcttatagagatctctaatcttcagtcctacgatagtttggaagagaccctgtccattgttgctgcccgggaagtctgcatgctttaacattt

SEQ ID NO: 29827 - DNA, 414 bp, Oryza sativa
  Clone ID: uC-osflM202053f02a1
acctgtaaaaaagctctatatttatgggtcgtaatatatcatatgatgaaccatgtttttattagacatataaaaatatcatgaaattatcctttccctcaatcagggtatccaacgtttcctgtattttcatgtctcgcatctttagaagcctgctccaagttcgcataaaaaaatggccctgaaattgacttcaacaggtgttttgggaattttgcttcaggctccatcttgttccatgcttgccacaacactattgttagatctgcatctcataaccggataagagtacaatatgatccatgcatcccaaaatttatgggaaaccttttagtttctatgaaatcacaacctggaacatggcaggtgcaaagggcttggcattaatcacaaccgcaacataggagcaaacct

SEQ ID NO: 29828 - DNA, 523 bp, Oryza sativa
  Clone ID: uC-osflM202053f03a1
ggtgtagaatgctcttccggtctctttattaaggactattgtctgaacaacagtatttacaagcttttaacatataggagtatctcgctgaaaaacaaaaaaacatgtaggagtagagtaagaacaagaccagaagctcataattatgactagaggccaatgaggtgttaattctggggagatcctaatctgtcctgcaagtttcagcaaagagaaaaagaggatatgcaaaaatcttgtcgtttcagaaacataagctatactgaatttttttttatcttctgggcacaaagggtagctccaagcctaccactctgtcaagatggcgaccaccgatactgctgccagctcccagttaagcttgctgcaatttcagatatcagcatgctccacaggacgatgttgattcggtgtttcttgattctccaggggcatgtactgagccatgatcgcacgaatctctgaatccatgtaactccgtagccgatatttgatacggatatgctccattccagccaagcga

SEQ ID NO: 29829 - DNA, 493 bp, Oryza sativa
  Clone ID: uC-osflM202053f04a1
gaaaggccgaaagatggcaacaacagccattccaattttaaatcgacactgagtccaggttcacatagacatttaactcatctgaagtatttttgaaactgtacattattgtaaaccaggcattttaaagccatacattgcttggggatccaagaacactaacaatacagatttcgggggcagctcaattcgaatttgagccggttcgcacagaagccacgcagattcaaccatccaattcattcgagggactggaacctcgaccgttgaccaagaaattttcgttcgctggattccaggaaataatttcccttcacagcatctgggtctcataacatgaagccacgcttccttcatcactgatatttgatgacattcctttggagtctgacattcatgcctcctcttccttacggaagatattcattgcatcgctgtataaagcaacagaattggagaggacagcaagcacgatcatggttacagccaagat

SEQ ID NO: 29830 - DNA, 504 bp, Oryza sativa
  Clone ID: uC-osflM202053f05a1
agggtcacgttgatttgattaacgatcagaatctctgtataatttccagagtaatagatacagagaatggattacctgagtacagcaacaacgctttcactatgcaggctgcagctgactagctgcaaaagctcgcagcacggggaagtactgagaaaaagaatgggtattgaatggttcaattgcctctacctttgcaaaatgcggacttctagttgagtttcctcctgtacaatggcctcaaaacccatagattgtacaaaggaaaacgaatgtagataccagagtatacaggtgaagaactactgctttgggtccttggctatctagaccctctgtaatatacaattgcattaacgacgtgtaactgggtaacacataacaggcatggtaatatggaagtcaacgcctgttcctggagggggcatagcaaacctttgttgagacggtcagcttctgaaataatcaatgaaattattcgtgtactatgatacagtgccaggc

SEQ ID NO: 29831 - DNA, 365 bp, Oryza sativa
  Clone ID: uC-osflM202053f06a1
aaagggggaacaaccaaaaatttaacaaatcctggaaaaactttttggatgggattttaacattcaggcaactatttggagcagcatgggatcataaaagggggggcccagtaacaagggggcaaaagaaacataactttagctggaaaattgggatataagggaaaattaaaacaaatcattcgcacagccttcagacgcaccataaattccttcttgtcgggcttcttaaagcattaaacaaaagggtccagggtttttaccaaagaatgcctggcctttgggattgaacccttggggaaccaaagggggatgggatttttagtttggacattttggccaatcaggggtctgatgttttagga

SEQ ID NO: 29832 - DNA, 478 bp, Oryza sativa
  Clone ID: uC-osflM202053f07a1
gagctaaagatttattattactgcaaaaattgtagcaatagaatagattatacaaaaagcagatgctgcggtctaattatccacaggcaatgaatccatatatttttctatgaataactatatccttcaacttcaagcatcctatcctaatgccaaccattccatcctgcattacgcaggattctagcttaccaacatgggcagttgggcacgcattccccatttccgcacctccatgcttaggctccctaaggaacaccctctgagagcatgaagagttcaaacacaaacatagttgatcacgctacagttgattgcaacgcttttattattcccctcttccatgtggaagtctctggttcaaacctgagctcccaggtcggccagtagtgaaggttctgttttaaagtaagcacacgaggtttgccattcaaatggacggtccgcaccctaacaaattcaccattttccaatccct

SEQ ID NO: 29833 - DNA, 393 bp, Oryza sativa
  Clone ID: uC-osflM202053f08a1
tttgttgtttttttttttttttgggtttttttggccatgaagagctcatattatattttgaaccatgtttctagcgccagtgtgaactgggaaccaaacaccataagccgtataattctggcatccacaccaaaaaaaaagaggggaatttgggttaccaccaactaactcaaggatgcaatatgcagctaaaagaataggtgggggtcatcgggaagatttggcaaaattggttcagtttgcatttgggcacatgctggccacaacactatatgaagagctggatctaataaccggataagattacgttaaaaaggcttcttctaacaggcaatgggtaacctgggagccgctatgaaataacaacctgtaacatggcaggcagcaaagggc

SEQ ID NO: 29834 - DNA, 518 bp, Oryza sativa
  Clone ID: uC-osflM202053f09a1
gctgaagaaacactagtgaattttcattgaattccaaagttgaaaacacttttggtataacatttgcaaaacaagtatctgtatttttctgacaaaaaaaggctgaaatttcctattgtaacatctccaaacacagcagcaggatagtttcctggcgggaaaagagataacaagagagagcagtagaggtcacttcctctgtgtccttgtgatccaatccaaaacgtggcaacaatcatcatccccacggaacaccctgttctcagaacggtaggtcttgagatcacggctctcgtgcctgcaactctccctcttcatttccagtgaatcaggaaccagccttgcagcacggtcatggtaagcatcacagataaactgcgcaatggcgtcgaaaggctgcgaggcatcaacccactggtaaatcttctcgttgcggaaccatgtcatctgcctctttgagaagtcctggaggcagtctgaaacttggtcaggaactccaagaactcttgtggggagct

SEQ ID NO: 29835 - DNA, 328 bp, Oryza sativa
  Clone ID: uC-osflM202053f10a1
aaaaaaaattttttttttttttaaaaaaaaaaaaaaaaaaaaaaaaaaaaaaaaaaaaaaaaaaaaaaaaaaaaaaaaaaccccaaaaccaaaaaaaaaaaaaaaaaaaaaaaagggggaaaaaaaaaaaaaaaaaacccccccccccccttaaaaaaaaaaagtgtccaacaacaaaaaaaaaaaaaaaattgccaaaaaaaaaaaaaaggggggtccttttccacaaccccccaaaaaaaaaaaaaaaaaaaaaaaaaattttattgggattcctcgaagagggaaaaaaaaaaaaaaacccacgggggaccaccccccggggggg

SEQ ID NO: 29836 - DNA, 448 bp, Oryza sativa
  Clone ID: uC-osflM202053f11a1
gaaatcttactaaatttgattttagtattgctatgaaatttagcactgccaaatttaggaaacacgaggatagaaagagtaagttttggtctgttgcccatgggccggcacgggcccacagcgtacggactacggactacggctgtgaacttgcactggccagtgttatttctcgatctttcagtggagcatcatactacacgcccacacaattgttttgccattttacaacaacacacatcattcgtgtagctcattgactcatgagaatctcagtgctggctcaattattacaggatcacgcacttctggccacgcttgctcgccggcgcggcggagggccctgcactcttcgtcctgctgccgccgtcgtgctccctcttctcctctatcctcttcctcctcttcttggccatcatgcacttgacgaactcctcgtagttgatct

SEQ ID NO: 29837 - DNA, 476 bp, Oryza sativa
  Clone ID: uC-osflM202053f12a1
ttttttgttttttttttttttttttttttttttttttttttttttttttttttttttttttttttttttttttttttttttttttttttttttttttttttttttttttttggggggggaaacccctttgtgtaaggggggggaaaaaaaaaaatgggtgggacacttgggggggcccctcccaaaaaaaatttttttcccccccaaaaaaaaaaatttccccccccggtttatgggattccttaaaaaaaaccccaattccccccccctttgcccaattttaaaactttttttccgaaaaaaaaaaccccggggggcccccttcggggggggggggggaacacccccaaaaacctttttttcccgcgggcccgaaaaaaaaaaaaaccccccggtcgaaaaaagagggggggggggcgcaaaaaagcccctaacttcaggaggggtcctcccctggggttccggggggggggggg

SEQ ID NO: 29838 - DNA, 520 bp, Oryza sativa
  Clone ID: uC-osflM202053g01a1
agataacgctggtcgaattactagtgagttcccattgtcgataattaaacagagaaaaacacacgaatgcaacgctttggtccaggatggcagcttcaggcagcctcaccatccagtgtccaggataggatttcaaaaccagttctcccttgaggaaatgtgatattcttggcgactgagttcttctctcatgcgactgtgttcttctctcatgctaccgactggcttattgcgttcatgtgctttgttcagcttcacatgcatctttggcctcctttaccaagtcctccagttgtttttgtgccataggaataagttgacgggcttcaaccatctcgctgtaggcattcatgaaagatctcttacggatcttcccttcatacttatgtgcatccttcactaacttcgacagctcatcttgtgtaaacatcgcttcctcagctgtagatctttctgtggggtaacatatgatcttaatacccgtagcaagtttcatcaaatcccagtctaaacatttaat

SEQ ID NO: 29839 - DNA, 357 bp, Oryza sativa
  Clone ID: uC-osflM202053g02a1
ttttttgtttttttttttttttttgttttttttttttttttttttttttttttttttttttttttttttttatatttttttttttttttttttttttaatttaattttataaatatttaaaaaaaaataaaaaaaaaataaataaaaaaaaaaaaaaaaaaaaaaaaaaaaaaaaaaaaaaaaaaaaaaaactttttaaaaagaaaaaaaaaaaaaaaaaaaaaaaaagaaaaacaaaaaaaaaaaaagtaaaaaaaacaaaaaaaaaaaaaaaagaaaaaaaaaaaaaacccaaaaaaaaaaacggggtaccaaacaaaaaaaaaaaaatgagaaaacaaactcaaaacaggcagg

SEQ ID NO: 29840 - DNA, 471 bp, Oryza sativa
  unsure (1)..(471): unsure at all n locations
  Clone ID: uC-osflM202053g03a1
atcacaaggagctgcacattctcagaaatgaaaaaccattctgatcaggaggaactccagttacactcgagctgccacaatcgtgtagataacaaccacagacacagggcaagaacaggaggtccaaattataaaaaaaaatgagacacccacaaactactgcaatcaccagaacaagtacagccattgacagtaaactcgtagaaaaccacactaccttgtcaaacaaaaaaaaacaaatcagaatagcaatagtagtacatgtgtcgttcacctacttgctgtttttctttttcagtaagctcccaaacttcttcagaagaggcttgttctttttctgttgctgctgtggttttgtcggggacattgccactttgctggtatcttctgatactgtcccatttggatgctcagtngtggtatcctccttgggctccagttcatctttggaggatacggnttcttggtttc

SEQ ID NO: 29841 - DNA, 514 bp, Oryza sativa
  Clone ID: uC-osflM202053g04a1
gtgttatcagaagttcacttatcagtacgagaattcgaacagagactggtccgagatattcttgccaagctaaaatagacgggcgccatctcaggccttggaaaacataaacatgttatgtagcatgcatatatacacacatcgccggataaatacgctagttaaaagctacggtcttcttctctcggcgtatgcgtccacctcgtcattaggaacgtgacaacaacacgtttaggccgacttcgcgaagccaaccctcatcttgccgtagtcgaacacggtatggtaggcacccatgaaaacgtcacccaggatccagagaggaccacggggaggagggatgtccatggctgtgaatccactgatgcactgggcagcagctccttcaccaaccttcagaatatactcttctggcttcagtgcaaactttttgcctccaatggtgaatgaaatctcaggcatggatgcaaggctgccacagtccacagatgattctcccattggacttgggagc

SEQ ID NO: 29842 - DNA, 412 bp, Oryza sativa
  Clone ID: uC-osflM202053g05a1
aacaatcatggccaacgaggggctaacaacagtttagcacagtacaaaaagtaaacacacataacaggaatatgcaatgcaacggaaccggagtatactgacaaaccaatcattaaccagagaactacttattaaccagctactaatagtcttctccatcgtcgttctcgtcgtctgcaccctcggcgccgacttcctcatagtccttctcaagggcagccaagtcctcacgggcttctgagaattcaccttcttccattccctcaccaacgtaccagtgcacaaacgcacgcttagcatacatcaagtcgaacttgtggtcgatgcgcgagaaaacctcagcaacagcagtgttgttgctgatcatgcacactgcacgctgaaccttagccaggtcaccaccagggacaac

SEQ ID NO: 29843 - DNA, 494 bp, Oryza sativa
  Clone ID: uC-osflM202053g06a1
ggaaagaacatatcgcctaattccgcaaattttacaacgttttttgctgacaaaaaaaaaaaagccttgctatacgaatattacaacagctatttcaaatttctattctgctagtactactcatctctgccatatacagtagtacaggggtcaattcttttttgttcctcctcttttttttcttcttctttcaaaggggtacacaaacatgatgagcctaccatcctgttacttcactgtaacaggacacggaaaaggcccggctgtgcctgcgtatactgaatgccgggctccaggaggtactgctcgacggcggcggtcagcctcgccggagtacgtgtgcttgatattatgatcacctggagacgacggcctgtggatcgagcaatcttccgccggttgttgagctcatagttcagggcgtgtatcgcctcgcttacgtgaagaccacacaggtcaattggggtattttgctcctgaaccaggccttgaaa

SEQ ID NO: 29844 - DNA, 534 bp, Oryza sativa
  Clone ID: uC-osflM202053g07a1
gttttatatacgctgggggaattactagtgagttcccattgtcgataattaaacagagaaaaacacacgaatgcaacgctttggtccaggatggcagcttcaggcagcctcaccatccagtgtccaggataggatttcaaaaccagttctcccttgaggaaatgtgatattcttggcgactgagttcttctctcatgcgactgtgttcttctctcatgctaccgactggcttattgcgttcatgtgctttgttcagcttcacatgcatctttggcctcctttaccaagtcctccagttgtttttgtgccataggaataagttgacgggcttcaaccatctcgctgtaggcattcatgaaagatctcttacggatcttcccttcatacttatgtgcatccttcactaacttcgacagctcatcttgtgtaaacatcgcttcctcagctgtagatctttctgtggggtaacatatgatcttaatacccgtagcaagtttcatcaaatcccagtctaaacatttaatgccagaccgt

SEQ ID NO: 29845 - DNA, 376 bp, Oryza sativa
  Clone ID: uC-osflM202053g08a1
aaaaacaagggttttggggacaaactgaccgttgtttgaaaaaaaacattgttgggggccttagggggccttaaatcagttcacccaaaatcaaaaaaagatagcaggggggacctgcaaaacaggggaaaccagcagcgggcatttgcccattttgatttttttaagggaccaaaggggggcctaacccgtttttaaagaaactcccttgaccttaaaaaaaatcgaagtaaacacctgtttccttggccatgattttaaggggaattttgaagtttttgaaaccccccttcctggggaaatcgggagggacatagcccaaaaggattttttttgaaaacatgtaacctcgccggaaacctgatgccaccaaaaa

SEQ ID NO: 29846 - DNA, 419 bp, Oryza sativa
  Clone ID: uC-osflM202053g09a1
ttttgggtttttttttttttttttgttttttttttttttttttttttttttttttttttttttttttttattctatattcaatatgattgtaattaaaggaaggtccaattttttatagaaaaaagaaacaaaaggggtttggacaaagaaaaatacaaaaacttcaatgaaaagagaaaccaaaaggggccggggcaccctgagggaaagggccctccccaagggccaaaaccctgacggacacgggggggaagggccattctacttacccccagcgggaagatttccaaaactagttacaagaaaggcgaggatgcccaaagccatcgatatgggatggccacgaacacaaacacggaaccgggatgtggagggccctaaactttgggcaaacccaaaggtgggcccggggggggaa

SEQ ID NO: 29847 - DNA, 382 bp, Oryza sativa
  Clone ID: uC-osflM202053g10a1
aaaacgggtaaaaacaccctttttttttcggaacatcttattaatcatttcgttgtcttttttttttttgcaacatcgcttttagcattttaatttggagacgggaacggcccaaactttaatcccgtcaaggggaccggaatgcccaaaaaacgttgcaagggccggggtcggcggggggatgcagggggttatcaatggggccctccccggggaaaacgggctggaaccaaaaccccacgaaggggagaatggggggcccccccgcgagaaaaccttaggggcagaaaaccaggaggggttccggggaaccccgggcccagttgccccaagggaaccacaaccccccggggtagccgagctgcggcacggggttccttcg

SEQ ID NO: 29848 - DNA, 512 bp, Oryza sativa
  Clone ID: uC-osflM202053g11a1
atacctcaagataataactggttgattgcaaagtcaacttacataacaaagcaatcactccataatgtaccactgatatgctaagtaaaattcatggtcttttcagaaagcatttgcacaatcaacaaaattttaacaaataaaagatgatgaatgcaagcttaaaagcatatatgctggtacattactatcaccatattcatcggggtacaatagtcccggtaattagctacataaggaagacatcacaattgtgtaaagggccttcatgccatgatcaaatcattgccgctttagagtgattcagtgtacagtcatccttggagatttgtaaggtatggtcttcaatcaatcttaactgatgagaaaaggtagtggacgaaagagaatgatgtcaggaacccaacagtcccagtagccagcataattgcacgagagacaacgaaagcatattcaatgtagagcgtagcagaaaactggccactcaagctttctggatcaaacaccagtag

SEQ ID NO: 29849 - DNA, 414 bp, Oryza sativa
  unsure (1)..(414): unsure at all n locations
  Clone ID: uC-osflM202053g12a1
ggtccacgtatggacatgatgcaatatataaacgtaggatgacacgtacacacagcggtgtacagagacaagaaaattaacatcgtatgcacgcacggagtgggcagcattaagcttacacagatggaaagagcgatgaccggcgctggattgatctgccccaggtgatgtttgtactgcacctattatgtgaggcttgaagatcaacctgcgagtccaggcattggatcgatgatctncgatgcggtcgggaccaagctaggattaactctgcctaggctggtctttgctgctatcagctgaagagtgctgtaggggaatgccctacggtgacgctagcacttgcctggggatgctctctggacactccttggttgagagactagatggcgtcagcacgggactagaggcacc

SEQ ID NO: 29850 - DNA, 389 bp, Oryza sativa
  Clone ID: uC-osflM202053h01a1
gccggtgacccgcccgtcgccgcggccggctgccacgaccgaccagatggccgccgcgccgtcgaggtgcctcctcgtcaccggcccgccggcgaggtgagggagagtggggaaagggtcgggttcgaggacgtaacgctcgatgtgcgaaccgaaccgctcgactccttcaaggttttcagccgttagtctgatagatggtctactgttgagaggtacaaagtttatatagcttttctggaggctttatcattgccatagctgtaggtcaaggacgacactgatcttttcattattgatgaaatggttaaaatggatctgtttaatacgaaattgttaactgctttaatgaaatttattgaatggaacaatgcattacttgtcacaat

SEQ ID NO: 29851 - DNA, 233 bp, Oryza sativa
  Clone ID: uC-osflM202053h02a1
gaatctgaacaccgattaagctacttctgagttcaatagagccatacagagtaggagcttgaacaaacaattcacggctcatgcaaggaatcaactgaatctacatgcttcacgcaccaccatgactggagcaaaaacaaatcgacgtgaaccccagaaacacgttcttattacagcaggaaggtctggagcacactgaattactttaagtgcacatctgtttgatgatctcc

SEQ ID NO: 29852 - DNA, 440 bp, Oryza sativa
  Clone ID: uC-osflM202053h03a1
ggcttacacttgcccatttacatgtatcaccacatacatatgcaatggcttacactttgcccatttacatgtatccacacatagttgctatcagcacaggcattcgcttctctatgggaaaaaaaaaaccacctatctacttaaaacctgaaaactatcgtaagattaaaaaatggacatctttttacatcttatgctagtttccaaggttttcactatatattttctcgacttatctactggacatcactgcataatacatcttaatgggtacgcccttcaagaacaaggattgattaccatgacccaacttcttgcctgcttggcttgctcctactctcaccacccggagacaatccgcaatctccttttatcgctctcacccatgaatccacctgtatctcagacatgctcgagcattcaaacttcaaaccttgact

SEQ ID NO: 29853 - DNA, 360 bp, Oryza sativa
  Clone ID: uC-osflM202053h04a1
ggggaaagggaaccaaaccattattggcccaagggggaaaaaccatacatagtttcatttgccggcccctgttatgtccattcattccgaaaacaattacctaatggtgggcggacttttcctagcaaaagaaaaagaggccgccccttggaatgacaacctggggtataaagatcaacccgggcataaaaaccagtccttcaaagcacagattaaaaattttttttttagctcccaagggggcaaatataaatgggggcggaccattccctgggggcagggctgctttttatatttgaagaacaaccaccggcagataatccgctggcatctttttaagtttcgggacgaactgggggg

SEQ ID NO: 29854 - DNA, 370 bp, Oryza sativa
  Clone ID: uC-osflM202053h05a1
cactaggaggtggaggtaggtactacttcccgacgaacacctacagaaggaagctggagcacggagcgtacgccttggggggccgtgcgaactctaactccgaccggaagaagaatgcaacaaggatgcgctcgagctaactacgggcggaggaccaagggagcgaggacgtgtgggtaacacgactagcctttagcgtgggaggaggactaggcctagcgcctgatgcatacccacctgatttacaccctccggcagcagaccagtcgaaggggaagagaagacccgtaaacatgagctccatgcttgcgaggccatagttgaaaccggggcacatactccggacagagccgaaagggatgaactcata

SEQ ID NO: 29855 - DNA, 113 bp, Oryza sativa
  Clone ID: uC-osflM202053h06a1
gccctaaattattgaccaaaactttatatgcatgccgttaggaaaggaaaaacagcgaaccctcaatgcttgctttccttaggattgcgaaaccttttgctgccatgtttcca

SEQ ID NO: 29856 - DNA, 116 bp, Oryza sativa
  unsure (1)..(116): unsure at all n locations
  Clone ID: uC-osflM202053h07a1
atgacgctacgtaacttgatcctctgatcggcnncgccctttacccgcccggtggcttagacggctgccgcgaccaaccagatggccgacgcgccgtctaggtgcctactcgtcac

SEQ ID NO: 29857 - DNA, 449 bp, Oryza sativa
  Clone ID: uC-osflM202053h08a1
ttttgttgattcatcagaaaaagagtttattagcaaagaacaggggataaattattccacatgccgacttgatgaatgatactaattatttccagtgttaaatggaattaagttggcgtaaaaaaaattctagctgaaacaacaccagctgaactggcatgccaattggcagtacgctgccttattctatttacttttgaccgggatacccttcggctgttcttgggataattttctatggtttaccattcaactggactttagctagcttctctccgctttcttcggcgccatccaccttaccaggaaatgacctcccactacttgtgacaagttccttgatggttgcttggatgtccttatcgtccaacagcgaatccaatgtcacatgtagccggaatctccaataatgcttcgggttagttgggtcattgattgtttcctctttt

SEQ ID NO: 29858 - DNA, 429 bp, Oryza sativa
  Clone ID: uC-osflM202053h09a1
ttttgtgttgacatgaagaaggggatctttactttatatcatgtacagtccattcctcaaaggatatgtctttcttttttgctttctttcttttgctttttttggggtctttcatgcacaaagcgcaggaagggtacatgagaaacagaagaaataaatgttcttgatcagaacacacaagattgaaatggaaaaggaactactacttcaacagcttaagtatatgagcgctcaaaccagtcactcggtcctgttaaggcctggaccggcattaccagcaaactcattatcaccactatgactactttcattgcccaatgagccaatcacctgatcatgcaacagaagctcgacgctgtaaatgcctgaagctttgctccatgctaaccttcaccatttcagcaagcatattcttagctttcccaccgc

SEQ ID NO: 29859 - DNA, 423 bp, Oryza sativa
  Clone ID: uC-osflM202053h10a1
gcaagcaaaacaatgcattaaatagtgttaagctgttgagcatcttgaaaactactttagtattcctctaacaaaattttccgcagtaacacctgtagaatcatactgtggctgcgaggcaaattctgcttgcacaaaaagaagcctgttaactgggcactaaccatcaagcaccactctacaatgatgaaaaggtttgttcgatccaatcagatagcctccgaatttttttggtcatatcagtgctctttgagaaataagactgggcatttgcaagcatcacagtcgcatcatgtcgaatagcttccagagttctgtagtaattgttctcaagccttatcctaatcacctcaatggaaaactggacaggaaacctgttaatgaaatctgatttctctgcaacactgttcaacttcagaacgc

SEQ ID NO: 29860 - DNA, 479 bp, Oryza sativa
  unsure (1)..(479): unsure at all n locations
  Clone ID: uC-osflM202053h11a1
caatcgaataagaaaaactcttgattattaccactacagaatatgtgtatagaccattgaccctaaataattgaccaaaactttatatgcatgtcgttaggaaaggaaaaacagtgaactctcaatgcttgctatcctcaggtttgcgaagccttttgctgccatgtttccacctgcttcattgacttctctttcctctgttgtaattctttgaattcctcagggctgaatggaggtggcagatcacatgggcctgcatcgttggcagacttaaccatagagtcctccataaacttcctttcacggcctatagcttggcatgccaataactctggacagatctcaatagcttcaggtggtttggtaggcttgaaccgtaggagcttagcatactcagttaacaggtgaaacatgtaatcgtatatatagnccatactaagctcttgttgaatgaagttgcttgcttgctttcctatttt

SEQ ID NO: 29861 - DNA, 402 bp, Oryza sativa
  Clone ID: uC-osflM202053h12a1
ggcaggaggtctatgagaaatgacatccaaaccaaggtaaatcttaaaccaaacataccctgtagaagctcgtaactctagaccctagctctgcccatctgggaatcacctagataacaatgtctcatggtttggacacaactacaatttttcatgtaggtctagacgacacctcatctcataggcatgaccaagtgctctattttaacaagcattgtatacatttacaattgcgattaaaaacacaaaatacaaatgagaaaatgttctcatcatcgtgttgcctattacaacaacattagccatcgctagaaccagaggaggtggtctctagaaccagctaggtttttgtatctcatggcttgagctcaccagattaaggtagatagggggaccatgaga

SEQ ID NO: 29862 - DNA, 460 bp, Oryza sativa
  Clone ID: uC-osflM202054a01a1
gtaacatcatcaacctaaatgatcatatatatatatatatatatagatacaagttttctgcagcaacctgaaagggcactgcaattgacaaaccaggagcagtactctcaaaagaggaagaagatgaatcacactaaacacataaatacaaatccaagggggggtttgaatcaattacataacttcaacgcataaacacccagacgattttcagtattgagtagatgatgccccagtgcattcattcttcactgatgatgatgattcaagtgggtacatatttaggagatgtctcataaactgagcatgttggcgggacttggtgagcataatcagctcaatcgagcatgtccatggatagctggagctgggtgattgttggcaacaaggatgtccttgatgcgatttaacggtcctacagcttggttaattttctcattgctgctgggatacaatttga

SEQ ID NO: 29863 - DNA, 475 bp, Oryza sativa
  Clone ID: uC-osflM202054a02a1
gaaacaatatatcacaaggttcacttggggcattgatagtaccataatacttctagcatccagatatagtaactatgcttaaagttgaacatgaaaggggggaaaagatcagcagatttgagccagcattgctcaactccacaaaagattgcacgccacaaccatttgccaccacataacaactatcagccatgctagaaggctagaactgcccatgcaagtatatattatcaactagacacacacacaaggactcataaccatcctccaaaataaaagtcgagcaaaagtgattaacacggctgctgattcattgcaggtaccttctactaatctagtgcttcttatctttcaaaggacccttgggaatcttcgataggcatttctcttcaaagagggcatagtactttttaaattcaatctcagccttctcaccaaaagcatcaaccttgtcctcatacttctcatacagtac

SEQ ID NO: 29864 - DNA, 304 bp, Oryza sativa
  Clone ID: uC-osflM202054a03a1
attactccttttttttattcttgttcatatattttgttttgggggccgaaaacaagaccccatggggacccaccagaaaatggggggctttaaaaaatcaaccaaaacgccccccaatgggaacccaagcctggggggcccaaaaaaaatggcacggggaaaatgggaccacacccccttttttaaaaacatacctccaaccccgggaaaaaatttgttgaccaccccggaaaccggactttacgggccccccgaccccccgaaaaagggggattgcaatgcccctagaaaaggccacgggggc

SEQ ID NO: 29865 - DNA, 372 bp, Oryza sativa
  Clone ID: uC-osflM202054a04a1
gcatgctcgcctccgtcagctgggagcctcctgtgtttgccgccctcacctttgcggcggagggcttgtccaaactggacgactggaccgacttggcacattcctggcacactgccttcttcagagatcactgcagaagactgaagaaaaccggcaacagaaagccatctatggcgccttcgaggagcacattagacatggaccgacgattgacggaccagattctttttttgggaacaagaaagatccatgcttggattgaggtcgaacaccccttctgtgactgctggtgcttgctcattcattcggaggggttcctgacgctcttgaggagatcggggatgtcgtaagcgagcatgttgtcgacgccct

SEQ ID NO: 29866 - DNA, 330 bp, Oryza sativa
  Clone ID: uC-osflM202054a05a1
gatcagggaaaaccagtccaccctttaaccattttccaactttaataaaaaaattctcgtttccccaaaaaattaaaattaaacaagattttcccatcgggggccacatgccacgtctcctatttgggcctcatttttggacccgaaataacccccataaaccagcctaatttttttccccttttccccataccccattggaataattatgccaagggattttctccgtgggcttaatgatcaacccatcataattttcggtgggggcaacggattattcaaagaagactggagaaaaaaaaatggggatttgaagaaggaaaaatttgg

SEQ ID NO: 29867 - DNA, 204 bp, Oryza sativa
  Clone ID: uC-osflM202054a06a1
cgccctaaaaatttttttggggggcctcttaagccgcgggggctaaacccggcatttcttagcccgtggaaaacttacaggggatccggacgggtggacaaaaaaagaacttcacctttttcaccctagccatgcaatagatgtggccatacaaaataatggactagaaacaggagggcagtgacagaaaggcatgaaagacca

SEQ ID NO: 29868 - DNA, 541 bp, Oryza sativa
  Clone ID: uC-osflM202054a07a1
gcttatacagaaatcacaatttgaacttgataaagattgatagcctatacaaacaaggactaaacttggctactccctttgttctggcacaagaattttgaagcttgctatttttacatccactagaaatgttcaaaatcctgtctactgggtatatctagagttctagacatcaaactgactactttaaataaagaataatgaatacaatatttgactgaagcttctaacatcatacttgtatggacaatctatcttatctagatattacccatgtgttggacttcaaaagcgaacgaagttggctccataaggaaattttagaaccaaagagtcgcacatggacagatttttttgatcctcccctaacaaattccagctcccttgatacaccattttcagcatagctgggttcttcaagaaatggaactgcaactgaaccctcagattcgacattctttagccatcccttgagtaagtagtttataacctaagaaccctatcatgagggcagtgaccagcaggactgatttcgtaatac

SEQ ID NO: 29869 - DNA, 133 bp, Oryza sativa
  Clone ID: uC-osflM202054a08a1
caggtaatacttgattgtagtaccaacgaaaggattaacttcagccacaggattccaagtacaaaatagaaagaaaacgtcggcatatgctgtagcgaacgagaaaccacctcctagatgatcttaggtactg

SEQ ID NO: 29870 - DNA, 453 bp, Oryza sativa
  Clone ID: uC-osflM202054a09a1
tttggtggtttttttttttttggggttttttttttttttttttttttttttttttttttttgaacaacaaaaaaaacggcaaatttcttttcatgagttagatggaagcgcctcacatttccagagacctaaccattttttatactacaccatcaagggatccatagaacttcgcctactcaagagaactttttaaatagggagacatagccggggcagcctttgtacagatcctaaaccccaaccattttaaccaagaggggacctacataggtttaaaccaaactcccaacttaaggtgcaggggccttgggggtctttttcgtggccggtaaccggacggttttgggcttggccttcgcctttgcccgcggaaactttttgggcttggagaccaccttttttttcggtgcctttggtttggtgccaacggggggggcccttttgggtttg

SEQ ID NO: 29871 - DNA, 309 bp, Oryza sativa
  Clone ID: uC-osflM202054a10a1
accggggcggcggcgggcgtgtcccgggaggacgactcgaccgtgctgctggtcgggctgacgacggccagcgccgccgccttgggcagcggcggcggcggggcgtggtggtgggcgtgcgcgaaggcgacggggaagttggtcttggccttgggcccgcggaagtggagcgcggcgctgtcgtaggcgcgcgccgcggcctcggcggtgtcgaaggtgccgagccacacccgcgccttcctggccgggtcgcggatctccgccgcgtacctgccccacgggcgcttcctcacgccggggaacctgggc

SEQ ID NO: 29872 - DNA, 300 bp, Oryza sativa
  Clone ID: uC-osflM202054a11a1
ttttgtgggatcttttcttatcggttggttctttttaagtgaaaaggaatgaccggagcgtacagtttacgcttgacaacttcaaatacaaattacttgaacctgccagccggcgaaattaaacaagttattttgaatcgagcttgattaattacagacaagtgttaaatgagtaaatagcatgaataataacaaccaaattaaggtgtacacacaatagcgttattagtcgccgatgccgtagagcttcctgaggaggactttgaagtcgaagatctcctccggcgagcggaggctgcc

SEQ ID NO: 29873 - DNA, 439 bp, Oryza sativa
  Clone ID: uC-osflM202054a12a1
tttgttggttttttaaaagaggagagggaaaggaagatcattaaggattctatgtttgtacagaatgaactagaatccggagacagtaaccctatcagtttttctgtacatgtgcagtatatatatctgcaccgaccataggatacacttgaatcagaattatagtgatagacttactgtgatgtgcatacagaaaagaatttgatccacatagacatagtggcatatatactggcatgccggaaacccgcgttgaaaaagaaaagcagcttttatgcccccccagagaaagcccttgtaacgctagttaccaatcagagttgagcatgaacaaaaaggggatccaatttcttgccattcagttgttgatatattctcagaactaccacttggctcaactgtcaacttccaaacacaaatatgcttgttccgacacact

SEQ ID NO: 29874 - DNA, 470 bp, Oryza sativa
  Clone ID: uC-osflM202054b01a1
cacagcttacaactgttgtattcagaaaaaaaaaacagtatttcacagcttacaagaaaccatcatttttttttcacggctaatatgagtagccaaagttactaataaacatcatcaatacaacatcaaatgacagcacctctgtactgcaaagcatcctcactctcatcaactatgccaaatctagagaagggttctgaggtgaggcgaaaaaagaaaaaaaaattaccggcccaggtaggatacacaaagtcctcctagatgagataaacaaagtaataacataggccataggctacatcatattcttcttcacttgagaaaaaggaaatccaggacttttccagggatgtatttgcgatggtgatacaaaatgaaacttaggagtggtcatgccatggacatggcctctatggtttcttacttttttcactctgttgttggatggcacaatgctcttcttagcttgg

SEQ ID NO: 29875 - DNA, 515 bp, Oryza sativa
  Clone ID: uC-osflM202054b02a1
gctccaaaattaactttcatacattaatattctcaggtacccgatttctacagtgagacgatgtagtactccacagaagtactcattggcaaacacagacaactacaaacctattatttacataatccgtcatgctgtgtacagatatgccttatcaagcaaacgatattcccactttttctcaagaaagaggaagaaaaggtcaaggtaaaacgtctccaaggttaaccaatactattccaagtgcctgggttcagtcacatcagttctacttatgctcctctgcgagctcgatcctttatcttgtttgaacgccttcttcaagaagaatgccattgcaagctgggccccaaggttagatcggcctcgggatagacaaacaatgctttcgataagcagaagtccacttgcaatcgttgcccgagatgacttcttccctggctgttggcgtgatgaagttcttgcaaaatgtgtaggaacaacatttgctcttgtatttccttgaggatgatgat

SEQ ID NO: 29876 - DNA, 76 bp, Oryza sativa
  Clone ID: uC-osflM202054b04a1
tttgttggttttttaaatttttgtgttttaaattttttttttttttttaaacactttttttttttgaaattttttt

SEQ ID NO: 29877 - DNA, 329 bp, Oryza sativa
  Clone ID: uC-osflM202054b05a1
gtagaatcattctcggtcagggcaatctttatacacttttattagtgggacacatgatgaccattttacatttaaagcactatcatatccaaacatatcatatactttgcccaataagcgtatacttgtgtgccgtcaggtttacagaaatataacttgaaatcgacccatcaatttacaacaaaccaaaaaaaacaaaattcgccctttcatgggcaaataaaggtattttcctgactggacggagcctacaacacccaattctggccgatcgacaataaaaaacaatggatgcatttaccagggacaggccacctgggattgggctt

SEQ ID NO: 29878 - DNA, 498 bp, Oryza sativa
  Clone ID: uC-osflM202054b07a1
ggcagaaaatttttcatccattatttctccatcttgcattccgcaagaagaccgctagttagggggaaaagagtaaaaaaagaccaaaaacgatcacaacacgtcgtcgtactccaacacgtacgtacggtactccactagaacgtaaaacctctctagaagagggaaaccggaccatatatttggtagcactttacaactagggctgttcagatcagccatgtttttttgttttttgttcttccaatcattcatcgaaaatttcctttaaccagagcgccgtttgcaattcccgctccagcgctgatgacgatctctcgttgaatgccgagggggttcctcacactgtgtagttctgctggatcgtgtcgatgtccagccccttcagcttcaccaccgattcgacggggcccttgagagtgttcagctctctcaacctcgcgatctcagctcgtctcttggcttgctcagcgatctcagagagctcgcggtagctgc

SEQ ID NO: 29879 - DNA, 507 bp, Oryza sativa
  Clone ID: uC-osflM202054b08a1
catgctacagatttcacccacatttattcagttaaaacaaaattagggccacgtctagtaagttcaaaggaaatcctgcacctctgaacacatacaaaatgcatctcttcagacaggagatgagattaattacaacattacactgaagcttccagctcagtcagcaatgtacactactagttacacttacggcttcattcattcagtagttcagtgcttgctagaatatatttgtagcctttgtcctataaacagatttatacagcaggaagaaacggatattcagatgtttccctaccaaaacagctactggattcctagcagcacagcattgacagacaataaatagctttcccaatccaatggaaagtgtgataactgaactctgaacaaccaattacacagcttcaactgaggatgtcagctcagatgagcagagacgcgaagagcgccgtcaccatcggtagaatgccggctctcatgacagcagcggcctgagagcctgac

SEQ ID NO: 29880 - DNA, 467 bp, Oryza sativa
  Clone ID: uC-osflM202054b09a1
ggggcgaagcaatgcaccattatcattagtgcttccagcatatctacgacatcatacacaataaatattacagcagagatggccatcttactgctttgtgacttgagagtagggcacggttggatcgctaactcatagtatccctccatttatctagattctagacaacatattgaaaatcaacaaaactatatgatatgcagaaaagtaacaaataaggcatcacctagtataagattacaacatttaggagaaccttgcgaagtcccagcagcaaatctttgtcctggcggactctgctgagtttttgacagaccaaccattgcctgaaaactcaaagcagccagtggtgttgtaccacaagacgacttttatcattttcccattcgtaaatgcagcaccgcagggcacagaagtcaggctccggcaagtatccgtccaccagcagaaaacccatcaagccaagt

SEQ ID NO: 29881 - DNA, 74 bp, Oryza sativa
  Clone ID: uC-osflM202054b10a1
ggggaaaaaaaaataatattttttataaagtgagtgaaaaccaataggggattgtgaaaaatgtaataaaaata

SEQ ID NO: 29882 - DNA, 405 bp, Oryza sativa
  Clone ID: uC-osflM202054b11a1
ggttccttcaagggctagtactagtaaatcttctgtctgtcagattttgtagaatcaggcacgctcagtgcaatcaatatacacttttcttagtgggacgcatgatatacattactcctagttgacagagatggccacaaaaaagaagaaaacaaaatcagatgaaacaaatccaatgcaacaataccctagctaattagaggagtattagactatgattacaagggcctcgaaccagaggcatcaacatctctactacgactatcccagctagattgggtgaaatcagttgtgaaatcttggctaccaaaagccatccgctgaaacagcctgatttctgccgtgtttgccacattgaacatttcgctcttaccaggctgaataccattgcttagatcgacgtca

SEQ ID NO: 29883 - DNA, 177 bp, Oryza sativa
  Clone ID: uC-osflM202054b12a1
tgctgccgccctcaccttttctttggagggctggtccaaactggacgactcgaccgaccttgcacattcctgtgacactgccttcttcagcgatcactgcagaagactgaagaaaactcgcaacaaaacgccctctatacgctactgcgaggagaacacttagacatgggccgacga

SEQ ID NO: 29884 - DNA, 458 bp, Oryza sativa
  Clone ID: uC-osflM202054c01a1
ggagtaattagtagtaggagattaatcattccaaagtagtagtcagcaataccacgacacgaacaaaacaaggtcgatctcttgtcagaatcggcgtccgttttacaagggtcagcgcagcgcagccaaccaaaactcccacaatcccctcccaaaaccgaaccgtttctgtgacctgaactggatcctgtgtccccccaagctttgtacttgtacttgcttttggtgctcttttgtgactcaccattgtcctagctaagctagctaccattctgtccttcccttgactcgtttgactcccttccaattccccttcttccaaattctactttaagaaatacagaaaagaaaagaaaaaataaagagtcctgactttgaaacagtgtaccaagtttgtcttttttccccttttcttaacatgggtggttgtcaggagcaggaatttacatgcatgccac

SEQ ID NO: 29885 - DNA, 435 bp, Oryza sativa
  Clone ID: uC-osflM202054c02a1
ggatggtgcaaacgcagcatgtatgtatatatctttccaccaactcaaacaaggacgtgaagaacgacagtgaagagagctttggattaggatgcatgggatgtgttgacattatattgcagatgagacaaccgatggatggacgacgttacagctgcaatgcatggttggcttggttgacagcacagcacagattttggaattaaaggagatttacgtaatttgtttgtacagaagaagagagtagtaattgattgggggtggaagacgacacaggtagcagctgcatggagtaattaatattctagctatatatggatcgagacgggggacgaattcgattattgagactgggagcagacgatatgatatgatatgatcagtagtcggcggtgggcagctggtcgtgcgggcgctggcccatgaagatgatgt

SEQ ID NO: 29886 - DNA, 410 bp, Oryza sativa
  Clone ID: uC-osflM202054c03a1
gggcttcatttacccaattatttacctgggattgaattattccccgggggcttaaaaaatctatagcccctgggcgggtttttatgaacaggggttaaagaagagagaattaacgggggcccaaaattttaaatgggggcagccagcccatcccagcccagcccagttaagctagcaagctgccacgtcttacggggacgggacggggggaatccccggggagggaatttacccccacttgcggggggcggggatgttgacctcccacggggggtcggaaaaacccgccccctcggggagggggggggcccaggggaacccgaacttcccccgctccgacagggggaacggggagggcatggccccccccatgttgggggaaacccgcccccacccgggggggggggggt

SEQ ID NO: 29887 - DNA, 371 bp, Oryza sativa
  Clone ID: uC-osflM202054c04a1
gggacaaactggtccttgttatcaacaacactccaacagtcatgctgatccaggtagcaatgcatagcggatttacagccaaacccaaacagttctggcataagcacaacgcatgtgccagaatttattcttgttcatagagcggaaaccgcttctttattacattgcactggcattactacataagggttgggctttgcctcctagcacagaacttgggccatttttaatcttcactggagtcccttcaggaagtcggcgttatcaaccaaaaccacttttcagccataagggtcaaggaaaggggcaatctttgggttgagccctggcaggggacctgggtgccgaaaaatcttttcccctagtttttt

SEQ ID NO: 29888 - DNA, 370 bp, Oryza sativa
  Clone ID: uC-osflM202054c05a1
aaacgaacacttttttttcagccaatgcaaaacttatacataaaccaataaaatacgcgtctagtgcatcgttatcgacatctggtaatggtggtggttgttgttacctaaaaaaagattaagacaaactgggaaatagtggcgataatgtttgacgatgttgcccgtccatagattgggcaagtgtatgtgtgttcgtcgatgcgcccactcaaagcctgttactacaatctcttatggtcagcagcattcagcgacgggtgaggcgagtccagcgttccaagctcggcacagaaaatttacgcccggtggcagccgagatgtgttctgtggttggatgatctggaggggcaaagcaagaggggctcac

SEQ ID NO: 29889 - DNA, 351 bp, Oryza sativa
  Clone ID: uC-osflM202054c06a1
ggggtagaaaacttctttattcaaatctcagcagctatagcaagtgcccatatttaagaggagtacagagtacagacgcatcacaatcagaaaaccaatagggggagtaccatgtggaaatgtacatcaaaactacaaaaatctcatattttgctggcgaactggaggccttccttcttgagctcctctatgttggcaacgggcggctgagttttcgcgaccttggcaatggccttgttctcatcaggtgacccaccctccaggaaggcacccaacaccttgccgtccttgatccagtaggacccgaacttgggcttggcagaggtcgggtcactgtctccgaacaggatg

SEQ ID NO: 29890 - DNA, 371 bp, Oryza sativa
  Clone ID: uC-osflM202054c07a1
cgataaggaatgaaacttttcagatggtcatggtgcacaaaacagaaccatcatgctcaaaaatcatgatgccaatagttcaccgttacagaacaagacgaagaggttgataagaaatgaggttcaatcgttccagcacataaatactacagagaaacgaggttcacatcattctagcacgtagatccgagatgcaatgtcttggacgagccaatcgaaaccttgaagaaggccctccccggtgtgcgcgctgcagcctacgatctgccagtgccggcttccgtccatcgtttccaaattgagtaccttagcaatttcagaaggtttgagagcgccttgaatatcttgcttatttgcaaacaccagcaatg

SEQ ID NO: 29891 - DNA, 446 bp, Oryza sativa
  Clone ID: uC-osflM202054c08a1
tttgtttttttttttttttttttttttttttttttttttttttttttttttttttttttttttttttttttttttggaacggaaccggggggataaattattattacgccccccaaaattcgatatcccaaaagggccgggaaaaaaactcccggtcaacaaaaccggatggatctcctccccctccttccaaaacaaccaactggaaaaggggggagggacaaaatccgggaaatctcaaccaggaaggaacccgggagaggaaaaaaaaaaaccccttttttggaaaatgcccccaggatgagaagtttgctcgccggaattgccgttaaaattaaacaaggctgccacccttggtgggggagaagggcttgccaagcttggaaacgttaagcccggcccttgactggaaggtgggaaagaacttgggtttaaacaatttgccc

SEQ ID NO: 29892 - DNA, 504 bp, Oryza sativa
  Clone ID: uC-osflM202054c09a1
aaaattaatccttgcattgacttccatataataaaatttacaaattaaattacaaaaccaaataatgccacgatcgaacagtacacgaggagagacaagctagagactggtttttttttcagtacttagtaacgtttattcccataccccaagcacgtacaaacacagtataccgtatacgtaggtaggtatacgtaggtacgtacatatatacggaagacggcgacagagttcgtgtattttcatcgaacaatatacgtttttgcagccaaattagttcacgtataaagttgaccagcaaccgcgcatatactggtgtactgtaccgatcgatcgacggaccggacgaacactcagaccgcgatagagtatttgtcccggttgagctcgtcggcggcctcgacgccgacggcggtgatgacggcggcgtcggcggcgcgggcggacatgaggtgctcctgcacgcgcgccgtcatgccgttgaggccggtctgcaggcgcgcg

SEQ ID NO: 29893 - DNA, 370 bp, Oryza sativa
  Clone ID: uC-osflM202054c10a1
atcaaaaagcttacattattcacctgaaaagttttgggtccatatatcatacccacatgcaatactttatatcagggtaaggcgagcccatatgggataaaatcaactgttgttgctgttgttgttgcaacagtcttatgaaatacccatctgaagtaaaaggatagttttaacaaataattacagttttaccaaaaatgataagcccgggtgcatacctcggccagtttcctcggagaactatagaccttccgttgctaccaaatgaacatttcttgtaaaactgaactgtaaatttgcggacaggactgtgcaatactgtgcacccccagtgcctgtcaggatcagagcagccacaaacccataaact

SEQ ID NO: 29894 - DNA, 297 bp, Oryza sativa
  Clone ID: uC-osflM202054c11a1
ggggccccaaacattgggctaaaaaaaaccattcagagattcaaccccccgggtggaccattgggggttaatcaccccccccccaaggcccagggttggcatttggcccttgctgaccggggaccgaaggggcatttttggataaaaacccccttacctggggaccggcgttttttcagggggattttaagggggtttgggcaaaatactgccaaatgatgtaagatgccgggaggggcccattgccacccgtgatagcccaggtttttcaggatctggggggggggaccaaacccc

SEQ ID NO: 29895 - DNA, 355 bp, Oryza sativa
  Clone ID: uC-osflM202054c12a1
ggacagaagattcatttttccaattgggcactaaccacatgttacaaagggctaagagaatagagatgggatcgatccacgatacagaaggacaaatcttgtttcatagtaagacacataactacacatttttttgcaaatggcatcgactcgtttattattattatctggtaagaggacacagcaatttgacatagtaaaacgtaatgaaaagcactataggatcgatcaaacaggaacactccttattcctacctcaaggaaacaccgatggttaacttgagcccaccttttttgtgacaggcacaatgtattaggttctagggaataatgcaaccccaattttccaagaacc

SEQ ID NO: 29896 - DNA, 396 bp, Oryza sativa
  Clone ID: uC-osflM202054d02a1
accaacaaatttccctttgggaaacgaattttaaagggccccaacccggggtgggttaaccggaaaaaccaaaggagggggaaaaccttggggttggggggtttaaccccacccgggttttaccctaaataaccggcccaacccttttaaaaagggggtaatggaaacggggtctaaaacgggggagggggggggggaaaaaaaggggggcccccccccggggggggggggggcccccccaaaagggttggggggcccccaacccaacccgggtaaggggggggggttacccccccccccccgggattgggggggccaaccggatgcccctggggaagaaggggccccccctggggggggaggggccaaggggggggtcccccaaagggccccccg

SEQ ID NO: 29897 - DNA, 514 bp, Oryza sativa
  Clone ID: uC-osflM202054d03a1
aaaaggacaaatcaattccattgcacaccaagatgaactgccacaaagccctacagcaaaagccactaaatttggtctatacaaaagccagcacatagccataccacacttgacaccattgagcacatcacatattggccaccataacacacagcccaacagacagctatacaaaataagtgcacatagcacatattggcatggtgccatacagtcaggttaaaggggcatgcttgcatccagcagcagccttcttgccaacatatacaaaagccaaaacttaatgtatctctgagtgaccacagatgctccagatcttgtaggtgtggacctgcaaaatgtgaacatgccaaacaaaacctgctttcaggtcagtttgggttacaaatttgaatttacacattttagttgtaaaagaagtacaactttgaacttaaacatgtgctgctgattcttgtgtcagacaatgctttctaggcaaaacgcatatccattcaaaacgggcgtaattcac

SEQ ID NO: 29898 - DNA, 365 bp, Oryza sativa
  Clone ID: uC-osflM202054d04a1
ggtggggtaatatctcttttttttttactcaacactttcatttagtttgttctttgagaagaaaaacgggcaaacaagtcacaccaacggggggggaaccccaatttaaccccaaattagaagggcacaccgaacccttagctaaaatacccgcgccaagcggaccggccagacccacccttgtcaagacacggacttgcaagattcataaggacggtctctggccacaaaaattaaggcccggagaaaaccatcacaccccttggggggggaccacctttaggacaaagtactttgcgaggaatcagggccaaaccttgggggtggccttcccgggaaggaaaaaccctaatggcccctaaaaa

SEQ ID NO: 29899 - DNA, 274 bp, Oryza sativa
  Clone ID: uC-osflM202054d05a1
attcgacaccataccaaacggatcaaccaacaggaatcacaagttcacaacatgagacatcgaatggattgagtaaagaggactcattgcgcgcgcacataatctgcggtgaaaccagcaaacttaacggatttgaacggcaccccttcggacgatatcgtcggtgagcctctggaacgccgtggacgacgacccgtccttctccacggtctttcggcaaacggtccttgtttccgccgcctttggcctcgccttcctccccttgttcgacgcg

SEQ ID NO: 29900 - DNA, 417 bp, Oryza sativa
  Clone ID: uC-osflM202054d06a1
ggattctaccgggaaaccactaccagaagaccgaacgatacataacacacctaatttcactgttctacgtctatttttcgaagtgtttgcaagtatgagcggcaacgggaatcatcggaacctacaaatgtacaggttatgtacattaaccaaacatgcacacagagattagtgcacagctcgtagagaaaggggatcagatgtaatctgacagaactgatgctgagacccgcttcaaggatgaggacactttggagatgtctgaatcggtgtggccggctgacatgaagaggcgtatttcgacgggaagtttgcacctatacaaaggtgaccgctttgacgccacgataaaaactgaatcttccttcaataccctttgagcaatagtttcaagaagaactatatcggtgtttgatg

SEQ ID NO: 29901 - DNA, 79 bp, Oryza sativa
  Clone ID: uC-osflM202054d07a1
atcattactttttttattttttttttatgtatattttttatttttttttttttaacaacaaaaccgctatttgaccaaa

SEQ ID NO: 29902 - DNA, 440 bp, Oryza sativa
  Clone ID: uC-osflM202054d08a1
aacaaatgcaaagagggtacaccttttctgaatattggccaagagtcagctttgcacatgatttttcttatgtacaaaaggtaaaacacattttttcagagcaagggcaagaagaaccagtgatggtactggatcatcgataaattcctctggtttttcaggattcgctgcacagtgaatcgccaaggatttactgttcttcataaggccaactgctcgtcagatcatttaacaaggtcggacatggcaatactggccagctagtgcattgctttgttgttgtggcttagccaacacatgtgatgactgccactgccataaacatgagatgctggagaaacttctactttttcatcattatccttgttttgtttgtgcattttgagcatccttcggtattgctgtctcgcgacaggactgtcgatgatcgatgataccct

SEQ ID NO: 29903 - DNA, 477 bp, Oryza sativa
  Clone ID: uC-osflM202054d09a1
gctatgttaactggttaggaaacaatggtgaagtggatacatgtttataaattatgcagaatttcaactcttcaaggtgatctgttcagagaatagtatgatcaaccaagaacagggttaaacagtatgttttcctcaatgcatacatttcgacatcaaaggtgagttgcaggaatgccaaaaatttccagtgtcaaagagaatgtcagcagagatgaacacaaaaacacgaggggaaagtcattgaaagcaaaggtgaaaagatggaacagatagcagttttgactttgctggttgattattagcggccataatcgttgttgttacctgccgcaacttgcgataaccaagccagatcatagctcaagtttttctcctgtggcgagtactgtgtcatctgggatccaatccattcagtcatgcatcaactaggtaagttaccagtaattaaaaaaaaattggtaggcttcactgatt

SEQ ID NO: 29904 - DNA, 283 bp, Oryza sativa
  Clone ID: uC-osflM202054d10a1
gggggaaaaacgacgacgataatatgaccaacacgtacaatcagtttggccggtgagaagtaataacaacaattcaacacgtacgaaaggacgggaaaccgaaattttactactcgttagcacgggaaacccaaccctaaacgaagctactggttgtagccgaagtaaccagaaaaaatcaaatcaagacacgaacttgatagatacagtaggacgatggcatgcgatgggttggtcgggaggtagagacttttattacgccttggtgggcaggaccgggacg

SEQ ID NO: 29905 - DNA, 434 bp, Oryza sativa
  Clone ID: uC-osflM202054d11a1
actaaaaatatatatatatatacagccatacaaaccatctaacaaacacagaagcacataaacaaaaaaaaatcatcccatcaagtgacaaagtagtcaggctgcacattgagatctatgtttaccctgaactttatactaatctatttttccctctcatttttacagcaggtgggaaacaaacagattacacgaaaaatacccaagttaaaacgaaacatgaactgatagccagttacaaactcctaccaagtgccaagatcactgagcatttgagcagaagtgcaggcgaaacaacgataccgaacgcagcgtcaagatcatttccttttctttcccattctcgttttcacctccccggttcatcctgcccattgctgccgtgcagaggcgggagggagaagacgctcaccgtcgagcttccggtccggatc

SEQ ID NO: 29906 - DNA, 390 bp, Oryza sativa
  Clone ID: uC-osflM202054d12a1
ggaaacgaacaatgtcatatggttttaactaaaggtatcatcatcctataaatatcctggctccatgttgtttatggtttaccctgacattaacatcgaactcaaaaggagagaagtatcaacatcacggcatcaccgccatttcacaccgcagaagaggactctcaactgaaccataaaccagttgtactatttttactaacaaaagcaagatgcaagtataaaaaaaaatgtaaaaacacaactttctgagggtgtccctaaccatgactaaatctttcttcactattctgtaatcttttctagaaataaggcttcctgcttgcttgttaggcccagatcactaaatgacatatcgccctcaccagtggtgaaagcacgccttgggta

SEQ ID NO: 29907 - DNA, 486 bp, Oryza sativa
  Clone ID: uC-osflM202054e01a1
aacaaaaaatgcatgatctattgctcttgcattgaaactaaaagcaaattgtttagggaactacatcccaaaatggaataagcgctgatatataagatttaagattcggatttggtgctctcgtctataattgtcagagagaccccctcacggtatcctcaactcaaatttcgtctttctcagaaaagcaactctttgtatcagtcaaaaatttgcagtattattttccagacaaagcacaaagcagctctcaggctgcgattggtggcgcgcgcggagtttatatgtcgaggagcaatctccgtgggtcttcaaccacgtccttgatgcggcgcaagaagtagacagcttctctgccgtcgatcagcctgtggtcatatgtcagcgcaaggtacatcattggcctcgcgagaatgttgccgtccacgaccacagggcggtgtacaatggagtgcattccaagactaagcaactggggggggttga

SEQ ID NO: 29908 - DNA, 399 bp, Oryza sativa
  Clone ID: uC-osflM202054e02a1
ctggaagagaaacaattatcaaattacaacagtaaccaacatttattctacagatgccatcgctttctttgcttttttggcaacgcaagtaaaccatttcaccgtcacaccacccaccatatatgccacccaaataaaaatcaagaacccaaacaattcccctttaattaattcccgcttaattaataaacaccagccttaataataaagtaataaattaactaatggctcgttctttccagtcattttgccttagctgtggaggatggccgggctacagtacgggccgttgagccagccgtcagtgatctgcttgtaagctgcctcggtgaggtggatgccgtcccagctaagatgcgacgccgggttggagcacgctgatgcgcctgacattccaca

SEQ ID NO: 29909 - DNA, 396 bp, Oryza sativa
  Clone ID: uC-osflM202054e03a1
gaagaaagcgatcagaatcttcctcttttatcactctacagttgattcagctttcttgacaacggagtcagcattcaggtttatttgagctatggatccaccaacatggtgggaacaaggtaagcctacaatctgctatgtaccctaaaggcaacaagaacatggaatcaggggagcatctgagcctctgcaaattgtgtggaagcccagagacacccctccacctaacaggaggaagccatgtggaaaagaggcaaaattactgccaagcaaacaatgtttgctccaattacagtttcaagtaatcaattgaatcaaccaaccaatatgagatcaggcattcttccgatttccagctcattgcccttcagtttatattcattcaacccggacaac

SEQ ID NO: 29910 - DNA, 427 bp, Oryza sativa
  Clone ID: uC-osflM202054e04a1
aaaagacactgaaaggtctcattttattcagagcattttgttcagcagcactcctaccaaccaacgctattcaaatcagagatgaatagctggcgggtctcacaatcagatcaagccattctcatacagttgagccaactccaacatctcaaaactatagctgcctctgcaccaaaatcttaacatttatacagtaacaggcacaacaacgaaatggcaggtaaatttctcctcaatttgccatcgaaggcatcagtttttcagtaccctctgtgattagcacactaaaaaaaagcatgtctggctttgatttattttggtccggactacacgatgatgctatcatggggacaaaaaaaaagaaggcccggggaaaatccatcaggcttgtatagaactccccatctgttcaatggtgaatgggaat

SEQ ID NO: 29911 - DNA, 329 bp, Oryza sativa
  Clone ID: uC-osflM202054e05a1
tttttttttggttttttttttttttttttttttttttttttttttttttttttttttttttttttttttttttttttttttttttttttttttttttttttttaatttttttttttttttattttttttttaaaacaaaaaaaaaattttttgggtttaaaatagaaaaaaaaaaaaaaaatgttttttcagacaaaaaaaaaactgagaaaaacaaaaaaaattaaaaaggggtaaaaaaaatttcccccttttttaaaaagaaagttttttttggggggccccttctgaaaaaacattttaaaaaaaagggtttcctcccagagaag

SEQ ID NO: 29912 - DNA, 70 bp, Oryza sativa
  Clone ID: uC-osflM202054e06a1
acttattatttattttaaactgtttttacccatctaaagttttgtcagtattacagtacaattaaacgga

SEQ ID NO: 29913 - DNA, 230 bp, Oryza sativa
  Clone ID: uC-osflM202054e07a1
tttttggggggaagagaaacaattatcaaattacaacagtaaccaacatttattctacagatgccattgttttctttgctcttttggcaacgcaagtaaaccatttcaccgtaacaccaaccaccatatatgccaacccaaataaaaatcaagaaccccaaaccaattcccctttaaattaatttcccgcttaattaaataaaacaccaggccttaattaataaaagcaa

SEQ ID NO: 29914 - DNA, 444 bp, Oryza sativa
  Clone ID: uC-osflM202054e08a1
gcttcagtaaccagtaaattctgaatttcattttttggctgcggctcaattatattacgccaacctccatacaatctgggttcaattttttcccctctgtacctgtttgagcgctacaaaatgctcagtagttacatctcagtattttacccctgcaaggattctactgctcccttgtacagttgtacacacttttttactgtactacgtccatagactgtaaaaaaagaaaattactgtccactttttaccagtggatgctctgctcaaagcagcaagagagaatcagaagaatcatccgctgaacggcctgtacaccttgagcgcgtcgatgacgtcagcaatggagcccgcggcggcggcgatggagacgactaggcagcacgcgctgagcgtcttgagtgagacccacctcgcgctgccacgtggcacgccgcgctgcgc

SEQ ID NO: 29915 - DNA, 447 bp, Oryza sativa
  Clone ID: uC-osflM202054e09a1
aactgaactgatacatctttaacacaagtaactgagctgttacaaatttcacaagtaatcgagatgttacacctttattgacctgccctctatcttgtacaattctatatggataccagaggtaatcaaatcagaagaaatgaggcacagcacggcgtcgaataatccgccttcgctagcagcaaatgcacattctacagggaccaagcctttttccgccttgagatcacggggagaaagacactgcaattggcatgcttggtgtccagcccacacacgacaaggtggcctgatcctctgtttctattctatgatttctatcattctaaggctacaacaatgttagtaagtgaccgaaccaattaaagaatggttggctaaatggctacctgtctcgtttcacccccattttgctaaaaaaaaattacagcggggatgaaacggtga

SEQ ID NO: 29916 - DNA, 408 bp, Oryza sativa
  Clone ID: uC-osflM202054e11a1
acgtaataccatccattttttttattgtcgacgaatttatcagatatgctctagatacatctcttgtgtgtatatagccggagctttgttttcacatatcctcacccaacgataattgtagtactcttacaataaaaccggtcggagagggagggaagagattattacatatgtgttaagagcagaggccattgagatggtacataaccaaactgtaaaataaaaatatatagcatattatatattgatatatcatcaacatagcccaaaacaaagctgcatactattattataggcaggaatccaccagcgcgatgcttgaacttagcttaattgccaccagactccttgaaacctgggggcttgtaggcgatgaagctaattaactggccctggctgacgttgtcc

SEQ ID NO: 29917 - DNA, 371 bp, Oryza sativa
  Clone ID: uC-osflM202054f01a1
gacagcaactcaataatctttcgatatttcaccgagggtaatgtatggtaggaaaatcgccagacataacagagccggccagactcaactcaaactcaaccctatgatggtaaactgtttgcgattaacgcctccgcctatgacaatgtttggagataaacgcttccaccaaaaaacgaatgtcggggagtgttctcccctacaagaattattattgttttcaatgttaaaaaggcaaaattcaccagatcccgttagtgcaggaccaggaataaacacttgttcgtcatcattttctgccagtttaggcaccgcccgagccgtacttttttccaaagaagaggatctgcagctggtcatagcccgagagc

SEQ ID NO: 29918 - DNA, 336 bp, Oryza sativa
  Clone ID: uC-osflM202054f02a1
agttggaagaccataacatcaagaactctccttgaaaattttgtaatttgatccgcaacgattcagatgcagatgaaacactgctgattcccactcagattacacacaatacaaatacaccgacaaactgcctcaaaaaccaccaaattgattcaaaagtaaaacgggtatgagggatcttcccaccgagactgactaaacctaaccacagacaattggatccactggacccagattattcaaaaacagatggctatgacggcatcgtcctcgcaaccgaagggaacttgcagctatggatatcctcacttcgcgcttgcgagctgggtgcggatg

SEQ ID NO: 29919 - DNA, 373 bp, Oryza sativa
  Clone ID: uC-osflM202054f03a1
acttcggctagtagcattgcaacgcaaacagtatgacaaggtaccacgcattgtttaagagctaagacaaagacaaaactgatgcatccaacgtaccaaaaagaaagcgaacagcagcagtcagatagctatgagaagagaactaggagagggataactagaagggacagaatggcatccatgggtccatgacgtttagtcgacctcctccatcttgctctcgccggcgtcgtcctccagcggcggcatgtcggcgtcagcctcggcggactcgtactcgtcgatgctcaggccgagcttgagcatgcggtggatcctggtgccgaaggtgttggggtcctccaagctgaaaccggaggtcaacagggcagtc

SEQ ID NO: 29920 - DNA, 356 bp, Oryza sativa
  Clone ID: uC-osflM202054f04a1
attgcagaggcaaggcacgaggtatgtatatcaaacgctctagaaaagattcatgtgatgaaatacatgatgaaccacgtatgttctcaagggaaaattaattaatgcagtatagttttaactttgtccatcgatctcaaccctgtactgggacgaccccactggctacagggcccctcgaggtactagcaggattacagtagctgtagtacggtacagcagcagcagcaggttcactgtcttgattggattggatcggattagtagacgtagtttttggcgaacatgcccctccttggcctcggcggccctgccggcgctggtgtacttgcccagctgcgcccaccaggttgccc

SEQ ID NO: 29921 - DNA, 279 bp, Oryza sativa
  Clone ID: uC-osflM202054f05a1
ggagcagacaaaaaaaagtattttctttgatggaacacaattacagtacttaatacacgagttccgcttgagttcattccagctacaacatgcttgaaacaccgacactacactgtctaatcgaatcgcgccccaccttcaattcccctcctgacatcacaggcttatgttacactcctacgagagcccaccaaccccacccatggcagcagcatgggcatatgggacgccattttccgcggggttccctcccacgacgaaaaattgcacgcgaggaac

SEQ ID NO: 29922 - DNA, 351 bp, Oryza sativa
  Clone ID: uC-osflM202054f06a1
ggggaaatagtcaaccatgacgcaaataaataacatcattcggtcatacatagttttaacaatagatataataaaagtaaaagactcctccctcctcaccagcacatagcacagcctagcaactacaaaaattcccataacatggcataaaaatttggaaattgtctacgaccacagtgacttttaaaacagaacccccacctttatcactcccccccccccccagataagacagggatacttcagacaaaaacaatccttatcaggccccttaacataactcttttgaacttgatcacagaaggtcagcgacgttggccgggagctccttaattaccacattgtagaacc

SEQ ID NO: 29923 - DNA, 277 bp, Oryza sativa
  Clone ID: uC-osflM202054f07a1
cataggaacatcataattttatttcatatgaacatgatgatgtttccaggtaactagattttctcttttctaaagaatacattcacctaataataccgtgtagagcctccctttgatgttcatccttctgacggttggtccttctatcatcctaatggccttttcccttgtcgctcattttgtaattgaactgtaacagactgcggactgctcattctgataaccaatgatgttggggaactgaggccaacaataaccgtcctcaaatccatgaatg

SEQ ID NO: 29924 - DNA, 423 bp, Oryza sativa
  Clone ID: uC-osflM202054f08a1
catagagaacagaagcttttatttatatctgaatagttaagctagcaggcaggcaacagaccaagcttcaacaacgctagaagggcagtaattaactagctcgagtagccggtgtgaaaaacacacaaagaaacgaagcaattaaaccagctagtactcatgtttcctcgcttcgatcgatcgatcatggcgccgcggcgaagccggcgaccatctatggctttgcctccacctccacaggcgggagcttggggaacttgaggaatggatccttcttgatcaatggcagcagcttcttgaacagctcggggtcagcctccgcgtcgtcctgcatcgccaccttcttctcctccgccggagggtggtagatcggcggcgacggcgtcggcagcggctgcttgtacaccggcgtcgggtgagagt

SEQ ID NO: 29925 - DNA, 443 bp, Oryza sativa
  Clone ID: uC-osflM202054f09a1
gcctctgaatacatgcactccattgatactctatagtgtaaaaaatgatattgtaaaattgcattactacactactactacgactagtgtaacaagaaacaaaagatttcttttacccatcccacattccaatacgttcgctcgccttttcttgtgggacgggagatgggttacgtcagggtctttgacctggaacagctgtctgtctgttgtgccaccagagtacagatcctgtgatcaaaagcattggagcccaacccttcaccctacctttcctagcctgctctctgcctccatgtctgtcaatgctgcgttgccatttgcacaatactcatcatgaatggatccttgggtcaggaggtaatgctgaacagtaaaaatggctgactacttgttcataatgtaagcgtttccccagtattgagttaatctttctgcatctt

SEQ ID NO: 29926 - DNA, 382 bp, Oryza sativa
  Clone ID: uC-osflM202054f10a1
attgcagaggcaaaacacgaggtatgtatatcaaacgctctagaaaagattcatgtgatgaaatacatgatgaaccacgtatgttctcaaggtaaaattaattaatgcagtatagttttaactttgtccatcgatctcaacctgtaactgtgacgacacactggctacagtgccctcgaggtactagcagtatagcagtagctgtagtacgtagcagcagcagcagcaggttcactgtcttgattggattggatcggattagtagacgtagttcttgacgaacatgccctccttggcctcggcggcctcgccgtcgctggtgtacttgccgagctgcgccagcgagttggccttggcgcggaggagcagcgcgtcctgcgcc

SEQ ID NO: 29927 - DNA, 117 bp, Oryza sativa
  Clone ID: uC-osflM202054f11a1
ctcgtggcgccttattttttgggggtatagaacaggggggcacaacccagataaaaaacactctagaaacgattcatgtacgaaatgcattattaaccacttatgctctcaaggcac

SEQ ID NO: 29928 - DNA, 473 bp, Oryza sativa
  Clone ID: uC-osflM202054f12a1
gtgagaagttacacgaccagtatcgtattatcacactaagagcaacaggaacaaaaggatagtgtagtgtcttcttttcatcgatgttaggaacaagttccagcctatgtcccgatagaaacggaagggtgcatgttcactgttttcttattgaacacaaactacataactacagcttaatgtggcaaggttcactggctgctcgattcatcatgctcttgttgcatctggttcagtacaaatgccccttcaaggttcttgtggacctcggctttgaacttctcctgcttgtttccccttttaagtttcatcagaatgtcaaactttgcgaagtcttcaacaacctatgcctttgcacgaacgatcttgagaagttcatatggaaacagggaggttgacctctgctggattgatttcacagcatggtctgcagcatctttgactaccggatcatgtactggaacatcacgcca

SEQ ID NO: 29929 - DNA, 371 bp, Oryza sativa
  Clone ID: uC-osflM202054g01a1
accaaaagaacagatacgttaattgcgcataccataggacatccttcatacacaggtgatacgtaccacgacatttatacaaggcttgcatggaatttgtcaaaaagacaaagaccgaattacctgacaaaaatggtacatgacactatagttacatatgcgcattaccctgaactcgagcatgaattatgcatgaactgaaactctcagagctcagtaataaagaacaagcgatatatatataggagacagagaaaataaaaggaggggaggcaaacaacaactacatatgacaatttcattaatagagtatagatcatgtgttactgactgtagttcagtccatagaactagtgccgtctgatgaaaaa

SEQ ID NO: 29930 - DNA, 248 bp, Oryza sativa
  Clone ID: uC-osflM202054g02a1
ttgggggtattgagttcgcggttacaggctcatctctaacaaatatgatggaatcaactcgattacgaacaaggacacagactgtgttctccactaagaaaacaaatggcctataatcacgcacctataggctgcaaaagtacctagtgtacttcgcatattatgcttggccgaagaattatccatgcatgactgaccaataactatttatataccataggaaacactagatgcccaatttttttgat

SEQ ID NO: 29931 - DNA, 173 bp, Oryza sativa
  Clone ID: uC-osflM202054g04a1
ggatgaaccaaagaagggggcgagattaattattacagagacagacgggggggtcatcagcaactaaggactgtagaaagaagctcatgaaccgggcaggatcagaatggttgcatgctcaagttgtagtgccaccgtgcacgcacgtacggaagcgagttagaccgatcaat

SEQ ID NO: 29932 - DNA, 260 bp, Oryza sativa
  Clone ID: uC-osflM202054g05a1
gggaatgtgatgatgatgatgatgatgattacaccaaacaatttggcaccccaactgaaaaggaaaccaccatgcccagattccttattctaaattgaccacccaacttttgtatatcattggccctagctggccttttggccaccaccaaaccccttcgaaaacctcgcgccatctcaacctcaggggggccagaatgcacgggactgaacccaccaagaagagtgcttgagaacccacccaacccgggtggagacgcc

SEQ ID NO: 29933 - DNA, 341 bp, Oryza sativa
  unsure (1)..(341): unsure at all n locations
  Clone ID: uC-osflM202054g06a1
gccaaagtattcgtgcatgcatctacttttaatattacatggtataaatatatatctgtgagccaggggatgttgcgcatacatgactgatacatctgcgctcacaaaacacaaaacataaataaaacttgctaagtnacactagacaacaaattaangaattgtcgacatgattatnnnncttgacaaactcgattctttggaacctttccttgagttccagcttggaggcataaacagtcagagtcacacgctgactnaaancttngatcatgtgagactgctgaaactgcaaatttcagtgttggtgctatccgagttagtgtcaggttgagccatgc

SEQ ID NO: 29934 - DNA, 426 bp, Oryza sativa
  Clone ID: uC-osflM202054g08a1
gttagtcttgcaaactgggcaattgattttattttcaccatgcatacgtcaaataatcacagccataataacaaaagccatactctctgtattaaagatccaacaggttcagagaacacgcaagctcagaactacacatcaccaaaattggagcaagtttgggggtacatatccgctcatacagtggaggatttatttctcgattctacgagctttttaactagagttcgaccgggaagtcaattacggatagaaatgagcatcctgtcttcacaaaacccatgcacacaacagtgggcatgaaccgcatgatattcaccatcaagtttagcagggctccacgggtgcgcggaacttggtaccagcgtagacagcagtcgcaccaagctcctcctaattctaagaagctgggtgtattttggcagg

SEQ ID NO: 29935 - DNA, 495 bp, Oryza sativa
  Clone ID: uC-osflM202054g09a1
aaacataagatccctaagcatagattacacatatctccccactgttcaaaatgttacacataagatggcgcgaataagcaatcagtggggagaccaagcaatacatttcttgcatttagcaacctactgcaagaccagactaaattatcaagcccatagagctacaagcttctaaacacacaaatgctaattaaatacacaggcagctaaacccagttccttcagttcatctctcacgaagtcggattataacgaaggcactgctcgtagtagctaataagcagcaagggattatttgctttcaattctttgtcgtccaccatgacttcctgcccatcagacctgagtgctttgaatgtaattgaaacttgctgcacatcgttgttcacagctgctgcaaatcgcactggcttgatgatcttggggatatgaactcggttaggacagccctctgtcttttttttatcgccagtttctccttcagtggaaccaaca

SEQ ID NO: 29936 - DNA, 357 bp, Oryza sativa
  Clone ID: uC-osflM202054g10a1
atgaaccattgaattgagcgagattaattattacagtgacagacggcggggtcatcgtcaactaagtactgtagaaagaagcccacgaaccgggcaggatcagaatggttgcatgctcaagttgtagtgcaccgtgcacgcacgtacggaagcgagttagctcgatcaatttgggaatctgcagacgcggcgtatgtcgcctccggtggccgccgaattgacgccgaccctcccgagcctggacatggggggggcgatagccgtcgaagaaggagctatggctccacgcgtagtggcagactgagccgcgcgagcgatgaacgagaccacagcctgggggagtctaagagtcccctg

SEQ ID NO: 29937 - DNA, 327 bp, Oryza sativa
  Clone ID: uC-osflM202054g11a1
gccataccagcgggaccagagagtctcatggaaaaggagaaacatagagatcttggtgacaaacaagaaaaagaagaacagctacacactgtacggctttaatgcacagatgcacaggctgcccacctggcaataaatggaggagcgcatgccactttctgggggcaccaagctgggaggttccaggtgacccactacactaagtggtcgaccagggtgcctatacctaaatgacgccctagactaacaggttcttgccaggcaccaataattattggaggagagccccctgtctggcagaagcttgccgatgaatatggacataat

SEQ ID NO: 29938 - DNA, 492 bp, Oryza sativa
  unsure (1)..(492): unsure at all n locations
  Clone ID: uC-osflM202054g12a1
agtatgggatatggcatattctcctgccagatgtataataattcatatgacaaacttggagccaaagtatgcaagcattcatctactagaatattacatggtatagattatatatctgtgagccaggggatgttgcgcatacatgactgatacatctgcgctcacaaaacacaaaacataaataaaacttgctaagtaacactagacaacaaattaaagaattgtcgacatgattatctccttgacaaactcgattctttgcaacctttccttgagttccagcttggatgcatcatcagtcagagtcacacgctgactcaacctctgatcatgtgagactgctgaaactgcaatttcagtgtttgtgttatccgagttagtgtcagtttgagccatgctgcagataaattgggagagcagtggatcaagtgcaggatctttgtatgtcctgtgttcatcatatactgggaggcccctcaaanaggggtctgg

SEQ ID NO: 29939 - DNA, 77 bp, Oryza sativa
  Clone ID: uC-osflM202054h02a1
gggggatccttttttttgacataaggcataccgcaacaggaaggaattccctctatacagtgtgagaccattcaagg

SEQ ID NO: 29940 - DNA, 152 bp, Oryza sativa
  Clone ID: uC-osflM202054h03a1
tttttattttatttattatacttggtgttaattcccatgatcgattagtggtgttgtccacgatttttggtaacattgtttttctcaattttctatttcatatattcccaactctcaattctacattatatatcattttttcattcaacttc

SEQ ID NO: 29941 - DNA, 482 bp, Oryza sativa
  Clone ID: uC-osflM202054h04a1
catggacaagatctattcacagggttaccattttaccaagtatacattaacacaaaaacactatagaatataatctatagtagactgtagtctatgggtatgtatacacatgaatgtctgaacgagatgtagctgcacgacattgtgttcacagcataaaggttagatacagttacttatgcaaaccgtgaggactgtaggctattcctaacaatccacaactatagcgagtactgttgtctcccttcaccctttcttgggaaacaagtgaagctcatgtgatacaattgtatgatcttccagttatctgccaccggatagctgaatgtcttcctggatattgagagactcctcgatacttcaccctttcttgggaaacaagtgaagctcatgtgatacaattggatgatcttccagctatctggcactggatagctgaatggcttcctggatattgagagacttctcactgaagctgaaca

SEQ ID NO: 29942 - DNA, 475 bp, Oryza sativa
  Clone ID: uC-osflM202054h05a1
ggggacaaaagtagaaaggttaacatataccacacatcttgccgagctcaccctcacagcattgttgttcgaaatagggacggacaaacaacacaggttcagctagaaattcctaaaaacagttgagttcatggtgtagctatagatgatcacattggattttgggtgttcattcatgcctcgggaaatatttaacttaagctgcggaagacatctcaaagtgattgcctagcctaatcccagccttgagcagctggttgagctgccgggtcccatccagtaggcgcaaccggtggaacgacggcggcttcagtggctacgggtgctcctgcttgatcccatccttcggcagcagcaactggagctggagctgcgccccaatcaccaacagtagcagctgggggagcagccacatcagaggtccactggtcagcagaccattgttcaggtgcggtgtaatcagtgatggcagcaa

SEQ ID NO: 29943 - DNA, 424 bp, Oryza sativa
  Clone ID: uC-osflM202054h06a1
actaccaactttcaacaaaatttgttggataatttgctcaaaagatgtaaaagaaatctgaacattgtaccttacatcccaatgatgcaagattgtgattcctcattcccctgcatcacagatgcttttgatcaagcattattacaagaaatgccttctgattattaaagttggaaacatctcttcattttgataaacatatccccttcgaacaaagaatattgtagtagctctaggttctagaggtgttggtcaagatggatttcatgtttcttgtttcggctacgacactcggacggtcaaacagagcggagactactgcgacgcctttgaggtttgggagaccaagctccatcactgaacctgcatttgaagcgttgatgccgccaatagcgaccacaggcagcttagagccaggcaaact

SEQ ID NO: 29944 - DNA, 357 bp, Oryza sativa
  Clone ID: uC-osflM202054h07a1
cctctggctactaagatgtttcagttcgccaggttgtctcttgcctgctcatggattcagcaggcagttcaaaaggttgacctatttgggaatctccggatctatgcttattttcaactccccgaagcatttcgtcgcttgctacgcccttcctcgtctctgggtacctaggtatccaccgcaagcctttcctcttttgaacctcgccattaacgttaaggctatgccatcctaaggtgctactaaatggaaggatcttatcaacgtccatgaatgcgaaatcatagatcgaactgccgaattggcaaaattcggggctattatagtatccgctaagttcacgggctggagataagc

SEQ ID NO: 29945 - DNA, 478 bp, Oryza sativa
  Clone ID: uC-osflM202054h08a1
ggcagaaaatttttcatccattatttctccatcttgcattccgcaagaagaccgctagttagggggaaaagagtaaaaaaagaccaaaaacgatcacaacacgtcgtcgtactccaacacgtacgtacggtactccactagaacgtaaaacctctctagaagagggaaaccggaccatatatttggtagcactttacaactagggctgttcagatcagccatgtttttttgttttttgttcttccaatcattcatcgaaaatttcctttaaccagagcgccgtttgcaattcccgctccagcgctgatgacgatctctcgttgaatgccgagggggctcctcacactgtgtagctctgctggatcgtgtcgatgtccagccccttcagcttcaccaccgattcgacgtggcccttgagagtgttcagctctctcaagcctgcgatctcagctcgtctcttggcttgctcagcgatctc

SEQ ID NO: 29946 - DNA, 167 bp, Oryza sativa
  Clone ID: uC-osflM202054h09a1
tttgttgttttgttagaaaatggtgcatccactatttctccagccaggattacgcaagaagaccgctggccagggggaaaagtagaaaagcatgagcaagatacgaccacacacatgatgttggcacttacaacaccatacgtacgattcctccatctaaaaacgaa

SEQ ID NO: 29947 - DNA, 446 bp, Oryza sativa
  Clone ID: uC-osflM202054h10a1
gagcaaacagcaaggagtgtggttcgtcataaatcaggagcaaacaatatgtgacagcgatcgagctgcatagtacaacattcttttcttgaggtggttctacgttgaaatgaaactgacgagctgcctcaagtctgttacacaatgtagtgatatggttatagatgatcgatcggtctagcatcgagtaatggagatatgattctagagcatcatgatcggcggtttctagtctgcgtccatctcctcgagcgctgcctgggcggctgccttcgcctgctccacgaggtcgtctggaaccttctcatgctggcgctttgattcatcgcatacccagctcagctccagttcaaagtctttgtctttagcttcgtcatgcactccatagattatctttgcaacctcaacaatgccttctctgcatgtaagctcagaaagattcagtt

SEQ ID NO: 29948 - DNA, 517 bp, Oryza sativa
  Clone ID: uC-osflM202054h12a1
gcagagaacatgtgtaaccttattaacttgataaaatgtagcatgaattggcagatgtatcttgttcttcttacatgtatggagaaagatatgaacacagtagaaagtctaaaaataacctgctcaacccttctggatgtgagaagctcaattgaaagcaacttgcaattttaacaccatttacaaccttatttccctgtgtatacaggtttccttttctcagcaaatgcagctagaccttcaagacgatcttgagtgtgcagaacttgctcgtagcattcttcttcgacagccaatccggcggacagatctacctccatgccttgattgatggccttcttagccattcttatcgctaacggacctttctgatttatctcctgggcaagttcaagagcccttttataagcctccccagcgggaacacagtagtttactactcccatggttacagcttctactgcatcgaatctacgaccagtgaatattaattcctttgctctggactttccacaat

SEQ ID NO: 29949 - DNA, 384 bp, Oryza sativa
  Clone ID: uC-osflM202055a01a1
gggggataaagccggggctttggtttcacatatcctcacccaacgataattggaggacttttacaaaaaaaccggtcggagagggggggaagagattattacctatggggtaagagcagaggccattgagatgggacataaccaaactggaaaaaaaaaatttttagcctattatatattggtttatcatcaacatagcccaaaacaaagcggcatactattattttgggcaggaatccaccagcgcgaagcttgatcttagcttaattgccaccaaactccttgaaacctgggggcttggaggcgatgaaactaatcaactggacctgcctgacgttgtcaaaacccatgataccgacaaaggcattaggggaggcctttttg

SEQ ID NO: 29950 - DNA, 479 bp, Oryza sativa
  Clone ID: uC-osflM202055a02a1
gtgaaacttaaacctccattaatataaaacgacagagttcactggaataaatcccagtacattgccaaacagataaagagagcataaaaccatctgtttccaatgaacggaaaactgcactagggctacaatcttcatattgaaaccacacaacagagaagttgcacatcgacagggagctgcgataatgccgtgacgaatgcaaccttgggcctccttcggcgtgcagcacgctcgacaaaccggcaatccccatccggttgcctctacgaagactgcacaaaaacggaggtctgctgttgagccatagattttggattaagcataaccggactcagcaagagatgtccacagagttcgtcattaaatctgaggagcgtgagctcaacccgaacaacaaaccctgcatggagcaagctggtaggaaacacatagaaagaaggagcccacatctaaatccccaaaccaactgaataact

SEQ ID NO: 29951 - DNA, 474 bp, Oryza sativa
  Clone ID: uC-osflM202055a03a1
gggctggttaccagacatctcaattggctcgagagtaaaatcaatcaaattacaagttactacacaacgagaggaacttactacaagaaaagcctggcaagtatataaaaatgtatattactggcagaaaagcaatttttttacattttttctacgccaatcaatacatcaaaccggtcttgatgtacataaaattgttatcaacatagcacaaaaccttatatacaacatgtcaaaatctaactcttctgctaataatgtaagatgatctctcctgcaaatgacccttcacaccaagtctgcttctttgtaagttatgactggatcacagaaccaagggtattgtgttcctcaacggatgtgaatgtggttggaattgttgaacatcccagtgtgggaacccttggttgcagtcttgggtgctttaggagccccaaatacgttccagaatctcagggtctcatctgctgcagc

SEQ ID NO: 29952 - DNA, 263 bp, Oryza sativa
  Clone ID: uC-osflM202055a04a1
ggaacaaaagggatatttttttatggatattgctaccacaaggcatgaatcatgaatatgaccttgtcgaacagtttgctcatgtgcccatcagcacatacatatgtaactttctagaagaaccaagaaagttttttttggatgcatacaaaaaaaaattgaaggggattaatcgcaatgcccatgcactttaaccgctagaaaagggtttacatacatgcatgccaaattttttagctttatggatcacttctaattgatga

SEQ ID NO: 29953 - DNA, 451 bp, Oryza sativa
  Clone ID: uC-osflM202055a05a1
ggaaatgaattttactgaattcatttgaaaatgtttacatagattctaatttcaaaaccacatggcattcgccgatttacaacagaccaactaccggactacattttatactaacaaaaaaatcatatcccaaacaatctttttacatggctgattatcaacgttgataaaatcctcgagggcaaaaagaaaataataattatacagcccttacaggcctacaagctgcacaagcattttattactacctggcaatatatgcattctgcaaatgaaaccatctaaagagaccagactactaaaaggaattatctagcagaggctcatgggtcctcttgaccaagagcaatgactcatagaccagcccagcgagaggcccgccaatcagcggcccgagccagtagatccagtggtgggtccacactccagtggccagcgcccgcccaaatga

SEQ ID NO: 29954 - DNA, 452 bp, Oryza sativa
  Clone ID: uC-osflM202055a06a1
aagactactgtcaaccacaaacatatgattctgtagaataaaggtacaactagatagtttgttgtccataagtagtgaagctactctagctttaaactagagacgaagcaactgaaattccactcatgacaaagcacaccgacagataaggctaaacttaaataaagcattacgcaagatacagctactccatagtatagctagaagctagttattgactacattctagtagtaagccgcaaaaggttcaagcattccaacccggagaaatactgatttaaccagcaaatgggagatcttcaagaggccaaaagcaatcagaggggccagggtaacacaacatacattagactgcccaattttgctggttcatctcatagatgctctaatggccttatttactgagcaaccctaggttgcacaccaccataaccactgccataatttgattg

SEQ ID NO: 29955 - DNA, 471 bp, Oryza sativa
  Clone ID: uC-osflM202055a07a1
gtcagtacaaacatacacctttttaattgactttaagatccgtgcagcttataggagtgcggaagcatttacaccatttacaaataaaaatcccgtggaaaaaaatgaatcaattcattacaatcagtacaaaatatgactcatctgttctcttttatctcacagaaaggtacaacaaaacgacaaatttctctgcaggctatttacactgatgcacaaatatggtaacgtttatagcagagtatggaaaacaagaacactctctcaacttcttatggattttaacttacacagataacctaactatgtagatacttgtcatttgtttgaccattggaattcaatttccaggttcctattaggaccgcttttactctctggtagcaaggtgtattcgccagcaacggagcccagcatgacaacccgatcgatctggattgtcaccttaccaaatgatttctttccgaattt

SEQ ID NO: 29956 - DNA, 460 bp, Oryza sativa
  Clone ID: uC-osflM202055a08a1
caagtaaaccctactgggaggaccattatttaatttattcttagctgctgagaactcacggccaatacattttacatttacaatacgcaggttaatttctcccggagtcgaaacaaagatgtctttcgaactctgcacaagttaaaaattaaacgagatgtccaagaaacgctaggccaaaagaaaaataaaaggacatgtcggcgaattttcccattttttggtgaactgaccagataagcaatcagtcagtaacggaaccatcaatctatcatgcaaatatcatccacacgctggaggaacgtttgctacgccttgcctctgcagctcgcccatcacactgtccactgaaggtggcttcagtccaagaggcaaaggcaaccacggtttcgataaaacatcaccgatagctgcgtcgatgctctcgcttgatggttgaacctggagttgaagctgtgcg

SEQ ID NO: 29957 - DNA, 332 bp, Oryza sativa
  Clone ID: uC-osflM202055a09a1
ttttgggtttttttaaattttttgggttttattttttttttttttttttttttttttttttttttttgggccaaaaaaaagagcatttaaaaaacttaagtaaaaaattgggggaagggaatcacggggtccaaaaaaaaaaaaggggggcaaagaaaaaaaactaagccggaaaaaaaaaaggcccccagaaaagggaaaggggggggccatacaaacccagggggtggggaaaagggaacataaacaaagggttccagaaaaaagggcttaggggcaaaaatgaaaaaacccggaagggggggcccaaggggccgggaaggtgcccccca

SEQ ID NO: 29958 - DNA, 477 bp, Oryza sativa
  Clone ID: uC-osflM202055a10a1
gccacaacgtccgggtccgcgtgcgcagcggcggccacgactacgagggcctctcgtaccggtcggagatccccgagccgttcgccatcgtcgacctcgtcaacatgcggaacgtgaccgtcgacgggaaggcgcgcacggcgtgggtggagtccggcgcgcagatcggcgagctctactacggcatctccaaggcgagccccacgctggcgttcccggcgggcgtgtgcccgaccatcggcgtcgggggccacttcagcggcggcgggttcggcatgctgctgcgcaagttcggcctcgcgtccgacaacgtgctcgacgtgaaggtggtggacgcgaacggcaaggtgcaggaccggaagtcgatgggggaggactacttatgggccgtccgcggcggcggcggctcgagcttcgggatcgtggtgtcgtggaagctgaggctgttgccggtgcccgcgacggtgacggtgatcc

SEQ ID NO: 29959 - DNA, 479 bp, Oryza sativa
  Clone ID: uC-osflM202055a11a1
ttttgggaattgttttacagttctgagcctgatgcaactgctcagcatgtatggtttacggaagcagatcatatccacggctatacagaggccacacagataaacttaaccagggaacatatatatatatactctaataaggcctagcaaaagtggatgtgtaaaattcaatcaaatgaattgaatatagatagctactgcactgtgaaatgatacatggcgctgtacttatatctagaagttagcaaggacatctttcatatcagcaaccgacatgatgggctcatttccatagatccgcgtcaccatctgaacgaagctctcgtacttgtccaaaaactctttcttgcacttgtcccacagtgaaggaaacaactcatcagaagtcagtgtcttctgtaacctcctatacatggcaccgattgacttgtcaatcccagataaactggatttgatcaccttcttagatcagttttgac

SEQ ID NO: 29960 - DNA, 218 bp, Oryza sativa
  Clone ID: uC-osflM202055a12a1
tttgggggatttttgaaattttggggtcctacattttttttatattttctttggttttatgacaaaggggaaacaaaactacatacagctgttttaaagaaaaaatgaaacaccaaaggttttcagatgaaaaataacaacgagctgcagggggttgtttgacaaaaatattcaagggggcagaaataagccacttttaatttcctgggcccggaaaa

SEQ ID NO: 29961 - DNA, 356 bp, Oryza sativa
  Clone ID: uC-osflM202055b01a1
aaaaaaaccctttttatttgggggaaccatgggggggacccaaaagggacttttaaaaaacaccccctgggataaaaaaaaaaaggggccccaaaacaggggacccggccccacacgtacacaggggtccctggtttggcccaaatgggggggggggtcccccccccccggggggggcccccaacctggggtcaaaaggggacaaaagaaaacccccccaggcccctgggggggggcccccggggaaccgggtacaaaaggggcacggccccgggcgggaaaaaaccccaaacccggttcccggtccccccccggggccctcccttaagggggaaaaaaaattccccccgggggaa

SEQ ID NO: 29962 - DNA, 388 bp, Oryza sativa
  Clone ID: uC-osflM202055b02a1
aaccgcacggatataataagttaaggccatgagataaacagcagatagggcattattccaaattatcagcctttggacattcttattgcccaattgggggaaaaggactccccatgagtacttttgggccaaaacaggaggggctaactatcggacaatgactacaaaagggagtagaatggccccataggaaccttaggggacatcaaagaatgcccaacatcacttcaaaaaaatatcacaatcagtaagcataacctgcaacggcaataactagctgctagcatgcacatccacttttttgttcagcctctggaacaggatctggaacaaccgtctggaagtagatgtcctgatcacgcttatgctctaaagcaagcttagcgac

SEQ ID NO: 29963 - DNA, 398 bp, Oryza sativa
  Clone ID: uC-osflM202055b03a1
ctgaacaagggtcctggctatgacttcaacacaaattcaggagcccactgccaaatatacagcacagcagagggactcacagtacatagacccagcattccagaagtccagcaaaacctttggcttcaaggcttcaccatgtctgtattggtaaacactaaccacttggtttacaaacaaccccagttactcatgaccgaaaatttggctggaaatttcagccgggaaaactaatatataatctaacattgggcctacttttctttcctcccaagattttgccacttttaggggaggttctgaaggttataaaaggattgggaggaatgccctatgggttaagacttggacgtggctcaatctttttcctctcagggaacctttgttccaggccaaac

SEQ ID NO: 29964 - DNA, 198 bp, Oryza sativa
  Clone ID: uC-osflM202055b04a1
ttatttttggttttttaaaatttttgggttttttttttttttttttcacatctaattcacacacttcaaccaatacataaaaacatatgcaaaaaaaatttcacccaagatccccaccaaggcaaacaaactgttcacacggataaaccaaccgacacataacaatccccagggatgtcccatcaaacaacggtcact

SEQ ID NO: 29965 - DNA, 451 bp, Oryza sativa
  Clone ID: uC-osflM202055b05a1
cagtagattaatttgttatatttattatgagctcaatatatatactgtttaagtatgtacaatgcagtgtgttgctactgaactttatcagggtagtaaagtagatctttgtggactgatgaactgaacctatctctgcctatttggagtgtttcataaagggaacactccaaactctgaaatatcttcctccactgcagggtagtcactgaagttaactggactacttcagatcctttaaccgatggttaatcttggtcagaacgacagatttcttgttcaaactgaggttagattatatccacagcttcttggagcacaacaataacacataacctagaggttcctcaactaagatctcagttaagttgtggatgctcccttgctagtttatactcagctggtaaaaaagaattgaagacactagcctctaatgtttaagagagaatca

SEQ ID NO: 29966 - DNA, 496 bp, Oryza sativa
  Clone ID: uC-osflM202055b06a1
gggtataacttcatctatatattattgcatgtactagtcaaatccttgatatataaaggaattgatgatgtggttccaaatcaatcaaaaattgttatatgccttgttttcaaatgatggggtgcgagtgcaacaacacatgtatccaacggaaaaccaagcttacatgtactatcatcatagaattaataaaattccgctgagctttccatgggggtgaaagccaaaaccaaaaaggtcaaaaaaggggtgaccctcttcatcagatttagccatttgcaacgatttcatggatcttgtcactgatctcaggatcatctgatctgactgctagcttcatggccacttccttcggtccgctaagtccgaatgacagcctcactaaaactttcacattgccgataaacacaccagatagcaggcaagtgtgtgacctcgaattgcttgggaccacatcagttccctcgcagggctgcatgccaaggatgcctatgac

SEQ ID NO: 29967 - DNA, 464 bp, Oryza sativa
  Clone ID: uC-osflM202055b07a1
aacgtggcaagaggcagagtttattacgagtagtaatcaaaatgattgggccatgctacacaagaaagagatgtcagtgatggatttagtagtacatcttcaagattaacatatgtaacagccttgtgccatcttgttacagaaagcgattatggatgtgcttccaactatgatctagccttctcatcttccctccaaaattgtacttacacgatagaaattagaacctagtgttggatggcaatcatcacctttacacaatatcagatatcaccaccttcgcaccagtgatgtgagcaactcaaaaagctcaaaaggacttccccgcctgtagacatcatcttgctggctctgtccagtggaaaatagtagagaaaccagggcacgccatccagtcaacaaaacccaagtacttcccatggctaccaggataaaaggagttggtggaatatgaccagatgaca

SEQ ID NO: 29968 - DNA, 400 bp, Oryza sativa
  Clone ID: uC-osflM202055b08a1
gttgcatgagaataaatgattcataaatcacgggtgtaacacgaacaacccatactaatttgtccgttcgctgggacaccggctaaacgaagcaaaggctctaaacgcggagacccctctgattactacaggggccggacatgcaatattacgcggggccgttgacgcgggccttggtgacgccggctcaggcctaccctaggtggccgtgcgtgaagccggatggagaacacctggagcttgtcgccgaggcccttggtgaagacctaggggatgaaaaggcggtcgtagccttggatccggcgcgtgaccgggcggacgcagagatccgggttgttgggctggggcgtaaccgggttttccacccggtagaagaacctcagggcggtcaccggcggct

SEQ ID NO: 29969 - DNA, 436 bp, Oryza sativa
  Clone ID: uC-osflM202055b09a1
ccgacaaaagaacttttccttctctattaatttaatatcaatccattggatctccttttatgtatcatctcaaaagacataaacaaaaccaaaatttaaaaaacaaggaaataatcttccatctaaaactcaatcctggaacctaatctccaactcatcctcctcaaccatgaggaaatgcgatcctctgtcgatcaccttctcgccgtccaccctcgccctgctcaggtgctcgcatgggctgatctccatcttcaacttcttcttctcccctaccttgagatgctggttcctgaacccgatcagctgcctcaccggccggccgccatccgtgctcgaccaccggacgaacatcagcacggtgtgcttgccatccatggggccatggttctgcacctccaccatgaccgggaacctgagccgctcgcaccggtcg

SEQ ID NO: 29970 - DNA, 314 bp, Oryza sativa
  Clone ID: uC-osflM202055b10a1
cggcagacactcacggtatagtagggtagtcgggggtccagggatatagtcatatctgcgcgttttttcatgccgttcgttgacttcgttcacagggccagggccgggtaggcgatatcgagtgtgaccccacacaggccggggccaccgacgtcggggaaaatccggatgtagccgggctcgccccatgactggccccatgagttcttgatggtccagtacttggcgccggaagacccgttggtgccgtacccgacgacggtgacggcgtgcgctaggcccgtgccgaacgggcccgtgtaaaccccaccctt

SEQ ID NO: 29971 - DNA, 469 bp, Oryza sativa
  Clone ID: uC-osflM202055b11a1
gttaggagagatcgatcacctagacgataactagtactataataatgggggtggttaactattacagacagaaaggtacttaggagatcgatcacataaaagacaactacaataatagtggtgcaagtatttaggagatcgatcacctagaagacaactataataattgtgctgctaagctattacagacttatcagaagccaaacatacgagtgaagcttgagcatccacaaaaatcaacatgcagttccaatctgctgctccaacttttacttgtagaaacttatggatctgaatctctagctgcattagagtcctccaaatcagtcctcactggcttcagtgtcttgaggctcttttttctcttgaacctgaacatagccttctcgtactttgttaatcatatccggaagcaaattggttgaaaataattaaaccccaaactatgaatagcttaaaagaggccttt

SEQ ID NO: 29972 - DNA, 457 bp, Oryza sativa
  Clone ID: uC-osflM202055b12a1
ggatcagtgccagattaaggccctacagtttattcatatatacagggcgcacattacaatgtttaaacagcactacaaacatacgaccgaagtacactatcttagttcagatatctcctgcagcctctcgatctacagaagcaggggattctttgcccttcatcttctcggttgaagtgataatcgtaggtaatttcctcccccggatttatgtggggttccggaagaacactaacttttttttggttcttactgggaatatttttgcgacacagtttggttggcaagagtgggtgatgaatcttgggaaccccacctttgcgggtggcatcgatgatatgttcctttccaatcttgaagaagtaacaagcactcttatattgctgccgtttcccggactgggattcaatctctcttttgtcagcaacgcattgcccaacaatttcaccaacatact

SEQ ID NO: 29973 - DNA, 471 bp, Oryza sativa
  Clone ID: uC-osflM202055c01a1
gctgatgagtatatacttgcattagttgctcttcattatttgcattgatcttcctcttgtgcatgacaaggtactagtagtacggaatttacatggttggtaccaaaaggggggccccaaatgggaaaaaagaagaagggagaaaggtgaagaactaaacaggattatggcacaacaatggccagacagccatcagtttctctcgtccgtcgttgattaattagctctctgcgcttctgcaatgtggacaccattttcgagcacctgtgttggtgtagaatccacgatcgatcagcgttacgggttaccctgccgatgtaatcgcttggacggcccagatcacgcgcttttctttagctagcctcgccggttaaattcaattgttacagcctcaaccgtgtcctggacaggcgattccacttcacgagccggaacaaggactccatcaccttggcgggctcctggagggag

SEQ ID NO: 29974 - DNA, 441 bp, Oryza sativa
  Clone ID: uC-osflM202055c02a1
gaatgtatatactgtcttctttgtattgcaatgaaacaatggcaatcacatatatgttgttccagattcacaactcaaacggcagccgaaatgaccaaaccggcaaaaaagaaaaaaaaaacacacaattattagccgaaacgacacgaagaaacgagagggactatggcactgcaggaagtgatctgcaatgtgtggtgttgacaggggaagatgagaaaaaaaaaattaaaccacaattaatcccatgcatgcgcggtggtggctagaaaaattgcatatggatctagtaatgtgactcgtttggctgagttaatttgttgatgaaatttgggaacggtgcgcgacaatggatgtgatcgatcgatctacaggccctgctctacgaggtagtcaccgagcctctcaaccaccatgttgcactgcccccgggtcatgggc

SEQ ID NO: 29975 - DNA, 391 bp, Oryza sativa
  Clone ID: uC-osflM202055c03a1
acagcgagcacaggggaatcatgtttagttagcggggctataatcgtaagcaccaactgtttacttgatcaatggcagtatttgccattttttacaatgaactatacaagtatatgcaaaaacatttcgcctaaattgatgggcttcctacaaattcgccttttccatttcacccaaggggatgaacatacaacgcaattaagcgacaaacaactttgcctgaccggcgatgaacaggctcatgaacttttccccgtccaccgtgtccttttccatcaaaagctgagcaagcttggggaggatgtccatgtgtgtcgggatgatctgcgttgcttttgagtaggcctttttcacgagcttccttaccttaagattcacaacattcgggggg

SEQ ID NO: 29976 - DNA, 444 bp, Oryza sativa
  Clone ID: uC-osflM202055c04a1
gtcccatcgaggaaaagacgaggaactaaccagtcagttagacagttgtttgctgtcaaaacacaaaactgaagggggaaaaatttacagtacaacagaggttaccaaaacaacttgtggtattattagttgtagactctttatcatggttaagaccgacctgatctgggattctcgtctcctggggaagggcatctatacacatgctgttgtactaactccgatcgattctgtgaccttgacgggaatcatcaggttttcagttgagcaaccttttctgagacctcatcagctgtttcgtccatgctctctgtaagggaatcctcctgatctctgtcttgctttggttttttaccaatacacttggaagcgcttatgctttcactcttcaacaagcttcgagcactcatgagcggtttgctaatgccgtctgtcactgatgca

SEQ ID NO: 29977 - DNA, 464 bp, Oryza sativa
  Clone ID: uC-osflM202055c05a1
aattaggataatgattttagaggaaacaaagtattctaatcaaaatgtaatcgaaaacagtaaaccattgctctaagcctcaacctggtgtgtccatatcatcagagaaaccaacacaggtgcgtcatcagggagacagttagctgcttggcgttcacattgccaatacaaaaaacgaaattttccacgcaggaaggtaacaagcaatccaactcaaccgttgacttgtctttgtacttcggtgcagtttttattacaaaaagcaagaataacattcattggtatgcttacagcgccggctgtcactggaaaagaaaaccatttatggagtgtccgagcatttcaaaatgccttgagagatttatggcctacaggaagtttctgatgtccaacttcttgacatcaggcatctcctcgtttttgaactcctccctttttagttgaacctccattgcttcaacaca

SEQ ID NO: 29978 - DNA, 405 bp, Oryza sativa
  Clone ID: uC-osflM202055c06a1
gggcatagggcagtgattggttaccgctaagcattccatgaacaattgttcactagcagcttgttgggtacagtattgtcactcaaatatttgctggggagttgacagaggccaagatatagatgccattgatcatcttgatctgacaaagctactgtctcccccaggagaaggctcattttggcataataagaccgagaattttacagcatacaacggaatgagacgctgcctgagctaaatagagagaagacacaggtttgattcctttcttgagctattcccacgcccgtttggtgtaaaagctagttaggcagatcgctaatgcctggaacgcccagagcgggtacctataatccattgtgaatatatcctttccgattttcccaaattggaagatgacct

SEQ ID NO: 29979 - DNA, 467 bp, Oryza sativa
  Clone ID: uC-osflM202055c07a1
cttgaaatcaaatggacagtgctcagatgatttccatcttataggtttttacagacggccgatatcaaaacatccacacaagggtctttcttgaactattgtatacaaatatatgtggtgcccatcctatacagtagaattctatgcacatttcagcatttggtcctacctcagtcagacccgccgcagcacagagagcagcactcgaagcatgcgaggcacgagagcgcgccgcacagctgcaccatgacgatggcgcaccggtcgttcatcttgctgcaggtgttgatgaagcacatgcagcagcagcagtccgtgaggcggctgcagcagccgacggccttgtcgaacatctcgaacctctctggtggtttcgtgtccccgaacccagcggaaaggttctccctcgttgcagctgtgtcaccgaacccgagcgtcagtccgttgagcgacgtcgctgattgctc

SEQ ID NO: 29980 - DNA, 429 bp, Oryza sativa
  Clone ID: uC-osflM202055c08a1
aaagttaacacaatatcacagatttcctctttgactgaatatccagtatgaatagaccaaaatgcccctacctacactgctctccaaacatgtgggaattatcaagaagacaaagcaaaaggggacatttttctgatcatgccaccaggaggagcaccaccaagatcgccgaggcggcggcggccacggaacgcggcggcccgatcggagcggagttgggtaggtaggggtaggagtccggcggcggcatcttgcactcgtcgccgttgaagtagatcttgcgcgggaacgcccagccctggctgaaggtgaaggtgttgtagtcctttcgcatcagcacctccgactgcacgttgccgaacggtcctgccttcatgagcaggtcgttgaagaacttgagcccctagaacatgccggtgtctttgattg

SEQ ID NO: 29981 - DNA, 342 bp, Oryza sativa
  Clone ID: uC-osflM202055c09a1
ttttgtgttttttttttttttttggttttttttttttttttttttaatttttttttttttttttttgttcaaaaggttttaatttaaaaattgaacccaaaaacaaaaagggaaaagggggggagtaaaaaaagggggaaaggaccaaaacgcgggaagggggggcgcgaacaagggggggaaagagggggcccccccaaggggaaaaaggggaagggcccccaccctgggaccgccccaaaaagagaacggggggaacgccccccacccttgggcggccaaaaatggacaacccccttttgccccccagcgaacagggccggggaacggcccacccccccc

SEQ ID NO: 29982 - DNA, 459 bp, Oryza sativa
  Clone ID: uC-osflM202055c10a1
gcaggttggaagttgattcatacagcaacatgcaccattgaccgttcatttaaaaagaacacaaagtacagtgcctagatcacagcggatgaggatactaactttacttctctctaacttcgagtcattgacaaatgactccgttgagtagaggatccacatctcagtgacccatattagagaggatccacatctcagtgacccatattagagggaagtaagtcaaaggatctcgatccgatcacagcacatctgaatataacacaatcgcagcagtaagtaggttacatttacagatgctcaagctcaatgttctcaacggcgtttggtgtcagactgtcagtaatcttggtatgcatttctacatccatttggcgtcagcaatacatttctagctcctcactcctcagcatgtaggtgagatcattaaactactgatccaaccctgcaattcaaaac

SEQ ID NO: 29983 - DNA, 429 bp, Oryza sativa
  Clone ID: uC-osflM202055c11a1
gggaacttattcctcatgcatatactcttcagagattttgatccaaaagaaacatatgatccatgacaccatccatccacaaacacagaagcagttttccccagtccatcgtaagcaatcctggggttttaatttacatcttcctcaaatccgagctgttctagtttctacaagagggagcttgctagtaggcatggttggagaggatggccctcccatggcggtgcgggtggtgagcgcaggcgcagtggacggaggtgaggctgaggcatccgctgatgatgagggagtgccgctccgggcacgtgtggagcgccgggaaggagtcgcacaccgcctggaccgccggcggcgtcagcgccgtgcactggctgatgttcaggctggccagcccgtcggcgccggcgccggcgttttttctcgccgccg

SEQ ID NO: 29984 - DNA, 364 bp, Oryza sativa
  Clone ID: uC-osflM202055c12a1
tttggcgcgccttctttttttttttttggggcaacgcagattaatgggttacttattaattagtttaaactgctatgacccagcaaatgttcggacagcagtacagcacatttaaacggactcgatggtccactaacagcacaaataaagttttcacgaggataatgcagacacaggataacagtacagcagcaattccatcaatcaatgattactgaccacccctgaggcggagcaccaggtggagggtagactccttctgaatgttgtagtcggcgagggtacgggcatttttcagctgcttgccggcgaagatcaagcgctgctggtctgggggaataccttccttgggctggatcttaac

SEQ ID NO: 29985 - DNA, 463 bp, Oryza sativa
  Clone ID: uC-osflM202055d01a1
cacatgaaacctcagccttccattatgacagtgacctgtctgtctctgtccaaaagcttcatacatgagcaaaggaacatcaaactgaaaaagtaagagcttaattataggactcctccagtcccagccttagggattgaccgagataaactctatttctacatccactaatttcatcatctccccgtactgacgcagttgcaaattttgcttaatttcttttgaaggtttcagttggacagagctgcaaggaagaggaaaggacataattttgcctgcatagtatgcatgcctgacaatattatgatctattcctcctttgacaaggactaaggtaccccctagttactactaaaatcagatcattgctgctgcctcccactgtctcaagcatggtttggtaacctctggacatggaggctctgatcgatcagaagttggtgttcatcatcagaccttgatc

SEQ ID NO: 29986 - DNA, 439 bp, Oryza sativa
  Clone ID: uC-osflM202055d02a1
ggctgcacagaacaggattacgtaacaatacgctatgcccaagacaagtcaatactacaacatctgtggcgagtacagaggtacaaaagtcaggcaccgtaagcctttcgattaaaaaccaaactgaaacacgcacgattttttaacaccccacgaaaaacaatctgatagctagctcctttggtggtggaacctaaagagctttatcttcccaaaacatccacatcattatctgtcatgactatatagtttcgatacgtaaaaaggcagcgttcactcagggatatccgccatgtcttcctttcatttaagcccggccaagatgcttcaagccttgttggcaatgttgttggaaagccagtcaagccccttatacaaccccttaccagaagtagcacatgtgctctggatgtaccagtgccgctggccgcaggagggc

SEQ ID NO: 29987 - DNA, 434 bp, Oryza sativa
  Clone ID: uC-osflM202055d03a1
ggcgaacacagatgtcaattaactatcagcttcccatactgccgcgaaccaagatgcatgtttagacaggagagctaatagatacaatgcatctttacacgtcttcctgctctcgaccaacactttcctaacagacaagtttaccacaactaacttcagctaaactaactatactaaccattctacttcctggacaaaatagtctcctccagaagaccagaacccgcacaaagagatcaattggctcactcccgtaatgctctactgacccactgcacattttggaccaagcatcactgtgccttacaagccacctgtatgctgttgctcttgctctgtattgctactgctcccacgatgctcctgttgcaaggccccttgttcacgacatgggttatcattctgtgcattttctctgctctccgttatcaact

SEQ ID NO: 29988 - DNA, 372 bp, Oryza sativa
  Clone ID: uC-osflM202055d04a1
gggaggcaaaaacttcattctgccttgaaaatcgacagggttatacaaaaggcaggggtaccaactgctccagggttccagggcaagctctaaaaaatcttttcttttttgggcgggaacaatgggggcagcaataaatcgtaaacgtagaacacgttttcttatttggggccatttaaacaagtttaaaaattggaaaagggattaaaaatatctggcaaactttccgggcacctggactcggtgagtaaagggcaacccaagaaaaatgccctaattggccggcaggctccccccatttgaaattttaaagcccaagggtttccaaaaaaaaggctagatgaactacttgcccggattgacaaaccgggg

SEQ ID NO: 29989 - DNA, 359 bp, Oryza sativa
  Clone ID: uC-osflM202055d05a1
attaaacaataggctgtttgctattgcacataatcaaaacattaacaggggggcacactactacattcttcttccacttttttttttgggaaatttcctagacgaactttagaggaacattaaacttacaagggaacactgaacaaagggggcatttgggccaaactttttttaggggcatttggggttatactatacaaaagggcacaactaaattcctagaaaaactctagggacaaacccagactttgggtagaccaccccagcagcagcagcccggaggaaggaagcaaagcaaaacaccggggggcaaaaacccaaggcttttgcaacaacctttaggtttggccatcctagcc

SEQ ID NO: 29990 - DNA, 366 bp, Oryza sativa
  Clone ID: uC-osflM202055d06a1
aaaaggcaagaatattattcataaatgacgcatgatttttatcaaaacgcttgcaaatgatatcagataagtagagtcaacaagacaaaactgtatctgccaaagcacaccttcccaactccacccaattacgccattatttctgggcaaaagcaaacgggttcccattcctccccttcaccagtctcaaaccataaaccccacaacaaatcctcctaagggacggcatataagatgatgaaaacaaagcaggatactccagagtcgtcatggcgaacttcaagttgacacttctcatgccacagcccgtagtcgggctgggcagcctaataccgggtgtgcccgggcttgtagggacccttaact

SEQ ID NO: 29991 - DNA, 424 bp, Oryza sativa
  Clone ID: uC-osflM202055d07a1
ttttgtgtttttttttttttttttgttttttttttttttttttttttttttttttttttttttttttttaggggaaggggaaaaaagggtgaaaattttgggtttggccaacccttgggggacctttttttttttgggggggtattaccggacaacggaggcgggggcatcctggtcctttttaagcaaacccctcacggcctttggtccaaggaaaaacccatcacgaattcctcctaacctcctccttggccaaaaaacaccaaatgccctagtttttttttccgggggggaccctacccgggacttttttttccaatggcccataacaaaaaaaaggggcctgaagaaaagaaaaagaaaggaaaagaacccgggaaaaagggggggaaaaaaaggcgggaggaaccttacttcaaacggg

SEQ ID NO: 29992 - DNA, 354 bp, Oryza sativa
  Clone ID: uC-osflM202055d08a1
gggggcggggccgggggcgggggcggcggagaggttcgcggcaagcagcagctccatcaccgactacctgcggtaccgccgcccggggtccgccgggggaggtgggggaaccggggtgtgcggcggggagctgcagacggcggtggtgcggtacgagaagcggctcccgtggtcgctcatccaccccttcctccatgttgatttggtttctactgtccacattgctgacaaagaatacttcgatagacttcagcaagcacttcaagattatgaatgtgttctttatgaaatggttacaagtcgggagaactttaaacaatcgcaaggacccaacctttgcgaagaagctgaaat

SEQ ID NO: 29993 - DNA, 122 bp, Oryza sativa
  Clone ID: uC-osflM202055d09a1
ttttggtgttttttttttttttttggttttttttttttttttttttttttttttttttttttattatttattaaatttataaaaaagaatagaaagaggaaccagacgaaaaaaaacaaaaa

SEQ ID NO: 29994 - DNA, 440 bp, Oryza sativa
  Clone ID: uC-osflM202055d10a1
gaaaaaagacgccccacatcacggttgcagacaaagttgcagattccagcaatgacgcaattaaaaccgaaaattatctctcaaccatccattcgatccatcaactcatgcggggatcgatcgatcagctggagagaaagttccagtgacaggttcatcaaaattaagccggcaggcaagcctgaaagctaccgttaacgcattttatttttttcagaacaactgacaccggccgggtatttactccacttaatagaagcacctttgatcaggctgggtgatcttctccgtcagctttttacatcatatctactccgccaagttgcatccacggatgtaagggtgatcatactttatataccttggccaatatggtctgtacttggtcattgctaactccagccatgggttcatgttacccgtggaatgaacaacagcag

SEQ ID NO: 29995 - DNA, 455 bp, Oryza sativa
  Clone ID: uC-osflM202055d11a1
gagaaaagatccatgggtctttaaatccacacaagctcttttacaataaggtcacaagccctgatggccattcgaaaatctaaatagttgtacatactgcttaattttgaaagataggattgaggaaacaaagttcttgtgaaaactttgaccactagagtaatcgatttgccagaaacagcttaaaacagcaagtttataagtgcgaagcaggaacacgtagaatcatctaatgacccatgtaatttcttcctgggcctcctggtggagtactgccatacccaccaccacccccatagccgcccaaataaccaccagcaccaggcattccaggcaaaccactactacccagtcctgcagaagcccctgggttaggcaaccctgaaccatttggacccaactccaggatggtgttcagacccaacccttcaccctgggaggcaaggatagttgtt

SEQ ID NO: 29996 - DNA, 443 bp, Oryza sativa
  Clone ID: uC-osflM202055d12a1
tttttggagcaaactaacacacggggaggagatgactttagggagaacggaatattgcagctggactatagtcaaatgtaaatattaccaaaaccagtccccaattgaatcaggctcaacttgatgaatcatctaaggagtgatccaacaaaacaaacgtaaatggaaaagcagtgcttattacaggcctaaaataccactcacgctccaatgcaggcatccctctcccttcattattccaagctttgggcacaagaccttcatggcttcatgtatactgatccttggcatcaacgatgacaaaaacttaaaacgcgcggtttgaatcttacaggctctttgctgttgcgatgacgctctccgcggtgatgccatcctcctggtagatctttccagcaggagcacttgcaccgaatttgtccatgccaatagccttgcctttg

SEQ ID NO: 29997 - DNA, 312 bp, Oryza sativa
  Clone ID: uC-osflM202055e01a1
aaaacgaacaaacgcaaactgtttttttcacaaggtttgccgatgacaatggaaagggtaatctaggtccaagcggatcattgacgggggagacaaaacattggttggcccacaaaacccaccagtggggccaacaaggagggctatccgttattggacgggagaaaaagtaaaacctgacggggggaagggaaactgaataattttaggagaccatgatgatgatgatggataggcttcttaggacgcccgccgcccttaggggtttggtgctcccatcttggccactggaagggtcactcggaataggtt

SEQ ID NO: 29998 - DNA, 466 bp, Oryza sativa
  Clone ID: uC-osflM202055e02a1
gaatcttgaagctgacagaaccgtcaagtttttatttattgaatcagttgttcaaaagtataaaaaaaaaagattgagagcatcaaaacttacaaatccaatgcaaaggagacggctgacagcccttgtaataagtttggcaaatcaatgaatcaagcagtttagatgttaccaggttctcccatcaggcattcaacaggtaatagtggatcgctctcggacaagcagcgtctgtcatcatctttacagttgcatgtcgtgtgttgtcagatgcttatacttctgatccacatttgatgatcttgcagcctctgtcaaacccttggtaacaaccaacttaagaatctcaacaccctcttctatggctgaatcaatccgttctcgaccggtcttattaaacttctggagcacaaaagctttggggtccatttggccaggtggccgtccaattccaatccttaattga

SEQ ID NO: 29999 - DNA, 383 bp, Oryza sativa
  Clone ID: uC-osflM202055e03a1
agcaacgcagattaatagtttacttattaattagtttaaactgctatgacccagcaaatgttcggacagcagtacagcacatttaaacggactcgatggtccactaacagcacaaataaagttttcacgaggataatgcagacacaggataacagtacagcagcaattccatcaatcaatgattactgaccacccctgaggcggagcaccaggtggagggtagactccttctgaatgttgtagtcggcgagggtacggccatcttccagctgcttgccggcgaagatcaggcgctgctggtctgggggaataccttccttgtcctggatcttagccttcacattgtcgatggtatcggagctctaaccttcagagtaatggtc

SEQ ID NO: 30000 - DNA, 429 bp, Oryza sativa
  Clone ID: uC-osflM202055e04a1
gagaaatatgtataataagtatttgtttgcacgttttccaatactgaatacgcttctttatttacctttatttttactgaccaatcaatgagttgttgccggctctgtgataatcttttgaacttgagggcctcagcattctgttaggacctagcactgagtgtatagaactcgtatatgaatagttgtaaaaatgtaattataagttttaaatattgcattgataatacatagaatccaaggcgcattcctagacggatatagtattttatagacatagttaacaaatctaaaagttgtagttttgataagtagtggatgcagagtatgtgcaagaaggtgggggttaataaagatgaggtagttttttttttccacctgtagtaattgtggctatgaagtgtttgtttgcaaacaatacagtgggct

SEQ ID NO: 30001 - DNA, 407 bp, Oryza sativa
  Clone ID: uC-osflM202055e05a1
gggggaacactaggggataactctattggtacagtacaacataacacaagcctcattagggttctctacttctgatattttgcatcactatgtacattggtcctcttagtctactatgccatactgcacgttgggtgtaagtacctacaactgatcagcagggccagggattaacttacaaagagagacaacattagcaactacatatgtacatctatattcttgttctttaccacaaacatagagtgcttagctcttctatttgctatctggctgaagctctgctgggctcatattaatgctcaccgcgagtgctatcaacattgcaaatccagcacaagcaaggctgaaacctctgaagttgaaaggtgcagtttctgataggaaccaatcagtgagaggagaaa

SEQ ID NO: 30002 - DNA, 349 bp, Oryza sativa
  Clone ID: uC-osflM202055e06a1
gaccaccgaacaaccgcttcttaaaatttaaactcgccaaacaggatctaaacgttggttagcaagcattcatgattcatgattcatctatgggttaattacaacagcggccaaatcacccactgtaaagaccaagaaatcacctggaacagcagcaagaccactcactcactcactcactcaggagtacgtgcttctaccatacagttaatttacaccggaagaaaattcccttccattttacacccgacgacgcgaaaaggagaaaaaaaaacgttacgttagcccggtacgcaacggtaccggggagccaccgtgcccgaggggatgccgctcttggagttggcgt

SEQ ID NO: 30003 - DNA, 423 bp, Oryza sativa
  Clone ID: uC-osflM202055e07a1
cttggcaaacatggttaatataacagcattctaacagtgcagaatagtagggtttttcctgtggctggcatcgtggaacaagaaaaccaggatccagccatcatttatcaactgaacaaaagcgtgacccagaactacttaagtaatttaagaacatcatcgtttcctccgcgatggtgcgacgacagttcgtgtactagaagatagctactgaaagccgaagacatcaatgtccattgccccaacaacaacagatggtgcatcagactggcgtccgaattcatttaactgatccccaggctcttttggagctgcggcttccttgatttcgtcaccaccatcatcattggcatctgaagtccacacagtcaagttgccacgcaggagctgcatgatcaaagtgctgcccttgtgggatttttc

SEQ ID NO: 30004 - DNA, 398 bp, Oryza sativa
  Clone ID: uC-osflM202055e08a1
gtaatcaatctgccaagttaaccataactatagagtttcaattttggagattaatcataagtgtagcactgctggaagataatgacatagcagaggtgatagcaaaggaatttacacaaaataatcctagaagatcccttcgaccgtgaagatagatagatctttagaacatgtagatcaactcgacgtagcagagtatgatataaacaaaaggtggttgtcgaagaacaaaccttcaacttcaaaaatatatggatttagaacgttgagatgaattcaggcgcatcacccctcggtccagcaactgtcctggaaatatacaactttttcaccttctttgcatcattagcatttgttgccttattgatacttgctgttctattcatgacctcgatgtt

SEQ ID NO: 30005 - DNA, 355 bp, Oryza sativa
  Clone ID: uC-osflM202055e09a1
ctgatgagaaaaccactaccaatacatgtcagaacttacaggtgatttagctcaaggagggcactcaaaacacttttcaagccttcagctactgaccaccagagacgtcttacaaaacgggactgcagcctgctacgcagcacaggtgacaaaacgaagcacggacgcaaacctcacccatacatccatcacgcacgtcagagaaagaaaaaagagcacagcatcacaaagacacaaaactcttcactggcaaaacaacctgtgaagggcaaatggggctcaatgctattcggcctcagcttcttcctcttcgtcttcgtacctcttcatcggctgtggcgtcctggtactgctg

SEQ ID NO: 30006 - DNA, 296 bp, Oryza sativa
  Clone ID: uC-osflM202055f01a1
gcccgcgcctgtggctgcggctccggcggccacgaagcaggtggcgccggcgaggtgggcggtggacagctggaggacgaagaaggcgctgcagctgccggagtaccccaacgcggcggagctggaggcggtgctcaagacgatcgaggcgttcccgccgatcgtgttcgccggggaggcgaggcacctggaggagcgcctcgccgacgccgccatgggccgcgccttccttcttcagggcggcgactgcgccgagagcttcaaggagttcaacggcaacaacatccgcgacacct

SEQ ID NO: 30007 - DNA, 461 bp, Oryza sativa
  Clone ID: uC-osflM202055f02a1
acgggagagggaggtgaggaaggtcctcgtgcggatatacggcgacggcgtggagctcttcttcgaccgcgaggacgaggtgcgcaccttcgagtgcatgtctcgccatggccaaggcccccgcctcctcggccggttcaccaacggccgcgtcgaggagttcatccacgcaaggacactatctgcagcagaccttcgtgatcctgaaatttcagctctggtggcgtcaaaactgagggaattccacaaccttgacatgcctggcccgaaatctgtactcatttgggaccgactgaaaaactggctcaaaactgcaaggaacctgtgctcatctgatgaatccaagaaatttcggctgggtagcctggagaacgagattgctgcattggagaaagaattttcaggggattaccacgggattggtttttgccacaacgatctttagtatggcaacatcatga

SEQ ID NO: 30008 - DNA, 489 bp, Oryza sativa
  Clone ID: uC-osflM202055f03a1
aactagaaacggcattacagataagcaaaaaaaacatcgatatatcgcttatataaaggaccctcttcagtttcagaactgacaacattatcgccgcacactttaccggacctgcagcagaaacgcagtattggcaagaaaacgagaacagttgatacatacacgtttattcggggagagatgtaaaaaggctatcaaacaggaggccataaagaaagttcatgggtagcctcaaaagcattctagaatggctcttgaaaagtttatgtgatgacggtgggagcagatcggccagtgtactcttgcatctttgacagcttcagtgcaacatcaaccagaggagcaagggcatcctgcgaatccctgccggtcttggaagaatccttttcatactgctcgatgtagacacggatagtagcaccaacagagccagttccagagaagccgaacacccagccggaaccatcttcgagaggtaccggacaccct

SEQ ID NO: 30009 - DNA, 464 bp, Oryza sativa
  Clone ID: uC-osflM202055f04a1
gcaatgcaatgcaaggtaaatcgatcatcaggtttagcaaagcaaacatgcgttgagctaagctacaacgctacatgcaggcagttcttgatgatgatgatgtctcagcccagtctttgccggattctcccttggaagcagcatgatgcctcttgtggccactccggctcagcagagagatgctgcttgctcttggtatctggacagcgccagccacgcagtctccagcttgggcacagctccagaccctggaagggccttccccaagtgaccttagcctcgggaatccgtttcttagcctgcagatcgaccactgctcggtgtctttgccggacagcctatcgcaggcagggcaaggagggtcatgcttctgccccttgggagtggttcgctccaagcactcggcatggtagacatggcagcagggaagcacaccagcaacaggcagatcttcagtacggacg

SEQ ID NO: 30010 - DNA, 366 bp, Oryza sativa
  Clone ID: uC-osflM202055f05a1
aaaaacgggaaaacacggccctatttgggggggctggggggatgcaacacaggggcgggccgaaaccccctaaactccacatggccccattttagagggggggttgccaaacccccggggaaacctttttatcattattcccatttaaaaacaaaccgggcggggtgggagcccgggggggtctgggcatgggtccacaagggggccctttgcggggggaaagcccccggaatttaggggaccggggtggggcccctgggggggggggggttggcgagccccggggtccccccctcccccggggggacggcctcccaaaacacgtacctttttccgttggggcgggggccaacccacctggggggg

SEQ ID NO: 30011 - DNA, 451 bp, Oryza sativa
  Clone ID: uC-osflM202055f06a1
ggctggcaaaattgtagagcctttatcaataattgaatatagaatctctcatctatgacaccaacacccaagcagctgctacaatcaagggtacatttacacaactcaaccaacaaactgttccattttacaagctcttcttcctgtttatttcacttaacaagggccaacaaatctcaagggttatattcctgtgtgctaacgcaactattggttgcttaataatgccaaggcagaaactttgctgggtacctccagacctgcctaagggaaccagatacaagtcacatgtcgtcctcttgttctgggatgccttctgtagatatggcagaatgtgcaggttggtagggcagggagcattaagaaaacttggattataattctcagaagtaccgtatcgggccatccaagcttccagatgcaaactggtttacaataggatttgttgatg

SEQ ID NO: 30012 - DNA, 497 bp, Oryza sativa
  Clone ID: uC-osflM202055f08a1
ttttgggtttttttttttttttgggttttttttttttttttttttttttttttttttttttttttattttttttttattatattaatattttttttttttttatgttttttaaaagccaccaaaaaaatggcccaataaaaaaaaaaacgccggcgcgacccaccacccaaaaatcgaggggaaaggggctgatgttaaaaaaaaaggacgcccgggggtaaccaaaaggggcagacaaaaaagtgttttccagagaaacaaaaaaagtttatgtgatgacggagggagcagatcaaccagtgtactcttgcatctttgacagcttcagtgcaacatcaaccagaggagcaagggcatcctgcgaatccctgccggtcttggaagaatccttctcatactgctcgatgtagacacggatagtcgcaccaacagagccagttccagagaggcggaacaccagccgggaaccatctgcgaagaggtactcgacaccctg

SEQ ID NO: 30013 - DNA, 423 bp, Oryza sativa
  Clone ID: uC-osflM202055f12a1
gttcattcaaagccacatcactgttggttctctagatggccaaagggttttccacttgttcaggtagttctggtacttgcgcaaatcaaatacaatgaaaaggtatagctgcactttaaactactaaaacatctaaatttccatcgaagggctaggcatttgtgatgctatggttaaatttgcttgcaagaaatctgaaaacagaaaaccaaaacaaatgcttcaaacattcgatggaatcattccctgcttctcgtcctccaattgctttttcttcaccaaaagctccaccaaatttcatcgtcatctgtgggtataatatgtcacagtcggtaccgtggagcttttaaagtcgtgacgttcattggggtccatgttttagtttgcaaattccaatagctctgcatccatgaaactgctgca

SEQ ID NO: 30014 - DNA, 263 bp, Oryza sativa
  Clone ID: uC-osflM202055g01a1
ggccaacccccacaaacgggggaaaaattaggggggggaaaaaagggtaaaaaaacccgaagacccaaaatttttttgcaaaaaaaaactttttaaaaggccttaaatttgggcaaaggaccaaagcctaaaaagtttttttgggctttttttttttcagggccctaaaaaaagggggcccccaaaaggcccaattttacggggggggaaaaactccaaaatttttagggggggggggggccttcagactgggggaaaaaggg

SEQ ID NO: 30015 - DNA, 377 bp, Oryza sativa
  Clone ID: uC-osflM202055g02a1
caaaccaaggtgatggatctttattgatcttagctatttactgacatactgtacatgctgaagttgcaaaaaattactacgcggccgtggctgggatgatgatggggctcctcacgatgtgttcgtccgagacccacttcaggttgccctcggcgccggcgacgttcggttggccggcccaccgcaccgtcacggggaagctctgcatctccttcagctccgtgaaccgaagcatcggcggctgcacgatcacggacacgtccttgggcatgtcgacgacggccgtgtacacggaactgggcttcccgacgttggtcaccgtccggttcaccgtgatcggctgcgcgagcaggttgacgacaagggatggtagttga

SEQ ID NO: 30016 - DNA, 457 bp, Oryza sativa
  Clone ID: uC-osflM202055g03a1
ctcctgtaactttttcaataaattaatagatatgtttgctgcaaagcttggaggtttgtatggagtaacattacatgagaatatgagattcaggtacaaaattttcatcagaaatattgcttccctaaaacaaatgctactacatgaaatgtgatgaatccatggaatcgtgacagtcatcgagaaatgtgttgatgttcatcatgattgagctgcaccacatcttgggtcagcataatgcctcatttaagttccatgagaatctcacacaaatagcctttggcatcttcaaattcatgtcaggtagggcaatgcatcacactagcttcctaaatccatcctctatagaagaaccgtgggaacattaggatcatttccactgccttcagcagatttcttcttgcctcgcttcttgagcttctttctaaatctgaattgtctttcatattcttctcca

SEQ ID NO: 30017 - DNA, 462 bp, Oryza sativa
  Clone ID: uC-osflM202055g04a1
gtattgatctgcattatatttcagccagcacaagtgacttgccaagcaacttgttcacagtatcaaaacatagaaatagttcgctactgcagccttacagacaggaccatgtatagtagactgtaaccggtgggtgcgcccgtattattcaattcccaaagagcagaaataattttatctatacatcatgcatatcaaggacaagaagttttttttttccttcagtagatcgagttacagattgttgcagcaaataattagcctttcgattgattgattaattaattaattaacagtgccttttaattataactgctcgatcagccacgctgaggcagattctttctctcttctcctggggtagtgctcatcttgttttcatttcacatcctggagtagccatcgtactgatccatgaaagtgtcgttgaactttttgaagctggtcatgatggcaggcatg

SEQ ID NO: 30018 - DNA, 319 bp, Oryza sativa
  Clone ID: uC-osflM202055g06a1
gaagaaaaaatgaggtacattattgattattcagatttagtactagcatatgcgtgtatcagtattcaaaatgtagctagctagcattaagccacagaagaacaaaaatcaagtctcaaatctatttatcagggtacaaaagagttcaacatcagaacgaattttcgggtagcacatcacaaaccaaccatccatccatccatccagagggcattcgtttcttgcagagtaaaagctgaacgacctagagatcaagagacagaaaagatttttttccaaagaaaaatgggtgggggactagcttgtttcacggatcaaa

SEQ ID NO: 30019 - DNA, 359 bp, Oryza sativa
  Clone ID: uC-osflM202055g07a1
ttttgtgttttttttttttttttttttttggggcgtttaggttggcacctccggttaagttgatcaaccaaaccccttgtgacagaccttgcaccacgtatcacctctcctcttcacaacaaaacaccaaacgagcgcagctccaaagtataaccatgcaacgcgcgcacacgcgtacatataccagagtacacaccaaaaccaaaaaaacgagcctagcaatactacccattttagcacccaactttggtcgtgccaactgcccccaagtttaaccgcgccttgtattcatatattcatagaatggagggaatgcgacggcgttcgatgccacgcggccgttcggtttacaggagcag

SEQ ID NO: 30020 - DNA, 402 bp, Oryza sativa
  Clone ID: uC-osflM202055g11a1
ggtgtcgtgcgtcgtgggcctcggcgcgctcgaggcgcgttaccgggtgcgcgagctcggcaactgcgcgcacgcgttccacatggcgtgcatcgacaagtgggtcgacaagggccaggccacctgcccgttctgccgagccgacctactcccctccgacgacgacgacgacgccgccgccatcgtcgccaccaccaggcaccacctgccctccttctgatccatgtcgccaagaacccatcttgcttagcacccaacacccccttccaccccaagagcaacaagggctccctcctgctttctccaccaatggatcaaatccaatcaaaatggaagaacacacaacacacgagaagagagatagagagagaaattaatggaggaagaagatgacaggagaga

SEQ ID NO: 30021 - DNA, 420 bp, Oryza sativa
  Clone ID: uC-osflM202055g12a1
acacaagcgggcaagcatttattaagaagcacctgtttaacatagttaatcaacatgcataatagcccttctccacacccatcaccatcctgatcttgtctacctgaacataacaaggttacatggcaacattgcacaaagctgtaggcatttctcacatgagcatatatcccttcctgtactcactccataataagcaacacaagtagcaagcattacattatttttcttctctgctgctctatggtcctactcaaaacttgcaggaagtgcccagccgctgcttcatccgctgccctgcagccgccgcacgctcctgcagagcttctttcagcagctcctggaacttcttaaggaatatattccactcttctgcattcatgtccgacagcctgacgaagtatacacttgatggaagct

SEQ ID NO: 30022 - DNA, 458 bp, Oryza sativa
  Clone ID: uC-osflM202055h02a1
gggcttctcaatgtatgccatgatctcctcttgccgctcaagagtctcctgcaaggccttcttggtcgctgcaagttcctcctccaatgcactaacacggctgacggcagtctttagcatctcctctttatcagctggcatttctgcaggcttggtgagaatcgcaatgaccttctcctcaatatcggacaaacgctttgtagaagaaacatattcagctactgacacagcctccactgatatctcggatagttgttgtgcttggattttggatgtactttgtgccccaagggtagcaccaagtaccttctttggcatgttgcggctaacacggagcatttgtgcaatgctcatgacaagagccatgatacccccatagagtggaggattggatccattagaggcatttacaatcgctttggttactgtgacatttttaattggcaatccttgctctg

SEQ ID NO: 30023 - DNA, 409 bp, Oryza sativa
  Clone ID: uC-osflM202055h03a1
gggcagagcaacagataggaaatttatacacaatgctgccatccatggactagtcccaactttttaacaaccctaacagaacaaccatttgctgaggaccaacatacacttcttccaccacacaaaccagtacaagttctaaacagagacaaacaacattgtcagcaattagctagctcttcttcttctctcctttagattcggcgaaccaactcttatgccacaccttccagcacatgggtgaatacaaataaatacacaagtaaaacccccccaaaacaaccaagccccatgtataccttgtataagatgttaaaaaagtttttaactggcccaaatccggtccaatctattcacgctcttcctttcacagtcgagctgttcaatgttcttctttggcctctcaaag

SEQ ID NO: 30024 - DNA, 442 bp, Oryza sativa
  Clone ID: uC-osflM202055h04a1
agatcaacagaacactgcatagtgtggtgggatgaatacagaggaagatctaggaccaaatggggattaaggaatactcactatcaatcaagatctagcacaccaaaattacatcaatcctgtgccatcttacactttccttcagctagaaggcatcaataccaggattaaaaacctatgcacatacctaagccagcagcagaaatggtaaagatttcttattgcatctgtacaaaaatcgcatagcaggcagcagcagcagcatcagcagcaagcaagcaaagtatagcatctgtagctcactgaagtgagtgctggaatggagagctctaatccaactgatcagtgatccaaatcttgcaagactagctgatttgatgtggatccgcagctgtgtgttcgatcgatggccgcctcattgcaggtcgtagacgttggaatc

SEQ ID NO: 30025 - DNA, 52 bp, Oryza sativa
  Clone ID: uC-osflM202055h07a1
tttgtgggtccatcgcacctggagaggtgtaatgctttttttctctatttga

SEQ ID NO: 30026 - DNA, 193 bp, Oryza sativa
  Clone ID: uC-osflM202055h08a1
ttttgtggttttttatacctggggggttataatttttccactcaagagtctccgaaaactcaattgaacgagtgacaatatactgctccaatgcacaaacacggctgacggcagtctttaccataaagcctttccatttcagtgataaatcaaactcttggtgagaatatgcaatgacccttttcctcaatat

SEQ ID NO: 30027 - DNA, 355 bp, Oryza sativa
  Clone ID: uC-osflM202055h10a1
tttttgggatagaggagatcaaactgtgtttatagactgaactgaaacttgattatacagtttgccacgactcctaactcaagcccctatgacgtggatacatatgtacaaaagttttgacacctgagaaaatgatctagtttccctacatggatagctagctagtagctatctcatgtcatggagtgttgccaagaaggcgtccaacttgacattgtcacctcgagacaagaacttgatgcagatgggcgccctggcacccatgagtgtcagcatggacagcaagatcgagccgacgccgtcgccgtagatgagccccgacgccagcgccggcgagagcattcgcccgcggccg

SEQ ID NO: 30028 - DNA, 452 bp, Oryza sativa
  Clone ID: uC-osflM202055h11a1
tttttgggttagaaatggagtgagtatctttacaggtcacaaagcagtcaaaatgactccatgtctctctcaaggctctatcaacatccctccccttacatacagtgatacagataaggagttcagaattcagaagaagcccatacatatatgaacaggggtgtactgcaaaagtttgctcgagatcagggccagaatgcaaaccaaaggtcttctgcagcgctgcatgtgccatgtccgtccccaaatcaacaaaagaaagagagaaaagaaagcagcagcagcaaaagataaagaagcctgtgaaaagaagcaaaagagaaaccggagaggaggagcccctttttctttacatctttctcggggaaagggcctttttttgatcagacagaaactacacactgtggtctaaaactaaaaaggatctcaatcactttgaaactactcgtact

SEQ ID NO: 30029 - DNA, 415 bp, Oryza sativa
  Clone ID: uC-osflM202055h12a1
gtaacacaaacaggtgggccaatacacaaattttattgccagttcctccgactgactaaactgacatgagaaggtgttcaggacaattgccacggacatgaatgtacaaatgactggactaaagcaaccacggaccatttatctagacaaaggaaaaaaagccaaagaagttcaaatcggcaaaataaattgccttgtttatgtacacaaccaaactaacagaattcggcagccggagaagcaaattcagagcttatccatgtcggcgttcctgaagctgccaccgaggagtgacaagaggccgccaccgtgcacccttccctccggaacggcacagcctccctctctgcccccatgcacggtaggttcggacgacgatgagggcatcatagagcgagggaccagcacctgggga

SEQ ID NO: 30030 - DNA, 77 bp, Oryza sativa
  Clone ID: uC-osflM202056a01a1
ctcggtggttccccttttctcctttatttgagggattagtaccctagttcagatacacacacgaagaacacaacaaa

SEQ ID NO: 30031 - DNA, 326 bp, Oryza sativa
  Clone ID: uC-osflM202059a02b1
gaccgcattgctgagagatttgctgatgtgaccatgtcacataagggggaggtgaaggcccttgtcagcacagattttccactcccctgtgaaagaggagaaggaactgaaggagaccttgcaagatcttcttgctaagaacaaaactatcttgattgaacagaagatagacttcaggatcacgggagggctagctatcaaaatcgggcagaaggtgtttgatatgtcgaccaagactagggcgaattaaatggagatgttatggtggccaccccttgatttctaactgcctttcggatcgaaagatgcacttggtttgatgctga

SEQ ID NO: 30032 - DNA, 399 bp, Oryza sativa
  Clone ID: uC-osflM202059a03b1
cgaaaggacggagagagaggactgagggtgagctggtgagcgagagattccggcgtctccgcctcgccgtcccccgtctccccgccgccgccgccgtcgcagtagcagccgaggccggtcatgctagccgacctcaacgtcgacccgccggagagcgacggcgaggaccaaccaccaactcccaaccccaacgtaaaccccgccaccgccgtcgtcaccgcggcgacggtggtcgccatcgattcctccactaggagtagcaatgatgagggtagtttggcaaaaagcgtgatcacaacgaaggaacctgatacctgttgaatgcgaagatgctgatcaacattgtcagggggcttctgttgcaccccaagagaaaagttgcaccctgaaagctgcttt

SEQ ID NO: 30033 - DNA, 388 bp, Oryza sativa
  Clone ID: uC-osflM202059a04b1
tttttagccagtttacccaggtgctgaacattgagctggatcaaataattgaggcatgcaagtttcttgacgaaaactggtctccaaagattacactgattgttgcacagaagaatcatcataccaaattttttgtgcctggatctcaaaataacgttcctcctggtactgttgaggacaacgcagtctgtcatccaaggaacaatgacttctacatgtgtgcgcacgctggaatgattggaactacaaggtctacacattattatattcttcatgatgagataggcttttttgctgacgatcttcaagagttggtccactcccttttctatgtctaccaaaggagcactacagccatattagtcggtgcaccccatttgctacgcgc

SEQ ID NO: 30034 - DNA, 418 bp, Oryza sativa
  Clone ID: uC-osflM202059a05b1
tttctttaaaagcaatctgcagtgagtacagggggcacattgctgatgtctcccttagatatgatgcaccagcagatgatctcatagatgtgattgagggaagcaggtccacatgccttgcatctatgttgttgataagattgatcagataacacttgaagagctggaaatcttggataatacttcccactactgcccaattagtgctcattttgagtggaatcacgatggttttttagagatgatctgggaatacctggatttggttaggatatacacaaaaacctaaaggtttaaacccagattatgaggaccctgttatcgtatcctttaagaagaaaacagtggaagacttctgaacagaatccacaaggacatggtgaaacatttaaatatgcattggtgggggttttagcgt

SEQ ID NO: 30035 - DNA, 426 bp, Oryza sativa
  Clone ID: uC-osflM202059a07b1
atggcccccccgccgccgccgtcgtcgttccagctatagctttccccgccggcggtggcgatcgatcgatcctctcctcgtcggttgattagggtcaagaattcttccctctcccagcttggttgaatttcttggtttgatcaaggggaggaattaattgagaggtgaattagttcgccggagtttgtttctctctctctctcctcttctctgagctgagagggggaggagagaatcaagtgacgagttatagtatggcgaggagcggcggcggcaatggtgggggagaaggttggcggcggcggcggcaatggcggtggcggagagggtttgaaagaaagggccgcggacccaggcggaggacaagcttgtggtggaccacgtgcggcggcaccgggaggtgaactggaacgtcgtgccgcggga

SEQ ID NO: 30036 - DNA, 364 bp, Oryza sativa
  Clone ID: uC-osflM202059a11b1
tttcttccttctcctccggctcttcttcagtagggggtcctttcttctcctcgtgcccaccaccaccaccgtagcaatggcgggcaacgggccgatcaacaaggaggacccgctcaactggggcgcggcggcggccgagatggccggcagccaccttgacgaggtgaagcgcatggtggcgcagttccgcgagccgttggtcaagatccagggcgccaccctccgcgttggccaggtggccgccgtcgtccaagccaaggacgccctcggcgttgccctacagcttcaccaggaggcccgcccccgcgtcaaggccagcatcgagtgggatctcaactgcattggccacgggggggacatttac

SEQ ID NO: 30037 - DNA, 496 bp, Oryza sativa
  Clone ID: uC-osflM202059b02b1
gtggcagcatccgagcctgttggatcaatattgccgaaaggggttttcccagcagacaccatgatgcgtgctcagactaacacaacatctggtggttgctcgagtcctggcggtggtcgatgatttttttgagctgagagatctcagcacaatttttcaatcacttgacacagttatgataggcccctccaatgtgaataaaaagctgtggcctctgtagagaaggctcggcgagggtggtgtttctctgccatctcaataaagcattcataggttacaggcaagctcgattcacttgcaatttttgcgttcttctgttctctgaaacgggaaagaaaaggaaggtttttgaatgtcaggctcgatagttcttatcggcagttcgcggtactgggagactcggatccattccttcggaaaaaattctaggcaggaggtgtatcatgcagaagcctctggatttggtcgttcagcttccgagttcgatttttccttt

SEQ ID NO: 30038 - DNA, 464 bp, Oryza sativa
  unsure (1)..(464): unsure at all n locations
  Clone ID: uC-osflM202059b04b1
ttgttgcttggtgagnngcggagatggccccctccgtgatggcgtaganggccaccaccgtcgctcccttccaggggctcaagtccaccgtcggcatgcccgttgcccgccgatccggcaactccagcttcggcaacgtcagcaatggcngcaggatcaggtgcatgcaggtgtggccgattgagggcatcaagaaattcgagaccctcttctacctgccaccgctcaccgtggaggacctcctgaagcagatcgagtacctgctccgttccaagtgggtgccctgcctcgagttcagcaaggtcggatttgtctaccgcgagaaccacaggtcccctggatactacgacggcaggtactggaccatgtggaagctgcccatgttcgggtgcaccgacgccacccaggtgcttaaggagcttgaggaggccaagaaggcgtaccctgatgcattcgttcgtatt

SEQ ID NO: 30039 - DNA, 433 bp, Oryza sativa
  Clone ID: uC-osflM202059b06b1
ttcttcatctcctacctgctctcctctcctctcctgttctacactacccaacttttgctcccaacacatctttgtttcgatcgaccgaacgatcagctctagcttagccgcagcagtggccatgcaccctctcgcccaggggcacccccaggcgtggccatggggtgtagccatgtacaccaacctgcactaccaccaccactacgagagggagcacctgttcgagaagccgttgacgccgagcgacgtcggcaagctcaacaggctggtgatccccaagcagcacgccgagaggtacttcccgctcggcggcggagactccggagagaagggcctcctcctctccttcgaggacgagtacggcaagccatggcggttgcgttacttctactggaccagcagccagagctacgtgctcaccaagggctggagc

SEQ ID NO: 30040 - DNA, 384 bp, Oryza sativa
  Clone ID: uC-osflM202059b07b1
caccagaaacatagtacacttgagctcactgcaaactcaaacactcacaccaatggctctccaagttcaggccgaactcctgccctctgctcttctctgtccccaagaagggcaacttgagcgcggtggtgaaggagccggggttccttagcgtgagccagaaggccaagaagccgtctctggtggtgagggcggtggcgactccggcggagccggtggcgagccccggcgcgggcacggtgaaggcggcggtgatggcggctgggagctacaccgtcatgcacctggacctcgccttcctcgacagcgttcggcagttcgtggacaacttccggcgctccggcatgccgctcgacgcgctggtgtgcaacgccgtcatttacc

SEQ ID NO: 30041 - DNA, 485 bp, Oryza sativa
  Clone ID: uC-osflM202059b09b1
tttgacactcactgatataatcaagctagctagcttaatcacctagctatccgtcagtttagctagatatggctgcagttaactgcaaggtggtggtcgccgtgattgtggtggcgatggtggttgcggcgccgggggcgtcggcggcgataacgtgcgggcaggtgggatcggcgatcgcgccgtgcatctcgtacgtgacggggaggagcggcctcacgcagggatgctgcaacggagtgaaggggctgaacaacgccgcccgcaccaccgtcgaccgccaggcggcctgccgctgcctcaagagcctcgccggcagcatcaagtcgctcaacctcggcaccgtcgccggcgtccccggcaagtgcggcgtcaacgtcggcttccccatcagcctctccaccgactgcaacaaggtcagcttgatcaattaattctgcttggatcgatcgatcgagcttacacgctagcttgatcggagttga

SEQ ID NO: 30042 - DNA, 379 bp, Oryza sativa
  Clone ID: uC-osflM202059b11b1
ttttgttcacgcgtccgcggacgcgtgggccgaaggttcgtggaagggttcgaggactcgttggggctcgggaagggggcgacgcggctgtacgcgacgatcgatctcggccgggtgcgggtggggcggacgcgggtcgacgacttacgagccggtgaacccgtggcggtaccaggtgttccacatctactgcgcccacttcgtcgccgacgtggtgttcttcgttaaggaggcgcagtccatctggcgccacgcttatcggtcgcgcctacctcctcgtcagggagctcctgttcggcgaggccatcgagcgccgacttgacattctcgacgccgggtggaggtggttttttctcgggccgacgattcacgtgcggct

SEQ ID NO: 30043 - DNA, 395 bp, Oryza sativa
  Clone ID: uC-osflM202059b12b1
ccggaccggacaacccgggacgacccacgcgtttgtttgccacaaccatgcatcatcacacgaaggggactgcgtgaacatcggagacagccgaaacaaagcgcccgcccagagtgctatgctgcaacgatactctgtcaaaatccaagccccaaacgaaagagaggaccacgatggcaaacacaccgatgagacagaaaaccgagtggctgcaggaaacaacccagccacggaacgatccaacaacgaaacctgaagccagcccatacaagaacacccgagggagaaaagcgggaccccagagcaaccggtgaggacaaggaccgcagataagcccaccgagggcgcggaacacacgtgaggaacgccgaaggggatatcgaccgacccaccct

SEQ ID NO: 30044 - DNA, 457 bp, Oryza sativa
  Clone ID: uC-osflM202059c01b1
gctttgatgagtttgcccttgcccaccgcttacgcctacgacgaaccccatccctcccgcgagcaggagcaggagcaggagcagggctagccgtcgctcctcctgctgcttccgccgaattcaatcctgaaaccagatgtgccgtcaccagccaagggctcggctctctaccgatgagcagcttgccagctgcaagaaagccttctgcatttatacttgctaagcccggtaccgagtttggcaataaataatcattttcaggcggccgaatccaattaaaaaatcgctggcttttatcttgcaaaggatgccctttcttttacaaaggatttcaacgcaaagaccggaaagaaagaggagccctgaaaaacccatattcacttttctgggagggaccaaaaataagaaactgcggggcaccaaaaatatcttttcctactttaagttcctggtagcc

SEQ ID NO: 30045 - DNA, 479 bp, Oryza sativa
  Clone ID: uC-osflM202059c03b1
ttttaaatggagaacccttggatgaatactgtcgcgataaaattgattaaaagaaggatcgaggaaaaccctgctcatatcggagaagaggcacgagatgatgatctatattcagaaatgcctccaaggaagaaaactacaaagaacagtgggatgggcctgctagcaggtggagtggcttcaaggcacctagctgaagctatcgtagaacttagaagaaactaaacaggagaacaaggagctttggatatggcggacacattagcagcaaatcagaccttgatgatggcaccgaaagaaaggttggaaaaacaatttgaggaattaaaaacgcttggtgctagcctcccaagggcctgcacctatgaacagaagtcaggtgtctaattaaccagctaaaaatcagccggaggaactggatcccatgaattgcattaataaagcaccatcacttttcatccagaaaccagaaaacatct

SEQ ID NO: 30046 - DNA, 444 bp, Oryza sativa
  Clone ID: uC-osflM202059c04b1
ttatgaaggcgagcgccgaggtgctcgggaacggcacgctggggtcggcgtacaaggccgccatgcgcaacggcgtgacggtggcggtgaagcggatgcgcgacatgaaccgcgtcggccgcgccgagttcgaggagcacatccggatgctcggcgagctccgccaccccaacgtcctctcccccgtcggctaccattaccgcaaggaagaaaagctcatcgtctccgagttcatgccacgtggcagcctcctctacgtcctccacggtgaccagagcccggacagggtggtgctggattggccggcgaggatgaggatcgccgtcggcgtggtgcgcggcttgtcgtacctccacgagaagctgggcatcccggcgatgaggctggtgagcatgaccggggcgttgtgaccgcgcggacgaacggacgaacacggtgcatggt

SEQ ID NO: 30047 - DNA, 313 bp, Oryza sativa
  Clone ID: uC-osflM202059c06b1
gttattttgttgccagcgttggggatcaggcgtacggtttcttcaaggggccatggcggctgcggcgcccagttcggtggtagccggactcgtgtccgggctagggctggcgcgctcctcgttaacgcccagcgacggccgctctcctttcctctcgcccctgcatccgccatggcccgcggacccgcggctcgtctgtaggagcagcggagcccggtccccccagggagagagccgtggtcgtcgttcgcgtcgacgcaaatttctcgcggcagcagcagcagcttggagagcatgagcatgaggaggctgt

SEQ ID NO: 30048 - DNA, 318 bp, Oryza sativa
  Clone ID: uC-osflM202059c08b1
tttgtgcccgcgcctcgcgacgggcccaaatccaacacgacgacgaggaggaggagatcgagtgcgccaccgaatcgaataaccacaagccgcggaagatttcccctccccccggtggatccctcctcctcctcctcctcctcctcctccttcggggtcgcctcctcccctccgatggagttcgggagcgagagcggcagtggtagcggtagctctaggggagaacacgctggccatcggcggtggtggtgcgtttgatgcggcgtggactccgttggtcagcttcggcgtggaggacctgctggtggtggggggccc

SEQ ID NO: 30049 - DNA, 338 bp, Oryza sativa
  Clone ID: uC-osflM202059c11b1
ttcgtggacgcgtgggagcgtcgccaccctctcgtctccccctcccgcctccgcctcgccgccgcctcgagatgctcgcgacccccggcgcgctccaccacctcctcctcctcccgccgccgccgcacacgcaactcgccttccaccatgccgtcgggggcgagggggcggggctgctcccgctcccccgcccccgccgcgtagaagcgagcgcctccacctcgcgtcgtggtggcgcgcgaaggagagcggcgggggctagggttagggcttacagtggcgaggaggcgccccccgtggtgaccgaagaggctagcaccttcggcggtccgaccaag

SEQ ID NO: 30050 - DNA, 95 bp, Oryza sativa
  Clone ID: uC-osflM202059d09b1
tcgttttctttcgcttcgcgagattggttgattcatctcgcgattgatcgagctcgagcggctgtgaggtgaggtggatgaggaggaggaggacg

SEQ ID NO: 30051 - DNA, 173 bp, Oryza sativa
  Clone ID: uC-osflM202059d10b1
atctttcttcctcccaatctgtgaagcgagagagagagagagagagctcctggcgagcttaccttgttccttcttccaaaccctaatcctttcgtcgagcggaggagagccgctgttagtgcgctctcgcggaggcgtgatgtgattctgtattgtccgaggggaggggaggg

SEQ ID NO: 30052 - DNA, 324 bp, Oryza sativa
  Clone ID: uC-osflM202059e03b1
gttattttaattagcaccagaaatatggcttcttgcaagatgacgctgctccccgtgctcctcctcctcgccgcggcctcgccggcggcgctgggcgccttcgacgcgaaccacatgctcgccgacaagtcccagaacgggtcgttccttgaagttgctgacgcagacgaaggtcgcggaggagacgaaccggctcaagtcggcgtcactgttggacctccaagacaaggccatgaagccgctcacgtcgttccccgccgacaagccagcggatggccatggccaaccacgttcttctcaggtactttcacccccatccagctg

SEQ ID NO: 30053 - DNA, 483 bp, Oryza sativa
  Clone ID: uC-osflM202059e04b1
tatccgaacggacttacatctagtgttaacggagttaattgtttagttggtaatgctgttacaaataactcaggaatgggaggaatggggtttggggccatgggtgggcttggtccaaatcatgcagctagtggattgagaactgcaatagcgaacaatgcgatggcaattagtggtaggatgggaatgaatcacagtgcacatgacctatcacagttgggccaactacagcagcaacagcaacatcaacatcaacatcaacatcaacatcaacagcaacagcagcagcagcagcagcagcaacatgacttaggaaaccaactgttgagtggacttagagcagcaaacagcttcaataaccttcagtatgactggaaaccatctcaataaagatagaacattacaagtttgatatgacgacgtggctgctttactgggttcattgcttatggagcacaagtaacagtgccgacacctcgaact

SEQ ID NO: 30054 - DNA, 426 bp, Oryza sativa
  Clone ID: uC-osflM202059e09b1
ttttgttagcctatgttgatttcttgtgatgaactttcattcacctgatctgaaactgccaacacttggagtggagggtgagctttgtgcaaggatgacagtggaaggttcctgtctatgtgaaaatgaatatacaaacaaacggaagagaaagagtacatctttatacttttttcctaccctcagggacctgcaatgttcagctggtactgcatctaagatctaactaagtttccaggctttgcctcctttcatgctgaacttcttgagcctcccaaagaacatcacaaaaatgagtatcagtttgccagagtcgctccatcttcctacgaaaccagtccatttattctgtgcagagatggtctggattgatctgtctactgcaactgtagcccattgagaaccccacatttccatatgcactga

SEQ ID NO: 30055 - DNA, 243 bp, Oryza sativa
  Clone ID: uC-osflM202059e12b1
actttccagacaatcgaagggaaataacatctgcagcacatgctgatgtttctgctgttcacagtgcaagtttcaatcagaagtttgtatgagaagcagctacaggagcatcaactagaaactgttgatgcacttactgattccaggaaagatgcccctgctgccttgtgcacatatggtgttggggatggtttgttggggagaatatggcattctttagcacctcacataggtccttgccct

SEQ ID NO: 30056 - DNA, 346 bp, Oryza sativa
  Clone ID: uC-osflM202059f03b1
aataattctagttctttttgtgtttggctttagatatattcccaatccccaacctcccaataatgcgatctctcccagatctgttcggatcaaaggttgtgtcgatcgcaaaaaagaaaaaaaaaaaacaatttccttttggggaggttcatctgtggatcacttctttgtttcccgcgttttgttggggattcgattttcgggttaagattttttacacgatggccttgaacttggctcatagcgccgcggtggtagcgagctttgcgaacctcggtgatgcccggcgagcttcttcggtggtcgtcatgccctcctttgtcttcgtcggccacaaccagcctga

SEQ ID NO: 30057 - DNA, 445 bp, Oryza sativa
  Clone ID: uC-osflM202059f04b1
ttcttctctacgacctcttcccgccgctccctccccctccatttcctcttctccaccgcctccaagaacagcaaacccaactcctcccccctcctctcctcgcatttcttcgacctgccattccacacccgcgcgcgcctcaaactctatgtgagggaagggaaacaatcgacttcccagctgagaaaccaagaagcagcagcagcagccatgcgtccgtccttcctcctcctcctcgtcgtgtttgccggcgtcttggccggcggggcgcgcgcggggccgccgatggcgggcgagaatctgccggggcagctgttgccgggcgagaagccgccggggcagccgttgccggggcagccgttgccggggcacccgttgccagggcaattgttgccggggcagccgttgtcggggcagccgttgtcagggcaatcgttgccggggc

SEQ ID NO: 30058 - DNA, 499 bp, Oryza sativa
  Clone ID: uC-osflM202059f06b1
ttttacgagctcaaaagacacacattccaaaagcatctgtggccatctcctcctagtcctaggctcgcgtcaatggcggcgtccaccatggcactctcctcccctgccgccctcgccggcaaggcggtcgccaatgccaaggtgttcggcgagggccgcgtcacgatgcgcaagtcggcggccaagcccaagcccgccgcggcgtcggggagcccgtggtacggcgccgaccgcgtgctctacctcggcccgctctccggcgagccgccgtcctacctcaccggcgagttccccggcgactacggctgggacaccgccgggctgtcggccgacccggagacgttcgccaagaaccgggagctggaggtgatccactgccggtgggccatgctgggcgcgctcggctgcgtcttcccggagctccttgcccgcaacggcgtgaagttcggcgaggccgtgtggttaaggcggggtcccagatcttcagcgagggggggct

SEQ ID NO: 30059 - DNA, 447 bp, Oryza sativa
  Clone ID: uC-osflM202059f10b1
tttttcagactgacaagctcatcctgttcccatctcaactgcggtcactcaccaatggctccgccgcttctcctcgtctcgctcctgctcatcggcttcgtcagcgccagagccatcacaccctcagctgaagcggcggcggtgttcccgaaggaagccctgccgaccaactccggctacctccccatcacgacaaccaacgcctcgctcttcttcgcctactacgaggccacgcacccgctcacgccgccggcctccacgccgctcctcctctggctccagggcggccccggctgctccggcctcgccggcaattttcttcgagctcggcccctacttcgtcaaccgcgacgcgcttttcctcttgcccaaccccttctcgtggaatcgccggtttggtctcctcttcatcgacaacccgctcggcacgggctttaacgccgggcc

SEQ ID NO: 30060 - DNA, 199 bp, Oryza sativa
  Clone ID: uC-osflM202059g02b1
tgtacgcacgcacctaccctcctccgccatcgatcgtgctccgatctgcgccgccgagccggacctccgcgcggcgacggcggcggctttgcggccggcgagagggccctcgtgggcggcacgtcatggaccacggcccccgcccagcgttagccccttgccccctgcgctcgctgggtcctttgctcgatcgcttctc

SEQ ID NO: 30061 - DNA, 364 bp, Oryza sativa
  Clone ID: uC-osflM202059g04b1
ctcagcttatagtcaggtgaggtctgagctgaggttgagagatggcacaggcaatggcgtccatgaccgggctgtcgcagggcgtgcagctgtcggccgggcccaggcgcgccggcggtaggtccaggctcgccgttgttagggccgacgccgccgccgccgacgttcagaccggccgccgcgccgtgctcggactcgaagtcaccgggatcgccggcggcgtcctcgcgcaggcggcgctcgccgaggccgtcaagcccatcaagctcggccccccgccaccgcccttctgtggactccctgggacgctgaactcggaccaggccagggacacggacctgccgctgagggagaggttttacct

SEQ ID NO: 30062 - DNA, 475 bp, Oryza sativa
  Clone ID: uC-osflM202059g06b1
tatttctcctcacgctaccgccacaggtgtccgcgccgcgagaggcctcgggctcggctggtggtggaagaatcggatcaggagaagcaaaccaagggatagaaattcctccccccagaagatctctcatccccgtgcgctgctgctgctgtgtcgtcgtcgtcgtcgggagtggggagcgagcgagcgagctggtctgtgtccgtggtgattggacaggacatggtcgggcggatggagcggcagtcgggcgtcgtcgtcggcgtcatgctccccctcctcctccgccgccggcacctcctcctcgtcttcggcctgcgggggcaagaagcggcccgacatactcaacatgatccggagtgcaacatgccttaattcgtcatctaccgataccggcaaggggaggagtaagcagtcagcaacaaagtgactcatggattccacttgggtgaagggaaaattgggcatgacatgg

SEQ ID NO: 30063 - DNA, 278 bp, Oryza sativa
  Clone ID: uC-osflM202059g07b1
ttgtctgtcagtgctcgagttcgtctcgctctccggatccgtatactagggtttccccccatgcaagtcgcagatggaggcgccggcgatggagcccggcgagatggaagcgatgctccgggcggcagcggagttcgcgtcctacccaggagcgcatggtgatgacaccgtgaggcagttcctggagcaataccctctgcccaagctgttaggtgcattggagagtgaggctgatgtaccttggatggatgaaactattgccgcatgcttggaccaag

SEQ ID NO: 30064 - DNA, 398 bp, Oryza sativa
  Clone ID: uC-osflM202059g10b1
tagaaaggcagcaaaacacaccgcctcctccgcccccgcctccgcctccgcctccgcccgcagcgatcgactccccgccctcctcgccccgctccgtagcgagacccctcctccctctcctcctccgctctcgcgcgctaagttgaggacctcccaaccagtaagcatttcgaggctcctgcctatgcttgatgtcaactatcaaagatgttgtttagtgctgtggaggtcaagtagcattggatcataaattcaaccaaaacaagacaggcatgggaccgtgcagacaccctaggcttttgtcagtgggtggttgctttaagtactacacttcctgctgataattcttccattttgtctattctgtgatccgtggttgaaagatcatcagttccctg

SEQ ID NO: 30065 - DNA, 486 bp, Oryza sativa
  Clone ID: uC-osflM202059g11b1
tttttcgactctcccaaaccttaataccatggcccatatatcagtgacccaggccctgggcaaactggtccacggcccagggcctgagatgaaaggcccgatgagaaatatgcatttttactaggaataagtctattttttctcctttcaaccatgtaactttgtgttgggccaaaatttccatggggcggcctaggccttggcctatttctgggtccgccccttatcagtgattgtggtgatggcagattcactaccaccactactatcttttaatagtagtaaagactttggagtcatcttgtaattttaagatgtacaagacggtaccataaattgactttaaagtgatttgaatggatgtgtaatgggagaaatcgcttttcaaatgtaaaataatgcactacttgtattagtactaaattttacattagagaacacgatatatttaagggatcttgataacataaaattcctttaagaata

SEQ ID NO: 30066 - DNA, 477 bp, Oryza sativa
  unsure (1)..(477): unsure at all n locations
  Clone ID: uC-osflM202059h06b1
tttgtcgtcgaatccaaaacagctgcggagtctgcattacagagaattgcagagcttgaaactcaggttcaggaattaagtgctgctgaacaaagtttgaagtcacaccttactgagtttgagtcaaagttggcatctgctgagaaaaagagtatggatcttgagcaagagcttaaagatgctacagaggaatgcaacagttcccgtttgagagtcgatgagctttctggggagcttgaagagtacaaagagaaaagaactagcctcgaggcttcattactcgaagcaaaacaaaaggaggctgagttgtcagagaagttggatcaagttaatgaagaaaaggagaaatttgtagagctgtccangaaagctaccataaaacatttggaagcagagaaccaggtccaagccttgcagggcgaactagaatcggcccgccataaactgaagaggtggagtctgatcttgaggcccttg

SEQ ID NO: 30067 - DNA, 197 bp, Oryza sativa
  Clone ID: uC-osflM202059h09b1
ttgtttcaccatcctgttgattcacttggccggacccctcttcgacacgccgattcactctgagggaaagagagagaggcctgcctgccacacaaccactgtccccaagcctcgtcagagcgccccggcgtatgattggaccggtggccgccaagaagatcctgatggacgtgaaggacctggagaaggaccctact

SEQ ID NO: 30068 - DNA, 496 bp, Oryza sativa
  Clone ID: uC-osflM202059h12b1
tttttgacgcgtgggcacatacgtgccgtcgaatcccccacctcctccacaccggacagtctgcccccagcttccttccttccttctcaccttcctcctctcttcgcctcctcccctcttcttccccactcctccccctcccaatcccaaatcgcaattactccccaagccgcgagagagcccgagagtaaactaatcgccatccgccaccgcgcagccgcggcagctagctcgcgagaagaaaacgccacgcgacccgagagcgagagagagagagagctaagccgccgtgcgccacgccaccaccaccaacccatcccaatctctctctctctctctcctcgggctcctagctacaagaagaaccccctcacccccaccccggacacctacctagccgctacccctctctcttcctgttcttcttcttcttccctcttctgtggtggtgggtttgacccaagaacggaggagggattgggcgggcggcaatggg

SEQ ID NO: 30069 - DNA, 396 bp, Oryza sativa
  Clone ID: uC-osflM202061a01a1
aattcaaacataaattaatgaagcatttttgggccatgggtagatgatgggggcatagatataagcggagcacacgcaagtacatcctccaagaacaagaacaactggatggtgcggccagggaagttcgtacacccctgaaacattaagcattattactcacacacttctagcaaacaccacagtttacatgatcattttttttatacacacatacaaacaaacccatgattattcaggatgcgatttgatgggcccgatcaataagctctgcatcgcgatccgatcatgggttggccgtcggcaccctggggttatggctctcagggtttggggggagttcgtgctccggaacctccggctttggaaactcccgcacgggggggtggggctttt

SEQ ID NO: 30070 - DNA, 489 bp, Oryza sativa
  Clone ID: uC-osflM202061a02a1
gcctcaaacaaagaaccataaaaatttttaaagaaaaacatacagctaaaaacttcagaactgttgcttcgtttttgggccggacatggcacagaaactgaactattatctgcaatttctgcactcgattttgtattggacaatccaggaagcaatatgagacgatgcagagatctttgatcatcaaaaatctcggcacggctgcagagcagagagagagctgaaagcttcaacagggggcaaaagctccttcaggcctcaggatatgccgaccgttttccccagcagccacatgacgagggagaactcgatcatgaacagggcgtgcagccacgtccggtcgacgacaaagccgtacaccgtgatgccggcccggttgttctccaggtacgtcacaagggcctgcctctgctggaagcagtggttgttctggaaagggatgtacttggacttggggtggccggagtcgtcgtcgtcgctggaggagga

SEQ ID NO: 30071 - DNA, 248 bp, Oryza sativa
  Clone ID: uC-osflM202061a03a1
cccggcttccaaaaaaacccccccccaaaacaggaaaagaatttcagaaaaaaatttgggggaaaaaaaaaataacccccttggcccggggcccgttcttggggggaggaaaccccctttaggggggggggggattatgcccccaaaacctggcttaaaaatttaaaggttgtttgtttaaaaaaaaatcttctggggaaattttggggagggaggaaaacctgcccaaacacaatcttggggtttaa

SEQ ID NO: 30072 - DNA, 430 bp, Oryza sativa
  Clone ID: uC-osflM202061a04a1
aaaagcctaattccaagtgaggataagcaaccatgtttccaaatcctaaaattaaattcatatacatatgttactatactatagataagggcctatctaagcaacagtacatgaattttttttctccagaaacaagaaaaatctcaaaaattgagatccttcaatcaatttcagggcctgtgcagcccaatgcaacccatatagtatatataaatgggccaaagcccattgggcctggggctactagaccttgaaggagatagtgctgttgggcgggttgtagaactgcacggtgcggccgttgagcggctgcgtcggcctcgcgccgccggcggggagcagcgcggtgatgagggcgacctgctcctggctgatctgcctgatcttgccgagcacgctccagaagacgtcctcggtgcacggcggcgcc

SEQ ID NO: 30073 - DNA, 363 bp, Oryza sativa
  Clone ID: uC-osflM202061a06a1
cacaaaatccaacttgcaccacctatttagaaggattttatgcatcccaaattccaaagttaaattctactacttgaagttacaatttttttgcagcagaatcaaaatttgacagccacctcatcagttaaagatgtccgcaccgcaaaaataatctaatctagggaataaatttatcacacaataactttgcatgagccggagagtaagctagaaacccatcccgcccatgccacccattgggggtgctgcggctgctgcctcctcttccttggggatctcaacaataatagattctggggtagtcattagagaggacacacttgcaggatccaccaaagctgttctgataacttttagggg

SEQ ID NO: 30074 - DNA, 112 bp, Oryza sativa
  Clone ID: uC-osflM202061a07a1
ctaaaaaaaaaaaaaaacagaactttcttaaaccatcgttaacaaaaaaaaagaaaaggatcatcatagggggacaaatcggggcttttggaaaacaaaagaggttctaaaa

SEQ ID NO: 30075 - DNA, 560 bp, Oryza sativa
  Clone ID: uC-osflM202061a09a1
aggagagaactcaattcttccttgaagggcagtaagccaaacaaattggtcactgcaaatccttatttggaaaaaagtggaggggaaaaacatcgatcagcagggccgggcctcctgcatgtaagtacatgttctggctaacaaacataaaaggcacaacatgttgacctccaaatgttaaaaattgcatcgcttatgaagcggactccttggcaatcttctctgccttggcaatgacctcatcgattcctccaaccatgttgaatgactgctcaggaaggtcattatacttcccgtccaatacaccctggaaactttgaacgctctccttcagctcaacatacttttcaggtgcacccgtgaaaacttcggtaacgtggaagggcttgctaaggaacccgtgaatctttcaacacgagcgactgtcaacttatcatccctactgagcttcgtcatttcccagaatggcaataatttcttgaagaatcctgtaatttcggaagacccctttgaacaccactaagctggttgtagtgggtcccaaccccaattccatgggg

SEQ ID NO: 30076 - DNA, 478 bp, Oryza sativa
  Clone ID: uC-osflM202061a10a1
gggggaatcaaactctttcttattcatcattcatagtatgtaccatgacatgccacccgcgaccgagaatatacattgccgagaggcgagagcccaaagatggacataaaaatttaaaaagaagaggtgaaaattaagtaaaaacaccgcataaaaatagattggcgcgcttccacgctagctgcaaatatcgctctaataatctgcatgcttcggacggagaagcacatcggatatagagaggaggaagaagaggaggaagagatgagcggcggcggcaaacggcgaggaggccggcggttagggcaggcgcacggggactagacgacggcgtacggagcgccattattaggcggtagcgtcaccccatgtggctgtccagatggtggcactgccgacacggggcatggagttgatcttggtgaaggggctgaccttgaaggtggctgccgtacatgacacccttgcttgtcccccg

SEQ ID NO: 30077 - DNA, 444 bp, Oryza sativa
  Clone ID: uC-osflM202061a12a1
aaccacatggttacgtaaatcctgattgcaactcataacaggagcctcctcatcttccatgatgtttaacatgcaggcatgtgatgtctcctgtttgaactcatggtaaaaggactgaaatatggagacgtgagtatacggttgcatcacgcatgacagctcgattcgcatattttacattgattttttgcccatcttgacatctctattcacttgacatgggttcctcatttcttcctagatgatgaggttgtagaagaagcggcagcttatgattccaccagcatcatgttcccacaagtcccaaggcaccagtgacatttgccatgccaatcatacccgcctttctggttttgtcctcaaccaagcctttgtaaagtgagagcttgtcttcagtcatgtcgaatctttttatcattttttcaaaagctgccgtctttcttg

SEQ ID NO: 30078 - DNA, 417 bp, Oryza sativa
  Clone ID: uC-osflM202061b01a1
cgttgggtgctatttgaatgctagttgcccattttttgtacttatgaatatattggaggtgtcataacagccaacctaggagttgtaaaaccactggaaataccaatacaagttagggaagaccaaaaaacagccctattggtggcaaagcactggaggacacccaaaatgcaggcgatctaggtacagaagagaggaggcatcacatcatgtttgagggctatacagttcatctctatctagcattcctttcagcttccaaagcggcgccttgcttgagttcttcatgcccttcaggctccattcccatggcgagatatgccatcccttgaaggttgtgtgcagtaggccacttaggagatatgtctgctgctttctttgcatccgcaaggcctttttgcagcttgccgagcacca

SEQ ID NO: 30079 - DNA, 475 bp, Oryza sativa
  Clone ID: uC-osflM202061b02a1
cctataataacgatacatcattaattcgatcatcccttggatgcggcctgcggcttacattaaatctcgatccaaagaagcaaagatgatgacagacagaaattaattaagctagaaatctcctcgatcgatcacacacacacacacaattaaggtacatacatacatgcactgctgcaactgcaactgcagggtcggtgcgtggctactacaagtgtacacatggtacgttggttggcaccatctcgatcgtgtcgttgtgctcacttgccggggacgaagttggtggcgtatgcccaggcgttgttggcgacggggtcggcgacgtggtcgaagaggttctcgatggggcccttgccggtgacgatggcctggacgaagaagccgaacatggagaacatggcgaggcggccgttcttgagctccttcaccttgagctcggcgaaggtgtcagggtcgtcggcgaggccgagcg

SEQ ID NO: 30080 - DNA, 406 bp, Oryza sativa
  Clone ID: uC-osflM202061b03a1
ggaccaaggaattgttctcaaaaatcttaagaggggaaatccccccaaaagagagggccggtttacaaaactttattttttttaagtacaacaaattttccattcctccatgatcctattaggttttacccccaaaccaaacaaattaccttgcccgagcccttttcctccactggcaaataaacttccctggggcttgagtagccaagcatccatggggggaccaaaatcccatgtcagtgttttctacaacaaggttgccggtgataagctcacggtggggggggacgggccaaataaacccccttgggaggggctttacggcaagccctacctctatgatgatcccccttatgggcgggtttttttccccccttttgggaataaggtttttttttgccaaccc

SEQ ID NO: 30081 - DNA, 439 bp, Oryza sativa
  Clone ID: uC-osflM202061b04a1
ggggagagaagaaaactgcaaacaccacgttggataattgagctgcttaattacattcccaataattatatcataatccctagctcagcaaaatatacttcataccgatcgaagaacacactacctgcataccgatcgaagaacgcactacttgaggctgctttgctaaaaccggagccccccaaaacacgagcgaccagctgtgtactggtcgtcagttacccggcggcggccagctgagatcaaggccggcgatgtcggcgaagttgtcccacgccgtgccggtgaccgccgttccattgttccacggtgcgatcccgcagttgtacaagtcagggacagccgatgcccaagagaacgcggccggcgcaacgccggcgaggccgcactgcggcaggaaggcgccgtcactgaggaacgggaagcccgctgggaggtc

SEQ ID NO: 30082 - DNA, 392 bp, Oryza sativa
  Clone ID: uC-osflM202061b05a1
ataatattacagtaagctcattatatatagaagataaccaccaaaataccaatatgtagaagtacatttttagtacctaggctactagtagaacaaataaattttaggcaatgagcgagagaggcaacgaggctgtttttctttggaacaaaaatagttgaataaataacagggtaacatgaaagtttactctagtcctccagaaagttggtgcaagtgcaagtattttcctaaaccaataaattcccttgatttgccctccagatccaactaaagttaaataagtgaaagaacaaactggtgtccacctccctgaaagcaaccgtagaccaaccaaactacagtcttttgcactttgaaccagatacccattttgtgggtggcaagatcag

SEQ ID NO: 30083 - DNA, 58 bp, Oryza sativa
  Clone ID: uC-osflM202061b07a1
tcgcatagcacagcagtacagtaaagcttaggaatcctccatgagctgagccagccct

SEQ ID NO: 30084 - DNA, 211 bp, Oryza sativa
  Clone ID: uC-osflM202061b08a1
aatggaagcctggggttttattggatgatttggcgggtaaaaaaaaattactaattgtgcattacttggcaggcctttttcaatgaaaggtgtacccccctaaaccccgaagaaattaacaggtgaaacgaaggggtaaataataaactcaaacgaggccccccagcttttttttgagggcccagagcttcctggccttctcccgggttgc

SEQ ID NO: 30085 - DNA, 129 bp, Oryza sativa
  Clone ID: uC-osflM202061b09a1
ggggaaggaatacaaaattccatttatccaaggtgcccaaaagggacccgtttggccccagccttagctggaggtggccccttattttttctggcaaatctacccaaaattcccggggaaaaagggggg

SEQ ID NO: 30086 - DNA, 149 bp, Oryza sativa
  Clone ID: uC-osflM202061b10a1
tgagtttgtccgaccttttttttctctttttggggtggttttcttcttttgggaagataaacccccgacatttttattcattgtggaaacagctggatattattggcaatttaacttttaccgtaaattatgaaattgtacaggcaact

SEQ ID NO: 30087 - DNA, 436 bp, Oryza sativa
  Clone ID: uC-osflM202061c01a1
ggaatgcaaaagcaattggttctcacagactaggacttgatcgcattcaaaaaatacaaagttgcagagatacaacaaggctgaagatcctcgttttgctgggagaattccatgataaggaacagtaaactgacaaaaatgtttagggactggaagaaccatgaatatggtagcgtatcctatatgatgattgccatgagaaaaccgatcctgctatgaggatgccagtttcctgagaaattcaggccctacctgaccacagtttgtaagaacctcaaacaagggttttgcaagcagagcattagcgctagaaaagatgcaatgcacctcccccacaagcacatgacagtttgcaccagcgaggatttcaatgttttcgccaactgaaggaggcaagtttgcaaccaacccagtgtcgaagtccttaaaatttgcc

SEQ ID NO: 30088 - DNA, 440 bp, Oryza sativa
  Clone ID: uC-osflM202061c02a1
acattcatacgggccaaatctttcaataccactataactggtgtacataaagtatttcatcagaagtgcagttcaactgctgaataagcaggtacagagctgaatatcgatggtttacaaattccctctccagcttatccagagtaggatcttatcagatacttctgagctgatatctcagcgttatcagaggacagctgaagtaaaagcttgagatatcaagtatcatgatgtctatgtacaaagccatgtttaagatctatcaattacataatactagcacactttgccgtacaccaacctacctatgttttcttagcacattgtacgagttctcatcaaccaaaagctgacgcggtgcaaatcatgatgcagaattgtggataaatctgagaacaatccatcagagttcagatgataaatcagaggacggtgaggct

SEQ ID NO: 30089 - DNA, 368 bp, Oryza sativa
  Clone ID: uC-osflM202061c03a1
ggcagtaaaatccaaattttattattgaactgcatgaatcgaatgaagctaagcaagagcatcgacccgacaggccggtcgattgcacacccacaccctttactcccccctcaattgctaggttcacaaaacacgcatgcactcggtcggtcgggccagcttaattagcttgcttgcttggtcggtctctgcatgcaagcaggacgaaccaggggagttacgcgccaatacagtccctactagatctggccggagtacttctgtacgcactaagccaagaggggtctcacctagtagcctagccctccgcgatgaacatgtgctcgggcttatgtttgggttccccccatttgctggctattcctccc

SEQ ID NO: 30090 - DNA, 459 bp, Oryza sativa
  Clone ID: uC-osflM202061c04a1
gaatccagctaaaagcaaccatgagttgtttccctttggcctccattgattcatcaataaataatgttacatgtaatattctccgtgtgttatatggtggctatagtttagtggtagaattcttaccagccacaaattaacgaactttgtacatttttctcacaaattaggagaaaagcaggagtaaaacagagccacgatcaaaaccaggagtaacccggagctcgttgttatggcttttttccctggatctttttaaggtatttcctgtgaagttttaatgcaacagcgcaagccttttttcgcattcaaatttccattaacattattcaaaatcctaataaccatatcaatccctctagcttcctgcaggagcttcgcactgttctcctttagaacactagcaaccagtaaaacagaaatcggatcaggaccatcgcttgtactagtagccccatt

SEQ ID NO: 30091 - DNA, 420 bp, Oryza sativa
  Clone ID: uC-osflM202061c06a1
acacaaataagtgtcatcaagatggcattatatcatcgacaagtacatatagttaatcatcaaatcacagacaaatcaattcaaattttaagataagtttgaaacctcaaatctctccaatgtatacgtcgccttataatcttatatcgtctaggtcttcttgggggcaaacttggccttgatcttgtccacctcctcgtcgtcgatctggaaggccttggcgaggacggcgtcgggcaccgccggcgaggcggcgaagagcgtggcggcgatggactgcgtgccggggagctggctgttgaaggcggagacgacggcggcgggcttgtcgccggtgttcctctggaagtggacgaggccgcgggggaagacgaagacgtcgccctgggagatggtgcgggagaggagcttgttggcggt

SEQ ID NO: 30092 - DNA, 113 bp, Oryza sativa
  Clone ID: uC-osflM202061c07a1
acgcacgccacgccacgggcactcgcctcgcttatcggccgcgtcccgcgccgccgcgtggcatatcctcccccctctacaaccttgttgatcctggttacctactcagtgcg

SEQ ID NO: 30093 - DNA, 260 bp, Oryza sativa
  Clone ID: uC-osflM202061c08a1
aggtgaagttaagaagctcatgataatgcacaaaatggacttgttgccaaaagactgatgacaacaaggaatatgcacaacatatttacaaactaccaaataccaactaatgacactcacattctgccttgctaatgggagcggaccaatgctgttggattcggaccaatttttttccgagtttttcccaagcttttttcgacgaggcttaccgctagtcttgctagcattttgcaggaggggcttttttgcctgaacct

SEQ ID NO: 30094 - DNA, 360 bp, Oryza sativa
  Clone ID: uC-osflM202061c09a1
aggaaagaataatggaacattccaatcatcactcgactattcaaaagcataacaatatagttggtttagaccaaactatcaaggtctaaacgttaggaacccactcactcaccccattaggaagtatagaacgagctgcaactgaatacaaaaaaaaagcccacggtcctagtgtaaacagtaataatcagtgccaaaaaaactcatagctcatataaccactagctgtcttaagtagcattgtatgctttgtccagccaatatgtaggcaggagtacacgtaacaaggtagcagagcgcatggtcaccgacgaggcacagcttaccaaatattacacacccattgtgcgtgttaggacc

SEQ ID NO: 30095 - DNA, 156 bp, Oryza sativa
  Clone ID: uC-osflM202061c10a1
caccatgcatactttaaatttttacattcattattacaaaagccatactttttgttttaaagaaccaactgggtcagagaccacgctcgtacagaacttcacatcaccaaaatctggtgtaagcttgggggtacataccgcgctcatacagcggag

SEQ ID NO: 30096 - DNA, 407 bp, Oryza sativa
  Clone ID: uC-osflM202061c11a1
aggtaaaagattgcgacatcaaccacagcttttatacaaaaccaggaggattaaacgtacgccacaacacaaagtaaaagagctaagtagaacatcatcatccacgaaaatgtcgtcacatgcatacatcttaaaacaccatttttctgctgccataagtcgccccacttcttacttatttagttcaggacttcaggcgaaggctacctctcaccttcaggcgcggtgacctcacctactgggtcttcgccgacttgttttttgacgggtgggcctccggggataacttgccgaaaacctttggcgatgcgctccgtcgggatgggcgggaaggtcctgggctccgggtgaccccttgtcgtcccggtcggaaacaccttgttggacccctttggaccagtttgggg

SEQ ID NO: 30097 - DNA, 140 bp, Oryza sativa
  Clone ID: uC-osflM202061c12a1
aggaagtataggtattattattcggttatattaggatgagtttgaactttgaagcgcctggatagccgtgcgaaggtcggatgtatatactgtaactgaatcttatttacttcctccctatctaaagaccacactttcct

SEQ ID NO: 30098 - DNA, 572 bp, Oryza sativa
  Clone ID: uC-osflM202061d01a1
aagctgaaccaagtgatccaattattattcactaattaagcaaaaaaggaaataaaaacaagtacaaaattgtttgacaaaaaaaaatcgagcacgctagcacgaggacaatgtacgtgtcacactctcctagaccttaatgttgaccaggcgctccgacgccaacgacgcggcgtccaccgtcatggcgcggacggtggcgttcgttcccagggacgggtggctcactgtcaggttgtagtcgccgtgtgggaggtcgagctcgacggcgccgtcggcgccggtcgtcgccgccgtcttgtgcgtcttccactcggcgatcagcttgtcgacgagggtcccaacgggcaggttcttgaagctgttgtccgtcaggcacatcacgtagcaacccttggcgtgccacgccgcccacattatcatcccgttcaccgacgggtgcgcgtacccttccctcagcacctgctccaagaactttacctggttgggtcctttgacgacatcgacctcggtgagccacatgggaagcttgagctgcgccaacgtgtcgagggcgctccttatgtaaggga

SEQ ID NO: 30099 - DNA, 293 bp, Oryza sativa
  Clone ID: uC-osflM202061d02a1
gaacgaaagtacgtatagaattcatccataggagtaggcatgcatatgctgatatgccaggtttacagatagatcacttgacaattaccgtgcatatgccatctatacaatagttaatttgcagcaatgagacgtcgccctggctgtatttactctgtaaattctttgatctcaaattaatcatatgtataatttaggtatgatgtgtgatcagttgttcttgtcgtcgaccgccgactacgacccgtcggcgccggggggacacggcggttctcggaatggtttaggcctcc

SEQ ID NO: 30100 - DNA, 105 bp, Oryza sativa
  Clone ID: uC-osflM202061d03a1
cggacagaagtgaattaaatcagcttcaagttattgcacatttcaccatgaagaacatatacctcatacatggaactgcctttaccaggattaactctcatttac

SEQ ID NO: 30101 - DNA, 275 bp, Oryza sativa
  Clone ID: uC-osflM202061d04a1
tttttttttttttttttttttttttttttttttttttttttggaaaaaaatgcccatatatatatatatatatatatatggatgtattattagaaaaaaaatggcttatatttagatccataagaaataagggatttttccccagttggggcaggggcccttccggaaaaaaacatgaaagaatgggggaaatataagcaaagaataaagctaggtcgtcacttattttttccagaaatggccaagggccattttctaggggttcgacccttaac

SEQ ID NO: 30102 - DNA, 84 bp, Oryza sativa
  Clone ID: uC-osflM202061d05a1
cacgaaatgatccaggttaatggaactggtagggaataatggatggttcggttcctaacatgtctacaaattcattgtcatccc

SEQ ID NO: 30103 - DNA, 113 bp, Oryza sativa
  Clone ID: uC-osflM202061d06a1
ctagaactagaaatactagaacacgtctgatgcttaacgccacaagtacatactgaattaaaaggccacagagaacactcctgtagtcattccgtgcggccatggactctaaa

SEQ ID NO: 30104 - DNA, 331 bp, Oryza sativa
  Clone ID: uC-osflM202061d07a1
gggggcttagaacagatataatttcatcaaagaaaaccaatacaacatataacaatattacaataataataaaaaaaacctccttttcccaaaaaaataaaattaaataaaaatctcccatttggggccacatgccatctctcctatatgggcctcatttcttgatccgaaataatcctcataaaccatactaatatttttccccttttccccatacaccattgtaataattatgtcaatggattttctacgcaggcttaatgatcaacccatcataatcttcgctagtggcaacggattattcaaagaagactggagaaatagaaatggc

SEQ ID NO: 30105 - DNA, 539 bp, Oryza sativa
  Clone ID: uC-osflM202061d08a1
gaaacaaaaaggtttttgaagcacggttgtactaattgcatagtatcccaacatggtccggtgaacagagaagatatgaaaccaagactcagaaaaccacagcacggttgtacagtgctaattcgagttcctcgtcaaaatctgactgaaaaatgaaactacaggagctataatttaggtcatccgctgggcagcctccttggcgagcagcttttccctggccttggtcttcgcctgcgacttggatcccatgacgccgcctccccactttttcctaacctcatcgaatttgtcgttgaagttcgccttgatagcctccaggatcttgctgaactcaagcttgtcctcgttcttgacagtggtcaagcagaggacagatgcagttttcttgtgaacaattgatccaagacgggcttttccttttacaatgcagtaagggaccttcatcttcctgcacagggctggaagccacacaaccagcttaatcggatcgacatcttgagcaatgacgacccgttgggccttgctctgttcaatga

SEQ ID NO: 30106 - DNA, 263 bp, Oryza sativa
  Clone ID: uC-osflM202061d10a1
agggaccacttactcattatagttcttccatgctgctctaccacagcaaaacgtttcagacaccatcaaaccagacttaaggatacacattacaggtaaatagtacacaatgaaacgggacacgaccaaggaccagaccagacaaccatagcttcattggggaagacaaattggcagacttgtgaaccttacaacagcaacagcttcatggttgaggacttactggccaccatggaggcggagcaccaggtggagtgcggact

SEQ ID NO: 30107 - DNA, 211 bp, Oryza sativa
  Clone ID: uC-osflM202061d11a1
accaaaacaattgagcccttcaaaatttgacttggtgttttttgccctacaaaagacttcatcagcttacttttagcttattatgaacttcctaataaactcaaatttaaacattaccttgtgaaaaacggtagttaatattggtgggaaacttatggtgtgaaacaaaaacgcgggtcttattctttcggcatcccttcatgaaccctgt

SEQ ID NO: 30108 - DNA, 456 bp, Oryza sativa
  Clone ID: uC-osflM202061d12a1
ggatacagtgttttcctttatatactttacactaggtaatacaaaaaagtaacagtgtgtattgacaatttacatcacatatataaaacaaatgaagcaacggaatcattactagacagacacaacgaaagcacaatcctggaattctctcttttccttggacagaaactattgtgctctcaagacataaacttgaacaaagcaaagaatacattggatcccatcatcagagaagaacagctgtcttgccgcaagtaatcaataactcaactctgtttcagattgagttcccaggcctagagaacaacctgctttaatcactgaagctgttcctactggtgaccaccagtgggctgtaaaaacaactgttgaagctggaggatcactgaccattgttagccaatggcaccttcatttgatgaaaaaatggctccttgatatgaggctaaaacaatg

SEQ ID NO: 30109 - DNA, 398 bp, Oryza sativa
  Clone ID: uC-osflM202061e01a1
aggaaaaacacttccatgggggattcattggccccaagagggaacagggggaaaaaaaaattcacaatttcccccccagtttgggcgatgtttcccaaggaaaaggggcccatgcaaccaaattatggattacaacccaactaggaagggcccccaggttagggggggtttcggatgaaaaaacttattacaacccgcaagggcctaatatcccgggtttttccaaaaaaacaccagggggtttttttaaaaagaggggaactggtaacacaagggggttcaatttttggcccccctgaaccaaacctttgggggccgccccccccccccccgagaaccccctggttttaaaccccctgggccccccccccccccaaacatttgggggccaaatttta

SEQ ID NO: 30110 - DNA, 470 bp, Oryza sativa
  Clone ID: uC-osflM202061e02a1
cgtcaagtgtcaacgcatattcaggaaacagcaccgaccaaccaaatctagtatcaaagttagacagctgctgttccgatataaaaaatattggtaaatcgttctacatcaaaacaggcctgtcttttacataccagagggctacctgctagtctatagtcacaaccactcccgcttcgtttttaataacacatctgtacttcacatttcatcccaacaactaacctatttgggctggatacatcgcaaaagatgggtcgttcgacccttctaccagctatgaagtaaagctccaattctatccgatacttgtactcttatacaagctggatcctaatgcactcccagcatacggctgtttcttttgtgaagtgaacaacaagttggcggcggcgatgatctttggacccattatgatggggggcttattgatggtctgatcctcgcaggcatggtaaggccagtgtcac

SEQ ID NO: 30111 - DNA, 346 bp, Oryza sativa
  Clone ID: uC-osflM202061e03a1
gggggccataaggtgattccagctagcataatgttccagaatgacacgagacaacgagaggcaaagcgacaaaaaacatgtaggacaatccacacccagtaatccatattaataccacaatataagagtttgggagagggtgtttcatacgttttacaggctctgagacctcatacgggtaaatctccgacaacactccatctgcagctagaatcatgcaggcaaggctaaacgatgatgatgatgatgatggtggggatacgttttacaggaaacatggatatcttttcttattaacaatagtttcgtaagggagcatcactgataggatgtatttgcgttttgt

SEQ ID NO: 30112 - DNA, 149 bp, Oryza sativa
  Clone ID: uC-osflM202061e04a1
ccgtctccaccaacaaccaagggggaaaagaaccagacagccccaaacaccccccccacccggggcacgccatccccccggcagcctgctaaccgccaaccaaccggattatgccaataagaaaacacctccaaaactcaattggccgc

SEQ ID NO: 30113 - DNA, 457 bp, Oryza sativa
  Clone ID: uC-osflM202061e05a1
aattgtctgtcaatcaattcggggcgcaaattgcattttaatgcgtctcacaatccgaataaacggcccttttttattttgtatcgggctactaaatactaaacacatttaagaaatgagagaatttagaatagctaccagaaagaccagtccaatccataatgatgtaccggaaaatacaacgtttttattgtttgaccaaccatcaggagaagcaaatacaaggggtacactaatgactaagactgaggaagtcacaattaatgcaaaaacagctaattggaaagcaatagtcatatttctaatcctccaagttaccatcaaataaagttgactacatattatatttgatccctcacttaatcaaaattgttataaaatacacgaagtaggaggggctttatcatgaaaccattgatactttcttttaaaatttcttcttcccactttttttatt

SEQ ID NO: 30114 - DNA, 448 bp, Oryza sativa
  Clone ID: uC-osflM202061e06a1
gccaaaattgtcctcatattatacatataaatcatactataatacacagtcgaaaaaacctcttatggaactcaagaaagataaaagaaagggaaaaaaaaaaaagaaaagagagaagaaaaaaaaatgctgagctactaaaagcatttcatcttggtcatgtgtcaatattcttccagcaatattgctccttgaaggaacttctgtactactatatatgaacgaatgttgtgcctcatgaatacaggcgtttttggtgtgctgaaaattacctgttaccacacatttttcagattacctaccctccgtttggaggccttttcacaaagctctcagccttagagctgtcaagtgatccctgttcctgtacaatggtgtggggaactctatgtacaattttggccatgcctttggcatcaccacaaacttaaatgttacccccctggga

SEQ ID NO: 30115 - DNA, 453 bp, Oryza sativa
  Clone ID: uC-osflM202061e07a1
aagggacaaatttgagcaatgccaattatttggtaatgttaagaatggtgtagaaccaaacaaccccgtcaatccttcatgtacacagggccatggaagaaagcttcaattggccataaccaatatttgtctaaatatggtttaactggaatataatgagttaatgacataccgatatactattcagtattgtccataaagctcagtgattcatcagctatctctctgcaaagaagacatactgctgcctcaggatgactggatccccataataagacgatgcagatcatgaagcagcccgatgaggtgcccccaacaaatggccaaaagaagctaccatcaccaatgctgtacaatttgctctggatgttcatcgcaaaagcccccagctatgaaggtgttgacagttattcctaatgatgcattagccagtgtaagctgaagcctgaataa

SEQ ID NO: 30116 - DNA, 416 bp, Oryza sativa
  Clone ID: uC-osflM202061e08a1
ggaaatccttcacaatgggtttaattaattcgccatcagaaaagaaaatttctacaaatatattataatttagttacaatacttttttttttagaaacacccccgtatatgaaacttgcagtcaagccaagaacttctcgaccttctccacttcctccacgctcccgatgtacagcggcactctctgatggatctccgtaggcatgatgtcaagtatcctctggtggccatcggagcccttgccgccggcctgctcgacgatgaagctcatcggcgcgcactcgtacagcagccgcagcttgccgttcttgctcttctggtccctggggtagccgtagatgccgccgtagagcagcgtgcggtggaagtcgccgacgaggctgccgatgtagcgcgcggagtatggcttcccggac

SEQ ID NO: 30117 - DNA, 490 bp, Oryza sativa
  Clone ID: uC-osflM202061e09a1
agcatcaattgattaaatgaattgcactggctgtcgacataaatcaaccgatctgatggtcaggcttacaggcttgatagttcaagttccaaaccggtttttctacgctacacttcggcctaacgaacttacagttgacatgaatagagagatcaacgactaatttgactgggtatcacctatacatgaacaacaacagaagagctatttcttgtctatctcccggaccgctttacgctaatgcttatgttgtatgtacataggctagcgataggctacatgaagtagcttagagaagtcttcttcctggacccgccttctccatatagatcgttccactgaataagctcagtcatatttctcgaatcagatgttatacttgcacatacctgctcatgtgcatgtttgaaatcgttcattcttagggaacgaacattactgctagaacgagggggagggtatggtttattttctgccttcggtgatgctc

SEQ ID NO: 30118 - DNA, 397 bp, Oryza sativa
  Clone ID: uC-osflM202061e10a1
agagcaattagattatgtccccttctttattacgaagagaaaatacagagcaaaaaaatcttggttctcaacatcaattaagggggaaaagaatctgacagaacaggaatggaaattgcctgtgcctccatttccctgttagtctgctactgccatccaacgttttatgccattagaaaacctccaaactcattggcgctatactagctatatcccgctgcagaggcacttatgtttgccctcagaatagccaaaaaaagatggtaagatttcaaggggggagccaggagtattatgtggattttgaagggggaaatgagaacctacaaacggagtttgattcatcatttaataagatcatccttaaagctagtcgatcctcgcatactgggagtgc

SEQ ID NO: 30119 - DNA, 365 bp, Oryza sativa
  Clone ID: uC-osflM202061e11a1
acatgaatacacaacgcacggacgaacgatttattcatgtgaaggcatgatttacatccttaaaattctctcgcatctagatatagctagagagtggccagctgctgactatgcatggagctggcacggcagtagtgtacaatgctactgtaattttgtattgctacaagtactagacaggtacagggctgaggcccgtggatggctgtaggctggcagcatactccctcgcccacagatcataatgtatgatctcctccagtgatggccttgttactagctcattccgatgagcgtcgcatgtcaacttccccaccctgaagatgtccaggtaccccgatcttttcatcgatgaacaactccac

SEQ ID NO: 30120 - DNA, 456 bp, Oryza sativa
  Clone ID: uC-osflM202061e12a1
aatatgaaagtaggatcaaatgataattttaatgtcaaaatatacactctctacaagtataaaactcatttatcttttctacaaaacaatcaagaatggaaagaaatggctttccaggtccttcaaattcaacgagcaggcatgcagtgtgcatatactagatctacactaagcaagagaagtcttagcagtcatgagatacaccatttgcttttttggtatcactgttgtctttggttgccaaaagtggttcagtctccttttctggcatctgtgaaactggcagtggatcatttgttgccttcttcttgccctccttcactgagaagtaggagtacaatcccattccaaatatggcgatcaaaatttcctaatatgttccttgcgttgaaaggatcgtgtaacagaattgttccaaatgagagaacgagacatgtcttaaggtggccctacacc

SEQ ID NO: 30121 - DNA, 506 bp, Oryza sativa
  Clone ID: uC-osflM202061f01a1
aaatacttaatagtaatagactctttgatggagtattacaacatgcagcagtggcattaatacgccagtacattaattaagttacacatatgcaggctccattttggtttcttttaatttatcgtattacagaatttctgtagccttgctgatgatcacttggatatcatgtactagtaattaacaataggatgcatacaaaagatggcccaacgacaacagaagatgcgtgcatctgacattgtctggccttatttggttggtagtactccaattaattaacaagagatgatgcattcttgtgccttagtttcttcacatgcttggcttcacgttgagcctattcgcaatcttcacccccaacgactcatcacactgggagaggtagttgacccagatggcgcggagctcaggggagaccttggggtgcgcgagctcgccggcgaagcggcggatgaacctctcctgtctattcggggcccacgacctgtaccttttcccgggct

SEQ ID NO: 30122 - DNA, 195 bp, Oryza sativa
  Clone ID: uC-osflM202061f02a1
ggattgatcgatcaattatttacaccaaacagcggtgtctgacagttcatggaaattttttggttcctcaaaaacagaacatgaaccttgttaaagggtacatcaatgcttacaagcttaaaggcgttttggcggcaacggtaagtccctaccgttgctttccaacatttcagggacttatctcatggacggttg

SEQ ID NO: 30123 - DNA, 487 bp, Oryza sativa
  Clone ID: uC-osflM202061f03a1
gggtacaacaaaaatattcctctttataacaacctgatcaacatctaagttataatgctgaaatcttacattgatctacatatcatcatcaaagaacaagaagaacaaatgaaagaacgaacataaggcgcttcaaatgttcaaattcatcgctacgactggttcttcagtcaggcgtaaaagaatctcactaaactttgacctatagcaatcttcaatgctacatttgttttttagtcagcaacatcttgatgtggaagcatttattgggcaattatttgcaaatttgcagaaactgcatttccacctctcttcttcactcacaaatttaggctcccgtgcttccttgccagaagctgaggacttcctgaaattgatccttgagccacctagcatcataagagaactggtattcttcaagcagggaattgtccgcttgtagctcatatctcaagagcagctgttcctgagaccgtggtagtgtatg

SEQ ID NO: 30124 - DNA, 364 bp, Oryza sativa
  Clone ID: uC-osflM202061f04a1
gggtacacataaaaggacttgatttagcattcaccacgagcctgaacatttgatagaaacttaaacttaaaaaggggcgatatccacaggagtttcctaaaactttgaaggaaagaataaaccttaacacacacattaagaagggaagcaatccccagggcattttttgttcacgggcatgacataaggtttcctaacctggcaaaagcagatttacactttacaggggtttattttaacggggaaattcatcaaaaatttctttggcgggatgaagagttattcttttcgggtttgacacaaggaaccaagacttggattaaaaggatggggctctggagggggggggcaacctgggcgtttt

SEQ ID NO: 30125 - DNA, 371 bp, Oryza sativa
  Clone ID: uC-osflM202061f05a1
aaccatccggaatcccttttaacacgggggaccaaaaaattcgggggagcacaaaacccgggaaacgagcaaaaccccttacaaaagcaaaaggggcccgggagcccaagtttaagggagcccaaagggttaaaaaccccgtttccctggaaaccacaaggcccacacgaatttcaaaaaattcttccctcctttaaactagaaaaaaaaaaagggctttaaaaaaccaggtaatgaaggccgggtccccccggggtgaaaaaacttttgcagcgggatggaaagaacccaaattggggggcccaaaagggcaccgatttcttagtcacccaaaaatatgcatgaagccccccaaaaaggaccttccaaaa

SEQ ID NO: 30126 - DNA, 596 bp, Oryza sativa
  Clone ID: uC-osflM202061f06a1
cctcttccccccctccctgggggggcttccgccccttgccggggctcccccccccccccccgcccccccgccgcccctcgcgccccctcccgccccgcggcgcccccccgcccgccccccaaaccccgggggcccccccccccccggggggcgggggcccccccccggggggggcccccccaaacctcctttgggggccgccgggggggggcccccccgggccaaaaaaggacccccgggggggggaagaaccgcggggggccccccccaaaaaaagggccccgggggggggccccgggggggggcccccccccgggcgccggggcccgcccccagggcccgggggggccccctggggaccccggggggccccccccctcttcagcggggccccgccgggacggggccccccgggggggggcccccccctgccccccccggggggaaccaaaaggccccccaggggggcccagggggggggccccccccccgggggcccccccccaaagggggggccccgggggggggcgccccgggcggggggcgggggccccccccaccccgggggggcgccgggggggtaagccccccccccc

SEQ ID NO: 30127 - DNA, 476 bp, Oryza sativa
  Clone ID: uC-osflM202061f07a1
cttcaaacttccaacttttccatcacatgaaaactttcctacacaaataaacttctaacttttttcttcaaacttccaatcttagtcaaacttccaattttagcgtggaactaaacacagccctactacaaatccaaaagtctgccccttcaagctacttagagggagaaaaacaccaatgttaccatcctttaggtctcaaccttctgaataatcaaaatggtggtgcatcaagcatcttcattgtcatcctcatttccctcttcgtaagagtcttcgtcttcatcttcatcatcatcgtcttcgtaagagtcttcatcttcatctttatcatcatcgtcttcgtaagagtcttcatcatcatctccatctctatcttcgtcttcgtctttgtcatcatcaaaaatcccgatttcctcaaaattgaaaactgcagaaataacaaatacgacaagcacagtaaatttcaagatgtc

SEQ ID NO: 30128 - DNA, 419 bp, Oryza sativa
  Clone ID: uC-osflM202061f08a1
gagggaagcaaactctttcttattcatcattcatagtatgtaccatgacatgccacccgcgaccgagaatatacattgccgagaggcgagagcccaaagatggacataaaaatttaaaaagaagaggtgaaaattaagtaaaaacaccgcagaaaaatagattggcgcgcttccacgctagctgcaaatatcgctctaataatctgcatgcttcggacggagaagcacatcggatatagagaggaggaagaagaggaggaagagatgagcggcggcggcaaacggcgaggaggccggcggcgagggcaggcgcacggcgacgagacgacggcgtacggagcgccatcatcaggcggcagcgtcgttcccaggtggcggcccagttggtggcgctgccgacgcggtgcatggagttgatc

SEQ ID NO: 30129 - DNA, 419 bp, Oryza sativa
  Clone ID: uC-osflM202061f09a1
gcacaatcaggtccattgtacttctttcatcaaccaaccagataacattgttttacacaatctgaacgaacgaagcaaatattcgggtacgcggaaagaggagaacgtcgcgcgtctcaccgcagcctgcatgaaagcaatggacctcaccgccgttgctcgccggagatccacactcacttgccggggacgaagttggtggcgtaggcccatgcgttgttgttgacggggtcggcgaggtggtcggccaggttctccagtggccccttgccggtgacgatggcctggacgaagaacccgaacatggagaacatggcgaggcggccgtttttgatctccttcaccttgagctcggtgaacgcctcggggtcgtcggcgaggccgagcgggttgaagctgtcgtcggggtagagcgggtc

SEQ ID NO: 30130 - DNA, 99 bp, Oryza sativa
  Clone ID: uC-osflM202061f10a1
ccgaggatacataagggggacccataacggacatttacaatacacacacttgcataaccataatcaaagctactccactcaacggtacacatacgcaaa

SEQ ID NO: 30131 - DNA, 350 bp, Oryza sativa
  Clone ID: uC-osflM202061f11a1
gagcaatggaaatactcgcattccaaaacagttcgatggacaattattggtctcagagcatcagttttaaccgaacagaaataaacgagtttttaacgactgacatagtgcacattgcgagctgtttttaacggtccatgaaacgagagccatggccgtgggcaaatcttatcaaattctttgaactagatctcttaactgcagacatgcaaaccaccatttgaacgaggttcacttctccttggcggcagccttggtcaccttggtaccgggtgggcccttcttctccacctttttgatgacgcccacagccacaggtttgttttatgttacgtaccggaaaaacgacc

SEQ ID NO: 30132 - DNA, 372 bp, Oryza sativa
  Clone ID: uC-osflM202061g01a1
ggagaaagtcaaggttcgataaatattgcttcacttgtacaaagtacagataaaaatacattgatacatgacacggagagagccatgcacaccacttatttggacacacagagggcaaggctgcagagaaaatcaagcaacacaagctgaactcacgggcccacctgtcagcctctcactggtcgaggccggagactcttgtgaaaaacagcaacaccacgcatgcagaagaagacaaattattacacacacaaatcgacgacacggcggccggcgacgtacggcgaggtcgtcgccgccgccggcgacgttgtgatgaggtcgatcagccgaagaggtggtgcttcttctcgccggtggactcctcggcgc

SEQ ID NO: 30133 - DNA, 117 bp, Oryza sativa
  Clone ID: uC-osflM202061g02a1
aaacataagtgggaacttcttcgaacgataacagttttaagaacaagggtcaccacaaaatattcaggttcggaatgcaagagtcacgaagggaggcctgttttcccccggtttttt

SEQ ID NO: 30134 - DNA, 400 bp, Oryza sativa
  Clone ID: uC-osflM202061g03a1
attggagaagatcagtactactttattcatgccatgaccatgcatacatatgggctttcacagatccatgaagaattcctcgcccgaaaccgaaaaatacataaagcaaactcactcactctggctgcagagcgaccgtgcgaagtgcgtactcacacgcaattttattcgatcgatcggggccggcacggcggcgcacacgtctacttcgccgcagacgccgacatgatgtcgccgtcgaacggcgcctggccgaagcagtccaggttgggcccgtagccgacgccgagcacgtcgcagtagcgcttgtagaacgcgacccggtcggcgccgccgttgccgccggcgcactggagcccgccggtgaggatgttcgtggtgagcccgtagcctggcgcgc

SEQ ID NO: 30135 - DNA, 423 bp, Oryza sativa
  Clone ID: uC-osflM202061g04a1
atcaaaaattgatcatcaattggttctacacatacacggacaaaagctggcactctgtagtctgtacccgtatacacacggacagttcgtacctataccattaccattacacccactctcaagtctcaactggaactagccaagctccgtacgcgtaaaccgggggagctcgccgcgccgaggcccaagcgaccaccgtccatccttgcacgccggcgtcgccacgacgccaccgccttcgcggcgcgccgggcacggcaatgcgaggctgctccggcgagaccggcagaacggcggtgggcggtgagctatatgacgcgggcgccgtcaccgggctcgcagaccagcacgcggcggcccggcgggatcttgcttaccagctccggctgcgcctttttgtacttggcccggacgaacgccgtc

SEQ ID NO: 30136 - DNA, 425 bp, Oryza sativa
  Clone ID: uC-osflM202061g05a1
aaaaaaaacatgcaatagattttaattaactgaaggggaagaaacccaatcatttttgtttatacagtgaaagcaagatgcttggccctccagatgactaaataagctaaagcataaacattgtccaaattttttacatgtcgatcacatgatgcacacgataaatagattgctttgacagatacctccattgggctggacggtcttttgagacaagaaaaacccttgatgacgagtaatcgaatgtagggcagtccaaatcattaaagccaatagccttttttactccaagaggggctccacggtcaaagctgtaagtttggtgaccgtcctccttaaaggggtcaaatgcaaataggcccataccacatgcagccaaaacaaggttggagttgccccacacttgggtttttgaaaagtgatgg

SEQ ID NO: 30137 - DNA, 397 bp, Oryza sativa
  Clone ID: uC-osflM202061g06a1
ggacaagcaagaagtatatatattcatccatttctcaaactactacaagaggtcgagaggaacacataatcaggagggattgcgacaatttacagcaacaggagtctggagatcgaggcaagaacaagacaggcagcagcagagctaccctcttcatttccactgaatttttacacatttggaatccatggaaaccgagccttccctcccgtcgtcgtggtgtcaccggagtccgatgagaaaaatggtcatggcgtgctcataatccggatcgctcgccggcgtcggtgaaggaggcggggcgattgttcgggcggctgttgaggagtgggttcagagccttgacgacgatgcttatgttgggcctgaagtccgcctcgtactgcacgcacagcgc

SEQ ID NO: 30138 - DNA, 430 bp, Oryza sativa
  Clone ID: uC-osflM202061g07a1
ggtatgggcaacgcgcggatgatattgcttagtttaaaagaaagttgctgtacaattgtactatacactctagggtgaaacaaatagagcgctaacaatcactacaaccaaaagggcagggcagcaggagaaacacaaacaaatacgaccattttctctcaaccaatagcctatagtacatgcctcaaatgtatacacaagtcacgccaggtcttagtacagacagaagctgatctgatcccagagaaattagcatcctggcaaggattgagctgatgccatggcagataagcttgcatctgaatcagcacagtgtctcagataggattgccggaaagactggcctgaggatgctcctggttgatttacctctgaatcagcccacatgtttacgtaggattgcccgaaagactggcctgaggatgctcct

SEQ ID NO: 30139 - DNA, 361 bp, Oryza sativa
  Clone ID: uC-osflM202061g08a1
gggacgacaactttaaatattggtcaataaaaccctttctggggccaacccacacgagaggcatatccagaggaaaacaattagcccaaacggaccacttggcccaaatgcaaagcattgggaagaactaatttgaccggtaccacccttgtaaaaacccaaaaagagagaggaaggggggcccggaagaaaaacatttttgttgaaccggagaagaatccattcattatggggaccgcagcatggggcatctaaatcgatgggctccaataacatgcggagccattgatcgatcgatcttcccattttactgggccttgaaggggttgtccttggagggtttttttaccttattaccacc

SEQ ID NO: 30140 - DNA, 469 bp, Oryza sativa
  Clone ID: uC-osflM202061g09a1
aatacttcacttctttctttctttataacatatcacacacacgacacatggccatgccacacaacacaactccagataaatgacatgacacacaatcaaaccgaccaactgaaaggaaaactcatcatcagaagttcagaatagcaaacacacattcagacacacaaattaaggtagagaggagagaggaagagaacaaaaaagattatatacccccctttcaattaacttcaaccacagccaagaatcagacttgcctaccactaggcacacaagcaaaatccatcaagtgatcacctcgctcctcttcagcctaccttcgcttccgccttcgtcttcaccttcaccttcacttggagcaattcttcttccacctcagccttccgcaccttggtggtcgccgaaggcgatcgccgtgccgtgccaccatcaaggggaagtttctgagctgcacagctagggatgattt

SEQ ID NO: 30141 - DNA, 486 bp, Oryza sativa
  Clone ID: uC-osflM202061g10a1
gggagggtggtcaaccacgtaaactgatcctggaacaaaatgaacaacatttacaagcctcaacccttgacagttacaggcatcgtgccattgtacattctcaaaagctaacttctgtgagcgcccatcaaagctatgtctactacaaatatatttcaattacagggggagaacataattgaagtgggaaaatctactagtacatcatcattatcaccaagcacacaacctagagttccaagaatggcatgtcatgaatcgaaaacagaaacgctagaaataacctattcagtagccctctgcaattgtcatgtagtgaagaaagaccatagctttttcccaattgattggttccgccttttggagtcatcgtcctcctcatcatcctgttcagctccaagttcacttcctgatggtgtcataggcatcgcatttggtgctgtatttatcccattcacaattatttaccccctttgaattagtgac

SEQ ID NO: 30142 - DNA, 362 bp, Oryza sativa
  Clone ID: uC-osflM202061g11a1
ttcttttgtgttgtttttttttttttttttttacagcctaatacgcccacttgttattcaaacctatgacgaacatgattcattacattgatgctttgccacatcccattgcagagtttttggacctcaacagttcccttagaaattgcctcccaagtcagttccaggtgttgggctgcctaagcgaaccttgtttttgaccatttccaaacagggatatggtttttggccttctggggacccggttttacaatatttaaccatgggggctgcccatcttgcatggcccagggttgggttacatggcgggtcaaatttattttttacagcgggtttatatttaacagggggtgctaaaccta

SEQ ID NO: 30143 - DNA, 380 bp, Oryza sativa
  Clone ID: uC-osflM202061g12a1
agctgaaaaggcttttttacatacttccatacaaccatagcttatatacaatgctagcaatattacacatccggcaactaactcattacatataagagagaacatggatagttagctgaaaaggggacagttcattacttccgtacaaccatagcttttgtagactggtaacgatattacacacccgttaacttaggcactacaccatcataatagtgagatatttgacgatagtagccagactgccagagagccaaaattttggggacaggttcagtttcctaatccccactggtccataggcatcgtttggaatttaaccagcaattcctatgcttttccctcactggcattggcgctgtcattattgacaattttga

SEQ ID NO: 30144 - DNA, 372 bp, Oryza sativa
  Clone ID: uC-osflM202061h01a1
agggatagtactggaatgcggtgattaggatggaagaagcattctggacgatacaggatcggacatctgggcacgattactcctcctggaagtaaaaaccagccgtcacggccgatagtgacgctcgttgtcgttggcaggtgcattacataggctgaaatgtttggtaccccattacatattagtcttgatgattcaatatacttttgcaggttggcaccgttttttacttgacgctcttagcatcttcctcggagaaactttcccgccttccagctgcaaagccttaacgctcgagctgatttcatgttggctggagtactgtttaggttgtcccaatggttggcgctttacttattgtgcagcaatttg

SEQ ID NO: 30145 - DNA, 377 bp, Oryza sativa
  Clone ID: uC-osflM202061h02a1
aaattaagcatttatctatctgtcccattaacgcaaccaatggtcacaaaatttcgttccgattacacagttgcggaggcttcgcatgccaatctgcatatatcaggattcaggacacactgcacaccgtatccgttgggtaatacagaagtattttgtcagttgagcaggtcgtcccacttgcagtactgcccgccggcgagcgcccggtagtagcggtccctgcagtagaccggccgtccgtcggcggcctccgcggcggcagcggcgaggtcgtcgtcttgcctcacctccacgggcagacgcagcagctcctcccttctgagactgggcttggaggaggcagcggatggtggtgcgttcacggagtgcaggaa

SEQ ID NO: 30146 - DNA, 429 bp, Oryza sativa
  Clone ID: uC-osflM202061h03a1
ttttttttttttgttttttttttttttttttttttttttttttttttttttttttaggaaaattggttgggccatattcaatttggcaagggcttttccatgcaaaaaccatgggatgcaaggaaacgaccactccaacacgataagaatattggatcggaaactctgttcacacctggaacaatttggtatagggataaaccaaatatagaatcaataacttggcgatcccgtgggagccccacagcccgatagagggccccaagaatggatcttcaaccaccgggcaccccaggaaccggatggagggccccatgaatggtggggccgggaggtcaattctgggcgctgcggaggggtcctgggtcttgcatttttaggaaaaataacccaccccttgagaaaccgcatagaagccgatatttattt

SEQ ID NO: 30147 - DNA, 459 bp, Oryza sativa
  Clone ID: uC-osflM202061h04a1
aaccaaaacataggaggtttcatttcttcttctcaaagtagtgtagcatctttccttctttcaccattacataagcttaagcaataacagataacaaatcctcctcctcctctaggtaaaatattcaaacacaatacccttataagtacttattattaggaaagtagcgtgcatgggcataaatggcagcggggggcaggttaagaatcacaatgctgagcagcgaggaaacaaaacaccataatgggacagagcaaaagcctccgaaagggagcttttaggcagaaggcttctcccacttgaggggcttcaccacctcccaggtgaagtctgggtcgtcccttccgaagtgaccgtaagccgccgtcttgaggtagcgtccgttgccgccttttttgaggtcaaggttgatgatgatcatgccaggcctgaagtcgaaagtcttcttcacaatcttga

SEQ ID NO: 30148 - DNA, 410 bp, Oryza sativa
  Clone ID: uC-osflM202061h05a1
aaaagtattctggaaatccgcggttgtcgtctcctctatattgaggtccttcgtaaacttaacgaggtattttatatctcatttaacctatattttgagaaacaatagaatttttgcactaaaatatagcacatgccctatgtatggcgagaatgtgtacgcatgctacgtatcctctacacatactgtacctatgaccaccaaacgatacttttttgcctcacgcacatgcatgcacaagcacacactgatccttaattctttcacatggacgacgcgtgcttggagaggtagtcgatggcgacggcggtgtggaccgcggcgccgacggggagtgcggcctcgttgatgacgaaatgcggggagtgcgtggtgtgcgccatccgggcgctgctggtggtggcgtttgc

SEQ ID NO: 30149 - DNA, 523 bp, Oryza sativa
  Clone ID: uC-osflM202061h06a1
aaccaaaaatttgaatcgttttattttgtgacggaagattccatccagtacatctcacaagtaccttgttccagaccaaatacatatatattagcataaagcaaaagagggttgcgttttccagcgcacttcaaagtgccagcttcactcgttgctgggttctccgcgctccagcttacaacggaagcaagtgttattcaccgtggatcgttatctaatccttattattgcataatatagcgtccatcttgatgagcttcgtcttggtgcatatcgtatttaggagacagggctagcagtaatgccccatatttcctttgcatactgagcgatagtacggtcgctgctgaatttgccacttccagctgtgttcagtatagacatcttgatccattttttcttatccttgtaggcttcatcaacctgggcctgtgcatcaatatagcttgggaaatcatagccaacgaggaaataatcaccacgaccaaaatcagaattttctttaagagaattcaagagggga

SEQ ID NO: 30150 - DNA, 359 bp, Oryza sativa
  Clone ID: uC-osflM202061h07a1
aaaaaaaggggctgacataaaaagcccccttcaatgggaaggaatacccacatttttaccgggttttttatgttcaaacggaaaacccgatttccccgattggcccccgccaaagggcatcacaagggcattggttttttacaacaaaaattggaggaaccttgggtgggtggttagacaaatccacattaaggaagtttgtcaggtcgtaaaaccctacattttcaaccctggccttgaatggggggcccattggttttttctgaaccgcctggtttgacaatccccttgatgtcacccccctgtttcgcaggctttaaaaaaaagccaaacaatttttcattccccccggatgggac

SEQ ID NO: 30151 - DNA, 501 bp, Oryza sativa
  Clone ID: uC-osflM202061h09a1
aataaaaagaagcaattcctgataagaaaagagtccatagaagggtaggggaggcaaaaaccggtgaacacaatggcatctgctgtatcacggccaccagcggaatacaagactttcacttctgtgaatgcaatcaacgatactaaactaccaacttgctttcctcttggtttattttggcactgtagatagatactaccctgacactgtctatttggtgagggccccatacagaaatccaccgttttggtcacggaggacaagatctctccccccttgcgtcgggaaccaagggcatcaacaaagcaagggagaaacgggaaggagaggagcatcgacaagcaatcatctcccagtaagcaccaagcactgccatgtttgccaaccttgtagtcctacccctcagcctgctgctgctgctgcttctccttcttgggaatgtggaagcccttgaatcttgcgtgcaaccctaatttaccccaactgttggtttgccatttg

SEQ ID NO: 30152 - DNA, 434 bp, Oryza sativa
  Clone ID: uC-osflM202061h10a1
gggaatctccctgtttctattggtgaaagaacaggagatccatgtagacaaactgctactatacaaggaaaactggcaaaaattatcatcaaagagccctaagcctgatgctcaagtgagaatactctcaggctcaacactttgatgaaagggaaaaggagagaggaaaatggattgttactgtatctcttatgaggttgcacttaaatggcatgtctcgagattgacttagaggactgagtcagagttgatgactgtgccagtgatggatgctctgactgaccatcccagcagatgtccctgagagaaggtcttaggcccttgttgcagaatttttcgtactccaacgtgtcccctgcagactttttcacctcaacaacaaagaaggatggtgtcacttcaaagatctttggattgatcgggagctgcccttt

SEQ ID NO: 30153 - DNA, 398 bp, Oryza sativa
  Clone ID: uC-osflM202061h11a1
gcaagctggacatcaattagaacataacgattcaaatacagcgcaaaaacaaatacagtgagcattacagaaggtttcttttattactagcatgcaccttgtaatttaggaagattacaacaatatcctagtttcctcaactgatcaaaacatgatcagaattttagccagtctcatattttgtgcgtgagttgtacacattaggaacataccagaaacctaaactaggtaaaaaaaaaaaacatagcaccaagccttttgaccataattttccttgccaaccaaaaacttggtttcatgttgccagtttgattaggcaattccaatttatcagtaaaaccttaaggcatattcaagttccttttttatcagaacagttgttaacccaactgttttgc

SEQ ID NO: 30154 - DNA, 383 bp, Oryza sativa
  Clone ID: uC-osflM202061h12a1
agaagacaagaacgacgttaactaggattcaacattgcatagtgcttacaacaaaactcgttttcgaccaagtggtgattcttcttaccaaagaaaaccaccatggtctcgaagaattatcttttacttgtagtactacatgaggaaaaaaatatgcatggttttccaccaccaattcagaatctaaaatgcaacggtactctggattggtactcatctagttacaggaagtagtctggtatcaggagattgcccaccatccagcaagccagctcactctagccatccactcctggtgcatacgagctccattaatctgggacaaggttatgtacattacattaaaaaggaaaggctctcgcatcatgtagctgaggcgcttg

SEQ ID NO: 30155 - DNA, 419 bp, Oryza sativa
  Clone ID: uC-osflM202062a01a1
atgagaaaacataatgctcatggcatcagaaatacaaacgcaaagatttcgttacatactggaggggataacttcgttcaaatcgtttaaatttacttctattacatgcatttgatgctaaaaaagaaaaaaaaagacctagcatggaacacaagcatagaatctacattgcaaagttatatataagacacgatacaccttcgatcatatcatatgtaacaacactggccccatcgccattctggtcctacattaccaccaccattaccacctaagggcagccaggagcatgaaagcgaggacgaaattcgggccgggtcagttcttggcagcatggggggtggggcccccactgtaatcggctaccttgagcatcagatttgacagacaggaacaagccatgctgctggctgggagaa

SEQ ID NO: 30156 - DNA, 416 bp, Oryza sativa
  Clone ID: uC-osflM202062a02a1
cttcaggtagcagaggattaactggggatctacatatatgtacaagctggctgaaatacagaggagcgaggcaggctcactcgacgactacaaaaggtatatacatgtctcggtatagtatcgttcaggtcgttaaattaaatgcacggaatcgaccgcgtggagcaggcagaaacagaatcgtatggctctgttcttcggcttcggcaagggcaaggcaatcggcgattgcctggatgaacacagatgcttcgcgcgtgccgtgggcccgtggagcagagacgaagacaatgcttgctgttgaaaggtcttcaagcgggaccttcgcacacgttcccacgggacaacgggcagaccctgtgtacttctttgagccacttgcaaccacacagaaggggaactcgtgtttgcacgga

SEQ ID NO: 30157 - DNA, 444 bp, Oryza sativa
  Clone ID: uC-osflM202062a03a1
aggtgggaaacgaataaaatcattattgcaaaaacatcatcttcttcttcatcttcttagtgtacacaacaccaactcgatcatcatctcgccgcactaaacccatcttccccaacccaaagacaacgaactcgctggccacaaatccatccaaccacaattaaccactgctaagctacggtcccccacttcacttgccggggacgaagttggtggcgtacgcccaggcgttgttgttgacggggtcggcgaggtggtcggcgaggttctccgagggggcccttgccggtgacgatggcctggacgaagaagcccaacatggcgaacatggccaggcggccgctcctgatctccttcaccttgagccccgggaaccccttcgggtcatcggtaagccctaccgcttcaagccccgtccgccccggaacgcttctctacctcccc

SEQ ID NO: 30158 - DNA, 205 bp, Oryza sativa
  Clone ID: uC-osflM202062a04a1
gggtattgttaacacattattttttttttaatattattagtggacacagcacccactggaacagtatcgagctggactaaaacaaccatcgccaaccaaagggcaaacacgtgggataaacacaaggaggtgctaaccagaaaggaaccaccgctaagctacggaagccccacttacacttgccagggcgacgaagactgcgcgg

SEQ ID NO: 30159 - DNA, 379 bp, Oryza sativa
  Clone ID: uC-osflM202062a05a1
gggataaattaaccaacttaattcatctcaacaagagttgtacaaagggtctacattcaacgttgagggatcagccatagcttaacaaaagacaacaaagtgaaacaacggggcatcacgagcgggtcagttcacaggaactccagagggtcacttttatttgcctccgcagccggccatgccgagggacaccgaggcagcatccccaccaccaagtaacatcaaaaggcttcgcaacaaagccgttggatgcttgcagcttcacaggctcgagtgagccaattgatcaactaatcatcgcaagggattctttttctcgttggcgttctttcttggccgagcaggaaatcttgcacgaacgggagtgacgttctccttg

SEQ ID NO: 30160 - DNA, 425 bp, Oryza sativa
  Clone ID: uC-osflM202062a06a1
ggttctaagtccttgttattgaatatactgcattggtagtttggtacaaagtgatccttcggtattgccctctgatcttggactgaacaaaaaacaaacctgaataagctgccttctagaggagataatcccaatgaaatcaggatagtttatcacgatgaattcaaccacaccagaagaaaaaattatagactcaaatgcttgtattcctcgatgtactctgctcgattctaaaatcagattagagtttgacaccgcaagagatgaggccacaggttggcctccgccggcgcccggagtgcggagtcaggccgcgcgcttcatcccgccgtggcgcccgaatagccccgcctgcaacacccaatccttgatcatctcctgcgccgcgcggccggtgtccgccggcatgaggtgcccggcgccgt

SEQ ID NO: 30161 - DNA, 480 bp, Oryza sativa
  Clone ID: uC-osflM202062a08a1
gccggtgaggcgaagatgtggtggcaggcgtacgtcgacgaccacctgatgtgcgagattgacggcaaccacctcaccgccgccgccatcgtcggccacgacggcagcgtctgggcgcagtcccccaacttcccgcagtacaagcctgaggagattactggcatcatgaaggactttgatgaacccggcagtctcgcaccaactggtcttttccttgggggcacaaaatacatggtgatccaaggtgaaccaggggttgtcatccgaggaaagaagggcactggaggcatatgtgtcaagaagactggcctgtcgttgattcttggaatctatgatgagccgatgaccccaggccagtgcaacatgattgtggagaggcttggcgattatctgatcgagcagggttgctaagtcctcaatatgctattttggtcatttgggacttagtttactccctatttggttcaataatgtgagctt

SEQ ID NO: 30162 - DNA, 444 bp, Oryza sativa
  Clone ID: uC-osflM202062a09a1
gatgggtgagctatgctaggtcgtatgattatagcctcttattatcccccatccatttaattacaaaatctacccctcattctcttccctctttcaacaatatggccctcacatctcccaccaaaaatgggatgcactgaaatcaaaatgaagaagaaaatagaaaaagaataccaaaagaaaaaaaaatcaagaatcacaagtatcaacaaatttcaagcaagggatcagaagaaacaagaatgtcatccattcatgggcgaccaccattgatttacttgttcctcatcctgctccccctactctccgccgtcctcggcgcggcagcgccggccgtcttggtggtggacgcctagagcgacctcgtcatcgccgcgccgtccgcccgggcgcgttcgccgtggtcgccgcgtggccggtgcacgtccgacttgtggtcagcgg

SEQ ID NO: 30163 - DNA, 450 bp, Oryza sativa
  Clone ID: uC-osflM202062a10a1
gactaacagccacgattcatcaccgttattagatcagcataaaccaaacaaaacaagcagatgcgatgcgaccgaggcagctttattcaacttgtccagaaccacttctctaccgactatcacttttgcatgggtaaaattaactaggtaccacgggttgattgtacagtatttctcaatgggacagacatgccgaaacatcaactatttcccccactgtcactactctccatctcaccgtatttcagaaccttggcaaaatctggcgttggagctgtcaaacatgttagccgttaggtcccgtttcctccatgtctacagccacaagcatccatgccctctcctactcacttgtttagagctcatccttgagaggctcggctggggccgactctgccttctccttcgcctgaccagcgggtttcttgttcttcttaatgaagtcgacga

SEQ ID NO: 30164 - DNA, 240 bp, Oryza sativa
  Clone ID: uC-osflM202062a11a1
attagatcattttaaaccaatcaaaacaagcagatgtgatgcgaccgaggcagctttattcaacttggccagaaccacttctataccgactatcactttagcatgggtaaaattaactaggtaccacgggttgattgaacactatctctcagtgggacagacaggccgaaacacccagctattccccgccacactcagtacgattcataaaaccgcctttcagaaccttggcaaaaactg

SEQ ID NO: 30165 - DNA, 306 bp, Oryza sativa
  Clone ID: uC-osflM202062a12a1
actagcgaaacacaacaacggaataagaaagctgtcaatcaaggacccgaaccctaaacgcgccacagccttgcataagcattttcacacgacgacaccacggataaatacagcaagcctcaaaaaggagaaaaagaacacgggcggagaaacaacgtaatctgctgatgagcgtacgagaagccttaaggatcctgaattcctccctttcttatttcggtgcacgtatcgactcttcctggatcttgtcgcgttcgcgggaggactggttcgatcagcagatgggcaggggctcgccgttccact

SEQ ID NO: 30166 - DNA, 475 bp, Oryza sativa
  Clone ID: uC-osflM202062b01a1
ccgtacaaacacacttgcaaatatcagctgatataggaaatagctgcgagttcagttattctcgtccaagcaaaaatagtacagcttaagttcaggacacaggatatgcgcaaaccaaaagtactatttcaagagacatactgatcgaacattcatgaaaagtatgtaacgcttgcagggagtaacaaaattaatttggccttggtgttgcccactcaacacgaaggataaggttatcataaccataaccattgagcttgctgatagccttctcagcgtcctctttgtgaacaaagttgacgaagccgaaccccctgcttgctccagtcttctgatccacccgcaacgtagacacggttaactggaccaaatgtgcggaatagctcaagtaggtcgggttcacgggtgtcctctgatagattggtcacacggacagagttctcatcattcctacccctcatgtcatgtccaaccc

SEQ ID NO: 30167 - DNA, 455 bp, Oryza sativa
  Clone ID: uC-osflM202062b02a1
cctcccctctgttttttttaaccttttactagaaactttacatccaaggttaaacaagggtagagctaaggttagccaaatttaaaaaaaacgaggaaaataaaaaaaaactaatccacttcggcccaggcccataaaacggccggcatggtctcgtggcgaagcgccgagaccttgtcgccgaagccgaacaagccggcgtcgaagccgtcgtcgtcccactccgccgcggcggcggcggcggcaaccgcctccggcgaggtgagggcaaacccagcgtagccgcctccgccaatttcgtcctcgaacccccagatctgtccgccgaacccgatggcatcctggggctccccagccccggcctcctcctccgacaaggacccggtggcgggcggcaggcccagctcgtcgtcggaggcctcgagaaggaacccgagcttgggctgcgtgtgggg

SEQ ID NO: 30168 - DNA, 326 bp, Oryza sativa
  Clone ID: uC-osflM202062b03a1
ggaggcggcggcgttcggtctgacgacgctctgctggtggcggtgctgcggcggctgctggtggtggtgctgatgctggaactggatctcgtactgcatcttgttgccgtcgacgtcgtcgtcgtcgtcgtcgtcgtcgacatcgtcgacataggcatcctcgtgggccttggacatgttgttaatggtcacaccagcgatggcctcaatcctcctggctcccatgccaattcttccatcaccttcttgtgcacaagaattagagaaatcctcaacgagctgagttagcacgccatcatcttggccccatcaggcattttcatgat

SEQ ID NO: 30169 - DNA, 316 bp, Oryza sativa
  Clone ID: uC-osflM202062b04a1
aaaacaagacttgaaaagaaaaaaatcctgaagtctgtcccaaagttcagttttacacctcacagaaaatggcccgggtttgcagctgggttttttctttgacaggtatgcgtccctttgtcgaaggggaacaacgtacgggcagccaatccgggcacagtttttttaggttggcagttctgcccggggaccgaaaatgggggggcttcgtttccttttaggggtgtatttttttggaccttcccgaggccgttttttggccaggggtttttgttttcgcacactttgcactcgtcggtcttcgggttgtccttgc

SEQ ID NO: 30170 - DNA, 277 bp, Oryza sativa
  Clone ID: uC-osflM202062b05a1
ctgaattctggatggaccatatcagattcatcacagcatcgcacaatttgtgcaagcattggtccatctagcgatggagagagagagtagtctacaatggcggttgggccattcacgagcccggggggaacttgggggcgtaaacccaggcgttgttggcgacggggacggcgagggggtcgagcaggttctccaaggggcccttgccggtgacgatggcctggaacaaaaaagcccaacatggagaacttggtgaggcggcccttcttgatctcct

SEQ ID NO: 30171 - DNA, 160 bp, Oryza sativa
  Clone ID: uC-osflM202062b07a1
cttcttaggtcaagcaaaacccactttattttcatgtacctggcaaacccagcgctgttaatacttttcaaacagtaaaaaaaacgtatccacggttcaaactatgggcattaattaccacacttccccgatttttttctccatacctgacagggtacaa

SEQ ID NO: 30172 - DNA, 396 bp, Oryza sativa
  Clone ID: uC-osflM202062b08a1
gtgacataaattacttctgctgataatatatatagtttctgtttgcatatgaacacaactgttcttatttacagtgttttcttttgtaagtagtactttcgctatgtagtaggagtataaaaactgagaaatttggcacttcctgggccaatgatatatttttaagtgtgatagaattcatggcctcaatcctcctgcctcccatgccaattcttccatcaccttcttgtgcacaagaataagagaaatcctcaacgagctgagttagcaggcatcatcttggccgaatcaggcatttcatgattaatttacctgttgatccttcccattacgatcgcgttcttcccttaacttcgcattttattttgatgcaccttttggtggtgtggagctatt

SEQ ID NO: 30173 - DNA, 549 bp, Oryza sativa
  Clone ID: uC-osflM202062b09a1
actgtaatcaaatgcaacaaaaggttatctgcttatatacatccccgtactttaacttcgacacctgctgctcggtcggccgattaactgcattgcactgggtgttcaatctaccaacatgcagaggagcagatggtctgtgtgcctttgctccattctgtctttctatttcactactcattaatccatcaattcacacatcagactaaagagtttcaggatatacaactaacactggataaaaaaacctccccagtgtttccatctgcagccagttataacggcacaacagcagctgcacttcttcccaacaaactgaatcatctccgtcctctgtacagatacaaaatggtcatccccaaacctgtaaatctcctcaattttacaccaggcatcatcacaaatggaggtttttcatctagtcatgtatgtcctcttctttatcatgtcaaactgttggtatgtttgtgctatgaaaatacggcaataccccggaagatgagatacagtaggaacgagacataagcaagcaccgctgcgaagagacta

SEQ ID NO: 30174 - DNA, 344 bp, Oryza sativa
  Clone ID: uC-osflM202062b10a1
ataagagaccggaaggaattgcatggatgaatcatgaattgaattgttacatcacaagaacaccgctcttgttcaagggcagtgtcttctccttcctgcgccagatggcgtcatggcgattgcaatttgcaagatcattctacaacaacaatggatacgtggattactccaccatgtatatggtgagcttgtgctcacgcgcacgtgcaagatggatttggctaatcatcagagggacctaatcttccatgacctgagctttggcggcagctgcgcgagcatggagttcgtcgtcgcccgctcctcgtgctggtcacccgcttgaaccactggctctccgggtc

SEQ ID NO: 30175 - DNA, 88 bp, Oryza sativa
  Clone ID: uC-osflM202062b11a1
ctacttcgccaccaatggccatcatttattcgctcaaatccaaaataccagcaattcgccaaggaccatatttccaccttgagatcca

SEQ ID NO: 30176 - DNA, 370 bp, Oryza sativa
  Clone ID: uC-osflM202062b12a1
gtaatcaagatagcgctatattagtatatttcacttgcaaaatacaacaacggaatcagaaagctgccagccaaggccatgaacgctgcaggcgccacggcattgcagcagcaatctcacacgattacaacacggataaatacagcaagctcaaaaaggaaaaaaaaaacacggacggagaaacaacgtaatctgctgatgagcgtacgagaagccttcaggatcctgaattcctccctttcttatttcggtgcacgtatcgtctcttcctggatcttgtcgcgttcgcgggtggactggttcgatcagcagatgggcaggggctcgcccgtccactccttgaggcactcgagcatctggtcgatgagct

SEQ ID NO: 30177 - DNA, 357 bp, Oryza sativa
  Clone ID: uC-osflM202062c01a1
attataaaatgacttgtattatattcccaacattaaagtttgatattcggatacattttgctcactgtggcagacaaagcagaccacctagagcccttttattcagaatatatgcaagataataaagaacattggtcatagcatatactagtactatatgaatagtctggctggctgcttcacaaagtaacagagtgatcgctactggagttttgagtattctttaatcttcagtgcgcttccctcatcagcagctcctcatcttcttaccctctgtgccatctatctcctcgacagcatcgtcttcccagtagagagccttcattttaccagctttctccgtggtttcatcagcaa

SEQ ID NO: 30178 - DNA, 123 bp, Oryza sativa
  Clone ID: uC-osflM202062c03a1
gagcagcattatgacaaaattgacaacacttgctcctggaccgtgacaaagggagaaggttacattttactggactaatattcaacctgacgtcgtggactttttggaggaaggctacgcacc

SEQ ID NO: 30179 - DNA, 334 bp, Oryza sativa
  Clone ID: uC-osflM202062c04a1
aacaaaaagattagtttgaaacaaatgaaagaatacagtgtgtgttccccgtccacccagttacatacatacatcccaaggagttcatcttctccttttttcaagagaactcagaactgcttggtacaaaccagtactagttacatgatcagtagcaatggcgtcgaattgcaggtattgcagatgaaaccacctttgttcttttccccctctagaataaagatggagaaggaagaaaaaaaaagaaatcaatagtaattaccttccagtattaattggcattggtaagaagagattagatgcctgttagattaataatcaagctgatctctac

SEQ ID NO: 30180 - DNA, 235 bp, Oryza sativa
  Clone ID: uC-osflM202062c05a1
agaaaagccgcttgctttgccgccatggctggcaagctgagcagagcagctaacacaaagaacacgagatcactataaaccaaacggcaacgaacgaagaaaatacagggtcttttttgtctgaagatacacgaagcggttcgttttcttttatttttaggctcctcttctcctcgatgatgggtgtatggcaatggcaatggcgaagggatcctggcttagccgctgggaaggg

SEQ ID NO: 30181 - DNA, 111 bp, Oryza sativa
  Clone ID: uC-osflM202062c08a1
ctcagcagaagtagcttcccaaaatgatcaaaatgccccccatggctttgcttgttggctggttgggggtattctcgccattttgagaggcagaaatatgtgctcgaagag

SEQ ID NO: 30182 - DNA, 68 bp, Oryza sativa
  Clone ID: uC-osflM202062c09a1
tttttttggggtgttttttttttttttacgcattgacacataaaaacacactaagggtttcgatagat

SEQ ID NO: 30183 - DNA, 287 bp, Oryza sativa
  Clone ID: uC-osflM202062c10a1
tagttggccgccatggtcgcgcgctcccccgccgtcgcccaccaggagattgccccactaggcgcacgttctgtttcaacacaagttgtgagaacccgcatgaagagtgttaggaacatccagaagattacaaaagcaatgaagatggttgcagcatcaaagcttcgagctgttcaaataagaacagaaaatttacgtggtctatggcagccattcaccgctcttcttggggatgtccctagtgtcgatgtcaagaagaatgctattgttgccattacctctgacat

SEQ ID NO: 30184 - DNA, 355 bp, Oryza sativa
  Clone ID: uC-osflM202062c11a1
ggttgaaagcatgtagaggaatctcaatacacataaatcctgatacaatatcaactaagtttaatgtctaggaagactcgatgaaacatgaaaacagtggactgccgtgcgagttacaaatcatctaggataagagttaaaccgatactgattcctaagtggaacctacaaaatatcaggtttcgtggttccggtggcctgcaccgaataggtaacagagagttctggaaacatgtacggtgtacatgcaagatacaaatttgggacttctgacgacgtgcattgtcgagagcaagagtgccaccatgcactgcaaaattctcctggaagcccagaaaatggcaccattgttctc

SEQ ID NO: 30185 - DNA, 56 bp, Oryza sativa
  Clone ID: uC-osflM202062c12a1
ataaagaagtatatatgatggataaataatattatcgggaccccctattcatgccc

SEQ ID NO: 30186 - DNA, 356 bp, Oryza sativa
  Clone ID: uC-osflM202062d01a1
gagcaacatttcaaacacaaatctgaatggacagaagaaaaaacattcatgtgcacgaaatgtagggatattatcacaatggtagaagcatctgttgcattcaggattacagatacaactagaaaagtgaagaaaaagctgagttaacaacagaagacacgcccttggcttacatagtctatacacatcaagcatacacacatggggtgatgctttgtcaggctcctaggtacgtaggaaggaagcttccatggactgcaggatactcgctgtgtcgaacctgaagtttcggaagcttttacctgggcggctgtcaagagtttgtgggtcagatcctgttctagtaataacggggt

SEQ ID NO: 30187 - DNA, 382 bp, Oryza sativa
  Clone ID: uC-osflM202062d02a1
catggcagtttattgttccatctttattcattcacaaaagtagatacagccagtgccttggagagttggaggttcgagcatcttggcctacaatgctcttgctaacaattctggcgaatgaaaaccaaaaagagctcaagtgtgaaagtttaaagatacatggcacaatattacagaagttgccgtgacaaagtgatctacgaacgaattatgcttacccgacagaaagaataggaccggactatatataactacagcaaaaaggccacaagttcaaacatttcaatttattcaagctgcacttgggagaaaacatttgatttttttgaacatagatcagtgctttgcatttctttgatgtagtacttgatccaaacgtttt

SEQ ID NO: 30188 - DNA, 262 bp, Oryza sativa
  Clone ID: uC-osflM202062d04a1
aaaacaaactggtgtttatcatagtaaattttcccggagaatcagatgctcagaattcataggggccttcagcattttacaacttccaagatggggcaaaattacaagcgcaacttttttaaagtaagctgttgggggaaacgggaccttttctaacaccgggaaaaattttggtttttggagggaaccctttgtaccccttaactggggaataaacccgggcgggttgtttcccgccctctcttaattgaaccgggccttt

SEQ ID NO: 30189 - DNA, 119 bp, Oryza sativa
  Clone ID: uC-osflM202062d08a1
tatttgcccccttttttttttcttggggtatagtacttcacgcattcttcgaacattatcacctaattgatacaatgtctgcgttagctactagcttagttaccttaccaaatactaca

SEQ ID NO: 30190 - DNA, 364 bp, Oryza sativa
  Clone ID: uC-osflM202062d12a1
gggaaacgaataaaatcattattgcaaaaacatcatcttcttcttcatcctcttagtgtacacaacaccaactcgatcatcatctcgtcgcactaaacccatcttccccaacccaacgacaacgaactcgttggccacaaatccatccaaccacaattaaccactgctaagctacggttccccactttacttgccggggacgaagttggtggcgtacgcccaggcgttgttgttgacggggtcggcgaggtggtcggcgaggttcttgagggggcccttgccggtgacgatggcctggaccaagaaagccccaacatggagaacatggccaggcggccgttcttgatctccttcaccttgagct

SEQ ID NO: 30191 - DNA, 452 bp, Oryza sativa
  Clone ID: uC-osflM202062e01a1
atgaacgaacgaacttgactcagctttctggtgtgaaggcagaatgcttagtcattttatctcatcatcagtagtctatcaatgtcacaacaattgtttcacttcattctcgtttgttattattgaactcatcctaagaaccccttcaaaaaaaacaaacaaaattactctgccaccatgctggcgtgacaattctatgtgggtaaaaaactcaaagcaccctagaattccaaaattgttggaaataaacctaccactgatgttactttctatgacttctgctttgatttctgcttcttcaactccaaggaagtccctaatcctactggtgtggaaccaccggactttttagacgatggcccgttggtattccctgcagtgccctttttggggggtccattcgattgctgaccttcagatgcattttgagtgctggcagtagcggaagtagc

SEQ ID NO: 30192 - DNA, 193 bp, Oryza sativa
  Clone ID: uC-osflM202062e02a1
gaatactcctatttcatattcattttactaaaattattgatccagaacacaaagaggaatgaatggatcggcaatgtcgccagatcagatggagatgctgttgggcacgccgcggcaggtgacccccggtggagagttgggcgccagcagttcgtacggtagcaccccggcgccgcaccggttcttccggccg

SEQ ID NO: 30193 - DNA, 282 bp, Oryza sativa
  Clone ID: uC-osflM202062e11a1
tttttctttttttttttttttttttttttgcacacggaaaagaccaaggtttattttttaccgccagcaccaagtgagtggtccacatgacaaaatgtttattgagcacagtaccactggacaccattttccaactacacaaacccaggcacataaagcagcttccaaacataagacaatggaagataataatatcgtttaaaagaatcccaccgggtaaatcctgaaatccctggagcacaatttgtacaccccctgtaccggttcatttgtatgacttgg

SEQ ID NO: 30194 - DNA, 204 bp, Oryza sativa
  Clone ID: uC-osflM202062e12a1
agattcacagcacgatggggtcggacgactgcgagcccttccctcccacgcgcctgaacctcttcgcctgcacgcagctccggctgctccgccgcaccgcgccgccgccgccgcctgatcccttcgccgccccgtcctcctcctcccgccgccgtcgtcgacgacacttctgctcctcctcctcctcctactccttatcctgca

SEQ ID NO: 30195 - DNA, 270 bp, Oryza sativa
  Clone ID: uC-osflM202062f01a1
ggatatcaaacgctttagaaaagattcatgggatgaaatacatgatgaaccacgtttgttctcaagggaaaattaattaatgccggatagttttaactttggccattgatctcaacctgtaactgggacgacacactggctacagggcccttgaggtactagcagtatagcagcagctgtagtacgtagcagcagcagcagcagggtcactggcttgattggattggatcggattagtagaccgagttcttgacgaacatgccctccttg

SEQ ID NO: 30196 - DNA, 294 bp, Oryza sativa
  Clone ID: uC-osflM202062f03a1
aacacagaaaaacatatccttgttcttatcttcccaccacaaaacaaagaccgaccaaaccatgagcattgctagatttaagacagtatggtaggtgggataatattacatgggagccccaaatctaaagtgaatgggcagtcagttcttgtttaaacaaataaccacacaagtagaacataactgcttgaaataacttacattggagcgactctagtggcagtgtttctcacattagcttgcacaatactgaagctcttgggatgatcaccttcatcaggagatgagcttcaa

SEQ ID NO: 30197 - DNA, 80 bp, Oryza sativa
  Clone ID: uC-osflM202062f04a1
ccgcctcaacttgaaacttcacaaaacagggcatccgcgctcaatattacaaaaatatataggaccccttaacccggcat

SEQ ID NO: 30198 - DNA, 238 bp, Oryza sativa
  Clone ID: uC-osflM202062f06a1
ttgtttgcccttctcttctttttctttcggggggtgaaagcaactcctctgtacattgcacattaatgataatacgacattatttaaatcgcttctctttatgagaatttagtgcataactacggatcaatccttttgtctttagcactactggcatatgaacccattcagtgtccagagttaaccattcacgacaagccaatagttctaatttttccgctgatgcctcatgtcccaa

SEQ ID NO: 30199 - DNA, 215 bp, Oryza sativa
  Clone ID: uC-osflM202062f11a1
atcattcccgacttttgtattcattattataactacatgaaaatttcctgcttagaagcaggtaacatagtgaatttttttttgtcagaaatgaataggttgggtacataagtcatcgattcatatttttgtctttgcgcgactttcttttcgcgtttctaaaagggtctaggcctctagcccttccaacacgcttacacatgcacactgctaca

SEQ ID NO: 30200 - DNA, 313 bp, Oryza sativa
  Clone ID: uC-osflM202062f12a1
agcacttagaacagatataatttcatcaaagaaaaccaatacaacatataacaatattacaataataataaaaaaaatctccttttcccaaaaaaataaaataaaataaaaatctcccatttggggccacatgccatctctcctatatgggcctcatttcttgatccgaaataatcctcataaaccatactaatatttttccccttttccccatacaccattgtaataattatgtcaatggattttttacgtaggcttaatgatcaacccatcataatcttcgctagtgtcaacggattattcaaagaagact

SEQ ID NO: 30201 - DNA, 365 bp, Oryza sativa
  Clone ID: uC-osflM202062g01a1
gaagagccgcactggcttgaaaaactcagaaagctggcaacatatacaaatataactcccgcgacccggccatctcgtctccaccatttaccaggacaatgcctttaacacacacacacaagacacaacacattcggtaattcagcgtgaacgtgagtacgtgaccaataagagcagatctcatgtagtagcagtgtagcaccagtagtacagttcacttccaccgttgctcctaccgtccggtggcatgatggcatcgcgtgccgccgtctcagcagcagcgtgccagtcatcgggtgggcgcgaacgcgcgcgatgcgtttgagcgtttccgacccaaagccgccctagagaaaaagcgcgcc

SEQ ID NO: 30202 - DNA, 346 bp, Oryza sativa
  Clone ID: uC-osflM202062g02a1
gcttataacgtttaatataatcatttgtgttccttcaaatcacgcttgcgccacgcaacatcaaaattaagcgttttgtgggagcatgtccacccacatctgaccgtggggaattattgctcaaaccctcacaatcttcacaaaatttacggaaacgaagtggttctattcccatctagtagggctccactggtgcacggaatttggctccggcatagacggcagcagcaccaagctcctcctcgatcctaagaagctggttgtacttggcaaggcgctcagatctgcaaggagctccagtcttgatctggcccgtggattaaccaactgccagatcagcaatgaa

SEQ ID NO: 30203 - DNA, 339 bp, Oryza sativa
  Clone ID: uC-osflM202062g03a1
atcattgttaaaactttttctttccatgtaaattatctgcaaagtaagaaagtaacactcccaagttacaacagcacaccatccatatatccatgcaggcagcctgtttgtgcccttgtgcagatgcatttcatttatacaagtagaaggcactcaaatcagccaccacatgaacacacacatgttccatcatcgatcgatctacacatgcatcacccggtcatgcacttacaaacaaaagatctacttgaagaagtacgggaggtcgagcacgtagaggaggaagtaggcccagaggacgccggagatgcccccgaagaagaagccgccggtgaactt

SEQ ID NO: 30204 - DNA, 379 bp, Oryza sativa
  Clone ID: uC-osflM202062g09a1
atagcttctgaaatcgcagaaggccaaattattctttatgccaaaacagtctgaatgaatttagggtacagatctcattttacctcaattctcatcaccttatgtaacgcagcctttgctacaaactagtattacaggcacacaaaaactcatctcgtgaagaaaagaagaaacgagttccctcaacagtcaacacatggatgatggacagacagacaacagaacctagacctcacttttttaaaagctcagttcagttcctgacgaaagtgcttagaaccgccaagtagttggggaaggtcttgcgggtgcaaccagggtccctgatcgtcacgggcaccttggcgcacgctgcgagggagaaggccatggccatcct

SEQ ID NO: 30205 - DNA, 449 bp, Oryza sativa
  Clone ID: uC-osflM202062g10a1
gcaaataatccacattcattcaaagccacatcactgttggttctctagatggccaaagggttttccacttgttcaggtagttctggtacttgcgcaaatcaaatacaatgaaaaggcatagctgcactttaaactactaaaacatctaaatttccattgaagggctaggcatttgtgatgctatggttaaatttgcttgcaagaaatctgaaaacagaaaaccaaaacaaatgcttcaaacattcgatggaatcattccctgtttctcgccctccaattgcttttttttcaccaaaagcttcaccaaattttatcgtcatctgggggtataatatgtcacagttggtacccgggagtttttaaagccgtgacgcttatttggggtcccctgtttaatccgcaaattcccaatccctttcatccatgaaactgctgcacaggattggccc

SEQ ID NO: 30206 - DNA, 145 bp, Oryza sativa
  Clone ID: uC-osflM202062g12a1
aaaacgaaaaaggcccttttcttccacgttaaaagacctacacaacaaacgcaggtcgggttgtgataattaacaaatttagaccctgtcaatgaatttaaacactaaactagttaaaggaattttctgtaaaagaaaggaaaaa

SEQ ID NO: 30207 - DNA, 474 bp, Oryza sativa
  Clone ID: uC-osflM202062h01a1
agggatcacttattcattatagttcttccatgctgctctaccacagcaaaacgtttcagacaccatcaaaccagacttaaggatacacattacaggtaaatagtacacaatgaaacgggacacgaccaaggaccagaccagacaaccatagctccattggggaagacaaataggcagacttgtgaaccctagaacagcagcagctccatggctgaggacttactggccaccacggaggcggagcaccaggtggagtgtggactccttctggatgttgtaatccgcaagggtgcggccatcctcaagctgcttaccagcaaagatcagacgctgctggtccggggggatgccctccttgtcctggatcttcgccttcacgttgtcaatagggtcggacgactcaaccttaaagggtatggtcttgccagtcagggtcttcacgaagatctgcatcccacccctgagcctgagaac

SEQ ID NO: 30208 - DNA, 309 bp, Oryza sativa
  Clone ID: uC-osflM202062h03a1
ctcagactgcatcattcaatttatacacatcaggtagatcatacatccatgtctggtcttcttttttcttcagaaagaagcaaccaaagaggtttggccgtgtactagctactatatatcataaaaccatacatgtttggtttcagcttatgaaatatacaggctaatctccgtgatctgaagagggatctacatacactcttcatgcagatttagcgaacccgatcctgtctttgccgaagtcgaaaaccgtatgataagcacccatgaagacattttcaagaattcaaagaggaccccgtggtggag

SEQ ID NO: 30209 - DNA, 326 bp, Oryza sativa
  Clone ID: uC-osflM202062h05a1
gatgtacaagtggatgcattaattcatcatcttgggtgttcttatattacaaatcaccaccatgcaagtcgccattaaccaccaacccagctttcctaatttaagtagtaatcaacaaaaggatgacctctcctctctccataccctcccagctcgctcgtcatcacaaaactaaacagcgcgcgcgaacgcacaccaacgcatcgatcccgtttgaattgcgcgcgaaagagcttaaattaagaggatgaggagaaggtgtcgaagatggtggtgtggaagcggtcccttaggtgggtggcccagttgttgaggggccctttgcc

SEQ ID NO: 30210 - DNA, 419 bp, Oryza sativa
  Clone ID: uC-osflM202062h06a1
gatcactaattacagtttattctctttccatcgtttgtacacgcttgtttttgtgtctctaagcattagaagaagaaaacacacgaggtaagcaaatgacaatacattctttactgaagatactggcagcataatgctatacgactgctacttatttcagtttcttgcaagaactactaatggaaggatgtgcatccagtaaaaataaactcaatggagtagaccatgaacatgattacatgaatggagtcagaggtggagacaccgtttggcaacttcgggctgccaccaacaaagattgtctcatttgagattttacattgacatccaaatcccttgagacctcattctttgaagaggatatatgcctttccccattctgaaataattcattcaatcctttacgcccttcttaactc

SEQ ID NO: 30211 - DNA, 211 bp, Oryza sativa
  Clone ID: uC-osflM202062h07a1
attcctccgcaaaacgtttcagtaaccattaaaccagacttaaggatccacattacaggcaaatagtacacaatgaaactggaccaccgactcaaggaccagaccagacaaccatatgctccattggggaagacaaataggcagacttgtgaaccctaaaacagcagcagctccatggctgaggacctactggccaccacggaggcggagc

SEQ ID NO: 30212 - DNA, 312 bp, Oryza sativa
  Clone ID: uC-osflM202062h08a1
ggcttgaactaactttgattgaactaaatataatgtagcacataatatcataccacccctaatcaaatttgggtgttctcagctttgacgcgtcaatcctcttcgctctaaaaccatctccaatttgccaaaacgaccaaaacacactcaaggctctcccctgaacaaaacccttcacaaacaaaactaatgtcaacaagcattctgctaaactggaaggcaaaacatcctgaattcgatcattccaaaccgtctacttacacacgcacacacttttatccacagcaaaaggaatgttctttcgacgattgg

SEQ ID NO: 30213 - DNA, 285 bp, Oryza sativa
  Clone ID: uC-osflM202062h09a1
acttaaatcgtctgaactttacaccattcctcgtatcaagtttcttctgtacgggatttgcataaaacgtgccaaatcgtttcaggcagttcaccctgtctactgaaatttgttcagatcatctcagacaagatatgccggtatctgccgtagtccgacgtcgtcttgaaggtcggcgtgaactcggagaagaagctcagcatggcggcgaggttctgcgcgctggttatggccacagctttctccaagaacaggacaggctgaacagttatttaccttggattt

SEQ ID NO: 30214 - DNA, 154 bp, Oryza sativa
  Clone ID: uC-osflM202062h10a1
ccacgcacaaattaaatttcttcgctttcctttcacctggttaacacatatatccatttgcggctagcatgaccataatcggttcgacccagatttgcggtagccacgcttcatgcatgtaagagagccttaatattttcgctgctgggttggg

SEQ ID NO: 30215 - DNA, 130 bp, Oryza sativa
  Clone ID: uC-osflM202062h11a1
ttttctgggggttttttatctcattggccttttaccatccttatactttttttcttaatttacctcattactcacaaccctaaaccataaacccccgctccaagcaaaaaaaagcgcaccccaacaacac

SEQ ID NO: 30216 - DNA, 347 bp, Oryza sativa
  Clone ID: uC-osflM202062h12a1
agacacgtatgattcaaagttcaaacagtgataaaatagtgggttacacaagattaaattaaaacctataatattcgacgtataattaattcgtgcattaagcacattaaattttgcgagcactcagagattgggtgacgcgacccacacgtacgtacctggtctgcactgcacagtgcacatcatacacacacgattcatcagtacacaaattaccaacttaacgtaacaacacacggtaacacatgtactcttaccatccaagaaaaaatcaacttctaactacgtctataaattcataaagaaagtaatttttttttaaaccgggggagatcttaaattaacac

SEQ ID NO: 30217 - DNA, 125 bp, Oryza sativa
  Clone ID: uC-osflM202063a01a1
ttgttttaaaaaaattctggggtttgttccaaagttcagtattacacctcttttatagtggtctgtgtcggaaggtgtgttttattattcgacaggtcatgccgttcctctgtacgaagggggaa

SEQ ID NO: 30218 - DNA, 424 bp, Oryza sativa
  Clone ID: uC-osflM202066a02a1
acggcgttcgttcttttttttttttgttatgttacaaatttgtttatagtatttttattttttttttttttttgtttttttactggtgttttatacactgttactcaccacatgttaccgggggggaatgaaacacggtaacacaccaaagggtaccgggaaagaaggacactttgtaagccaccggtccggtaggagctccgaaacacgagaccaggttctcacggttgacttagcgtttatttacacaagggaaggggcgtgggcaacaagagcgcaaaagggtaaaaaacccgggaagtgcttacataaaactgacgaagccggcgagggggtgcaaccggcactaacacccggtaacgacgttaccgagtgttttgagcacaccggagcgtgggacccacatgtcatttccatgttcctt

SEQ ID NO: 30219 - DNA, 77 bp, Oryza sativa
  Clone ID: uC-osflM202066a03a1
ttgacctttcgtcctttgttttttgtttttttttgggtttgttttttttataaaaacaccaagatgggataaacctt

SEQ ID NO: 30220 - DNA, 422 bp, Oryza sativa
  Clone ID: uC-osflM202066a04a1
ggagatgagcaccacgacgcacttgatgctcttgcacaccgtctggatcaccgtcggcccgggctccgggatcgtcaggttcaggttgtcgccgaacccctccgcgtacggcggctcgccgaccaccacgatcgcgtagtcgtacttgtcgccggtgaccacgctgctgtccgggttctccgagtacaccaccgtttgtgctgggatcaacggtggccttgatcgcccacaggatcgtcgtgccagcagtgatgttgttgccgggctgtccttgccaggtgatggtccatcctccacactgtctgcccaaatcatcagcatggcttcccgcgacgagaattttaccggcttttttttggaggggaagcaccggagagtaggaggattttccgttcttgagcagcaccaaggacttcctgacc

SEQ ID NO: 30221 - DNA, 408 bp, Oryza sativa
  Clone ID: uC-osflM202066a05a1
agctaataaactgcatgggctgactgccaatggtgccttagcacatttcggattcacctagaacgatcaaactgagaaaaagcacatggcatgacatacaaccaagtctacaaataagaaggtccggtcttgaccataaaagactgatgctaaactaacctatgaatacactgattctgtttgaggggacatcctttaaagatgggagggattttgctgtcgaatatttggcctactccaagcatcaaaacttcagaacgcatcgaagaaaagaccagcaaatgttgctagtcctcatcagaatcaccaaacgtaatctttgttgatgtaggagcatctggtttgacccctttgaaatgagagccatatatttgcgatatactatctcttgacatgtgtgccaaattt

SEQ ID NO: 30222 - DNA, 400 bp, Oryza sativa
  Clone ID: uC-osflM202066a06a1
atgaataggccattctgtcgcataaataggaatttacagccatgtaatgagtactctgaaaccccaattgctggattacctacacaaccatacaggagaagattacatgcactgggctaattcatgtccttatgatcttatattcacaagaaagtttcagtttctgtatacccatcttcatccttggacagaaaaatatattattgaggccaactaaattgacacaatggaactaataccgtgggcacctcatgcaacaatagggtaggaatcgctagttgcaataccagacatgttcttgcccattttcatcttgcagtaaccattgaaaccccagtatgcaccccatgagttcttgatgagccagtagggaacgccattttagacaccatagccaacg

SEQ ID NO: 30223 - DNA, 363 bp, Oryza sativa
  Clone ID: uC-osflM202066a07a1
ggacaacatgcaatttataaaacgtataggattacacgtacgcacagatcgtgtacatactgaagaaaattaaaatagaacatgcccacagggggcgggcaacataaagtattcagctgatacagagagagaatggagcgctgcatgtttgccgcagatgatattttaattactttgctcatatatgctggagcaaggacgtgcttaattactagctgatcaactccgattgggctagcatgttaagctcgatcgatcgatccaagcaggattgatttaactgaccttgttgcagtcggcggagaggctgatggggaagccaacgttgacgccgtatttgccggggacgccggcaacggggcc

SEQ ID NO: 30224 - DNA, 397 bp, Oryza sativa
  Clone ID: uC-osflM202066a08a1
agtaaacaaattgcaaatagcatatatattttttattaccacatgttctcttaccgggtgcttcaaacacggtaacgcaccacatgttaccgggtgtgaatgaaacacggtaacacaccaaatgttaccgtgtgtgaaggacactcggtaagccaccggtccgttaggagctccgttacacgagtccagctacgcacggcagccttaccgtgtgctcacacacggtatgtgttttggccttcccgtgcgcataatcgtaaaacacccgggaagtgcgcacggtaaactgacgaagccgccgagtagctgttcccgtgcactagcacccggtaacgacgttaccgtgtgttttgagcacacgggagcgtgggacccacatgtcatttccatcttcctt

SEQ ID NO: 30225 - DNA, 397 bp, Oryza sativa
  Clone ID: uC-osflM202066a09a1
gacggacggacagacgacagaatatatgccctaagattaatgagcttacagcaagttaggcatgataagagatattatgagcatgatggggaggagccacgaatgaatttcttgatgcaagatgtgccataccacaatcatgccattcatacaggccaggcttaatatggtgctagagatctaatcaccgtgatgtcaacccaggagcggtaagaacccttgtgccgatttgaatacaaattcgtatattgcgaacgattccttaaaaggcgtgcatcatctgacatggtgaggaggatgatgaattcgtgggggggaacaaagttacgacatgggggtgccatatgtaacattatctatctaccatgtgatgggaacaatctgtgctggtgaacat

SEQ ID NO: 30226 - DNA, 393 bp, Oryza sativa
  unsure (1)..(393): unsure at all n locations
  Clone ID: uC-osflM202066a10a1
tttgtttaaaccggtaaaaaacataaagccatgaaacaatatatcacaaggttcacttggggcattgatagtaccataatacttctagcatccagatatagtaactatgcttaaagttgaacatgaaaggggggaaaagatcagcagatttgagccagcattgctcaactccacagaagattgcacgccacaaccatctgccaccacattaacaactatcagccatgctagaaggctagaactgcccatgcaagtatatattatcaactagacacacacacaaggactcataaccatcctccaaaaaaaaagtcgagcaatagtgattaacaccgctgctgattcattgcagggaccttctactaatctagngctttttatctttcaaaggac

SEQ ID NO: 30227 - DNA, 273 bp, Oryza sativa
  Clone ID: uC-osflM202066a11a1
cagagaacaagggctgttgatatataattattctgtttttatttgaatacacataaacgatcaaactgtgaaacggtccaggatctgcgataattaggaaactacagagcagcagctacaatattaaccatagcagctgcaggataaacacggtgctaaataggcaggctttgttatttttttgacagcctggatatctggaaggggaccatgacttgagtcatctcctccctcatgataatcttcccaacctgaaaaggtcgggaatgccta

SEQ ID NO: 30228 - DNA, 392 bp, Oryza sativa
  Clone ID: uC-osflM202066b01a1
actctgtaaattctttgatctcaaattaatcataggcttaatttaagattgaagtgtgatccaaagaagctgagatgatcccagacagaaattaattaagctagaaatggtacctggatcgatcacacacacacacacaattaagggacatacatacatgcactgctgcaactgcaactgcagggtcggtgcgtggctactacaagtgtacacatggtacgttggttggcaccatctcgatcgggtcggtgtgctcacttgccggggacgaagttggtggcgtatgcccaggcgttgttggcgacggggtcggcgacgtggtcgaagaggttctcgatggggcccttgccggtgacgatggcctggacgaagaagccgaacatggagaacat

SEQ ID NO: 30229 - DNA, 401 bp, Oryza sativa
  Clone ID: uC-osflM202066b02a1
ggacaacatgcaattcataaaacgtataggattacacgtacgcacagatcgtgtacatactgaagaaaattaagatagaacatgcacacagggagcgtgcaacataaagtatacgagctgatacagagagagaatggagcgctgcatgtttgacgaagctggtattgtaattactttgttcatatatgctgaagcaagtggcggagcttaattactaggtggtgaatttccaatgagctagcccggtaggccaagatcgatcgatccaagggggactgatttaactgaccatgttaaacccgggggagaggcagaacttgtgcatcaagcagcaccaacaaagcgggggcaaacagcctttgaggaaacttggcttgacttggggctgccggccaggttat

SEQ ID NO: 30230 - DNA, 358 bp, Oryza sativa
  Clone ID: uC-osflM202066b03a1
cagggttaattagttttaacttccaaaaattcatcaattaattagggagagaacggagggagaggtaaaaatattataagtaaataagttgaaaaaaatcgaccagctagaagttctttttggcctggtaggggttggcgtaggtccagtcccgaggggcaaccccccaggaggtggccttgcgggggtcgccggtcatgacccggaaggggagcgactccccggcgaggatggcctccgtcttccagagctggccccaactgcgttggagcggggatccacttcacccgtttgccgcccttcaccgtcagattcaccatgttcccctggccgccacgtttttaaccataaccatgtt

SEQ ID NO: 30231 - DNA, 379 bp, Oryza sativa
  Clone ID: uC-osflM202066b04a1
tttgttttttttttttttttgttttaccatatccacttggtcttgcatatttggtttttgaacggaatcgggctatttcatatttcgggtgaattacatcatatgcacgcttacatcaactattactatcacggaacccagcgccgcatttaattaccttgacgagcaagatcgctgccctttgttacagggctagaacacagggcccataaagccacgccgggtagcgtggtgcaccaggggcattaaccccaaggatgccctaaggttccttcaccaaattgcattccagaatcatctccaaagatttcggaaagagctggcttatgccaaacatgataccccctgaagccaccggcttaacagcgggcatggatac

SEQ ID NO: 30232 - DNA, 370 bp, Oryza sativa
  Clone ID: uC-osflM202066b05a1
gggcatgcaaaactatgggattacgagatcatttaagtaaatgaaattcaacgcccttggcacaccaaaaaacagaagtacgggtgtgccaagatgattacaattattctgtaatgggatcatggagccctggctgccgaatgcccacgacaattacaaaacgctcagctaaatatatttggaagggttccgtgagcaggctaaaagatcctccggaccgaagatggccttggtctcaagcacggcttcatttgggatgtccaacttccctgacttgggggggaagggcaccttacccttgaggggaactccagagccgaaccggacattaccagagacttttaaggggtcaagctcgacaatgctgggg

SEQ ID NO: 30233 - DNA, 135 bp, Oryza sativa
  Clone ID: uC-osflM202066b06a1
ctcccacggctagagcggagctagagcctcgcctgaccggtgagaaccgccttcacactattgcgagtgccactggcgtacctgcttttcacggcgtcgccttcttacgagcacaacgaagcggagcacactgag

SEQ ID NO: 30234 - DNA, 298 bp, Oryza sativa
  Clone ID: uC-osflM202066b07a1
ataataacgaaccatgattaattcggacatccattgagatgctgggctgaggttaacattgaagcgcgatccaaagaagcagagatgatcgccagaccgacaacccgtaggcgccgggagggacacggagggttccgcaataggcataggccaccagggctgtggcggccctggcttcggcttcggcccgggcttcggcggcttcggcttacgataagggcccggcatgggaggctgggggttcggcttcggccctggcttgggaggcttcggccccacgcgtacgcggacgcgtggg

SEQ ID NO: 30235 - DNA, 398 bp, Oryza sativa
  Clone ID: uC-osflM202066b08a1
ggacaacatgcaattcataaaacgtataggattacacgtacgcacagatcgtgtacatactgaagaaaattaagatagaacatgcacacagggagcgtgcaacataaagtatacagctgatacagagagagaatggagcgctgcatgtctgccgcagctgttattttaattactttgttcatatatgctgtagcaagtacgtgcttaattactagctgatcaactccgattgagctagcatgttaagctcgatcgatcgatccaagcaggattgatttaactgaccttgttgcagtcggtggagaggctgatggggaagccaacgttgacgccgcatttgccggggacgccggcgacggtgccgaggttgagcgacttgatgctgccggcgaggctct

SEQ ID NO: 30236 - DNA, 363 bp, Oryza sativa
  Clone ID: uC-osflM202066b09a1
ctttctttttttttttttttttttttttttttttttttttttttttttttttattttttatttttttttacttccaaaaattcatcatttaagtagggagagaacggagggagaggtaaaaatattataagtaaataagttgaaaaaaatggatcagctagaagttcttcttggcctggaaggggttgtcgtaggtccagtcgcgaggggcgaccccccaggagggggccttgcgggggtcgccggtcatgacccggaaggtgagcgactcgccggtgaggttggcctccgccttccaaagctggccccagttgctctgcaggggcgtccactttacccgcttggtgccttttaccgtaagtt

SEQ ID NO: 30237 - DNA, 272 bp, Oryza sativa
  Clone ID: uC-osflM202066b10a1
caatgatatttcatatttggttctcgaaggaaatcgggatatttcatatttctggggaattacatcatatccacgcttacatcagctattactatcacggaacccagcgccgcactaactggggcaggaattctgggtaattttttctgcgaaaggaagataaaatggtgccatacagcaagattggaatgatgctttccattgctacatgcacacaaagacacgaagtcgatctgagtcagaactataccctgtatacatatgccccccta

SEQ ID NO: 30238 - DNA, 393 bp, Oryza sativa
  Clone ID: uC-osflM202066b11a1
acatcacaaagattaagaggtgagacatcaaagatcgagcacaaaaagtttacatcacgaagattaagaggcgaggatggatttgttgctcccgagggagggcgtggatggccggcggcggatccgctctcccggggctcgcctgcgcagctctactccccactgcccctcccacacgccggtgctgctgagcaccgcaactgccccctcccccgtgccactcccaaggaccggtggcggtggatctgccctcccaaggctcgccggagctagatccgcacctcaccgctgagaaccgccgccaccctcttccccgtgccactgccgcacctccttcccccgccgccgcctccttccccacacagcggtggggagtgaagggaggctagcggc

SEQ ID NO: 30239 - DNA, 265 bp, Oryza sativa
  Clone ID: uC-osflM202066b12a1
tttgttttttttttttttttttttttttttttttttttggatgcgaccgaggcagctttattcaacttggccagaaccacttctttaccgactatcacttttgcatgggtaaaattaactaggtaccacgggttgattgtacagtatttctcaatgggacagacatgccgaaacatcaactatttcccccactctaactactctccatttcaccgtctttcagaaccttggcaaaatctggcgttggagctgtcaaacatgttag

SEQ ID NO: 30240 - DNA, 395 bp, Oryza sativa
  Clone ID: uC-osflM202066c01a1
agattcatagtctattagcgcgtcatatggatcaagagaccaagcacaagctcaaacatgtgaactgaaaggtacatggagcataaccacctactccatgtgaccgtagacagagatctccgtactagcgctccaaaaaaaaacccgtgtttaggatgctctggaatcaaaaccatttctatctgatgtcatcccaaatattgctataagatgacagaggaaacccaaatggactactttggtgatgtgctgagctgaatatgaaacatgcagattaaggggcttcggtcttcaaagcatcagatagcgctgattcttctcagctaacattgggatctttgagagaagcttgtgatcaagcactgcatattgcttcttgagctcgattagggcct

SEQ ID NO: 30241 - DNA, 410 bp, Oryza sativa
  Clone ID: uC-osflM202066c02a1
tgccgaccatctacacggacgagacggaggtgtacttttaacaaatgcatctaacatcgtgcgatagtaagccgtacctccacattacattgaactggctaatatataggaggcccatgattttgcagaatccatgattaattggggtccatagagagcttctagttgcctgcggaactttcacaagctatatcttaaggctctccagaaatcgtgtcccctcagaaagcgccacaaaggttcccttgatatactcaattatttctatggacttgtagcgtgcctctgctccgttgagcttgagcacctccgggatcggcttcaccattccatcgacataggcttcatgaaatgtcacgatggtggttcggcctttctctgcgtccgcgagtactctgtgctcgacgctc

SEQ ID NO: 30242 - DNA, 289 bp, Oryza sativa
  Clone ID: uC-osflM202066c03a1
aaaaaaagcccatcgggggaaagggacccttcctttacaaacaaagacactcaaaaacgctgaacaatgggtacccctcgaaagacttggccaaaaaaaagtttacacggggccaaaaaaagtattgccccgaaaaaaaaaaattgcccttttttaggttaccaccccttttatttcacataatattggtcgccaaaattttttccacactttaccccttccgggagatgaggaataagaccaacctacataatgggaaggtctccaacacgatcaattttgtggggct

SEQ ID NO: 30243 - DNA, 402 bp, Oryza sativa
  Clone ID: uC-osflM202066c04a1
tttggttttttttttttttttttttttttttttttttacggaataccattcattttttttattggcgaccaatttatcagatatgctctagaaacatatcttgggggtatatagccggagctttgttttcacaaatcctcacccaacgataattggaggacttttacaaaaaaaccggtcggagagggagggaagagattattacatatggggtaagagcagaggccattgagatgggacataaccaaactgggaaataaaaatatataggatattatatattgatatttcatcaacatagcccaaaacaaagctgcctactattattttaggaagctgggcatccacgcgaagctcgagcttaggttaggggccaccaaactctctagaaactgggggcgg

SEQ ID NO: 30244 - DNA, 383 bp, Oryza sativa
  Clone ID: uC-osflM202066c05a1
agaaggaaatataacccaggcagacgcctgactgcatacgctgaatcatcatatatgcctctgaagatagattttgttcatacaggcgtccaggatggcccagcaaaatgttggcagggaccaatctcaatctgaggacatgacaaattataattgatatatacagcttcagaagcgttgtattggacagatcactcttcacataacggctacactaatttgatcgggcgacttggactccacggaacgccgacaaaccttgttgaccattagcttgaagcaaggggagaaaaccatgcacagcgcagcaagtgcgaacggtgcagggatcagccaccccagcatcgcatgcacaatgctgtgcatgacatcctttgaggcct

SEQ ID NO: 30245 - DNA, 413 bp, Oryza sativa
  Clone ID: uC-osflM202066c06a1
tcgagcttccgtcctttttttttttgttccatgtatcagagatgataacttacgaattaagatctccattacataaaaacatacagtgactgagtactggattacacgattgagttgttcagggttcagataggaaaaacatcttggggactagagatagagggaatcgacagatgcgcagaaaatgcgcgcggaaaacaggacatcacgattgcgttgcttgtcgcacagatgcacagacatgaacacggcgattaagatcctctttcttgtgtaaaacgaaccagcaactaaatggaggtagattgaaaccaggggggccccatcgaagggaccaaccacgaaaacccagagctctatccaggtgtcttgctggtgagctcctgagcgacggcgcaagggtcctggctggg

SEQ ID NO: 30246 - DNA, 415 bp, Oryza sativa
  Clone ID: uC-osflM202066c07a1
ctctttttttgcaaataatgaatcatagtaaattgcgcgtcatatgtatcttgagaccaaacagaagctcaaacatgtgaacctgaaaggcaatggagcataactaccgactccttgcgaccgttaaccaggtatctccgtgctagcgatccaaaaaaaaacctctgtaaaataatggctggcctgagattccttgccagagacgaatacatccttcttgcattctaacctggaataaatgattgaagagccaaaactcctcttattcgttcccttgcatggcgacgggcttgatgccctctgaaacagctttgaacccttaaaataccatgcagagtacggatccgagtgtcttcaagtttgccaatatggccagatcgaaagaacaattttgggtacccaacttgatacatgt

SEQ ID NO: 30247 - DNA, 423 bp, Oryza sativa
  Clone ID: uC-osflM202066c08a1
cggtcgcctttctgttttctttcttttacactgacgacacagaggtgtatctcttaacaaacacatttaacattgtgcgagagtaagccgtacctccacgatctacatgagaactggctcatctatatgggcgcgctgctgttgccaaaggccctcaagatggggtgcgcgtaggaggactcgaggtacgtggagcgcaccggaacgcctaacggttgggacgtggcgttctacgtgttcggcttcttcaagggcgacctgctcttcaccgtcatcatactcatcggtaccggctggtccatcctcaagccctacctccaggagagggagaagaacatgcttatgatcgtgatcccgctgcaagtggtcgagaacctgttgctggtggtgatcggggagactgtgccgacggggcaggactgg

SEQ ID NO: 30248 - DNA, 332 bp, Oryza sativa
  Clone ID: uC-osflM202066c09a1
aaaaatgcccatcgggggaaagggccccttcctttacaaagcatgaccctgtcacagttagaacgttcgttttaactggaaaggtttggcctaaaaaatgttttcactgggccagaaaaagttttggcctcaaaaaaaaaacttgcccttttttagcttacccgccattttatttcacataatatggggctacaattttatttcaccatttgccccattttgggggcgggaaaaagggcctgaaaatgatgatgggaatgtttccaacactttaactttggctggggaaccccatgaatagcattagccagatgggcaacatttcctggggg

SEQ ID NO: 30249 - DNA, 403 bp, Oryza sativa
  Clone ID: uC-osflM202066c10a1
tttgtttttttttttttttttttttttttttttttttacgtaataccatccattttttttattggcgacgaatttatcagatatgctctagatacatatcttgggggtatatagccggagctttgttttcacatatcctgacccaacgataattggaggacttttacaataaaaccggtcggagagggggggaagagattattacatatgggttaagagcagaggccattgagatggtacataaccaaactgtaaaataaaaatatatagcatattatatattgatatatcatcaacatagcccaaaacaaagctgcatactattattataggcagcaatccaccagcgcgatgcttgatcttagcttagttgccaccagactcctcgcaacctgggggcttg

SEQ ID NO: 30250 - DNA, 393 bp, Oryza sativa
  Clone ID: uC-osflM202066c11a1
ttttggttttttttgatttgaaacagagcacacgaaaagattttcttttcctctgaacaaagacatgacacaataaatttcgccaagtagctgcctcattacacaaattcagaccaaaatatccaccgcaaatccaagagcttcttattaataataatagtaaaaataaacgccaaaagttctcacacggaagcaactaacttagcacacaaaagacagacatgaacacacccaagcccctcctcttccttgtctaaaacgaagcagcaactaaattaaatcgacctaaaattccgaggcccccaatggcggcgatcgacgacgaaaccgaggagctctagttggctgccttgctgatgagctcctgcgcgacggcgacggtgggcagcgccg

SEQ ID NO: 30251 - DNA, 190 bp, Oryza sativa
  Clone ID: uC-osflM202066c12a1
tttgtttttttttttttttttttttttttttttttttttattttttattatataaaatcatacatttatttaataattaattaccaacaaaaaaaaaatttggaatggttaaaaataaatatcaaacaaattaaaaaaggacagaatttataaaaggaaaagaaaaaccaaaacataaactattaccccc

SEQ ID NO: 30252 - DNA, 244 bp, Oryza sativa
  Clone ID: uC-osflM202066d01a1
gcgtcgtttggagcggctggcctggtcgtcctttttttttctgtcaacagaagcgagtactgcattgccaagacccagtgcgctgcgggctccaccaacccaatacaacgcgacgacaggcgtgcacaaggaaacacgcgacactctggttgaagacctagccctacgtacgcggacacatccgtatatctggcagacacaccaggggccgacacttgcatgacagcactgctcttgccatgcc

SEQ ID NO: 30253 - DNA, 344 bp, Oryza sativa
  Clone ID: uC-osflM202066d02a1
gggaggaaagaatttacatttgttggggggggtgactggaaaaaaaccccaggaccggggttaaaatggggggaatttaaaacgcttaacttttacacttggtggaatattgcctaaaaagaattttagcccctgggcatgaatcccatttttaagacatttaatacggtccccaagacatccacagattttccaaaccctggctgccggtggtggttgcttgcttgggaaccttgaagaaaacgaaaccactggtcctccttattgggaaaacacttatcacaatggggaatatttttaatttgcaaaattagcttgggaaggtcctttttccttttttaaat

SEQ ID NO: 30254 - DNA, 398 bp, Oryza sativa
  Clone ID: uC-osflM202066d03a1
ttagggatagaataaccaaaacataggaggtttcatttcttcttctcaaaggagtgcagcatctttccttctttcaccattacataagcttaagcaataacagataacaaatcctcctcctcctctaggtaaaatattcaaacacaatacccttataagtacttattattaggaaagtagcgtgcatgggcataaatggcagcggggggcaggttaagaatcacaatgctgagcagcgaggaaacaaaacaccataatgggacagagcaaaagcctccgaaagggagcttttaggcagaaggcttctcccacttgaggggcttcaccacctcccaggtgaagtctgggtcgtcccttccgaagtgaccgtaagccgccgtcttgaggtagcgtccgtt

SEQ ID NO: 30255 - DNA, 395 bp, Oryza sativa
  Clone ID: uC-osflM202066d04a1
ttaaggtgaagaccgaacaaacaaagcaaactgaagatcgaacacacattatagagtacacgtcttacagagttcactagacgggcacaattgtgagcatagacacgaattgcataatcgaatcaatttgtagcccttttatttccattacatagttcatagccaggtctgatgccatccaagcgggaggctagaactgaacatgatgatcaatggatggcaacttgaacttcagtctgcgtgggtttcattctcagcgctttagcatgtccctgaaccagcaggccgacgccttgggagaggagctcgagcgcggtgaagtcgacgtagacgataccaaacttggacgggtaacctgacaggcactcgaagttgtacaggagagaccaggcgaa

SEQ ID NO: 30256 - DNA, 413 bp, Oryza sativa
  Clone ID: uC-osflM202066d05a1
tctgtcctttctttctttttttttttgggagacagcaactcaataatctttcgctattttaccgaggaacattattagttcgtaaatcgccagacataacagagccggccagactgaactcaaactcaaccctatgatggtaaactgattgcgatcaacgcctccgcctatgacaatgtttggagataaacgcttgcaccaaaaaacgaatgtcggggagtgttatcccctacaaggaattattattgggttcaatgttaaaaaggcaaaattcaccagatcccggaagcgcaggaccaggaataaacacttgctcgccatcattttctgccaggttaggcaccggccgagccgtacttctttccaaagaagaggatctgcagctggtcatagcctgagagcacaccagcacc

SEQ ID NO: 30257 - DNA, 407 bp, Oryza sativa
  Clone ID: uC-osflM202066d06a1
cttccttttttttttttgaagcaaagttcagtttttttgtgcctgttctgcttactacaagctgcttctccagtcactaccttctcggtaggtaaactctaaaactcgacaacatgtgtgtcgatcaaaggtagcaagcatcctatcacactgtatcgccatcttctactagctactagtagtagtatcatacaactctcctcttgactattgccatgcaaactactgtctgctagagtacagtagtacaatagaacaaacaaaacatagctgacagcacagctgatcgcagtttctgggtgcacggcaacactgcatttctcgacggtcagtaggtcacaaacacacactgcttccgggccactactgattagtgcgcatgtcaccgccattgctgctgccttcct

SEQ ID NO: 30258 - DNA, 126 bp, Oryza sativa
  Clone ID: uC-osflM202066d07a1
tttgttttaactgtcaacagaagcaattactgcattgccaagactgagagactggagtgcgccaccaaagaattaccatttggtgcagggggctcaagggaaaaatacccaatgggcctgggggac

SEQ ID NO: 30259 - DNA, 149 bp, Oryza sativa
  Clone ID: uC-osflM202066d08a1
tttggttttttagggagagaaggaccaaaacaccacgacgccccatttcttcatctcaaagggggggaaaaaaattccttttttcaccaagacataagcctggaaacaatcaccagaggaccagagggctccatactggcgggtaaggt

SEQ ID NO: 30260 - DNA, 395 bp, Oryza sativa
  Clone ID: uC-osflM202066d09a1
agggatagaataaccaaaacataggaggtttcatttcttcttctcaaaggagtgtagcatctttccttctttcaccattacataagcttaagcaataacagataacagatcctgctcctcctctaggtaaaatattcaaacacaatacccttataagtacttattattaggaaagtagcgtgcatgggcataaatgggagcggggggcaggttaagaatcacaatgctgagcagcgaggaaacaaaacaccataatgggacagagcaaaagcctccgaaagggagcttttaggcagaaggcttctcccacttgaggggcttcaccacctcccaggtgaagtctgggtcgtcccttccgaagagaccgtaagccgccgtcttgaggtagcgtccgt

SEQ ID NO: 30261 - DNA, 401 bp, Oryza sativa
  Clone ID: uC-osflM202066d10a1
ttttggtttatgatcatactcccaaaccaatctgcactccagaagaatactattcatctctgtctaaggcatcaaccaccctaaacattttgctagtctcagtcatcactcatcagtaaatatcagacactagcacaagagacatttatacacacgttacagtacttagctggtgagctgataccttgcagctcagtaactacataagaatctgtttgattcagcgagtggttatctttccctgtggagcagttttgagctcctaagaaactcaactagagatcctcagtaaaaacaacccaaactagagatttccagtaaactagtaagtagttctctcattcaacttcaagcaggtctccggcgataatactgcagcgaccactgagttaggagctcgc

SEQ ID NO: 30262 - DNA, 363 bp, Oryza sativa
  Clone ID: uC-osflM202066d11a1
gtatgtaaatattatattattgtaaatcattttgaggagctagactagcgtgccttattaacaaggagatatgtaccattacatgatgattaacatataaatctgtagctacatggaattaaggtagtggagcagaggaggaaggatgatagaagactccaattctccatggatgggaatgggatcaggtggccttgcagaactctccgcccagatcgtcgcacgcctcctcggggaacaccgcggtgggctcgttgaaggataggtagtccctgtcgacttcctccgccgccgcactagatacatcaacagcagacgatgatgagagcttggactgtgggtacatctgcacgttgcacgcct

SEQ ID NO: 30263 - DNA, 242 bp, Oryza sativa
  Clone ID: uC-osflM202066d12a1
gcggaacaaattggtgggccgttttccgtttattgaccaacagttacaaagtttggaatcatgcgatctgaacgacaaaacgctgacaaagttggggatcgctgatcagttcagttgccaccaccttcgctcgtcgccggcttttttagatgccacagccgaagggaaccccggctacgggggcctgaaacccggcaggtcacaggggatgtgcggcacgaaggggcaatgctgcggcgggt

SEQ ID NO: 30264 - DNA, 243 bp, Oryza sativa
  Clone ID: uC-osflM202066e01a1
ccttgtttttttgtttttttttttctttttttttcacttaaactccaatttaccaagcttgggggacttaagtgcaaaagcaccaaacatgttagactttacaaaacttctatcgattgggaaattagtaaaaattagctttagattatcccacctgaaccagttttgtttgagggggcaaaagggcacttatccaactcggcatgcgaagctggtgagtccacttaggttttctttcaaaaa

SEQ ID NO: 30265 - DNA, 285 bp, Oryza sativa
  Clone ID: uC-osflM202066e02a1
cacgctgtggatccttttgagcggcctttctttttttttttgtttacattggtttttacggacatttgtgctatataagttacaaggaacaagattaattacaggcttaaattaccggaaccaggacccttcagcacaagacgatgtcatcgtctggatttttgaatggccaggcaacaacaaccttaaggttccacccttggaaccttacaatagccgatacccgcggggcccatatgttgggattcttaaatttggccttatggcacaactttttaaattttt

SEQ ID NO: 30266 - DNA, 462 bp, Oryza sativa
  Clone ID: uC-osflM202066e03a1
cgccgcacgcacgcttgcgtacgcttgagcgcgtcttccttttcgtccttggttactttggtttttagggacatttgttctatctatgtaacaccgagggtgatgaatggcaggaaaatcaaaagacataacagaaccggccagactcagctgaaactcaaccctatgatggtaaactgtttgcgattaacgcctccgcctatgacaatgtttggagataaacgcttccaccaaaaaacgaatgtcggggagtgttctcccctacaagaattattattgttttcaatgttaaaaaggcaaaagtcaccatatcccgttagtgcaggaccggccatggacgctcttgcgtcaccattttctgccagtttaggcaccgcccgagccgtacttctttccaaagaagaggatctgcagctgttcataggctcacgagcgccccccccccagcaagggcacgtagga

SEQ ID NO: 30267 - DNA, 414 bp, Oryza sativa
  Clone ID: uC-osflM202066e04a1
gatgtggccgccgcgcccgagtcggggccgttggagtccgcgtcggaagcggcggcgccggcgccggagacggccgcgctcttgtcgctgccgttgtccaggtccagcgggagcttcatcttggcgagggactccgtgaactgctgcatgctcttcatgtacatgtccatgatctccttctggtcgaccttgacctcctgctcgaggttgacgcggatgaccggcggcttatccaccgcgctctcgcccatggcgccgggggagttcgccgccgggctggcgctgctctgtacggctcgggaggcctcgctacccgcgtcggcggcgtcggaggcggccttctcttctgctcccgacgaccaggaggcattgccggaggagttggactgcggggtgggcgagaccgtggtaccg

SEQ ID NO: 30268 - DNA, 385 bp, Oryza sativa
  Clone ID: uC-osflM202066e05a1
aaattacaaaaaggcactgtaatgggactcatgtattaacagttcaagtggcatgaagaagatattgaacaacattctgaaacttgatgttcaagcccaaatgcagacacctcatagtggaacataccctcatgctctataccttacacaggcgtatgtatgctggtaactgctagtctgctactgatcaaatcatcaatggatcaggagcggatgaaattaaaataactgtccgatccaacggggacggaccaatcctaggagggacacttcattattgggatattaagcgataagaaagccaactattcacaccgagctgataattctctccaaaatagtctgtgttcatgcgcgtgccatcaatggagttgttgactccgag

SEQ ID NO: 30269 - DNA, 370 bp, Oryza sativa
  Clone ID: uC-osflM202066e06a1
tttgttttttttttatattttggttttcatttatttttgcctgccaacaaaacatcacctgattgcatttcgcacatattgcaacaaattttgcttattgttccctaaaaaggttctccttcagaccaacatccctatttggaaagctttccaaagccggagagaactactctcttatcactctgcaggttaaaccacgggtgacccttgaacagagcttgcatgatttacttaaaggaaaggaatgaacctgaaagttttaattcacatccaagcagggccctatactggggaaggaaaaagacctaggctcctgtgttatttctacccggccttagaggagctacaagggcggtaaggaaagggcgaa

SEQ ID NO: 30270 - DNA, 360 bp, Oryza sativa
  Clone ID: uC-osflM202066e07a1
aattattatttttgattttaatttttgttttaagacccaaacctgaatgaaaaacaaacaaaggctacgatataattggagggaacggggtgattgatactacagacaagggccggtggggggggccattcaaaggccaaatccggccccaatccagggtccccgagaagagggctgcggacacgggttgcggcgggcaaaaacgaggcgggggcagagggggaagccagaggagaccgggagctggacggactccacccgcggactgggcggcgatcttgggggtgcagggcacgggggagcggcggatggcctgggcaaactactgcaaagggagtcgtacggccagggccacggacc

SEQ ID NO: 30271 - DNA, 403 bp, Oryza sativa
  Clone ID: uC-osflM202066e08a1
acaacgattgtaactcacatttgagctatatatgttacacggaacaagatgaattacaggcttaatttacagcataacaggaccctccagactaagatgatgcttagccttggaatgtgaagacgcaggcaacaacacgcttaaggtccaccttgtgactgacataccgataccgcggcgatattgttggattctcaattggccatatgcacaactttttattattacactccaaactagctggattcattcatattcgtggcgattgagctggaccaatatacacgaacagctgtgagtatggagaatcaacttaggcactgagctggtagaagtagaattcaatttttacgaaacttgatcatatattgcttgacaatgcacgcaagcagctcgtgctgcc

SEQ ID NO: 30272 - DNA, 401 bp, Oryza sativa
  Clone ID: uC-osflM202066e09a1
ggtcgtcctttttttttttgtttttttttttttttttttttttttttttaattccagttttttgttttttattgtattttaaatgttttacttttttttagttggttttcggggagaccccaaatttacaaaaattcaaccagaaggggacttaaattttggggggggaatgcaatacaggttgccgaatccaatggaccaaaaaaacactcgggtcggggggaggaacagccgaatgggcgctggggggggttcaaaaagggcccggggtttggtaaaaaggggcctccagggggttaccacccccctaaaaaatgatggggagggtggacccaaggtttcaagggaccggccgggggcgggggcccggggggggccgtatcatgaggcggggcagaccc

SEQ ID NO: 30273 - DNA, 410 bp, Oryza sativa
  Clone ID: uC-osflM202066e10a1
gcgcccgagtcggcgccgctggagtccgcgtcggaagcggcggcgccggcgccggagacggccgcgctcttgtcgctgccgttgtccaggtccagcgggagcttcatcttggcgagggactccgtgaactgctgcatgctcttcatgtacatgtccatgatctccttctggtcgaccttgacctcctgctcgaggttgacgcggatgaccggcggcttatccaccgcgctctcggacatggcgccgggggagttcgccgccgggctggcgctgctctgcacggtgcgggaggactccacctccgcgtcggcggcgtcggaggcggccttctccttctgctccgccgacgagacggcattgccggaggagttggactgcggggtggccgggaccgcggcggcggcggggga

SEQ ID NO: 30274 - DNA, 356 bp, Oryza sativa
  Clone ID: uC-osflM202066e11a1
aaattaagataaggaactggaaagagttgcatcatatgtgatcattcaagttacatggtctacacggtaaaccaccaaagagtagtacctgtatttgttcgaaatgcaaatacctcatatggaaaataatcttatgcgctaaacggaacgaaaggctagatagagttggccacaagcgcacaaaagacatgcaatcagacaatggatttgaagtgtaaaataatcgtctaactgacattctgattgtgccatccatcattcctagcagttaggctttcttatcagtagggctcgacgaaaaattaagcctaaacctttttccactcttccttggcgtcacccttgacacctttctt

SEQ ID NO: 30275 - DNA, 362 bp, Oryza sativa
  Clone ID: uC-osflM202066e12a1
gcctgacgaacaaatcatccagctgcattggagctcgcacatattgcaacatattctgcttattcttccttaaaaaggttatcttacaaaatttcatccatcattagatagcttcctaatgccggagagaactactcccttataacgcgccaggtaaatccacgggtgatccttgaacaatgcttacatgatttactcaatggaatggaatcgaatcgaatctatatatacatattcaagcagggccaagcactggtgaatgaaaaagacctagggccctgacttattactaccaggccttagctgagctagaaagctgggaaagaatgggcgatacattttacactggtacatttggctca

SEQ ID NO: 30276 - DNA, 417 bp, Oryza sativa
  Clone ID: uC-osflM202066f01a1
tttctcctgttttttgggtttttggttttcgttttattgttattaattttttttttttttccttggaaaaacccgctcccattcgggaaatcttaccaaagacccaaaacccagctttggaaatatccagccgggtggttgaaaagaacccccaacaagtttttcaacccccccaaaaaaaatttgccaaccgcttccaaccacttgtttaccttaaaagcaagcaccgcagcgtccaatgattactttcgggcacaaggttgtgcatgagagagtcccccccggggggctatacacacgctttccgagacctggttggggcacccttaattttttttccttgggtgcctcccccggctcggggttttttttcggggggttcgggacggcgaccttggatttgacggggttttcggg

SEQ ID NO: 30277 - DNA, 397 bp, Oryza sativa
  Clone ID: uC-osflM202066f03a1
agctacacaaggcattacactatatacattttattgcattcatgtaatcttgaggaccaaagttcaactgaaaatttacattgacagggccggaacgatatccattatttaaaaattggaaaatttacaatggcattctagcttttcatttagtgtccaaagggaacataatttcttaactttggattggggggaaaccctttgttccttcaaggttttgggatacttttcttaatcttagggttgggatattttttagcatgggggttcttttctttttcattggggcagacaccaaatccctttcaagggcaaaaggaatagggcccaatattacacctttgacatactcaaatccccgaagcttgttctttgctgcaacagattgcagctcttt

SEQ ID NO: 30278 - DNA, 383 bp, Oryza sativa
  Clone ID: uC-osflM202066f04a1
agctacacaaggcatcacacgatatacattttattgcattcatgtaatcttgagtaccaaagttcaactgaaaatttacatgtagaggccggaacgatatccattatctaaaaattgaaaaatttacaatggcattctagcttttcatttagggttcaaagggaacatatttctttactttgatttggcggcaaccctctgttcctccagtttttggtatactttctcaatctcaggcttgtgatattttagcatgttggttcttttctttttcattggtgcagtcaccaaatccctttcaaggtcaaaaggaatagggtccaatattacacctttgacatactcaaatccccgtagcttgttctttgctgcaacagattgca

SEQ ID NO: 30279 - DNA, 376 bp, Oryza sativa
  unsure (1)..(376): unsure at all n locations
  Clone ID: uC-osflM202066f05a1
ccatctagggctccttgaatattaatgattcaatcgtaatcttcagaatgtttggacctatatgatgttagactgactgactctcctccagaaggacataaactccccaggggatctgatatactcacaacttggacgtggcattcagcaaaaattcttttcagagtctcaaacattagggctcagtgctccaaactcaaatatcagaaactgttcttttgctcaaggaaagatcagcttggagtagagcagctcattccatgtgtcctggagacctgggaggcaccaatgcgtgcaatccgcgtagcttttcgggttcgcgatctgctccggggttagcgggntccactgcttcttgtatatctgagtgtgagca

SEQ ID NO: 30280 - DNA, 394 bp, Oryza sativa
  Clone ID: uC-osflM202066f06a1
aggtgtagaatgctcttccggcctctttattaaggactattgcctgaacaacaggatttacaagcttttaacatataggagtatctcgctgaaaaacaaaaaaacatgtaggagtagagtaagaacaagaccagaagctcataattatgactagaggccaatgaggtgttaattctggggagatcctaatctgtcctgcaagtttcagcaaagagaaaaagaggatatgcaaaaatcttgtcgtttcagaaacataagctatactgaatttttttttatcttctgggcacaaagggtagctccaagcctaccactctgtcaagatggcgaccaccgatactgctgccagctcccagttaagcttgctgcaatttcagatatcagcatgctccac

SEQ ID NO: 30281 - DNA, 341 bp, Oryza sativa
  Clone ID: uC-osflM202066f07a1
ccttgttgcgcgtatcaaaatatatatggcaagataaaaagctctcgttcatttctgacaatcagaactcatggaacactgcaggaagaaggagtgacctacaacggatctttggacctgggaagcgggctgttagactgggaccacttaggaaggcacggccatagccttattacagaacgtggggcttcaaccgtggttaacttaaagcaaacagcaggtcaaacacaccgagggaaacaaggggaatggttgatcagtgagaaggagagcaaggctaaacaacgagttatgcccaccgaaaactggaagaagggttgatggaccgcagtacagggtat

SEQ ID NO: 30282 - DNA, 424 bp, Oryza sativa
  Clone ID: uC-osflM202066f08a1
gtcttccttttttttttttttttttttttttttttttttttttttttttttttggacataaacaccaagaggaccaggtttttatagacttatttgacatcattaacaaccacgaccacgataattgacgacgatattgccgacatgatcgatttcataggactatttgaccagcagtacgaagaccccgtaaaagtagcccacaaattaagaggacataaacttaatatatagttttgatcataagatcggcagtagtacagattcagaatttaattgacaaacacaaacaccggaatataattgggtaatcaagcaagccatgatatcaggtgcaccccatcatcctccggttaaacatttattaacgacgacgggattaacattagaaaagggcgccgtcgattgggaagtcgccgaagct

SEQ ID NO: 30283 - DNA, 401 bp, Oryza sativa
  unsure (1)..(401): unsure at all n locations
  Clone ID: uC-osflM202066f09a1
agctacacaaggcatcacacgatatacattttattgcattcatgtaatcttgagtaccaaagttcaactgaaaatttacatgtagaggccggaacgatatccattatctaaaaattgaaaaatttacaatggcattctagcttttcatttaggggtcaaagggaacatatttctttactttgatttggcggcaaccctctgttcctccagtttttggtatactttctcaatctcaggcttgtgatattttagcatgttgnttcttttctttttcattggtgcagtcaccaaatccctttcaaggtcaaaaggaatagggtccaatattacacctttgacatactcaaatccccgtagcttgttctttgctgcaacagattgcagctctttcaggatatgct

SEQ ID NO: 30284 - DNA, 390 bp, Oryza sativa
  Clone ID: uC-osflM202066f10a1
gttcatggcagggcagaactctctcttagaacagcacaatatccagacacaatccttggatgcctaaaaccaacaagggaaagaaaagaagcttaaaaccatttggtgcagctaaaggccccaacgtcaagcttgttcagtcagtctcacagcatggtacagcaaaagacaaagcatcggcctacaggagaagacagaacaggattcacatctaaagttcaatgctttcctaaataaaacttgctactcgtcatccgattagctggataagtttccccacgatgagtttctatatgctctgcatctgggagaatgagatcctgatcgtgttaccctccagcgaggtggcatgttttgatacaagggcttcggtcgcctcctcttcgctct

SEQ ID NO: 30285 - DNA, 393 bp, Oryza sativa
  Clone ID: uC-osflM202066f11a1
gataaccaaaaatttgaatcgttttattttgtgacggaagattccatccagtacatctcacaagtaccttgttccagaccaaatacatatatattagcataaagcaaaagagggttgcgttttccagcgcacttcaaagtgccagcttcactcgttgctgggttctccgcgctccagcttacaacggaagcaagtgttattcaccgtggatcgttatctaatccttattattgcataatatagcgtccatcttgatgagcttcgtcttggtgcatatcgtatttaggagacagggctagcagtaatgccccatatttcctttgcatactgagcgatagtacggtcgctgctgaatttgccacttccagctgtgttcagtatagacatcttgat

SEQ ID NO: 30286 - DNA, 391 bp, Oryza sativa
  Clone ID: uC-osflM202066f12a1
cagatgtgtgcaacctctcaaccaaatacattctacattggtcacttgtttgttccatgtcactgtaaaaaacaaaaagaagagagaaacaaagagtggggagaaaaaacaaaagtgaacttcacaagatgtatcatacaatgagcggtaaccatttcgcggcgaattttacacactgagcgaaggaacctctagttgttgctgcttcttctgttggccccctttcatgtccttgggctttgcctttggaggaccagctgcctttgccttctgcacccttgctaccggtttcttttgatcaggaggagatggtgttacggttttcttatgatcaggaggagacagtgctaccggtttcttctgatcaggaggagatgctgctaccggtttc

SEQ ID NO: 30287 - DNA, 397 bp, Oryza sativa
  Clone ID: uC-osflM202066g01a1
cggtcgccctgttttttttttttttttggtaccaaacattatccattcttattattgcacatgatttttacttgtttgacaaatgtttatacgaagaaactcagtttcaggggaaaaaaattacatgtttcggcacagaacattggtaactggggcttgaatcattccgaaccacctaaaatttttgcttgagtaccccagggtatgttttactcaaaatgaaaggaccaaaccggattcatgctttataatttgttcccgcccttaacttttatactacgctggctaagatctttattaaagaaccaggcccaaatgaagccggaaaacccatttttttaccataccacaactatgaggattttgtagggctgtcaactgcaaaccccattggatt

SEQ ID NO: 30288 - DNA, 380 bp, Oryza sativa
  Clone ID: uC-osflM202066g02a1
acgcttggtcgccctgtttttttttttttttttttaccaaacatttattcattcttattattggacatgatttttactggaatggccaaggtttttccaagaaaacccagggtcaatgtggaaaattttaagggtccgcaccagaccattggtaatgggggttggagtatttcgaaccaacttggaggattggttgagtaccccagggcagggaattcttaaaaggttagggcccaattgggtttaagctttattttttcttcctggccttaggtcttataacctacctaagtaggtttttttattaaaaaaaaaagcccggatgtaacaggaaaacccatttatatctcccatcccacacctatggtgatttggggggg

SEQ ID NO: 30289 - DNA, 418 bp, Oryza sativa
  Clone ID: uC-osflM202066g03a1
accctattcaatatatactgcagactaattaggagggaaaatagctagatatacaccggcaaaaacaatattccggctgaagatactacctgacagagagtaacaataaaaaaactcattgttcagacccttaaacaagcggacaaaaaggaatgaaacctgtgtcactcgctagacatgggtgcctgaatctatactgaatcagcacaatatagaacttctgccgcaggagactaggctgaacggaaagcatctaatgatgcccaagacatataaccaatcaatattcctggcttacataaaagggcagattgttatttagcagagattcctttaaagtgcttacctagggccctgctggatctggatctggaggtcagaaactgatgaaatcgtccttttgttccttactgtcctg

SEQ ID NO: 30290 - DNA, 390 bp, Oryza sativa
  Clone ID: uC-osflM202066g04a1
tctggtttgcgcgcactcgacgaagagaatagacagacaggcgtactctaccctataaaaggcttttgacatatgaacgaaggcacgattgactgactcgaccgaagagtagataaccatcagtacaaataccaacgccaggattggaagttaaatattagcgaacgcgcacagactggagtacactatcaaacacaggcatacctgaccatcaacattttcgcataacctgtgagtgagatgcggagggtgagcagattttcaggtcagagctgccagcatgaactttggaagagccaatgctggacatcaacagtcgcgtgagctgggggcatccccccagaatgacccccagaggctagtgcgtgcacatccatctaccagactccg

SEQ ID NO: 30291 - DNA, 225 bp, Oryza sativa
  Clone ID: uC-osflM202066g05a1
gtttgacgagctcttgcagcgccatcgcacgcgctcggatgctttaaagctgtcgagcggtcgtcctttttttttttaaaatcttgtgccataatggaccattttagaaggatgcgacactgatagaagaccaaatatgtattgggaaataaatacaaatgttacacatctatgtggccggccgaccaatccggcccaattaacacaacacaaagaacaaacggg

SEQ ID NO: 30292 - DNA, 460 bp, Oryza sativa
  Clone ID: uC-osflM202066g06a1
tgacgagctcatgcacgccgtcgcacgctcggatgctttagagcggtcgagcgttctttttttttttttttttataaaccaagcaaaactattatacacacaaatctattttggcggagaatttcattttacatgcagggtggcaactaggaaagaacacccgccaactaaagatggtagacaggtacaaatggggctgttaatctacaaaatttacaggttgtcggagcacattaccctgtgtcactcactagggttcatcctgacagaacaaaccaattatcccgaaccattatcagaaggtccttctggttcttaggccttggtgaggcaccatctgaagttctgaagaatataggcactatcaacaactcattagcagcagccaaactctacaaacccaaaacttgccttctctcttttgctgacacattttacatgtattctcctcatcaaccat

SEQ ID NO: 30293 - DNA, 398 bp, Oryza sativa
  Clone ID: uC-osflM202066g07a1
accaaacattatccattcttattattgcacatgattttcactgtattgacaaagtttatacgaagaaacacagtatcaatgattaaaaatttcaagatacagcacagaacattggtaactggggcttgaatcattccgaaccacctagtagtattgctcgagtaccccagtgcaggaattactcaaatgtcaaggaccaaattggattcatgctctatttttttttcctgccctaagtttttatactacctaactaagctttttattcaagaaacaagccgcattgaagcaggaaaacccatctatctaccataccacacctatgatgatattggagggctgtcaactgcaagccccattgtattgagtccattgtcaacgtaaacagtcgagccagt

SEQ ID NO: 30294 - DNA, 413 bp, Oryza sativa
  Clone ID: uC-osflM202066g08a1
accctattcaatttatactgcagtataattaggagggaaatcagataaatttacaccggcaaatcaaatatactggtagtatatactagcagtagaatgtaccataaaaaaactcagcatcaaacccttcaccgagcgtacagcaagtaatgaaacctctgacactgataggagtcatgagccaaaatctgactggcttgacacagtaagggggactggtacatctatctattcctgtacagcaagaaactagtcatgcccaagacattaaaccaaacaaaatccctgggatacattcaagcaagatgggcatatcacacaaattcatatcaagcgtctccctgcggccctgctgtatctggatctgggggtcagaaactgatgaaatcgtccttttgttccttcctgtcctg

SEQ ID NO: 30295 - DNA, 423 bp, Oryza sativa
  Clone ID: uC-osflM202066g09a1
ggtcgtccttttttttttttttttttttttttttttttttttttttttgttaaaatattgttttttttttcattggtaaaatacagaaaccaggagggataaacttaccccaggacacaaattaaaagtggtaggaaaccatcctaaaacacgaaaatgaccccacatgcatttttttaaaaccccctaaaaatgttggcataaatgggggaatattacttatttattccagggctccagggcaagggtacctttgaccttatgttctgagaagcgacctagggggtttaaaacaacttcctctacctggggtggggaccctttatatttttcctagaatgtttgctacgcgttcgggggttattttggggggtcctgagggcgacctaagatttgacgggtttttcggggacagctgggggg

SEQ ID NO: 30296 - DNA, 394 bp, Oryza sativa
  Clone ID: uC-osflM202066g10a1
gatcaaataagacaaagagtataataagatagccgcaatacacaacataataaggctttgtacatatgcagcgcgggttgtataactaacttgtaagttgagcagcacaggaactgctacaaaacggtgttccagcattgcaagtcagtttagcgcgttagcaccctcactaggctctcgcaacctcctaaagctaaacagattaacgacaatctaacatagctagggagagagatcatctatcttagcagattcagagttcagagccaccaacaaaatcttcttgatgagcaatgcatagttatctgacttaccattacctgcgcgcatccggaccagctggccgagcctgacttgtcacatgacttgtctgctgaccagcaatgttcacact

SEQ ID NO: 30297 - DNA, 399 bp, Oryza sativa
  Clone ID: uC-osflM202066g11a1
tttgttttttggctccattttggtttcttttaatttatcgtattacagaatttctgtagccttgctgatgatcacttggatatcatgtactagtaattaacaataggatgcatacaaaagatggcccaacgacaacagaagatgcgtgcatctgacattgtctggccttatttggttggtagtactccaattaattaacaagagatgatgcattcttgtgccttagtttcttcacatgcttggcttcacgttgagcctattcgcaatcttcacccccaacgactcatcacactgggagaggtagttgacccagatggcgcggagctcaggggagaccttggggtgcgcgagctcgccggcgaagcggcggatgaacctctcctgtctatccggcgccca

SEQ ID NO: 30298 - DNA, 443 bp, Oryza sativa
  Clone ID: uC-osflM202066g12a1
agcttggatccttttatgctgttagcgttcgccttttttttttttgtttaagcgtaggttatccaccataattaagatcgagaccatgagatagctagaacactgctgctaccatgagatagtttatccccctgtagtactgtacatcagaaattcaccactcaactcaccccctcacccatgcatccagatccatgcatgcaggaaacaattaccacaacacacacagtaagtctgaatctcatcacatccatctctctctctctcctccccccaattcattaacatcttatacatgcatactccacaaaaaaaaaaaagaagaaacaagaagagaacatcttccatcgcccaatcatcggtttcaccagcctgaactcatcaagctccttgagatgccctggccctgatgaaatcgatcacacgctcagcctgacagcgtc

SEQ ID NO: 30299 - DNA, 81 bp, Oryza sativa
  unsure (1)..(81): unsure at all n locations
  Clone ID: uC-osflM202066h01a1
agcgcaaactcccccacccccacccccancaaacccctttttttttttttttactccaaccacccctcttccttttctctt

SEQ ID NO: 30300 - DNA, 414 bp, Oryza sativa
  Clone ID: uC-osflM202066h02a1
gccggcgtggcgtgcgtcgtgacgtcggaccagttcgagcgcatgctgccccaccgcgacgacgcggcgtgccccgcccgcgggttctacgcctaccgcgccttcgtcgccgcggccggcgcgttcccggccttcgccgccacgggcgacgccgacacccgcaagcgtgaggtcgccgcgttcctggcccagacttcccacgcgacctctggtgggccctactcgtggggctactgctacaaggaggtgaagggcgcgacgtcagacttatgcgtgccggacgcgcgctggccgtgcgcgcccggcaaggcgtaccacgcccgaggacccatgcaaattgcatacagcttccactatggggtggcccgcgaggcgatcgagacctacctgctgggcaaccctgagctggtggca

SEQ ID NO: 30301 - DNA, 134 bp, Oryza sativa
  Clone ID: uC-osflM202066h03a1
tttgtttttttttttttttttgtttttttttttattttttttttttttcatgatttttacaactttagcataattccatctgagccatggcacctcgatgagatattaggcatttgagtgcctcatgatataaa

SEQ ID NO: 30302 - DNA, 404 bp, Oryza sativa
  Clone ID: uC-osflM202066h04a1
ttttgttttttttttttttttttttttttttaaaaatgtaaactttagctatattcattgcagtagccagtgcccagtagggagaaatccttacatctgctagggaagcgctaaactaactacatcatccaaacggcaggttctccaagctagggaatttacaggccggatttttatgtactgatataggacagcataatacaaagtggaggcgacaaccgcctacagatatacagaaattccttttttgtcaacagcctttttcctcggggagcctttctatactggacagtaaaatcagatcggggtagtaacagagttaccacatgttgctgacatctctaacattatatatctacgatgtcatgggaacaattctcctgctgaacattcatcagcactca

SEQ ID NO: 30303 - DNA, 467 bp, Oryza sativa
  Clone ID: uC-osflM202066h05a1
tttgaggagctccggcgcgccatcgacgggtcggaagcttttaagcggtcgagctgtcgtcctttgttttttttttttttacttttattttttttttttttttttcggagggggtcgttggtattccacctatccaaacaagcctttaatagttaaaggaaaaaccttccaatcacggtttggcctgcaataatatttacataatacctataaagccctataactgggctatagaggggatcacttcctgtgaacatactaagaaaacgattttgttaacattgtgggctctaggtacctgttattctaaaacattgtttttggttggagagaatccagaactgttgtttaaaatgggtcggatggagtcattaacacacttgcaagaatttcctgcaaaattgctacatggctagggcgtgacaacacatatgcactttgttggacactgcccaacagaggggggg

SEQ ID NO: 30304 - DNA, 134 bp, Oryza sativa
  Clone ID: uC-osflM202066h06a1
ttttgtttttttgttttttttttttttttgtttttttttttttttttttttttttttgtgaatttccacaaacctagcttattcacgaacggaaaaaacacaccgaaagaacaaaaaggggacgcaccgcaaca

SEQ ID NO: 30305 - DNA, 120 bp, Oryza sativa
  Clone ID: uC-osflM202066h07a1
gcgcatgctgtcccacctttactacttttttttttttttttttttttttcaacaccaaccgcctcaaacattacgtgggcggcgcatggaaatacatcctttccacgggagagggctggg

SEQ ID NO: 30306 - DNA, 303 bp, Oryza sativa
  Clone ID: uC-osflM202066h08a1
gcagagaagatttagctctaatggcagacaagagtcttacaactttagcataattccatcgagccatggcactcgatggatattggcattgagtcctatgataaaaagagcagcttcaaagcatgcgtaaaagttaaggtcctttctttggtggacaagtcatacatgagtacatgagaccctcgctgctattagcagcacaaggaaacttactattgagataattcatcaaccaaacaaaaactggaaaagtacgtgcagcgcgcaggggattcatccccagcaaatcaccacccatccttc

SEQ ID NO: 30307 - DNA, 340 bp, Oryza sativa
  Clone ID: uC-osflM202066h09a1
tttgtttttttttgtttttttgtttttttttttttttttttttattattgtactttatttttttttgtttgtcttttttttgtcagaaacactttttcaacctgaattaagaggaacattttttggccccggggggaaaatttgggaactaaaataatggcgagccacccaaaatccttccccaaaaaaaaaaaaaattttttgggggcaacccaaaaaatcccaaaccccattgaaaaattaaaaattgtgcccccccaaaattttacaaaaaacggggctaaaaagggccaaattaaggttgggccatatcaggcccccccatttaattttgcccccg

SEQ ID NO: 30308 - DNA, 394 bp, Oryza sativa
  Clone ID: uC-osflM202066h10a1
acattcaacttccactttttattccaactgtactcccatctctcagtcagtgacacatatcaggaatacgtaaaagatttgcagtcgctgacaaccatgtgaatgactgagaacatatttgagagcaaagtaagacaggcaagctccctgatattatatcaggctcacaatatttgcgcatacaaactaaaataatttctcaacactgcttgatctacctatcatctccctttgtattcatgtgccgtgctgaaatcacaatgtcacattattttatcaatgctttgcccacacacatgaaaaacagctttcagatcaatggccatatttcttcaatcctaccaagtaacaacacaaatggcggctgctgagctgctttgatgagaggcggaag

SEQ ID NO: 30309 - DNA, 316 bp, Oryza sativa
  unsure (1)..(316): unsure at all n locations
  Clone ID: uC-osflM202066h11a1
cgtacgagcagaaattaaattactgaatcgaacaggaaactcgagtactcgacacaaatctagcttattcacgaatgttaacaaaccaacgatgaaaaataagtcacgcacgcaaaacaaaaaaatacaaatacaaaaacgaacgaaaaacaatcgatttagcgaatcacttaattatgatatgacgatcatatcgtcctcgtaaaccgggcgcgcgcgagcgggcgatcgatcgatcgatcgatggatcggatcagatcagatcagatcatcacttgggcatgggcccgtggtttgaggtgcngcagcgccgcct

SEQ ID NO: 30310 - DNA, 437 bp, Oryza sativa
  Clone ID: uC-osflM202066h12a1
aaggttggatcctttgagccggttgttctttcgcccttttttttactgctctgtttttgctcagagaaaaaaaaagacacacatgcatactctaccctataaaacacttctgaaaaattaacgaaatcaccattgatgtctaccaccgaaaaatagttaaccataaatacaaataccaacgtcaagttcagaatttaaatattagttaaccgtaacagccgaatcacactatcaaacccagacatacattcccataaaattttccgattaacctctcaatcagttgcggaggggagctgattttcaggtcgcacctgcttgcctgaactctggaatcgccaatgcagcacatcaacagccgtgtgagcgaggggcatccccgtaaaatcacccccagatgttagtgcgtccacattcatctaccagacttcctccca

SEQ ID NO: 30311 - DNA, 482 bp, Oryza sativa
  Clone ID: uC-osflM202067a04b1
cacatgtttagtgttattctcctcatgttatgttttgctacgttggggagcgctcagtatgtcaagtataaggatccgaagcagcccgtctctgttcgtgtcaaggatctgctcggccggatgactctcgctgagaagattggccagatgacccaaatcgagagggagaatgccacggcggagcagattgccaagtacttcataggtagtgtactgagtggtggaggcagtgtgcctgctcctcaggcatcagctcaggcttgggcttcaatggtgaatgaaatgcaaaagggtgccctttcgacccgactaggtattccgatgatctacggtattgatgccgtgcatgggcacaataacgtctaccaggctacaattttcccccataatgtcgggctcggcgctaccagggaccccgacctagtaaagaagataggagacgcaactgctcttgagctagagctactggaattccctacgtc

SEQ ID NO: 30312 - DNA, 193 bp, Oryza sativa
  Clone ID: uC-osflM202067a07b1
tggctgcggcggtgatggtggcggcgacggtggtggttttttttaaagaaaaggtggggtaccaccccacaatccatctactaatagacatcgagagcgatccttcatcatcgccctataaactatacaatacaacaaaaacacatctgacgatgcggataatgtctccaccctccctcattcctggataaag

SEQ ID NO: 30313 - DNA, 150 bp, Oryza sativa
  Clone ID: uC-osflM202067a12b1
tgttttttccccggcacctcaccatggacacggtttgctttaccggaggcgagcacaaggggaaggagaagacgtgccgggtgtgcggcgaggaggtggctgcgagggaggacgggaagccgatcgtggcgtgcgccgagtgcggctttc

SEQ ID NO: 30314 - DNA, 455 bp, Oryza sativa
  unsure (1)..(455): unsure at all n locations
  Clone ID: uC-osflM202067b01b1
aacttacttaaccgccgccgcatcgccctcgttagaacgatggccgcgtcggcgctgcaccagaccaccagcttcctcggcaccgcccctcgccgggatgagctcgtccgccgcgtcggcgactccggtggccgcatcaccatgcgccgcaccgtcaagagcgcgccccagagcatctggtatggacctgaccgtcccaagtacctgggcccgttctcggagcagacgccatcgtacctgaccggagagttcccgggagactacgggtgggacacggcggggctatcggccgacccggagacgttcgcgaggaacagggagctggaggtgatccactcgcggtgggcgatgctgggggcgctgggctgcgtcttccggagatcccgtncagaacggggtgaagttcggggaggcggtgtggttcaaggccgcgcgcagaacttcttcgagggggg

SEQ ID NO: 30315 - DNA, 349 bp, Oryza sativa
  Clone ID: uC-osflM202067b03b1
ctttctccctaactcgcctcctccgccgccgccgccgccaccggcggcgacttcccatatctccggaggcctacccttcccaccgccgcatcctcgatctgcgtgctgccaccgcgacgaacccctgtagcggtcgcctcctactcggtagaaccctagatccccccgataccccgcgcccctctccgccgccgccgccgtcccggctgacggtatgaaagtgaccgacgatctccagtaagatcccggagattaggagtccagcttcgcgatggcgatccgcatcaccatgtcgtactccggctatgtggcgcagagcctggcctcgtcttttggcctgcgctgcacc

SEQ ID NO: 30316 - DNA, 511 bp, Oryza sativa
  Clone ID: uC-osflM202067b04b1
ctttatttatgagttgtagggagggacgtatgtcaccacaaacagaaactaaagcaagtgttggatttaaagctggtgttaaggattataaattgacttactacaccccggagtacgaaaccaaggacactgatatcttggcagcattccgagtaactcctcagccgggggttccgcccgaagaagcaggggctgcagtagctgccgaatcttctactggtacatggacaactgtttggactgatggacttaccagtcttgatcgttacaaaggccgatgctatcacatcgagcccgttgttggggaggataatcaatatatcgcttatgtagcttatccattagacctatttgaagagggttctgttactaacatgtttacttccattgtgggtaacgtatttggttttaaagccctacgcgctctacgtctggaggatctgcgaattccccctacttattcaaaaactttccaagtccgcctcatggtattcaagtttgaagggataag

SEQ ID NO: 30317 - DNA, 486 bp, Oryza sativa
  Clone ID: uC-osflM202067b05b1
gacttatttcctcccgtcctttcgaagcctctcgaatcgcatcgccgagccggatggcggtcaccgccgacgtgaagctcgagggcctccgcgccgccaccgacaagctcgaccagatcagcgagaacgagaagtccgggttcatcagcctcgtttcgcgctacctcagcggcgaggcggagcagatcgagtggagtaagatccagaccccgaccgacgaggtggtggttccctacgacacgctctcggctgctcccgaagatctcaacgagacgaagaagctgctcgacaaactcgtcgtgctcaagctcaatggaggcctcgggacgaccatgggctgcactggtcccaagtctgtcattgaagtccgcaatggctttacgtttctagaccttattgtgattcaaattgagtccctgaacaagaagtatggatgcaatgtccctttgcttctaatgaactcattcaacactcatgatgacacac

SEQ ID NO: 30318 - DNA, 378 bp, Oryza sativa
  Clone ID: uC-osflM202067b11b1
aaacaagcaaaagttcagttctctagcttattattgcaaccattaggaatagaggtaatttttcagccgctcatacagccatgctatactatgcagggcaagaagaacacaggtgcagagcagctgccattattcgcgagacacatcacacatacagagagttcgatcgatcggagttggttgatgagattagagataagataattagaacatgtccttgagtgtggggagcttcatctcgccgctggtggagagcgggatggtgaagttgccgacgatggggaggtcgatggtgaggccgacgtcgagctggtagtcgatgttccagtcccggcccacgttcttcaccagcgagatgaggaagccgtacgggatctt

SEQ ID NO: 30319 - DNA, 526 bp, Oryza sativa
  unsure (1)..(526): unsure at all n locations
  Clone ID: uC-osflM202067c07b1
tcgcttaggtggattcggcggctgctgctactggtgctcgggccacggcggcggcggcggcggcgacgacaccacggaggcagtctccggcgggagctgggagcccctcgcagcgcgacgcgcggtggggtgacacgagctcctacggtgctagaaagaagcacagggttttttgccagcttccaaatagtgattgggccttatgcactgtaattacaacctccggtgacgattccgtactaaagcttcctgaaggaaaagtactgaggttgaaaacagagagccttgaagctgcaaatcctgaaattcttgacggggnggatgatcttatgcagctaagttatctaagtgagccatccgttctgtacaatttgcagtacagatacactcaagacttgatatatactaaagcaggtccagttttggtggcggtcaatccttttaagaaagttcctctatatggtaatgagtacattgatgcatatagaaataaaacaaaggatagcccacacgtttatgcatagca

SEQ ID NO: 30320 - DNA, 518 bp, Oryza sativa
  Clone ID: uC-osflM202067c10b1
ttggacttactctactactactagccagtaagctagctaactaactacgtggctatggcccccaccgcgatggcctcctcggccacctccgtggctccattccaagggctcaagtccaccgccggcctccccgtcagccgccgctccaccaactcgggcttcggcaacgtcagcaatggcggaaggatcaagtgcatgcaggtgtggccaattgagggcatcaagaagttcgagaccctatcgtacctgccaccactcaccgtggaggatcttttgaagcagatcgagtacctgcttcgatccaagtgggtgccttgtctcgagttcagcaaggttgggttcgtctaccgtgagaaccacaggtctcccggatactacgatggcaggtattggaccatgtggaagctgcccatgttcggctgcaccgatgccacccaagtgctcaaggagctcgaggaggccaagaaggcctaccctgatgcctttgtccgtatcatcggcttctacaacgtcaggca

SEQ ID NO: 30321 - DNA, 548 bp, Oryza sativa
  Clone ID: uC-osflM202067d05b1
agtgttcctttgggcttttccaggttcagatcgacgcctccttcctctggacattgttgctagttggtgatggctgagcaggctaatcaaccgactgtccttcagaagttcggtggccagttccaccttggctccagcttttctgaaggtgtacgggctcgcaacatctgcccatctgtctcatcctatgacaggcgctttaccacaaggagctacatgacccagggccttgtcaatggtggcatcaacgtcccaatgatgtcgtcctctccaatttttgctaatgctccagctgagaaaggtggcaaaaacttcatgattgatttcctcatgggtggagtgtcagccgcagtttcaaagactgctgctgctccgattgagcgtgtgaagctgcttatccagaaccaggatgaaatgatcaaggctggtaggctctcagagccatacaagggtattggggactgcttcggacgcacttatcaggatgagggttttgcttcattgctgagagggaacactgcccatgtgatccgttactttcccaccca

SEQ ID NO: 30322 - DNA, 434 bp, Oryza sativa
  Clone ID: uC-osflM202067d07b1
ttgattccaggaagctctgctgaaaaatccggtggacataaggttacaccgaatgaaagcataccgcaaatgcaaaatcatatttcagaacagcagaaccttgaagttggtggtacctgcacagtggaatctgtaaaggagttgagcaatagcaagaaaattgaagaccaaagtagagagagtgttctgtctgatatcagttcgcgcactctggcatttccatcaatttctactgctgactttcagtttgatcttgatagagcatcagacattatagtagatgcagtggctgacatcttgcagaaatatgataatataagactagttcttgtagacctaagccataaatcaagaatactgtcattggtcaaggaaaaggctgctaagaagaacattaactccagcaggtttttcacttttgtgggagatataac

SEQ ID NO: 30323 - DNA, 423 bp, Oryza sativa
  unsure (1)..(423): unsure at all n locations
  Clone ID: uC-osflM202067d08b1
tcttttcccatcctcatctgaggaatacactctcctgctctccactaacctttgctctagtagttgttgccaaccagatccaccatgccaccacctgctgctccaagccgtcgttgctgctgctgttgatgccttctcttccccctagctgctgctggatttagcttcttagatgacgcatttccggattgggacggcttcactcctcctcgcctggatcctgtcgtctctccgccccactgttgcgcggatccgccgtcgccggcgacgggaggggcggatccaacgacctcttcctctccacggatcctgtggccggcttcactcctcctcatttggatcccatcgtttctccgnccctctgtcgtgcggatccgtcggcggcggcgacgggaggggcggatccggtgacctcttcccctc

SEQ ID NO: 30324 - DNA, 547 bp, Oryza sativa
  Clone ID: uC-osflM202067d10b1
tttggtttgtagagaacaagagatgcaagaagagaaaaactttgctgctgtctgcaaattggggattcctgagcaggaactagcagagacggcggataatatccctgatgagtgctgcaaagaggagacttcaatggagcaggacgaaggcggcgatgggaccaacatggagtctgaaagcatttcagaggttgccgagcatccgaatgtggaagatgaagagaacacgcaggatgatggtggatctgaaatggagatatctgaggagatcatctctggttttgggtgcgaagaggatttctccgaggaagtcacttcaaaatatgtctccgaaggtgaaatttctgactccggtgcgattgtttccctacatgttgaaatgcaaaaacaaccagtggagaaccatgcctttgagcaagatgacagcagcactgcagacaatgcaatttatcaagatgacagcacagcagacagagcatttgatcaagatgacatccgtgcagatggctatgatgactctaagaggaattggatattggaatgagag

SEQ ID NO: 30325 - DNA, 461 bp, Oryza sativa
  Clone ID: uC-osflM202067e03b1
ctctaccttatcggcaaatcttcccccatcttctcggtcatggcgtccgcggcggcggagaaggggaaggctccggccgacacagagcagacggcggcggcgaccgccgcgcggctcgcggcggagtggaccacgtgggcgatgaagaacgcgaaggtagtggcccactacggattcatcccgctcgtcatcctcatcggcatgaactccgagcccaagccccgcctcgcccagctcctctccccaatctaggggtcctagctcaattctcgccagctgctattcggctgttcctcaccacgacccgcgtggatgcgcgtctattggatacggcaacctgtattgcatttcttctacataattttagttcctttctgtttgaatgtttggtaattttgggtctccccaaatagctactgatgagagttaagactttgagttgcaattaaatacaaatactg

SEQ ID NO: 30326 - DNA, 453 bp, Oryza sativa
  Clone ID: uC-osflM202067e08b1
tctttctccacccaggctttgaactttgctttcaaggattacttcaagaggctgttcaacttcaagaaagacaaggatggttactggaagcggtttggtggcaaccttgcctctggtggtgctgctggtgcttcatctctgttgtttgtgtactcccttgactatgctaggacaaggttggccaatgatgcgaaggctgccaagggaggaggtgaaaggcagttcaatggccttgtggatgtttaccgcaagactctcaagtcagatggcattgctgggttgtaccgtggatttaacatgtgatgtgttggaatcattgtctaccgaggtctgtactttggaatgtatgattctctgaagccagttgtactcactgggttttttcaggacaatttctttgcaagctctgccccttgggggcctgatcaccaacggtgcaggtcttgcctttta

SEQ ID NO: 30327 - DNA, 329 bp, Oryza sativa
  Clone ID: uC-osflM202067e09b1
tcgcttcgccacgccacgccacgccgagttgtggagctgagccatgatggagttgcgcaagcactggggcgtcggcgggcggcggtgcggtgcgtgcgaggcgtcgccggcggccgtgcactgccgcggctgcggcggggtgtacctgtgcacggtgtgcgacgcgcgcccgggccacgcgcgggcggcgcacgagcgggtgtgggtgtgcgaggtctgcgaggtggcgcccgtcgccgacacctgcaaggccgacgtcggggtgctctgtgccgcctgcgacgccgaccatccaaaaggcaacccggtggcccgtcgacacgcgcgcg

SEQ ID NO: 30328 - DNA, 330 bp, Oryza sativa
  Clone ID: uC-osflM202067e10b1
ttccttattcctcattcctccaaccagtggtgtgtgcttgctgctgctgctgcttcagttctcgagtagtactccagtacagacaaggcgagtggtggtggtgtttgttgccatggagtcgcagcaggagaaggcggtttctgcgccggcggcgaacgggagcggcggcgccggcggcggcgagctgatcgggtacgtcgacgtgcacgtgcagagcgcgcgggacatccagaacatctgcatctaccacaagcaggacgtgtacgcgcggctgtcgctgccgggggagggggcgccggcggcgttcacgcatgtcatcaacggtggtgt

SEQ ID NO: 30329 - DNA, 347 bp, Oryza sativa
  Clone ID: uC-osflM202067e12b1
tagatcaacaaggaggcgcgattcacgccaacaatcacaggatggggagagaaggggagaaatcatccgctcatctcccaaaatcctccaaaaaaatccatctttatcccgaaaagatcctccttttcttggggtttctgacaggcgtgcacggctatctttaggcgttctcggcctcatctctcgtggaaaggttcttcttcttcggggttgcctgctgctgcttaatctgaggaggaaaagcccaattcttgtggggagtgaagggagggaggaggggggcatggcgctggacgactacaaagcgttgctgactatccttcggaacatccacccggcggagctgc

SEQ ID NO: 30330 - DNA, 322 bp, Oryza sativa
  Clone ID: uC-osflM202067f01b1
atcgtcctttactttattctccggtagatgacatggctatatatgagctaatgtgcgacacgactcaatgtacgggccatcaagcgcactattgaacgatacataagactcacctgcacgatctgatacatgatgtcgagcggtgcaaggcagtcacagctgagtgtgaaggcatatatgtggattactgcaggcaggaagcctgtggctagaccacggagaagctgattaaattgcacgaggcagcctacatgattgggacgaccgagaagatgtttagttgcgacaagatcactctcacagagaacagatctgagcttga

SEQ ID NO: 30331 - DNA, 555 bp, Oryza sativa
  Clone ID: uC-osflM202067f04b1
atctgtgttccactctacgatacgttaggtgcaggagctgttgacttcattattgaccatgctgaaatcgatgttatctttgttcaggacaagaaaataaaagaaatactgtccgcaaattgcaagtctgctaagagagtgaaaggactggtggcatttacttcgggaacaagcgaagaaatcacaagtgctgatcagattgggatgaagttgtactcgtggaaagatttcttaaaaatgggaaaggaaaatccagcccaaccttgtgctccaaaaccaaatgatacatgcaccatcatgtacacaagtgggacaagtggagagcccaaaggtgtcatgcttagccatgagagtcatgccatatatgtgaaaggtgtggacctcttcatggagcagtttgacgataagatgacaacagatgatgtgtttctttcctttctaccgcttgctcacatccttgaccgcatgatcgaggagtttttttttacaaaggagcctcaagtgctattatcatgggatttgaatgcttgagagagatctcatgagctaagccac

SEQ ID NO: 30332 - DNA, 547 bp, Oryza sativa
  unsure (1)..(547): unsure at all n locations
  Clone ID: uC-osflM202067f09b1
tttttctcctctctttctctcgttctctttctttttctctcgctctcccctgcgccgccgcatcctcaggtctcgccgccgctccaccccacgccggccgatgctccctgcctccggcagccgccccgcagccgctgccggcctgaatcggtttcgtggctcctcatgagtctatccccaaactaaccctagccatcaacccctctccaatcgatgctgctgctggctactgctctcaacgactgggattggaattttcccagccccggcgcccctgatccaagcatgactcagaccagccgtgtctccccgagctccttctctctgatcccttcattccctacttctgtgatgtgatctgattggtgttctattatatagttacctactgtgaatttctatgcttgtgaactagtcctaatgaccaacttgatgatgctatactcagaattatcctgctatctgtaggttctaagataattgatttgctataattagatgataaccatatgctatggatggatgaatgaatgctngcataatatat

SEQ ID NO: 30333 - DNA, 400 bp, Oryza sativa
  Clone ID: uC-osflM202067g01b1
ggctatttttaaggctcttgctgctgctggtgctgaaattcttgttggtacatgggtgcctgcactaaacatatttgagacaagcctaaggcgtggaaagtttgatgaatcacgaaagctgcctgatggatctcttatggaaattgttaaagtctatccacttgatgctgtctatgattcccctgaagatgttcctgaagatgtcaaaggaaacaaaaggtatgctgggtcatcaaattggactgttaaggaagttgctgagtcagtcaagaatgactttggcagcattgacattttggtgcattctctagctaatggtccagagggaacaaaaccactgttggagacatcaagaagagggtatcttgctgcactgtcagcatcgagttactccttcgtc

SEQ ID NO: 30334 - DNA, 354 bp, Oryza sativa
  Clone ID: uC-osflM202067g02b1
gcgtttggtaaagtggaacagcgctcgcgggttgcgcttgcgccggctaagaagcgcggcggacgccagataaagccctccctccattgacatcaacatgggtgacaatctgatggataaggtcaatgccttgggtgagcggctcaaggtaagtggggcagaagttagccggaagatgtcagctggtgtcagtaacatgagtttcaagatgaaagaattcttccaaggccagaacatggcggacaagatagtcgatgaggccacgctggagaccatggatgctcctgattgggccaccaatcttgagatatgtgatatggttaacactggaaatgtcaacagcattgagctgat

SEQ ID NO: 30335 - DNA, 572 bp, Oryza sativa
  unsure (1)..(572): unsure at all n locations
  Clone ID: uC-osflM202067g06b1
ggtcgccccacgcgtccgtatttgagttttgtagcgagctcgcgcgaatgcgaagccaaccgagagaggcattcaccaacgagcaagaggggagtggattggttggttaaagctccgcatcttgcggcggaaatctcgctctcttctctgcggtgggtggccggagaagtcgccgccggtgaggcatggggatggaggtggcggcggcgcggctgggggctctgtacacgacctccgactacgcgtcggtggtgtccatcaacctgttcgtcgcgctgctctgcgcctgcatcgtcctcggccacctcctcgaggagaatcgctgggtcaatgagtccatcaccgcgctcatcatcgggctctgcaccgncgtggtgatcttgctgatgaccaaagggaagagctcgcacttattcgtcttcagtgaggatctctttttcatctacctnctccctccgatcatcttcaatgcaggttttcaggtaaagaaaaagcaattctttccgaatttcatgacgatcacattattttgagccgtcggnacaatgatatnctctttcacaatatctatt

SEQ ID NO: 30336 - DNA, 338 bp, Oryza sativa
  Clone ID: uC-osflM202067g08b1
tatttcggcagcacagcagcagcagaagcagctcggatccctcctgcaatggcgaccgcgtgcccgccgctctcgctgcagccggcctacctctcggggaggtccgcgcgcgcgcgccgcccgccgcccgccgtccgctgcagcgccgtcggagaggttatggcggagacggcggcggtcgggacggcggaggagccgctgctggtgagcgcgatcaaggggaggaaggtcgagagaccgccggtctggctcatgaggcaggccgggaggtacatgaagagctatcaattgctctgcgagcgacatccttcattccgtgaaagatcagaaaatgttga

SEQ ID NO: 30337 - DNA, 533 bp, Oryza sativa
  Clone ID: uC-osflM202067g10b1
tgtctagaggaaaaaaagattttcttttcgtcttcccccgtagcagcagcgagccgagcatccatccaaattcccaaaagaggaaactacgctgcgccaccgactctctcgccgccgcaccctcctccctccctccctcgctcgcctccgccgccgcctccgctgcctctccggtgggggccatggcgagcgcggcgccgctgccccccacgccgccgccatcgcagcagcagcagccgcagccgcagggcaaggagcagcagcagcagatggcggtggcgatgaacgcgcgccgcctggtgatgatcggggaccgcctcaggacccacttccgcggcggcggcgggaccgtcctcgagccgcccgacctcgcgcacctcgtctacgccttcgccagagggatcgatttcgctctttctagcggcgatgttcctaccgtggccagtgaaatacccagcattttgaagaaggtgtatctggtagggaaagatcaatttctgcaatcttctggtatggtgctaatgatatcatgc

SEQ ID NO: 30338 - DNA, 336 bp, Oryza sativa
  Clone ID: uC-osflM202067g12b1
attactcacccgcttcggttcctcccctctctaagccggggaagctaagccatggcgtgcgtcaccgcccgcaccccggtcgcagccctccgctcgtcggcgtggctcaagtctaccttcctagggcaatcctccacccgcctggcccgcgcaccgactacgaggcgtaatgttcgggcggaggccaagggagagtggctccccggcctcccttctcccacctacctcaacggcagcttgccaggcgataacgggttcgacccgttgggtctggcggaggacccggagaacctgcggtggtccgtgcaggcggagctggagaacgggcggtgggcg

SEQ ID NO: 30339 - DNA, 386 bp, Oryza sativa
  Clone ID: uC-osflM202067h07b1
tttgttcagagcactaggagtcggcgtgggcttcaggactggtggtgataactggctgttggtaaggaaacatggcagagaccagaggcgtgggtgggcgccttgcggcatttgccttctaaggtggactcgaagatatattatctcaaggatgtgttggttgagtacatggacatgaaaaatgtggttgctgaaatagcagaggagagggagaggtttcagcttgaacagcgtggaaatgacgcacttctggaagcaatgaaggaggagcttgtggcagcaaacaacgagctcgaagcagcaaaagaagaaatctctcgaaagaacaatgagctagagtcttgaaagaaacagcttcaagagagttgagcgagaaatattcaagc

SEQ ID NO: 30340 - DNA, 364 bp, Oryza sativa
  Clone ID: uC-osflM202067h08b1
tctcttatgttcttaggtcatacacagtggctagtggactactggcttctgcaaaatggtttcagtattggaattggggatacaattgcagatgctgccaccatggtgaagattaatgagacaatctcaaaagctaaagatgatgtgaaggagcttattaagcaaaatcaggataaacaattggaagctgagccaggacgcaccatgatggaatcattcgaaaatagagtaaatcaggttcttaacaaggctcgtgatgatgctggaagtagtgcccagaagagtttgtctgaaagcaacaacctgaaggctatggttactgcaagctcaaaaggaagttttcatcaatatttttcaaatgact

SEQ ID NO: 30341 - DNA, 252 bp, Oryza sativa
  Clone ID: uC-osflM202068a02a1
aggacaatccacacccagtaatccatattaataccacaatataagagtttgggagagggtgtttcatacgttttacaggctctgagacctcatacgggtaaatctccgacaacactccatctgcagctagaatcatgcaggcaaggctaaacgatgatgatgatgatgatggtggggatacgttgtacaggaaacatgggtatctttcttattaacaatagcattgtaagggggcatgcctgtttggacaga

SEQ ID NO: 30342 - DNA, 247 bp, Oryza sativa
  Clone ID: uC-osflM202068a04a1
ggagcgcacaaggatctaaaggcatttccacggcttaccgccagtttgacggcataactgggcattcccaaaccaaattggtggggagcaaactaattgtacagttcatcaaagcgagtgacatgaactggtatttttaaacggaggttcaaaatgctacctgaatgactacggcagagagttttcccaaatccaagaaaaaccctcaaaatgacctttagcttatcccgttaacttttcacttgat

SEQ ID NO: 30343 - DNA, 277 bp, Oryza sativa
  Clone ID: uC-osflM202068a07a1
acatgataaaattattattgtcttgaattatgtaaacgatgataacaaatccttttccagctacaaaagaaccagcataacaacaaagaattataaagttgcttaagtaatctctcccttcatctcaaaaagagctatatctagggggcctaggccacagcaacactttcacttaaagggtactttccatcctgcgacacacaagctcccaggatcaatctacttggccttgccgttctcgacagcagcagtcgaggggttcagctcatcccaggcc

SEQ ID NO: 30344 - DNA, 274 bp, Oryza sativa
  Clone ID: uC-osflM202068a08a1
catgaaagaggatgtagatcagcaaaaagtacaggatttaactcacaatagtgaatcaaaacatctcagttctgtctgatggttatgatgggtttctatgattttacaatgtatactgaacatgtccaccattttacaactgttaggaatcctggaatcatacaaattactgaatatatgacaggggaatgagatccccggtactatttccagcaaatgttaagatcaaggtcatgcagtgtacataaccatgtagggaaatgccggtcgtgtc

SEQ ID NO: 30345 - DNA, 150 bp, Oryza sativa
  Clone ID: uC-osflM202068a09a1
aaaaaaagatcaacccaaaaacaaaaaaaaaaaaaaaaaaaaacaaaaaaaaaaccaaaaaaaaaaaaaaaaaaaaacctctaaataccccacacggcaaaaaaaaaaaaaaataatcaaaaaccgcaaaaaaaaccagccaaacaaaaa

SEQ ID NO: 30346 - DNA, 298 bp, Oryza sativa
  Clone ID: uC-osflM202068a10a1
atgtattctgcagtttatttactcctgaactctatagtgtaagggtatctgcaaacgaagatacaatcaccttcggcaaacgtgtaaatcatctagtagcaaataaaggcattctatcagtaaaataatggagtgcctacgagttgtacccctcctatgtgtgaatgacatgaatcgctgtgtttcaacagagctttagtggatgaagtcataaagaaggtaaaaaggcctaggattagaagcaaaaccttcacaaattctcttattgtagttcgccagccttgacctcaaattctta

SEQ ID NO: 30347 - DNA, 266 bp, Oryza sativa
  Clone ID: uC-osflM202068a11a1
ggccacgaggagggggaggcggtcctccttcccgacgaacaccgacggcaggcgctggagcacggcgcggtacgccttggtgggccgcgcgacctcgaactccgaccggaagtcgacgtcgacgaggatgcgctcgcgctcggcgcggtcggaggcgggagggaggaggacgtcgaggtaggcgtgctcgccttttgggtgggaggaggacttgtcccagcgggagatgcaaaccgcggcgtcttgcccccgccgcgcggagcgag

SEQ ID NO: 30348 - DNA, 119 bp, Oryza sativa
  Clone ID: uC-osflM202068b01a1
aaaagctatggggtcagccgaccccacataaatagcctaaatccgccacttggcgggagatattgcattattgcattgtctcattaacactttaactatatatggaaacattttttcac

SEQ ID NO: 30349 - DNA, 280 bp, Oryza sativa
  Clone ID: uC-osflM202068b02a1
gagctggcaattgtggttatccaacacctgtagttaaactcaagacttacaagtcactcaaatgttgcaggttgaacatacttcaagaaagctaaattgcaggttacatatccctacccaactaaaatgttagatttaaagcaacttttatttatgtctctattctgcatgcttccaaaaggtggaagcaactaagcagagtgcatggccagcttgcaatgtgggtcatcaggaaacggttcattcgatcatggaagaaagaatcacaccttcactcatt

SEQ ID NO: 30350 - DNA, 287 bp, Oryza sativa
  Clone ID: uC-osflM202068b05a1
atagactgtatagtgaatatgcttattttaaaaaataaaaataaagagcaacacttatgttagtacaatgcagcactgaatagtactacattactaaaactatatactgcaggtaagcaaatcacattgcatctaacttttcttgcaaaaagtaaactgtgtacatttctgatattgttccaggagatccactgggcaattagtatctcaattgtccgcagattcttctatggttcgtcgactaaattttctgtttgacttctaccataattccatagatcatgaag

SEQ ID NO: 30351 - DNA, 296 bp, Oryza sativa
  Clone ID: uC-osflM202068b06a1
gcagagaaattttggttttatcaaaaaggacgtgttccatttgaactgacccacgtcatgttggaaaaaattacaaataatagctaggctataaataaatagcacatcccatattacagttcaaagtgttaaacctaaaaggaaacaaaagaccacgttgacaaaactagctgccatccaaagaatgttcttttccatatatcaagacacgacacagagactaactgacaaatgacgtttggcaccaacctatttttcccatgaactggaggcgaacttgaaacaaattttgacca

SEQ ID NO: 30352 - DNA, 275 bp, Oryza sativa
  Clone ID: uC-osflM202068b08a1
aatctccaacgagctagctcacctttttattcaagctaatcgatgctttttttattttttgatacggatgtacatagaaggacttctacggtacaatttattagcgggcattgcttaattaccacacaacggcaaatcaattattcactgaagcatatatatagagaagctaccaccatgctacattatacatattgggtccgattctcaggtctccactctctccgccagcttgatacccgatgactccaagatctccaacgctggaatgtaaa

SEQ ID NO: 30353 - DNA, 302 bp, Oryza sativa
  Clone ID: uC-osflM202068b09a1
ggcgggaggaggagctcctgcttgtccacgctaagatcctttaccaccgtgagctggctcacctccgacgagcacgacctccgacccctctccgccgacgcctcgctctgcggcggccggagatcgtcgtcatcgccatcgccaccctcctcctgctgccgccgcctgctcgctctgaccacgctccacagcccaagcggcggcgcctccgtcgagccgccgttcctcctccggtggtgacgctgcgatgacgccgcggcggtggcggtggcggtggcagctcggctccggttggtcggagt

SEQ ID NO: 30354 - DNA, 268 bp, Oryza sativa
  Clone ID: uC-osflM202068b10a1
caaaaaaaaagaaggggcaaatttactttgcaggagggttgctcaatgaaaagcaactcctgtttacatgaattacaacaaattgagctatagacttgcttgtcagaaaacaggcaaaaataaattacagaaaaaaatggtaagagaccaagcggctgtgatgtgagtgagggggagaccatgttacatgttgaatgaagttggtcaaattaattacaagctaacaaatcttgacatcatatatgcatcttcaagttcacccgccaaa

SEQ ID NO: 30355 - DNA, 255 bp, Oryza sativa
  Clone ID: uC-osflM202068b11a1
ggtctagtaatttggtaaatactcctttcccaaaatatttacccaaaaaataactcatacaaatttggttcctacacctatacagacataaagacttcatacatgtatttaagtgtaacttgcaacactgaaaagcgaaatcaatctctcgtgggagaaaaacctacaataagttgaatttttagacattctataccaaaaaaaatgaatttccagaaattcagcaaaattccagatttcttggaatcagatcac

SEQ ID NO: 30356 - DNA, 314 bp, Oryza sativa
  Clone ID: uC-osflM202068b12a1
gcgatttctaggggtttgggtcctttgctcggggcatgggccctgcggttcggcggcagtgacgagcggcaagccacctagaggaggagatgattacggagaagccgagctggattcgccacgagggcctgcagatcttctctatcgacatccagccgggcggcatccgcttcgccaccggcggcggcgaccagaagattcgcatatggagcatgaaatcagtggccaaagacaatgacagtgatgattccagccaaaggttgctggctacaattcgagaccattttggaacagtaaactgtgtgagatgggcc

SEQ ID NO: 30357 - DNA, 190 bp, Oryza sativa
  Clone ID: uC-osflM202068c01a1
gggaaaaaaaaaactgttttattttgggtcaaccctaaaaaaaaaattttttaaaacaaaataccttggaaaagggggaaagggtaaccctttaaaaaaacccaaacccaaaaaaagggaataaaggggggccaacatttttataaaaacaaaaggggaaaaaaaacgggaaaaacccgcctaagggggg

SEQ ID NO: 30358 - DNA, 188 bp, Oryza sativa
  Clone ID: uC-osflM202068c02a1
tttgggttttttattttttttggtgtttttttttatatttcttttctatgatttattttttttatgagtaacaagacaaaactgcatctgccaaagcacacctccccaactccacccaattacgccataattctccgggcaaaagcaaacggccttcccattccacccatctcacccagccacaaacc

SEQ ID NO: 30359 - DNA, 287 bp, Oryza sativa
  Clone ID: uC-osflM202068c03a1
aaacagagttgtttcataagtactataaataactgcttgttctcaattacataaagttttcataaaagttttaacagcctgatcccaagtacattacatagatgataacaatatcaaagtacacagatgacatatctcttcttttcaacacaacacattgatgatagatgtctttcagatgaagcgtgaaatgatacatacgaacagggatgggcaactcaaacaatgacagatagtcgacaagtccgggcataattattagcacacctcctgtcacaggaggctct

SEQ ID NO: 30360 - DNA, 293 bp, Oryza sativa
  Clone ID: uC-osflM202068c04a1
tttgggttttttttttttttttgttttttttttttttttttttttactacatagatgaactagtattagacgaagttttggacttctggtttactaggaacatagaaaacatcaaatgggggatgagttacaaacatgggaggtaaaattgaaatgacacgtgcaggaggtcttgttgatgaatggcacaaacgaacttatttcttttttccggcgggtccctttggtttcttggtagggactggtttgggtggtttttttgaaggggccttttttttcaaaggcactggtgg

SEQ ID NO: 30361 - DNA, 83 bp, Oryza sativa
  Clone ID: uC-osflM202068c05a1
tttgggttctttttttttttgggtttttaaaaatgaatgaattttcatacatgttttaaacagaaagacaacttagcaaggcg

SEQ ID NO: 30362 - DNA, 91 bp, Oryza sativa
  Clone ID: uC-osflM202068c07a1
tggtttttttttttttttgggtttttacttaattttcattgtttgtttgtttttggggaaactaaccccgagggaaaacaggccaatttaa

SEQ ID NO: 30363 - DNA, 284 bp, Oryza sativa
  Clone ID: uC-osflM202068c08a1
cataaatgacgcatgatttttatcaaaacgcttgcaaatgatatcagataagtagagtcaacaagacaaaactgtatctgccaaagcacacctccccaactccacccaattacgccattatttctgggcaaaagcaaacggcttcccattcctccccttcaccagtctcaaaccataaaccccacaacaaatcctcctaagtgacggcatataagatgatgaaaacaaagcaggatactccagagtcgtcatggcgaacttcaagttgacacttctcatgccac

SEQ ID NO: 30364 - DNA, 286 bp, Oryza sativa
  Clone ID: uC-osflM202068c09a1
caaaaagctatggggtcggccgaccccacataaatagcctaaatccgccactggcgggtgatattgtatcattgtattgtctcatcaaacttcaactatataggtaaatattacactctcacttagatcatatatatcgagccgaaaaaactaccaccaaaattaacacaagctaattaatttaattttacttaatttatcgctcgacggtgacggagacgacactgccgccactggcggtggcggcggcaccgggaccggagatgacggagggcatctcgacgtc

SEQ ID NO: 30365 - DNA, 266 bp, Oryza sativa
  Clone ID: uC-osflM202068c10a1
aggaaaaaaacagttcagtagtataaatggtacgaatgttcagtacaattgtgtcccgttaacatacatcgattttgccaaaagaacaaagggaactttgtatagtatgagtgtatttgtatagggtcggaagtcttgccatccgaatgtttgccccaaaaatgttggggtaaaaaaaagagaagagaaaataggataacctgaaacggagctatgaatatttcgtttcattctatagcttacaactgtttattttacttatcatg

SEQ ID NO: 30366 - DNA, 284 bp, Oryza sativa
  Clone ID: uC-osflM202068c11a1
tttgtttaaaaaaacggtgaggattatattacatggatcggttaaactcctactctactatacactgtgacgagggttacagacaacatctcacggtttcctcttctgcccttgcctgcactgcacaagggaagggataacacctcgacaacgacgaactcaacttgatcctttttctttcttttttttttcttttttttttcacctatatgtacatgcaagagctcagttctgctcagccatggccatggcccggctccattaccgggagagaaaggtcagga

SEQ ID NO: 30367 - DNA, 298 bp, Oryza sativa
  Clone ID: uC-osflM202068c12a1
tttgtttaacactgcaatttttgtttttggcattcctcattatcaaaaagcgctgaacatcatcatcaacaaaataaaataaaacaaataaaaaaatagaaaagtttaattgctatacatcggtgtttgatcttcactgaccagtataaacaaatttccatcctttttttttttccacctccaacaaccaaccagaatgtctgccatccgtctctctcaactcgttctcatgacaccttatttcttcctcttaattaagcttatgtaaaaccatcatcaatttgttcgtccattcatc

SEQ ID NO: 30368 - DNA, 287 bp, Oryza sativa
  Clone ID: uC-osflM202068d01a1
atccggctcaagtatatgatactttcgcatttaaataactgtgctgtatacatctcattgtgtacataaataactcctatgtgttgtttagctaccaggacttgtgtagaatatactatgttgacttcttaggtatttctcgtgctttggcccagagaaaaaggtagagcccgacaatcaccaatgctgtgcctagaagactgcacattgagaataggagaacaattacatctattgctgccaatggtcaaaaaataaactgtactgcaaatacacttcatatagtt

SEQ ID NO: 30369 - DNA, 124 bp, Oryza sativa
  Clone ID: uC-osflM202068d02a1
tttgggttttttttatttatttgtttaaatttttttttttttggtttttttttttttttttgtttctttttttttttttatttactttttttttttatttctatattttttttttcttttttta

SEQ ID NO: 30370 - DNA, 290 bp, Oryza sativa
  Clone ID: uC-osflM202068d03a1
aatcacaaaccacgagttgtccaaagttcagacagttgatttatctacagaagtgctatagatatgcccaatacttttatgaaattagcgacagtcacatatactgtagtaagttcagagacaacggggatgtgtaccgtagctttcatcctccattggtttatctcagcgaagggattaaccacatgtacctctgtccttccggcctgcgccggacagcgtgaggctctggatgaccgtgggcatgggcgggctcaagagcttcgacgagctccttcgtcctgttctcc

SEQ ID NO: 30371 - DNA, 293 bp, Oryza sativa
  Clone ID: uC-osflM202068d04a1
ttttgtttgcataaactgaatgaagaagtgaacaaacacaaggaactttggtacaacaacttattctacatttctgctccttcatatgggtatatgtctactatctgcaatacaggtatcagagggcagcagcagtacatctgctcacaagccctgaaaacaggttgacaaatctatatgtatgtaaatatgcatacatgatacacatgtatatgcacttattggacagctgtatctttctatcaactcaaccaaaaatgtgcatttccgcggctgatgatcatcctatctta

SEQ ID NO: 30372 - DNA, 293 bp, Oryza sativa
  Clone ID: uC-osflM202068d05a1
ttttgttttttttttttaacgcctcgcacgagacggtgcgaagttctattaatagagcaggaaaaaaattataagattacaaccctggatggtcgtaactaggaaaaaggaaaaaaaataccatcatccacacatcgacatcgccaacacacaaacccaggagaagactaacaccggaccggccgccgctaagcgtgaccgaccgccacttaaaccaacaaaaggacacagacgagatcgccccctaggggatgccaaaacgacgtcttcaagaagagaagcgaccaaaaacc

SEQ ID NO: 30373 - DNA, 204 bp, Oryza sativa
  Clone ID: uC-osflM202068d06a1
ttttgggttttttgtatttatgggttatccatcttttttttttttgcaacaattcatttttttttggtgcaagagaacaaacattatatttgccatcatgggacgaggaaaatttgccaggcacccaacaaagatgggagaacatagaggacaaagggacaacttataaggagaaggctaacgacgcaaggacacaaagaaacg

SEQ ID NO: 30374 - DNA, 291 bp, Oryza sativa
  Clone ID: uC-osflM202068d07a1
gataataatactattaaatgatatagcaaatggtttcgttgatatttggtggtaccaggttactcgttagctacacctcgcaagaaacccaaagctgcgcacttttgttaacaagcgttgcttaaaacgaaaaggtgccgcttcctgttgcttaaaacaaatgatatggagcgccacaaatcaccccgttgggaactcttcgctgcatacaaaacatgcacattcatcacctgaaatgttgccaactacagcatttgcttctcgtcagtactgtaggacctgacacttgta

SEQ ID NO: 30375 - DNA, 292 bp, Oryza sativa
  Clone ID: uC-osflM202068d08a1
caatgaaatatccttgctcatcctgcagccttaattatatatattacatatggtacatacactgggaagaaaaataaaaaaaaataactccttgattaattcccccatttggttcacgcacaccacccaacccaaaagcggccacgaacacaacaagatacattttgctactgctcctccgacctccaatcgttcgatccgagcccatgcacgcgcccgatcgatgcaacagctagcgatcaaacacgaagcgcgcatgcaagcgaaacccaactctgtgtgtcagatccat

SEQ ID NO: 30376 - DNA, 249 bp, Oryza sativa
  Clone ID: uC-osflM202068d09a1
aacaacgacaaggacaaaaaggtaatcatcaaatcacagacaaatcaattcaaattttaagaaaaggttgaaaccccaaaactttccaaaggatacggcgccttaaaaacttaaatcggctagggcttttggggggcaaacttgggcttgatcttggccacctcctcggcggcgatctggaagggcttggggaggacggggtcgggcacccccggggaggggggaaaaagggggggggcaaaggactgg

SEQ ID NO: 30377 - DNA, 268 bp, Oryza sativa
  Clone ID: uC-osflM202068d10a1
gatccgaatgaggccacataaatatctatatgagtctttcaaaccccatttagttttaaaaggggagattcatgagctagcaattatatatacatttctcaaaatcttacccctcaaaatttcacttgacatgctgatggctttgatcacatgcggacatgcccacatataacttaggtaatgaactcaaaatttgagacagaatacagatgaatgttttgtacatcgcacgggttgtgaaaagagggtgtagagagctataaaattc

SEQ ID NO: 30378 - DNA, 280 bp, Oryza sativa
  Clone ID: uC-osflM202068d11a1
agatgaagagatttaccaccagtaactaacatgcaacaatcatcatctcattgttcaagagttcaaacattatcgtcgtcatcatgggacgaggaaaatttgccagacacgcaccagagatgggagaacatctggactctggtctcttctaagtgaagctaacagtaaggctaaggtaacaactcccaagaggccaaagataagacaacagcaatcctgaaacaacatgagacccaaaaagaaacggtgcgggcgattcccaagcacaacgtacactggc

SEQ ID NO: 30379 - DNA, 308 bp, Oryza sativa
  Clone ID: uC-osflM202068d12a1
tcgaacagcaccagcggcgcagcagaaccccccttcgccgccgccgccgccacggccaccacctcctcctcgtccttcccgccccaatgcgccttcctcttctcctcctccgcctccttccccctgttcttgcggcaacgcagcaccccgcacgccacgcacccgacgagacagagcagcatggccacggacaccaccccgcacaccaccgcaaccgtgacgacgctcaaatgcttcctcctgctcctcgtccgcgtcctcctcgccggcgtcgcgggatcattctttccgccacttctatgtggatg

SEQ ID NO: 30380 - DNA, 293 bp, Oryza sativa
  Clone ID: uC-osflM202068e01a1
cgatcgcccaagctcttattaccaaaagtaatcccaaaaaagaaaacacttgagttacatcttacaacaatcccatattcccatcccatgatccaccagtgaacaacacaactttcactctgcaccatcatatcgtacacatcaagctgatcattaacagctaagtaattcgtgagaaacgcgtcctacaaattctcctccatcgatctttcttggtagagagaagaagaagaagaagagcacagcaaaatcctagacgaaaatcaatagcacatcactctcactcactgatc

SEQ ID NO: 30381 - DNA, 284 bp, Oryza sativa
  Clone ID: uC-osflM202068e02a1
aatgcaacattattgcattaatgcaatgagaccatcgaataatggaatcgatacaccgatttatcagtacacccattctcacacaataatttagagacaattccggagttctggaaacatggtaatttcgcttccaccagacaaaacgcaggacacgataagagctatacacaacgggctctcagattataggcctccaaagaggctataagggtcatccgtgctgggcaccgcagcaaggactgcagcaaagcacatcttgatgcaaaatatgttgacggcat

SEQ ID NO: 30382 - DNA, 292 bp, Oryza sativa
  Clone ID: uC-osflM202068e03a1
ataagaagcagctcttgttagatgaaattaggacttaccgttacaacatagcaactcactatcgagtaaactcgtaacagctgaaattagtccccggacacacgcaacaagtgaagaagaaaagaagaaaaaacagcaacatacttcgaaactgtcgaaagcattgtccactcttctccgcgcgcaagacggcagcttagctagtctgctcatttcatggcgcatgccaggtcaccagatcacctggcagtgtacaggggcttctcccacgagggcaggactcagtagatgt

SEQ ID NO: 30383 - DNA, 287 bp, Oryza sativa
  Clone ID: uC-osflM202068e04a1
tttttgtttttttttttttttttttttttttttttttttttttttttttttttttttttttttttttttttattttttttttatattttaattttttaatacatttttttattttttcaggggaaaaaaacaaaacaccgagggatcatttaaaaccacattgtgcaaaactaaaagtcagtagtagtcagtactagtactgaaaaacaggcacaaaaaaaacattgattgaatgaggccataaaaaacctacgagggagttaaactataccgattgaatggatcca

SEQ ID NO: 30384 - DNA, 85 bp, Oryza sativa
  Clone ID: uC-osflM202068e05a1
tttgtttttttaggttatctgtttttttttttttttttttagcccacttaaaatccatttccaaacccaattaacatcccacata

SEQ ID NO: 30385 - DNA, 236 bp, Oryza sativa
  Clone ID: uC-osflM202068e07a1
gaccaaagtcaaaacgacttataatatgtaatggaaatagcgcatagttaaaagttgctatattttaggatgaatgtagtactaagttacatgtaaattccacgctacattttacccgaggatcaagatgattctttgcataacagactgtcagtgcaagatacgtctgagagactaccaaagaccattttgcgacagggcaagattttttcagagttgatgtcccatcatgggga

SEQ ID NO: 30386 - DNA, 174 bp, Oryza sativa
  Clone ID: uC-osflM202068e08a1
cccttaacaaaaaaaacttatgggtatgaacttgcataggaaaacacgggttaacagggtataattaccccagaaataggagcagcacacaacatacggcttttaaaacagcattaaggtattgcacaacaccttgtggatcagataacaaggcttaaaaaacttagaccgaaa

SEQ ID NO: 30387 - DNA, 290 bp, Oryza sativa
  Clone ID: uC-osflM202068e09a1
gatgagtaattttgcatacatcgttgtacagattctgctgagaacaaaactcttacacattacaatctaaagatgaagcaccaatgcatataaaaaatgaaaataaagttttacataatgatcggaataatgtgtccatggtgatggtacaactatatttgatcatacaaatctaccagtcaaaagaagacattgtggcaataacattctccgctgaaaggttcacatctggagtactaattgcaatggacctttcatcgcttgagttgcctgaagctgaaagccattca

SEQ ID NO: 30388 - DNA, 283 bp, Oryza sativa
  Clone ID: uC-osflM202068e10a1
gttccaaaaagaatggcttgaattgatctgaatttatatgccaacaggctaattgcacaacaattcatcgtacaggctaaaaccgagaatacatttcctcaaggatacactgactaaactgattacaccgagggatcagacaactccacaatctgcagcctctcagtcagtagtagtcagtactagtactgaattacacacacagggcaaacattgctcgaatcagcccctagaaacctccgtggcagttaaactataccgattgaatggatccatccatcta

SEQ ID NO: 30389 - DNA, 254 bp, Oryza sativa
  Clone ID: uC-osflM202068e11a1
agcccacttaaaatccaatacaaaacccaattaacatccacatatctagcatcttacagcccaattaacaacattcagctcatatttaatacaaattcacaaaacaggctatcacaaattcagaaaaaaaaaagatcacatgttatcctcaagtaagttacatgacaagtcagttaattacatccacaaatcaccatccaaaacatgttcaattacatcacaggttcactgaccaggtcaatacatcactagta

SEQ ID NO: 30390 - DNA, 248 bp, Oryza sativa
  Clone ID: uC-osflM202068e12a1
gcagcgacgggtccacgatggcctcgatgtcgccgctctcgtagtgcgacttggcccagggcccgaggctggccatggcaccggcgccgggcgtgagcaggatgggcgggcggccggagatgagctcgagcaggatgatgccgaagctgtagaggtcgctcttgtgggtgagctgctgggagacgtagtagtgcgggtccaggtagccgagggtgccgcgcacgtgggtggtgatggttttggtggtg

SEQ ID NO: 30391 - DNA, 299 bp, Oryza sativa
  Clone ID: uC-osflM202068f01a1
cagcctgtgtgaatgcacgtgttggcaaatattgcaaacaaaactcatggaaggactacccaggaaaactgagatgtgtccttgtaacaacccaaaccactgccaataaatcaacgaaaatatacacttctgtaagtaatgacaccacacaactgaacaagagaaccttgacaagatgaactgcacaatgaagatgaaaaaaaaaaaacgtactgcactgggactttcacgaaggcttcaatcttcagattgagcatttggcttaatagatgcaccggcgtttgttgtaccggatgtac

SEQ ID NO: 30392 - DNA, 264 bp, Oryza sativa
  Clone ID: uC-osflM202068f02a1
gggctgggacaaaaattaaacacgatttatgaacttggtcgtaatacaaaaaggacagcagcctgggggctcctagatcctcaagcacaaggaacaaaagcacaaaccaaatgacaccttacaggtgggttgatctatgaatgacctaaaacggggtaaaatcagctttatatgccccaagataggggaggatcaccaactgggagtaaaggggaaacatgagtatgaaaaggagatgatcaggactatttggaccatgcaacc

SEQ ID NO: 30393 - DNA, 202 bp, Oryza sativa
  Clone ID: uC-osflM202068f03a1
tgggggcggcgggggtgtcggcgctgagggcgtcgtacgcggcggtggcgggggaggagagcgacgtggtggtggtgggcggcgggccgggagggtgcgtggcggcgatttaagccccgcacattgggattaccacaacacctgtgtctttgaaggagacaccgcacacgggtagcagcgataacttccacacctggctaga

SEQ ID NO: 30394 - DNA, 271 bp, Oryza sativa
  Clone ID: uC-osflM202068f04a1
cccgtgcatgcgaagagggttcatatgcatgttcagaagttcagcttgatactatcacacacagtacatactgcagatttgcagaacaatggacggttgacacagttcacatggagaacatcaggaccaaagctagcacaggcgttacataataacaccaccttataaagtgcacaatatagctccaccatcgcccaagcgacactatagtaggaactgtggagacatacgatccctaaactgctaaacaccacagaggaagaaagggatc

SEQ ID NO: 30395 - DNA, 280 bp, Oryza sativa
  Clone ID: uC-osflM202068f06a1
tttttgttttttttttttttttttttttttttttttgggaatttcacgccgcttgtattatggtacgtacaaaactacaaacaattgtaccaataattctgggctagtaaactgtaagcacaccatttggttccccatcccgcccttttttgggtacatacatatttgccgcctgactgacaaatataatcgctgctggtaagcacaaaaccacaaatgctatctatacaaagccactaagttactgggggaaaaaataatgtaacagccagcacacagc

SEQ ID NO: 30396 - DNA, 76 bp, Oryza sativa
  Clone ID: uC-osflM202068f07a1
aaacaatattttttttaatttttttttattttttttttttatttatatttttccaacaaaaaaccccaaaaataaa

SEQ ID NO: 30397 - DNA, 273 bp, Oryza sativa
  Clone ID: uC-osflM202068f08a1
aaaattgaacaaacgcgcatattataagtgacgaagcggtctcacataaaacagggcacacaggttacaacaacgagggttgtaagcccattaagccccaaacatcagatcaccacaagcaaatgtctcgaagacacacgcacacggcaacaggataactccacactggcagatcatgggatagcagcagttatcaatcaggccttgacacacagaacatcaagcccccagacgacgacgactcctctagtactcgtcaccatcatcgccatc

SEQ ID NO: 30398 - DNA, 148 bp, Oryza sativa
  Clone ID: uC-osflM202068f09a1
ttgtttttaaatgaaactggtgttaataataaaagtaattcccaaaaaaaaaacagttgagattcaatttacaacaataccatattacaattcaaagatccacccgtgaataccacaacttttattttaaagcaagatagtcggagga

SEQ ID NO: 30399 - DNA, 110 bp, Oryza sativa
  Clone ID: uC-osflM202068f11a1
ttgttttttgcacatataaatggatatatatatatgcatatatatagatatatatatgtctatatatacatatatatagctaggtccatacacaaattgatatacaccaa

SEQ ID NO: 30400 - DNA, 285 bp, Oryza sativa
  Clone ID: uC-osflM202068f12a1
tttgttttttttttttttttttttttttttttttttttttttttttttttttttttttttaataaaaattatttttttaaaaaaaaaaaatataaattaaaaaaaaaaaaaaaatttaaaaaaaaaaaaaaaaaaaaaaaattaaaaaaaaaaaaaaaaagaaaaaaaaaaaaaaaaaaaaaaaaaaaaacaaaaaaaaaaaaaaaccaaaaaaaaaaaaaaaaaaagggcccccaaaaaaaaaaataaaaacaaaaaaaaattttagaaggagggagtttcccc

SEQ ID NO: 30401 - DNA, 288 bp, Oryza sativa
  Clone ID: uC-osflM202068g01a1
ttggggtttttttattttttggggttttttttttttttttttttttttttttttttagaaaaggagcaaatctgaaatcggttgccctgaaaaagggatcaggggacaagaacttattccggggggaaaaaggctactacataacaggtttataccaacattcacgcactcaaaattccatgggaacataggagtaacaccacgactccagcggatagggattgccatgaaggcatgaaccggccatccatagagatatcactggtggcgctcaaggcttttcctccc

SEQ ID NO: 30402 - DNA, 300 bp, Oryza sativa
  Clone ID: uC-osflM202068g03a1
agaatgtgaacactataacttagacagcaaaaagatgatccaggttccacatccgttacatcacgacagagtaaaaatagtttctcagtagcacgcgaacataggattgttgatgtgaaacacatgcattcgacaaaagggaaatgaaatacgacaacgaaagcagttctcttagcagtagaccaactagaacatgtaagggtaacggcacaacacatgcggcggccaaaaatttagagcttgtcctcgaaatcggagaggggagtcatctgctccttgagacccttcctcttgcggata

SEQ ID NO: 30403 - DNA, 113 bp, Oryza sativa
  Clone ID: uC-osflM202068g05a1
ttttgttttttttgttgctttggtttaccatgggcgtaaggatgtcatggcaaagacagcaagacttggaagtttaaaacattgtcatatccaaaaccgcaaaaacgaaggtg

SEQ ID NO: 30404 - DNA, 293 bp, Oryza sativa
  Clone ID: uC-osflM202068g06a1
tttttgttgcaattgaatgtatcaatgaattagaatgaaccacaaggttaaagggcaactcgatttcatttacacaaatcttattgtttttctcttctcatttcacattcagaatgtctaccagctcaaagcttccgagtttatggaaacagagatgtttaaggccatgtgtgaatgtaagttttcagattacagggaaggagctgctgccaaatttcccagcagttaggcgttcaccttgtggagagtatactgcgaaacttcaagaatcaaagtatctgtgattgcgcatg

SEQ ID NO: 30405 - DNA, 300 bp, Oryza sativa
  Clone ID: uC-osflM202068g07a1
tttgtttttttttttttgacgggataatagactgacaaaagatccaatattgcatatttaaaaacaaacgggggtttacacgtcaaacgaaacacaatgtaaatagaatccagaatcctgcatttaaaagggttactcagccaagcatgagtaccaaacgacacacactaaatatccacttagaacatagtagcacaccacgactccagcggatagtgattggcatgaaggcatgaaccggccatccatagagatatcactgctttcgttcaaggcttttcctcccgttcacggttccac

SEQ ID NO: 30406 - DNA, 289 bp, Oryza sativa
  Clone ID: uC-osflM202068g08a1
gcagggagcataggcgacatgaatctcctattatacactcaaaaaacataaaagcccaagttctcgaaaaaggaaaaaagcagccgccaaaatggccgcgataagacgtcaaaatcaaaggcttatgttgtgtctcatgtctcccttcgggacctccggcgtggggcagcagctccatccttctcttcctcttccttctcgtcctccttgccaccgctgcttccagctgcttcggacttgggagactttggggtttttgacctcggttaccggcttcacaggagccgct

SEQ ID NO: 30407 - DNA, 162 bp, Oryza sativa
  Clone ID: uC-osflM202068g09a1
tgggtttaagctgccttatggatttgtgatgacaaattcagtatccttcatcacacaaagcttacggacattttgcactaaccaacaccacctcgccacaaacccattgagcactttgaaaagcagagttcaactaatgcgaaaaagaaaaccacgccccaa

SEQ ID NO: 30408 - DNA, 264 bp, Oryza sativa
  Clone ID: uC-osflM202068g10a1
gggcataatcattcttggatcgattgctaatcgagtaatttacagagggccacatcacacacaagccatattgttgggtacaacaagcatatgacacctactgattagccatcacacaaggggccatattgttgggtcgctagctatattggtggctccatggtatatacagaagttcacacaaatgaggtctgcaaacctccggggcctttggtattcaattttacctgtatatagccggggatcaagcactgggtcctcctt

SEQ ID NO: 30409 - DNA, 261 bp, Oryza sativa
  Clone ID: uC-osflM202068g11a1
cggctcaaatttgcctctttagccagtctgtttttttattcgaatactcagtttccaaatccaatatgactcggggtcaggaaaagcttcatctggaatgatgacacaacgttggagcaggaaattggattgggtagggtttctctcttgatcctttctgtaaaaggggttggccacttcagcgatctggctcatgcgcatcgcattaaccgtccaacgggaatccctcaggaggattgaattttgcacccagattgctca

SEQ ID NO: 30410 - DNA, 288 bp, Oryza sativa
  Clone ID: uC-osflM202068g12a1
tttgtttttgctggtaacagaagggagttcaataacagcctacaaaattctgaaacgtaacaagcaactccgatatacaaattcgactgacatatcggggactcttgaccaaatgcgacaccattatttgtttgatcagatcagcacttgcacagtgatttacggatagacaaaattcaaagttgaccgcaaacataacttgatactgcaggcagtacatgcatttcacttccgaccaagagtggggaattgggattggtctttgatttctggagctggtggagctgc

SEQ ID NO: 30411 - DNA, 311 bp, Oryza sativa
  Clone ID: uC-osflM202068h03a1
tttggggttttagacaatttgcgtcaggtagcaaatatttgtcagccacaaatccaaacacttggtccttcctatcagaagatcagaatgaacaggttttcaaattcatctcccaacttgacgataatttacacgtacatttaacacattcttccacccttctcaaactcactcccttgttcttcccgggtaagattaaaattaacttgaggccgagccagcaacctctcggtggagagatgtttacaggctgggcggactatgggaggcgccggagatgacggtgagcagggatggtgccgaaggggtcc

SEQ ID NO: 30412 - DNA, 288 bp, Oryza sativa
  Clone ID: uC-osflM202068h04a1
tggggtttttttttaatttacgtgcgttttccccttccaagtttcacggaggtacgtaacgaagtgtacatatgcaattctcagtcgaaacactgaaatcacactcacacgtacggatgtcgatctgcctcgatgaagaaagacagaaaaaaatggtagtaacactataagctatatgtggttactaggagtactcattacagtatggctttactcgggtgtgtagctgagctgccacgttgaagatggatcagaattcagagctgctgctagtgatgtgcttgctag

SEQ ID NO: 30413 - DNA, 193 bp, Oryza sativa
  Clone ID: uC-osflM202068h05a1
ttggggttttttaataaattttgttttttttttttaaaaaaaattactagttgggctggtttacaaatggaacaaaaaattgaataggcactgtttaaattacactgacacaccctttgtaagtatgtttgaaatcactcgtttttcccataaaatggaaccgtataaactaacatagatttatacactaaaa

SEQ ID NO: 30414 - DNA, 80 bp, Oryza sativa
  Clone ID: uC-osflM202068h06a1
tttgggttttttttagtaaattcgggttattcccaaaacagcacgattggacacttattgggaacaaaacagacaaccag

SEQ ID NO: 30415 - DNA, 85 bp, Oryza sativa
  Clone ID: uC-osflM202068h07a1
tgggtttttttatttttttggtgatacaaattattaattttttatttagttattgttattctgtgttttggaaaataaaacaaaa

SEQ ID NO: 30416 - DNA, 293 bp, Oryza sativa
  Clone ID: uC-osflM202068h08a1
tgggtttgtagataatgggagaattttgacttgaactgaacagggttcaatgtacaagaacataaagcatcactgtactagcacaactcaagaagatcttcttctctctctctttttttttctttcatctcacggctacgaggaaaacgagaggcaatttaccgctgatttacaagtgattgctactacaaacaaactccaattcgagttgctctgaaacccttgctacacatactcctcaaaacactaaggtagaagctaagctatgaatctctttggccactcggaagatg

SEQ ID NO: 30417 - DNA, 234 bp, Oryza sativa
  Clone ID: uC-osflM202068h09a1
tgggtttttttttttttttttgttttttttttttttttttttttttttttttttttttttttttttttttttaaaaaaggtaaaatttgcccccaagaaggtctaaaaaaaagtttttttagggacaaaaattttagcccttggaagaaaaaaaaaggttgccaaaaaaaaaaaggaacctaaggggagggccaacaatgggtttcccccggaaggaaacaatccccttctttt

SEQ ID NO: 30418 - DNA, 294 bp, Oryza sativa
  Clone ID: uC-osflM202068h10a1
tttgtttacgttttaatttacatgcgttttccccttccaagtttcacggaggtacgtaacgaagtgtacatatgcaattctcagtcgaaacactgaaatcacactcacacgtacggatgtcgatctgcctcgatgaagaaagacagaaaaaaatggtagtaacactataagctatatgtggttactaggagtactcattacagtatggctttactcgggtgtgtagctgagctgccacgttgaagatggatcagaattcagagctgctgctagtgatgtgcttgctaggtgtcg

SEQ ID NO: 30419 - DNA, 283 bp, Oryza sativa
  Clone ID: uC-osflM202068h11a1
aaataagagataatatagccccagtttccagtatcctcactatagtgtcagtaggtacctggaaacactggccatctccatgacattttaaatatctttccagaaacctaacaaacatcaccacttcattatccccaacacacttttgatcctaattaaaacatgataagaccagactactacgcacttgacgctaggaaccttccacactagtaaaaagacagacaggaaggcctcaaagtaccagagcctgtacaaccactgctgctaaacccactagtct

SEQ ID NO: 30420 - DNA, 190 bp, Oryza sativa
  Clone ID: uC-osflM202071a02a1
cacgggaactttcagagcagcgcgactaaaggaagagaaaataatagaattacaaagcatttcaaaatgttcagggcattcgccatcattggacaaattccacgaggaaacagaacaaaaacagaaacatgagcacagtgttcatcccgcacattctcaaacattcttattggggagttaaaaccagatg

SEQ ID NO: 30421 - DNA, 68 bp, Oryza sativa
  Clone ID: uC-osflM202071a03a1
gggggaaaaaccaaattatttaaaaaagaaatttttggcccaaaagaaaatgttttataaaaaataaa

SEQ ID NO: 30422 - DNA, 253 bp, Oryza sativa
  Clone ID: uC-osflM202071a04a1
acgacaaaccacgaacttggatattaaaggtgccacaaagaaggttcacataaacaacacaggtcacagcagggaaagctacaagcaaaccctgcataatcgaaaagcaaatgtttttcaaaaccagacacacaaactgatagatagaagcccacacggacagatcataggatagcagcagtaatcaaggcattgccaagggcaccaggcaagaaccctgaacctttttaggactttggcacccttatcaccc

SEQ ID NO: 30423 - DNA, 62 bp, Oryza sativa
  Clone ID: uC-osflM202071a05a1
ggtgtggtaatgatcaaatgttttattgaaaatgttcattatggtatttattatataggggg

SEQ ID NO: 30424 - DNA, 169 bp, Oryza sativa
  Clone ID: uC-osflM202071a06a1
aacggggctagctatcattatgccgaagagtaatatcaaccgaacacccccaacatcacatggacccatctctggagctggtaaacaccagcatgacaacacggcagataagaatatctcgaaaaacacatacaagtcgcggtgaaaagctaaaaagggaccaactttg

SEQ ID NO: 30425 - DNA, 184 bp, Oryza sativa
  Clone ID: uC-osflM202071a07a1
acgactcaaacaaagctgccctgtagattctgcaaagagaggatatgggtctacagattttaccatcaccaaagtgaagagagtccacagaagaatcgagttacccaaaaccttgggcaaaacttatacaataaattacccccccggtattcacaactttttatagccctcttttttattttta

SEQ ID NO: 30426 - DNA, 199 bp, Oryza sativa
  Clone ID: uC-osflM202071a09a1
gttagtcctttttttttccacttgtcatttgcaaagtttctatcaacaaaagggtttaagcatagaagaaggggaaaaaaaacaatacgatatctgcagcatgtgatgtttcgcactattacccacttgagcgcaaagccaactttgagtttggccagcagttacattagaacagttgggtttgctttttatccgtcaa

SEQ ID NO: 30427 - DNA, 244 bp, Oryza sativa
  Clone ID: uC-osflM202071a10a1
ggaaacaaaacatttattcaactataatcttattcgtgagccagtgggacaagataggtcaacgacattttgaggaacagcctcgagggctctttgatgattccttcttgtggtatgatatgacatattgatttttccctaaatagattacatatacagccaaattaacaacagatgcgttgtacattcagacagtattcccttttataaatatattgccagtttggtgaaccgcaggccacaa

SEQ ID NO: 30428 - DNA, 231 bp, Oryza sativa
  Clone ID: uC-osflM202071a11a1
ggtgcgaaatgatcaaaagctatattgaaaatgttcatcatgtcatttataacaaggggggcagaaaggactttgcagccgggatatgtacaggtaatttccatcatcagagatggagtaaaaaagttgttagtagcaatgtctcaagagttaacggaccaaaatgaccctgtaatcagattgtccaattccaagatcatttccgagaaccagtttttttcattttgaaaa

SEQ ID NO: 30429 - DNA, 193 bp, Oryza sativa
  Clone ID: uC-osflM202071b01a1
agcagcgcatcagcagtttaccttgagtgatttcaaacagagctaatggaataaaaacagacatttaaaacacctccattgtcatctcaacataacataactagaagtagtaccttgagggatgtttacgttattacacccacattctatgaaaaatgaacacgaaagaaaaaggaaaaacccagttcatttg

SEQ ID NO: 30430 - DNA, 60 bp, Oryza sativa
  Clone ID: uC-osflM202071b02a1
cccaccaaaaaaaaaaaaaagaattaaaaaaaaaatttggggggaaaaaaaaaaggcccc

SEQ ID NO: 30431 - DNA, 244 bp, Oryza sativa
  Clone ID: uC-osflM202071b03a1
gagacgctgatcacctcacctgccgaggaatattagtatcatatgataaggcgaacttttttgctcctttagtgtgatataccaataccatgttggatacaggggttatagaaaactttacagatgtccatcagcagaccgaaccctcccccccccctccccaaacttataatcctttcatttttgcaggccgagatcaccctttgcacaaaaggggacactaatttgaataaatccctcccta

SEQ ID NO: 30432 - DNA, 317 bp, Oryza sativa
  unsure (1)..(317): unsure at all n locations
  Clone ID: uC-osflM202071b04a1
aggtgatcaagaaagtgattatatgtcaggcacagcacacaaataaacccaacatgactaacttctactgtccgtgaagttctaaccatttaagcaggggtaccaaatcatcatctgcagggagcataggcgacatgaatcttcctattatacacctcaaaaaacataaaangcccaangttctctgaaaaagggagaaaaagnncagccgccaaaaaatgtgccgcgataaggacnngtcaaaatcannnaggcttatgttgtgttctcatggtctccctttcgggaaacctcnncggcgttggggcagccagctc

SEQ ID NO: 30433 - DNA, 300 bp, Oryza sativa
  unsure (1)..(300): unsure at all n locations
  Clone ID: uC-osflM202071b05a1
agtaattaaaatttacttatgtttcttcttcttcttcacagttcacatggaaatcagaagtgaagtagcaaaaggaagagctgttctacactcgacagagtaacaaactaagagagcaacacaagtaacaagaggagagatttagctctctttttctggtgtttctgcaaataaaacttctccccttcttggctaccccctaaacccccaaancccaaggtagttaggtaaggttcacccccacttaaaatgtaaaccggcccattcttctttaccaaaaaatttggcctggtctccctt

SEQ ID NO: 30434 - DNA, 162 bp, Oryza sativa
  Clone ID: uC-osflM202071b06a1
gatgctgggatcttatattgctgcaccagatttacaagtgtagcatggtacattaacttactaaaaacactactaaaggtactcatctgggtgtgatcccaagcaacaactttaacactgaatgcaaatgaaatatactcactaaaattctgtcactttaca

SEQ ID NO: 30435 - DNA, 300 bp, Oryza sativa
  unsure (1)..(300): unsure at all n locations
  Clone ID: uC-osflM202071b08a1
ggtgttgaactttgcttataacgtttaatataatcatttgtgttccttcaaatcacgcttgcgccacgcaacatcaaaattaagcgttttgtgggagcatgtccacccacatctgaccgtggggaattattgctcaaaccctcacaantcttcacaaaatttacgngaaaccgnnaagtggttctattttcccatctnnagtagggctcccacttggtnnngcacggaattttggccttccggccattagacggccaggcagcaaccaaagcctccctccttcgaatcctaaagaagctg

SEQ ID NO: 30436 - DNA, 103 bp, Oryza sativa
  Clone ID: uC-osflM202071b09a1
gggacaaacagccttctgtcgaaattaaaagcatatgtctgcaggacataccaatggccttggttaaaacgaagcaagaagaacagccttaaccgcttaaggg

SEQ ID NO: 30437 - DNA, 204 bp, Oryza sativa
  Clone ID: uC-osflM202071b10a1
ttgtggccgccggccccggaggtggtcgccagggaggtggaggtggaggtgaaggcggacccggggccatcgggggtatctatggaggaggcgaaggcggaggaggtggaggaggagaaaggggagcggttgcctacggacgtggccgagaagctgtggctaatggtgtttcggcaaccaagccttgagaaaggaggttgttgg

SEQ ID NO: 30438 - DNA, 152 bp, Oryza sativa
  Clone ID: uC-osflM202071b11a1
agttaaaaaactgttgttaccatgaaaaaggtaaaacaccgggggtaccgaaaaaaaaaaaatccccccggaaaacaccccctaaaaaaagcacccagaaacatgaccccccggaaaaaaagctccacaacaccacacagggaggggaaaaa

SEQ ID NO: 30439 - DNA, 69 bp, Oryza sativa
  Clone ID: uC-osflM202071b12a1
aacaagtacgtgatagcaaattgcaaagttttatatatgcttctttactttgaacacttatctcctaga

SEQ ID NO: 30440 - DNA, 185 bp, Oryza sativa
  Clone ID: uC-osflM202071c01a1
aagaataagtatcatgaatatcattatatcagtcagattaattagctttgtcataacagaagctgcctgaaaggacagagcggtaatgccaatttggaaacacttgtaggttggaatttatggggtgctaaaagaccacgaccacaacatctaaacataatttacagtgacgtatcgacaccaaa

SEQ ID NO: 30441 - DNA, 351 bp, Oryza sativa
  Clone ID: uC-osflM202071c02a1
cacaatcgactggagcagcataagcttcttccacaatgccagtaaaagagaccggttttagtcctttttttttccacttgtcatttgcaaagtttctatcaacaaaagggtttaagcatagaagaaggggaaaaaaaacaatacgatatctgcagcatgtgatgtttcgcactatcacccactcgagcgcaaagccaacttgagtttggcagcagtacattagacagggggttgctttatcgtcaattcagttttcagatgcaacacgccgtcgaggaagaagaggctgtcgtcagccatgaacgtcgaccatggtatcgcaaagagattcctgtaaccaaccgccttccc

SEQ ID NO: 30442 - DNA, 265 bp, Oryza sativa
  Clone ID: uC-osflM202071c03a1
ccaaaggtaatcagacctatccatgtgaagcatagtgtatgtacaatcctgatagcagttaattacaccttaatgatgttaaaagtaaaccttggcacaagtttccctctgatccgtagcttcatacatcgctgtgatcagcggtcatcaccccttggcattcagcagcttgtttaccttcctgggccaggcaacattgcaaagaaaatctcctaaatgggtctttttttgggacagggaataaagcttttcccaacaaaatgcc

SEQ ID NO: 30443 - DNA, 169 bp, Oryza sativa
  Clone ID: uC-osflM202071c04a1
gacaatgaacaaggttttattgcacaccatggagccgattacattgacattcctgaacttgggtgcatactaaagcacattattatttgcaaatagatgagcatgccgcaggataaagcataattttgagattcaccgttatgagggattacaatgtaagtatgaggca

SEQ ID NO: 30444 - DNA, 228 bp, Oryza sativa
  unsure (1)..(228): unsure at all n locations
  Clone ID: uC-osflM202071c05a1
aaaatgatggctttataatattaatgtaatatcaaatctttgatagggcgcacagcatgcatcaaaagttctgaaattcgagaacgccctcattcgtggattgttttcctcttcatggctaggatttttccctaaccccagcctgccaaataagngccactacgagttatggaaccattcttctctttctaggggttgaagattggaatatttcttctttgccctaat

SEQ ID NO: 30445 - DNA, 292 bp, Oryza sativa
  unsure (1)..(292): unsure at all n locations
  Clone ID: uC-osflM202071c06a1
agaacagatataatttcatcaaagaaaaccaatacaacatataacaatattacaataataataaaaaaaatctccttttcccaaaaaaataaaataaaataaaaatctcccatttggggccacatgccatctctcctatatgggccctcattntcttgatccgaaataantcctcatanaaccattacttaattattttttccccttttttccccattacacccattgtaaattaattaatgttcaaatgggattttttctacggtaggcctttaaatgaatcaacccccat

SEQ ID NO: 30446 - DNA, 377 bp, Oryza sativa
  unsure (1)..(377): unsure at all n locations
  Clone ID: uC-osflM202071c07a1
agatggaaaaattactgtgtagtaatattgaatagtggaagaaattctacaattcgcctgaccaatcaataccaagcagtgggagaaaaggaagatcatacggtcaactataacaggtatatctcgcaccaatattaacaccccacaggttcacaccctcaacttctcgaacccgatgcttttaacnnacacgaattcccagattggattgtagatgaaaggaaccaaccataacccatgttaccagcaaaagtgtgaaatcggtatgggaaaaaaccacaacccttcatttgcattttacttaccttccttgattgcttagccaacccaaccaagtgacgccctttcttttcggaagggggtaggaaggtgacaac

SEQ ID NO: 30447 - DNA, 237 bp, Oryza sativa
  Clone ID: uC-osflM202071c08a1
gagtaagctgcggtttagacataaaaatcaggtggtacaggttttacacaactccactcctgcttctcagtcactacatcatcagatatccaatagtttttctcttcttttttttcttttttttttttgtctaacaagcaaggagccgacctgtaattttcttcctttcattggttgcaacactttgtcccgccaaaaaaaaccggtttgttgagccaaaaaaccaacaccatttga

SEQ ID NO: 30448 - DNA, 233 bp, Oryza sativa
  unsure (1)..(233): unsure at all n locations
  Clone ID: uC-osflM202071c09a1
aacggcaagaatattattcataaatgacgcatgatttttatcaaaacgctggcaaatgatatcatataacctgagtcaacaagacaaaactgtatctgccaaagcacacctgcccaacttcacccaattaccccattatttactgggcaaaatgcaaacgtgtttatccatctcctanccctatcaccagtgctcaacactcataagacaccgcacagacaagatacctcact

SEQ ID NO: 30449 - DNA, 155 bp, Oryza sativa
  Clone ID: uC-osflM202071c10a1
aaaaaaaaaggggaaaccccaaaaaaaagggcttttttttaaaaaaaaaccccccccaaaaaaaaatatggaaaaaaatatttggggatggaaatacaaaaaccaaatctgtgggggggaaaaaaaaggcttttaaagggggaggaaaatttttt

SEQ ID NO: 30450 - DNA, 151 bp, Oryza sativa
  Clone ID: uC-osflM202071c11a1
ccaaccaagccattgtacaacaatcgttttgcaacatatacttatacagaagaaattctccaagaaaatctgttcgagaaaaaagaaaccggaaggagttaaaagcacaaatgttaggccctgccccccagcgcatgacagcacgccccac

SEQ ID NO: 30451 - DNA, 177 bp, Oryza sativa
  Clone ID: uC-osflM202071c12a1
aatgtaaaggtaccattaacataggatccaaaaaaaagacgggaaaggaggtatttgttcatgttacatacaaagagtcacacagaaccaaagggttcagaaatgaggaagggggagggtgacttccgaacaattatctactactcatggttttagttcattttatattcaacatta

SEQ ID NO: 30452 - DNA, 347 bp, Oryza sativa
  unsure (1)..(347): unsure at all n locations
  Clone ID: uC-osflM202071d02a1
atcgctagaaaatggcaaattttccaatgctccttgttcactgtgccacaggatgacttatgcagctggagacaaaagctaaagaggaccagagaaaattctgggatcaaaacacaaggttggaacctggaactagaacaaaaatgggaaatcaagttagacaatgngagtcatcaaactcaaggggagcaaatcattgacaaaaatagttctaccatatttnntgctcatccccaanncaaaactatggccctttgnttaccacccaacgttcgcccggtttttagaaccaactttgaaagagggattaccatcccgtgggtgggcgaaagaaggggggccgaaaa

SEQ ID NO: 30453 - DNA, 164 bp, Oryza sativa
  Clone ID: uC-osflM202071d03a1
gcataagcttcataaggtttttaattaattattagcaagccatatagacactgagccacatactagagtaccaaatcataaacgaaggatgggagcagcaactgagcaaagcttcatccgggtcagacccattctgagaggcaacttcttaggcattttaacac

SEQ ID NO: 30454 - DNA, 177 bp, Oryza sativa
  Clone ID: uC-osflM202071d04a1
cactcgaagatttactcatgagtaaaacttttattgagagaaaatttcactctatggggacgaaataaatctgggacttttagttttcaattagtaatttttaggttttcactatgtattttcctgcatctgacacacgcaacaggtgtgacaccaacaccaagacacacatgccat

SEQ ID NO: 30455 - DNA, 163 bp, Oryza sativa
  Clone ID: uC-osflM202071d05a1
agaggagatcaaactgtgtttatagactgaactgaaacttgattatacagtttgccacgactcctaactcaagcccctatgacgcggatacatatgtgcaaaagttttgacacctgagaaaatgatctagtttccctacatggatagctagatagtagactat

SEQ ID NO: 30456 - DNA, 350 bp, Oryza sativa
  unsure (1)..(350): unsure at all n locations
  Clone ID: uC-osflM202071d06a1
aacatgccaaaagtccaagacagcaattcagagaagatttagctctaatggcagacaagagtcttacaactttagcataattccatcgagccatggcactcgatggatattggcattgagtcctatgataaaaagagcagncttcaaagcatgcgtaaaagttaagggtcctttcctttggttggacacagtcatacattgagtaacatggagaacccttcgcctgcttatttagccagcacaagggaaacctttactatttgagaataaattcaatcaacccaaaccaaaaacctggaaaaagttccggtgccagcggcgccaagcggaatttcattcccccagcaaaa

SEQ ID NO: 30457 - DNA, 416 bp, Oryza sativa
  unsure (1)..(416): unsure at all n locations
  Clone ID: uC-osflM202071d07a1
tccaagctgggcctcgcccacaccaccgccagcctcaaggacgccgccggccaagtccacctcgccggcttccccgcctccgccgccgccgcggccaaggacttcgccaacgacccgtccgacgtggcgctgttcctgcacacctccggcaccacgagccggcccaaggggcgtgnccgctcacgcanngcgcaacctgggcgnnncgtccgtcccagaacccatccgcgccgtggtaccgncctccaccgaaggcngganncgcgacggtgattcgttgcctcccgcttcntttccacgtccacggccctcctctgggcggcctncctcgccctccctggccgtccggccgcggtcccgtgaccgctccccggcggccgggggcgccttcttcgggcggtccacctttctggggc

SEQ ID NO: 30458 - DNA, 212 bp, Oryza sativa
  unsure (1)..(212): unsure at all n locations
  Clone ID: uC-osflM202071d08a1
aagaaaaccagaatgtataaagcatcaccaccagggcaggggttgccattgttattcacaaacaaaaacagagtttggcagtccaaaggcatacttttacaggttacatgacaacggcttatcagtactacaaatcactgtgtagnctgagcaaacttgctaacactctgttaaccttctgggtagctgctcacaaaaaaaactacctgaca

SEQ ID NO: 30459 - DNA, 264 bp, Oryza sativa
  Clone ID: uC-osflM202071d09a1
aaccaaaaaaatgagaaccatcagttgcttacagttctggtccgaccaacaaagatcgtggttgcattgtaaagatcataaatctgtttgcaccaattggggtcaaaacgggcatcagatgaagaaagcgatcagaatcttcctcttttatcacttctacagattgagttcaagctttctttgaccaaacgggagtccagcatttcagggtttattttgagcttattggatcccacccaaccattgggtgggaaccaaaggtaa

SEQ ID NO: 30460 - DNA, 343 bp, Oryza sativa
  unsure (1)..(343): unsure at all n locations
  Clone ID: uC-osflM202071d10a1
agaaaacagatcatcatgacgttggaaatagttatttacatggtgcattccatataaatggccgtatattgttctggatgcttgataaatcatcataggcagaagaactagattaactgtttgtctccatgtcgaatacccacttcaataanctggttggtttcacccccataacgtaccactaggtgaccaaccaagctaacttgnnatgcaaatttttcaggggcatttccctcagccttggactttcacccgtcttcgaatcgctttgggatttaatttcattctagttttgggcaccctggtgaccctcctttgacgaacctttccccgtcctttgaga

SEQ ID NO: 30461 - DNA, 196 bp, Oryza sativa
  Clone ID: uC-osflM202071d11a1
cttcaaaaacttttgtaaaaattcaccattttgaaggggcgtacactgatagaagaccaaaaatgaatggggaaaaaaatacaaatgttacacatctatggggccggccgaccaattccggcccaattaacacaacacaaagaacaaacggggcctccaaaacagaaatgtgatgtgggcccaatttaaatttggt

SEQ ID NO: 30462 - DNA, 139 bp, Oryza sativa
  Clone ID: uC-osflM202071d12a1
gccggaccagatcacccttttcatccgactcatctccttaatcaacagccacccgacgaatcacgaggcgcaaagttggactcggttgttggtacacagaaaggcagggctatatactcagaattgacactagaaaaca

SEQ ID NO: 30463 - DNA, 225 bp, Oryza sativa
  Clone ID: uC-osflM202071e01a1
gtccattaccagcgagtgcttaagcgaaaatggtaaggtccacatagcgtaatttagggcccgattgcccgtggcagcgaacccctgctggtgcacgcacgtcacaaaaaacactgcgactgattaaacggatatgctcagcatggcttatttggaaaggtggtataccttaaaaaagtgtggtgatgctgcctaaatcacagctcgactatacatacatattga

SEQ ID NO: 30464 - DNA, 361 bp, Oryza sativa
  Clone ID: uC-osflM202071e02a1
ccaaccaaaatgaggccgtgaaatatgcatactgatttcatctcaactgagatgagcagattacaccgccaaatcgccaatacaacccatccagcctctctgaagtttgagctatttacaggtgctccccccggtagcacaaccaagcatgcagctgtctgaccattttttcaggctacagctacctatgagaaaagcttttcaacccaccccccaaattatcaactttctcaatgtgcaaaagtttctttgtgaccatgcggtggactttcctcagcctcgcgcctttgtcctcgtgttcttgctcttgccagtgaatagagttgttggtcacttgtgaattggcatctatgctgttcac

SEQ ID NO: 30465 - DNA, 293 bp, Oryza sativa
  Clone ID: uC-osflM202071e03a1
aatacgttaaacatctaattagtattaagcatccgatcgatgtgacatgtactgaaaataccatccaaacagcctagacttttggacgagggagtactacgatgtacgctatgcagtcgctaacctgagtaaatgccttgatgctgttcccgactaaagtttgagcctcgaggcctagaaaatcattcggccgagtccgaaaggagccacgtcccacccatgttctccctgcccacaaaaccccgttttccccttcacgtttgcccttccgcctcaactgttgcttcgttcca

SEQ ID NO: 30466 - DNA, 357 bp, Oryza sativa
  Clone ID: uC-osflM202071e04a1
ctccttaatgaagaatttggactgaattcgaaataatttccacatgagcatgacgtagactacataaattttaaaggcctcctacaagaacgtcgcagaaatcaaccaacgcattatgcttctgtttggtggtaaagttctttcaaaagtaggatctgtttttttgacattaatctgaactgaactagacgtcaaaatcatgtggcatcggcggcgcgctcttctccatctggactgcggcggcggcgtctttcttctcgctcgttgctcgggcgtcgacgttcttgtcgccggatctatggtgcttgtcgccggcacgagccttcttcttcctgttcaggaagacatctgtcaaca

SEQ ID NO: 30467 - DNA, 143 bp, Oryza sativa
  Clone ID: uC-osflM202071e06a1
cataccaacagacactgtaggattatacaaaaaaacaacatcattgaggaatagccaatggatcccttaaataacacggcaacgaaacaagagtttagctgccatgcactcccattcagatacaacatgctcctcagcctata

SEQ ID NO: 30468 - DNA, 373 bp, Oryza sativa
  unsure (1)..(373): unsure at all n locations
  Clone ID: uC-osflM202071e07a1
aaaattaaaaaaaaatgcgcatacagcaatacaatatgactccgacatgatacgatgatagtaacagagggaaccatccaaataccaaaggtggcttccatatctctaaaaatgcagaaaaacattatatatatgttctagatatatatatatagcnnncagcatccagcgaatgagagagaattacttagattngggcaaataacataaggtaagaaaaagggagagggttccagggtaaggggcttcattctaactattatgttataagtggggggtggcagtgggtccatccattcaatcctcccttgggtcattaccagagggcaggccagggcaaattggtgggtggttctggctttcatgggggggg

SEQ ID NO: 30469 - DNA, 296 bp, Oryza sativa
  unsure (1)..(296): unsure at all n locations
  Clone ID: uC-osflM202071e08a1
agagcaccaaatcatccattcatttcattcgttttatctgcgatcatgctatagtaccaggatggtggatgagcagaaatcgacaaggaaaccatgtgtaatgctgcctctgccgctggaaatcttgttcaggatgtgcatgcactatgcagatggaccccgggcggttgtttctcaattcccgccccccagnaaggattcnttccctcggggtcggaccgccgagtaaggaccacaactcccccgggtgggaaagccatgatgccccgccggcttcatgttacccacccaatttg

SEQ ID NO: 30470 - DNA, 287 bp, Oryza sativa
  Clone ID: uC-osflM202071e09a1
ggcaacaatctgacagttttaccaacttctccaatactgaattattgtaaactctcatgtctgaacaaccgaagagtgcagagcgcgacatggtccaaccgcagcaagtgcaacagagggaaaatgttaactaagcatcatgtaccaaactacacattcaaagtgcaacaagcaccgaaaatgtccaattgtaaaagcttttcccagtcacccatttaaccgcctaaacctttctaccaaatattctttcagccaattgaccacccagggaccaattaaggtttttc

SEQ ID NO: 30471 - DNA, 80 bp, Oryza sativa
  Clone ID: uC-osflM202071e10a1
ggacaatataccgggcaaaaattgggattagcacaaatctggtgaaaggggccaattgaaaaaaagtggggggaacacgg

SEQ ID NO: 30472 - DNA, 368 bp, Oryza sativa
  Clone ID: uC-osflM202071e11a1
gggctccatgcaggttaaagctattggagatagagctgtagacaagtcttctgttagtttaatgccagacaaaccttttatttcaacaggttttttcctaggtcgccctctaccttttcttggagttgattccacaggattaacagttggcatgggataagctattgcaatgtcacatgaaacaactgctggactgacaatgaggatcaattaagagcaaacttcttgacttctgttcgttttgggatgaattcttccactttggcaattggcagtgggatatttttcttggtcctgcccccttggtcttttgacactttggttccaagtgattcatcagaaagttgggatggtcttttcttggtcta

SEQ ID NO: 30473 - DNA, 167 bp, Oryza sativa
  Clone ID: uC-osflM202071e12a1
ggtaataaaacaccgattcagctctagcagttacaatagaaaccatgttgtattcttgctactaacgcactagaaagtagcacatattttgtgtgcatttataggttatttcaacaccaaaatttacaccaacacacagtactcaaactagtgacacaaattgaaat

SEQ ID NO: 30474 - DNA, 158 bp, Oryza sativa
  Clone ID: uC-osflM202071f01a1
gcaggaaacttcatgtcatcataaacaagtattcttttgctggaaaaaaagaacattaaaggcccagattcttgggcatcaatgacattttcgacttgatatattgcaaatgtcgggaagcaaaaacagtgaccatcattcttccaaggaattatgaa

SEQ ID NO: 30475 - DNA, 90 bp, Oryza sativa
  Clone ID: uC-osflM202071f02a1
ttttttttttttttttattttttttttttttttttttttttttttttttttttatattttataatttatttttttttttaatttgttatt

SEQ ID NO: 30476 - DNA, 227 bp, Oryza sativa
  Clone ID: uC-osflM202071f05a1
acttaggatgctaaggaacttaagtatgaagtatcaacaaccccaaaacatcatataattacccttctgttggaaaactggaacccccactgggatgcagttcactgccacttaaatggagatcataacaaaaccttttgccaaatggtcacatatgatgaagatctcaatcacttttaccaaagggaacaacaccgaggtgccagatttctgcttaaacccaccca

SEQ ID NO: 30477 - DNA, 250 bp, Oryza sativa
  Clone ID: uC-osflM202071f06a1
ggttctgggggctcagattggggcttcgattcggctggagctgcagattcagcagatgatggagccttataatccttaaatttgccgatgtcttcctcttcttccacggttacggcaataattctcaccaactttaatttctttggcacccattctccatggaataacttttagccaaggggtagcctttccttccatgcccatttccatctcccaccttgtcgcctttttatccagtcctcttactttc

SEQ ID NO: 30478 - DNA, 133 bp, Oryza sativa
  Clone ID: uC-osflM202071f07a1
ggataattcgctacaaatatccccggagcttcctttgctttgatgggctcccactacatgccttggttggatgagccacaattcagggtccattcacatatgtgggctctagaaatttgaactaaatatttcg

SEQ ID NO: 30479 - DNA, 219 bp, Oryza sativa
  unsure (1)..(219): unsure at all n locations
  Clone ID: uC-osflM202071f08a1
attataaaatgacttgtattatattcccaacattaaagtttgatattcggatacattttgctcactgtggcagacaaagcagaccacctagagcccttttattcagaatatatgcaagataataaagaacattggtcatagcatatactagtactatatgaatangtctggctggccttgcttcaacaaagtaaccagagttgaatcgcttacttggag

SEQ ID NO: 30480 - DNA, 391 bp, Oryza sativa
  Clone ID: uC-osflM202071f09a1
gcaaaagcagttcacccaagataaattcaaattacttcagtgcatacataaggttgtgagatcgacaagcaaaaacatactggtaccaataaacagaagtattaaagaacccagcttgtgaacatcgaatgatggaattcagagtccgatctccctaatcagcatttgatctccctaattttgcctggcaaaacacaatctagcttggctccccggaccacaaccattttgctttccgtgataatctctcttctgcatggcttttcattaaactttccttccaatgcttgacttcccattttcgacccaggaattgcaccttttgccccgcatcccatctttcctatttgtcaggaaaccaaggcggctgactattcaaggtgttctgaag

SEQ ID NO: 30481 - DNA, 146 bp, Oryza sativa
  Clone ID: uC-osflM202071f10a1
attactactattgataagtttttttattttttcaagggaacaccaataatctttctaaagctcggaataagaagggcaaaaaactagaaaaggactaatggtcaccacacatgggttgaaacggaaattagaagtaacaagttcta

SEQ ID NO: 30482 - DNA, 221 bp, Oryza sativa
  Clone ID: uC-osflM202071f11a1
cattccgatagatagcaacaagcagttcaaacaccataaccaaagcgaactcaattcatggtaacatcacggacgaagaacacctaacactggatggatggatagagggccttcttcgacctcgagagagcaccacttggaccacgattaacgcacttcgacttcgatggatacagattgatttctgcaccaccggatagcttaaggaataacttggccca

SEQ ID NO: 30483 - DNA, 149 bp, Oryza sativa
  Clone ID: uC-osflM202071f12a1
aagcaagaaaagggttgctttttttccttttgctatacccatataaggccccttttgaaacacaagaagtttgtaacatgaatttcacagaaatccccgggggaaacaactcaactcaacctcccgcagaaaaatagccacaacatttt

SEQ ID NO: 30484 - DNA, 160 bp, Oryza sativa
  Clone ID: uC-osflM202071g01a1
ggggaaaaaaaacttcagggggaaataagcagaaaaaacactgaatgacagggggattcaggtatgttcactatgggcggttttttacacaaggaaaaaaaaatcaggttggcaccaaactggcaacaaaaaatggggagaaagaagaaaaccaaaaatt

SEQ ID NO: 30485 - DNA, 316 bp, Oryza sativa
  unsure (1)..(316): unsure at all n locations
  Clone ID: uC-osflM202071g02a1
cagaatatccagtattatgagaataatcacgcaaaattggcagacaatctggtacagtaatgcaaaaaacgtttaacttgtttgcaaaagcacaaaactgccaaagtacaaactgcctaacatcaatttcctctgttccagcgcagcatttatcacgcaaaaagaacataatacatccagcatcttcttttctttcccagattatacccagcatggagaacttttttataccccactttctnngcccccctttggcttacaangaaaagggtaggggaccgaaccaacgcaaacccacaatcttcacagcctttca

SEQ ID NO: 30486 - DNA, 211 bp, Oryza sativa
  Clone ID: uC-osflM202071g03a1
acatgaaacatgcaggtatcagatatttacattggaccgtctcctctcgaaagcatatgtacatggcgcacgcatgcaggtgcccgggtgtctgcacaaatatttttcacgcccacatggccgtacttcaccggcgtgccggtcggcttgatccaatggctcggcgtggcaagaaggttctgcaacggtagaaacttgggtggcccttcct

SEQ ID NO: 30487 - DNA, 340 bp, Oryza sativa
  Clone ID: uC-osflM202071g04a1
acaagttacagatctttcgatgtatatacatactatgatcctcgcctaatcttttcaatgggggcttcctcttcttactgtatagaagaatgaaataattggccgactagctgcgtttggtttccagttttttcagcatttacctatgagcccggctacgtttggggcaatatcttttttggccctgcaatgagaccggggaatcgccaatgtacattccgaacaggagccctgcaaaagtctttgcttttaacagccaccaatttgtctgccatcaattttctgttattagctgggccatcaaaagtttggcagaagtcgatctttgtacccgaaggaa

SEQ ID NO: 30488 - DNA, 277 bp, Oryza sativa
  Clone ID: uC-osflM202071g05a1
aaaggaaacggacccgaaaaaaggccaagaaaaaaccaaaaattaaatttaacccgaaaaacccacccaaatgaaaaaaaaccaaaaaaacccaaacccaaaaacaaacatgcaaaccgacaaaaattaccccaaggacctacggggggaaggggcccaaaagggacaaaaaccaccgaaatcttttttttttttaacctgggggggggtacaaaccattaaaaatgagaaaaagctaaaaatttttccagccaaaaaaaaaacgaaattggaaaaa

SEQ ID NO: 30489 - DNA, 55 bp, Oryza sativa
  Clone ID: uC-osflM202071g06a1
aaaagaaataccatatgccgttgtggatccccccatcttttatttccaaaatctc

SEQ ID NO: 30490 - DNA, 385 bp, Oryza sativa
  unsure (1)..(385): unsure at all n locations
  Clone ID: uC-osflM202071g07a1
ggaaaaatcgaagctgcctgatctaaattctaatagagttaaaagaagaacattagttacatctaagctgttacacgagctagcacgagatgagctatgtcgcccgactgttgtacagacactaggcaaaaccacagcgggctattataacttataatangatctctccctctacatacaacacgangagcaggtaggcgcacacgnctaaangtgcttaaaaactacangcagccgacgagcagggcaggggngggttttcgcttcaaggattgtntggtctcttgaagagggcgcctcccgcttggagggttggcctgctttctcctcgggccgtctcccgcggaccaccattctgggtcctgctgcatcaccaggccccggt

SEQ ID NO: 30491 - DNA, 166 bp, Oryza sativa
  Clone ID: uC-osflM202071g08a1
acaaaaatataatacgttttctttgtatcttttccattaactggttggatcattagttcatcaccagcaagggatacatcgatgggataatacgttttctgttctactttttacagaggttagctttacaagaactgcaccattctgtggtggttattgggttcag

SEQ ID NO: 30492 - DNA, 416 bp, Oryza sativa
  unsure (1)..(416): unsure at all n locations
  Clone ID: uC-osflM202071g09a1
ggcggcaggtgcggcggccgggccttgggcggcgccgccgccgctttcttggtcttggcacggatggcgtcgagggcctcgacgtacttctgcacccgcttctcctgcactcggcgctgctccttgacctcgccgtcggcggcgatggagtcgagcttgaccagctcattcatcagcgncctcggtgaggcgccaccacgntcggccgtcaacccaccccctccccgcccttggcctcaancgatcgccctccagcgcccgaccacctttggagagctgagcttggtcgaccgttcgaggggcgaaccgcgggagaacggactttggccggccgcgcctcgggccttgccaatggccgggcgcttccttcgagggagggcgccttgggccttgggcgcgtggggtcccctcgagga

SEQ ID NO: 30493 - DNA, 381 bp, Oryza sativa
  Clone ID: uC-osflM202071g10a1
gagaagcataagacaacttacaattagatatggagggtttaaatacagcgtcatcgatctgtaccaattgattttcttggaaccaatggttaagccaacccatcaataacaaataccaccaaattataaaccaggttagctttacaatattacaatcttggtccctgcgccctgggaagaggttgtccgatgcgcacgtaaattaccatcctccgagcccaagaaaaattagccattccttcttccaattccacttaaaccaaggcaaaaattcgggccttagagaggcttcgtccaatgtggaacccctcatcttaccttgccctaaatataccataacagaccaaccgggttttcaggcatccaatctaaagcccttat

SEQ ID NO: 30494 - DNA, 264 bp, Oryza sativa
  Clone ID: uC-osflM202071g11a1
gacaatgaacaaggttttattgcagtccatggcgccgattacattgacattcctgaacttgggtacatactaaagcacattattatctgcagatagatgagctgccgcaggataaagcatcttttggattaccgttatggggttacatgttaatttggagctgcacggttgcgaccaattgagtgtggcttgtgttcggctctggccggttggtgccctgttaacttcccgttgccaagagggggccccttcaaagggcagcag

SEQ ID NO: 30495 - DNA, 134 bp, Oryza sativa
  Clone ID: uC-osflM202071g12a1
caggactcccatgaggaaaatcatgattcgggcaaaagaatagcatcaactgatcaaccaaattttgactagaaataggcgtgacaccctattattgggcctggaaattacatatctagaagccaccacccaac

SEQ ID NO: 30496 - DNA, 112 bp, Oryza sativa
  Clone ID: uC-osflM202071h01a1
atgctgtaaacgcattggaagatttttgtgtatgaatcatacgttattaaatacatttacaggacacagcaacgccgggaacctctgctcagtggacaaaaagacgtgttgc

SEQ ID NO: 30497 - DNA, 232 bp, Oryza sativa
  Clone ID: uC-osflM202071h02a1
aggatgaactcttcgtatttttatattccattcttaaaaaacaattctgtaacactccagtaaaaagcataactttggggtaacattttacagtgtaaaggaaaaacagcatgcattacgtataccacatatttatccacgtcgggacaacttcactgagcaagtttatctggagccttggcatgaaaaaccagaagcctcttatgttactgcaaaatgttgcgccaattac

SEQ ID NO: 30498 - DNA, 170 bp, Oryza sativa
  Clone ID: uC-osflM202071h03a1
ttttttttttggagcgaaaatagacggccattgattagaactagaggatcacaaactacgtacatcgacaaaatccccgtatcatggaactatgcattttcgcatggaaaaagggacgtcccttcgaaaccattacaattttaaataacctgacacaaagaggctaggat

SEQ ID NO: 30499 - DNA, 357 bp, Oryza sativa
  Clone ID: uC-osflM202071h04a1
acatcaaaccataagcttttttatataagactagaaagtgcacatgtgttcctcagcatgatgtggagagtccagttcaccattattgaagttaaatacctagattacatcaaatgtacgcagatcaaagtggcctgttggaaatccaacggctgaacattgcaaaacatctctctggctggtactctggtgcagtatgtcctccgcccttcacagtagcgaacgtcacattgtttccatacgtcatggtgaatcctgcagactggccatcaagatgccaggccctccagtcatccacaatgtggtcgctgagtgatctcacccatgcttgggtactaagaaatggcagaacagcat

SEQ ID NO: 30500 - DNA, 139 bp, Oryza sativa
  Clone ID: uC-osflM202071h05a1
atgggtatatgttttctttaacaagatgaaaaaagagcagaacatcataaaagacgcaaaaaaaaaaaacgcaacaaagggaaacaaaaccaagacactcgatggaaaaaaaaaaggggcaaaaaggaaaacagaaacc

SEQ ID NO: 30501 - DNA, 356 bp, Oryza sativa
  Clone ID: uC-osflM202071h06a1
acaaggttacttgcttgggacaaaacagaatgaacagaatagaatgtatactttgccaagtcgtcccgattgcttgccttcctaattgacacaacccgcagtaccgcacacaagctgcaacctcaactagacactttatttatcaactaaataggcttaaacttagactgaaacttactatgtcctttcatcgattccaccgtgcaatgcagcagctgaaacatccaagacatacacataaatattaactgacacgagtagctatgggaatctgtcgttgcaaaaccatacagatttctccatgccatccacgctaacttgtacaaaccatttgacttgtaattgaaagaatgcgg

SEQ ID NO: 30502 - DNA, 170 bp, Oryza sativa
  Clone ID: uC-osflM202071h08a1
gccagtgcgaaacctgaagggagctgaagtttattactactacatgataacgtttcttcatcgaagccatttgtacatggatgggctggcacttctagctcgcagacaaagtaatcaccgacttactagcattattaacttaattaattatctaccacccatgcattggg

SEQ ID NO: 30503 - DNA, 356 bp, Oryza sativa
  Clone ID: uC-osflM202071h09a1
acaccaatcgaatcccagtgactttaattatcaccaaaatcaacatgaactgatcagttcttgtccagtaccgtttggacatgtatagaacaaccaatttgtcagtaacaagaaaaggtttacaaattcacggtttagaatttttttttcaccgctgcattcttatctacacctatctttgcagaacctgcaggcaatttgtacatatgtacttattataaatggaactcaaaatggttgagtttcaacgtgcaaacaacgaatttttcatattcgcactaactaatgcacagatcaccacggagatgtgcgatcgccaactaaaacgtccccaagcaagcgtcgttgtacacggc

SEQ ID NO: 30504 - DNA, 357 bp, Oryza sativa
  Clone ID: uC-osflM202071h10a1
ggcatcggcgccgtcgatgtcgccgtcgcgctcgatctgcgtcacctcgatgtcgtactgcgcgtacacggacacgaactcgccgatggccatgctgcacgcgccggccacgagcccggccagcccggacacgagcatggccttgttgttttcgttcacggcgccgatgccgatcatgagggacgccacggagacgagcccgtcgttggcgccgaggaccgcggcgcggagccactgcgcgcgggccatgtagttcacctcctcgccaccgtccccttcgccaccgccgccgccgtcgccgactcctctcgggacgacgtcggcctcggccgccttcaacgacgtgtagtgaggagc

SEQ ID NO: 30505 - DNA, 346 bp, Oryza sativa
  Clone ID: uC-osflM202071h11a1
atgaacgagctggcagaaagtaaatattttaacttaataacatccagagtacataacccattctcatgtcatcatgctaaagttgtttaatcataaaaaaacagctatgcgtctgcaaacataacataggagctctcagggaacaaaaaagggtagttctttcagtgtagaaccagcaacaaagaaagacttgctctaagctgaggcacccttgcccttcttcctctggagcttcttcatgtagaattccagctccttgccctcaaggatatagccatctgctcggccacactgcccagggcgggaagaaatgcaggccagcaacctcccactgccaaactggtct

SEQ ID NO: 30506 - DNA, 336 bp, Oryza sativa
  unsure (1)..(336): unsure at all n locations
  Clone ID: uC-osflM202073a01a1
aaaaaaggcatgacattagatgataactatataagataaagaaccgctcattttacataattactcttttcagcgatacctgaatgttattcttacatatttgtagtctagtgggtgcaacangtgcaaggcaattcctgcanctggatcaagttccgcagtattccaacagaccacagtcccacaacttgcctgactnntagaggtgcannnaccgttgcaagntccattctggggaaccccttccttgtgcccgtttaaggaacaccnnatcaccccttgttctgccaaaaaataccctggatttctttttcccaggggagcaattcctgataa

SEQ ID NO: 30507 - DNA, 309 bp, Oryza sativa
  Clone ID: uC-osflM202075a02a1
caaacaaacccataaattaacaggggggagaagcaaaacattttaggggagacccaacatcctttacaacattaacgggacagacttgtccggaaaaagaacatgggacctggggagccccaaagggaagggaaaaaagggcaaaaccaaaaaatggggcagttaaaatcttgatagggcccaggggggaaaaaaaactgtacccctaacgggggcaaattagttaaacacaccccccttgtccccagcaaaaatttcagaaaagggcataaaaccaaccatgcctcctgggttggaacccacaggttt

SEQ ID NO: 30508 - DNA, 365 bp, Oryza sativa
  Clone ID: uC-osflM202075a03a1
acactaagattcattcattcattcatttgatcaaagcaaacgagacgagctttcttcttgcgatcaaaaacacagatgggcaaccacacagttaacacaaactagatagttccacacaaaactaacgatgataacgatcggatgatgatgatggtagctcgattagatagatagataacttggccatgagggccccaccgctcagttcctccagttcccgtcggagttgccgccgccgcggctgccgtagccgccgccgtagccgccgccgtagccgccgccaccacggccgccaccgtagccaccgccaccgccgtagccgccttcacggcgctggccgtagccaccgtcgtcgtcaccaccac

SEQ ID NO: 30509 - DNA, 358 bp, Oryza sativa
  Clone ID: uC-osflM202075a04a1
aggttcaaatgcaacttattcataaagcatactgctgtcccacaggaaactgtttcataaaactaacatatcttactgtctcgatggtccattaaaccagacacaagtagacatcagcaccacaaatacttgacgaacagaggctcgggacgaccaggcacatcggcagctccaccaaactggctgattactgaccaccacggaggcggagcaccaggtggagggtggactccttctggatgttgtagtcggcgagggtgcgttcattctccagctgcttgccagcgaagatcagacactgctggtctgcgggaatcccctccttgtcctggatcttggccttcacattatcaatggt

SEQ ID NO: 30510 - DNA, 198 bp, Oryza sativa
  Clone ID: uC-osflM202075a05a1
cgaccaagaagggctgtaggaacccaaacggtaatataagcacccgaacgttgaacctttttcccgataaaagagggatcaggcgtgcaacaaactggctttcacgccagggaaaccactggttcaaaataaggcacgaaagaacaaacaaaacttttccttcggggcgaacctataccaacttgtgaggaaaaacac

SEQ ID NO: 30511 - DNA, 364 bp, Oryza sativa
  Clone ID: uC-osflM202075a06a1
acacaaactatatagagatgttgatttacatatgaaggtcgatagatacggtcaaagttccctgaagacaaaatcggaactcctctgcacacaacttaaaagaggagacctcaactcaaaatggaacatagatgaagacgccagaaaaggttccaaaagaaaatgcagggaaagacttcctctccacaccaccactaaaaactcatgtaaattgtctccttgctctcctctctttctctctctcccctcagcacagttactggaaactgctatacaacatggggttaatacattcttaaaaagtgaccaaaatctggaagctctcgctgcgcctttcacctttctcggccttcaggttaatatg

SEQ ID NO: 30512 - DNA, 351 bp, Oryza sativa
  Clone ID: uC-osflM202075a07a1
gagcaacaagaatattttcctttatttcatttgctggaagcacttattattctcttattaccagttaccgacagcaacatcatcctcagataaatccaggcaactatccaaattaagcctttccctcacagcaaaagagagaagaataaaaggccaaaacaaccgcagttcaaaatttcagcaagaatgtgcgtatctccatcggtccaagctcaacaacaagggcgtggctgtcaactgggccacccttcaatggtgcaggatcagttttgctctccccggttactctccaattgagcttcttcatctctgacttcttttggtttgcagataggctagtctcagtcaaat

SEQ ID NO: 30513 - DNA, 349 bp, Oryza sativa
  Clone ID: uC-osflM202075a08a1
agggtaaaaatcacacatgacagtttagcggccaatatgctcggaatttctgtctgagcctacttgggccttattgtaaccgagacaaccattattacaaaccacactatataaattcttgagaaaaaacagggaaagaaaaccaacagcaacaaaaaaataaaaaaaaaggcccagcgaaggagatgagtttctcttcaattccgctctactcttctcccttttattcttctccttgccctgcagctgccgctgaaagcatgaccgaatgagtgaagagatccggttcaagattggttcgtagcctcctcctcttcctcctctttggctaaatcattgtccggctaga

SEQ ID NO: 30514 - DNA, 378 bp, Oryza sativa
  Clone ID: uC-osflM202075a09a1
gatctataacggtcgtcctttttttctcttgttggtacaaacatcattcattcatactgtccaaatctttcaataccactataactggtgtacataaagaatctcatcagaagagcagctcaactgctcaataagcaggttcagagctaaatatcgatggtttacaaattccctttccagcttatacacataaggatctcatcaaatacttctgagctgctatctaaacgatgtcaaaggccagctgaggtaaaagcttgagatattaagtatcatgaagtctatgctcaaaatcctgtataagatctatcaactacataatactagcccacttgggcgcacaccaacctgcctatgtttttttagcacattggtcga

SEQ ID NO: 30515 - DNA, 355 bp, Oryza sativa
  Clone ID: uC-osflM202075a10a1
acaaggagctgcagcctttgattaattattataatgagcagatagtatatacaactcctctcaagactagctctatctctctctaaaccctcctaaccaaaagctcaaaagacaaaaatttgagatcaccatctcaagcacctatatgttagccacattgctctagatcttgcgatcttcctttttttttcccttcttccgtatgaaacaacaaaaaaatttctgactcctgtggttgccaacaaaatctgccaacctgttcatcacacgccccaattcgctttacactgtacaggaccggtgatcgtgtgttcagccgttgagcttcgccaagaactggttgagatcgtactcg

SEQ ID NO: 30516 - DNA, 349 bp, Oryza sativa
  Clone ID: uC-osflM202075a11a1
agcatagggattagcatagacgttcataaatggtcgaaaatgtttccaatttggaagcacagcagctttcctgctatgttctctttcagctatcaatacaaaacttatggttaatatagtcacctactctctttacacggcaaaattatttctatatgtgatgcaatatttttcatgattatttacataatggccacagccagcatcacagatatcagcggtcaggtctccacaattccaacatccgcagcaacagctagaggattcgcccatgtcacgattaacagcaaccgatgccactgcactgatgccttctaacacaatcgaatatacaactaacccagttccc

SEQ ID NO: 30517 - DNA, 265 bp, Oryza sativa
  Clone ID: uC-osflM202075a12a1
actccccaaccaagggggaaaataaagaacccccaaacagggccaatcatacaaaaaaccgcccggcagggggggggggggagggggggggagggttccggcccgaaaaggggggaaaaaaaacccgcagggggggggggggaggcaaggaccgcccttaggacgggcacaaccctgcccagggggggcccaaccttgggggtcggggtgagggaaaccaaggggaggggggccacccagttaaagggggggataaccccccccc

SEQ ID NO: 30518 - DNA, 305 bp, Oryza sativa
  Clone ID: uC-osflM202075b01a1
aaggaaaattggatttatcccaaccggattgggtctaaaagaggacagccaccaccggttcaccaggggggttaatcccgggcgaaaaactgaaattgggggaaaattcaccggttcggggggaaggcatgaccgctgtttggattatttttggccccctaaaaacagggttataacggttcttggagaagagttttctgacagacgggggattattacttgggccatcccccaagaacaccatccccattataatcatgggtgccagcattataatggaaatggtcgtttcgggcagttgcaaa

SEQ ID NO: 30519 - DNA, 387 bp, Oryza sativa
  Clone ID: uC-osflM202075b02a1
ggtggcggcggcggtggtgtcctgcatgctcttgtgcccccgtgacagccgcttcgtcgcctcgccgccgccgacgccgccgtggttcctgccgccgacattgaccctccttctagaatcttctcgaagcttggcgtccatctccttgttgggcgcgtacttgggcaagctcgatggctcgcaggcgtacggctccgtcctgaaatactcggaggcgagggcttcggtggcggtgccacgggcggagggctcgacggagaggagcttggagaggagcgcgaacgcgtcgtcgcccatcatgcccccgaacgtctccctgagccggctctcgtacggctgctgcggccggaacccggcgccgccgccgccgcccgccgccgcgcggcg

SEQ ID NO: 30520 - DNA, 371 bp, Oryza sativa
  Clone ID: uC-osflM202075b03a1
attaccaaaagtaatcccaaaaaagaaaacacttgagttacatcttacaacaatcccatattcccatcccatgatccaccagtgaacaacacaactttcactctgcaccatcatatcgtacacatcaagctgatcattaacagctaagtaattcgtgagaaacgcgtcctacaaattctcctccatcgatctttcttggtagagagaagaagaagaagaagagcacagcaaaatcctagacgaaaatcaatagcacatcactctcactcactgatcgtgatcggccaagccgacgagcttctcgctgagctcccagaccttcttggccttctccggatcggaggcctcctcggagagctggttctcgaacg

SEQ ID NO: 30521 - DNA, 349 bp, Oryza sativa
  Clone ID: uC-osflM202075b04a1
gcaaaccccaacttttttcagtttctgaattctggatggatcatatcagattcatcacagcatcgtacaatctgtgcaagcattggtacatcgagcgatggagagagagagtagtctacaatggcggctgggccattcacgagcccggcgtgaacttggtggcgtagacccaggcgttgttggcgacggggtcggcgaggtggtcgaacaggttcttcaaggggcccttgccggtgaccatggcctggacgaaaaaacccaacatggagaacatggcgaggcggccattcttgatctccttgaccttgagctcggcgaaagtgacggggtcgtcggcgaggcccagcgg

SEQ ID NO: 30522 - DNA, 157 bp, Oryza sativa
  Clone ID: uC-osflM202075b05a1
accccttcctaaaacttgggtaccctctagtttttcccgccttttttttttttttttttgggaaaaaataaatttaggtaatttttaagggggggaaaaatttgccaataaaggggtattttctccccgggggtgaataattatatttaaaagtaat

SEQ ID NO: 30523 - DNA, 61 bp, Oryza sativa
  Clone ID: uC-osflM202075b06a1
gatgcacggcctccgtcagcagggagcctccagagttggtcgccccccttttttttttttt

SEQ ID NO: 30524 - DNA, 274 bp, Oryza sativa
  Clone ID: uC-osflM202075b07a1
ggaaaaaagaaaatgtggataaaaaatcccaaatttttccgagaaaaaaaaaaagtttttaaaaaaaaaaaaaaatttaataaaaaaaaaaaaaagattaaaaaaaaaaaatttggcgaacaaaacaaacaaaaaaggggtaaaaaaaaaaatttcccacgcacccaaaaaaaacttggggggggaaaaaaaaacaccatataccaaaagaaaattaatagggtttaccaagggtgcaagcctaaaagggaacagaaaaaaattttcgcaaaaa

SEQ ID NO: 30525 - DNA, 298 bp, Oryza sativa
  Clone ID: uC-osflM202075b08a1
ggaaggcaaaggaaatttcccgcaaatacttattcatatgtttggacaacatttttcccgacccatgctcattggggcaaacccagctgaccccctagagcttttagttccccatttttttttaaaccaagcatacctcccaagatcaaaacacatgcttacaagcgaaaatcctaatagcctggctggctgtttcacagaataaccaaacgacaaccttaacaaataaaaatgccccggaatgaaaacaaagcagggaatcgtcaccaaaaggcccatttttctcataaaacactcc

SEQ ID NO: 30526 - DNA, 314 bp, Oryza sativa
  Clone ID: uC-osflM202075b09a1
aaggaaatccattcattttattatggaaaccccccgattaatattacaagatgacctccttagagaaacccacaacatccatcacacacttgatcaatgaacttattacaatactgaaatactgcatggaactaataaatgaagaaataaacatttcctttctgagaactaaacccaaaagctatggaatctcagcaatgatcatttagcactggggcaagtcccatgggggggggggtaacaatgtctcctgcgttggaccgttctgaaccttaaacaccatgccaagcccgaactttaaatgagcctcgaag

SEQ ID NO: 30527 - DNA, 300 bp, Oryza sativa
  Clone ID: uC-osflM202075b10a1
ggggggccgtgaaatatgcttccggatttcatctaaactgaaatgagcaaattacaccgccaaattgccaatacaacccatccagcctttttgaagtttgagctttttacaggggctcccccgggtggcaaaaccaaccttgcagttgtttaacctttttttaaggttaaagttccctttaaaaaaagtttttaaacccacccccaaaattttaaattttttaattggccaaaattttttttgtgaccatgcggggaactttttttaaaccttggcctttttgcctgggttttttttttt

SEQ ID NO: 30528 - DNA, 354 bp, Oryza sativa
  Clone ID: uC-osflM202075b11a1
aacaaacaaaacttattgttatagacttgtatagcaaaacaagagttcacagggtagtagtagtacagcagtagtagtagtacacaacataggctcttataacaggctcaggtctgcacaacaactcttgatagcttacaagcttcatcaactttgccgcagattgttttcactcacttgttacttacttagtagaacagttcactatcactgttttctgcttgctaatccttcttggtaggttgtacctccagattgggcaactttaagaactcagacgaaacgcacagttattcgcaagtgtaagtgcagagccatctcatttgcagcagagaacatcatgctgctagtaag

SEQ ID NO: 30529 - DNA, 276 bp, Oryza sativa
  Clone ID: uC-osflM202075b12a1
aaaaaaaaagagcttctggactgatccccaaaatttacaaaccgaaggggaaggggggcaaaaaaaaggctgtaaaacaacaatttttgccccaaaaaaaaagggggccctagaatttactttttcctaaccacagatggccccggtgccttcctgcttgggaaacaggggtcccaatttcccctcaaaatttaaaaggggggaaaccaaacacttagacggaaaagggaaccccccaaaaatttttgggggccccttggccatttgaaaaagggg

SEQ ID NO: 30530 - DNA, 358 bp, Oryza sativa
  Clone ID: uC-osflM202075c01a1
tttttttttttttttttttttttttttttttttttttttttttttttttttttttttttttttttttttttttttttttttttttttttttttttttttttttttttttttttttttttttttttttttttttaaaaaaaaaaaggggggggtttttcccccacgccaaaaaaagggtaaaaaaaaaaacccccaaaaaaaaggtgcaataaaaaacatttttaaaaaaaaaaatcccccaaaaaagaaaaaagagcccccccaaaaaaagccacccaaaaaaccttcccaaaaaaaagttttaaaaaaaaaggcaggccccaaaaaaacacggacaaaatgggcttaaagaggggag

SEQ ID NO: 30531 - DNA, 380 bp, Oryza sativa
  Clone ID: uC-osflM202075c02a1
tttttgtaatcgaacacaaaccactcgcaatgcagtgacctgtttgagcaattattgctgttccagaactcatcctcaacacatctctatcacactcaaattcacaggtccaaaaacgagacactcaaaacagagagatacggataccaggatatgacaggcttcagcttcactggctctcagatggttgcttggccactgaaagagggagaagacatgatggttagcatctctgtcacagaggccatggcgcttaacgctgccttcaggacatcctgggagcatccaggcttcacaatacttttgaccttctccaaatactcctgcaattgtttgatcctccccatgtagtctcgatcttcgacacacaatgaaatcgg

SEQ ID NO: 30532 - DNA, 371 bp, Oryza sativa
  Clone ID: uC-osflM202075c03a1
aacatgtaaaatctttggtattaatattcctctttgatgtgtcaactgtcaacaaacacctctttggattcaatgggattacaaatggtatatatatatatatatatatatagccaaaaggattgcatatgtagtgtgccaagaatatcaatttttatagaaacctatcatgtaaccctgaccttttggcctctacaaacaaaacagaattttcgacttgaatcgggctataagggtcactaaaagaatgatgaatcggtatcacaaaatatgagacctgcggttcgtagttcatactgtatgactatttgaatccaaaagcctgtctccttcagagggcatgtcagatgacatttccagactctgcttgg

SEQ ID NO: 30533 - DNA, 327 bp, Oryza sativa
  Clone ID: uC-osflM202075c04a1
aaaaagcactcatcactatatatttagctggagagataaaagtacttattattattacttaatcatgctctcgcctagctagtagtagtacccaagcacgcagcagctcaagcttagtagctggggatgtcgtggtggtggtggtcgtctgggtggtcgtcttcttcttcgtctccggcggcggcggcgatcagcgggggaaggcggcgatctcgacgcccttgttgccgagggaaggctggggtgggtcgtaggcgctgaaaaggcggtaggaggagatgagggagaggaggatgtagcaggcaacggaggcgaaggtgatggcca

SEQ ID NO: 30534 - DNA, 315 bp, Oryza sativa
  Clone ID: uC-osflM202075c05a1
ggttccctgtatactttatttcactctgtaaatctgattaccataatatgaatacttatcccaaatttacaaatgttttttctttgtgctatctctgccagtacaatagcaaggtaactgctgcctacacaactgaatgatcatgtttgagcttctcctcagtttctgcttatctacaagactagatgtgcttgaaagacctctaaatgtgaggactgaagcacttgaaattcagttaaaaataacacaattagttcctgttctgactgcaaatgtgttcacacactagagatcttgtgcataggccacctgata

SEQ ID NO: 30535 - DNA, 353 bp, Oryza sativa
  Clone ID: uC-osflM202075c06a1
actcatagaacagctcaaattgccaatcaacttggaagaacaataccgcttctagctaagctttgttttcttgtagtttgctacacagcactacagctacacagaattcagagagcaattggaagggagaatcacagaatgaactgatttccgtacgctcggtgaacggacaatcaaacgaatgcagcctacgagcgttgccaggtacaatcctctacaacttgtaataaatagatgccaatgttagattctactgcatcctgaatggctagtaacaagtgtaacaaacaccatctaaactggacctggcagccgcgggcacaaccgaatctaatgaattgctcagaaccgca

SEQ ID NO: 30536 - DNA, 372 bp, Oryza sativa
  Clone ID: uC-osflM202075c07a1
agcaatgtatactcgcattccacaacagtcgaagggcaataataagtcttaacatccaagtttaaaccgaacagaaaatagagttttaaatgactgacatagtgcacaaagcgagcagatattaacggtcaatgcaacaactgaaatgaccgtcgacaaaacttaacgagtactaaaagagctagatatctcaaatgcagatatggaaagcaccacttgaacgaggctcatttcttcttggcggcagccttggtcaccttggcaccggttgggtccttcttctccacgttcttgatgacgccaacagccaccgtttgcctcatgtcccgcacggcaaaacgaccaagaggagggtactcagagaaggtctcc

SEQ ID NO: 30537 - DNA, 372 bp, Oryza sativa
  Clone ID: uC-osflM202075c08a1
cacaacaccatatttcattgatcaggttcagaacctgcacagaaatacacactaccggtacagatctcaccttctctccaatactcgtacatccatccacgcggtccacacgaatacgtacatctatacggtacacgtacgtacatctactgcaccgcgtacacacacgcacactctcctgcagagacgcgcatcgtcgtcaacctagctagcttagctgaaggcgatgcgtcgccatggcagcacggcggcggcggcgctcacttgccggggacgaagttggtggcgtaggcccaggcgttgttgttgacggggtcggcgaggtggtcggcgaggttcttgagggggcccttgccggtgacgatggcctgt

SEQ ID NO: 30538 - DNA, 370 bp, Oryza sativa
  Clone ID: uC-osflM202075c09a1
gacgggaatcacagcctcacaggggggtgatggtttcatttccatgcaaaagcccaaacaaaccatccataaataacattagtcgcctcagtaactctcagagcatcagatttgatgatcatcacacccagggaggcccaaaaaacgaaacactggctactgtcaaaagggttcgatcagtcgtctaacgacaggtggtagcggagctagaacacgacctcatccacacaaagacatctacaaataacttaaggaagcgccagctcgagttcacgcaaaatgtacaccctgataatccaactgcgagatctgaaagttgcacgtcgccatggtcactgctgtgggggctgttgtgggggttgctgctgct

SEQ ID NO: 30539 - DNA, 297 bp, Oryza sativa
  Clone ID: uC-osflM202075c10a1
ccataatatgttttttttttttttttttttttttttttttttttaattttttttttttaacaaaattaaacaaaaagctaaaaaccccttttccaaacccaaaaacatgccgattttgtaaacccggacaaaacacggttacaggggaacattgaaaaaacttgaaggcattgtctaaaagaccataaaattcaattcgggaactccccccataaaaaccagcacaggctggcaagcattacaaaatttttcttaatctgggggattatgggcctaataaaaaatggaaagaaaggc

SEQ ID NO: 30540 - DNA, 336 bp, Oryza sativa
  Clone ID: uC-osflM202075c11a1
aaccccaaatgtcacgatcgcaactttattacactcttccatggtgatgtaattaggtaaagtgagagaaaatgaaaaaaaaacaaaacaaacaggggagatgattcgccggttagttgaccccgtaaatccacttctcttcgttgctggtgtaagagaccagctccctgggctcaaaccagagaccaatctcagcctttgcagtctctgggccatcgcttccatggatgatgttcctgccaacaacaacagcaaggtcacccctgatggttcctggttcagacttctgtgggtctgtagcaccaatcagttttctcccgtacttgataacaccct

SEQ ID NO: 30541 - DNA, 245 bp, Oryza sativa
  Clone ID: uC-osflM202075c12a1
gggggaaaaaaaagggttaaaaggggggtttttcccaaaaggggggggaattaaaaaaaaaaaaattcccccaaaaaaaggggtttaccgggattttaggggggggggaaaaaagggggccccccccaaaaataaaaaaaaaaaaaggtccccaaaatcgcggcccaaataaaaggggaaacattctggatcaaaaacaaaaaaagtttcggaaaaaaaggggggggcccccccttttccaaaaa

SEQ ID NO: 30542 - DNA, 358 bp, Oryza sativa
  Clone ID: uC-osflM202075d01a1
aatcacataatatcaatatcacacgttattaaagcatgaaagccccacatgatggagagattacaggtaacatggtcgtatttgtatatcagttcatggctgcatgcagattcatttcaatgcagtacaggcatggcacagagagagccatgagttcttacatttcctcttttcataatccactaatcgcattcgcatggcagtatttaattagtcaagcgagtccacatgtggcatacgtaggtgcgatttattattaattagcgcggttaattacttcattagtacttaatcagagcgaggtggagcagccggtggcgcaggacaagacgtcgttggtgcagccgatgacgcataa

SEQ ID NO: 30543 - DNA, 369 bp, Oryza sativa
  Clone ID: uC-osflM202075d02a1
caacatcaaaacttcttatatcacagacaataacaatacaatgaacattttcatgcggagtactaacctacaacacctctcagatcgaggacaaagcccagagagaggaaaccacccatcgtcttcgtcgcattagatacacacatttgcaataccggcaaaacaccgccaaacgggatgctcctggagcacaaatgtcgctcagcagtcgaagttggcgcagctgttggtggtggtggtctcggagctgccgatgaacgggtcgatcttgacccagaggagggagaagacggaggcgagcaggacagaccagagcacgacgatggtgggcgtccggttctggcgacccatgagacccttgaggaaggg

SEQ ID NO: 30544 - DNA, 370 bp, Oryza sativa
  Clone ID: uC-osflM202075d03a1
gcgtaaattaagctagcatgtatgtaggtaggtactgtagctatatactgtataagtgaagtagaagtatatgacatattatatagatagtggtagtacatgtatagagagagagagagagagacgatcgatatgattgattatgcggcggggcgttggtcatcgtcgtcgtcctccggcggctgcagcttctggggacgaggggcaggctcggaggaggcgccggcgacggtgaggtactcgagcgcggtgacgacgtcgctgatggcagggcgcatggtggcgtcctcctggaggcacatggcggcgatggcgagggcctggtagaggcccttggtggggtaggcgccgcggagcaaggggtcggcca

SEQ ID NO: 30545 - DNA, 285 bp, Oryza sativa
  Clone ID: uC-osflM202075d04a1
ccagcatccaatccgaggggtttcttttccacatattttttccaacatttcccaggaaggggttctccccaagggggccattaacccaatacacctttttgcaaaaaccaggaagcctttctggtaacaaagaggggttatgtcccctgcctccagggggaacccggaaggcatacccaacccttacagcctgccaggacctttgataggaaaaagcttaaaccgggaaacaggaagaaggggcccggcatatatccttgggctgcaaaccctaacacaattcct

SEQ ID NO: 30546 - DNA, 346 bp, Oryza sativa
  Clone ID: uC-osflM202075d05a1
gtaccgcaaatactatcttattgagagctgcatagatggaacaaatgtgctcatgtacactgggtataggattgggcacaaatatatatggatatccttattgcatccttatcctataaggattagtaacaccttgacatgcattccgtgcaacttccaatgcatcccttcaggaaactctgatgatcatgatgatctgtcttgctggcacatgaagagctaccctcccaagtgacttgacagccaaggtacattgcttgctgtcctccatgttttgttcaggagacatcttgatccatcatgcggcctgaacactcatggaaccggttggtacatccagcaaggc

SEQ ID NO: 30547 - DNA, 350 bp, Oryza sativa
  Clone ID: uC-osflM202075d06a1
ctaagttgtgatttcagtgtttccactttccagttcattctcaactagataagcacaatgacaacatgttagatacagccttgttaacctgacaaactgaagcttgggcttgggctctgaacattcagcaactttcaggtttatgtactactatgaaatatgccagtcaatgtatatacacatgtgaaaaagcatgaccaactgtacaaaatgtacaatctctgttgagtaaccagccaggttagtatagaagcaacactgcaacagtacttaaccactgcagaataaccatcgaagttaacaaggtgaaatttgcgctgccaaagggaggaaaagatggattcctccac

SEQ ID NO: 30548 - DNA, 373 bp, Oryza sativa
  Clone ID: uC-osflM202075d07a1
acttactacttgtatttatgtatttatgtatgtatatctcacaacggatacacgtcgaatctttattacttgtgtccttcaccggcagtcccctgatattcttcagcaagcagcagcagggaagcagtagcctcaggcgtcatccttgtctgcaaagatgtcaagaagggagagcgcctcggcgacgctgagctccagcctgaacttggggccgtcgtagtggtggaggatcggccggaaggcgtcctcctccagcgggtcatagatcttcctcgtcgcaaccttcacctgtgcagggaagcgcgactcgccggggcacttcttgtcctcccacgccgtcggatcgatgtttgttccgccaaagctcgcagcc

SEQ ID NO: 30549 - DNA, 369 bp, Oryza sativa
  Clone ID: uC-osflM202075d08a1
gagaagaaaacaaatgagcagtgatatctctgaactttcgcttacacatagatagcaagcagtctagtagtggaccaatccggccttctgcacgcatacagtcactcacacgctactacgctatctttacatggagaacatatacatatattgcgacatagaagtgcatatgacatataattagtgtgcacatgtgtgcatgctgctgctgcatgcagcgctagattattcgttcgcagcaggtagcgaagttgtgtgatcagttttgtcaggcgtggtccggctcaccaggaagagcagcgagaacatcaggaggagcagcgaatacatggcggtctatgtcgtcaggtggactagcgaacacttggt

SEQ ID NO: 30550 - DNA, 333 bp, Oryza sativa
  Clone ID: uC-osflM202075d09a1
aaaacaaatgagcagggatatctttgaactttcgcttacacatagatagcaagcagtctagtaggggaccaatccggccttttgcacgcatacagtcactcacacgctactacgctattttacatggggaacatatacatattttgggacatagaagggcatatgacatataattagggggcacatgggggcatgctgctgctgcatgcagcgctagattattcgttcgcagcaggtagcgaagttgggtgatcagttttgtcaggcggggtccggctcaccaggaagagcagcgagaacatcagggggggcagggaatacatggggggctat

SEQ ID NO: 30551 - DNA, 323 bp, Oryza sativa
  Clone ID: uC-osflM202075d10a1
gcatctcaaaaccggttttgcaaagatattttatagaaatcttacaatgtattcttcaaaataattggaggtaccaattcggtgttcattagcactatccacaacatttaaaggtgaaattaagtaaactgaacaacaaaaacagctgtttactcacaggctaaattgctatgaacctagaatatacagcattatcaaattattaataaaactcagccactatagtttggaataaaagaaaaaaaaaaatcatatataaacctaatatgaatggaaaaacaacgcataaatcttttcctctgtgcaccaaaggacagtccaat

SEQ ID NO: 30552 - DNA, 339 bp, Oryza sativa
  Clone ID: uC-osflM202075d11a1
gacttgcttaaatcgacctctgaactcatccaagatgtctggtctctagggtgggacactagatagaaagactagcatgatacaaacctagacaacactatacaagttttctcaaggattacaggaagttgttctgacagcttcattcgtctacacataatctacatgtcagttttggaagccttctcagaatcagctagcaggaaaaatgaaactagaagattaatcaagcacaagttcgtccaccattggtttacaacagattaaattatgcacagtcgctgatgaaggtgggaatttgcatgccatcgaccactcgtcatcaccagggaccagtca

SEQ ID NO: 30553 - DNA, 368 bp, Oryza sativa
  Clone ID: uC-osflM202075e01a1
ggtggccaatacatttgcaagcttgattgaacatttatgtagcgagcaaacagtggattgacaacattttgcaaagtaggtgggggtgctcaatcatagcggtcacacatggtgtccaaaccatttacactaattgcattaacacacgtacaaagacttgggcacaatcaaatagagtttatgtccctaggagattcggcgaacctaacataacaagacacctttttttttaactttcacaatagcaaaccatgttgtacagaccatagggtatactccatcttaaaactgttagacttcttggatttcagaaaattgcttacaggcattggatctgcatcttgcttttgactgtggggcagaaacca

SEQ ID NO: 30554 - DNA, 373 bp, Oryza sativa
  Clone ID: uC-osflM202075e02a1
gactgggaaaagaaaaataattttctacctgagaaatgctccctgcctggagtctgaatagatcaaacctcacacacgcatcaaaattctcaacccaacagaacatggataatttgtttcgagcacacaacacacagagaagctatccacagtgtattaactggtgaaaaactgaaaaatgctaccgtttgcgatggtttggtttttcagtgacttagctatgctcggatgagtgctggccgtttgctgacaggtccccttgtgattcttcagcattctggctcgaattagcctcttccatgggcttcatctctagcttcttcttctccttctggacgacttgcctaggcatcacctccaggatgaagcttcc

SEQ ID NO: 30555 - DNA, 373 bp, Oryza sativa
  Clone ID: uC-osflM202075e03a1
agtaaatcaaactgttgtttatcatagtaaatcttcccggagaatcagatgctcagaattcatagtgttcttcagcatcttacaacttacaagatggcgcagatatacaagcgcaactatcttaaagtaagctgtaggaggaaatggaaccatttctaacaacgggaaaaatataggttatagaaggaaaccatttgaacaaattaatagggaaataaattaggaggatcgtttccgtccgatctcaatagaactggacgtttgatacgtagatggcgtctggcatccagttgaccgggatgacgtctttggcgatgaggctcttgccggactcggtggtgacgcgaatggagaagggtgccttgagtggcgt

SEQ ID NO: 30556 - DNA, 346 bp, Oryza sativa
  Clone ID: uC-osflM202075e04a1
aatgctaaggaggacaacatatgatcatattctacagcttgcaaaagaggttacattgctgactatccaagaaaagaaattctcacagtgcaaatatataaaacattactagccttctcgtacatgcataaatacagaaagggcaaagtgaaagagctgagcggttaaatcatacacaattagttgatattaaggcgcaggagcgctgtaaattctgggcaagaacaagagcttatttcacttaaattggacaagagttctccaatcgtatgctggaaacatcataatagtatttgaccaacataacatacttccaaactgatagttgacagttcggagtatagct

SEQ ID NO: 30557 - DNA, 346 bp, Oryza sativa
  Clone ID: uC-osflM202075e05a1
ctctcaccaatcattaacagcaaaaattgtgatcaagcataagaggtatgtgacggatggtccggataatactcaaacttggaaacaagtacctggccttaatggcaaggataccaggccgagaagtataacgcctaacatccaacccgggaactcgaaccactcaagtcaaaccatacgagggaaaaagtgccatgttgccgataacctcatgcaagatcacacacaactgcaagctaaaaagatagctacgactgtaaattaggagataatggcgtcgcccagtgacagcgcagcaagttgactggtcggggtgttcgcattgtgctgctgggccacattgcgg

SEQ ID NO: 30558 - DNA, 319 bp, Oryza sativa
  Clone ID: uC-osflM202075e06a1
gcccaatcaattagcgcgtgcccaattgccatatgctaatctcttatcttacatctgaacatacggcttatcattgtcgccgtcgaacaccaagaggccgctaaacaaagaagtgtttacgaacagttttaacacgatcgagtttgggtcaacaccaaaaaggaaaattaagcatcatacccattgtgttcacaacgttgacacatagcagggctccctgctcaccatcccttcaaattaatttcaccattttaggtgcatgtaataccatgccatgaaacagcagcaagcaattcctctggagtgtgtgtgtgtgtgt

SEQ ID NO: 30559 - DNA, 267 bp, Oryza sativa
  unsure (1)..(267): unsure at all n locations
  Clone ID: uC-osflM202075e08a1
gggggggaatttcattcgatagcaaagcatgcaaatcagcccccaatttcaaacaaaaggggtttgatcccccccaaatgataagccggtctttttttcccgcccaaaaaccaaatttaaatttagcccctgatagcatccactagctggtggatttaacaaaacagatccttttgtcccggnnnttnantttttcttttccttttttggcttagaagcccttttttggggggccccaaaaaggcgctgggtcatcctctcaaaacg

SEQ ID NO: 30560 - DNA, 334 bp, Oryza sativa
  Clone ID: uC-osflM202075e09a1
cggcgacgaacgccgcggagcctatcgctcctgtatcttggctttattactcactgaaagttcacacggcactcactaaatacgagcctacacagccagttttatacccacggggacgcagcgcccacgcacccacttagcgagcttcacgcgcacgtacgcatggcagcctggacgacctggtttcacgcgttcgtgagccacatactcctccacatgaacgggcctccatccttctcgcatggcgtgctcctgcatgcgctcaaccgccaggacttggcctctggactcacatacattgaacacacacacacaacgtgtacagcaccaccac

SEQ ID NO: 30561 - DNA, 292 bp, Oryza sativa
  Clone ID: uC-osflM202075e10a1
attaaggggcatatcaaattataatctgtcttgggtatgccccgttcttataaaatgccccttttttttgggggggtggtttaccccctgatctggagtagtagtatcccggaagaacaaatagctgctgccccctacgttcatgacaaaacagatcagatttcaaaaccccaaaaaactggcaggcccccccctcattgggctaccccctcggcccctctctctctttaaccctctgcacaattatgccctgtattcggctccacaatcgccttttatatccctaagattt

SEQ ID NO: 30562 - DNA, 297 bp, Oryza sativa
  Clone ID: uC-osflM202075e11a1
aatagtaactatgatcttcaaattcacaaattctccatatgaatattacatacatgcagaatgggaaggaaaattaaccaaacttggaagccccagcgggaagcaacatatgggggacatagttcaaaggaatggggaccatttgcatggatacatagtacataatagggcagtagaatctatccacgaggcgaaatgcaggatgcgaaggctgaattcgttgatctaatgctggacagaggcggccattttggacgcgtttttacactttagggccaccttgggcgcgccgccgtc

SEQ ID NO: 30563 - DNA, 284 bp, Oryza sativa
  Clone ID: uC-osflM202075e12a1
aaataaaagggcagagccctccatttccattaaaaaaacccatgagtttttacaaaaaaggagttttggaaaacccgagaggaaaaacccccaggggctcacaaaaaaaacagagacaaaatgaaatccagctagcacaggccttaaagttttatgcaggccttaaagttttatgctatctttccataactcaactaatttttctccaaataaccattgggtcctcaactaccagtttatcaacagcctcaataaagcagccaagggtgacccctataaaacta

SEQ ID NO: 30564 - DNA, 371 bp, Oryza sativa
  Clone ID: uC-osflM202075f01a1
gcagaacaacatgccaaagatgaaactcagaactcttttgtccattgcagagtcagctaaaatgtttgcagttcagtctgctgaaaactaaccactcttttacatgtaaagtagcactcactatatctgcagctatgcacaggaaacaaacattcagaacatcttctaagattctacctgaacacaaattccacgagcaagattagcggcaaccgacaaacgaaagaattttcagaacgagacatcagacatgaacgccattctttccccgcaaaaattttaagaaaaatgccattcttgatgcagctagtgattagctctcggaggacatgatctccagctcagcccaccacagcggcgacaccttcgga

SEQ ID NO: 30565 - DNA, 357 bp, Oryza sativa
  Clone ID: uC-osflM202075f02a1
catagaaccccaaagcattcatgagttgatccgtaattccgtatgctggaaaaacattcatgagactgcataacaatgccaagagtgttttgttgctgaattacactatggactaaaaaggacagatccttatacagaaagtagccatggccagtctttgatcaaaggagatgatgaacaatgttttaaaaaccatggcagatgaaattactcagatactatatctcttcttgccaacagaacatctctctttctgatacggggaccacatagcataatccagctaaaacttattctgatactttgcaactgaatcatcaaccttgagcaactgggcagaacccatgcataattgca

SEQ ID NO: 30566 - DNA, 374 bp, Oryza sativa
  Clone ID: uC-osflM202075f03a1
ggtcaggggagccgcagtaccttcaggcttcagttgacacaagatgtgcaagtttacacactatgaatgctagaattaacacaggaaagatgaagctttaaacacaggtaggttaatcaacagttacagtttaaaattaaattagagacaagcttacaaactagaaaagctagggcaagataatatctaagagatcatgacatccggagattgacaactccactctaacacagttcgacacaacttcttgttactcatgcccgggtcctcttgttggtgcagtccgggcacttgtactgcttgatatgctcggcacgagcgggtgtgatcttgacgcacttcccatgataccacttctcgcagttatcgcaaca

SEQ ID NO: 30567 - DNA, 291 bp, Oryza sativa
  Clone ID: uC-osflM202075f04a1
ccagcaacagatatgtttacttaagaattaagatcttcatttcataaaaacatccagggactgagtactggattacacgattgagttgttcagggtccaaaaaggaaaaacatcttggggcctagggatcgagggaatcgacagatgcgcatcaagatggggagcgggaagcagggcattacagattggggggaatgtcgtaggccgcacaagggcggcccgggaataaagacctgccgttgaagggggacgccctgaagatcacctggggggtgagggcaacaagaccat

SEQ ID NO: 30568 - DNA, 336 bp, Oryza sativa
  Clone ID: uC-osflM202075f05a1
atctgaagagacacttaagattgaaatcttgtacattagtttctggtacacagccacagaaacctccttttggtttcacatgcagccagtgtaaggtatgatgtaattctatgaacaaagtatacttggggcgaacactctgtcttcgcctccagtcttcggacattgtaaggtaaacatctctctacttatcttgtttcatagagtcttgatctcatgcttcaagccgtagtcaattctctaatgagtaaaattcttctgcatcttcatacacacaaggatgggtggacagtggaacaggaggtaactcttctctcctttctggcagaaaccaag

SEQ ID NO: 30569 - DNA, 350 bp, Oryza sativa
  Clone ID: uC-osflM202075f06a1
tttttttttttttttttttttttttttttttttttttttttttttttttttttttttttttttttttttttttttttttttggggaaaaattggcccaaaataaaaaaaaaaaaaaacgggggaaaaaacctttcccattgggaaaaggggcaagggtggaaggtttttaccccttgggagggtccaggccaaaaagggaaagttttttaaacctttcaaggggttggggctaaggcctagcacattgggtttaaaaaaaaccaccccttaaaggggggaaaaagtgggggaaagaccccccttggggggaaaaggcctccgaaattttgtcgggggaaaggggttaacc

SEQ ID NO: 30570 - DNA, 282 bp, Oryza sativa
  Clone ID: uC-osflM202075f07a1
aaaaattaaataaaaaaaaaaaaaaaaaaaaaaaaaaaaaaaaaaaaaaaaaaaaaaaaaaaaaaaaaaaaaaaaaaaagaaaaaaaaaaaaaaaaagaaaaaaaaaaaaatgggaaaaaaaaattattagcgcaaagtgtacaagggggaaaaaaatgggaaaaaaaaaaaattccacaaatctaattgaaaagcaaacggggaaaaaggccaaaagaaaatgaaacacaaaaagcggccaaaatttgaaagtagaataaatgttgtcgccggaaataaaa

SEQ ID NO: 30571 - DNA, 371 bp, Oryza sativa
  Clone ID: uC-osflM202075f08a1
gaaagcaaaagcaagcaacttaattaattaatataattttctccgtactccactagattgtgtgtgcaatgaggtgttgggcaccaccattaaacccgatttatgcaatgacctcctcacaacctaatcacccactaagagcacaagattagtgcttaatcagatgattaaatttaagctaagccatctctgacgtagggagtcgaggtggctcgcctgctcctcacgaatctcgaggccgtcaagagggctgcacgaatcacgacgcgcccttcgtcttgctttgcatggcgcgcgcgatggcggtggcgatggattgatcggtgcatcgccggcgagccggcgagtaggtggtggtggtggtcatagcc

SEQ ID NO: 30572 - DNA, 358 bp, Oryza sativa
  Clone ID: uC-osflM202075f09a1
cacaaaattcatagcacatacaatatcatgattaataagtaacataagcatgtcatttgatgaagacaggaatgttgaataaaaagtggtaaatagtttcagttaacttgcagctcgctagggctgtactaaaatgaaactaagttcagcagggaaaacattatgcttgaaaatcgaatgcaagtctgctgtacctgcactacaaacaccattctttggcattctggaacatgcgcagccagggactgggaccacacttttcaagctgccattccttgggataccatggatattgccacatcatgaagcaacgctctgggtgtggcatcatagcaagatgtcttccatcaggggagca

SEQ ID NO: 30573 - DNA, 332 bp, Oryza sativa
  Clone ID: uC-osflM202075f10a1
gacagcaactcaataatctttcgatatttcaccgagggtaatgtatggtaggaaaatcgccagacataacagagccggccagactcaactcaaactcaaccctatgatggtaaactgtttgcgattaacgcctccgcctatgacaatgtttggagataaacgcttccaccaaaaaacgaatgtcggggagtgttctcccctacaagaattattattgttttcaatgttaaaaaggcaaaattcaccagatcccgttagtgcaggaccaggaataaacacttgttcgtcatcattttctgccagtttaggcaccgcccgagccgtacttcttt

SEQ ID NO: 30574 - DNA, 307 bp, Oryza sativa
  Clone ID: uC-osflM202075f11a1
ggacccaagcttccttataatattatagctggcaaccagatcttacatatacatactcataagatctttgaacatgtaaatcatccatgaatcacctacaatgattcagcaaatgcagaacataaagaagaagaaagaacagaagagggggtaaaagaaaaccaaaaaaaaaataaaacccaagatttgcatttaaggtagccactcctgcaattcctttcatggcaagatcatccagcaaaacaagcaggcagggcattattaatcacggatccacatccctgcaccgggggatggtctcgcatcc

SEQ ID NO: 30575 - DNA, 328 bp, Oryza sativa
  Clone ID: uC-osflM202075f12a1
caaaccacatactcctattaatttagtgatagtttcctcatgctgacacgaattaatttatttattgcaaaatagtttcctttcctttttcttttccattttgttctcctggaagtcggagtaaataaaaagaaaaaaacaacaaaactatggtactgtaaaacgggctgtaagcctgtaacaactttaaaaggaacataaataaacttattacagaatatgccggctcaaccttgtttaactcaaagaaaatagcgtgccaaacacatcatattaaactttcggcattgttgtagtgttgtaaggagtggatggctcaacagcgagt

SEQ ID NO: 30576 - DNA, 376 bp, Oryza sativa
  Clone ID: uC-osflM202075g01a1
cgcagataacgactcattaacgcaaaactctgcctgctgggcaaaaatcgagcgattcataaggcgctgcgctgctcaaataatgatacaggaaaagctttttctacaataatgtacacgctaacgcaccaacagatggccaaaaaaaaaaaactatgtttttcgcttgagtgtcagctctacattgcatcggaacagggggttgaggaaacactcaacactgtacaccgaaccttgtttgtgcctgggcaaacgccaagaaaatcttctcatcgagttcaactgcgaaaggcatcagctgtttgatgtatgtagacatgccctttgaatctttcaacaaccaaatggcactgacttgtcattaactctactgctg

SEQ ID NO: 30577 - DNA, 376 bp, Oryza sativa
  Clone ID: uC-osflM202075g02a1
attcggaggcgtaccatggagataaaagtgcaggatttctcatataacaaggtcaatatgatgtttcttaactgcagagatgtccacggataggctccacggcgctaaactgacaagacaatagataaatttccagaaatggacacactccagaacttaaacatatccaggataattaggctattctggcaacagtttagtgtatatggcatggtttcatgctactgctgcagatttgaaggtcctttctgcattgcttctttctgttcagtttgcatagtcactcgtctcctgtcatagcgaggacgaggccggctccttacctgttgcctttcagtaaatcggaattgtggtctatgtatgacctgtccatcta

SEQ ID NO: 30578 - DNA, 375 bp, Oryza sativa
  Clone ID: uC-osflM202075g03a1
aatagcaatagtatatatttattattattatttgattgctgcagacgcgctggtcatgcactcatgcatgcctgcatggtgcataaacaactggacaagcatagccgcaccacgtagtggtaatagtcctataacaatatttgacatagtagtagtagtactgtagtagctgcgatgtcacaggcaggggccagccaacgcagagcagaaacgactcaacaagcgtcacgtcactagggagcaaataacacacagttccgactcgaaacacaaggtttccatgcagacgcgcccggccatgcttgcatgcccccgaggatcagctgcatcctcgaggtgctggcatggatggatgccaatgcaaggcaagatagg

SEQ ID NO: 30579 - DNA, 231 bp, Oryza sativa
  Clone ID: uC-osflM202075g04a1
aaaaggcttaaaaaaaaaggggggaaaaaaaaaagggggggaatttttaaaaagggaaaaactttaaaaaaaaagggggttttaaaaaaaaaaaggccctttaatggggaaaaaaaaattttaaaacgaagggggccgaaaaaaaaaaaaaaaaggttttttaattgaaaaaggggccaaggggggggggggcccaaccccaagggaaaacccatttgaccccggggggaa

SEQ ID NO: 30580 - DNA, 357 bp, Oryza sativa
  Clone ID: uC-osflM202075g05a1
acgccaaatgttgagtatgattaatgagctgtggactagtggaggcccccattatgtttcaccatcagacgggctaactcagtagatgtgcttacatatcatgttaacagtgttttaatctcaaaaacatatagtgcagtcgcttgataaacagctcggccagtcctcaatgtaaagcctagttccagatccgaacaaaatcgaacccttcagcttgaacttataccacagaagacccatcgaattattcgcagtacaacacttgagaaaatgcattagcattacttctagaccctggaggtctgtgcataacaatcgagctgatggaacaggttaagcattatacctttgatatat

SEQ ID NO: 30581 - DNA, 338 bp, Oryza sativa
  Clone ID: uC-osflM202075g06a1
attggttccggaaactcactttcattcctccgatcagcattattgccaactgcttacatgactgccacaaatgaaagaattacacacgatccgtatataccttaacaaaaaaatcgccatctgttgccttttgctctacaccagcgtgttgcacgtaccattggaggggttgcagagcgcgctaagcaggtattacctcccgggcgcgccattggcgttatatgcttgccccggtcgcctgatccaccttcagctcaccggcgaatccagggtacgcgccgcttccgaagactcccgggcccgccgagggggccttcagcggggcgtccctgctggcc

SEQ ID NO: 30582 - DNA, 374 bp, Oryza sativa
  Clone ID: uC-osflM202075g07a1
aaatacaaagaaatacataatctagtatgcatgtattcatcgtctgtacacttaatcatcctttcctgccatattgggatttacacttgtatttttctactttttagccactcaattaatcttgcctttcaagtttcaacaaagaaaataaaccagtcaactgtggaatgcagcatgcatggttagagctatgaaatttgtggagcagatgtctgtgttgtacacatcttgcttcttagctcttcaaacgccttcatgctttcctcgtcaaagcctccggcaaactgatgaactcggaaagcaaatctcacaccctgaagaagcaagaactctctgttgggctctttctcggtgccttgcaaggcatctagctc

SEQ ID NO: 30583 - DNA, 297 bp, Oryza sativa
  Clone ID: uC-osflM202075g08a1
cttaaacgtgggccccaaccccattcattaattgacccgccccggggcaatttcaggggattccacatcccaccatccccatgtccccccattcaagggaaacaaaggtttaaccctcagccctaaggttttgcccacaaaaacatttttttttcatcgaacccaaaacaaaaaaaaagcgtgggcccggaacaaaccccccccccgggggaaccggggggggaaaggaagtcccacatccccattgcagggggggctcgaaataccgggaggccccagggctggggccccgaaacg

SEQ ID NO: 30584 - DNA, 366 bp, Oryza sativa
  Clone ID: uC-osflM202075g09a1
ggctggaaatggatatattccccaagcgtgacaacaacttttgagtgccagtgtgtgtgtgttcccctcccctccctgcttaattacatcatctctaacgtaaatgattcgtgatcttcaacgggaggaaaatgacgctctcttcgacctccagagcggttttcctcccgagacaaaaagcacaaatccaaagctccccaaaaggctgtacaaaatggcaaaatgaagaaaaaaaaaagggagatcgaatgatcccacatcggaatccgacctcgaggcgacggtgtatatgagcgtctgaccgtgctagctccggagcgcgaccgtggcctcgtgcacgagcgagccggtggcctgcgcgacgcc

SEQ ID NO: 30585 - DNA, 330 bp, Oryza sativa
  Clone ID: uC-osflM202075g10a1
gccaagcaccagcaacgatggacatattagggtatggataaacgagtcataacagccgaagtaccaaaatatttttgccaaacaaagctcttctaatgtccttcagctatggcacaggaccaaagcctcacaagttcttttaggcttcttttttttcatgtacttctagatattgagcctactaaaggcacaattttacgaggctgcaagaactcctaagcttctaggcaggcaggcagcctccagtctggtggagcatggcgtcgatctcgtccccgtcttccatctcgagctcgtcaggggtctgctcgccacggagcctacgaccat

SEQ ID NO: 30586 - DNA, 357 bp, Oryza sativa
  Clone ID: uC-osflM202075g11a1
actacaagagattctaatattaagtggtaatagctagctaggtgtacagttaattgtgcaaaacatttaattagcaggagtccggatggattgcgcttgcgtggaagctgctactactagctagctagctaagagatgcgcatatggatcatggagtccatccatgaataaaagtatattagcaccatcgaattgatgagatggataaaagcctcatcgatcaatctgaaatataaaggtggaggaggagaagagatggcaataataatccaaagaggaagctgcagctggacggatgaggagagcgattagaggaggaggatttggcggtgtccgctggcgatgtgcccgtcgtgt

SEQ ID NO: 30587 - DNA, 346 bp, Oryza sativa
  Clone ID: uC-osflM202075g12a1
aaaggagtaaagatataagaaatgtggtgtacatatatatgctaccatgcaagatcaaacgttgttgtatgatatatatgcatgtctaactattacttacaacagatcacgagactagtaaggaggcactgatcagagcgacaagatttatttcccggtacctcctaaacaagatgagagcaaatgaccaagacgatactgatctcaaccttctagctagctagcttgctatagctttccggagagcttctgtaatcatccaggttcgacggcagcagatgaggcaaacttggcttgtatcttcagtccaaggagaccatccgatgttgatgcctgcaccgagagg

SEQ ID NO: 30588 - DNA, 384 bp, Oryza sativa
  Clone ID: uC-osflM202075h01a1
aactaatgtccaaactacttcgttattaaccaatacatgtttacaaggagtaaaaaaatacttcaacaatataatatcatccttaacattcataataaaaatgaaagctacattaaacaaggtgtccttcctagttaactatataagtgccatatatatactagacaaagacgataaaagaagtcattatcaacggaggaagtaaggagaagctgtgtgccttcgaattttggctcggagcaactccttgttagcaccaggaatcttgtcaatcttctccccatccttgacgaagaaaaatgttggcactatcccttcgatgtcataccagtccgtaacactctccagctcatcgctgtcgacattgaccttaatgaaaaccgt

SEQ ID NO: 30589 - DNA, 382 bp, Oryza sativa
  Clone ID: uC-osflM202075h02a1
cactggaacatgattatgacagtgatgcctatagtggagcattgcaacattaagatctatattgttttacaaggaggtttacactttcaccaaagaatatgatttagataaccatcttatcaaaatacaactggaaaataaatgagaatggtatgtgtacataaattgcacactgtgcaacattttttctttaccattcactaaccagcctacaagctggtgcagtttagagtgtgaaatattaggggagaaaaaaagagaattgcatcccactaataaaattatcccaaaagtgtatataacttggtcatctactcacaggacaattattgcagatggtttgcatgctaagaaaatatgggtcacatccaaacaattctgt

SEQ ID NO: 30590 - DNA, 345 bp, Oryza sativa
  Clone ID: uC-osflM202075h03a1
ggaagagacaatgtacacttctttttatcagcaatttgggtcaaaaaacaatgaaatttgcccttacaggaaggcttccaggatttccagcatatcaagatcactgcttatggttttgctagaaaataacaacaaacctttgaaaataaaaagagaaaaaaataacaaatgagtgactgtggaagcggtatcgcaccaagatcctataccactaactaaaaaaatcaatttatcgacgattcagcagaattattgatcagcaagctatatttagtttgacccatatccgcgtggatgtgacttttgccatctccaagcgactgacaggctctccttgaggtcggt

SEQ ID NO: 30591 - DNA, 360 bp, Oryza sativa
  Clone ID: uC-osflM202075h04a1
cctctaaaggctacaatgtaacagtatccatatctcaaatgaacaaccacaacagtaaccgaccagtttatgaaacaaactatcctgtaaagtttcttcttttttgttttccagcatctaccacaacagtgcgcaatgttctagagcaaattcttcacatctgccgccaacttgggactggaagagggatggcaagtatcatttgattgatcagcttagtcagcagtagagagccacagcagcagctccatggtttttattgcctactcttattggagctgctgcaatcagggcacttgtagtgctttatgtgttccgctttcgctggtgttatcctaacgcatttgccgtggaaccacc

SEQ ID NO: 30592 - DNA, 364 bp, Oryza sativa
  Clone ID: uC-osflM202075h05a1
agagaagcaatgatcaatcagactgctatacaatatgactggtaagggtaatatttagtttgcaacctctgtatctggtgacagaaagcctgaaagtgggaagataacagtaaaacaagggaacacgtgtatgaaaaaagatgtcgatgctcactgatatcagcaacctagtaaaaaacccctctgctggggtccaattaccatatctatagctatgtacatacgtctaatgaggttgcgcttcccaaacttcacaatttgccaacatctatgcctacttccccattgcaatgttgttcagcatcatcatccctaggtcgctttcctagaactgtttgtttctggtcctctgcaaaagcagagg

SEQ ID NO: 30593 - DNA, 382 bp, Oryza sativa
  Clone ID: uC-osflM202075h06a1
ggcgtcgggggggagcaagaacggcgggtacggggactacctcatcgaggaggaggaggggctcaacgaccacaacgtcgtcgtcaagtgccacgagatccagaccgccatctccgaaggagcaacatcatttctcttcacggagtaccaatatgttggtatcttcatgtcaatcttcgctgtcgtgatcttcctcttccttggttcagtcgagggattcagtacaaagagccagccttgcacatacagcaaggacaagtactgcaagcctgcccttttcaacgcgctctttagcactgcatctttcttgctgggagcgatcacctctttggtctctggttaccttggaatgaagatcgccacatttgccaatgccagaact

SEQ ID NO: 30594 - DNA, 380 bp, Oryza sativa
  Clone ID: uC-osflM202075h07a1
ggaaaaaataactcaggttcatcactctcatttcatcattgtgcactcctaaagagtttttaaaaaatcgcagattctagttgtacaaagaatatgtccaggaaaaaggtcaggggtgtctacatttctgcagccccaacaaatctaacattgcccaaccaaccccatacaacaaatgtctgccctacttttctttccccgaggaactattcctaatatatctaaagaaacactcgtttcccatgaaacatatctaatctgaaaacagtcttacacaatgcagcttgtaaaattaatagcatctcacttagcaggggtagcatttgttttattttgcatagtacttgcttgggggtcttcagttgtcttggatgaagcac

SEQ ID NO: 30595 - DNA, 211 bp, Oryza sativa
  Clone ID: uC-osflM202075h08a1
cttgtcttcatttttatgtcttgtgatctcttttattttttttgttggttggagcgggacccaccagtcaacacagaaccagagggtttgcgggggcccaccccactaaaaaccctcatgcaaccccccttgcttttgggcccccaaccaacaatgttccccccatccccgggggagccaggcagggggggaaacaaaggtgtgggcccgc

SEQ ID NO: 30596 - DNA, 381 bp, Oryza sativa
  Clone ID: uC-osflM202075h09a1
aggatgacccactgagccagatggcataacataccaaggctactaaactacataattatgccatgagaacgccatcacatctacagatggatggaagcgctacttaacagtcaacagagaacaagagggaatgcgtttgcccttaacagaaaataccaacatgcaagaaccattacttctacccacagttcccacaatgcccacgacatcacatgtcaggcccagacggacgggatgacttatttgtaggatggcaggaatggcgacgaaaaaatgggtgtcaaaaccaggccaatgggcttccgaatcagaagcgggaagagaggtccctcaggatcccagggagctaaggaatgtacaccgaaatgccaagaaatacaa

SEQ ID NO: 30597 - DNA, 86 bp, Oryza sativa
  Clone ID: uC-osflM202075h10a1
ggtaaaattgccaataattatttttttcaaattaaaaaacaaagaaccaaacagccccataaaattaacaataaattaaggaacct

SEQ ID NO: 30598 - DNA, 346 bp, Oryza sativa
  Clone ID: uC-osflM202075h11a1
cccccgtaaagcagctcaatgtccctacatgttggctaaggccaacaagctgatgtgcacgagatccaaaagtctagcaatctaacctaagtggccagaatctgaagattcacaaagcaacacacgatgtcgaagcttttttctatcggagaacgaataggcttcgaccacactcggactcgggacggacgtgttctgttcagtgctgagcgctcagctcaggggacctcttgcgctcatggcggctagtgtcgacgtcatcggcgccggctgtgtccttgccgaagagcttcacggagtcctccaggctcttgcccttggtctccggcaggaagaagtacatgaa

SEQ ID NO: 30599 - DNA, 354 bp, Oryza sativa
  Clone ID: uC-osflM202075h12a1
ccaatcacaaaaacactttccagtgatgaaattttctgaagcaaccatcatacagaaaaggaagttaaataagttaccgtcaaggaactaaaacacatacgagttgttcttcaaattcacaatcctaagttgtccaaaaaccaaaaccaaactaatcagggctgacttagctgctccaaactccaaagtcgtccaaattgtgtagagcttgactggcatgaacaataccttcagagtggctcaaatcttaatcaggaagaggaattggccttacgggtaaggcgaacacaatctggataaaccagctcacaaaccgagagcgtttcgacctcctcgcgacgaatttcagaaaca

SEQ ID NO: 30600 - DNA, 367 bp, Oryza sativa
  Clone ID: uC-osflM202076a02a1
agacagcaactcaataatctttcgatatttcaccgagggtaatgtatggtaggaaaatcgccagacataacagagccggccagactcaactcaaactcaaccctatgatggtaaactgtttgcgattaacgcctccgcctatgacaatgtttggagataaacgcttccaccaaaaaacgaatgtcggggagtgttctcccctacaagaattattattgttttcaatgttaaaaaggcaaaattcaccagatcccgttagtgcaggaccaggaataaacacttgttcgtcatcattttctgccagtttaggcaccgcccgagccgtacttctttccaaagaagaggatctgcagctggtcatagcctg

SEQ ID NO: 30601 - DNA, 362 bp, Oryza sativa
  Clone ID: uC-osflM202076a03a1
ataggatcaaaacatttttattaccacaactttttaaggatggaatcaagtaacaatactttcaccccaaaatacagtttagcgacaatatcttataaaagccgattgctttgccggcatggctggcaagctgagcagagcagctaacacaaagaacacgagatcactataaaccaaacggcaactaactaagaaaatacagggtcttttttgtctgaagatacacgaagcggttcggtttattttatttttagtgtactgtactcctcgatgatgggtgtatggcaattgcaatggctatgggatcttggcttagttgatgggaaggggctcgacgttccactccttgaggcagacgatca

SEQ ID NO: 30602 - DNA, 379 bp, Oryza sativa
  Clone ID: uC-osflM202076a04a1
gagattgagaggcagccctctcccatttccaccagtagaaatggaggaacaagacatttcaacaccataacgatctctcaacataatattgagattaggcatcttccgtataatgtctgccaatgttggagggacgcctgatgatagcggtagacgataaccagtaaggtctagcgtatggagcctttccagcttgcttagcgactcaggcagctcagagatgacatgtgaaagtttcagatactgcaaatttactagtcctgtaatagaatctggcagtggcagtctctcgagcctaaagcaacctgacaggtttagatcctccaaatttgttaggttaccaaacaaatgaggtaactgttgaagctcagagcagcca

SEQ ID NO: 30603 - DNA, 341 bp, Oryza sativa
  Clone ID: uC-osflM202076a05a1
gttaggcattctttttctatttttaccattttaaatggaggaacaagacattgtaactccataacgatctgtgaacataatattggtatgaggccaccaaggtttgtagattgacatttttagagggatgcttgatcatttcgatagacaattcccatacccgtgtagcgttttggagcactttccaggggaacccggttctcgacagggatctacgtgaactcggagagaatcgccctgcagtaaatacacttgaatggttatttaataaggagcacctacacgattttgtccatggcctcccggatgctcctgaactggctaaaagtgatatgttacca

SEQ ID NO: 30604 - DNA, 247 bp, Oryza sativa
  Clone ID: uC-osflM202076a06a1
cgccccccttttttttttttgtggtgggtcaacaaggtccgttgttcttctttcatcaaccaaccagataacattgttgtactcagtccgaacaaacgaagcaaatattcgggtacgcggaaagaggagaacgtcgcgcgtaacaatcttacagcagtgttacaattcctaacaaatcaagtggcgatgtttggccggagatagcacacctcactttgccggggacagaacgttggttgtgcgtaag

SEQ ID NO: 30605 - DNA, 362 bp, Oryza sativa
  Clone ID: uC-osflM202076a08a1
acagcaagtggggattaattgtaaagaactcaatataaattagctccatataaggatgatacagataatgctgtcaaacaatgaatcaaatgtcatgctccacattgccacagcattacaagtaaacgaaaagcattactagttttttccctactagacgatttctgttaaccaggttaacaagcaagaaattacaagctgcagttaacctgtgacaagatttaccctaatattcccccatattgcaccgatgcacttttgccacgccgatgcttcctacttagccttgggataagtattcaaatggaaagaacatggcaggtcaggtttgaacataagaatcttcgtagcagcgactggta

SEQ ID NO: 30606 - DNA, 363 bp, Oryza sativa
  Clone ID: uC-osflM202076a09a1
gcagaaatatcttatgaactaatttaagaatttcttattaaaaatgtacaccatgtctcaaccccaaagcatgaaagttgggagcccaaataggccaacgaggtatgtgcactcatggctatacttaccttcttataccactccatcaagatctctactacaaatccaaatatagtccgatgttttctgtcggcatcttttcaagatgcggcagaaatgttgtagcctgatggacacctcggtctgcgacaacgtctcgttgttcgcccccaaccaatgatccccctatcactagcttctatctccgcagcatctggctttgcagtatccggttttgccggtggactaaccgggacttcttct

SEQ ID NO: 30607 - DNA, 278 bp, Oryza sativa
  Clone ID: uC-osflM202076a10a1
attaaaaatgttcaccatgttttaaccaaaaagcatgaaagttgggagcccaaagaggccaacaaggtttgtgcactcatggctataccaacctggttataccactccataaagatctctactacgaaggcaaagatagcccgatggatggtggcaaccaagtttttaagaagcggccgacatgaacgtagcactgaaggacacctggagtctgcgacaacgaaatggctgctcgcccagaaccaatgatccgcctatcactagggtctatcggcgga

SEQ ID NO: 30608 - DNA, 368 bp, Oryza sativa
  Clone ID: uC-osflM202076a11a1
cagctaattacattttataattaaccaagagtaagttacatgtagtatgccaaaaaatccggccggcaaagtaaagttagtgtacaccaagaatcgaaaatatgaacatcttacagcatgttccattcctacaaaactagtgggatttaggcagggagagctgccggcgtggctgggggaacccggttctcgacagggatctccgtgaactcggagagaatcgccctgaactcgtcaccactcaatgtctccttctcaaggagcacctccacgatcttgtccatggcctcccggttgctcctgatctggctcaaagcgatctcgtaggcctcatcggacaaccgcttcacagcggtatcgatgtcctc

SEQ ID NO: 30609 - DNA, 378 bp, Oryza sativa
  Clone ID: uC-osflM202076a12a1
acacaatcaggtccattgtacttctttcatcaaccaaccagataacattgttttacacaatctgaacgaacgaagcaaatattcgggtacgcggaaagaggagaacgtcgcgcgtctcaccgcagcctgcatgaaagcaatggacctcaccgccgttgctcgccggagatccacactcacttgccggggacgaagttggtggcgtaggcccatgcgttgttgttgacggggtcggcgaggtggtcggccaggttctccagtggccccttgccggtgacgatggcctggacgaagaacccgaacatggagaacatggcgaggcggccgttcttgatctccttcaccttgagctcggcgaacgccttggggtcgtcggcg

SEQ ID NO: 30610 - DNA, 370 bp, Oryza sativa
  Clone ID: uC-osflM202076b01a1
gacagcaactcaataatctttcgatatttcaccgagggtaatgtatggtaggaaaatcgccagacataacagagccggccagactcaactcaaactcaaccctatgatggtaaactgtttgcgattaacgcctccgcctatgacaatgtttggagataaacgcttccaccaaaaaacgaatgtcggggagtgttctcccctacaagaattattattgttttcaatgttaaaaaggcaaaattcaccagatcccgttagtgcaggaccaggaataaacacttgttcgtcatcattttctgccagtttaggcaccgcccgagccgtacttctttccaaagaagaggatctgcagctggtcatagcctgagag

SEQ ID NO: 30611 - DNA, 331 bp, Oryza sativa
  Clone ID: uC-osflM202076b02a1
aaggatggaatcgagtagcaatactttcaccccaaaatacagtttagcgacaatatcttagaaaagccgcttgctttgccgccatggctggcaagctgagcagagcagctaacacaaagaacacgagatcactataaaccaaacggcaacgaacgaagaaaatacagggtcttttttgtctgaagatacacgaagcggttcgttttcttttatttttaggctcctctcctccttgatgatgggtgtatggcaatggcaatggcgatgggatcttggcttagttgatgggaaggggctcgccgttccacttcttgaggcagtcgagcatggg

SEQ ID NO: 30612 - DNA, 346 bp, Oryza sativa
  Clone ID: uC-osflM202076b03a1
caatacctgatatctcattcagtatcttcgaagtatgtggtgtagcacaaacttctgtagggctcatcatattccatatatgtaagatgagatgaaggggggtaatagctacacaaggcatcacacgatatacattttattgcattcatgtaatcttgagtaccaaagttcaactgaaaatttacatgtagaggccggaacgatatccattatctaaaaattgaaaaatttacaatggcattctagcttttcatttagtgttcaaagggaacatatttctttactttgatttggcggcaaccctctgttcctccagtttttggtatactttctcaatctcaggctt

SEQ ID NO: 30613 - DNA, 377 bp, Oryza sativa
  Clone ID: uC-osflM202076b04a1
ataaaaccaaccacattatatagtaaacattggcttcagagttcagatccacaaggttcacagccactatagcaagtacagataaggtagaagctaagtaacttgttccagcctcatatagcagttacagatagatagtttcactgccaaatagtacttgagacttcagcatctaagctagacacagcacatactaacatactaacatagctatatagcgcaactagaagcgcccgacagacacatgccgcttcttggatgtccagaatgtttattccatttgtccttatatatacaggcaccagttgctacaccccaaacccctcagtagaactcggccgacacgggcatgtcatcgaagctccaaaggtccatgc

SEQ ID NO: 30614 - DNA, 377 bp, Oryza sativa
  unsure (1)..(377): unsure at all n locations
  Clone ID: uC-osflM202076b05a1
gcaaatcaatgatgctaccattctaatgcttaagttgttttgccatccagggaccagcgttatcatgaatgagcttacgattggttctatcgccaacttggaagcaccgatagcagaagtggtactaacttggagggtaacgatatgacatattgatagagagaatggcacaaaggtgcacgatgttttgttcttgtttttaagttctcattgatgtgttagtgacgatttccttttgaaaggggcctttatgcaatatnttacttacccaaaagaacagtgatgagatatcaaagctaaggccaaagaattggttgcttgtcattacagatcggcatttactttattatactgagatttgactgttgattcacaga

SEQ ID NO: 30615 - DNA, 369 bp, Oryza sativa
  Clone ID: uC-osflM202076b06a1
cttcatccactaataatactagcccagagggagcaactgaatagagcattaatgatcctggttacagtagacataccatagaggcttcattaaagatcctggctacttcatcaggtaatatttgcgcattagaagagatcactcgcgcacatagatgtcaaagcataaataaagagtctaaattctaacaatactccaagtcatagctctaatcatattattattacatcagcctgcagtgtaatacggaatcttggaactatcatgccctgcaataaattctgtcccgtatggatgcttgatacgatcgctacatgcgtgacaacgctcgtagtcctgattcctgatcattacataatcaattctcct

SEQ ID NO: 30616 - DNA, 369 bp, Oryza sativa
  Clone ID: uC-osflM202076b07a1
ggggcctagtccttccaagttttttctcatttctttttgttccaagtatgaagtaacttttttgtatggctttacatcattattaaaaggttcaagtatccttaaatggaagacgaatgaaaatgaaagatagctcaagtatccttataaggaagacaaataaaagcgaaagacaagtatatatcctagagtacgagtctacgcctttggcatccagccatttatagtaagacttggcagaaacaatctggatttgaagctttcacctaacattaagaatcattttgtctttctcaagcgctgctttcatttgttgtcaaccttcatttcatgactgtcatcttggggattatgtactgcggttgaagc

SEQ ID NO: 30617 - DNA, 368 bp, Oryza sativa
  Clone ID: uC-osflM202076b08a1
acagcaactagagaattggatgccctctatctatgctgagaccaacatgattctctttgaatttttttttcctttttggagtagtgcctcacacagttaagaactgagatttgaatttaacataaacagaaaataacagttgattgtaggtgcctctccttctagcagtgcatttccattttcctccttgagaacacttttttctagtatttttgcaggttaggcggttaggccccttcgctgtacattgattctgaatggcctaaactttctgccattgcaccactgcaaaaaccagaagattgaccggtatcatttccatttccatttaagtttatgtgactaagtaaattttctacttcacatgt

SEQ ID NO: 30618 - DNA, 372 bp, Oryza sativa
  Clone ID: uC-osflM202076b09a1
aacaactgacacaaaacacttaggtagttggaagaccataacatcaagaactctccttgaaaattttgtaatttgatccgcaacgattcagatgcagatgaaacactgctgattcccactcagattacacacaatacaaatacaccgacaaactgccttaaaaaccaccaaattgattcaaaagtaaaacgggtatgagggatcttcccaccgagactgactaaacctaaccacagacaattggatccactggacccagattattcaaaaacagatggctatgacggcatcgtcctcgcaaccgaagggaacttgcagctatggatatcctcacttcgcgctggcgagctgggtgcggatgagcttggcgga

SEQ ID NO: 30619 - DNA, 365 bp, Oryza sativa
  Clone ID: uC-osflM202076b10a1
ccacggatcccaaatgttctcattgattgatagcgatatcatagaagcagcgacacgaattaagatttaaaaccaaccccaagaaggatcgcagatccaactccaccgaatcgatccaagaactccgcctaatccaaccaaaccatgggcgatctcatctcaccaacacgacacgaactcataaaaagactaacaccaccaccacctcctccttatttagggactcgacgactcaagacgactgatactggcgaaaggcgaaggggaacagcacagatctaggagagctggccgcagtcggcgatgacgaccggcttggcggtgctcccgccgggggatcccaccttctcgatggccttgacgac

SEQ ID NO: 30620 - DNA, 350 bp, Oryza sativa
  Clone ID: uC-osflM202076b11a1
ccggtcctcttcccttgcgtgccacaataatgcattcaaatttgatacaaatatcttagccaagctaattctccgttttgtggttttgcatctgcctcatgcttcagtgatataggtggagggctggaggtagtttgctttgctcttgctccacttgtacaagatgttcccagaaacatcataaaatatgaagtcagcttggtcctggtttatctggagggacatgaacccttgtccatcgtaaaagaactggagcttatcagaatttggctgcaagacttctattcatgcttttgaaccaacttcacttgtgaagtattggataggactgtctctgctgctaatgtgtt

SEQ ID NO: 30621 - DNA, 314 bp, Oryza sativa
  Clone ID: uC-osflM202076b12a1
gagggcaatatcacacgagtttgggaccaaggcaccggaaaagggggttccaaatccaacgggatttcataacccaaagacccacaaatttggcgggctaatggggggagggatgagctcgaagcctaaaactcgttgaagggaagggccccgatcttccaaacgaggtacggggggccgaacatgacgacggtgatgagcgtaaagggggcggcaatgcccatcacgtgggggccgaacgggggggcctggaacggccaccctttcttgggcaggcccagctggtggtcggcgaacatgttgatggccccctg

SEQ ID NO: 30622 - DNA, 366 bp, Oryza sativa
  Clone ID: uC-osflM202076c01a1
cgatgctgccattctatcaatatgtaagagcatcgcacaatttttttcagcagatgagctaaaggacagaaccatttgaactaatctaaaaatactatactggttaattgcactgtttataactataagcttcggttactgcttgctctcagctctgcctatagtgtcaactaggtggcaaatttgttcttgcaacaggtgaatatcattgggccatgataggtatatccttccagaaaagtgtgtcacatagaataccccagctctccatactaccacagatatatatgtgagcacatattttcagctgcagatcgttcatttcagatcaatgaaaaaacactgcttattctggagaatggagag

SEQ ID NO: 30623 - DNA, 256 bp, Oryza sativa
  Clone ID: uC-osflM202076c02a1
gtgggggggacccccagccccaaaaattgggccccattttttgggggaaaaaatataattttaagggggggtaaattttttggggcccaaaaaaaaaaaaaattttttaaaaaaaaaaaggttctcggaaaaaaaagggaaaaaaaacccgtggttaaaaaaaaaattttccccgggggaaaaaaaaaaacccttttttgggggccctttaaggggcttgggggaacctttatcccggaaaaggggggtttctttt

SEQ ID NO: 30624 - DNA, 368 bp, Oryza sativa
  Clone ID: uC-osflM202076c03a1
ccttaaagcaagggcaagtaacttctaggcttttggttggcaaacagggaaccaagttcttccacacgaactactaagatgaagcaggttgcacgagaacacatacaggaagtctcaactgtgaactttcaatacataggtttagaacatgtaagacggggaatcaacatagtcccagaggaaaatataagtaaatgctgtatactagggaaataagatggtctatggcatccaggcaggtccctcttaggcaaagcttccaggttggggccatactcttggtcatctggtttgggaaggggctccaataagcaggctccatacttcattggtcttggcattcttttgtcttggctgttgcatttgtc

SEQ ID NO: 30625 - DNA, 352 bp, Oryza sativa
  Clone ID: uC-osflM202076c04a1
agtagaaagcaaccgtatttctttctacattgaaatatagaagatgtacattgaaatgtgtcaagaagagatgtaggagcaccctcatggagagggatttttagaagttccattgcatggtttcacaagttatgcaatgaccatcctactttcttctagctgtaatatttccaaaactagttacaagaaatgcgaggatgcccattgtcattgatatggtatggtgatgaagagattcacgaaatatgaatgtggagctcattaaacttttgccgcttcagtaggtgcaccggccctttcagcaataatctgctcatagagatctctaatcttcagtcctacgatagtttgg

SEQ ID NO: 30626 - DNA, 323 bp, Oryza sativa
  Clone ID: uC-osflM202076c05a1
ttttttttttttttttttttttttttttttttttttttttttttttttttttttttttttttttgtttgtttaaaaatgtttttttttttttttttttttaaaaaaagaaaaaaaatttttttttcccctaaaaaaaaacggggcccaccggcggaaggaaaccacaaatttttaaggtcccattttttttttccaacacccccggacccatttggaaaaaaaaaaaaaaggggaaaaaaaaaaacctttaaaaaaaaagggaaaaaccccccgggggaggagggaaaccgggccaaaccaaaatggcccccttttggaggtt

SEQ ID NO: 30627 - DNA, 368 bp, Oryza sativa
  Clone ID: uC-osflM202076c06a1
gtcaaatgggttcaatgttttcagcaaatgtcctgcgaatcaccaggcaaaaaaaagggagctagtacaaagcctcaatacacactggagtaaaaccagcaacggcatctgcgctccacatctcgcgatgtgcagcggtctgagataaacagtttctatgtgatggaacttaaaagtctcttttattcaaaaacacgggagcgggcaatcgctcactatctgtccctctgggtattgcttagttttagttgaggcatgagtaagcgagcgtcttctcctccgacagctcctgggcagtcgcgtccatcttcttccttgagaactcgtcgatcgggagaccctgaacaatcgtccattcgccaccactg

SEQ ID NO: 30628 - DNA, 363 bp, Oryza sativa
  Clone ID: uC-osflM202076c07a1
aacaaacaaaacttattgttatagacttgtatagcaaaacaagagttcacagggtagtagtagtacagcagtagtagtagtacacaacataggctcttataaggctcaggtctgcacaacaactcttgatagcttacaagcttcatcaactttgccgcagattgttttcactcacttgttacttacttagtagaacagttcactatcactgttttctgcttgctaatccttcttggtaggttgtacctccagattgggcaactttaagaactcagacgaaacgcacagttattcgcaagtgtaagtgcagagccatctcatttgcagcagagaacatcatgctgctagtaaggacctccagga

SEQ ID NO: 30629 - DNA, 357 bp, Oryza sativa
  Clone ID: uC-osflM202076c08a1
cttaaggcactccttaagagagctcttcattcaaaatattcagcttctcaaacaacacagattctcactcagattatcagaatccgaatacaaaagaagccataagcttgtagaactactcattccagattctcatcagccgctcctcagaacatcatgctccccccaataatgcaaagtatgtgcatgcatgcttggatatgatcttcaaatcatagttccaaacaaataataaaaccaacctctgcttaactgcaaccagtcaagagggtgtcggcccaatgggctggaaaaaatcacggccctacacaacacatgttgtggttagctagcccagcccaggcagaattacatgct

SEQ ID NO: 30630 - DNA, 290 bp, Oryza sativa
  Clone ID: uC-osflM202076c09a1
aaaccaaaaacctgtttttgtaactgaaacaaagggaaaacaaagggagggcaaaatgtccatggttcaaaaaaaaaaaaaaaacaaaaacaaaaaccaacaaaaacaaaaagcaattccaaataattaaaaaactcataaaggggggatttgttaataataactggggggagcactcggggggaaacccctgggggaagccccagccgtgggcccaatatttggaggacatgtagttgcgctgggcccacccaacggggccgagttgggccccgtcaagctcggggggg

SEQ ID NO: 30631 - DNA, 320 bp, Oryza sativa
  Clone ID: uC-osflM202076c10a1
aacattcaaatatggccatttgtccattcccttttcaaaagtttaaaccatttttgggtcccaaaattttacagaagaacatagcacgaactcaacacgagcaatacaaaacttttacaaatcgatctttttgctgcccccctatgcacaaattttcaaaaatcgctgaccccctttttaaacagttgatgccgcactgcctgacgtcagggcccctggccttgatggggaagggatcaatcctgacccagagcaaggaaaagatggaggcgagcagcacggaccagatgacaacaatggggggcgtccggttctgcctc

SEQ ID NO: 30632 - DNA, 362 bp, Oryza sativa
  Clone ID: uC-osflM202076c11a1
gccgtaatgtttatattgacaatattgatctctcttgtcatctacaaaggagtgctcaaaaatgtgttctgtaaccagcaacggtaataacagcagctgaaaaaaaggggcagcaatataacaggtgatacagaattacagatggaaacttaccatactaccaacagctatgaacttccatgaatcaaaatatgcccaactcctgatgtcaggattgagactagagatcacctcctcaatcagttctcaccaagggtgtaccgggtgaacctccgtaccttgatgttctccccaagggtggcgatcgtctccttcacaagatccttcaccgtcttgctgtcatccttgatgaaaggctgctc

SEQ ID NO: 30633 - DNA, 330 bp, Oryza sativa
  Clone ID: uC-osflM202076c12a1
aagataaaattttgagatggcaaactgcctgttcttggcctccacaaacagacatcgggatccatgaacgtcaattaacatacacacagaatgcattgccgggcatgatcaaacttaaactcctaaggctacatgtcatggcgtatctactggggacccccatatactatggtcagagtacattctctttcacttgggatgactaggcgccgggctcgagcggtaggtcgggcatgaccttattccagaaccagggcttcctccataggagcaccatttcctcgatgggcacgcccttggttttcggcaggaagacgtgggcgaagacgg

SEQ ID NO: 30634 - DNA, 395 bp, Oryza sativa
  Clone ID: uC-osflM202076d01a1
tttttccgccctttttttttttttttatctttaaaggcaagaatattattcataaatgacgcatgatttttatcaaaacgcttgcaaatgatatcagataagtagagtcaacaagacaaaactgtatttgccaaagcacacctccccaactccacccaattacgccattatttctgggcaaaagcaaacggcttcccattcctccccttcaccagtctcaaaccataaaccccacaacaaatcctcctaagtgacggcatataagatgatgaaaacaaagcaggatactccagagtcgtcatggcgaacttcaaggtgacacttctcatgccacagccgttagtcgtgctgggcagcctagtaccggtagtgcgcgggcttgtagggaccctcaa

SEQ ID NO: 30635 - DNA, 212 bp, Oryza sativa
  Clone ID: uC-osflM202076d02a1
accaaatatgaagggccgacccatttggaatattattttggattccaaggtacacagctttcacagttggcggcactttcagtgtggagtatatacattcggatcaagtgggtaaacaaaaccagaaagactttgagcaagcttccgcttttaacaacacaaaagatctattggatgttctgtatcatattttgaaagcgaaagaaaacgtg

SEQ ID NO: 30636 - DNA, 360 bp, Oryza sativa
  Clone ID: uC-osflM202076d03a1
aaaacagcactaaatcaacattttatttcgtctctcagacagtaccatgctgatgatgcgcacgaccaacacacaacacatgcttacatattcacaaaatgtatgtaggtaatgcacttgaaggtttgagatgctacaaacaaatgaaatcatttagtccattgaagagtggcttgtcaacatacttacaccaaactgactggatacagctgaacaactagatcagttattctgggtttctaagcgaacttcttgtcgaggtgacggtctatgatttcagatacggtttctaagaagattacttcacttgaccctgggagaacatggccctcggcttcctggacgatgtcctcaatctca

SEQ ID NO: 30637 - DNA, 364 bp, Oryza sativa
  Clone ID: uC-osflM202076d04a1
cagttgagaatttcacgccgcttgtattatggtacgtacaaaactacaaacaattgtaccaataattctggtctagtaaactgtaagcacaccatctgcttccccatcccgccctcttttgggtacatacatatctgccgcctgactgacaaatataatcgctgctggtaagcacaaaaccacaaatgctatctatacaaagccactaagttactgtgtgaaaaaataatgtaacagccagcacacagcaaagaaaaaacgtaagcgtagtttttttctctgtccagtctattgcgtgtcgtcactgatggatccgtccttttgaagcttcagactgaggttactgaacctttgtcttgagtac

SEQ ID NO: 30638 - DNA, 378 bp, Oryza sativa
  Clone ID: uC-osflM202076d05a1
ggagatgagcaccacgacgcacttgatgctcttgcacaccgtctggatcaccgtcggcccgggctccgggatcgtcaggttcaggttgtcgccgaacccctccgcgtacggcggctcgccgaccaccacgatcgcgtagtcgtacttgtcgccggtgaccacgctgctgtccgggttctccgagtacaccaccgtcgtgctgggatcaacggtggccttgatcgccgacaggatcgtcgtgccagcagtgatgttgttgccgggctgtccttgccaggtgatggtccatcctccacactgtctgcccaaatcatcagcatggcttcccgcgacgagaattttaccggctttcttcgggaggggaagcaccggagagta

SEQ ID NO: 30639 - DNA, 331 bp, Oryza sativa
  Clone ID: uC-osflM202076d06a1
cacaagggccaacatgagactccgattttaaccattgacacgtgaaacacattaaggtttgataaataaaaagatctccagctggagtgtgacaccacatagtctttgaggactgtctgggactctgggtttatttattgaccaacattacagataagaaagcgcacagcacaaacaaactcgaagcactcatgacgcgaactggaaatactcatgacgaacgaaatactgaaaagacgataaggcgaagtaggcgatgattgggaggagattcggcgcatcactcttcctaagattcaaaatccgcgctttggagccactccacgaacgg

SEQ ID NO: 30640 - DNA, 310 bp, Oryza sativa
  Clone ID: uC-osflM202076d07a1
agacaacagtcatcctattcaccataaagcaacgaaattgacatgagaaatttctaaacatgctatacacgtatacagattgttaggtacattcataaaacctggggagccgaaccaggctgcgcaatgggttatattgggattgaaatctcatgggtggtctaggcactggaacgtccatggacggggtgatcagcttttccatctgtagttagactgaagtggctgcttctgtcctctgtaccttatggctattccatcttggatttcttggggaaaaaatttagcagctgataagcaggtaatttct

SEQ ID NO: 30641 - DNA, 346 bp, Oryza sativa
  Clone ID: uC-osflM202076d08a1
ggacaaaattaccatgttacaactcaggattatcaaaacaaattaccatgttacaactattatacagactaaatcagtatatggacgtctatatcatttgataattacaatttccaacatcagagggaagcttaatgaacacacaaattacaagatgacaccaaaccaacatacaagagggccaatcatatgttgaaatgaacccatatcctagctagttatggaacagtacaagcccatatgtaaaggatactactggagatgcaagctggaccaagtagaaatcaaatactgctactgagaactcctccatggttcataaagcaattgtttctactcagaagaa

SEQ ID NO: 30642 - DNA, 363 bp, Oryza sativa
  Clone ID: uC-osflM202076d09a1
gaacgataaacaccaggaaccggcgtttatttgaggcaagcactgcccaaaatctcgcaaaagtactgaaaccttagacatagtacacatccatggcaaacatggatgccaaatgacaactacagaaaattatcaaattcgaatgcagctgacggcttctcctgctgaagatgcatattttcccctccattacttggatgtgctctctccatcgacagccaatgggacggcgctggccaggctgcggtatttcagagcatagaacatctcaatgtaacggcgagtctcgcgcctctcaaggttgcttacgtacttccagaatccgtatacaccagtcaaggtcatcagcctctcagagtacag

SEQ ID NO: 30643 - DNA, 352 bp, Oryza sativa
  Clone ID: uC-osflM202076d10a1
gcgtacaaattgagcacgtaattattgcgagctaaatataatcaagctaggaaaattaagcagcaattaaggtagagagattcaaattaaaagagaaagaggctaggactagctatagctagcgccatgggagagcaacagatcttcgatctgtcgtctcaggcgtcatggaactccagcaccaccacggccttggccttctccttcctgccgccctcgccggcgccgcggagcagccgccgcaccgccgcgatgagccgttccgccgcggcgggggacctgcagccgagcgcgcggcagaaggcggggtgcctcgcgatcgccgtcttcaccttcaccaccaccgacccgt

SEQ ID NO: 30644 - DNA, 367 bp, Oryza sativa
  Clone ID: uC-osflM202076d11a1
cccggaacaattttatttctgatttcctatttgcgaggagaagacacaagcttattttggaggctacaaacaaactgaaatgacatggcccgaatcaaatgaaatctcacaatgaaactcaacagaagtgttcgatcttaaacatgcatctcatccaacttgctccacactgatcacattacaaattaatcaagaagaaactaaacatggatcgatcatcacccaagtgtcacatcctcgcaacaaaagccttcttccccatctgaaccaaatcagtccttcacaacacatcctcacaagattctgacgatggagtgaccaccatttttatgcgtgttgccgatggcgaaatgggtaattagaactc

SEQ ID NO: 30645 - DNA, 367 bp, Oryza sativa
  Clone ID: uC-osflM202076d12a1
aaatgaaatttttaaaaaaagtatcataaggtaacatgggcatctcaaacgttcaaagctgcaacatgcgcatctcaaccgtgacacctgatgtgtacatagcatgaacatgccgtcccaaatgatctcaaacgatattcattaacaaatcatacaatccgctccagctctctagcatagctgagcgtttggttgataacctgcaaagatggtatctccttgcagggctgggtctccttcgccttctggaagaagacggaaccatcctttatctcccattcagggtgctcctctgcgatgtactggtgcaattctttgtcagagctgaacatcagcacttgtcttgcttcagctattgacatataat

SEQ ID NO: 30646 - DNA, 384 bp, Oryza sativa
  Clone ID: uC-osflM202076e02a1
gcacgtcggccgcgctggcagtgccggaggcgcatccttgggctgctcatcgcgcttctttatcgtctccagcaagacctgcagggagctctccgccgtggccggggctggcgccatcacggcggctgcagagagcatcaccgccgtgggaaatcacacaaaagccaccagatcagaccagtgacctacacgcaggctcacacaccaatccgccaaatcctgccgcggggcaccatggcaaccaaaaccttctccatctcgcaccaatattatctccaaatgtaggcgcacacgcccctaactcaaaagcaaagggctcgaaagtgacagccctcccaaacccccaaattctgccgccatgggctcaaaatcccctcaacaatc

SEQ ID NO: 30647 - DNA, 357 bp, Oryza sativa
  Clone ID: uC-osflM202076e03a1
aagtgaaaggaaggggctgctcatataactacatatggatgggtgacaacgattgctgcatggaacattgttacatgacagatataatatctactaggagcatgttctatctgcaaactgaaggggggaatgaaccaccaacgggctgaactttctgaacttgtaaagaattgtcgatgatctacacccggacccactgcttgccgacagatgaacgctccggaccgatgaacggtacgatcctaaacgtaagtgagggtgcgggaccacggcaccctctggttagtgctcacccatagaattaagcaactgtactaccagaacagcaccgtcctgtgagaagattcagacacattt

SEQ ID NO: 30648 - DNA, 369 bp, Oryza sativa
  Clone ID: uC-osflM202076e04a1
cagaagacaattagacgccgttagtgttgtggacctgcccgcatgcctacctttctacccgagatttttggattaagagactgtaggtacaccggtggacagccaattgcgccctatattggattcatacatatccggcgggtgagtgacagatatgaaggttgttgtactggacagatccacaaaagctgtctatacaaggccagtaagttcactgcgggaaaaaaatgaatgtaacagccagtacacttgatgagaaggacgaaagcctaattgatcactctgaacaatatatggggtggaggaactgagggggccgtccttatgcagctaggaactggggtttctgcaccttaggatagcgaactg

SEQ ID NO: 30649 - DNA, 370 bp, Oryza sativa
  Clone ID: uC-osflM202076e05a1
gagatgagcaccacgacgcacttgatgctcttgcacaccgtctggatcaccgtcggcccgggctccgggatcgtcaggttcaggttgtcgccgaaccccttcgtgtacggcggctcgccgaccaccacgatcgcgtagtcgtacttgacgccggtgaccacgctgctgtccgggttctccgagtacaccaccgccgtgctgggatcaacggtggccttgatcgccgtcaggatcgtcgggccagcagtgatgttgttgccgggctgcccttgccaggtgatggtccatcctaacacactgtctgcccaaatcatcatcatggcttgccgtgacgagaattttaccggctttcttcgggaggggaagcacc

SEQ ID NO: 30650 - DNA, 337 bp, Oryza sativa
  Clone ID: uC-osflM202076e06a1
gccacaagacccaacatgagactccttttttaaccattgacacgtgaaacacattaaggtttgataaataaaaagatctccagctggagggggacaccacatagtctttgaggactgactggcactgtgggcatatttatggaccaacattacagataagaaagcgcacaggacaaacaaactcgaagcacttatgacgcgaactggaaatcctcatgacgaacgaaatactgaaaagacgataaggcgaagtaggcgatgattgggaggagattcggggcatcacttttcctaagattcagaatccgcgctctggagccactccacgaacggtttg

SEQ ID NO: 30651 - DNA, 387 bp, Oryza sativa
  Clone ID: uC-osflM202076e07a1
tgctgcgcgcccacggagccctcgcggagcacgtggacgaggcgggggagcacgcccagcgacaccaggctgtccggcgagatggcgctgctcaccaggctgcggagcgcgcccacggcggactcctgcggcagcgggccgtcgaggtaggcgagcaggctgcggaggccgccctcggacacgacggcgcggcggaggccgtcgttgctcgacgtgaggctctggaggcactccgtggggtactccttgcagccgagcacgacgccgcagtcgagcaggttgaccatgacgcgcacgatcccttgctccgccagcgcttggcgcacctcgggcaccgtcgagaggttcttgagcgcgccggccgacgcggactgcgagatggagtcc

SEQ ID NO: 30652 - DNA, 369 bp, Oryza sativa
  Clone ID: uC-osflM202076e08a1
gcacaaaagacaggccagttggcttattggaacattccaaatatacagggttcaagcaaaacatcttctagccaagaagccttgagcattgcaaatatacaaggttcaagcaaagcatctactacttgagaattcagataatacatgaagcaaaatcacacaccagccatcagtgcttccatctttagcatcacagcctgaaagctcattccaccatactgcacatgcccattcatttgacatagttgcagagggcttaaaaggacgcgaaaacacgacgcaacgatgaactgcgggcttggctgcagactgcagcaagctccatcgcagcccagagcaaacatatgtacatatatgacacagcagacc

SEQ ID NO: 30653 - DNA, 366 bp, Oryza sativa
  Clone ID: uC-osflM202076e09a1
gaacgattaacaccttgaaccggcagaatataagaggtaagtattagtcataataaaaaaaaaggcctgaagccttaaacctggagcacatacctggccaccatggatgccaactgacacccacccaaacccatcaaattccttggcaaaaaccaactagctaattgaaaaaaagcatattaaaatcttccaggcctcgaatggggtctatcgatgaccaaaccatgggactgtactggcctgcctgggtgattagatactgtacaacatctaagtgggacagcgagggtatggcaccttaatgggggttacatactgctagaaaccctttacacaacttaagggcatcactcagttagagctcag

SEQ ID NO: 30654 - DNA, 366 bp, Oryza sativa
  Clone ID: uC-osflM202076e10a1
aataacagaaacagattacagttttcaatagcagtagaacaagcgaatgccacaagccaaaataaagacataggaattagcaatgtaaatacccgcattccacaacagccgaagggcaataatcaggctcagaacaagtttaaaccgaacagaaaatagagagttttaaacgacacagtgcacacagcgagcatatgataataacggtcaatgcaacgagtgccatggccgtgcacaaaactaccacttgaacgaggatcatttcttcttggcggcagccttggtcaccttggcaccggttgggtccttcttctccacgttcttgatgacgccaacagccaccgtttgcctaatgtcacgcacggt

SEQ ID NO: 30655 - DNA, 338 bp, Oryza sativa
  Clone ID: uC-osflM202076e11a1
gcggcagtactcttaacagagacatttcagatttggtccagctccaagatggcagtaatatgcagcaaaggcatgagagctttgtacatgattaaataacttgatcaaaatcccaattaagtacattgtccccatgcttccaggccggactgatgcatgtctgatggctgctgcccaagcagagcacaaccgatgatgctatgtacactggcaacagaattaaggaactgaaaacaatgaaaggcatgaaagaacaacagtcatcatggtcagcttaaaactatcaccaatctcacagcaaactgagtcaatcgggttgctaaagaccggttcttgaa

SEQ ID NO: 30656 - DNA, 363 bp, Oryza sativa
  Clone ID: uC-osflM202076e12a1
aaatgaaatttttaaaaaaagtatcataaggtaacatgggcatctcaaacgttcaaagctgcaacatgcgcatctcaaccgtgacacctgatgtgtacatagcatgaacatgccgtcccaaatgatctcaaacgatattcattaacaaatcatacaatccgctccagctctctagcatagctgagcgtttggttgataacctgcaaagatggtatctccttgcagggctgggtctccttcgccttctggaagaagacggaaccatcctttatctcccattcagggtgctcctctgcgatgtactggtgcaattctttgtcagagctgaacatcagcacttgtcttgcttcagctattgacata

SEQ ID NO: 30657 - DNA, 111 bp, Oryza sativa
  Clone ID: uC-osflM202076f01a1
gcaccaacgagggacacgaattggacaaaagaagaagagggagaggagctgaagaactcaacacaaaatgcactaagctcaaaccaccacctcaagctgccaacgccaact

SEQ ID NO: 30658 - DNA, 372 bp, Oryza sativa
  Clone ID: uC-osflM202076f02a1
gacacgagcaacatagcctagatatgtcattgttcatgttgcacaggagaagcatatgttttgcccagtatggaacgattacaccttccaatttccaagagggcatctttgaataatctggtacagtagcgcacaagacacagagaaaagaactcactaatcaaggctacaaggatttcaccaatatggccatcggagagcatctaaagctaaagctatacacacaccaaaatgatctttgcgaacatcagcgagtctcttcatctcttgctatctttcttttaatttatttacctggcggggtttcgatgcggtccttgatgatcttctcaccggatctgccttctcgcccttgctactggtgctaacttt

SEQ ID NO: 30659 - DNA, 341 bp, Oryza sativa
  Clone ID: uC-osflM202076f03a1
ccattcgaaagaaaatcagcaaacgcattgttccagcccagagtagcaaacagacggtacgtacatggccacagttcaggtatacatgccgttgcaagataggttgtcctaattccagcaatgatatccatcacaccgacaaatcgggtaaatttggcttcgtcaagctgggttgatttaggagagagaaaagtttcacagggggcaagcctcagtggagaggagaaggtcaaggggatctcttgtagggttccttgacatgggggccagaattgttgaagcggttgaagttattgccccctttgttgtcccggccagttccaagcacctttggatcagct

SEQ ID NO: 30660 - DNA, 365 bp, Oryza sativa
  Clone ID: uC-osflM202076f04a1
aactaagaccagtttgatttcgtgtttgatacaaaaattaagatggacggattcacaagagagcaccctctacttaagctttacattacaaggccaaccagcagctgcctgccggccgaccactgggtgcgcacgcgcgcgcaataatcaaccaatcacacacagtacgcacgcacataaaaaccacccatagccttcacgtacgcccggacgcacgcaccggttcgtgccaagctcaagggtagatggttctcgggatgatgatgtcgccgatgttggtgtgccacgggtccgagaggtggctggccaggttctccagtgggccggtgcccgggtacgccgactgttggacgcataaacccaca

SEQ ID NO: 30661 - DNA, 367 bp, Oryza sativa
  Clone ID: uC-osflM202076f05a1
gcaaaattggtgacctttcattctcaatgtcatgatgggagtacatgtctgtacaacggaattatggcaaaaggaatgatgggctttgcatcattctgattttgcggcaaacataaacatattactcacattgcaaacaaacagttgccagaacacatctacacacacaaaaaaaaccattacaacaatatgatcaaacaataaatctaccatgttgagagtgatcgatcctattattcttctaccaagacagactctacagagttcagaactatactactaaatcgccaatactaactcatccagttctaattgactgcatattcaaccagatccactcttgcatgccttactctggagcatcttt

SEQ ID NO: 30662 - DNA, 362 bp, Oryza sativa
  Clone ID: uC-osflM202076f06a1
gctcaaaatggataatagaatcttcattctccacacacctgcactgctcactaattacaagcccaaacctgattggcttaaatcaggctcatggcctatggctttccacaaacataaacagtgaaactgcctataactgataagtgtactgaaattcctgatgcaaattaaacgatacacataccggaaaactgtaattttggcatcaatgcgactgtcaaacacagagggacaagtgtgccattggaataggcaaaacaacattctgcattgcgaacaacataccataactatatcaatctttagagcgttgctgacaccctctaggtccaaagcgaccatcgcccctcaaaactcttttt

SEQ ID NO: 30663 - DNA, 309 bp, Oryza sativa
  Clone ID: uC-osflM202076f07a1
ataagacagtatgatttagtaaccgttaagtaacagatgttttcttgagtgaaccaaaatcaacaagcaaccacatataggttgacagctgatgacaaattagaggttgtttcaacatttgtgttcatcatctgatttcataacggtggcggcaacaatataaaacctaaagagtcagcttgcaaaacagcaagacggcacgaagaatacgatccctaccctaccaagtaagcagcagcctggcaaaatgaagtctggctccagcatcacgagccgtccactgacaaagatgtcactacgggaatgacg

SEQ ID NO: 30664 - DNA, 370 bp, Oryza sativa
  Clone ID: uC-osflM202076f08a1
ctcagttaaataatgggagatcatcttgtatataatgatcttctgccgtcactcctatacaaacattttacccattacaaaaaccaagaaatataccaaggcgcccaagctcactgtcactgctgactcccctaccactaaaaattctcaagagaggataacgaatgctaagcattagtcttctaagaatggcattcagaactgtggaactatgtgccggctgatgagaactcagcctatgaataaattaatctagccacaactttaacataaagatattggtcagaggttgtatttaactgaacagggatatgctagtattaaactcgaagcatcttctctttcaggcgtgaaatgaacttgaatgtct

SEQ ID NO: 30665 - DNA, 371 bp, Oryza sativa
  Clone ID: uC-osflM202076f09a1
ggctggaaatggatatattccccaagcgtgacaacaacttttgagtgccagtgtgtgtgtgttcccctcccctccctgcttaattacatcatctctaacgtaaatgattcgtgatcttcaacgggaggaaaatgacgctctcttcgacctccagagcggttttcctcccgagacaaaaagcacaaatccaaagctccccaaaaggctgtacaaaatggcaaaaagaagaaaaaaaaaagggagatcgaatgatcccacatcggaatccgacctcgaggcgacggtgtatatgagcgtctgaccgtgctagctccggagcgcgaccgcggcctcgtgcacgagcgagccggtggcctgcgcgacgccgtgcg

SEQ ID NO: 30666 - DNA, 393 bp, Oryza sativa
  Clone ID: uC-osflM202076f10a1
aaaattactatttataagaagagagaaagcaagacctgcccataaaagcaggacatgaacagcgatacaaccgatctcagttaggtacagacagagtagagaggtcaacccccggatgggccaaggctttaccaaaactgatacaggctcaccgcctagggtgaggagctgtttgatggtagcgctactttattcgtgtgaagcaacagtggttaagcatcatcctaaaacgcctcagagctcgttgactttagacacatcgcaatgggctgttgtttgaagcactaatgaggctgcgacgttcgtgcctgaacaggcttccatagaagcctaccctggagcagtgattaacacttgtgacaggacgatcgcacacgctttttatgacccagg

SEQ ID NO: 30667 - DNA, 339 bp, Oryza sativa
  Clone ID: uC-osflM202076f11a1
attcttcacactcttgctctgtttgctgctaacaaatcaaaacccgatttgtttagtttttgggtttgttttcctttaacccccttacattacctttggggggacaaaaaaccctccccaccactgaaccccccggggggcattaaaaagaaaaaaaagggaaaaacctttgggggaagaaaacagtctaaaaacaacatcccccccttgaattcccaaattttttcagcagtgcatgccaaaacaggagggaggaaccgtaaaattggggggcccccaaaaacctaacgcaattgggcgggcgcaccaccgggaaggcccgggggatggcctccaatg

SEQ ID NO: 30668 - DNA, 361 bp, Oryza sativa
  Clone ID: uC-osflM202076f12a1
gaaggctaaacctggtgcatgcatgtatttcatcgagaatacaatctgggggttttctttaccacaaaaaagttggggctaatcatgtagaagggggtgaagggttatggacagcaaagtagggttagctgattacattgacaggtaaacctacaggtaataacaaaagaggatttaacctaaactagatgcaactttgcgggtgacttctactggcgtgcaacaaaagctcagcgtccgacaagatcacatgggtggggtgacgcacgtgccgtgccgccatggcacgccagagcggccaagaggttgggggaagacgacaactacgacgaggagcttggccacgcgcgacgcgggccat

SEQ ID NO: 30669 - DNA, 405 bp, Oryza sativa
  Clone ID: uC-osflM202076g01a1
tgtctttcgccctcctttttttttttttgatgtgcaagtggatgcattaattcatcatcttgggtgttcttatattacaaatcaccaccatgcaagtcgccattaaccaccaacccagctttcctaatttaagtagtaatcaacaaaaggatgacctctcctctctccataccctcccagctcgctcgtcatcacaaaactaaacagcgcgcgcgaacgcacaccaacgcatcgatcccgtttgaattgcgcgcgaaagagcttaaattaagaggatgaggagaaggtgttgaaaatggtggtgtggagcgggtcgctgaggtgggtggcccaattgttgaggggccccttgccggtggcggcggcctgcacggcgaagccgaggaaggcgaccatggcgaggcg

SEQ ID NO: 30670 - DNA, 345 bp, Oryza sativa
  Clone ID: uC-osflM202076g03a1
gctggcacgtcttatttgtatcgattgccatccaaatattcagaggctcctacagtgcttctcttatctgtgctttcctcaacaggtctaaagaattttgaaatacttttggtagattgatacataaaaatcaatctacaatgacacaaaactggaatctaaaaatttttaccccatggttaaatgggaaaaaaagggccttggggcatatattttattttaacttggaattcctacccaatgaataaattatttccttccaattacatcaagactctttctggctaggttggggggactggcccttttggctgattcctaggaaccaaaagtcggggatttggt

SEQ ID NO: 30671 - DNA, 368 bp, Oryza sativa
  Clone ID: uC-osflM202076g04a1
acatataaatagtgcaagccattgaataaaaaattcgaaggaacacacgccattagtcttttacatgtcaactgaattacaattaaaacatgttgcactagcatacattgttttgcaaacatgcatagctaaataaaaaaaaaaaaaagctaactcatatataaatcgtataaaccacgggataaaaatacagtaccttcataattttattgaaattagtatgctcaaataagctgagcaacacaaataatcttttgtgtaagtgctctaaactatattatattaccatgtaatcaaccttagatagtatttaatgcacttttaatataccatggatagatattcaagcgcgcattcataatacacca

SEQ ID NO: 30672 - DNA, 367 bp, Oryza sativa
  Clone ID: uC-osflM202076g05a1
gctcatgcgaacaacatatatgcaattgcaaacgcatggaaataatgtaacagtatatatgtatgtactgatcaattcgcagatcaatcactccttgtcgttatcatcagcacccccgcgagacgaggagccaatgccgacttgcagccacggtgtcgtctcccctgccatgctcacgtccttgagatcgctaagcctcgctctcttgacggtggtgctgtccgcctcgtcctctgctgcggcggtgcttaacccgaccgcgtcgttggcgttctggctgccggttgtcgcggtagccttgttccgttggctgggtatcgccggcgacgatgggatgtataccggtggtggcgcgtcgagatgaaac

SEQ ID NO: 30673 - DNA, 367 bp, Oryza sativa
  Clone ID: uC-osflM202076g06a1
attgatatatgttggatgaatccaataaaaccgatacaagtcacgaaaaatcagactagatgaatccttcgagatcacatgagcaaaagctttcgacgaaagctgtcctatagtcgtggaagcaataacacttgataaagataggaattcagacacgagaggttgcagactataagatgtcatcaaatctccttgaacgccgcgaagagatcaccgttgatgtagtcgttgtccacaagactaaccaagaagtagctcttctggaccttgtctagtatctccctagatgagtcgccctcagggaacaggcaagcccaaccctttgaccaaatttcgaaagcttcgtctttccaaaccataaagctgg

SEQ ID NO: 30674 - DNA, 340 bp, Oryza sativa
  Clone ID: uC-osflM202076g07a1
aatataaacaagtgttcacatatatgttgacagtttaaaaaaaaaaagggggaaaaaaaaaatttgtgcttaaaagctgtccctttttacaaaaggagggggattttaacacctaaagaaaaaattggccggggagggtgacttcacaaagaaaaccacccctaaggctaccgggtaaaaaaaaaaacgtgggggtttccaaaaaacgcaagaaaaaacccgtgtccgcacccgcgacaaaaaggggaaaaaacaaaattggggaaaccaacccccccaagggtgcccttgggaattcgcgggagccccgggggggggggacttacccggcaaggggggg

SEQ ID NO: 30675 - DNA, 192 bp, Oryza sativa
  Clone ID: uC-osflM202076g08a1
aggagctgaggattctatttattgggcgctctttttttttttttttggaaaaatcattaattatttaaatataaagcaaacagttggttaaacagagtattcaagagtcgattgagctttgttcacggagacaaaatcaaagacctctcttatggactggtggttacttaatactagaaattacttagagac

SEQ ID NO: 30676 - DNA, 271 bp, Oryza sativa
  Clone ID: uC-osflM202076g09a1
gcttaatgctgaaggcttcccaaaacgtgctggaagaatacaggatgcaacaagagttttagaatgttgtacggttacatatcttctgatgatgaccgtgaaaaaagtggatatcttgcattggctcttacccacccccacccaaaaaaaaaaaaatcctcatacacaagcccgacaacactccattggctacagtcagggtagttagataatctcatcagtatcacaacagcgaagcattttttcagcaaacaaaagaaaagggaaaagc

SEQ ID NO: 30677 - DNA, 341 bp, Oryza sativa
  Clone ID: uC-osflM202076g10a1
ggaagcgtaccaaatttgcatatatttatttttcaaaacccgcattgtacaacatgtatatttcatcgcagtttattgttccatctttattcattcacaaaagtagatacagccagtgccttggagagttggaggttcgagcattttggcctacaatgctcttgctaacaattctggcgaatgaaaaccaaaaagagctcaagtgtgaaagtttaaagatacatggcacaatattacagaagttgccgggacaaagtgatctacgaacgaattatgctcacccgacagaaagaataggaccggactatatataactacagcaaaaaggccacaagttcaaa

SEQ ID NO: 30678 - DNA, 311 bp, Oryza sativa
  Clone ID: uC-osflM202076g11a1
acacagccggtggagggacaaaataaattatttatttgcatcctgaacagaaaacggggtcaagcccccaataaatttaccccacaggcttgaaaaaaaaaccttacggggttggtttgcacaaacttccccataaaaacgggaaaactgttttctccacaaagaaaatttcagtagacctgttgcctcaaccaaaaggggggacgattcatcaggtttaattggggaaaatccggggggcttccaggaaagcatcaggcatgaggcttttcatgaccaacttgatgaaacggggacggggggagggaaaa

SEQ ID NO: 30679 - DNA, 365 bp, Oryza sativa
  Clone ID: uC-osflM202076g12a1
ggctgatagagacaggcaacaaattaatgcattaaatttcaattcctccaatagcttcttgattcataacagcgacgtgaccaagtaaaaggggggtaaaatggactacaaaaataactcaagagagaaccccaaaaaaatgaaaaaggaaacaattatcatagttgagttttgagatctaaaacataaggcaacggatgatggaatattggagcattgccattccttcgtctgagcagatcaaaagatggctaatctaaccctgctgattggaatcagttcctactcttcatctaacagtaaaatggtaggcatcagtcgagtcacagcaaggaaaagaaggatccccatcaggcatcaggtag

SEQ ID NO: 30680 - DNA, 332 bp, Oryza sativa
  Clone ID: uC-osflM202076h01a1
gacagtaccaggaatctcaatacaagagaaacaaaaaagtggaagtctgaacatcaatgtgcataatacattccaaaacctcgctagaaataaccgctggtgccaaatggagggtaaaaataatctacacatggatggacaagatccagaacaaagctcggaacaatgaagtgacgcccttgtagctggatagagcacaccatgtacaaataaagaataccctgtcaaacttggaataacggaaacgggaaggaacggtcaattcatgtacgaaacatgaccaagattgctggcaaacatggtctttgacgtaccatgtgaccaatcaagca

SEQ ID NO: 30681 - DNA, 199 bp, Oryza sativa
  Clone ID: uC-osflM202076h02a1
cgcgtgggtttgatttttattttttgaccggttcttatttgttttccatctttggggggaccaaaacaaactttatcatgatccaatgttttaacgggggaagagaaaactgggaactgggcaaaatcttcattcaccaaaaagggaaaaaggccaaccagtacgggtcccaagacaaacccaaaagccgaattttaaa

SEQ ID NO: 30682 - DNA, 266 bp, Oryza sativa
  Clone ID: uC-osflM202076h03a1
gttcggagagaaggccatacagatcttccgtattaagcatcagtaattctcattgctctcaggaaaaacatagggggcaccaatttgtaatgtacccaatcaatacaaataaggcacaaccaactaacgattccatgatgcttgaactgcccacgtaaacgagacacaacacccttgtgagggtgggtttttaaaagcccttaataagggcaaccttgagggactgcacaagcgaatgttcaaagagatgttaacagttgaacaat

SEQ ID NO: 30683 - DNA, 253 bp, Oryza sativa
  Clone ID: uC-osflM202076h04a1
gtgcaaaaccggaacaagaacatacattcaaatgcttcatcagcgcatgaccccgccacgtggcgaaaaaaatgggaagcagttacccaagatatgttagacctgtacacactttttttgtaatactcaatttgatagaccattataaaaccttgttttgtgtcaaatccaggatatagctccggaagatcttccaaacagaattgatcctaaggcattcgatggtatgcgcccataggaagatgactgatga

SEQ ID NO: 30684 - DNA, 367 bp, Oryza sativa
  unsure (1)..(367): unsure at all n locations
  Clone ID: uC-osflM202076h05a1
gttacatctccacagacaagcatgcataaagtacttaataaatcgcacataatagtaactatgatcttcaaattcacaaattctccatatgaatattacatacatgcagaatgtgaaggaaaattaaccaaacttggaagcaccagcgggaagcaacatatggcggacatagttcaaaggaatggagaccatatgcatggatacatagtacataatagtgcagtagaatctatccacgaggcgaaatgcaggatgcgaaggctgaattcgttgatctagtgctggacagaggcggccatcttgtacgcgtatctacacttcagcgccacctcgcgcgcgccgccgncgccgatctcaggcgttgctt

SEQ ID NO: 30685 - DNA, 360 bp, Oryza sativa
  Clone ID: uC-osflM202076h06a1
gagaaccaaaggctgctcatcacccacttggcatcttgggcatgtcacattacatacagaaatgcattgccttaatctttcctttacatggtttaattttctcctcttaatcatctacatgctaatgattaatcacccaaactatgttgcgccattaagtaacatcatcagctcagctgcagtccacacagagcgaaggcagcagcagcagtgccttttaatcatctatacattgcagctgcaggtgcagcagccatggaggatggaggcagcagagactctgatcatggcgtggagacgtcgtcgccgccgaagctgtagggagcggagctggagcaggtggtgctggtgctgctgacc

SEQ ID NO: 30686 - DNA, 135 bp, Oryza sativa
  Clone ID: uC-osflM202076h08a1
gggatgataacttcgatgttattcatttcatagaataatcgcaactcaaaaacaaccagaacacgtattttttctggtacccttattaaggattctgattaaatcttgaattaagccgaactatattggtccaaa

SEQ ID NO: 30687 - DNA, 57 bp, Oryza sativa
  Clone ID: uC-osflM202076h09a1
accatcaattgttttaacacaacgcacggaccaacgatttattaatgtgaaggcttg

SEQ ID NO: 30688 - DNA, 367 bp, Oryza sativa
  Clone ID: uC-osflM202076h10a1
gtagcacaagaaaagctttacttccattataaccaacaaaggacagcctctctgtgcagcatctctttcccgcagtactcaggtttttcatcaaggaatttacatttgccataactaattagctaaaccaacccgaaagaattgttagctgtcaacaacgcagcgagacacagctgcagccatgacagcaatggagggtgttttttttttcttttgtgtgttggaaaggcctaagcatggcaacctacacaagctgtttctatgcatgtatagtgctatataggatggatttttgtgtactaataatatcttgagctatctacagatcatgagcttgatattgtcgctggcacagggttgttgttcg

SEQ ID NO: 30689 - DNA, 103 bp, Oryza sativa
  Clone ID: uC-osflM202076h11a1
ggggggtcaagaaaagcgcatctttcattattaccaacattggaaagccacaatgacttgtatccacataacgcgttagatatgagtttaattccaaacaaaa

SEQ ID NO: 30690 - DNA, 325 bp, Oryza sativa
  unsure (1)..(325): unsure at all n locations
  Clone ID: uC-osflM202076h12a1
aattcgatcatcccttggatgcggcctgcggcttacattaaatctcgatccaaagaagcaaagatgatgaccgacagaaattaattaagctagaaatctcctcgatggatcacacacacacacacaattaagggacatacatacatgccctgctgcaactgcaactgcagggtcggggcgtggctactacaagggtacacatggtacgttggttggcaccatctcgatcgggtcgttgggctcacttgccggggacaaattggggggnnntcatcacacgagtcacagcagggaaaagaaggatcccgatcaagcatgttgtagc

SEQ ID NO: 30691 - DNA, 133 bp, Oryza sativa
  unsure (1)..(133): unsure at all n locations
  Clone ID: uC-osflM202077a01a1
gaatcaggctccaacatacttcaaatcatagaccacaccatacagcaaacatagtataaacattgtcatagagagtacagctgatagcagcttgtaatattctagcattactttggtangcatcccttctaca

SEQ ID NO: 30692 - DNA, 125 bp, Oryza sativa
  Clone ID: uC-osflM202077a02a1
gggacaagcaagaagtatatatattcatccatttctcaaactactacaagaggtcgagaggaacacataatcaggagggattgcgacaatttacagcaacagggagtctggagaattcgacggca

SEQ ID NO: 30693 - DNA, 401 bp, Oryza sativa
  Clone ID: uC-osflM202077a04a1
ctattgagtcgcccgtcctttttttttttttttgacattttaattttttttttatcagaaggtcacttatcagttcgagaattcgaactgtgactggcccgcgattttcttgccaacctaaaatatacgggcgccatctcaggccttggaaaacataaacatgttatgtagcatgcatatatacacacatctgccggataaataccctagttaaaagctacgggcttcttctctcggcgtatgcgttccacctcgtcattaggaacgtgacaacaacacgtttaggccgacttcgcgaagccaacccttatcttgccgtattcgaacacggtatggtaggcacccatgaaaacgtcacccaggatccagagaggaccacggggaggagggatttccatggc

SEQ ID NO: 30694 - DNA, 194 bp, Oryza sativa
  Clone ID: uC-osflM202077a06a1
cttaaaacaagttttcccttgatgcgaacaaaatgctgtctgtacattttttcgtttttgctggcatgctttctgtacaatctgatgctatgagtaatatacaactaatgctactatttcgaggaaaaaaaaaactactgcatgagcatgggcaggtgtgacttatgcccgtattatgtatatttacataaatt

SEQ ID NO: 30695 - DNA, 190 bp, Oryza sativa
  Clone ID: uC-osflM202077a07a1
gaaggacaatggcaacttggcaagtactatctgcgagtttaaagaaacatctcgtaccacgaccaagcacctttgtgcttctgcactgcaaaatcttacaaaaagaagctgctcaatgctaactatcttacattccttgtgaaatctgtcaatattgtgtaagcttaatgttgtattcaaaataatcgga

SEQ ID NO: 30696 - DNA, 173 bp, Oryza sativa
  Clone ID: uC-osflM202077a08a1
gcgcacagcgtctcgaggagcacgacgccgaaggagtagacgtcggacttgtccgtcagctgctggcaccggaagtactccgggtcgaggtagccgaagctgcccttgacggcggtgctgacgtgcagctggttcatcccgggagccgttccttggtatcagcccaatagtcg

SEQ ID NO: 30697 - DNA, 426 bp, Oryza sativa
  unsure (1)..(426): unsure at all n locations
  Clone ID: uC-osflM202077a09a1
cacagagaacatggaagtgcatacataatttagatagctggtccaaaccacatactctatgttctcacgacagcacattaacaaaacagagaaactagntctcaaaattcccacagataatcttcttattggagattgttcatggtaataaacatgatgtgattataattccttgagaataaggaattccggtatatcgctgtctatctcataatacttaaatacaatgacatatcgctcatcttgcgttcacttccgnatgccatctttcgagaaaagttgttcgaacctcagccatagttcacctggtctcgagatcattggtcttggtacccatgccttttcctgcatgccttaaaccttagcatgcctccttccggggctaagctttgggtcctcttgggaagtcaagctttctccttcctg

SEQ ID NO: 30698 - DNA, 134 bp, Oryza sativa
  Clone ID: uC-osflM202077a10a1
aactcatctgaagtatttttgaaactgtacattattgtaaaccaggcattttaaagccatacattgcttgtggatacaagaacactaacaatacagatatcgcgagcagctcaatatcgaatttgagcccggtt

SEQ ID NO: 30699 - DNA, 405 bp, Oryza sativa
  unsure (1)..(405): unsure at all n locations
  Clone ID: uC-osflM202077a11a1
cccttgttgctttccctatgcttttcttttcttttttttttttttcttgctttcttttttttccgtctttttctttttttttttgcccaaaaacgcaactttttttaggggccccaaaaccccagccccgcaccccagaatgccctttgccggcccaggccttagggggggcccctatgccgccttaaccccccaatncccgaattgctgtgacacctttaacaacccgggcccccccacttcccccaatccctcaccgggccccccactggccacccccaagctttatccggggcccatgggccccaaacccggccccaaaacaacccccctaaacagggggcctcccccgggaaccccccccccgggaaaaccgcctttccattaggggaggccacccggccc

SEQ ID NO: 30700 - DNA, 215 bp, Oryza sativa
  Clone ID: uC-osflM202077b01a1
tcggtcgcggcggttggggtggcggtggtggtgtcgcggaggaggaggagcaagcgggaggcggaggaggagcggcggaggagggccgccgctgtgatcgaggaggtggagcagaggttctcgacgcccacggcgctgctgcgcggcatcgcggacgccatggtggttggaagatggagcgcggctcttccgcgtccgtacccttctatcgcccc

SEQ ID NO: 30701 - DNA, 402 bp, Oryza sativa
  unsure (1)..(402): unsure at all n locations
  Clone ID: uC-osflM202077b02a1
agacaagcaattctatatcatttctgacttttgtattcattattataactacatgaaaatttcctgcttagaagcaggtaacatagtgaatttttttttgtcagaaatgaataggcttgggtacataantgtcattcgattcatatttttnntgtctttgtgcgtcttttcttttttcgtgttctcaaaaagggtctatggcctctttatgccttccaactagcttacatcattgcaacttgctatcaattcgtatgtntgtcaactttgtcattccatatgttgaacgtatacgttggaatcttgcccatggtctaaatgaaaatcaattctttgttcaggcctaacgcaagcagagggaccctgctccaagggagttcattctttgctttctgggccctg

SEQ ID NO: 30702 - DNA, 417 bp, Oryza sativa
  unsure (1)..(417): unsure at all n locations
  Clone ID: uC-osflM202077b03a1
gatcgagactataaatccaaggaccaaggattatattataatggggttacatccagaataaggaaaacaactcagtttcaggtttagcacagtggcggcccttactgctagaaatgctagctggcattgcatatgntcgttacttaatcattatatatgctgtagctaccatgttctgatagcttcatatcnnttccgcattgaatgattctttttttaaaaaggtttccttaatagtacatcaataatatannagccttcatangttatctntgtttaccattccaaattctgtgttaagaatctttgtcctccaatttattcgcataaatactttcaacatacctgtttcaaaaggaaatctttcccaggttactgttcgcctccgttttgtgacattttcccaataaatccata

SEQ ID NO: 30703 - DNA, 153 bp, Oryza sativa
  Clone ID: uC-osflM202077b04a1
ttgtttcgccctttttcttttttttttcaaagttgggcaaaaaccaaggtttgcatttgcactattgttacaccctgagttgtggaaattttctagataaatagactttgcagacatatgatttattggcctggatggctcatagatcataac

SEQ ID NO: 30704 - DNA, 349 bp, Oryza sativa
  Clone ID: uC-osflM202077b05a1
aacctgaaaacatcacctttttatgcaattttttatacaacaaaaatcttgaaacatagttttctgctgatattcctcgaataaatagaggaatggcaatatgcacgtcctctagaaaaactgaaactaaacaatactctttacctcgtctggtctatataatggttgtgcattagcattaagcacaacgcagcatatcgagcaaatgcttgacattgtttatcccccctattatctgggaaatgctacataagttacagtgacggagatacccagaaacctacaaaactgttgcgcacttggcagtgaacgcttcacaaaagattagctttccacctttttcctcttt

SEQ ID NO: 30705 - DNA, 151 bp, Oryza sativa
  Clone ID: uC-osflM202077b06a1
acatggaaatcaaattgcttatgtgcggaacgaacgatggccgttatgtacagcaggcagaattacatgatgagaattggaaaggcttcatggattttttttttcaagccatcctacgcagcttacaacaaaatgttgggccaaattcccg

SEQ ID NO: 30706 - DNA, 123 bp, Oryza sativa
  Clone ID: uC-osflM202077b07a1
gaaaggtacagattgtagcgtccagctttattgaaaactataacacgaaccttaagtagaccttatgaaagctgagatcaaataccatgccaaccgcttctgacaaatgggcaccagatttcc

SEQ ID NO: 30707 - DNA, 200 bp, Oryza sativa
  Clone ID: uC-osflM202077b08a1
gcctcgaacaaaaatttcgcagcattagaactagatataaactgtacaatccacaatgcactgaactgaatgcatgcagatataggcgaccacatactttttacttcagacaagactctgactatgatagctgcataaaacatactataaacatggcaatgcacccaagtgatttcacatacttcttcctttctttcttt

SEQ ID NO: 30708 - DNA, 179 bp, Oryza sativa
  Clone ID: uC-osflM202077b09a1
gtccgaaaatgcatacctgaattttatgcgggcaatttcaccaagggtttttacaaaactgtgatggaaaaacacatgggaaggtaaacaacggaatggggtggtttacatggtattggcgggcaaggctagggcctaggggggctccccatccaaaataaaatgtgagccgaatacaa

SEQ ID NO: 30709 - DNA, 443 bp, Oryza sativa
  unsure (1)..(443): unsure at all n locations
  Clone ID: uC-osflM202077b10a1
gacagagaacatggaagtgcatacataatttagatagctggtccaaaccacatactctatgttctcacgacagcacattaacaaaacagagaaactagtctcaaaatcccacagataactatcttatggagatgttcagtgtaaaaacaggattgataatatccttgagtataaggatccgggtaaccgctngtctactcaaataccttaataacaagtacatacgctgcacgtgcgctcacttccggagccacgttcgagaaaggtttgtcngtacctcaagcatatgtcacgtgtctgaagatcattggctcttgtcaccctatgcctttcctgcaagccttaaaccttatgcagcctcctccgggctaatgcttgggtcctcttggagtcaagcttctccttcctggccttgatgcgggcagcctcagcaagggtggcca

SEQ ID NO: 30710 - DNA, 148 bp, Oryza sativa
  Clone ID: uC-osflM202077b11a1
cactatataaaaggcatggccgacgaatgccgccttccttagcctggaatcctttgatggggcggccctttttttttttttttgggtacaccaggctatcccatattaaactgagtgtagagacccccaatttttaaacccccaaccc

SEQ ID NO: 30711 - DNA, 233 bp, Oryza sativa
  Clone ID: uC-osflM202077c01a1
gaccacaatatcgaaccattgtacactgcatggtgcatatgcttctgagaggctgagacagatggacttattactggcgctagcttagccttatcccaagtcgtcaacgactcaatcttcctatctacatcagccacgttacgctatatcgatatcgagttagctacagacaaaattaatttaaagctatatttaaattacaacttgacattgcatcgttccacggttcgctg

SEQ ID NO: 30712 - DNA, 149 bp, Oryza sativa
  Clone ID: uC-osflM202077c02a1
cctaataaaattctcggaagtaccatgtacgacagcaattcaaatacgtgcatgcccaattgcccagatacatcttttcaagtattattacatggccattcataacttacacagcatcacctacacactgctgtctaagctgacgggca

SEQ ID NO: 30713 - DNA, 119 bp, Oryza sativa
  Clone ID: uC-osflM202077c03a1
aaactctcactgagcgcacactttcccatatatcaaccgcgaaagatcacattacactccataatgaatgggtctactacaagcgggccaaggctatgaacaaacacatgtgtgagtgc

SEQ ID NO: 30714 - DNA, 427 bp, Oryza sativa
  unsure (1)..(427): unsure at all n locations
  Clone ID: uC-osflM202077c04a1
gggcaagagcatttataaaggatccagtctctgaaacattcgacaaagttaccaaaattgggcaaatggtgttgccaccagatgctaaaagttgagaaatattcacatggatcaattctaccattttgtagctttttcacttatttcccattatgtcgcgcccttgtgaaaatggccagagactatgcgagttcttttcaatgcatttccatgatgcctttgaatgatagccagtaaaagggcttgtgngcgcagcatgcttggaggggtaagtcttctcaggatggcattcgcaatatggttcgcacccatttttctcaaactttgtccagttgttatggcaggtaaccaacttcctgcagttctctcaggccccattatcggcaggggtgtgctcctggagcaaggaagtattttcactggtttt

SEQ ID NO: 30715 - DNA, 146 bp, Oryza sativa
  Clone ID: uC-osflM202077c05a1
gaatcgatacgcaatactgaatcaatgcgcaaatgaagcacttgacaagcaattaagcgtagtttatccaccataattaagatcgagaccatgagatagctggaacactgctgctaccatgagatagtttatacccccctgtagta

SEQ ID NO: 30716 - DNA, 409 bp, Oryza sativa
  unsure (1)..(409): unsure at all n locations
  Clone ID: uC-osflM202077c07a1
gcatactgtatgtgtatgctcggaataacacgaattagccgcaacatatgcagcaagaatgttgcgaacatctcaaccttagcttacaatgttcagcaccatgctgaatttcccaatcccgggtattcatgcaagaatacctngaatatatttttcaagaaattctcattccactttcctatttttctatcattgaataaacatttgagaaaaactttcagttggtaagcatacgtctactatcgtcatgtacttcgtatcgagaatggttccaaggatgtagtagttctttgcttccggcacggcgaggcttcgtaacgtgatccaagccgctatccatcaatcgtagggagaatttccgccgccctccgaattccaccaccaccctngccggcttcgccgaggagta

SEQ ID NO: 30717 - DNA, 424 bp, Oryza sativa
  unsure (1)..(424): unsure at all n locations
  Clone ID: uC-osflM202077c08a1
caaattcaaaaaccacgatttataaagtgccggagatgaagtacacaaattaacattacatcgagttttaataaaacatcatgcgaaaagccagcaaaaacaaaaggcagcatacagctaatgaatgctctacttggagtagcttcgcataaagggtccgcactttattttcatgtagcacttctacttccattttcttttccgaaaggatgtgaccattcttcttatctgggtgttgtacattgtgactggtatcatggtcatacaacgcgaggagcctgttattcccccatttcgtttgttcataaccaagtactacaagtcttaanncaaagttgtcatttgagagggcaaataccggcctttgcatcaaagatgctttgacctgtttgtccaccctggaagtctgtggaaacaaggtcct

SEQ ID NO: 30718 - DNA, 281 bp, Oryza sativa
  unsure (1)..(281): unsure at all n locations
  Clone ID: uC-osflM202077c09a1
aaggatggaatcgagtagcaatactttcaccccaaaatacagtttagcgacaatatcttagaaaagccgcttgctttgccgccatggctggcaagctgagcagagcagctaacacaaagaacatcgagatcatctattaaaccataatcggcaatcgaaccgatagaataatacatgggtctctttcttgctcttcgaagatacccacgatagcgnngttcgtttcttcttttttattttttnaagtctccttcttccttcctttcgatgaaaatgggtgt

SEQ ID NO: 30719 - DNA, 359 bp, Oryza sativa
  Clone ID: uC-osflM202077c11a1
aggacaaaagtagaaagcttaacatataccacacattttgccgagctcaccctcacagcattgttgttcgaaatagggacggacaaacaacacaggttcagctagaaattcctaaaaacagttgagttcatggtgtagctatagatgatcacattggattttgggtgttcattcatgcctcgggaaatatttaacttaagctgcggaagacatctcaaagtgattgcctagcctaatcccagccttgagcagctggttgagctgccgggtcccatccagtaggcgcaaccggtggaacgacggcggcttcagtggctacgggtgctcctgcttgatcccatccttcggcagcagcaact

SEQ ID NO: 30720 - DNA, 150 bp, Oryza sativa
  Clone ID: uC-osflM202077c12a1
aattaattcacaacaccatatttcattgatcaggttcagaacctgcacagaaattcacactaccggttcagatctcaccttctctccaatacttgtacatccatccacgcggtccacacgaatacgtacatctatacggttacacgtacg

SEQ ID NO: 30721 - DNA, 151 bp, Oryza sativa
  Clone ID: uC-osflM202077d01a1
caatacatattgaattgttttttgaacgaaagtacgtatagaattcatccataggagtgggcatgcatatgctgatatgccaggtttacagatagatcacttgacaattaccgtgcatatgcctatctatacaaataggttaattttgcag

SEQ ID NO: 30722 - DNA, 428 bp, Oryza sativa
  unsure (1)..(428): unsure at all n locations
  Clone ID: uC-osflM202077d02a1
gcgggcaatgtaaaaagaacatatttcacaaaatagtacactacgaatataagtttctatcctgaatcttgtccacaatacagaatgcggccgatctataaactaaactaaaaatcatgatacaatgnttgtaccccgtgttcattactatatganntggccccgcactacgcatgcatatgttatgcaaatatatcatggatgcaccatagaagcttgcttgtcattcatcattatatcctgacagtctcattactgcaataccatattggcatgtccaaaaactagcttctttgcgaacaaaanttnnnagttggccttttccttattgacnntagcagaanatctcggcaattcagcaccannagtggaggtaaaaccgaaaataaaattacangcagtgcacccttctttcaccaccctggaag

SEQ ID NO: 30723 - DNA, 374 bp, Oryza sativa
  Clone ID: uC-osflM202077d03a1
cacaagtactgtcagggcaaatgatatgtcgggaggagacacaatatatgcgccaaatacctccttagaagagaaccaaatacaacattcacccaacaatatcttgtttacgatggggattcaaaagtaggtccaccacttcatctcatgcatatcactgaagcaaatcagtttacaataggtttaagtgacaaatggtaagagacaagaagcctcatgactacggctcaagagtgtcacttagaacagtaaactatcaaatgtcaacagacaatttactccacctcttccaagaaatccttgatctctgccggggttagaactttgaattcacggtcagatcgaataactccaatttcaatattgttggctga

SEQ ID NO: 30724 - DNA, 447 bp, Oryza sativa
  unsure (1)..(447): unsure at all n locations
  Clone ID: uC-osflM202077d04a1
agaaacaaaccaatctgcttctaattccattgtaaattgccgcatatttttttgtcggcacggtgaccacaaaacatttttcggtttgatgactacaagagggtaagtactaagtacactgtacacatcccttgcatagttcggtgagaaaaccaatccatggataatctaatttctgaggatacgncttgcttggcatctttctatttggtataccctgaatatctatcatatcaattattatcaanntcttcctaaatatcnnnctcccataattatgaatnnnctcaagaatctgatacgaatgatccattaagncnngctatattacatannatacttctgtgatgtgatgccaattgataatgccctttgatgatgaacatttcctaagaaataatatccaccctaagtttttttaagtttttcagcccaatagatgctaca

SEQ ID NO: 30725 - DNA, 432 bp, Oryza sativa
  unsure (1)..(432): unsure at all n locations
  Clone ID: uC-osflM202077d05a1
agtatagcccatatctttatattatattattattaacaaaaacttgtcatgcccagctatggcttgggcgcgatctgatacacagaacaaagagaaaacataaaaaggagaaataattaatagcaagcgtcaagccgtgcctgcttaaaagngtgtaaagtgcagactgnccgtcgtacgcttcctacgccngttggggtcgaaagttcttggcatacatgggtcgtgtgcaaccctttccgtgcacatggcaggtttatccttgcttgtctgttgctccttgtcccttccttccttcctatttgctaggccgcctatcgtatgctatcgattgggtatgcgaatatgctagagaatcttttatttcagctggattggcgcagaaaccgtagaaggaatccagtcttcatggcgtcggagttagcgtcacca

SEQ ID NO: 30726 - DNA, 168 bp, Oryza sativa
  Clone ID: uC-osflM202077d06a1
agaagtcagccctgttattgcttcccatttatattgactgttggtccgacaaagttggcacgtgcgcttacttatctcaaacaaacggattgaacctgcccatgcaccccggatcacccatccactgcacaacaaaagtcaccaaacacagcgcgaaacccaaagttg

SEQ ID NO: 30727 - DNA, 141 bp, Oryza sativa
  Clone ID: uC-osflM202077d07a1
ggaaaagaagtccagaaatcccaggctcatctaaattgccaatacatcgtacaaatttcggacgtaatctgacatgtgtgggaaacacggatttgagctgggaaacaaagcagggctccacttaccactgcatccagaact

SEQ ID NO: 30728 - DNA, 120 bp, Oryza sativa
  Clone ID: uC-osflM202077d08a1
gtcatccattgttttggctttttatttttttggcggtgcaacattctattttcgcatgacccctgtcttgtgtgggcaactcggacaggaactgaacaacaacccgggccccattgggca

SEQ ID NO: 30729 - DNA, 139 bp, Oryza sativa
  Clone ID: uC-osflM202077d09a1
atggtaataccaccttgttttgcgtaaaaaaacttaatcttcatcttcagagataagaacaccacctttgatagatggatggatacagatacaatcattggcaaaattcaaggtctcgaactttgcaattgagacgttc

SEQ ID NO: 30730 - DNA, 434 bp, Oryza sativa
  unsure (1)..(434): unsure at all n locations
  Clone ID: uC-osflM202077d10a1
aatcagaaagaatggcgacatatataaaagaacatatactaaactaataaacaaaccaagattttacaattacatcacaggctatggtacaaagctatcaagcagatatgctggcgtttaataccccaatccaattcatgagcctctaataaatataaatatatcaaacatgcagtagtatatacgatccatgcttgcctttatgatcgtcgcccctgccggtggtatattggcaagggcgttctttcgtggagaattctccactggtggagttgcttttatcgagggttgattccaaggcatccaatcgctttttgcccgtctatttgtcaccccagttcaacngactggttgctgcctgggtttgttcatatccatttcgttcaacccaataccccctaacacgttcgggcaattcctcaaaacacctttga

SEQ ID NO: 30731 - DNA, 160 bp, Oryza sativa
  Clone ID: uC-osflM202077d11a1
atctatagtttctttctttatttttatttccttttatttttggtaattcaattttattttttggtcctttttgtgaaaggggaactgaaaaacctacaaaaataaagcccttcttcaggggggtttacaccacaggaagaacggagtttaaaccacccat

SEQ ID NO: 30732 - DNA, 152 bp, Oryza sativa
  Clone ID: uC-osflM202077d12a1
aagaaaagagttcgccgtttcagctcttgttcacaacagccagcttccccaagttcattcccccattgattttcctacagagatcgagtttaaatcatttcgctatgaacatctgtggtttggttgattaggaaacgagggccgaagttagt

SEQ ID NO: 30733 - DNA, 148 bp, Oryza sativa
  Clone ID: uC-osflM202077e01a1
ggagtgtataaaagaataaatactgttgcggtttctgacattaggttcgtattaactcgatcttctttttattatgaacacttgcgagcaagctggatgagagaaatatggccttcctctgcagctctgctggatgccgtttcttggt

SEQ ID NO: 30734 - DNA, 384 bp, Oryza sativa
  Clone ID: uC-osflM202077e02a1
cagaagcaatttgttatttgtagagaagatcaggatacagccagttcactatgcgatcatgtaaacaggcctgctcggtcacggtaaattcaaaaagtgtagcttcagctaaagataaacctaacaggccgtccaaacaaggcaacacatgtaaattacaacaaaacatttttgctcccgttctacgtctcactgccgcatcctttgttgcaaaatgaccgtactgatatcatgaaagaggaattgttccagagcgtgtagctccaggagccccttatgcagctaccctcaatttctgtgtcttcaccttcaacctttccatgaattgagcattggccttaagtctgtttttaacatatgcatttctagcatcatcagccaact

SEQ ID NO: 30735 - DNA, 407 bp, Oryza sativa
  unsure (1)..(407): unsure at all n locations
  Clone ID: uC-osflM202077e03a1
ccggaaacaggggggcaacagacagaactaaacacaatgcatatgtattgttacaaaactctcagcattttaagtttgttcattcgaacgatacaattaagagcccaggtcacacaaatncatgccatatacaacattattacggaggccataatactgtcacacggtaccgattgccaccattctaaataccttttcgtgctatacctatgcagaaacatgccctatagcttataaatatgactttttgccttgcaggaagaaccctaaggataagcacttacaggaggtgatatcccgaggcacacctttgaatgttaacaaaggtatccaagtaatttggaatctttcgtatcagccgataacctatggcgagttcctcgtagaattctcgatggcatatttgg

SEQ ID NO: 30736 - DNA, 145 bp, Oryza sativa
  Clone ID: uC-osflM202077e04a1
gatcaaaggggcattatactcaacagactagttcaatatattttgttcttagcattgggttgacttttgcaaatgttttggactttaggtagatttacatggatattatactgagagtacaaagcattaaattcaccataaattg

SEQ ID NO: 30737 - DNA, 390 bp, Oryza sativa
  Clone ID: uC-osflM202077e05a1
ataaaaaagtgagcactagtaatgcttcccattcataatgtctgatggtgcgtttaggttggcacctccggttaagttgatcaaccaaaccccttgtgacagaccttgcaccacgtatcacctttcctcttcacaacaaaacaccaaacgagcgcagctccaaagtataaccatgcaacgcgcgcacacgcgtacatataccagagtacacaccaaaaccaaaaaaacgagcctagcaatactacccattttagcacccaactttggtcgagccaactgcccccaagtttaaccgcgccttgtattcatatattcatagaatggagggaatgcgacggcgttcgatgccacgcggccgttcgtcttacaggagcagccgccgtccggccg

SEQ ID NO: 30738 - DNA, 160 bp, Oryza sativa
  Clone ID: uC-osflM202077e06a1
ggaggcaagccatgttatttaccttactaatttttgaatattacagggaaaaatttcacaggagaacccatgcatcacctgacattggattgaccatgcaaatggacactggattatgcatccacatgaggttaaagatttcagaacatcctaatgaaac

SEQ ID NO: 30739 - DNA, 375 bp, Oryza sativa
  Clone ID: uC-osflM202077e07a1
caaatccaatttcacttttatgtagctcagcaaaaaattatgctgggaaacccgcttgttaagataacagcgacaaatgacgaaccatccaggaacacgacctcaatttgcaatgtgctttgaagtaagaactcacaattcctcggggaaatatttcaccatcaaaaaggtctattctaaacacgaatatttattctgaaatgccctgacatgaggcatggccgatatatatccattcttctagccacagcctgctcaaagtagttaatttacataggcaagatgaggttccttggtatcctgagcctggacttggatttgcacacttttttgtatgaactattaaatttcaaaattttgcacaaatgtaatggc

SEQ ID NO: 30740 - DNA, 112 bp, Oryza sativa
  Clone ID: uC-osflM202077e08a1
ggggtaacaaaaaaaatattataaccttgaagtatttgaatatgatatagcaaacagccagtccgttgctctttatttaaggggtgtgaaaatccaaaaaatataagaaaga

SEQ ID NO: 30741 - DNA, 414 bp, Oryza sativa
  unsure (1)..(414): unsure at all n locations
  Clone ID: uC-osflM202077e09a1
ggaaccaacaccaaaccccattatacgattctcccactgctccaaggctaacagaaacgggagaagcaaataaagcaatcagtcacggctataattctgtatacatgcccctaccaaaantctttttcttatgtacccagactttggctctacaccaaatataagcaacattctatccttattccttatgcggggccattcacaactcngaccaaaattgttttgtcccggcaaaccaagatgtgaaaggcctctggaaaaaanacatcccgtgacgcccacttacattcacgatgtaatgcttgcaccaacgtgcgttcaatcccacgcgggaagncaatatatggcctcagacgtaatgngccatatgtttctgttgccatgttttcttctgttgaggttgtcttactttgt

SEQ ID NO: 30742 - DNA, 160 bp, Oryza sativa
  Clone ID: uC-osflM202077e10a1
gaaaggcatactcaaatttttcgagttaatttcagttctttgaaatctggcgttacagtaggaaatcaaggactacaggttcatgtttcataatcagtggaaggaatttaatctcacgattctaaaccatctgggaatcgtaattgtattctattgaagt

SEQ ID NO: 30743 - DNA, 94 bp, Oryza sativa
  Clone ID: uC-osflM202077e11a1
gcaacatgcagctgtgggattaattcgccagatcattaatcaagtcacacatttgccggctccattttggcttcattcaaattcatgggatcac

SEQ ID NO: 30744 - DNA, 312 bp, Oryza sativa
  unsure (1)..(312): unsure at all n locations
  Clone ID: uC-osflM202077e12a1
agggaatgatgattaatttaactgttcactgttgtatacatcgaggttcaagattaattaagtaaaagctgcagtaccttcacaaaattatactccttactccttagcatagagctgatcgatggagcgtataaaaatttaanctttacatacatgatgaccaaatnttttattgcaataggatttatattttgccggcttgttcctgttctgtccaaatctgcatggcatgaatccatttcgcttgctgatgaatttgctttcctttccttnnncgttcgttgntgctttcatgtatccttnggacgggat

SEQ ID NO: 30745 - DNA, 142 bp, Oryza sativa
  Clone ID: uC-osflM202077f01a1
ctcaaaagaaattattgtacttctattctactagcatgttggggagtagtgggcatacatgctccaatgagtataaatttggcagccatgttggagtacaaagtagaagacatgcatgaacacataaaccatgttcattaca

SEQ ID NO: 30746 - DNA, 145 bp, Oryza sativa
  Clone ID: uC-osflM202077f02a1
gacacgtgaaacacattaaggtttgataaataaaaagatctccagctggagtgtgacaccacatagtctctgaggactgtctgggactctgggtttatttattgaccaacattacagataagaaagcgcacatgcacaaacaaac

SEQ ID NO: 30747 - DNA, 408 bp, Oryza sativa
  Clone ID: uC-osflM202077f03a1
agtcttgcaaactgtgcaattgattttattttcaccatgcatacgtcaaataatcacagccataataacaaaagccatactctctgtattaaagatccaacaggttcagagaacacgcaatgctcagatactacaccatcaccaaaatttggagcaaggttttgggggtacatattccgcttcataccagtggaggaattttatttttctcgatttctacgcatgcctttttatactagaagtttccgaccggggaagttcaatttaccggataagaaaatgagcattcctgttctttcacaaaaacccatgtcacacatacaggtggtgcatgataccgcatgataattcaccatcaagtttagtaggggctccacgggttgcgcggaacttggcaccagcgtaaac

SEQ ID NO: 30748 - DNA, 411 bp, Oryza sativa
  Clone ID: uC-osflM202077f04a1
tgcgttcgcgcggtgagcacctgcagcagcagcacgccgagggagtagatgtcggacttgacgcccagcttccccgtctgctggtactccgggtcgatgtagcagaaggtccccgccgtcgccgtcagccggtactgcgtcacgctgtccgccaccgccggcggcacgaggcgcgccagcccgacgtcgctgatcttgctgacgtagttgcggtcgagcaggatgttggccggcttcaggtcgcggtgcaccagcggctccggcttggtctggtggaggaacagcagcgcggtggcgatctccgccgagatcctgaaccgctggctccacgggatcggcggcgtgccgccgcggcggaacaggcggtcctcgaggctgccgttgtccatgtactcgtagacgaggcagccg

SEQ ID NO: 30749 - DNA, 422 bp, Oryza sativa
  unsure (1)..(422): unsure at all n locations
  Clone ID: uC-osflM202077f05a1
gggatgataacttcgatgttattcatttcatagaataatcgcaactcaaaaacaaccagaacacgtattttttctggtaccctcatcaggcatctgattaaatttgaataaaccgaacatatgtgtccaaaatcacaatgtgatgaaccatcaggtatgcatataggtattatccatgtctttgaatatgaagcaataattgataacacgattatggccggtttgaaaacttttgtccatcgctatnatgaagaaaccagcaatcaaaaatgagagaaacatagcagtgagggacggctgatatacatgctcctcttgggctttatgcattcttgggttccgaagaattangaagcatttcctgtgcacaatggatgggccagactcgtcgtactcagccttggcaatccacatctgctgga

SEQ ID NO: 30750 - DNA, 388 bp, Oryza sativa
  Clone ID: uC-osflM202077f06a1
gacaaaagtaatccaatggaagaataggccacgaacaaaatttctgacaacaatgctcttataaagtttacatttccaaagctaaaaggtcatatgaaacctcgccacatttggcgatgtatggaatacagaaaacctaccagcatatttacatggcatatatagaccacaaaaatgtgaggataaaagaagatattatctgtggggaaaggacaaaagaagatttggttcaaaaccaaaaaaaagtttccaaccagattttgcctgttgtttcaatgcccctatcgatgttggaagttcaacttcttgatgcaaatggcatacatgaacgcgaaaaacacagcgaagagcacgagcaccggcgcaacaactggcataaatttcctgt

SEQ ID NO: 30751 - DNA, 444 bp, Oryza sativa
  Clone ID: uC-osflM202077f08a1
aacttaagggaattcactgtcatagataaagcatcgaccgcccaagcatgtccaacataaaattaaaacacatgattatcagatagtttggtttagataacaagaagcataataatgataaaaccatctaatgagcagcaggcaatcacaagggcacatgcataacctagcactatcaatgccttcagtgcgccccggcttgcgatgagggccgtgcctttgtgcgatgctagcttttccccatttcgcctcatggggagcatcatccttggtacttgcacctttcccccgtgttgccggggctgcagtgatacatccttccggcgaggcttccaagctttcttcggcggttcaaagctgtgtcgaaatccatggttctttgcttcagggacccttgagggccgatgggctaccgggctttcttccggggtcaaggccgtcgcg

SEQ ID NO: 30752 - DNA, 424 bp, Oryza sativa
  unsure (1)..(424): unsure at all n locations
  Clone ID: uC-osflM202077f09a1
gagataaaaggctcatcattttgattctaaacttcattaaattgacgaggttacaaagacaatttcgaatgacaaccacggaaggcgcaccctgccctcagcaatgcacctactcagatatgtaagaaaaagttacacgtatanngaaatttgttaaanctccttatgaaaccgttgattatgtcaaaattttgtaagggatctttcgtctnnggtgtcctaaaaattttgggaagaagttattttaaaaagttcctatatgctatcnnctccaaaaatatgaaataccccgaatgtttgtnaattaaatcatttaagttgtcacggngaggtagctaggcgcatgtgtcgatcgacatggaggtagcttgatccgtgccgctgcataggttcttatcggcggtttgatcccggctactggaga

SEQ ID NO: 30753 - DNA, 427 bp, Oryza sativa
  unsure (1)..(427): unsure at all n locations
  Clone ID: uC-osflM202077f10a1
aatgagagattttgaactctgaatgttaaggtgcataaacagtcagtacagccattattaacctcgccagaagttttaggcccatcattatatgccagacaaaccattacctatatgatgagatcagattaaaaatgccctaatttctcattcgtggctcattttgcttcatttacattctgctattgcacctatccatagattccattatcntgcatattccatatgctgtatacatgctccatttcgtgataatacgtttatttccttctacataggtttntgcattgctatctatctatatgcatctatttcctttatgacatttcccatggtttacaattaccgagtaaacaatgcttgcctaacaaactattacaatacttgatatgtttgtatgattcctgaaggccctagccaagcaatt

SEQ ID NO: 30754 - DNA, 201 bp, Oryza sativa
  unsure (1)..(201): unsure at all n locations
  Clone ID: uC-osflM202077f11a1
acgcgcgcagcatgcattttatttaggcacggtccacaattcatacatgtatagtggatacgtctcgtcggcagacactcacggtatagtagggtagtcgtgtgtacagtgatatagtcatatctgcgcgntcttttcattgcctgttctgttgacttttcgttcatcatgggtcaggnngctcgggtatggcgattatcg

SEQ ID NO: 30755 - DNA, 378 bp, Oryza sativa
  Clone ID: uC-osflM202077f12a1
aaagcatcaaaaatgctttcatttgctggtcactcttacagacttacacttccccagtttcgcagtggtatccacaacagcgaaaggtttcttcacaagggaaaaaacaacacggagcagctcaacagaaggctttacagacaaaaatgcacactccctgttggctctcccaagatttgcaactggctggctggccatgaggtgctccaacatcaactgccaccttcaggttagcggcgtcggcatgaagtgatatgtacagatggagatctcatctctagctttatacagctgctgctactatcagacttggtagaccattcccacctccagtgtggaggcatgaggtatggtagcagcataagatggtccgcggct

SEQ ID NO: 30756 - DNA, 231 bp, Oryza sativa
  Clone ID: uC-osflM202077g01a1
cactatataagagctacgacgtacgatgcccgcctacagaagctaggatccagatgtatcggccgtccttttttttttttccaagatatggccgacgggaacgcgaatttaaattatgaagcaacaggactggatacaacttctacccagtttataccgatcaattacacacgaagatgagaaaaaaggacagaacattgtacatgcccatgaaagcacccatccattgcc

SEQ ID NO: 30757 - DNA, 384 bp, Oryza sativa
  Clone ID: uC-osflM202077g02a1
atcaaaacgcttgcaaatgatatcagataagttgagtcaacaagacaaaactgtatctgccaaagcacacctccccaactccacccaattacgccattatttctgggcaaaagcaaacggcttcccattcctccccttcaccagtctcaaaccataaaccccacaacaaatcctcctaagtgacggcatataagatgatgaaaacaaagcaggatactccagagtcgtcatggcgaacttcaagttgacacttctcatgccacagccgctagttcgtgctgggcagcctagtaccggtagtgcgcgggcttgtagggacccttaactggaacgctgatgtagtcagcctgcgacttggagagcttggtcagcctggcaccaagc

SEQ ID NO: 30758 - DNA, 207 bp, Oryza sativa
  Clone ID: uC-osflM202077g03a1
ttcgttcgcccttcctttttttttttttttagaatggaatcaaataataaatcaagaataatgcaacacatgtacacatatcctgatctcccatgttacgttcatacaaccagttcaacaccagtaaatcgatcccagtcccaaacaaacggtatgcacgcattggcctgttccatcctatccatcccccgatcgaatatatacaac

SEQ ID NO: 30759 - DNA, 365 bp, Oryza sativa
  unsure (1)..(365): unsure at all n locations
  Clone ID: uC-osflM202077g04a1
atacttccaatgaaacaatatataatgcagtttatattatccatgtttcatacaggattacatgctgaccgtattgtttcattttccctcaaagcaaaagtaacatctgaatttcttactttttcctgcaaggttcttgtgatgattaaaggctaaggtgattcctgatgttacctttacaggtatagtggaattcattgttcagactttaactattttctatgngacgatggctactgntctttcaatttcagtgttggttttcagaaattcaagttcatctattatcataatctgttttctgtcaccggcaacaatttagcatgcaccaaataactttacttatttttgtattcggtacacct

SEQ ID NO: 30760 - DNA, 422 bp, Oryza sativa
  unsure (1)..(422): unsure at all n locations
  Clone ID: uC-osflM202077g05a1
gcggcaaaatgatttgtatttatttgtttatgtacgatgagaccaaacagtttcagtaaatcatttggggtagttgttgtcagaggggtaggagggtttcatgaatggacatgaacaatgagattctccgaagagaaatacaacatttgttatggctaacaatatcaacctattggctaaacgattcgtatgcatttggacatgccttctatttcctatcaatactatttgtatctgcctttccgctttcttgcatatccttacttatgctatnagatacttatttacannaggaggatatggcaggtactttattctcccttcctttttttggttgggtcttcatgtnngaaaggaaccaaaccgatgaatcagaaagcatcaatcgaaagcatctcgaagtgcccagctgacaaaagcat

SEQ ID NO: 30761 - DNA, 431 bp, Oryza sativa
  unsure (1)..(431): unsure at all n locations
  Clone ID: uC-osflM202077g06a1
gcggcaaaatgatttgtatttatttgtttatgtacgatgagaccaaacagtttcagtaaatcatttggggtagttgttgtcagaggggtaggagggtttcatgaatggacatgaacaatgagattctccgaagatgaaatacaacatttgttatggctaacaattatcaaccttatggctataagattcgattgcatttgacatgccttctatttcctatcaattactattgtatctgcctttccgctttcttgcatatcctacttttatgctaagatnacatatttacaannggaggtaaggcagggtacctttatctccctttcctttttnnggtgggtctttcatgtctgaaggaaccnnaaaccgatgaatnncagaaagcattcaacggaaaggcattctcgaagttgcccagcttgacaaaagca

SEQ ID NO: 30762 - DNA, 130 bp, Oryza sativa
  Clone ID: uC-osflM202077g07a1
agcatgcctccagttcgtccgccgtccttttttttttttccgtggaactgcccatggcaatcgggattcctatcatataacacccggaacggtggcaacactgaatgtggctcaacatcaccaaacccga

SEQ ID NO: 30763 - DNA, 248 bp, Oryza sativa
  unsure (1)..(248): unsure at all n locations
  Clone ID: uC-osflM202077g08a1
agaagctacacaaagcataaagcaagcctctcatatctttcctcatacagatgatgttctcaaagaggctgttaatcaaacacatcagcagtatgcactaacgactaacatgatggactgtctctcaagtttttgaggctgctaaaacctaacaccacagtatgtgcctataagctaccatagcattttaccacacatattcttncgtccccaagagggaattagttcttctgttctaagcacccctg

SEQ ID NO: 30764 - DNA, 157 bp, Oryza sativa
  Clone ID: uC-osflM202077g09a1
aaggaagcatccatgcttttattgggtaaaaaagacacgacccattgcatcagaaactgaccatgaacaaccctcataagaaactcaaatttgactcctattacaccgaatcaactgaatgtggaaaacatcaaaagtaacgggctatatacatccc

SEQ ID NO: 30765 - DNA, 406 bp, Oryza sativa
  Clone ID: uC-osflM202077g10a1
gtcaagaaacacgctggtgatcaccatgctcaactgcagttaccttttaaacaaaagacactactgtttgaactatgaatagcaatacatcacaactaataagtggcatatactatccaccaaaaaggctatattatagcatgtcaagaacacgtcttattaaaagggatatattcatagaaataatataccatgctccatacagctatgatcggtctaaacatactcatttattatcccatgttctttccttactatgtggatacttatatattggaatctcatttgacacaaagtgcagagcttcttggtcacttgcaagttttaagcccttgcatttcctgaatattcaaacaggttactttcatttagagggatccttcatcatgacttgaactcgaatttc

SEQ ID NO: 30766 - DNA, 427 bp, Oryza sativa
  unsure (1)..(427): unsure at all n locations
  Clone ID: uC-osflM202077g11a1
gcacattatccacctacacgtatataatttctaagaacatgaagcaaaaatgcaaagcaacaagccgcataaaaccgaaacaaacagataatcactaacagggacacaccaacctatacatatgccaatatatcggctataatgctattgcatagcattgcatatgtgcatatggagagggcccgatgcattctcttgatggcatcatgtttgccttctagttcnngttttctaaataaaaaaaaaagggacatcatcaccatttataaaggaataacacatctttgatgtgcatcttactatactgtatatcgaactgnnatgaaatactganntacgtgtcacctttacgtgtagctcttagtcctggntaccataaatgatgttggtattacgatgacgatcattaggtcattgtaagtttagc

SEQ ID NO: 30767 - DNA, 428 bp, Oryza sativa
  unsure (1)..(428): unsure at all n locations
  Clone ID: uC-osflM202077g12a1
accagtaaaagtcgcatccttgaatgatttgctctacagaatttttattacagaaccgattggtccccaaggcccaactgccattacacgctcttaaaaagatcaccgtgtattcccatttcggagtccaatattcgttgtccacatattctacaatacatagatagcatacatatcaagggtttnggcttgaccatagattacattctatgcatgacttatgcatcattagtatcttacaacatagtaatgttaccaattgggtttaaaaaatccgatgctgaatgacattgtattacgctgagattatttggagctaaataccaagtagcatacgaaaggctatagaatgnccatggnannggctgaagcattngataagtttggcaaatttgattccactccaaaccgagacacccaaacatcat

SEQ ID NO: 30768 - DNA, 153 bp, Oryza sativa
  Clone ID: uC-osflM202077h01a1
acaaagatgcctatccacagatctatcatatgattaacaataagagcaaccaagtgcctttcatatttcacagtataaaataaaagacgaaaagagtgaatattcgcatcaatatataacacctaactttacaccccgaataggctgtttgcc

SEQ ID NO: 30769 - DNA, 74 bp, Oryza sativa
  Clone ID: uC-osflM202077h02a1
accacaagggcctttttttcacccctattataaaaatccccaaggcttttaaaacccccaaagcccggaaaaac

SEQ ID NO: 30770 - DNA, 160 bp, Oryza sativa
  Clone ID: uC-osflM202077h03a1
atataattagcatgacgacgcatgcatcgcctccgacagaagggatcctccagattgtccgccctccattttttttttttttttggttttttttttttttttgggttaaacttactagacaactttttaaacacgcggttaaaaaattccccacatatga

SEQ ID NO: 30771 - DNA, 83 bp, Oryza sativa
  Clone ID: uC-osflM202077h04a1
ataacatgttcaaaatagaggggcggtcaaacaatgggaacagcgaccaaagccagactctgtttttggactgcaggcgcctc

SEQ ID NO: 30772 - DNA, 157 bp, Oryza sativa
  Clone ID: uC-osflM202077h05a1
aaacaagttaataattgtggagtatatttaaaatcggaggagcggagtagtacacacacgggtaattagatccaatcgccaccacgcgaaatcaatcgtccaccagctagctcatcgtcgtcgtcgatgatcaatatctcaatatacacatggtata

SEQ ID NO: 30773 - DNA, 113 bp, Oryza sativa
  Clone ID: uC-osflM202077h06a1
attgtggtgtttttttaaattcttttgtagagagggggcctcactgggcaattcagtggcaaacacccaaaggaaaaagcaagagcccgggatcgagttatacagggaaggct

SEQ ID NO: 30774 - DNA, 306 bp, Oryza sativa
  Clone ID: uC-osflM202077h07a1
aatctgacgagacaactgttaaaaaggcatttaaaaattccgttcatatgaattccgcaagggataattaaacaaaaattgagcggaaaaaccactgaacaaaaattcaggggaaaaatcagtcatgctctattgctactcagttttgggctttccttccaggttgtccctcgaataccagactttctgggccgccggaccttatttaccattgccctaagctcctttgccacccttaaatttgctggccctctaggccttcttaatacgcttattcaccagttttcttccctttgttagagctta

SEQ ID NO: 30775 - DNA, 257 bp, Oryza sativa
  Clone ID: uC-osflM202077h08a1
aatctgacgagacaactgataattcacgcatttaaaaattccgtacatatgaattcggtaagttataagtaaacaaaaattgagcagtagagccactgaacaaaaattcagtcagaaaattcagatcattgctcttattgctatctcagattttggggctttaccttcccagtcttttcccttcgcattaccggccttttcttggccgtacgcacctttttttcccctttgcccttagacttccttttgccaaccct

SEQ ID NO: 30776 - DNA, 130 bp, Oryza sativa
  Clone ID: uC-osflM202077h09a1
aaatatataggcccggaacgccaatttaacaaattaccatactcgaaaccgaacaacgttttgccctttcgcttgccaccataaaagcaggtttcacagcgaacaggggaagcactaacaagggccaagc

SEQ ID NO: 30777 - DNA, 196 bp, Oryza sativa
  Clone ID: uC-osflM202077h10a1
aacctaagtggccagaatctgaagattcacaaagcaacacacgatgtcgaagcttttttctatcggagaacgaataggcttcgaccacactcggactcgggacggacgtgttctgttcatgtgctgatgcgctcatgctcatggtggaccttctgtgcgcttctatggcgggctatgtgtcgacgttcatttcgtc

SEQ ID NO: 30778 - DNA, 131 bp, Oryza sativa
  Clone ID: uC-osflM202077h11a1
gacaaaacggaatgtttcaagtatcacaggagatcagcttctgactgcataaatttctcaggtctaaatcaccatatggaagataaagggggagcattagatattgtacagaacaagcatgatctccctac

SEQ ID NO: 30779 - DNA, 131 bp, Oryza sativa
  Clone ID: uC-osflM202077h12a1
acgaaaaaccccgaacttggattttaaaaatgccccaaaaaagggtcacataaacaaacacagtgtcacagacagcaaaaggcttcagaaaaaacccgtggatatatcaaagaaggcaaattggtttttaa

SEQ ID NO: 30780 - DNA, 126 bp, Oryza sativa
  unsure (1)..(126): unsure at all n locations
  Clone ID: uC-osflM202080a02a1
agactgaaaaaagtcaagataactataggtaagagattaagtgagcagcaccaacaagagaaaagattagccactatcataatacagactacangtcacatattttgatgtattccccaatggcca

SEQ ID NO: 30781 - DNA, 133 bp, Oryza sativa
  Clone ID: uC-osflM202080a03a1
ctttttgtttttttgggtttttttacagaattgtatacatttcttgtttaagcaaatcgggttattcttaaaagcaatcggtctgcagtttcaagacatgtacattcggaacccgagcccggggaagcaaaca

SEQ ID NO: 30782 - DNA, 289 bp, Oryza sativa
  Clone ID: uC-osflM202080a07a1
ggcaaaaataaaaaaaaaaaaaaagctaaaaattgtaataaaatcttgaactttaaagtaaaaaaaataaaaaaaaaaaaaagtgggttaaacgaaaggaaaaaaaactaaaatcaactagctgcaaattaaaaggggggaaaaaagcttcaaaatgaggggggaaaaaggttgcaaacagaaaaccaaactctacaaaatccggctaccaaaaaatttgccggcaaaaggaaggcatttaaaaaaaaaggaatgaaaaaaaactttatatatacaagttaaaaagggg

SEQ ID NO: 30783 - DNA, 216 bp, Oryza sativa
  Clone ID: uC-osflM202080a08a1
ataggaaaaaaaaattttaatttaaatatctaaggggacaaaaaaccaatttgaacaaaaattaggggaaaaaaacccaaattccaaaaccaaaaaaaaacgaacttgatggccaaaaattaaacaaaacaaaattaaccaatgttaaattaaggacaccaaattaaattgccgggggaaaaaattggaggctaacccccaaacattgaaattaaa

SEQ ID NO: 30784 - DNA, 326 bp, Oryza sativa
  Clone ID: uC-osflM202080a09a1
cacaaaatcgcaatacattcttgtttaagcaaaacgggtcattctcaaaagcaatcggactgcagtttcaagacatgtacatacatttttcgtgtccatgcaatcaactgtatttagtagtgtagaatgcactgctgtgctcccctggcctccttgggttgagatgataaaaccgcaaatcttctatacaaccatcatataagctgttccaaaaaaaaaaatgaaataaaacatattctacagcgtttcttacaaacaaactccctgggcccaaaatcccataaataacctctggctggggccattgaatctccgtacatcagatg

SEQ ID NO: 30785 - DNA, 176 bp, Oryza sativa
  Clone ID: uC-osflM202080a10a1
agatacacatccatcagatggatggatgaaatcaacagtcgagacaacttactagcaaaatatccagttctagaacacagaaacagagtacttcactaacaatctactaactacatgtgagtaggtattagcaaccatttcacgacacccaaattaagagtttcagccagcaaaaa

SEQ ID NO: 30786 - DNA, 267 bp, Oryza sativa
  unsure (1)..(267): unsure at all n locations
  Clone ID: uC-osflM202080a11a1
caaacaaaaaatgcatgatctattgctcttgcattgaaactaaaagcaaattgtttagggaactacatcccaaaatggaataagcgctgatttattaagaatttaagaatttcgcgatttggtggctctcgtgctatanattgtccagacgaggacccccctcacgggtattccttcaacttcaaaattttcgtccctttctcagaaaagagcaaacctcttttggtattcagttcaaaaaatttttgcagtaatttattttttcca

SEQ ID NO: 30787 - DNA, 128 bp, Oryza sativa
  Clone ID: uC-osflM202080b01a1
ggggaaaggaataaaatcattattgcaaaaacatcatcttcttcttcatcttcttagggttcacaacaccaactcgatcatcattctgggcgcactaaaacccattcttacccccaaccccaaaagac

SEQ ID NO: 30788 - DNA, 167 bp, Oryza sativa
  Clone ID: uC-osflM202080b03a1
accagaacctggcaaccgggggccgggagtatatacgggattacacatgaaaattaaacaggattgggatttccaattgtccggaagttcgataataatccgggccggacaagggaaaagtcagaatgaggggtggggaaaaaaagccaaaagaaagaaacaaggaa

SEQ ID NO: 30789 - DNA, 157 bp, Oryza sativa
  unsure (1)..(157): unsure at all n locations
  Clone ID: uC-osflM202080b05a1
gacgccccatgcattcgnacgattgtttggagccgtcgcccttgtttttttttttgcaagctggaatgagtagaaaagcttcttgccatattatccaccaggaggacatgtgtaatgatgaacaatcattgaacttgactaggctatatgtccaaag

SEQ ID NO: 30790 - DNA, 222 bp, Oryza sativa
  Clone ID: uC-osflM202080b06a1
gcacgcctaccacgccttggaaagtttagatcctttccgtttttttttttttttttttttttggtttaggccaaacaaataccaccatccaacatgccaaccatattttacactaggaataccttcctaccccgcaaaaaagggcaggtaacaaaagaacatttctctaaggtacccaaccacccactatgctcaagagcttagaaaagcttttacaaaagg

SEQ ID NO: 30791 - DNA, 380 bp, Oryza sativa
  unsure (1)..(380): unsure at all n locations
  Clone ID: uC-osflM202080b08a1
atcaaatcaatcacaatttttttcatacggaaacattttcagagtctacattcacaagttcagaactcgtaacacaaaaagagaaagccagaattacattttgtatttacaaaggacacccacagagagaacctcctgncacagtattaaccctgtaagttcctgatgcttntgactgaacccttacagaanttgtggtatttacaaaaatctaccagtaagccaaaaatnngttggatcccttttttaaagttatttattagtgataaaaaaagctttgacctaaatggaccctaccttttacaangcacctatcagaataagtacccagtcaagaacaccccaactcttgcanngaagtttattgttggagnttggag

SEQ ID NO: 30792 - DNA, 328 bp, Oryza sativa
  Clone ID: uC-osflM202080b10a1
aagcttgaatgatcccgaaaagcttttcgccatattacacaccatcacttgatgtgaaaagatggataatttgtgaacggactagggtacagccaaacaagccaacaagagccatacatgaccttgagcgccaacaaaagagggggcaacgcacaatagtacgaacggaaaggagcaaataacagccatgcaatgcacaggcccggtgaacacgttaaactacacagagatggatatattcggaatccttggcaagaacactgccaaagatggctagaccaacagccttactcggccggacgaaggttaaaatgatctggtctgccct

SEQ ID NO: 30793 - DNA, 260 bp, Oryza sativa
  unsure (1)..(260): unsure at all n locations
  Clone ID: uC-osflM202080b11a1
gaacggatattgaagaaaaccattatgggtttctttggatgaatttagcattgttgaacaatcatcgatgtttacatcctatattccaaagaacacaaaatcagatcacttacacccaccatttgctaangaccaatngccatcacttgttgcttgcccaaatcacctttaggaccaaaaggattccacattaaagccttgaggaaacttggatgctccttggttctaattccaaaagggaagtaaaaaaattatggagg

SEQ ID NO: 30794 - DNA, 358 bp, Oryza sativa
  unsure (1)..(358): unsure at all n locations
  Clone ID: uC-osflM202080c01a1
aagggtcacaaaatgaacttattctgtcaaccaactatagcccatgacaaaccaattccatgccatggccggtacagatcggtgcatctcacttctgttctgcctgacacgntctctgcgtgtacattgccttatacgccatttcattattggtaactttgtcttgcaagaatttgccacannaatcggtgtgacattaccacaaatctattcgaagcgaantttgaaactgaactttcaaaannttcaggcgggtgaaaaaggannaaaaaaaaaggaaaaggaaagccagcaagcaaaccgaagaacctcaatgcaaagacgggttcaaggaatttatttcgtttcctgcacttta

SEQ ID NO: 30795 - DNA, 360 bp, Oryza sativa
  unsure (1)..(360): unsure at all n locations
  Clone ID: uC-osflM202080c04a1
agctatgaaaccaacgatatgaatgaatgtagatatcttacaagcagagagttaggcaattcaacatgttttttttaagaaaagaaatttaacatatatgttgcagcagagtgtagtagtaacccgtagggagcaaaaggcctcctctcttcaaaaaaaaaaaaggaaggaaaggannaaaagaaaaaccatatggagccgagccctatgtggagaggaagtgtggagtagtacttgtttttcttaataataatttcatatcacccttctgtcagaaagaaagccgtnnggaagccaggngattgaaattgncccaangcccaagcgagggcttcttgcgctttgggccgcaacgccggc

SEQ ID NO: 30796 - DNA, 376 bp, Oryza sativa
  unsure (1)..(376): unsure at all n locations
  Clone ID: uC-osflM202080c05a1
gataaactgtcgtctgaattctgcctacttatatttagcttagccaaattaaaacagacaggttttgagatcacagtagcaatatttattgagcatgcactaaaatatatagcctacacngtttgcggcgagataaacccccgagctgaaaagacttaagggctctccgactccgtnccgatcacccatgngggggcattatgnnnccgcctctgnncgaagcccaaccttnnncaggttgccattagttcaaaaccacggttatggtagggctccccattaaagaccatctcccaagaatcccagagaggnaccacgaggaggaggaaatgtcccatagcttgtgaatccactgatgcactgggtagcagttccc

SEQ ID NO: 30797 - DNA, 76 bp, Oryza sativa
  unsure (1)..(76): unsure at all n locations
  Clone ID: uC-osflM202080c07a1
ttttttttttttttttttttttttttttttttttttgtttttttttttttattttatattatttttttttnttttt

SEQ ID NO: 30798 - DNA, 372 bp, Oryza sativa
  unsure (1)..(372): unsure at all n locations
  Clone ID: uC-osflM202080c08a1
gaatgaatgacacaatttattgtcaaaacaaccaagacaacacaagggggagagtcatttgtacttttaccccatgcaggtggtgcacataaaaactttaggaacacaagttacacangcactttgctcttgcagttaaaagaaatanttaaaaattcaaaattnnaacatctagttactttnntttgttgacatattanncgccgcaaaaagttattagccaggaacaagttttgccccagggtacccctcttttctggctattagccctacaaaatttctatangaaagcatcttaaaaaaacgtgttaaaaagaaataaaatcagatcattggtcctcaagatgttcaataaaacactagtcatcaaca

SEQ ID NO: 30799 - DNA, 230 bp, Oryza sativa
  Clone ID: uC-osflM202080c09a1
aagggtgaataagaagctggcatatacttcggttagttgcattgcagcgcaaacagaatggcaaggtaccacgcattggttaagagctaagacatagacaaaactgatgcatccaacgtaccaaaaagaaagcgaacaggaatagtcagatagctatgagaagagaactaggaaagggataactagaagggacagaatgggatgcatgggtccatggcgtttaggcgacc

SEQ ID NO: 30800 - DNA, 386 bp, Oryza sativa
  Clone ID: uC-osflM202080c10a1
gtgataatgtcatcggttggtaccgatgcacagtgaagcaaattgtactagtatggataatagtatcaacacaacttagggactttaaaccagaacacaacacaactcatgacaacgatgcattatgacaagaacgagcgcgcatacggtataagtgaaagtccaattgctgcatccacaggcaccacgcctcaggagaccacccatcggagggcgctaggacaagcgtgccagggtgggacttccttctgagatcgttatagtgcggcaaagggttgacggcacatcactcgacgctgtcttgccggccgaaagatgagggcggctgctgtgtctgggaggggatgcccctccttatcctggaatcttggcccttcacgttgtcc

SEQ ID NO: 30801 - DNA, 320 bp, Oryza sativa
  Clone ID: uC-osflM202080c11a1
gagaatcaaaaaccgaaagaaataggttctttgagcagagtgcagaacataaacaaaaatgcctgttgcaaattgcaagactacaggtaaacttaaatgccataagggagtttgtttggcagccataagatgaaactactgtgataagggctatctctctcacttcgtcatcctcttcctccgtcatcatcaatcagcaccagctgaggagattgagagcattcaaatcttttcgacgagacttggccttcctttggtcgtaggttagcttcttgagggtggatctcttgggggtagccggttccttcttgggcgatttg

SEQ ID NO: 30802 - DNA, 207 bp, Oryza sativa
  Clone ID: uC-osflM202080c12a1
ttcagactgtgtcgttggattttgactatcatcgtttaccggccgatcgctgcggttcgcctccactaacacacagctcctgaagcgggaacggatgaggaagaagaggagcaatcggggctgaccgacaaggccatcgaatctagccgcgatcatggacgacccgattgatcacagaacattggggcttacatcgggcctggacgc

SEQ ID NO: 30803 - DNA, 335 bp, Oryza sativa
  Clone ID: uC-osflM202080d03a1
acagcggcaaatccatctaattaaacatcaagactcgtctcaacaacaacctgccacaattcacaaacagcaggctgttgcacaagacggtgtacacggttcattttatttgggtgttcgtttccaccatcagattgatataatacacgcgaacaagccagaaacattcggcaacaatttctccaggaaaattcgcgggcctatttcgtcatcatccccgagcgagcgttatttggaagagggagtctttttcagacaggcacagccttaatggcaggagcgagtgaccaacgtcgacgtcggcgtcctagtagccaccctggatgtaggcgttg

SEQ ID NO: 30804 - DNA, 372 bp, Oryza sativa
  Clone ID: uC-osflM202080d04a1
cgctcgacctgccgtcctttttttttgatctgaaactcccatgacaatcacttatgacacacgggagctaatccttattggattgcctgatgtccagaggtgcacctttttagcattgctaagcctgcatgatgcttcagggaagtgaaggggccgcatatgagtagctgctccagcacaaaactactagcattacatatgcacagaaaaaggtatgatcctcttaagacattttcccgcgccaaaggtgaatggggtgaagatcttaggcggacttcacggtggcggacttgatgatgtcgatgaattcaggcttcaatgaagcaccaccgacgagaaaaccatcaacatcaggctttgctgccagctcct

SEQ ID NO: 30805 - DNA, 337 bp, Oryza sativa
  Clone ID: uC-osflM202080d05a1
tgttttgagaaaccaactccaatcacatatcttacacagggcatcatacaatatttatcacctgtagtccaaaattacaccatttatcaccggtcatgcatcgatgattcggcctgaagctagttggaccaacatatttgcgtgcaagcaataacagtaacattattgatttgcatatattctgcacaaatgcagaaacataatattatcccttgtttcaaatatactgccgtggcggctgctcaaaaagagcttctcatgcccgacttttattggtattttattgattagatcagggtctgattgctccatctgacgatgataattaattagcgcc

SEQ ID NO: 30806 - DNA, 494 bp, Oryza sativa
  unsure (1)..(494): unsure at all n locations
  Clone ID: uC-osflM202080d06a1
cagccatatgcacgcgtgcgcacgctcggaacctttaaaccggtcgagctttcgtcctttttttaggatcaagaatacattcgccatcggttgaaacagtcaccatgggctgttacaaaagcttgccagcgaccgtcccgctattacatctccacctccgtaggaacacacatattctgaacaccaagctcgcttattatcattcgaattgagaggataaacccccttnnnggcagaaaaaaattacataaagggtgaaagacccgatntttaaacaatcaccatctgcgtaccatgtaggattattaaacccctaaaccgttaccgattcaccgcagnnatgattcccctcaacgaagtattggttgaaatccaccaaattcccatccctttagcgaacccttctacttgaaccttttcggtgtcgggaattctgaataaacgaaatgcagaaccgcagccagcagcaacctttgcaggaaaacctgaaaaac

SEQ ID NO: 30807 - DNA, 380 bp, Oryza sativa
  unsure (1)..(380): unsure at all n locations
  Clone ID: uC-osflM202080d07a1
gtaaataatacgatgtatttatttcctttaagttttgctccgttactggatgcaaattaaataacgcgtcacaacagtcacaacagtgtcacaatatttcaagctacgcaatgggtagggtctcattatcaaatcttctccctttgccggaataaccaanggtaacacttttanaacacnnaagtgtttccgctattatttcatncnnttctcttttcaagtgnannagagcccnnaaaaaataatggcttgccctttgnnaagagattgntgatggtcttgtggttttgaggccaccttgactttggattagtacttttcatttatgatggttgcaaagtcctgtcacttttggactttggacaanccgacgccgccgt

SEQ ID NO: 30808 - DNA, 321 bp, Oryza sativa
  Clone ID: uC-osflM202080d08a1
acccactccagcaaacgcacacgaattatttagcacaagtagtaggtttgcaatgtaagaaacaaaaaagctcgaagcagatcattataaggccaaacgaaacttggttattatttcccatgccagtgcagatttacataaaaactagtacggctgggcgctagactacagacgcagaaggcaggttgacgtactcacaggtgcctgaaaacttgtctgaaaactgcacccatgtgaatacaaccgactacgaaactgattaacatcaactcacctaattgactaagatagtactaataacacgtacttataggaataaac

SEQ ID NO: 30809 - DNA, 79 bp, Oryza sativa
  Clone ID: uC-osflM202080d09a1
ttttagcggtttttcctttttttttttttggtttttaggggtcacaaaatgaacttattctgtcaaccaactatagccc

SEQ ID NO: 30810 - DNA, 386 bp, Oryza sativa
  unsure (1)..(386): unsure at all n locations
  Clone ID: uC-osflM202080d10a1
agaaaccaaatacaatcacatatattacacagggcatcatacaatatttatcacctgtagtccaaaattacaccatttatcacctggtcatgcattcgatgattcgtgcctgaagcgtagattgggaccaaacatatttgcgtgcaagtcacataaccagtaaccattatgtgattttgcattatattctctgcacagaattgcgagaacacccataatatctatcccttggtttcaaaatattagatgcgnaaaaatggcttgctcnnaaaaagagctatccnacccaagagaacttttnnattgttattttctttcatgagatnncagggtctgatttgctccatctgacgatgataattaatttagcgcctcaggctgtgcag

SEQ ID NO: 30811 - DNA, 387 bp, Oryza sativa
  unsure (1)..(387): unsure at all n locations
  Clone ID: uC-osflM202080d11a1
aggatcaagaagaatacccattgattgaaacagtcaacatgtgaagttacaaaagctagtaggcaaccatcacaaaaatatttgccatgttttcacgaactctgacaagcacaatctggaaatacantcgagcaggagcattgcattgtatgcgtcacagaaaaacttcgattaaaggagcagtactgcacaaataacctagctccnttaaatttaaaccacncnacgagcgacgaaaagctttaaacaaacgatggcgtaagatttgatgtaccngcctacctcattgccccttttcacacacgggccccgcatcgtctccttccgccacgggccagaccatcgcgctagcacgccgcatcaccttgcgcactttcagacttggga

SEQ ID NO: 30812 - DNA, 161 bp, Oryza sativa
  Clone ID: uC-osflM202080d12a1
agactaaaaagactgaatgcaccctaaagttgacagcaaggttaaccactgaccaacaacagctacatccagagacaaaaacaatctaacatcataaatggaaaacaatacccccaaccagatggcccaagccacaaacgggcgtaacaccatgtcgaaac

SEQ ID NO: 30813 - DNA, 345 bp, Oryza sativa
  Clone ID: uC-osflM202080e02a1
gtaaaataaaaacgagtgtcttatccttttggtataacatgtagccgccatgctgtttacacgacccaaattacagccatttacctccggattgacctcaagaaaacaaaccttccgcagcagagacggaactgttatccagaacctccatggtgctcaactctcaccgaagaaatttataatgatacatctggcaattaggtccaaacaaggtttggcaccccagactttaaaagctgcaacagcttaatccagcataccggaaagtcggtccaacaataaccatgaaaattgaagagcaccaacaattaccaacattagacaagtcattcctgaagcaccatg

SEQ ID NO: 30814 - DNA, 382 bp, Oryza sativa
  Clone ID: uC-osflM202080e04a1
acattacagaaaatttttgacactccaaccacacctacgaacctttagagcggtcgacctttagttttttttttttattttggacttttcaaatattgttttttaatgtaaataatttttgttttcattgtatttttttgggtttttcttttttttttttttttttttcaccaagaatcatccattctttcttggcatttttgcgggatttttaccccccacccctgcttttaacccccaacacaagccccccccaaaattaaataaacttgcccggccagcgaacaaaggaacggaaaaacaaacggaacaaacccccaacaagaaagttttttgggggcccccggcctgaccaattaccactaacccccctccccctccc

SEQ ID NO: 30815 - DNA, 193 bp, Oryza sativa
  unsure (1)..(193): unsure at all n locations
  Clone ID: uC-osflM202080e05a1
agaggagatcaaactgtgtttatagactgaactgaaacttgattatacagtttgccacgactcctaactcaagcccctatgacgtggatacatatgtacaaaagttttgacacctgatgaaaatngcatctagctttccctaacaatggatagctagcatagntagcctatactcatgttcataggcagtgtt

SEQ ID NO: 30816 - DNA, 152 bp, Oryza sativa
  Clone ID: uC-osflM202080e06a1
ttttttaagggttttttgtttaattaaacctttttcaattaaaattttaatttttaattattatttttttaaaaaaaaaaggggggtccaaccatggctttaaaccaacctttttaaacaaaagggccctagggaagggtgcattcaacatg

SEQ ID NO: 30817 - DNA, 92 bp, Oryza sativa
  Clone ID: uC-osflM202080e07a1
ggtccccaaacaacatgcgctaaattttataccagaacctggcaaccggtgctccggtagtttataccgcgggttacaccatgaacatttac

SEQ ID NO: 30818 - DNA, 157 bp, Oryza sativa
  Clone ID: uC-osflM202080e08a1
ggtcccaagcaacatgctgaaattttataccagaacctggcaaccggtgtccggtagtatatacggtattacacatgaacattacacagcattgcgatattccaattgccggaagtccgataattaataccgtgcccgcgacagttgaaaagttcag

SEQ ID NO: 30819 - DNA, 339 bp, Oryza sativa
  Clone ID: uC-osflM202080e09a1
ttattttgcatgatgagcgattggtcatttgtagagctgcaagtaaccaacaagctcatccaggtacatctcctgctgctccctatctccaacaatgtcgctcaactccttggccttgcgtgccaataccttcccctcctcttccaccatcacccgccgcacggccgccgcaacatcgtccctgtggaataacccatcgtcattccttgcaacctccacaccgatccccctcgctgccatcgcctccgcgattaggccctggtcaacaatgaaaggaagcatcacgagtgggtgaccgaactggaagctctcgatggtggagccccagccacagtgcgt

SEQ ID NO: 30820 - DNA, 382 bp, Oryza sativa
  Clone ID: uC-osflM202080e10a1
gactcgacaaaaatagttgatgaatggaaagaaattctgctgtacaagggataaatagggtcttggttgaacaactgctaatgtaaccagagattaggagtagaatgacacaattactccgcatttgattcagtgtgacaaaactacgcaacgttatttgcgaatgccattccctatgagcaccagccaaaaactgcaggaacgacccttacaaactcttactgataaccacgtgaatagtagcaggaaagacgagcttgagttcttacaattggcgatagacagaacaagatgcaatcgatcctttggccatcttcatcatgtccatcatacccgaataaatgcaggtaactctgaccttgtattggccccagtgttggat

SEQ ID NO: 30821 - DNA, 228 bp, Oryza sativa
  Clone ID: uC-osflM202080e12a1
gccaaaaaaaaaattttaaaaaaaaaaaatttaaaggcccccctatatacaaaagagagaaaatttaatccctaaaaaaaagtccctctggggaaaaaaaaaaacaaacacaaaccaaatttttcaaaaacccccaaatccttaaaaaaaaatccctttaaaagaaaacattttcccccttttttcccaaaaaaaggaaaaaaagggccaaggaaaaacgcccccaag

SEQ ID NO: 30822 - DNA, 296 bp, Oryza sativa
  unsure (1)..(296): unsure at all n locations
  Clone ID: uC-osflM202080f01a1
agcaatgctagtcaataaagctaatttcacctttgaacgggaatggggaagcaatgaagtacagaattacaggagaaggtggcagcttgaggagagaatcagggagcttgtcacaactctacaaagctattatacannagttcagaagccttgaaccgcagaagagnagcatttgcttcccttcctanncaggaagcattnnatgacttccttggtgcttgttttaccaaaattctgggtgatttatttgggaaggaatcattgcggttagccagcctgncagcctttcttcttgc

SEQ ID NO: 30823 - DNA, 149 bp, Oryza sativa
  Clone ID: uC-osflM202080f02a1
tttttgtatacagaatttgagatatttcctttcgcatcggcaaattataggattgcaatgtgatttttggtacagttcggagttgaagcaatatacaagcctcatttcagcacggtgcgtggccacaactcatatccattatctatcag

SEQ ID NO: 30824 - DNA, 141 bp, Oryza sativa
  Clone ID: uC-osflM202080f03a1
tttgacctgtcgtcctttttttaaagtccgaagtctggggggaaaatccatatactataaccgggaaagcatgccgattaacataatttgatacagagcaggacaacctaggatcacatgaattaacagtaccagaaaaca

SEQ ID NO: 30825 - DNA, 365 bp, Oryza sativa
  Clone ID: uC-osflM202080f06a1
ttttgaccttttttttttttttttttttttgaaaagggaaacaaaagcttgcaataatgatctcctttacataatatttatacactctgcacacaggagataagatcaaagaaaaaaaaaacatgctgctgcatagcttcgatcctccccttccccacacatataactatcagtctacatcacgccgtccaccgggcgcttcagccgatccggcagctgatgcccaccgtcaaccactatgctaggcagctcgctctccacgccgccggtggtcgccggcgcggtcaccgcggcggccacatgagaagcgccgttctcggcgctcgccatgtcgtcgccgccgccgtgccgaaccaccacctgcc

SEQ ID NO: 30826 - DNA, 403 bp, Oryza sativa
  unsure (1)..(403): unsure at all n locations
  Clone ID: uC-osflM202080f08a1
tgcacgcgtgcgcgcgctcggatccttttgtgcggttttgcggncgtcctttttttgaagtctcgttttctggggggaaaatccatttaccagaaccgcgttagcttgccttgcctgatatgatcggtcgaaactgttttacagagctctttttatcaagagaccgaaaacatatggccagaaagcacaagcatacatacacaaacgcaccacacccacttcagagagctatccaccatgatacataacgagtccaatatgccttgcatatacttcattgaattccgccgattcgaactgctcttgtaacatttacaaagataatgctcacttccctaagatggaaccatatagaatttgggaaaggaaaaaaacttcacaataactgtaggaaaggcttaaa

SEQ ID NO: 30827 - DNA, 326 bp, Oryza sativa
  Clone ID: uC-osflM202080f09a1
gtgcacagttcaaaacataaagatttatgaactttagcagttctgttagaagcttgctggtaccattcaggtaacattgacaaaaattgcaagtgctcccatgaagaaaatgcttttgcagcagaggaagaaaacagaaaattctaggcatgggaaaccccagtggcagaatgtacatcatactcattatttgaaatgcttccgcttaaatgctcaaaacattttaatgaaagtaagaaacagtggtccctcagttgacaacatcaaggaccagcttgcgtgacttcaggacggaccacctcatgcgacggtagtatgcggcttgg

SEQ ID NO: 30828 - DNA, 141 bp, Oryza sativa
  Clone ID: uC-osflM202080f10a1
ttttttttttttgttttttttttttttttttttttttttttttttttttttttttttttttttttttttttttttttttttttttttttttttttttttttttttttttttttttttttttttttattttttttttatatt

SEQ ID NO: 30829 - DNA, 63 bp, Oryza sativa
  Clone ID: uC-osflM202080f11a1
attaaaacttatattattttttttccttgtttatggtttattttggatttatatttaagaaac

SEQ ID NO: 30830 - DNA, 176 bp, Oryza sativa
  Clone ID: uC-osflM202080f12a1
ggaaagtaacaaagagattgaatatacataatgtacattgaggatccaaaccaaagacaatagagagccaagcatatgcaggccaccatgatcgagtcttactaactggagtagaaaccaaaacgcaggcgaactgaaagtaaggcagatgagcagagaacgcccataatatgata

SEQ ID NO: 30831 - DNA, 104 bp, Oryza sativa
  Clone ID: uC-osflM202080g01a1
gaaaaggcaagaattttgcctcgggttttgataaaagagagtttttgtgataatccttttcattggttggagaggtaattatttttgtggaatccaaataaact

SEQ ID NO: 30832 - DNA, 368 bp, Oryza sativa
  unsure (1)..(368): unsure at all n locations
  Clone ID: uC-osflM202080g04a1
caacactaacaatatatattatacaatttttacaaaaggaaagccaatagagagaaagtacaaagcaaaatcctacatttttagcttacataaaataatgntccaatgaaggccgacaattagagacgagggccaacangttcacatttttaaattacattgagaaaacagttagaaaacaccaaaaatggcttgcctttgaatccatatatttccgaaacagccgaattttcaacccccccaagaagtttagggggaatgcgttagtctcaacttctttatttttcccccaattttgggatcttcaattgtttcttaacccttttctcaacatcacaaccacaaggcgtttcggattcttcgtccgc

SEQ ID NO: 30833 - DNA, 88 bp, Oryza sativa
  Clone ID: uC-osflM202080g05a1
gtgtcgttttttttgggtttttgggggtttttttgtttttttgtttttctcttttttcttttttttaaacaagagagaaattgggggg

SEQ ID NO: 30834 - DNA, 330 bp, Oryza sativa
  Clone ID: uC-osflM202080g06a1
gaagacggaccagattaccagatttcatatcagcaaacaaagtaataccataatacatcccactagcctaaaaccggtaaaaaacataaagccatgaaacaatatatcacaaggttcacttggggcattgatagtaccataaatacttttagcatccagatatagtaactatgcttaaagttgaacatgaaagggggggaaaagatcagccagatttgagccagcattgctcaactccacaaaagattgcacgccacaaccatttgccaccacataacaactattagccatgctagaagggtagaactgcccatgcaagtatatattatc

SEQ ID NO: 30835 - DNA, 104 bp, Oryza sativa
  Clone ID: uC-osflM202080g07a1
ttttttttttttttttttttttttttttttttttttttttttttttttttttttttttttttttttttttttttttttttttttttttttttttttttgggggg

SEQ ID NO: 30836 - DNA, 173 bp, Oryza sativa
  Clone ID: uC-osflM202080g08a1
agctcaatacgagtattaatcaatattaatccgtctccacgattgcagagagtacgtcacaacagacaacgctacatgcataacactttcataacacttgcgtagtatattcttatccatcatgtaagctcacacagccttgattaaattaacttaaatcaacaaattctaaa

SEQ ID NO: 30837 - DNA, 291 bp, Oryza sativa
  Clone ID: uC-osflM202080g09a1
aatctaacatacgcaaactgatattatcacaatgttagccgatgacaatggaaagagtaatctaggtacaagcggatcattgacggtggagacaagacattggctgcaccacaacacccaccagtggcgccaacaaggagcgctatccgttataggacgagagaaaaagtaaaacatcacgatgtgaagtgaaactgaataattttagtagacgatgatgatgatgatggataggctccttaggacgcccgccgcccttagcgtcttgctgctcccatcttgtccactgga

SEQ ID NO: 30838 - DNA, 376 bp, Oryza sativa
  unsure (1)..(376): unsure at all n locations
  Clone ID: uC-osflM202080g10a1
ctgcgcaccgccgcgcttctccttccttccatacagataatccctcagaagaacccgagtgcgcttatcggagacccttgagcctcctgtactcatgnnctcctcttcaagctttanngcaggacatacctgtnatcttcnntgaagttcccagttccccaatctccccacgttnttccgatccccctttctggacctgttccggnanntattttcctcctaccctggggtaccccttcttgctcccgcngttcattgcctatcnntgatagcgcnnaggatagttctcaaccccgctnnnttgtcaatttgttggttggtaattggatctgtttccaagacacatccctcggttatcgagtagctgagtgctgac

SEQ ID NO: 30839 - DNA, 311 bp, Oryza sativa
  Clone ID: uC-osflM202080g12a1
cccccctgtaatgctataccattatcaccctcttgtttatatataaaagcggtttaccctcgtttacaacacaaagaagtgaaaattgcaaactagtaaactttgatctttaaggaagggaactccaaaccagaatcaagaaattgtatagatggtggtgactggcaaccatcatatggcatctgaaaaatctctgaaaccagtaccactttttaatgatgatccctgtttcctgcccagggtgagagctccctcctttcaataagaagaacggagggagcaagcttgaactggccctggagtttgaacta

SEQ ID NO: 30840 - DNA, 400 bp, Oryza sativa
  Clone ID: uC-osflM202080h03a1
catgaaccagaattattattatgccacagatcacaatgatacattcagaaagcttcgaatctacgtttcctctgttacattaccacagctacaagcataccgtgttacaacttgtccgggattaccaaagaaaatggaatattaaaggtgactagttcacaacctctaaggcattaaacccttaaaccttctgagccttgagggcaaaaaaagggaatgggaaaaaaaaacattaatttcaacaaggcttgccttagaaaggaaccatgaacgaatcaaaattttttacaagggttaagaactgaaatctcgaggcataaagattttcacattagggctcaaattcctttgtggctatttcaccttgtgcctgaaccactaccttggtttttcttgatga

SEQ ID NO: 30841 - DNA, 52 bp, Oryza sativa
  Clone ID: uC-osflM202080h04a1
agggctctcaaaggagcatatattattcaatcttgatgaaaggggggcacaa

SEQ ID NO: 30842 - DNA, 66 bp, Oryza sativa
  Clone ID: uC-osflM202080h05a1
tttttggggttttggggtttttgtggtttttgggtttttttttttgttttttaaatttttatatat

SEQ ID NO: 30843 - DNA, 130 bp, Oryza sativa
  Clone ID: uC-osflM202080h07a1
agagaagttaattttttttagacaggaggggtacttaattaacacacagtaagggggcacgttatattaagccgccggagtacacacatttgcggcggcgttgagcaaccgggtttaaactttaacgaac

SEQ ID NO: 30844 - DNA, 73 bp, Oryza sativa
  Clone ID: uC-osflM202080h10a1
ggtatttgggtattattgtctccgagaagatcagtactactttattcatgctcatgacccatgcatacatatg

SEQ ID NO: 30845 - DNA, 92 bp, Oryza sativa
  Clone ID: uC-osflM202080h12a1
ggacaacgtgctgtaaattaaacgcattggaacacaggtaacccacacagagagtgaccatcctgcataaattgaagaccgaacatgctcac

SEQ ID NO: 30846 - DNA, 60 bp, Oryza sativa
  Clone ID: uC-osflM202081a01a1
tgtgttcctctactagtgcgcgcccttctttttattttttttggggggtttttttgttta

SEQ ID NO: 30847 - DNA, 346 bp, Oryza sativa
  unsure (1)..(346): unsure at all n locations
  Clone ID: uC-osflM202081a02a1
aaccaaaacataggaggtttcatttcttcttctcaaagtagtgtagcatctttccttctttcaccattacataagcttaagcaataacagataacaaatcctcctcctcctctaggtaaaatattcaaacacaatagcccttataagtgacttattatttaggaaagtacgcgtgcattgggcatanaatggcatgctggggggccaggttaagaaatcaacaatgctgnatgcagcgaggaaacaaaaaacaccataaatggcgaccagagcaaaaagccctccgaaaggggagcctttttagggcagaaagggctttcttcccactttgagggggctttcacca

SEQ ID NO: 30848 - DNA, 52 bp, Oryza sativa
  Clone ID: uC-osflM202081a03a1
aaatatgaggagcattctttaattatcaatttcaatttctctcctaaaaatt

SEQ ID NO: 30849 - DNA, 190 bp, Oryza sativa
  Clone ID: uC-osflM202081a04a1
acgggccaatcaacaatacagtggttcagaagagcaattcaccatgtaactaacatcagttttattcaccatgtacacacatactgatgaatctgttgcagaggcagcactgccacttcccaaaacacacaagtgatgccaaccaccaattgctcatgtgcaataacaaaaggttggtgcccatctacaa

SEQ ID NO: 30850 - DNA, 273 bp, Oryza sativa
  Clone ID: uC-osflM202081a05a1
agggcgaaatactggttacatgtcgagaatccttagcgtccagtgctgcatgatactgaaaaagtccatttctagtcacctaaatggctcgccatttactgctacaacaatactacaaacaaaccatttgttcttccatttgcacaaactactcataagttttacactgagaagaaaaaaggaggcatctaccagtccctagtaatcacatccaaatcgtgaaacgtaatcagtatgacgcctacaataattcaacatgggtacaaagagtgg

SEQ ID NO: 30851 - DNA, 314 bp, Oryza sativa
  unsure (1)..(314): unsure at all n locations
  Clone ID: uC-osflM202081a07a1
gtgtctaagtaacattcaaggagactcactgtctgccttgctctttttggattccattacattacagaacaaggcttattctatggaaccttctgtgctagtttcagtttcaatactttacaacaccaccagntccaccacactctgagcagcagcactcatggaggaatttattccaagaaactaatacgngttcctctttcttaagtttgacaggaactatcaactgttggtgttagacactaatagttactggctagtctgtcttgaatctgggtacaaacttttccaggccctctttgcagtcctccacc

SEQ ID NO: 30852 - DNA, 293 bp, Oryza sativa
  Clone ID: uC-osflM202081a08a1
actaggaaacaatggtatgtaggattctttatacttttgccaataactaaactgcccagttggtggcttcagaaaaaaagaaggggcaaatttactttgcaggagggttgctcaatgaaaagcaactcctgtttacatgaattacaacaaattgagctatagacttgcttgtcagaaaacaagcaaaaataaattacagaaaaaaatggtaagagaacaagcggctgtgatgtgagtgagggggagaccatgttacatgttgaatgaagttggtcaaattaattacaagctaa

SEQ ID NO: 30853 - DNA, 323 bp, Oryza sativa
  unsure (1)..(323): unsure at all n locations
  Clone ID: uC-osflM202081a09a1
aaagaataattagttacacattagcattgatttatgaggagcatacatcatacaacagttacaactttctcgtacaagtagcgaaaagtacagatgctttaactttcaactgcatgaggttttgtaactgctactatttcacaagtatagtaacatttttatantcttgtacaaactgtatgtattgccgtttgaagttttgagttcctcagtttaccatcatatcaaggtaagatcatgtaatctttgttttgttttatcatgttgatagttcatcgcagtcatcgtatggaggagccaaggtactttcagctggtaaaact

SEQ ID NO: 30854 - DNA, 335 bp, Oryza sativa
  Clone ID: uC-osflM202081a10a1
aacaactgccagcggcttaattaaagctgagttcacatgtacttgtactcacatcccaacccacatatacagaagtagaacacactgataaattcagttattgactaccaaagagaagggggtaaataagcacgtggataaatcccactgcaaggtacaatagacttaaaaatgccactgaaagtctcattggaagtcgatggcattttcataactaccatcagaccaccaattacagtggcattttactgatttacctagataaatactgacgtggtcagatcggcgaacaagtaaaatggtacaacatgaattaggcttggaaaaaacccttt

SEQ ID NO: 30855 - DNA, 314 bp, Oryza sativa
  Clone ID: uC-osflM202081a11a1
gaaacgcactaacatgtatacatgtataacacgaccaaaacaaagccttatttgttagggaacaaagtaacagctggtggcgaacaagtaacaaaatccgatcagacgagcacacggtactacactttggagacgaaacgcaatggctctcgcgaaagcaaaaaactccctacatccatcaccaggcatatgcatatgtgtgcttagatggccgcgaagtactccttgcttcccttggggtcaggcttcatcgacttgtcaccgggcttccatccggccgggcacacctcgtccgggttgtcctggacgtactg

SEQ ID NO: 30856 - DNA, 318 bp, Oryza sativa
  Clone ID: uC-osflM202081b01a1
gagtatagccggagctttcatagatttcattcacatatgcctcacccaacaacatatagtcgtagcagataccactcttacatcaagtcagagagagatcaggtgaaacaaaaacaaaagcagagcacggccggtaaaatcaaaagacgatgaacaaactgggaacacacgaaacaaggtgggagacatcatcgaatcagagatgaacaattaaacgaggctatatatgacgatgacggcttagttgccaccagactcctcgcagcccgggggcttgtaggcgatgaagctgatgagctgcacctgcctaacgttgtc

SEQ ID NO: 30857 - DNA, 307 bp, Oryza sativa
  Clone ID: uC-osflM202081b02a1
aaagaaactaacaccacatgcatgattttttttctttcatgtaccatatcaagttatcaacaaaggacaaagtattcacattttaatttgcaagatcacataacaattattagacttaaagctattttatgtctttctcagcaactggtgtttgtcagattttctttctgtctaaacacaaacttgttactgtaataattaccaccgattcagttcagaatcagagctgcacctgacggccatggaatccagctgaacggagccggcggcggcgggcggcgcccgctttgccggcttctgggccctt

SEQ ID NO: 30858 - DNA, 319 bp, Oryza sativa
  Clone ID: uC-osflM202081b03a1
ggacattagacattttctttcatgtaatatagtagtagaacacacaagaggttcaagcttgaatgattagaaaagcttcttgccatattatccaccatcagttcatgtgtcatgatggataatttttgaactgactaggatttagagaaataagcggacaagaagcccgacttgaccttcaatgcaaagaaaagagggggcaacgcacaattgcacgatactgaaaggaacaaattacagacatacaatgcacaggttctgatgaacacattaaactacacagacattgagatatttgggatacttgcgatgaacaatt

SEQ ID NO: 30859 - DNA, 323 bp, Oryza sativa
  Clone ID: uC-osflM202081b04a1
aggataaatgcatctggattctcagtgcatagaagaacaaaatcatttgctgatcatcccgactcggaacagattttctttgaactaaacaccagagcacatgaacagagtggataacaaccataaaactaccagcctagcacggacggacgggagtagttcatacttcatggcgttgctactgttttggtcggccactactactactaccacatgactgatattgttggtctaattacagaagaaaaggaaacagactccaatctaatgccatttgaacaccgtccattggactgatgatcactagctgcttagcatgtcac

SEQ ID NO: 30860 - DNA, 325 bp, Oryza sativa
  Clone ID: uC-osflM202081b05a1
ttttttttggggttttttttttttttggtaagatttatgtgattttatttattgtgaacttttttttttttttatggtaaaattttttttttttttttttttttttaaggggaaaaaaaaaaaggggggtttttggggcttttagaaaaaagacctggttttaaaaaaggggaaaccccaaggggagaaaaaccaaaaatttttgggggggaaatatttttaaaagcccaaattatagaaaggggggaacaaaaaattggggggggggataaaaaaaagggggggagtcaaaaaggcaaaaaaaaggggggggggccccccggcc

SEQ ID NO: 30861 - DNA, 312 bp, Oryza sativa
  Clone ID: uC-osflM202081b06a1
acacatacagaagggtacaagttttattaattgaattatcgggtaaacgacttcaaattctgatttgggatacctaatgtatgatgacaagattcagcacagggtgcacagctgaggcacagcgcgcccaacgtttgatttgtgttcctcaccttaacacagcgagtcaagatacgagtgattatacagacggccaaactggaggaggctggcgcatgttctatcccacacaccgacaaaaaggatgtcggtgtccgggctgaaagaaatgccagatatctgaccaaagaagttcagctcatgccttctggt

SEQ ID NO: 30862 - DNA, 315 bp, Oryza sativa
  Clone ID: uC-osflM202081b07a1
gtggtgacgaactgaaactcgtataaatatatgataatattacgccaaaagatcactgattcttaacaaactctttgcagctacagacactggaattcataccgtactattactgattgacaaagccagaaatttgcccaggatacacagaagaaccgtatatcatcattcacccaaggcaggctgctcaagctgcccaatcttattacccaacaccataatcccctgaaaaacctcagttctccatgcggatgatgcagcggatgccctcgcccttgtgcattaggtcgaacgccgtgttgatctccgagaacg

SEQ ID NO: 30863 - DNA, 240 bp, Oryza sativa
  Clone ID: uC-osflM202081b08a1
acaagaaaaagggggggtttaaaaatttaaatggggccggttttttttgaaaggattttgacaaggggaacgcatgtaagggtgcccgggggttttgaaaaaaatttttttaaagcccaaatggggaaattttaacgggggagcgcggggggactggaaaaaagggtttggggggcaagaagttttttgtccggggaaattggggggcccctttttgggggacacctttttggaccccgg

SEQ ID NO: 30864 - DNA, 115 bp, Oryza sativa
  Clone ID: uC-osflM202081b09a1
ctatgaggagattttttggaaaaaagacaaaaccgggctcggacaagaaggggaaaaacctcaaactggtagaaaaaaagggggaggggcaaacccctgtgagatggtccacgga

SEQ ID NO: 30865 - DNA, 329 bp, Oryza sativa
  Clone ID: uC-osflM202081b10a1
gactgaaacgaaataaatttattgccatatctgatcacaaaatgattacaaataacaacaacgacacaactcaaaagatcggacacatattcatatgattccctttaaaaccattttatcgtattattgtgtcgatacagcagacctgctattgaacatgacaaaacctttatccttcctgatctagctcaggaagagtaaagtagggcctcaaatcattgctttggttcagtaatttgaggcccttggcaataactaaagtcccacacgactaaagcacccaatacatcatttcactggtgagcttgtacatctcagacctgtgcttc

SEQ ID NO: 30866 - DNA, 329 bp, Oryza sativa
  Clone ID: uC-osflM202081b11a1
atatcaaacgctctagaaaagattcatgtgatgaaatacatgatgaaccacgtatgttctcaaggtaaaattaattaatgcagtatagttttaactttgtccatcgatctcaacctgtaactgtgacgacacactggctacagtgccctcgaggtactagcagtatagcagtagctgtagtacgtagcagcagcagcagcaggttcactgtcttgattggattggatcggattagtagacgtagttcttgacgaacatgccctccttggcctcggcggcctcgccgtcgctggtgtacttgccgagctgcgccagcgagttggccttgg

SEQ ID NO: 30867 - DNA, 332 bp, Oryza sativa
  Clone ID: uC-osflM202081b12a1
cattaggcatgaagcagccaaacttgtaatttcattatacgagacaaaacctgtgaatatgtactgatgagttgaaagttcagtatttccccctccatttttcccctttccccatctgcatcaggttctaggaaccaaacatattacagtcaccagagagataggatgcaggttcaacacaagatctgtctcaacatgttacacgaactcctggtcctggtcatctggtcttcgagaaccctcttcgccgtcgatcattctcctagtcatgttggccctctgaacaaggcggaccagcgcttgcaccacctcagacatcggcggtctgaact

SEQ ID NO: 30868 - DNA, 321 bp, Oryza sativa
  Clone ID: uC-osflM202081c01a1
ggggttaaaccaaactggcggcccaaaagcttcacctgagaaggcttaaaacagtatgcacagtggcatttgtctccatacacaacaagtacaggtctcattcataacagcaagagcgatattatagcttagtgtaaactgctgcaactagaatatggcaaaatatagtacaccattatagtttgtttgggccgggcatttgtctcatgccgaggacgccaaaagcttattattattcactggcatgtagcaatacctgaagcgaagcctatttcaagttcaaaggtagcagacgactgactttgcattcttacaaactta

SEQ ID NO: 30869 - DNA, 321 bp, Oryza sativa
  Clone ID: uC-osflM202081c02a1
agaatgattggtccatattttattttggatcgggctgcaaaagccaaataagtccccccttgacatttacatcaagtacacaaccaaaagaaaacgtgcgagcaaaaaaaagtctccagaattcactagcatcggcgaacgtactagttaaacatattcaccatctcatcatggaaggagttattgatgattgattgattgcacctgctggaagcattcttgtggacaatctagcctgtgttctgcatgccggcagcaatgcccttcatcgtcaggatgagggtgtcctccaggccaggtgcgtactcgctcgcagcgttc

SEQ ID NO: 30870 - DNA, 348 bp, Oryza sativa
  Clone ID: uC-osflM202081c03a1
tggctcgctggcggcggcggcggcggcggcattgcggccgggccggcgcccgcgctcctctgcttcgacctcaagccgttcctcgccgcgctcaccgtgctcacgctcatcaccgccgcgtggcagctccgctcctacagctccgtcctcccttccccattccccgtctgcgccgacccggccgcgctctcgccgccccgcgcgctcgccgtgcgcaccgtggcgtcgagcggcaatgcgagtgtctcctccgaccctggtgggccgcccgcctcgctgccggaggtggggaacaagaagccggtggcggcggcggcggcggccgatcccaacaggcgggagttccgc

SEQ ID NO: 30871 - DNA, 315 bp, Oryza sativa
  Clone ID: uC-osflM202081c04a1
gacacgaagctcagatcagtgctgcagcattcatacgtcgtaaacttgattccgcttggtgatttacaacagcagtatacacacatactggaccagccatttagcgctccaattattgggaagctagtactgaaatgaacgcgagactaccaatactacaccatgctagtttcagagacaacaggaaggttgttcgtttgttcagatcaggttgttgccgaagccaaggacgagtgagcagcagcagcggcgaaccccgcgtagcccagcgcgtcgctggtgctaccctccggcccgtcgccgtcgtccgtgtcc

SEQ ID NO: 30872 - DNA, 158 bp, Oryza sativa
  Clone ID: uC-osflM202081c05a1
tttttttttttttttttttttttttttttttttttttttttttttttttttttttttttttttttttttttttttttttttttttttttttttttttttttttttttttaaaataattttttttttttttttttttttttaattttttttttaatttg

SEQ ID NO: 30873 - DNA, 255 bp, Oryza sativa
  Clone ID: uC-osflM202081c06a1
ggaacgggaaaatatttagggggcgcctttcccttttttttgggaaaaagagcacaaatgcccccattgggggaaaaataacggccatgggaaaaattggtaattggggaataagggcttagggccaaactatggttaaaattaaaatccaataaagggggggggaaggccatggacaaagttgggggaactggaaatttttgccaaaggaaagggtgggctcgttgaaaaagggggggggaaaaattggggggg

SEQ ID NO: 30874 - DNA, 320 bp, Oryza sativa
  Clone ID: uC-osflM202081c07a1
agaaggaaccaaagtgcacctatatacataaatatacatcaaatttctgctttaacatgatcagattcatcaacgcagaaagaatatatttcagagatcaaattacaacgcagtgaattgaattcacccaagtcctagccgtggacatgataaatacaccaccaccattgatgtttctgtttgctacagaccttccagcaaatatattaaaaatgaaactaagacaactccacagcggttttgagcctatccctgcattgcaatttcatctcagttcttcttgcacgtaggcaggatgtcctgactacgcctaaagccaa

SEQ ID NO: 30875 - DNA, 436 bp, Oryza sativa
  Clone ID: uC-osflM202081c08a1
aacgccgccgcgggggcggcagcagcgacggggggaggagggggagggggattattctttggtttgttctttctcttttgatgacgctgttttttgctggcttgtcaattgctcggttcttaggatgctcttttcctttttccctatccttctttcttgtttatttatctttttctgtattttctttttttatttttcttttcttttctttttttatttattcatttttattatctattcttttttattttttttctcttttttttattttcttattttttttttttttttctcctttcttttttttttttttaatttttttttcttttttttttttttctttttttttatttttttttttattatttttctttcttttctttttatttttattttttcctttttattttttttttttatttttttattttttttt

SEQ ID NO: 30876 - DNA, 320 bp, Oryza sativa
  Clone ID: uC-osflM202081c09a1
caccggttgtgtgactgaaaatagagaaaacgtcggcgttggccttagctgcttttgggcgcatcggcggcggcggcggcgacggcgtcggggatgccggcggcgagcctggctctcaagtccttcctgaggatcttgccggaagggttcttggggatggaatcggtgaagaacaccttgttgatcctcttgtagaacaccacctcttttgcaacgaatttcttgatctcatcctcggtgatttctgagccttctgtccggacaatgaaggcgactggcacttcaccggcaagatcatccttcatcgagacgacggcggc

SEQ ID NO: 30877 - DNA, 247 bp, Oryza sativa
  Clone ID: uC-osflM202081c10a1
ataattaaaattttaaaaaaaaaaaaaaaaaaaaaaaaaaaaaaaaaaaaaaaaaaaaaaaaaaaaaaaaaaaaaaaaaaaaaaaaaaaaaaaaaaaaaaaaaaaaaaagaaaaaaaaacaaaacaaagaaaaaaaaccaattaaaaaaaaaaaaaacaagaaaaaaaaaaaaagaaagaaaaaaaaaaaagggcaaaaacaaaaaaaaaacggaaaaaaaaaaaaaaaccctaaatgagccaaaaa

SEQ ID NO: 30878 - DNA, 301 bp, Oryza sativa
  Clone ID: uC-osflM202081c11a1
gatgcgaccgaggcagctttattcaacttgtccagaaccacttttttaccgactatcacttttgcatgggtaaaattaactaggtcccacgggttgattgtacagtatttttcaatgggacagacatgccgaaacatcaactatttcccccactctaactactttccatttcaccgtttttcaaaaccttggcaaaatctggcgttggagctgtcaaacatgttagccgtcaggtcccgtctcctccatgtctacagccacaagcatccatgccctttcctactaacttgtttagagctca

SEQ ID NO: 30879 - DNA, 328 bp, Oryza sativa
  Clone ID: uC-osflM202081c12a1
aaaaccaaccacattatatagtaaacattggcttcagagttcagatccacaaggttcacagccactatagcaagtacagataaggtagaagctaagtaacttgttccagcctcatatagcagttacagatagatagtttcactgccaaatagtacttgagacttcagcatctaagctagacacagcacatactaacatactaacatagctatatagcgcaactagaagcgcccgacagacacatgccgcttcttggatgtccagaatgtttattccatttgtccttatatatacaggcaccagttgctacaccccaaacccctcagta

SEQ ID NO: 30880 - DNA, 319 bp, Oryza sativa
  Clone ID: uC-osflM202081d01a1
aggtaagtgagcagatcaatcaagtatggatacttatataaagtcatcctcatcatcccattcctacaacgacaacgttctacaaaaagaccatcttctcccccacgggaaccgtacaaactaacacaaaaggcagccttgattcaactgtgataattagaagggcaagtgcggagagcgcctctaaatatttcaaggagcctatgatttcccaatggaaagatccatgtgaagataagcaatgcaggctacaaagaacaggaacacggctgatatcagcatcaacggttctgcgagcatgaagatcggattgaattcg

SEQ ID NO: 30881 - DNA, 346 bp, Oryza sativa
  unsure (1)..(346): unsure at all n locations
  Clone ID: uC-osflM202081d02a1
aattaatcgcactttgaaattattagttagtttctgtcacatgatgaggtgtggcaccaagatattttttgcttgagtgatcatatggactatagaatggccaaagcttcacaaatantctgtccgtgttatcgtcagtttcgtcacaagaagcaaaangaactactaggntcgatcacccaagcctgancgtggaatttgcagnccattgactttggaaggttttccaaattcccaangtttgtgtgcctgtgttcctggntcaaaacataacttacagtaagcaccttggccttgtgntctcatataagtcattctccttagtccttaaacttctgcataacaa

SEQ ID NO: 30882 - DNA, 125 bp, Oryza sativa
  Clone ID: uC-osflM202081d03a1
gagggaaaagaactgaagtttggatccaaactttggatctaaacacagcctttatttggcaaaaaaaaatgcattattaattctgtagcggctttgaaataccagaataaattagcctttaagaa

SEQ ID NO: 30883 - DNA, 192 bp, Oryza sativa
  Clone ID: uC-osflM202081d04a1
ggagaaatcattaataatataaatatatcgaaaacaggtggttaaacagagttgccaagagtcgatcgatcgctgtacaccgtgacaaattcaaagacgtctgtcataacttggataaattaatactagggatatattaaaggacccttgggcaagcgattgaaatagattcagcaatatgatggtattggt

SEQ ID NO: 30884 - DNA, 111 bp, Oryza sativa
  Clone ID: uC-osflM202081d05a1
agaaaaaaaacaaggttttttttggaaaaaaccttggttataggggaaaaaaaaagaattgaaccaattttaaaaaaaactgaaagaatgtttaacgcccttttttaaaaa

SEQ ID NO: 30885 - DNA, 349 bp, Oryza sativa
  Clone ID: uC-osflM202081d06a1
tctttccgccgggccccgggaagacgacgagcacgttcgacgacttgaggtcgccgtgcggcggccggtggaagagtggcagcgtctggtgcaggtaggccagcccccgcgccacgcccttcgctatcgccaacctcgccggccatggcagcggcgtcctcccctctcctctgttctctgcagcaaaatcgaggatccgatattcctttatttttatatgtctcttaaaaagtcacaaaaaaatttaaaaaatttagtaagatagatctatatgtgatttatcactccacaacactccacaacacatgcaaattcaaatttaacttatataaatagatacaaaaataac

SEQ ID NO: 30886 - DNA, 296 bp, Oryza sativa
  Clone ID: uC-osflM202081d07a1
acggattaattaactgttcacaatacaaatacagttggcacaaaatgtgtcctgcccaaaagcgggaaggcaggaagggaaaaatttgcaggaactaacgtgtggaatcaaagaatcgttgctgcatcctaccgatgataggctgtgttaagaaccaccccgcctcctttccatgcatgtgcgcgttcgtgcgtgcgtacgtacgtgttgtttgatttcagaggatcagaagtcgaagatcatcttgcggaacttctccatgtgctcggcctgcagcgagatggccaccgacaggc

SEQ ID NO: 30887 - DNA, 320 bp, Oryza sativa
  Clone ID: uC-osflM202081d08a1
gaaacaatatatcacaaggttcacttggggcattgatagtaccataatacttctagcatccagatatagtaactatgcttaaagttgaacatgaaaggggggaaaagatcagcagatttgagccagcattgctcaactccacaaaagattgcacgccacaaccatctgccaccacataacaactatcagccatgctagaaggctagaactgcccatgcaagtatatattatcaactagacacacacacaaggactcataaccatcctccaaaataaaagtcgagcaatagtgattaacacggctgctgattcattgcagg

SEQ ID NO: 30888 - DNA, 301 bp, Oryza sativa
  unsure (1)..(301): unsure at all n locations
  Clone ID: uC-osflM202081d09a1
agtatatcaaatttattcttgcatcataatgtcagtgcacataaacaggcaacccttgctaccaaagcaaacttgttttcccgacattttgctaccaagaggaatattacacaccgaacttttcagataggaatatgcangcatctcgcagaactttggggaccaggctaacttaaactgccacgcggtaaggtggtgaatgagaaaaggagaattgcaacacgagggacactggaaatgctttcggtcgtcttggggtcttttttttatctcaaaatatgattgcttcacataaggggaa

SEQ ID NO: 30889 - DNA, 261 bp, Oryza sativa
  Clone ID: uC-osflM202081d10a1
gggggaaaaaacaaacaaaataaaaattgggaaaaaaaaaaaaatggggggccaaaaaaaaaggggaaaaaccaaaccaccgggttttttagggaaaaaaaaaggggggcccaaccagggggggggtgcccattgggggttggaaaaaaaaaagggggtggccatccaaaaataaaaccccaaaaaaaatgtttatctgggaaagaaatcccgggttttccccaaaaaagggggaaaaaaacttttggccaaaacgggaaa

SEQ ID NO: 30890 - DNA, 323 bp, Oryza sativa
  Clone ID: uC-osflM202081d11a1
gggagaactcaactctataaaaaaaacacatgtagctgttacaggatggctgcaccttctcatgaaaaataagaaacattgctaccaaaaaggaaaatgagaaggggattaacaatccgttgttattactacaaaagatacagcactgagagactggatcgaacccatttcgagcaacactgagagaatggatcaaacccatttcgagcagagcgtctgtattttcgatcatcaaccttgctggccatgcagttcaaggccgcagggagggagaggtgaagacgatcttggttacagatttatgctttcatctttcttttctt

SEQ ID NO: 30891 - DNA, 313 bp, Oryza sativa
  Clone ID: uC-osflM202081d12a1
ggagtgcacattcatggatatttttttttttaagtctgacgagtacaaaatcaatgacgtggtaacagtgcactggctgttccccaaatcaacaaattgccatcagtaggtgctaactcgccagaatttgcattattctgtgatggagaagatagcaggagcgtaatttcactactagggtactactgcgttgtttcgggcttgcgacaggtgatgatggtgaatttgatgagccctttcttgtatccttcgatcatcagaggcatcaccattgcacctcttatcgtcttccacccacttcttagcagagaag

SEQ ID NO: 30892 - DNA, 301 bp, Oryza sativa
  Clone ID: uC-osflM202081e01a1
agcgctctcaaagtagcatatattattcaatcttgatgaaagagggacacaagccatcatctatagtgatggtgcctcttacaaacttcaacacacggataacaagcatacactcaagagtcaagagggggctaggttttgtgtgtacaatggaacacgcaggcatgtacacaaccaagtatactccaccccaaactatagtctttgcaatggttttggcagttgctcaaaaaccatgaattttgatgtgttccttcttcacaatgccggcctgaacaagaaaatttgatacgttcttcct

SEQ ID NO: 30893 - DNA, 215 bp, Oryza sativa
  Clone ID: uC-osflM202081e02a1
ggggccacaactttaaaaattggtcaaaaaaacactttttggggacaacccacacgagagttatttccaggggaaaacaattcagcccaaacgggccacttgtcaccaaaagcaaagaaattggggaaaaaatataatggacccggtacccccctttttaaaacaccaataaaaataaagagggaaggggtggccctgggaaaaaaaaacatttt

SEQ ID NO: 30894 - DNA, 316 bp, Oryza sativa
  unsure (1)..(316): unsure at all n locations
  Clone ID: uC-osflM202081e03a1
ggcattaatacgccagtacattaattaagttacacatatgcaggctccattttggtttcttttaatttatcgtattacagaatttctgtagccttgctgatgatcacttggatatcatgtactagtaattaacaataggatgcatacaaaagatggncccaacgacaacagtaagatgcgtgcatctgacattgtctggcccttatttggttggtagtaccttccaattaattaacaagagatgatgcattcttgtgccttagtttcttcacatgcttggcttcacgttgagcctattcgcaattttcacgcccaa

SEQ ID NO: 30895 - DNA, 323 bp, Oryza sativa
  Clone ID: uC-osflM202081e04a1
gtatatgaggtaaacaatatcaacatcatatttccccgtacaacaccaatccatgtcaacacagttccactcaaaggttctgtcaaacctaatacttatagccctaatagcaagatatatagagaaaaaataggcagaaatgaacaaatgaaattaactcatgtcaacaaccgatggccctaactgataagcctgctgcagatcaatccgccatgatgaagctagctgcttcattatctgaaccggcgtcgccccctcccaatcatcaggcaactcaatggcagtagcttcgtgtaatcccagtaagaggtcgttcttcgcat

SEQ ID NO: 30896 - DNA, 132 bp, Oryza sativa
  Clone ID: uC-osflM202081e05a1
ggaagaccaaaataccaaataccttacattatatgggggatagagtaattaaagatttaaatgcacatgcaaatatgcaatgccaccctttataattggacactagcaaacaatgggacctatcaacttaaa

SEQ ID NO: 30897 - DNA, 322 bp, Oryza sativa
  Clone ID: uC-osflM202081e07a1
ggtatcagaagttcacttatcagtacgagaattcgaacagagactggtccgagatattcttgccaagctaaaatagacgggcgccatctcaggccttggaaaacataaacatgttatgtagcatgcatatatacacacatcgccggataaatacgctagttaaaagctacggtcttcttctctcggcgtatgcgtccacctcgtcattaggaacgtgacaacaacacgtttaggccgacttcgcgaagccaacccttatcttgccgtagtcgaacacggtatggtaggcacccatgaaaacgtcacccaggatccagagagg

SEQ ID NO: 30898 - DNA, 317 bp, Oryza sativa
  unsure (1)..(317): unsure at all n locations
  Clone ID: uC-osflM202081e08a1
caaatcaaccacagacgctaattctcacaccatcgatcatcagcactagctgttacaggtttctcgtataatatcgatctatgcttgatttacacattcagatgtgacgaaatctacatgatgcaactgatggtgcatgcatgcatcatantccctgacccttggtgagccatcattttgggtcatatgcacagtttgattagctaccctttgatcgattaggatatgccaatggtcttccctagcagccacatgacgagcgagaactcgatcatgaagagcgcgtggagccatgtccggtcgaagacgaagccgaa

SEQ ID NO: 30899 - DNA, 310 bp, Oryza sativa
  Clone ID: uC-osflM202081e09a1
agaacggggaaaatcatacaaaatattttattgaaatggatttattgcgtccatcaaatacattcatggagcaagtcatctcaatgtgtaacacaagtatacagaagtccaacaccacactttcagatcattccatatcgtgtttcagttccctagaccaggagcaacttccaccgaataaacgaaagactatggacactaaaatgtaggaagagaaagtgcatctccatcatataggaagagaaatggaacgcacaagcattagtggaagtgcatttgtcatctaatttttacaatctagcaatctttg

SEQ ID NO: 30900 - DNA, 323 bp, Oryza sativa
  Clone ID: uC-osflM202081e10a1
attcagaagcaacttttattagcagacttgtgtttttgcatctgctacagccgtataaacatcgtgtagacagcttttacatttgagactagatgatacaagtgttcttcccactccccaggaagcaaagacacagcctgtgtatttccatgttgaactaaattggggcattccaagatggcctcacttgttgataaaagcgacccccttttggatactctcggccagctccttcttagccttctccagtccagctctttcaaattcattcaatggaccaagtgataagatctcctcgatgccacagcgacctaaccgcactt

SEQ ID NO: 30901 - DNA, 325 bp, Oryza sativa
  Clone ID: uC-osflM202081e11a1
acgtgacgggaacatacgtttcaggacaacacttgcaggataggtaggagtgctcaataatagcggtagcgcactgcataccaaccatttacatggatggaaatactacacatacaaagacacgtgcaactcgaatagagcgtacattctctaggagatgttgcaatacctaacataacagaggtcttaaaagagttctttttttttacttgcagaatagcaaaccatgtaatacagatcatatggtgatcctgtaaaactattaaattatggttttgaggaactgccctgcagttaattaatatctccgttttgctttcaactg

SEQ ID NO: 30902 - DNA, 210 bp, Oryza sativa
  Clone ID: uC-osflM202081e12a1
acaaaaaaaaaccggggttgacagcattattttaaaaaaaaccatttttcgacgggaaccaaaccacacaccaaggtttttcggtggttacttttaaaaaacttggttggaagcagcttttatttttgaacataccaaaccttggaaaggatcaaattttttttcaaacatttttttggggggcatagggcttggatgacccattttaat

SEQ ID NO: 30903 - DNA, 269 bp, Oryza sativa
  Clone ID: uC-osflM202081f01a1
ggaataacgggtctagaatgggccagatcggagaagataaaagatcatctagtttacaggagtactaattaatgaattgacagtactctgatcgacaggtaggatcaaacactgaaagcctgcatatatgcaggaacccgatgcaaaaacaagcattgttctgtttcctgctggagcaatgagcagcaatgcatgcataatatatattgccttgatcgccttgatcagcttagcacgcgcgaaacgaattgattaagggaaggctttgg

SEQ ID NO: 30904 - DNA, 353 bp, Oryza sativa
  Clone ID: uC-osflM202081f02a1
ttctgccgcgggctcctccttggcggcgccggcgccggcgttgtcgtaggcctgcgccaccggtgtcgccgtcgccggcgtgctgctctccttagcggccgtggccgccgcgggcgcgccggcggcgttgtcgtaggccttcgcctccagcgtcggcgtgctggtctgcggcttggcggcgtcgtcgcattccttctccaacgccgccgccgcctccgccgccggcgcctccgccgccggcttggctggcgtcgtggtagatggcgtagcggaggagtagacctgcgagaggtcttgctcgaggaggtcgagcacggcgtagacgttgcggaacgtggcgacgacggactcct

SEQ ID NO: 30905 - DNA, 325 bp, Oryza sativa
  Clone ID: uC-osflM202081f03a1
acaaataaaggacatgcaatgcctggcctgtattctcaatcataaccagcccatggaaaacgctaatacagcgatactaataatgtgctgcaaatacaggaagtggttgaaagttgctaattaactagtaaataagtcacggaagcaatgtagtgcacataaactgtgtccactgggtacttcagctcgacacattttgacatacgcagccctaatcttatgattccacatagcaattgatcctagtacatcttatgatccagtaatacagcaggtagctgagtaaatggactcagaaatagacttcaggacagattagtggccc

SEQ ID NO: 30906 - DNA, 188 bp, Oryza sativa
  Clone ID: uC-osflM202081f04a1
tttttttcaggggaataattagcatttttcatgttgacatttaatagacaacaaccaatttacaaagtgtgcaagagtaaattaacctttggacacttgtatatgacacgatcttactagtatcctcctttttatcaaaaatacaatgaaagaacatgaatgctcacccacaagaagatagaaggtag

SEQ ID NO: 30907 - DNA, 328 bp, Oryza sativa
  Clone ID: uC-osflM202081f05a1
ggaacttcatacaattcggatgctatatcacacatagaagccaaaccggcacagcagttatgtttgtaaccattttccaaacaaaacgaagcgcaaaacaagtctacaatttggaacaaaagatgcatcacagatcatgcaattgttcagaaaggctaaaagttaaatagaagcttatgttataaaatagcagataaggtcatggtgaaaaaaaaagagagttgatttctctatggggtcctgaatttgaaatgcattgcatttcactactcactatttgattcgacaactagactttgttttggcgcgtaagatgtgaaccatcctg

SEQ ID NO: 30908 - DNA, 327 bp, Oryza sativa
  Clone ID: uC-osflM202081f06a1
gaattaagtacatcgagattattgtaatcatgataaaaaaaaaagaggacggttcaccagtcatacaatacggacaaccatgaaaccagtgtcccagcccagagccccagatcctggagcatcaagagtttttctgccgatctaaagctgttcttaaactctaaaagatgcatcggtcagcaagcctggagttggagcaatgacaaaggcaaacatgccattacatttacatgtccctgcttgttctttgcattaccaattgaaagtgtagagcatttcattgcagtctggtacaaggctcacttgctcagaacataactgtttcga

SEQ ID NO: 30909 - DNA, 329 bp, Oryza sativa
  Clone ID: uC-osflM202081f07a1
catcaaaatcatggtatgtttatcctgaatcctcctctttaaacatgtatatgtgacaaaaatcaaatggaatgaaaatgtacactatggtacaacaagggctacaacaaatttcccaaatcccataggcatcacacacacagttgacacttccctcaaaatccgctactcagaaatacaccaatgcaaaccacagctcctcacactgatgaagaatccgttaatctgtatagctcacgaggcaacagcaatggcaatggttggtttgcattggcaatagcgattgcagtagcaagaagatgtatacaacaacacattgggtgaattct

SEQ ID NO: 30910 - DNA, 322 bp, Oryza sativa
  unsure (1)..(322): unsure at all n locations
  Clone ID: uC-osflM202081f08a1
atccaaaaccacgaattgtattacgccatagcagctggttattattgactagctagtattaccattgggttcccatctcttagccccaaccttgaaacgcatactaacgaaagacaacattcaaaaccaccatcaaangtccgatttaattgagagttgagacaactggtacacacgatggaccttgccgacgacattgagagttttttgcctcttggcagaaaattttcaagaaaaagcaccttagtaaaggtctccttccttgtgagtatggatgacgcagtcggacttagggtaggagacacatgtcagcacatagcct

SEQ ID NO: 30911 - DNA, 322 bp, Oryza sativa
  Clone ID: uC-osflM202081f09a1
aaaacaaccagaacacgtattttttctggtaccctcatcaggcatctgattaaatttgaataaaccgaacatatgtgtccaaaatcacaagtgagaaccacaggtagcaataggtattacaggctttgaatagaagaaaatgataacagataggttcggttgaaaactttgtaccacgctaatgaagaaacagcaacaaaaagagagaaacaagcaggaggacggggataacagctcctttgggcttagcattcttgggttcgaagaattagaagcatttcctgtgcacaatggatgggccagactcgtcggactcagcctt

SEQ ID NO: 30912 - DNA, 308 bp, Oryza sativa
  Clone ID: uC-osflM202081f11a1
gaaactccgaatatcccaacttgatttcaaatatgtacgtgatggaactcaataaaccaaatcaaaatgtccaccccgggttattttctgtttcttcttctcagatttgcttcgaggcttacggcacgacccgggcttaatttcatacaatgggttttccatcttcttacaagcaacttcagatttcaaatgttaagtattaacttaaattcccttcatgagggtctacatccttggggggtgcatttgccgatacgatgagccctcgggggatcgattttccggagatgatcttccaacaccaatcc

SEQ ID NO: 30913 - DNA, 222 bp, Oryza sativa
  Clone ID: uC-osflM202081f12a1
tgccggagaacgactccggcgaggaggacgccgacgaggaggacgactaggaggagcccccattggttgccacgttgaagccgttgtgctccagcacggagatggggctggagctgcggaacagcgcctcctccgccttgtccggcagcacgacgccggcgttcgccgtcagtcgccgacgccttgatcggcgccgcgccagttttacgtcccggaaaaact

SEQ ID NO: 30914 - DNA, 328 bp, Oryza sativa
  Clone ID: uC-osflM202081g01a1
actgctaaacggtaaaactggtattagggagagcgaaggttcctaaaggcatgtccacggattaccgcgagtttcacggtattactggtttagtccaaaccagatgggttggtaacaaactcatacgacagtacaacaaagcaggcactctcagttggcagtatcagcaggtagcccgaaatgctcctgaatgactcctgatggcgttttcccaaatccatcagcgattcccagcatgaccttgagcttctcctcttcactcttcacttgatccacacgcttcataacattggtgattagtgtactatatagtgaaccatcatcatca

SEQ ID NO: 30915 - DNA, 247 bp, Oryza sativa
  Clone ID: uC-osflM202081g02a1
gagggaagatttggtttccattgtattgtattgtttgtgcagctgtatcaatgtacatgaatgaggaaggcaggcaggccagttgttgaagagaagaagagcctattaggagtaggtgggaggggtacgccggctggtgcatgatcgtctttgaagatagttgcaaggtgatgaaggacgcccgccgatgaagcatctcggaccggctcgcaggccgattctctggaagaagcatggagcctgacca

SEQ ID NO: 30916 - DNA, 305 bp, Oryza sativa
  Clone ID: uC-osflM202081g03a1
gtgattctgtccgatttttccatttacatccatacacattctttggccttcttttagaagacgatgtcgcttttattatttttggctattgcgtggagggttggaaccttccacttttgtatatagtaaaaagaaaaaaaatattaactgcatactttgtttaaaaaaaaaacccaacctaaaaatgggacccctcctaggataattcagaatcgcagaactgggagaggataggattttttgggacggagagagtagtaagctgctcatcttctagtctacgtttccggattaatatctttccg

SEQ ID NO: 30917 - DNA, 307 bp, Oryza sativa
  Clone ID: uC-osflM202081g04a1
cacaaaagttaccttgtcctgcattctaattaaattttgcttcagttaagagaacaccaaaaagaacaaagctaaagcagttgggagagggagaaagagaccagcttttgacatccatgcataaaactgctaaaaagagattctatgcccctccagctttccatcatgagaggataacctactacacaaaagtatcactcccatcaaccattccaaatacttcagttagcaaatgacccaaaaaaggaatgggcgcgccgtccttttcgattaacagccagcaaacaggcttttgcgcctggggctg

SEQ ID NO: 30918 - DNA, 215 bp, Oryza sativa
  Clone ID: uC-osflM202081g05a1
ataaaatacaaatttttatttttggggataaaaaaaaccaaaaaaaaaaccgaaaaaacccaaaaaaaaaaaaaaaaaccgggggttttccaaaaaaaacaacaaaaaaaaaagggggggttcaaaaaaaaaaacccaaaaaaaaaaaatttggggtcaaaaaaccccggggcaaaaaaatatttctccccaaacagggggaaagcaaccaaaaa

SEQ ID NO: 30919 - DNA, 356 bp, Oryza sativa
  Clone ID: uC-osflM202081g06a1
tttgccgccacccgctcgtcgcccacgcctcctccacacctcctcctcctcccacgtcctcgccgtcgaggcgccgcaccacgcacgacatggcgagcagcgccctcgccatcagagcgcctgcccagcccgccgcctgggtttcgtgccgattttgatttcctttttcttggccgcctctgcctctctctctctctctctctctccctttcttggttcgattgttcctggttcttggcctgattggttgaacctgcttcttctggaatcaattaggggagaaatatttgcaggagaggggcggtggcgatggcggagttggttgggccgcgggtgtacagctgctgccattgccg

SEQ ID NO: 30920 - DNA, 225 bp, Oryza sativa
  Clone ID: uC-osflM202081g07a1
cattccgatagatagcaacaagcagttcaaacaccataaccaaagcgaactcaattcatggtaacatcacggacgaagaacacctaacactggatggatggatagagggcttctcgactcgagagagccactggacacgataacgactcgactcgatgataagatgattctgacacggatagctaaggataactggccacgatgggccccaccaatcagttcctc

SEQ ID NO: 30921 - DNA, 271 bp, Oryza sativa
  Clone ID: uC-osflM202081g08a1
aacatcaagaacttttcttgaaaattttgtaatttgatccgcaacgattcaaatgcagatgaaacactggtgattcccactcagattacacccaatacaaataccccgacaaactgccttaaaaaccaccaaattgattcaaaagtaaaacgggtatgagggatcttcccaccgagactgactaaacctaaccacagacaattggatccactggacccagattattcaaaaacaggtggctatgacgggattgtccttgcaaccgaaggga

SEQ ID NO: 30922 - DNA, 327 bp, Oryza sativa
  unsure (1)..(327): unsure at all n locations
  Clone ID: uC-osflM202081g09a1
aactagaatgctcaacctatataaacttcagtggccgacggaacaaatttacaggaagaacaaatcgcgatacagtaaagaacaaacatgataaacaaatttgttcatatatctacaaacacacaagcataaaatggtcctctgaatactacggttttttttttttgccgaaaattcaacagaaaactaaactccttaggtattgcacttccacttcgatgtgggtacgcagttcaggtagtggcaccagtggcatccgncatttccattcttacccttgaagagcatcactagtgaaaccacaaacccgacaagcagcaaaacgaa

SEQ ID NO: 30923 - DNA, 329 bp, Oryza sativa
  Clone ID: uC-osflM202081g10a1
ggaacaaacaatagcactatattttatagcacctcaaatttgagcgttaatacattgtacaccatacaaccggttttttggtctcaaaatcccagcttagctagttctaatcctcagaaactgcagtaacagcagtatgcccctagtctgctaaacgaacactcctttttgtctcgaactagatcttttcatgaactgatctaacatggacaaaccaacccagaatatgcaacaatggcactatctgaactgcaaaaaaggcttgatctgcatcatctgctgtattggactattggtacgatgacagctttgcgggcgaccttttgtac

SEQ ID NO: 30924 - DNA, 321 bp, Oryza sativa
  Clone ID: uC-osflM202081g11a1
attagacgagggaaaccaactattcgagcacagcccggaccatgcagacttcagggttcatacacaatcttgaactacatacattcggaacccgcacagttcatgcaggagagcaactttctagagcctgcatgcaaccgagcaagcagcttacaaactcaaagttttaaactaatctaatgggaccggcccacaggttcacgacaactactcaggcaaaatggccgacatgattatcacgcagaacgggccctggtccagacatggctggaacccaccaacaaccagatccggtaccagtccaggaccatagtaaacggt

SEQ ID NO: 30925 - DNA, 317 bp, Oryza sativa
  Clone ID: uC-osflM202081g12a1
cccgcaaaaatatttactgtatagtttggagcacagattataccatccatagcacaagccataagtattataatagcatacaagacctggacataaacagccctcataacaaagagattggcttctgtccataacaattctaagctttattacatgctaacaatcgagtggcgtcaccgatacttcagtgactcaagcaccgtacaagggaaataacatctgtacggtagcagtgagcttgtcatcacctaaaatcattctgacgtgcctactaagcactttatactaatttatggggaaaccatgttcctctgatc

SEQ ID NO: 30926 - DNA, 305 bp, Oryza sativa
  Clone ID: uC-osflM202081h01a1
aaacagatggacatcgtatttattcgactataaacatgcccatgtttattacaatgatgtgaatgaagatgataaataaatgatacatagagtagaaataatggcgtgtccatcgagcacttgggatcaaaacctgacaaaacgacgacggcgcgtatagttgcaggaaaatttctacatgatctcgacctagagcctcggtagcagcaaatggaatgcttccatgttttttttatagaacatttggtgatatatccttattgtttacacagaatctacaataattattcaccgtgcttcgtctt

SEQ ID NO: 30927 - DNA, 235 bp, Oryza sativa
  Clone ID: uC-osflM202081h02a1
gccgatatgcaaagggcactactagcttttaaagttttaagccttctttgaaaattatacatggcataatcgatggtcctctggcaagaagttgtctgaatcagatctaatggataccatactgaacatcctattttcctagactagtaggatggatctcggcctttgtctcaaatcttctttagatagatcacatcacattgccatgacttaaaatacttttcctattttcctt

SEQ ID NO: 30928 - DNA, 325 bp, Oryza sativa
  Clone ID: uC-osflM202081h03a1
gacattacacagccgtgtctgcagaacgaaaacctgtacaacaccttgagtatcaagatctccattaattcatctaccctaggactagcagctggggaaaaaagatatcctttttgataccaaagtgacaaaaactggaaaggaagcaaatcaacctaacattacgatgaccgaaaagaaagacggcaatcaacctaacattctgaaaatatcctaggaaaatgttcagcatctgtgctgacagttcttctcctgaaactccccggtcaatggagcagagatgatccaccttctggcttctgctcgttgcagcaacgtgacatta

SEQ ID NO: 30929 - DNA, 288 bp, Oryza sativa
  Clone ID: uC-osflM202081h04a1
ggggtaaacttgacacgaattaaattaacgctagaatatagatcgacaaacaaaggccaaataaataatatgccttcatttgatcgactactatatcatccacacacagatgtttcatagggacacacgaattatctctttcatgtaagtaaatagaaacctctgtgcatttattctaaaacaatgcccgtaatttaattaaggaacaccacttaagttgaataggtaaaagcaacctctcaaattaatacacttcatcgagaagaaacttgtttactcctggggcat

SEQ ID NO: 30930 - DNA, 187 bp, Oryza sativa
  Clone ID: uC-osflM202081h05a1
agctaagaaaaggaacatgcaactatatattattaaccagaagaacagaagcagggtaacccgggcttgagaaatttattatcctaacaaggcacgggagaaaacccataattacacatggcccacaggcccagtcgtttacccggggtctagacaattcgggggcattgacctacacgcgtgaatt

SEQ ID NO: 30931 - DNA, 141 bp, Oryza sativa
  Clone ID: uC-osflM202081h06a1
aaattaagttaggggaagggaaatgttccgtaagaaaggcacaaataagtttcgtacaaagacccctccagttgttcaaatgcaaataacatatgtacgggggataagatcatgagtgttacgagacacaggggaagtaaa

SEQ ID NO: 30932 - DNA, 315 bp, Oryza sativa
  Clone ID: uC-osflM202081h07a1
aataaacaaaagggtgtactagtgtaaattaagtaaggtataatgcacccgtacgtggtggaggcaatcaccagttgagttgtaaaactgcaacaagtatatataagctgctatgctatgcacactaataatttttgattgatgagatttagggcggctaagggtaataataataaaattgagttcagtagttagtagagttccaagtgaggtcctcggcaaggtggaggaacgaggaggcctgcttccagctccagctccagaattgttgggaatggagttggagtaatcattcttgggaaactgatacctgca

SEQ ID NO: 30933 - DNA, 239 bp, Oryza sativa
  Clone ID: uC-osflM202081h08a1
gggcaacccaatataatatctggaataacatacgatgcacaagaacacaatattggagtaatatcagtgatcagttatgcccaaggaaagttcataacaaatggagctaggcacctcaacgcccagaatcacacgaaggataggagatataatccattatgaccctcatggaggcccactgcatgctttcaggttttgaagaagaaattagtggttcctgttacccaaggaccagtaat

SEQ ID NO: 30934 - DNA, 243 bp, Oryza sativa
  Clone ID: uC-osflM202081h09a1
aaaaaaaaatttgtttaaaaaccatttatggggaccctttgaaaccacattaaaaccgtttaaccggaaactttatttaaaaaaaagggtggggggtgtgaatttgctcacctttgaaggcttttaaaagggggggaacccacaagggaaaaaaaacggaagtttaaacccttgggggggaaaacccccaaattttttgggcccaatgatgcaggagccaatggaaaacctgttttacccttt

SEQ ID NO: 30935 - DNA, 323 bp, Oryza sativa
  Clone ID: uC-osflM202081h10a1
acagtaaactaaagaagcattatatgaccccgatgactagaaaaaggcagaaacttcagtctcaagattggaataataggaaagcaatcctaccaaaaaagaaaagaaagaaaaatggatgtctatctacagaagcataagcacatggacaatgcactcttttacctacaagaacactatagggaaacaggagaggtccagaggagacatgtacttatttgtattgtagatatatgatgcttcaccggccatcagccgaggtgaacgattctgcaaacccggcaggccgagctgggatgctgcccttgctgtcctcaaggctc

SEQ ID NO: 30936 - DNA, 246 bp, Oryza sativa
  Clone ID: uC-osflM202081h12a1
aggaaacggaaccagggcgcactcctggaacacgcgataggaaacaaacaaggattaaattttaaggggcggggggagctatggggaagcaactgggaagatgtttaggcaaaaatattaggggaaccatgggcaggggaaaccagggaccattgcccaaaaaggctttactcctggatgggggcctttttttcctcggactcgggcttgggggggggggggccctgaaactggtgggactcggag

SEQ ID NO: 30937 - DNA, 363 bp, Oryza sativa
  Clone ID: uC-osflM202082a01a1
cttctaaataaattttgcatataaagatttgagttttgctactacatattgcataagcttgttacaaaattagccaaacatgatcaattcatcgccatatacaccaacaaaatattataaggtaggtagaacatgctaaaaaaaattgagctaagattttaaggtgaagctaacacattgtaattgtattgctccttcctcctttcgtcgtcgccgccgcctcgccagatctctcctacaccggccatatctacacattggaagcagcagcagcagcagcaggagcacccatggctggttctcggtcacgggtcgcggacgcgggggctggtggccggcatgggtacaccgggcgatggcggc

SEQ ID NO: 30938 - DNA, 389 bp, Oryza sativa
  Clone ID: uC-osflM202082a02a1
ggtcggtgccgagcgttgggatgatgttttgtacgtgcaccttcacgccgtcgacgccaaacgacgccaggttggcgtggagctcgttggagaagtcgagcaccttgcgcgggtggacgaggcccaggccgagcacggagagggagtccatgacaatgtgcggctggttcgccgttaccgcccggcgactgcactcgggtacgccagtcgccgtcttgtaccgctccatcgccggcgctcggcgccacgcctgacccagtagctcggccatggtgtgccacacgtacacctagccggaacgccgagctcccccttaacctcctccaccaggatactcagccccggcgtgttcttgacggcgccgtcggtcttgctttggaacttgacgt

SEQ ID NO: 30939 - DNA, 367 bp, Oryza sativa
  Clone ID: uC-osflM202082a03a1
gggagcatcactgatcaattcactgctacacacccaacgtaaaatgcatgatcccgtgttcgacttatacaggcaatgcttcgtattgagtcggaactattccgtcctctaagaattaattaacttggtacataattaagcagcatcaatccgaaaatcggatgagagcagacttgagacggtaaaccgatcgacacggtaaaaattaagaagtcgcaattacgaagtggaccataataatagtatacgatccccgctgcgcagctgacttgttttagcagacgccgatggtcttcttcttggccagcacggccctcttccagagggagatcacctcgcgctgcttctccatctccctctcgctcgc

SEQ ID NO: 30940 - DNA, 383 bp, Oryza sativa
  Clone ID: uC-osflM202082a04a1
atgggtaacacatggttttttttatgcgttgtatacccagaacagctcatgtttcacaatttatagtttgacagggtggagaacaggggatgtgacgacacttatttgctcaactaaattttattactgtgagacgaacgatcaacagatactattaagcatccatgttgcgaaatccatgtgatacaagaacgactgcctcaggctcgaagatgacaaaaagggtgacatggatgcgatactgacacttcagctgcaacttgcagcgacctacaacggggtcagcccaacaacaccgcatgcaagtcgcccaccagcatttccagtactgagactaagctcatggccacccttccccaaatcatcttcaagctcatgaacaa

SEQ ID NO: 30941 - DNA, 418 bp, Oryza sativa
  Clone ID: uC-osflM202082a05a1
taagctttttccttagagctgcgccctttttttttttttttttgggtcttatcgaacttatgttaactcatatattgcatgattaacacgatcaatcaacagaagaaagcaataaaaaataaaaataaaaataaaaatgaggctctgttagcctttatgaaggaagggtaggacatatatgcttgatcaatgttcttgggatgaagaattattcacttggacttcattattactcgatcaggcattagcggcgctcggagatggagcagattcactgctggactcttccgctgggcctggggccgccgaaggcccagccgggctctcagcgggcgcgtcggaggccaacaataccctggagccaccggtgactgtcgaggcttccgcgaacggtgccactgtgatagcggcgaggagg

SEQ ID NO: 30942 - DNA, 115 bp, Oryza sativa
  Clone ID: uC-osflM202082a06a1
cggaaaaaaaaggggacccccccttaaggccttttaaggaaatggtgactacattcccactaaagtgtgaaaagcccaaaaaggttataacccaaggccaactaggcgggccttt

SEQ ID NO: 30943 - DNA, 310 bp, Oryza sativa
  Clone ID: uC-osflM202082a07a1
gggaaaaaacgcccagcttacaagggagaaacacggcacattaagcacacaggcaagcctgcatatgtatcaaaaggaacaaaacaaaacccaatactaaacaaaaataaccggctatttttaaaacaaggcaacattaaggggcaacaaaaaacaatttcaacccaaaaatccggaaacccctttttaaaaaaagcttaaagcttgggttgcagggtaaacaagcagggctttgggctccactggtctcaggagcaaaaggggcccgaacaacggttggtgaaagcccaaaaccaatcccaggggcgga

SEQ ID NO: 30944 - DNA, 370 bp, Oryza sativa
  Clone ID: uC-osflM202082a08a1
gggataatgcatcccaacggtatgcaaagcaacttctctgttccgactaccaacaggacaacaggcaagcaaaagtacacaacacaacggtggattttcagcatttcaaaaataattctgaacatagccattttgagaggaaaaaacagagacacaaacttaattggaactaaagactagataatgggaactaatgaagaaacttattcgcaattctcagctggaatatcaaagttctccacgtgatgcagaggcaaacaagatcagatagatgaactctcatgatgaggatgcaatcaggtgcttagatcttgtcaagcgcctgaacaacgtcattcttcaaatcctcaaaatcctccactccaatgct

SEQ ID NO: 30945 - DNA, 341 bp, Oryza sativa
  Clone ID: uC-osflM202082a09a1
aaggaaaaagactaacagactttgtaacttatgatcagtacaaatcagagacatgttgagagttacagcacgccaacaaacatttttacagagttacaaacttcagaagctaatagagcagcatacacggtacaactgaagacaaccacaaaacacaaaccaggttagtttttgcacccaaaggggttcaagattttttttttttggtagctacccttttttggcatggggtcacctggagcaagtcatttccagagcttgacaaacctatcatgggttactggggcaaccttgcctgttgcgctcgatgctgttagcgctgcaactaaaccattatgagc

SEQ ID NO: 30946 - DNA, 307 bp, Oryza sativa
  Clone ID: uC-osflM202082a11a1
cattgaggtttatttatcagaacacgagagatagacctcaaccacaacgtggtatcatcagattacataagtatcagtattcagtactatgacgtataaagatagcaatgctctgaatgtttgcagaagagttttacggacgcctgaaagtaaaaacctagcgcgtctgtttcaggagtggtttcttgaggactgtcatcattcagacttatcagggcagagtctcacaacttggaaattgccttaaatggttaaaatgggaagccattctcaaatggtatcctttgcctcaaaaaatggtttggac

SEQ ID NO: 30947 - DNA, 63 bp, Oryza sativa
  Clone ID: uC-osflM202082a12a1
gtctaaacacaaaaatatttatattctttaaagggagaaacaacaaaagccaggaagagagga

SEQ ID NO: 30948 - DNA, 287 bp, Oryza sativa
  Clone ID: uC-osflM202082b01a1
aaaccgcactagaatggaaagaattaaccaatcctggataaataggggctcctagcaagagaacgcattctaaaaagttaacatatttgccatgtatgtgcattgcattgacaccgggaactactgacaaaataatcattaactaaagaactacttataaaccaagaggtaatagtcaggtacattgaagctctatatgtaggaactctccagagctaaaatgtcatatcatgtataaagggcagacaaagcctaacgggattttgagaatgcaccatgaatcatct

SEQ ID NO: 30949 - DNA, 370 bp, Oryza sativa
  Clone ID: uC-osflM202082b02a1
ctaagcaaactgcaatgaaattatatgcttatttacaacagtcattgcatgtttgaatgtgaattatctgcttcagtgtgtaatatgtattgtcacatataaatgagagaacatagtggacacttacataaataggctacaaatttcgcaaacaaacacaggtggtacttgggagctattaaaagtaccatgtatacgcttttctttgtttgggaagctagctgtctgtgcctcaaatttacagggaattatccgtctatataacacagattgcttaggagtccaaattctttgaggatggattgaacgccacctggtcagcacaatccaagttatctccagctttgtcactaccaacacccatcaggtc

SEQ ID NO: 30950 - DNA, 325 bp, Oryza sativa
  Clone ID: uC-osflM202082b03a1
attatggaggtcattgaagggacatttacatttggaataaattattaatacaaagtgtggaacacataatggactacaaaaggggatttttcaagccttaaaatagcaataatccagggacaagggtggccattgtaatacgtcttggacgctaactaagtgtactatacttgcaacaatgccccatgtaagatggaaggatactgggaaaattacatcagcgaattccggagtaatttggtctgaaaaaccgtggatccagatgtgactaacacagggaaggctggccgaacgctagacagccatggcgaagaagtacagattg

SEQ ID NO: 30951 - DNA, 396 bp, Oryza sativa
  Clone ID: uC-osflM202082b04a1
gaaaaaggtgcgtttcctatcgctcgccgttttgcccgccaatagcaagcggaagctgggggaatctgcggtggctttttcgcctcgttgtgccgtgtcatctcctcctcctcctcctgccgatgatgatgctgctgctgccgagttcctcctcctcctgctgctgtcgctgccccggcgggcagttccacggagctccaccccgcgtgatggcgccttgttgtggggtcaccagagtatatattgagaagagattgggagtaggagggggaaatgcatcaagcctgcaagacatgcacaggaaggagctccaggcaaggacaagggaccagctccagacattggagttatctacgcccttgtacgacacggcgtgggtggccatggtgccactgc

SEQ ID NO: 30952 - DNA, 378 bp, Oryza sativa
  Clone ID: uC-osflM202082b05a1
agcaaggaaaaagaatataactacaataagaagtgaaggtgcgaattcacagttccgctgaggaaatggtaaacaaactagatgttttaaccacatcgttccatattatttcaaaactttggggaatatttttagatggcagttgaaactgtatcatgatttaaatgtgaatcgccttcaggtaggtctgtaggcaagcctccttcagggcttcgctcactgttggatgcgcatggcatgtccgtgcaatatcctcactagatgctccatactgaagtgcaagcaccgcctcatggattatctcacctgcattaggggccattatatgtacaccgaggattctatcggtctccttctcagccactaccttgaccaacc

SEQ ID NO: 30953 - DNA, 378 bp, Oryza sativa
  Clone ID: uC-osflM202082b06a1
aagtaaccgggggccaaacccacctagcataatcaattgcaattgtaatacagcagtaaaacaaaaggggtaattctgccgcggccacctggtaaaaactgaaacatcatcacattactgaatgtctgttcgaatctgagactagaagtccaaactcaagcatcaggtgataataagtctttagttaacagaaagtacgagtagcccaagtggtatgattgccaactgggatttgaaaacaaaaggtgtatgatcaatatttttctcatcacatatacgaaggtgtattgatttagtcgacctcctcaatcttagggccagcaccactcccaccagtagtcggagcatcattgtccattccaccacccatgtcggcac

SEQ ID NO: 30954 - DNA, 371 bp, Oryza sativa
  Clone ID: uC-osflM202082b07a1
acacaaacacgtcaataaataatcactttaagttacttacaatttccacactttctcagacagcaattgcatcgaaatgcacacacgacgcgtgacccagagggcaaatatcttgacaaccttgatacaggatatgacatctaaaaaaagactaacacacagcatctaagagcacaataggagcaaacaagagcatgtacagggggcttaaaacgttgtttaaggtcatagccgctggagtaccaggccgaccctttatttagccagccagcctccagtacttcgggtcagcaggctgccataacactccagcattctcatccatctcaggatagggggagcaagtcgaaaatatctcctcacttcccctt

SEQ ID NO: 30955 - DNA, 371 bp, Oryza sativa
  Clone ID: uC-osflM202082b08a1
gtaaaatacataactttgcacacataaataacttgtcaaagagctgtatgtttgtagctggagtgaagtatgcatagagcaatacatgaacaatacactgaataagtacaagccaaccccaaatgaatagtttgagggctgggattaaaggttagtacactacactactatatactgtattgtacattttacacagaataaagcatgtgtgctttattccagtagcatcttctataagtaatctcccatcaagaactggagaaatatatacatccaggaagatgggcctactgcactctgcagcagattgttcctatgctatttgtttatcagtggtccttccttgatgacctagaacctggtctagatgt

SEQ ID NO: 30956 - DNA, 351 bp, Oryza sativa
  Clone ID: uC-osflM202082b09a1
gcctctgaaactgattctgctaattcatgatgagatttccagagttgacaacaaatcacattttcttcaggcgacaatgggaaaatgggttttagactaacatcttcactcgggtggaaagatacattcaaagctttccaagtcagaacaacatattcctttgactgcacacagtacctccagtcactagttaaacaaatggagaacaggaatcggggaatcaccgactgtaggcgctactcctatgctcgcccagataggcgaatatgtcagtgaattgcataggggcaatttacgagacatgtgttcaatttgttttacagggccatgcgttcagcaagccgacttttt

SEQ ID NO: 30957 - DNA, 365 bp, Oryza sativa
  Clone ID: uC-osflM202082b10a1
atataatgtacgtttttttttctcttttgagaattataaagttttacacatgtacaaatttgtcagattttcatatatatacaaattaaggcatggttaattagctttctctcgtcctcttccatatcgttgctgatatgtctagttaattagcatggcatgccgacgtggcagttgagcgtgccggcgaacttggtgagctggccgacgtacttgccgtgcttggcagggatgaagtcgagctggtcgtagctgcgctcgttctggccgccggactcgttaaagaaggcgccgttcattatcacgtcgccctgcgacttccacacccactccttgtccttgtcgtacggcgtgtacttcctttt

SEQ ID NO: 30958 - DNA, 365 bp, Oryza sativa
  Clone ID: uC-osflM202082b11a1
gaggaaaacagagcaaccacagttaagttattcattgttgtcttcaacaccagaaaattgcaagtgtcccgtgtaacccgatctaaagttactacgcaaataagctgttgtgcttacaaaaacatctggagtactgtcataccatgctcagcaatcaaaaagtactcggtcgtcgcaattgctagttctgaatggcacctgattacatctaacaaaatgatataggggaagacggatgatcgttacttcaaactgacctatggtctacttccgtcagtctcaccaaaacaaaagatcgcacttgggggcagctgatgcagattttcaaatcaattgcccgtctcctgtaggaactccaatacgtt

SEQ ID NO: 30959 - DNA, 359 bp, Oryza sativa
  Clone ID: uC-osflM202082b12a1
ccacacacaaaaacatatatatacttctcattgcaatccaacaaattccacgtgagtggtagtctcagacatattgttgggcatatatgccagggcctcatatgacgtacacacactgataaaaccattccacccaggagaacaaagccgagatgaaaaccatggtacatttttaaaaggctgcacattttgatgagtagcgcaaaagtgatgcgttgaacaaacgtcatggatccattttacatatacttgataagaagccacacgataacagcagggatcactattgcgacgacagatagcagcaggcacatgcatgagcagccacctttggtgcgcttgttcagaattgcaagcct

SEQ ID NO: 30960 - DNA, 354 bp, Oryza sativa
  Clone ID: uC-osflM202082c01a1
gatgataacatattcatctaagattatgccaaatcaaaatctccaatggtacagcacaatacattgctaaatgagggaactactcttgtttcttgcagatctcatcttgtacccagtacacaacagacctaaccctaaacactatagcaagcacaaaaccaaaccagactgaacattctgaaacaagaactactttcctttttcaccacccaaagtgtagctgattccacattccagtaaataatatataagagattcagacagagccttagcaccaccaattggggtctttttgtacaggcaaaggggcaaaggctcccagttcttcactatctcagaactggaacctgctag

SEQ ID NO: 30961 - DNA, 272 bp, Oryza sativa
  Clone ID: uC-osflM202082c03a1
gggcccaaaagggaacaggtcactttttttaaaaaggggggaccttgggaaaagaaacgggggatttttaaaaacaggaaaaaagggaaaaaactggaagggtaaacctttaagggaaaactaaatggaaataaaacaaaaaacaggggggggctgaaaaaaaattcctgggaaaaggttacagcccccttgggggggttgggaaaaaagactaaacggaaggggaagtaaaagggggggaaaaaggggaaaaaaagactccccggggggta

SEQ ID NO: 30962 - DNA, 368 bp, Oryza sativa
  Clone ID: uC-osflM202082c04a1
gacttgctagaattatggtattacaaggcttagatgttaccatgatgtgtaatcaatctgccaagttaaccataactatagagtttcaattttggagattaatcataagtgtagcactgctggaagataatgacatagcagaggtgatagcaaaggaatttacacaaaataatcctagaagatcccttcgaccgtgaagatagatagatctttagaacatgtagatcaactcgacgtagcagagtatgatataaacaaaaggtggttgtcgaagaacaaaccttcaacttcaaaaatatatggatttagaacgttgagatgaattcaggcgcatcacccctcggtccagcaactgtcctgtaaatata

SEQ ID NO: 30963 - DNA, 141 bp, Oryza sativa
  Clone ID: uC-osflM202082c05a1
ggaatcaaataataaatcaagaataatgcaacacatgtacacatatcctgatctcccatgttacgtacatacgaacagttcaacaccagtaaatcgatcccagtcccaaacaaacggtatgcacgcatggcctgttccacc

SEQ ID NO: 30964 - DNA, 366 bp, Oryza sativa
  Clone ID: uC-osflM202082c06a1
gaaatcacattaaacgcatgtgcaggatgtactgccaatccgagcagagagcaagatttgcaaagaaaacaaaaaaaaaatgtagctagcacatatactacttgtacaatcctcgagtgccatacatagaagagctacacttgaaaacaaacttctcgaaattactcaaattgagctacctttagaagaactatattggctttgcaactttactcaaccaaccatttcttgtcttgcaaaattcagcagcaccatcccttgttgattgaccgaaaatagcctgtgccccgatagtaaacctaatttaccaaccagcatcctccaatcccataaccaccgggagcaatcacatgcgtggctgcgggc

SEQ ID NO: 30965 - DNA, 360 bp, Oryza sativa
  Clone ID: uC-osflM202082c07a1
aaggtgaaatcatgattccctctattgtcatgctcgcaagtcacaggaccataaaaagaggcaacaaaagggccttaggtaaagaaaaattataccgatacattactgcaactcctcccgaattttcaacatcatacacactacatcgcatgcagggaacatgtgccgctaccaagagaccgacaaaacctcattcctcccaatgacaagttactcggatatattcattggaggttcaaggctctcgacaagaatgcgcaggtctaaatccttatcctcaaacttcttgatgaaaggatgattcaagagttctgaagcagacatccgctccgcaggatccttttgtatgcaggaggagat

SEQ ID NO: 30966 - DNA, 184 bp, Oryza sativa
  Clone ID: uC-osflM202082c08a1
aaaaatataaattttataaatttttttttttttttattaatatataaaatttatataaagtttttattatttataatatactgaaaaaaatgaacaaacaaaaaaaaaaataaataaaatatattttcgatataatcaaaagtttgacaaaccaaaataaaaaaagaaaaactcaaaatcaaaa

SEQ ID NO: 30967 - DNA, 351 bp, Oryza sativa
  Clone ID: uC-osflM202082c09a1
acgcgcgcagcatgcattttatttaggcacggtccacaattcatacatgtataggggatacgtctcgtcggcagacactcacggtatagtagggtagtcgtgtgtacagggatatagtcatatctgcgcgtcttttcatgccgttcgttgacttcgttcacagggtcagggtcgggtaggcgatatcgagtgtgacgccacacaggccggggccaccgacgtcgcggagaatccggatgtagccgcgctcgccccatgactggccccatgagttcttgatggtccagtacttggcgccggaagacgcgtcggtgccgtacccgacgacggtgacggcgtgcgctaggcgcg

SEQ ID NO: 30968 - DNA, 374 bp, Oryza sativa
  Clone ID: uC-osflM202082c10a1
acgagggaaaaaaactagaggtccctccaatataaaccatctagtatttctttattttaactacataattacaaaaggttgatgtagatctgacacctcctttctgtttcatatctcgtatttacaatggaatttttccctacaacctacaaaaatttcacgattctgtgaatccttctttgggtggtactggcttcccaccttgtgcagaagcctccttctgcaatcctgttattgaatctttttttgttttaactattacctgatctttacacaagggaaaagattaacctttctgacttcaccaccatggcgatgcagtcttccaggaaagcagaagggaagaactccgaggctccgagctgtctgcgcct

SEQ ID NO: 30969 - DNA, 374 bp, Oryza sativa
  Clone ID: uC-osflM202082c11a1
aatgaatctcgatagttctccattcaatcatgccagattttcaaccaatacactaagttttgcttcatgcaggaggacaaaaaattacttgagagtttcgagatagcatctaacataattctaagaaccaaaaactcctaacaggagccatctaaggatcggacctgcagaacagcaccatatgtcctgagaatgtcagcgcgggcaccggcatcgccatcattgagatcaagcagtgttctggtcaaatgcaaagcactaaagctattttttacaaggccacttccagatattataatctggccacccaattttctcgtagatcttggtccaaaactcaggagaccacccatctatcagtttaatgaagccat

SEQ ID NO: 30970 - DNA, 377 bp, Oryza sativa
  Clone ID: uC-osflM202082c12a1
gaagtgaagttaatttcattcaacaaaatcacccagcaccgggcaaatcagacagttacaaagtgattgataaaaacaaaaactccgggccagctgatgttcatcagcaaatattttacaagaaaaaaacaaggttctggattattaagacaaggcttttagataaccacagatatattgtgccccagggttcgatctatcggaaagggaaaaaattctgaaattccgatccgaaattgtgaatcctgttagagcctctagatatcaaaaccgaattaagtaacggccccagaatgggcaatcgatcaggtagccaagccatagcaggccagcgcctgatgcagatcagtacttgtagtccttgacgtgcaggcttt

SEQ ID NO: 30971 - DNA, 158 bp, Oryza sativa
  Clone ID: uC-osflM202082d01a1
caggtgaaagagaagttcattggcgtttacatgctgaaaccatgttatgacaaggtgcaaggactacaacaatagcacctatcaaaatcataagaaacgcttagtgcatatatacaccaagatagggccatctaaatctatacggaaagagaaaaagt

SEQ ID NO: 30972 - DNA, 366 bp, Oryza sativa
  Clone ID: uC-osflM202082d02a1
acatgaaatcagacagaataatttatggatgttgttaacgatgtacgagatacgtacattacatatatacacaacaaaatacatagcctcctggcattcagagttcatacatcgaacaatggaaaaaaaatttacgcagaactcattcagatcaagccaatctgacactatggggcatcgacaaatttctcaccaccaagggtgtgtgcctaaataatacacatcgcattccacaaggaaaagatgaaaaaaatcgttctaacatagcctacattttttttttgttcaagagctgcgtcaagtatgctacaaacacaccaatgacctactgggagcataaaggagcaatgcagatgcagttcctgg

SEQ ID NO: 30973 - DNA, 127 bp, Oryza sativa
  Clone ID: uC-osflM202082d03a1
aattgagcaaggagggcagtacagggacacctacattaggtaataattattaatataaagtgtggaacacataatggactacaaaaggcaactttttaagccttaatatagcttaaatccatggaca

SEQ ID NO: 30974 - DNA, 370 bp, Oryza sativa
  Clone ID: uC-osflM202082d04a1
ccaataacatactgctttagcatatcatgcatgataacaatttcagcacataaaaccccacttattctacgtatcatatatgatagttacatagcatcaggtgcatgtagtatactgtccttaatggtgcaaccaacaggacaatcagtagttgttcttctagaactgagcttggagcaaatctatgatcttcttatccacctgaaacgccttcatcaaaatatcatctgagataggtgggttcgatccaaacaccgcattggcaatagtaataaccccgggattttggctactcagtgcagcaatggcaactgccggcttgtgtgggttaggattgaactggaagtggatgagcccctcagggaacacc

SEQ ID NO: 30975 - DNA, 373 bp, Oryza sativa
  Clone ID: uC-osflM202082d05a1
gagattcaggtgtcaatgtattatttgacctcaagatcatttccatctaatacatttgcataggcaatttacaatccagtaaattcacctgatgacaatccctcactttccttagtatacatgcctcgtggaaaagcatataaattaaacaggtcgggactccgaaggaatacatttgcaatgaactcagcagcacctaataaacaagtagaagagagaattttatatcacaaccagaagatacgtccccgaagagagaaaagggctaactgagaacagcaaaccaagaaaattagacgagcagttgcagcccgagagcctcagttcagccgccttctcttgttccggtgtagtcccacaccatccacatgca

SEQ ID NO: 30976 - DNA, 368 bp, Oryza sativa
  unsure (1)..(368): unsure at all n locations
  Clone ID: uC-osflM202082d06a1
agcggcgttaaaggaatttttttatgttaattacattgggtgttacatttccaaactccaatggaaatcgaaatgaccacctcagaaagaaatacccaaaggtattagccaaaaacgggatgaagaaatgggatcaaacaaaatggtggaagaccgtacaagaggttgatccagaacactgcttgcgagagggggacaaggagaagtaggagagganaagttataaccacacatccccatgcagtgcatgcgacgaaggctacgaaaaatgcatagcatgggagatctactatggtgctgagagcagactatcattggtttaccgttaaataaggtgctgaccaattgaactgtgggctcgacagacc

SEQ ID NO: 30977 - DNA, 364 bp, Oryza sativa
  Clone ID: uC-osflM202082d07a1
aatgaaagcttcagactattccattctgctcttctgattgtaatgccacagaagagcatcagtgtttaagtcatgtgcaaaattatgacaaacaaatttgccgtccaccttttgatctaacaaaagggctggtcactcccaaaactccagatggatatatacacatcatttcgtttattaactatcacacgagattcctaaaacacattcatatgcgaacatccgcaaaactttttaccagttgataagcttgttgcatgaattctgcatcttcagagtgaagttgacgctgtcattgtcctttgagcatttccaaggatgataacaatgatggtaacatcatcgtggtactttctcctgctcc

SEQ ID NO: 30978 - DNA, 367 bp, Oryza sativa
  Clone ID: uC-osflM202082d08a1
aaaataatagagatgattttctatatatatagcaggatcacattaaacaattttgttgcgtatcacaacgagggattactactactgcagatttcctcagcaagaagctggagtagctagtagctaggacaaagacatttggacaacatgcaattcataaaacgtataggattacacgtagtacacacagatcgtgtacatactgaagaaaattaagatagaacatgcacacagggagcgtgcaacataaagtatacagctgatacagagagagaatggagcgctgcatgtctgccgcaggtgttattttaattactttgttcatatatgctgtagcaaatacgtgcttaattactagctgatcaac

SEQ ID NO: 30979 - DNA, 364 bp, Oryza sativa
  Clone ID: uC-osflM202082d09a1
acaccaatcatcccaagcaaagaaatgataactgacagagtgattgtttagacatgcttcaaacataaaaaaacacgcgcaaagccacaatttattatcagtgttgaagcgacatcatactatcatggagacggataacaaatagtgtccatgagacgaacgatgaaacgactgagcaggagcatcttttattcacgcagagtactatggctggcaagtgatagcagcaatcgatggccccgtagaagataacgcaccggaagcttaatcatcgtactcctggcggcgatggtggtggtgcttctgataacgctgcttcttttcatcatcagagtcattgtcatcatgtttcttgcggccgtag

SEQ ID NO: 30980 - DNA, 364 bp, Oryza sativa
  Clone ID: uC-osflM202082d10a1
ctcagactgcatcattcaatttatacacatcaggtagatcatacatccatgtctgttcttcttttttcttcagaaagaagcaaccaaagaggtttgtccgtgtactagctactatatatcataaaaccatacatgtttggtttcagcttatgaaatatacaggctaatctccgtgatctgaagagtgatctacatacactcttcatgcagatttagcgaacccgatcctgtctttgccgaagtcgaaaaccgtatgataagcacccatgaagacatctccaagaatccaaagaggaccgcgtggtggaggtatgtcgaacgccatgaacccgctgatgcagacggtttgccctccttgctccag

SEQ ID NO: 30981 - DNA, 371 bp, Oryza sativa
  Clone ID: uC-osflM202082d11a1
ggaatcaaataataaatcaagaataatgcaacacatgtacacatatcctgatctcccatgttacgtacatacgaacagttcaacaccagtaaatcgatcccagtcccaaacaaacggtatgcacgcatggcctgttccacctaccatccccgccgaataatacaactcgttcccatgcccatcgatcgatccatctcacctgccagttgggcggacgagctgcgagaacaccacgctgttagcgatgtcctcctcgtccatatcctcgctgatcagcgacagcgctgcggcgttggcagccatgctgtccgccacagaagtggtggtgctgtcgctcgtgctgtctgctccctccgtcttcccgccgttct

SEQ ID NO: 30982 - DNA, 166 bp, Oryza sativa
  Clone ID: uC-osflM202082d12a1
tttttttttggtttttgatgtttatagttgtactttataggtgtttttttcatattgatacattttgtactttaccagtttagttcttaagtttggcaccaatgaaggcacaaaacaaagtttcacattgaaaaaagtaagcgaacataaataaccagctccagcc

SEQ ID NO: 30983 - DNA, 204 bp, Oryza sativa
  Clone ID: uC-osflM202082e01a1
ttttttttttgtttttttatttttttatttttttttattattattttttttttatattatatttatattaaaattgatatttttatattttatttggaaacccaacaaaataaaaagggggtgtaaggggaccaaaaattaggaaaggaaaaaaaaagaccagaggaactttaaaaacagttgggggggggggcatatgcgccg

SEQ ID NO: 30984 - DNA, 89 bp, Oryza sativa
  Clone ID: uC-osflM202082e02a1
atacatcatagttttacaatttattattgtttttaattttaagcacagaaaaacagacaaccaagaaaacacacccacacaaacaacac

SEQ ID NO: 30985 - DNA, 305 bp, Oryza sativa
  Clone ID: uC-osflM202082e03a1
gacagtaaggacactttattgtttaattgaaatgagaagacaaattaaacgggataagggcgggaacaaaaaaaacaaagcctggggacacaaaacctgaacttatgagcttagggggaacagaacgaaaaaaattatggcccgggagaacgaaaaagccaaaagggagccccaaacccagacgggtacaaaaacggaaacccccaaggggcctaaaaccctaccaaacaccggggaaataaaacccggcataaaaatggggaaaaaaaaccccgggggggttaaaaaagaacaaaaactggggg

SEQ ID NO: 30986 - DNA, 188 bp, Oryza sativa
  Clone ID: uC-osflM202082e04a1
ggggtaattaaaattttttttttttggaaaaaaaaaaaagggtaaataaaaaaaaaagggaaagccagtaaaaaagggaaaaacaaaaaaaaagggttttaaaaaaaaaaggggcccccgagggaaaaaaaaccatgtttaaaaaaaaatggggaaagggttaaaaagaacggggaaaaattcaaaaa

SEQ ID NO: 30987 - DNA, 365 bp, Oryza sativa
  Clone ID: uC-osflM202082e05a1
ggcctatgaagatccaccaaatccacatattacattataatcataattatgaatactttccttgaagagcatcattacacaaaatcctttgcctcccctcttgcatgctcaagaaaaacctaccaattttctcctccctacccttaacaaccaaaaccagccccacctaacacattgccaaagcaccattttgccatctggtaatccctctaccaccaacagctacaagaaagagcaaatatccctgtcccctacagcaggcaattaagattgaattgcatacattaacagtgacaacaatggccctacatgattgaaacattacttgatggcttctggtcctacccacactaccacaacaaccc

SEQ ID NO: 30988 - DNA, 354 bp, Oryza sativa
  Clone ID: uC-osflM202082e06a1
gaaaaagatctcatccccaaatagaatatcaaaccctcagcggcatactcttagtgagtgtccgctggggtcatcacagtaggcaataggagtctcatttctccacttactaagatttcaggacttttaatttaaagtttcacaggactctacccactgttccaaaaacagggacaggaaaccgtatgcaagcgcatcagtatctaaaggcagtgtagtgacatggtacggcctgttacttaaataaacccccccaaaagaacaagaagcgtatttcagctcctccacttcatggacttggtgccttgtggcgagagttggcctttaaccttcaatcatttgatgccctcgggg

SEQ ID NO: 30989 - DNA, 345 bp, Oryza sativa
  Clone ID: uC-osflM202082e07a1
ctcgcaaccaaaaagggaaaaagaaaacactgttcctgattgatcctgagctcaactatgcctacccatatattctaccgcttccatctttgctactcacacccgggctaaattacaggcagaccaaacaaaaacaaccagtcaccacttcgacgacaaaattcacaggggggacacaccgattaagactgaacttcccgcgcgttttcgactttttttttccttttctttttttttgggtggcctcaaagaagaagaaaatgcggcctaatggtgaccaccacgaccccggcgaggcgtggcgaggtccggtgaggggacgttgttgatgtcagccctgggcct

SEQ ID NO: 30990 - DNA, 365 bp, Oryza sativa
  Clone ID: uC-osflM202082e09a1
ggcttcaattctgagctagattatcataccaaaccaaccaaagaatgcatagacaaaggggtcaaaacatatgcaacaaccagaatggattcacatgcaaatgagccttttatgtccagaaaatagctcatttggaggagagaatcgtaggagcgccgcagaatctttcccttgtttgtgtgtctacgaccagtgaaggcagcagctagcttcttttgaggtaccttctgtgcctctgcttggggaacctgttcagtagcagcatcaggccaacattgctcccacacaaaccgattgggtacttgacgcgatatgatttcctccgccagctaaacacagaggcaatccacttaatcaccgcgacg

SEQ ID NO: 30991 - DNA, 359 bp, Oryza sativa
  Clone ID: uC-osflM202082e10a1
ggacaaaaaaaatatatcattgtctgttttaacgagttcctctcattccaaagatgacatagtcatcctctacaaaaattttaaacaaaaatataattgaactcatgtgaccaatatattttccatccatgaagaacgataagttccaaaaataaccaagttgtcctaatgagaaaatcaggcactgacagctttcaatccagcatctgaagtggatggtgctggcgtaacaccaccggtagttggcaatccaaccatgactttgaatgcatcataaattccccattgagctccagtaagggtaccgatcatgacaatacgtaggggcagtccacgagtgaatagaccccagagaccaa

SEQ ID NO: 30992 - DNA, 279 bp, Oryza sativa
  Clone ID: uC-osflM202082e11a1
cccccggggaaaaaaaaaaaaaggaaaagggaataaaaaaattttgggggggaaaaacgaaaaggggggaaataattaaaagggggggggaaaaaaaactttgggggtttggggaaaaaaaagtgggtggttatgaaaaccctgggacccaaaaaggaaaatggggaaaaaaaaaaaaaaggttttggcggggggggggaaaaaaggttggtaaaaaaaaacccccaataaaggaatttcaatggccattttggggggaaaaaaaaatggctttttttt

SEQ ID NO: 30993 - DNA, 364 bp, Oryza sativa
  Clone ID: uC-osflM202082e12a1
cagaggggggaaaaatacatgcttattatactagatcatcaattaatttaccagcgtatcctctcagcggccgtgatcagtacacacggtactgtatgtataacgaatcaaatgaaatcaatcggggccgggcatcgtacaaaaccggaacaagattatacattcaaatgctacaacagcgtatgatcaagccacgtggggaaaaaaatgtgtaacaattacacaagagatattagacctcttcacactttttttttaatactccatttgattgtttctcattaagccttgttctgctttgttttggcaatgctaagaagatctccaaacagcttgtcctcaggcttcgatggttgccccatgg

SEQ ID NO: 30994 - DNA, 372 bp, Oryza sativa
  Clone ID: uC-osflM202082f01a1
attggcgacgaatttatcagatatgctctagatacatatcttgtgtgtatatagccggagctttgttttcacatatcctcacccaacgataattgtagtactcttacaataaaaccggtcggagagggagggaagagattattacatatgtgttaagagcagaggccattgagatggtacataaccaaactgtaaaataaaaatatatagcatattatatattgatatatcatcaacatagcccaaaacaaagctgcatactattattataggcagcaatccaccagcgcgatgcttgatcttagcttagttgccaccagactcctcgcaacctgggggcttgtaggcgatgaagctaatcaactgcacctg

SEQ ID NO: 30995 - DNA, 365 bp, Oryza sativa
  Clone ID: uC-osflM202082f02a1
aaaaaacaaggaaacatttttatttcgagggaaggacgcaggactgaagaaacttaaaagtgtccctgatgtgtttcatcatccgttctgtcactcacaaatggactcaaaatacagacccagatcaagtgtggtgttcaaccaaaatgttaactggcgaatggaaggtggcgtggttttctagaaactgcagatttgtacagaccaatccccagacagaagaaatacaagatcaagactggtgggcagcaaacaaattttgctgggatttatttgccccgattcatcgtccaagttcttcataccttcagggccaacttcttagcagcaagaacctccgcttcgagggttggctcccaaagaat

SEQ ID NO: 30996 - DNA, 376 bp, Oryza sativa
  Clone ID: uC-osflM202082f03a1
gaagaatgtcttggaccaaagaccctgagacaggttcaaccaaacacttccaagacggacatacaaacatactgaaaatgtcttgtcaaacatggttaatataacagcattctaatagtgcagaatagtagggtttttcctgtggctggcattagtggaacaagaaaaccaggatccagccatcatttatcaacttgaacaaaagctttgacccagaactacttaagtaaatttaagaacatttatcgctttctttcgtgatggtgccgacgacagtttcgcgtactagaagattgctacctgaaagctcgaagacatcaatgttcattgccccaacaacatccgatggtgcatttagactggcgttcgaacttca

SEQ ID NO: 30997 - DNA, 371 bp, Oryza sativa
  Clone ID: uC-osflM202082f04a1
agagaagctccacatgcaaaagtatatattccagtgtataatatccaggtaaagccaaagcctacacaaaccaaccacagaaccacattctcaccaggtcacctaaacttctaaacaagtctttgtgggagatatccaggtagtatatatattgtgaatcctcacccagagtttaccatgtagaagattgagatgtactgcacacaggaatggtcatcagtaccatataacggacgattgctgattactattactggttgcaatgtaacacttcggatacaatagtacattacagagctagctaaatgcgaagccacaataccgtcagcgcaagacgatcataaataaagcttacacaacatagccaacat

SEQ ID NO: 30998 - DNA, 371 bp, Oryza sativa
  Clone ID: uC-osflM202082f05a1
attgggtcgacgcacaaattggcatcgttttagctggcttcgttgtagatcctataataacgatacatcattaattcgatcatcccttggatgcggcctgcggcttacattaaatctcgatccaaagaagcaaagatgatgacagacagaaattaattaagctagaaatctcctcgatcgatcacacacacacacacaattaaggtacatacatacatgcactgctgcaactgcaactgcagggtcggtgcgtggctactacaagtgtacacatggtacgttggttggcaccatctcgatcgtgtcgttgtgctcacttgccggggacgaagttggtggcgtatgcccaggcgttgttggcgacggggtcc

SEQ ID NO: 30999 - DNA, 365 bp, Oryza sativa
  Clone ID: uC-osflM202082f06a1
ggacacaatgattagggatcacttattcattatagttcttccatgctgctctaccacagcaaaacgtttcagacaccatcaaaccagacttaaggatacacattacaggtaaatagtacacaatgaaacgggacacgaccaaggaccagaccagacaaccatagctccattggggaagacaaataggcagacttgtgaaccctagaacagcagcagctccatggctgaggacttactggccaccacggaggcggagcaccaggtggagtgtggactccttctggatgttgtaatccgcaagggtgcggccatcctcaagctgcttaccagcaaagatcagacgctgctggtccggggggatgccc

SEQ ID NO: 31000 - DNA, 348 bp, Oryza sativa
  Clone ID: uC-osflM202082f07a1
aatgcaataatgcaattctgatcaattagtaggtttctccccacttcaaattcattataacatggggaaaaaacgattctccataattcaaaatgcagatgtaagcaaaacttttgtagcatagctgaattcgatagcacgcaatgacatggcttccaaatcaaattcatgttttctcctccacctcacaaaaatagtgcctaggagctctttgcccttccacatctcttctatcttctctcaaagattaggatttctgcctggagaaacacaattcagagcgggcatggtggaacttcgagcgttgggccagcctggatctggccccatccgatgaggcgccaatgc

SEQ ID NO: 31001 - DNA, 366 bp, Oryza sativa
  Clone ID: uC-osflM202082f08a1
agattaatgaattgatgaattgcggtagctctgaaagcagcagtctatgtacattctgagttctgactgttcaaatatgcagggtgagtatcacatgaaacccggtacttgagagtcaccattccaaaacacaaaagagggtcatgagaccttaacgccaagtttcatgcgaaccttgctaatattttcacgaacatgtgccaggcataagtaaaaagaaaaaaaaattctgtgaatccctgttgtgttaattgcaattaactctttcccggtttccccctatcctgaaatctgctctagaaacaaggcttcctgcttgctattgaggccaagatcacttaaagacatctgagactcagagtcggt

SEQ ID NO: 31002 - DNA, 368 bp, Oryza sativa
  Clone ID: uC-osflM202082f09a1
gttcaaaaaccttctgcgtacagtacaaaaattgatatgtctgctcaagatttatttaggtaatactgtgaccaaaagaaccccacaagtcacgactcacaatcaactctgcggttcgacctacaagacatagatttcaagccgttttgtggaagagatcctggagatcaagtatgtcagcaagaactccagctgcagtggtatcattgccagctccagcgccctgaatcaccagaggggcgctctcgtagcatctgctgtatatctccaccacattgtcacttcctctcaaccttcccagtgcagagtttttcgggagttcttcaaggcccacttggcaccctgtgctttcaatcttacagacatag

SEQ ID NO: 31003 - DNA, 367 bp, Oryza sativa
  Clone ID: uC-osflM202082f10a1
ggagaggaagcacggatgtatttacaagtctgcatcttacattgttctaggtttctctctaccaatacaggcaggtggctgaaagaatgatgctagccagagcacaaaacccaaggttattgcaaaaagaaaacctcacaggattgtgcggccgttggtctttctcttggcctcctcccatggcgcctgtgcagaccccatgtccagctctcctccaaccatcaatgccgggaggccaccatttgcagtggagccacccatggtccctccaatgccaagcccaaggaagtccagagtggcaggcttgggaccgtacagtgccgatggtcccatcatcaagtccggcaaccctgaattcccagtgtca

SEQ ID NO: 31004 - DNA, 364 bp, Oryza sativa
  Clone ID: uC-osflM202082f11a1
acaccaattatcccaagcaaagaaatgataactgacagagtgattgtttagacatgcttcaaacataaaaaaacacgcgcaaagccacaatttattatcagtgttgaagcgacatcatactatcatggagacggataacaaatagtgtccatgagacgaacgatgaaacgactgagcaggagcatcttttattcacgcagagtactatggctggcaagtgatagcagcaatcgatggccccgtagaagataacgcaccggaagcttaatcatcgtactcctggcggcgatggtggcggtgtttctgaacaccctgctttttttcatcatcaaagacattgccctgatggtcctgggggatgccc

SEQ ID NO: 31005 - DNA, 370 bp, Oryza sativa
  Clone ID: uC-osflM202082f12a1
ggtgaaaagcagttcacattgcacatataagaagttaagtgctacaacattaacatccaaatatatcataaaaactcggaaggcagtggaaaaaggtctacttttaagtattaagcaagctgatacaaatagccaggcaggtactacactgccagcccaaatagacactacgctaatgtatcaagacatcgacaaaatgttataacaaaaacagtaccaggtacaactagccaagcaggcactacactgaattgacgttctagcatatgtgctgcccgtcgactacgaagattattcaaacttgatggtggctacgagctccagggatgaataccatgaagcgcactgtgataagcaaaccgtatttggg

SEQ ID NO: 31006 - DNA, 172 bp, Oryza sativa
  Clone ID: uC-osflM202082g01a1
ttttttttttggttttttttttttttttttttttttaataattttttatttaatttttaaaattaataaaaaaaaataaaaaaaggatatataaaaaaataaaagaaacaattaaaaaagaaaaaaaatagaaaaaaaaaaaaaaaaataataaagaaaaattagttaatgt

SEQ ID NO: 31007 - DNA, 405 bp, Oryza sativa
  Clone ID: uC-osflM202082g02a1
gaaattaaatttattgtttccatatactaaaagaataccaccaccacctggccgggcccacttccagcctctctttctctcactctctgggactcttgtctttttgtcttcgaatacataccatcctcccagcatgtacagtacaaataatccaccacaaccccaaacccccggggcctccaccttgtaaggccccccttctctttccttggcagaatggattaaatccttatataaatttaccacaggttaatttaaaaacctaaatctaaataaccaccctattctttttttggagcacaaaactaaaaaggaagagaaaagggagagagagggaggggcccaaaagaggaggaaaaaaaagggtttaaaggaaaagaagaaaaaaaaactttcaaattttgg

SEQ ID NO: 31008 - DNA, 151 bp, Oryza sativa
  Clone ID: uC-osflM202082g03a1
gtaaatctgaaatctcacttgattttgcaatctacagcagttctcagtttatgtatcaatcagggaagtaatatgaatgacaggcgaacttgtggtggctaccacagggccaatgagcctactctgggaaggtcacccatgcacacgaccg

SEQ ID NO: 31009 - DNA, 360 bp, Oryza sativa
  Clone ID: uC-osflM202082g05a1
acaggaagtaaggtgttgatgggagaaaaatatatgatgttcaagtagatggtcatcgtgcttattcaactatcaacatgtgcacaggtatcttacaatataaataattgtacaccaaaaagaatgccttcatcgagcaccggaggtcaaacaggaagctacaaaaagcagcagcagtgtcgatgcagaaggaaaatatgatgattctgaaacgtaattcacatctacaacctcacgcgaagcaaaataaattgccccaactcgcttcgaatatctggtgatattttattgtttacacgaatgtgatcctcaatttacagcacttcacctagcttcatcttctaggttgcggaatccggt

SEQ ID NO: 31010 - DNA, 368 bp, Oryza sativa
  Clone ID: uC-osflM202082g06a1
aaggaaattcgtatgcacaattattcattgacttgagaaaactcagttgatgacaattagaacagaacatttacatgagagaactcaggtggccctaagagcttcacattacagggattaaacataagaaaacccccccagcaacagccactggattgatcatacaagctgacacacagacactgcctccatagaactagaaaccagggtcattgaacaattaatttcaccctgccttcagttcagagtccagaggccaaccaataccaagttcaggaaaaatggctgccgctgatgaggctctcctcccttacgacaacgatcacaaaaccatgagaggatccatttttcatgcagtgatgaacatg

SEQ ID NO: 31011 - DNA, 98 bp, Oryza sativa
  Clone ID: uC-osflM202082g07a1
gctacaagtatgtatccaggacctgttccgttataattacatgcgcctgatcagtttaaattaagggtaaaaaaatgtacaatgattatcctataatt

SEQ ID NO: 31012 - DNA, 370 bp, Oryza sativa
  Clone ID: uC-osflM202082g08a1
atcgaaacgagataggcaaatcggcaggtataaacgagtgtattacataaggtgttacataagatcacatggactaatacatcatagttcagtactctgtaacttttaacttattccaaaaacaccactgatgacacacaacctaggtaaaaacagcagtacaactgatggacaatcgcatagaggtgcaataggttcaaatccacaacccagtcttacttgctatctgcagaggcctcgactatcttgacagcagaccaaactcgcctttccctcacgcagacttggatgcgatcattccggtcttccgggcataggcaaagatcccgcctgcctcaataaccggcccggcatcgccgataggcttcag

SEQ ID NO: 31013 - DNA, 256 bp, Oryza sativa
  Clone ID: uC-osflM202082g09a1
gggcccccaaggggaaaaagggaagttaaaaaaaaatttttaaaataaaaaaagggttaaaaaaaaggggaaagccggctcccccagaaaaaaatttggtttaaaagagatggggaaggccccggggttacaaaaaacaaaaatgaggactttccgggaaaaaacttttggggcccggggaaaaaaaaataaaaaagaaaaaattttgggggggggggcaaaataaactgggggggggttttttaaaacccaaaaa

SEQ ID NO: 31014 - DNA, 355 bp, Oryza sativa
  Clone ID: uC-osflM202082g10a1
aaatgaacatggtaccataatatacaataatatggaatacatcaacatttaagcaaatatttttagaggttccaagcgaaatgaacaggcagaggcaacagagttagatgctgaccatcccttcaacataaacaaggaatttcgtcaacagatgtggttgacatgaacttaagagaactagggaaatggagtgtccgacataaatactttttttcttgcgaggatacaaaaatactaatttgaatgacgctttacttttaccatacacatcaaaccacacgattacccctgtcgtgagacaactaaaacatttttaaggtgctgccagtgccttaggcttcggctttacttccac

SEQ ID NO: 31015 - DNA, 366 bp, Oryza sativa
  Clone ID: uC-osflM202082g11a1
cagcaaaagatagcgccttctctttcataacaagtaaattcaaaactttgcttccttccagtaatatcctcattcaaatggcatagacacacgaagaaggaagcaaacacatctcttggatctcgataacagtaatatcctcatgaggttggtacaaaactttgaagtggttacaattagcacagctcactacagcatttgtttcaaaaggctactacagcagtattcttggccagcaagttgaacagtgaaacattccccattttttatgtccgtgccgatcagattcttggtgctcctccgattgtagcttcagggagtcgttctatcgagtacctgtgccgagtgatatacatgattggaaca

SEQ ID NO: 31016 - DNA, 356 bp, Oryza sativa
  Clone ID: uC-osflM202082g12a1
gaagggaacaaataatggtgatttgacatatttagaattacaacccacacaggtttgcattgacagcacttcattaaggagcaatgcattattcatctttacgcagtaagcacaaattaagatgtacaaatcaaatatgcacaacaacttcacagtcaagtttgtggtaatgctttacaacagtaacatcacaagaagaagcacaggggtattgttgtatgcctgattattggggtcaaaccaaaattcacgccatgacagtaaggttgtaagctattacttatctggatctaagacaatagaggtgtagtgcgtttatttgaattccaggagtgttggataggtttcattcgccg

SEQ ID NO: 31017 - DNA, 364 bp, Oryza sativa
  Clone ID: uC-osflM202082h01a1
agtctcgttaatcgatcattcttgtgttactcttatattataaaattatttgttttgcacttacatttctgttaaaataaaatccggggcttcctgttactccgttttctcaatcctggagacagaacaagaaatgagaacacatttgcaggagtatatacgcagggcatgagcccttgagacggaagaatggagtacgtcacgatgatgacagtgtgttgttgcctctgaatctgattgagcagtgcaggaactgcagcaggttgagcacgctgagtgcagccatcatccagaagaagtagtccagatggccctcgtcgagcttgtccgggatccacccggtgccgccgtcgcgcgccgtggc

SEQ ID NO: 31018 - DNA, 139 bp, Oryza sativa
  Clone ID: uC-osflM202082h02a1
tttttacttggtcgaatgctgcatgtacgtgttttcattacctctactgcagagactactacttgtgtgtgtaaccgtacctataaacttgtactccatcacgtaatgatgaatgaataaaggagcgtgtcatatttgt

SEQ ID NO: 31019 - DNA, 367 bp, Oryza sativa
  Clone ID: uC-osflM202082h03a1
agaccaaaaaagattgcctaggatgtttagcaccgtcaaaagagagagttgtacgtacaatacagcagagagagaggcatcagttgttcagccattacagacgcagagccgccacaacaatgtgttgcaattccgcccggccatgcatttctaacgacaaccaagtgcagagcctacttgaaaattaccgaggcaccagggagggttacaagtaaaccatttttccctccagatttgccagctatcgatctgtctgtcatatacacaaacaagggcgaggaagccgtcgagcaaaggttggatgctttgtgattttgtctttcgtttcttttacctcgggccggacagcttcattgcccggagattg

SEQ ID NO: 31020 - DNA, 339 bp, Oryza sativa
  Clone ID: uC-osflM202082h04a1
acatgcaaatatttgcattagccataagccattacattaattagtagcagtacaaaactcggttcgtatgaaacaaccgatcgatcgaactcgacccaatttcacgtacttgatcgaatacaaattaaactgaaaattagcagtacaggtcaaaggtgatggtatactagactggtaatgcgccgtacgtgtcgtcacacattacgcctagccgtgcgtggttattgcgctatccaattccaaacttgtacgtggacggacgagcgcgtcgatcggcgttgaccttgccaccggcttacttagggacatcggttgcctttggctccgaggcgggcttgg

SEQ ID NO: 31021 - DNA, 394 bp, Oryza sativa
  Clone ID: uC-osflM202082h05a1
ttttcgccggcggcgttgaagacgtgcgacgacacgagcgggaagcgcttggcgttgtaggtgtcggtccagtagaggatcggcacggcgacgtaggtgctgagcgcgaagccggccatgacgttgaagatggcgaacgccggcgacgccagcgggttgccgaggaagcccaccacggtgttccagtcgaggccgaaggagccgacgccgaggcccgaggcgccggagccgatctgctgcgccgtcaccgagtccctgtacagccagcacagcaccgagatggtgctgatcgccgggaacaggtagctgggtacgatatagtaggcgaagctgcacgtcatcaccatgatgaagaactgcagccgtgtcagctgccccttgttcctcttctcct

SEQ ID NO: 31022 - DNA, 368 bp, Oryza sativa
  Clone ID: uC-osflM202082h06a1
gggaaaaaaacgatggaaataacacgacagggaccaaggctgcgacaccggagctcagcagctgacacatacatagactacaaatccacaggcatgacacacgcctgatccgcctactttgcacttgatggcaactctagcaatggcactgcaatagccttcctctgtgcccaagtgccctctcctatctaaagagactaaccatagatagatgcatggatagatagacgattgttcatgggttggatggatggatggatacttgctacgacgatttccgaagacactatcttcttttcccttgaaatcttcttcttcaaatttgtttgctgcttggctatggatgtgtgatgctgatttcacagcag

SEQ ID NO: 31023 - DNA, 127 bp, Oryza sativa
  Clone ID: uC-osflM202082h07a1
tttttttaatgaaaattccaaaccaggattttaagaattaagaatcaacaatacgatcacgacaacgttaacaagattctcacataaacttggcaaaacagatcattgtgcacagtgctgcttagct

SEQ ID NO: 31024 - DNA, 370 bp, Oryza sativa
  Clone ID: uC-osflM202082h08a1
aaacgagagaaggtacttgtctgatcctgtttccggaatttaaggaatttacagaacagttgcagtacagtactggctatacatccacacgggaaatatcaactatgctgacattacaactacattttcatatctgacgctgcatcttcacttcagctgtagggtgctcccagattcttttcagttctacatttcttctattgcttctgtttctggtttactaccgctctttgagcagcgctcatcctctggaacacctctgacccattcgttctcaatcgccaggatatgaagccgagaagggatcggcggcaacattacgttggcgatgccttcgagctgttgcacgacgagccctatggtcggccgg

SEQ ID NO: 31025 - DNA, 363 bp, Oryza sativa
  Clone ID: uC-osflM202082h09a1
atctcaaaaaccaaccaaccaatcaagcatctattgtaatatataagtttgtatgattttctacaaataggcttccaaaaacagttacaaaaccagctcaaggagggtacatctagtaatttggcacattgttctgttgtaaatttgttatgtagttacattgtcagttcagtttcttctcggtatattgtatcatgaccgtttgataaaaaaaatattgctgtgtgccgttttgggttgtatacagagtgggatcagttgaatcatagcctatcttccaccgaaaagacggtataattttatgtcctcgaagatgatttgtgaaattcagccctaaccacaagtgaacatttgcaaattttt

SEQ ID NO: 31026 - DNA, 368 bp, Oryza sativa
  Clone ID: uC-osflM202082h10a1
aaatgaccacaagcaatttttaacaaactacaagagtacatgtttgacacaaatacacaattcaaatctaaaacactaaagagtccagtacaggtgcacttagaagggcttgaagaagcataagctattacagttagtttctactactaacagaaaatctagaattgatgccattgacatacaccaaacaacacattaaagaccctaaagctggtcctaaactgaaaaccaacagctgaatgcatatccattgggcattctatctcatgagggtctttacagcgagtcaaattcttggttcttcagacataagccatagagggatccaccatcaagctctggctctcttgctactactgctgcagttt

SEQ ID NO: 31027 - DNA, 314 bp, Oryza sativa
  Clone ID: uC-osflM202082h11a1
agaacccaaaaaaacgatccaaaattaaatcggacatcccttggaggggggccgggggttacaataaaactggagccaaagaagcaaagatggagacagacagaaaataattaaggtaggaagttgcttaggtcgagcacacacaaacacacaattaagggacaaacaaacagggactggtgaaactggaactggaggggagggggggggctactacaaggggacacatggggcgaggggggggaccattttgaggggggaggagggctaacttggcggggacaaagtgggggggcgttggccaggcgtgttgg

SEQ ID NO: 31028 - DNA, 336 bp, Oryza sativa
  Clone ID: uC-osflM202082h12a1
atatattgtatatttccttgtgtatgttgacagtgagaactgtcttctacaaaataacagcaacaaaaataaccctatgcatcattacaatccacatatcaaagcttgaactttatacaagcacacggtgaccacaagtaactggattctgccgtattacctcagaaagcagatcaccctaatgcatttcaacatcctgcacaggaatatctgtgtggtcagagcgaccagtatcagatgttccaaatgagcttgctatcttagatttgcacaatgggcaaagtgcattaatctttagccattaatcaacacattccttgtggaaacaaagtgtgc

SEQ ID NO: 31029 - DNA, 344 bp, Oryza sativa
  Clone ID: uC-osflM202083a01a1
aaaccccaaaaaagaaaaacagacattttattacaggggggggcctcactttggggtccaagacttggaaagaccaaccaggcttaattccccttaaacataaggttacattccgaccgaccgaccgattgactcccaaaaaactcaattattccccaggaaaggggggggaaaaagaaaaaggggaaacatttggggctccctataacgggctttagactaataacttattaaacgcccctttaagcaaaggggttaaatgaaagaatatgggtctgggaccggccattgggatgctttgggacacacgggggggaacttttttgggttccaagatttgaaac

SEQ ID NO: 31030 - DNA, 394 bp, Oryza sativa
  Clone ID: uC-osflM202083a02a1
ggtaatagtaacattcatccaacatatcactactatgtacaagttgtttttgtttgcaacgtacagcagggcagtaaaacactcaaaaagagcatatgagtgacaaaaggaaaaaaaaaaaaaactgagagactccagtaagccaatgaatgatttcatctgtttttttaggaggatgctgttgtacactactttcactctagcagcagctgtctaatctcatcgaattcatcgttttcatgagggagtactcctggttcgtcatgttcaactactgctagttcatcgcgacgtactcccgtcttctcgtagaaagcctccttctgtgcatcccattctttgacgatttcatctaccctgtcgcccagcagtttgtcattctgaacaatgtgcc

SEQ ID NO: 31031 - DNA, 371 bp, Oryza sativa
  Clone ID: uC-osflM202083a03a1
accaccacaaaaacacaaaataatcgattttatagatggtatgtataacaccctcctaatgatcgatggccctccctccctcatgtgtaaatgtatgctttacaatcatcaccatccaatccacactttatctgaccacctacctacacacttatcagttcatcagaactgtctgtacagcaggtaaaacacatcagaatcctcgtcattcaaacagaggcagagatgggagtgaagatgaagatgaagaatcagcctagcttagatctacaccagtgtggagttcggaggggtgatgcccatcattttgtagtacgccttttccgcctccgccattctggtctgaaacatcccccattcctttctgcacc

SEQ ID NO: 31032 - DNA, 400 bp, Oryza sativa
  Clone ID: uC-osflM202083a04a1
acagactaaaaatccattatttttccagtatttacacaactccgttgcagctgagcttgctgccgttacaacgatcggtagccctatacaacaaatcgatccgtaatacgcctacgtcgccatacgttacgtacaccggacacgtactctgagtgcattctactctcgtcgaacacgagcagagaagctgctgattttgctgctcaattcgatccactacacgacggccttcgctggcggtatcacgatcgggctcctcacgacgtgctcgtcggagacccaattgaggttcccctcgacgccggcgacggccggctgccctgcccaccgcacggtcaccgtgaagctctgcttctcgtacgccctggagaagcgcagcaatggcgggtgcacggtgacc

SEQ ID NO: 31033 - DNA, 420 bp, Oryza sativa
  Clone ID: uC-osflM202083a05a1
gccctcgagaatgcccaggccggcgctttcgagcagcggagctcgatcgccataggctgccatggcgatgctcgtgtctgggctcgccatgctcatgataacacgtcaccatggccaccggtaattaagttcttgttcctggtgagcagttgagacgatgcaggttgcattcgcatcgtccctggcgttcgtggtcagccgcttgcctctactagtgagcactgaacagcatcggcctggccgatttcagcgtgggcggacgcctacattgttagaaacacagatatgttagttaaagataagagtcaaatacaaatatagggatatgatacaattctagagatagaatcttagagatacaatagagtcctagagatagaatcctagagataatctagagataaatctgctcttacttga

SEQ ID NO: 31034 - DNA, 401 bp, Oryza sativa
  Clone ID: uC-osflM202083a06a1
atgatgcaaattatttctttgatggacatatgagttcagatcaggcaggttgcaccttcaatctcaaaaatggaaaccaatcctacactagacctttcggttgatctgaaccaaaaactcccagacaaaaattctaccatttcagttggtatgaaccatctaaacaaagccaccctgaagaaattcaccactgtttagacggtaagggttccctctgccggctcagcaacaggagccttgggcttcggcttctcgacaacaatggcctgtgtggtaaggaccattccagccaccgaggcagcattctggagcgcgcatctcgtcaccttagctgggtcaataacacccgccttaatcaagttctcatacttgtcgttcatcgcattgtacccgacttccca

SEQ ID NO: 31035 - DNA, 336 bp, Oryza sativa
  Clone ID: uC-osflM202083a07a1
gggacacaatgattagggaacacttattcattataggttttccatgctggtttaccacaaaaaaacgtttaaaaccccattaaaccaaacttaagggtacccattacagggaaaaaggccacaatgaaacgggacacgaccaaggaccaaaccagacaaccatagctccattggggaaaacaaaaagggaaacttgggaaccctaaaacaagagcagctccatgggtggggacttactggccaccacggggggggggcaccaagggggggggggactccttttggagggtgaaaaccccaaggggggggccaacttaaagttgtttaccaacaaaa

SEQ ID NO: 31036 - DNA, 132 bp, Oryza sativa
  Clone ID: uC-osflM202083a08a1
aggcaaaaaaaaaaaaaaaaaattaatttcaaaaaaatcccgggtagaaaacaaaaataaataataaaccaaagttgagaattttataccacaaaaaaaaatttgaagacacaaacaaaaaaaataacaaaa

SEQ ID NO: 31037 - DNA, 347 bp, Oryza sativa
  Clone ID: uC-osflM202083a09a1
aatcacaatttgggttttctgttaatctgggggtccaaattacacacctcagtattcagaaaaaaaggggggggcacccattcaagggggacttgctgaacaggggaaaaagaccgaactgcaaatacccaacccgggtagcagatccagagggccaaaggggcacatgaaggcagatattccatagcaaaaaaaccgggggctatcctaactctaaatctctaaacatttatggcccggatttctaacacctggggggcctgcccaaaacaacaatttcctccgctaaagctttttcccttacaaagggtggctgggaagtaatttaagggtaggacaaaaaacac

SEQ ID NO: 31038 - DNA, 395 bp, Oryza sativa
  Clone ID: uC-osflM202083a10a1
aaattcttaatagtaatagactctttgatggagtattacaacatgcagcagtggcattaatacgccagtacattaattaagttacacatatgcaggctccattttggtttcttttaatttatcgtattacagaatttctgtagccttgctgatgatcacttggatatcatgtactagtaattaacaataggatgcatacaaaagatggcccaacgacaacagaagatgcgtgcatctgacattgtctggccttatttggttggtagtactccaattaattaacaagagatgatgcattcttgtgccttagtttcttcacatgcttggcttcacgttgagcctattcgcaatcttcacccccaacgacttatcacactgggagaggtagttgaccc

SEQ ID NO: 31039 - DNA, 390 bp, Oryza sativa
  Clone ID: uC-osflM202083a11a1
cagctaggatgccggatgattctctgtagcacgacggtccttgcccgacgaatatcccggctacaccgatctgcctgctctcctagatcctctacactcttcatgaagacctccagcttcttcttgatctcctcaaccccaaacttgaccgcctcctcatctcgctcagcgaactctacgcagtcgatcatcgagctgatctccaactccacccggttgatgagcaccctgatactgtccaaatccttgatggcaatgaacgtccccacctgcattgcgctcaccacctccttctgtccacggagagcgtcctgataccctttcagtagagaatcgatccacttccccatagatcccaccggaatggaagcagctgcggccaatgccgcc

SEQ ID NO: 31040 - DNA, 130 bp, Oryza sativa
  Clone ID: uC-osflM202083a12a1
ctttggtgggggggttttaaattattgttgtgttggacttaccagttcagatcaggcaggttgcaccttcaatctcaaaaatggaaaccaatcctactctagatcttttcggttgatttgaactaatact

SEQ ID NO: 31041 - DNA, 366 bp, Oryza sativa
  Clone ID: uC-osflM202083b01a1
gcagttaaagaaatattaaaattcaaattaacatctagttactttttgttgacatatacgccgcaaaagtatagccaggacagtttgcccaggtaccctctttctgctatagcctacaaattctatagaagcatttaaaaaacgtgtaaaaagaataaatcagatcatggtcctcaagatgttcaataaaacactagtcatcaacattgtatttcagaccttttggtcaagctcagactgtgatgacagtatattgggtttctgggttttctcgctgggtgctgagtaaacctggcgctctttgcctcctggtttcgatgaagcattcccataccaaatcatgccaataacagcaaggatcatgcc

SEQ ID NO: 31042 - DNA, 392 bp, Oryza sativa
  Clone ID: uC-osflM202083b02a1
aaacggagcaggaaggacctagtaaatgctgttgagaatagtcccacattgaaagtttagggggagtggcaccaacttaaaaggggaggggtccctcacctcatgagctagcttttggggtgtagaaaggctttctcccggttgggccaacgtctcccggttttaggccaacaaatgctaccatagactttacttattaatctggcttcaatccaggcccttgcaaagctatctacatgaagccatccagatgattatttacaggtgatcatgtagtgtccagctactcgggtcgaacgcttatcaggttggggagcaccgtcgcctgcagcttcttcacctcacttgtcgtgaccctgcaggaatcaagcgacagcgagcgcaggttctga

SEQ ID NO: 31043 - DNA, 384 bp, Oryza sativa
  Clone ID: uC-osflM202083b03a1
aagcaaaaaaaacatcgatatatcgcttatataaagtaccctcttcagtttcagaactgacaacattatcgccgcacactttaccggacctgcagcagaaacgcagtattggcaagaaaacgagaacagttgatacatacacgtttattcggggagagatgtaaaaaggctatcaaacaggaggccataaagaaagttcatgggtagcctcaaaagcattctagaatggctcttgaaaagtttatgtgatgacggtgggagcagatcggccagtgtactcttgcatctttgacagcttcagtgcaacatcaaccagaggagcaagggcatcctgcgaatccctgccggtcttggaagaatccttctcatactgctcgatgtaga

SEQ ID NO: 31044 - DNA, 398 bp, Oryza sativa
  Clone ID: uC-osflM202083b04a1
gcctgacttggaaagggacaaattcataatcagttgtgaaatacaaatgcaaaagttggtagctttctactacaaaaagaagttatacaacaagaagagaccgatccgaatggatgatgctttctggtaatataaacactacatcaacttaacacggtgagtcagagcacacgtcttgccaagacaacagattgcatttttccactggacattaggatatgatacagctgattgcctgattctatgctacaagaccaacaaactgatttccatagcccatcgagttggtcgtaattcttaacacaaggaacttacaacaacacaggaagaaaactgtccttcaaactattttccggtgtccgctgaaggcccaaatcttcaaattcttgtcccaactt

SEQ ID NO: 31045 - DNA, 261 bp, Oryza sativa
  Clone ID: uC-osflM202083b05a1
gaatggatggaaatggatatatttcacaagcgtggcaaccatttttgagtgccagggtgagtgtgtgcatgtccagtgcttgcttattgacataatctctgactgaaatgaccaccggtcttaaacggtaggcaaatgactcgttactattatcagcatagcggacaattatgcgatgacaaaatgtaagaaatccaacgtgtgcacaaagggctgtacaaactggcaatgtgatgatacgaaaaagggcgaatcgaatga

SEQ ID NO: 31046 - DNA, 321 bp, Oryza sativa
  Clone ID: uC-osflM202083b06a1
aaaaacccaaaatattcgccgtataattaattggggccttaagcccattaaattttggggggccccaaagattgggggacccgacccaaacgtacctacctggtttggactggacagggccccttatccccccccggtttatttggccccaaattcccaatttaacggcaacacaccggggaaaaacgggacttttcccctccaggaaaaaatacgcttttgaccgcgtttataaattcaaagggagggtgattttttttaaccgggggggggccttaattaaaacacagtggggggggcccttattttaagcccccgggg

SEQ ID NO: 31047 - DNA, 383 bp, Oryza sativa
  Clone ID: uC-osflM202083b07a1
aagagaatcaaaagccgctacatattattagtgcaagtcaatatatagaaatcattctccccatagaaatagttacaatgtgcacatcttaaaaataacgatctcagttatttcaacaacataggagtatataacaataatacccacactggtatgataaaaattcctattcctcgattggaggtgggaacagacacatgcgcacccgtcaaaataaataaaaaaacagttgtaaggaagtatttgggttgctaacctagaaagatttatttgataggtaaattctggtagtaggatggcaaatcaaaatgtccaacatatagaatgtatccaggggcggatccaacgtgggtgctagggggactcgagtcccccctatcccg

SEQ ID NO: 31048 - DNA, 362 bp, Oryza sativa
  Clone ID: uC-osflM202083b08a1
gggcaacaataagactcagagcatccaagtttttaaccgaatagaaataaacgagttttaaacgactaacatagtgcacattgcgagcagatattaacggtccatgcaacgagtgccatggccgtgggcaaaacttaacgaacgctaagatatctcaaatgcagccagcataaccaccacttcaacgatgctcatttcttcttggcggcagccttggtcaccttggcaccggttgggtccttcttctccacgttcttgatgacgccaacagccaccgtttgcctcatgtcacgcacggcaaaacgaccaagaggagggtactcagagaaggtctccacaaccatgggcttggtgggaatcat

SEQ ID NO: 31049 - DNA, 368 bp, Oryza sativa
  Clone ID: uC-osflM202083b09a1
gggcagtatagattaccaataattaagtttgaaccaacaagtataagaaaaaaaaagttaagtaaacctacaacaacaggtgcctcacagaacacacacataactaccaccccccccccccccccaaacaaaaatacaaccttttttaggataacgcagcacatgattgatttgagtaggtcgatcgatcgacctaggcgtcgatgggcttgcagacgacggtggcgtgcttgaggatctggttgctgaactggccgggcttttcggtggtgtccaccttgtccatcccgggcggcggcagcaggtcgaagctctggacgaggcggccgagcgtgatcccgatgatgggcagcgcgaggatgatcccg

SEQ ID NO: 31050 - DNA, 353 bp, Oryza sativa
  Clone ID: uC-osflM202083b11a1
gccaaatcatgagatattcgataactgaataattctttctctcatcacaagaaaatagacagataattaatgtctgcaagggacagattccactgtaacgaaacaccaaagcacataagcttaacggtagcgacgaagagagacggtctggttgcgcttccaggtggccctgcgggaaggtctggccttgtggtgagtgtggcctttgccgcgcaggccacggtacttcttgccagcagaggtgaggccacggagctcacggtgcttgtgcacaggcttgcagagccagttgatccttgggtcattgcggatagcgctgtgagcaacatccacaaggatgatctcaaagtact

SEQ ID NO: 31051 - DNA, 413 bp, Oryza sativa
  Clone ID: uC-osflM202083b12a1
gaggagcggcttcttgacggcgaagctggtcatagcgccgccggagagaccggtggccatgccgtggtcgttcttccctcccggcctcgtatcttacccgcgcgcgctttcgtggacagggatggagcgggagagtgtgacgggggagtgtaatcgagagaccccgcggctcggtcgtagtactactacttaaagagacgtcgagtcgtcgagtcgcccggtggcttaccgtggaacgcgtgtgcatctggggacgacgaagcggggaaattcgactgtgatttctcgttggctcacagacgttcatgtcagcgagaaggcgatggggccctggttgccggtcgatttggatccaacggctgcaagggcaaatatttcttagggcaatagcaatgtgccaccaatttttaccg

SEQ ID NO: 31052 - DNA, 370 bp, Oryza sativa
  Clone ID: uC-osflM202083c01a1
gacactaaattgctgttcatcatacgagtcgcaaacagggcatatgccatatctaattcagtcgtacggtatcatcatgcatcaattatcaatatgatggtatcgtatcaagtttcggggatggtaacaaaccacccatctgaacgagctctatcaagatggtagcaaaataaaatcagtaatggggcttaaacccccacttagtttacaggcaccggggcaacttatacatcgtctctctgaaaagaccaaatccaacgccatgtcaacggagtgacagcccctacttcaccggaagtagattgatcccagggggatgtcaacgtcgttgtcatcatcgtcctcacaagccaccaccacgtcaagatgg

SEQ ID NO: 31053 - DNA, 360 bp, Oryza sativa
  Clone ID: uC-osflM202083c02a1
gggacttgaactgggaggagcagggcgcaaacgtacgcccaacccagctgatcgatcagccgatccatccatccattatatgacgacgacgcccaagtacacttaacaatgggccagtacctttaatactctactgagcatacaccagggcaaaataggctagaccaccggatcctccctggatacacataacagcacaggcagggcaaaataaagccaggttcaaaatggctatgccacctatcaagcatttataatcagatcaaatgactagaaataggcctgtgcgtgccaacataagtccaggcccgctttgggtttcatcaagttttcaaaccaaaccattttgacattaactct

SEQ ID NO: 31054 - DNA, 409 bp, Oryza sativa
  Clone ID: uC-osflM202083c03a1
gccgagcggcgtcgccgacgccggcggccctcgcgccgccgcgccatgaccggcgcgcctttcttttctcttcttctccgctccccccaccgtctctaacccccaccgtgtgagagagagatggcggcggccgaaaagacggagatggcggcgccgccgcgggctccctcgccggtgcgcgcgtgcaccggcaggtgcgcgcacggccgtcgagtggctcctcggtggtgccctttgccctccccccttttgccggcgacggccggcgacaagaaggtgagctgaagctgctgggaacatgggcgagcccctacgtctccagagtgaagctcgcccttcacctcaagggcctgagctacgagtacgtcgtcgaggaggatcacttcaacaacaagagcgagctcctcct

SEQ ID NO: 31055 - DNA, 326 bp, Oryza sativa
  Clone ID: uC-osflM202083c04a1
cgggcaaacaaaaaaaagcccttgaaaggttagcaaattccaacccaaaacaacttaaggaacccccccccaaacccttaagcaacacaagaaaaatctttaaaaaacgatggccggacaaactccaggggacgggaaaaacatttcaccggacattaggacaaatattgggcgggggacaattaacccacaacgttatacacggggaaacacattaatggccctatactactatacccaggcgcacacgggggcctacgaggaatgggtttacgggcggaattcttcgccgccgccgccgaggccaaattcgccggcaaaccccc

SEQ ID NO: 31056 - DNA, 354 bp, Oryza sativa
  Clone ID: uC-osflM202083c05a1
ggggctctaacttttcgaacaacccgattaaaaaagttataggcagcataacttccaaacactttcgaatcatccataaaaattaagaaccaacccactaaaccaaataaaatttttttaacccaagaaccccctcatatataatttattatctaaaattcgtaacaagctccgtttaaaaaaaactcccgagatttctacctaaatcctaggcattattaggaaggtctataacaagcccaataatataggtccataaactatgaaataaagagcatttatctaattagcatttttaaaacccaaatccctaatttatttagcacgggcaaaagcttggattggcattgaatt

SEQ ID NO: 31057 - DNA, 397 bp, Oryza sativa
  Clone ID: uC-osflM202083c06a1
gtacgcgcgcagcatgcattttatttaggcacggtccacaattcatacatgtatagtggatacgtctcgtcggcagacactcacggtatagtagggtagtcgtgtgtacagtgatatagtcatatctgcgcgtcttttcatgccgttcgttgacttcgttcacagggtcagggtcgggtaggcgatatcgagtgtgacgccacacaggccggggccaccgacgtcgcggagaatccggatgtagccgcgctcgccccatgactggccccatgagttcttgatggtccagtacttggcgccggaagacgcgtcggtgccgtacccgacgacggtgacggcgtgcgctaggcgcgtgccgcacgggcccgtgtaaacgccccccttgtagaactgcatc

SEQ ID NO: 31058 - DNA, 109 bp, Oryza sativa
  Clone ID: uC-osflM202083c07a1
tttttttgtgtttttttttttttttttttttttttattttttttaatatttttattttattttttattataaatatataaaatataaaaaaaacaaaacaaccaatacc

SEQ ID NO: 31059 - DNA, 197 bp, Oryza sativa
  Clone ID: uC-osflM202083c09a1
ggggttcagtacctctcaaaatattaacttaaaaatagtacactgtttccccgtatgttacatatgataaagtttaccaaagcgaaatagacattactgaacaaaagcacggaggttaaatataaattagcaccagcgatcctaactatataaatcatcatctgttagctgcggtgtgcagcggatgccgaaggggt

SEQ ID NO: 31060 - DNA, 346 bp, Oryza sativa
  Clone ID: uC-osflM202083c10a1
tagtggccgcggcggaggcggcggaggaggggaggaggagggggagcacgagcgggtgcgcacgctgcgggagatcaagaaccagatcatcgggaaccggaccaagaagctccagtacctccgcctcggcgccgtgcccgtcgtcgtggcggcgctcgcggggcccggggcctcccccgccgtgctcgtgcaggccgccgccgccgttgggagcttcgcgtgcggtgtcgacgacggtgtgcgggccgtgctcgccgccggggccgaggcccacctgactgcggatcctcgcccaccttgacgagatggttgttgaagctagtgcacgtgctctgagaatgattta

SEQ ID NO: 31061 - DNA, 395 bp, Oryza sativa
  Clone ID: uC-osflM202083c11a1
gccagccgagtaatcctaaatcgtccagtattcgaattgccagttttgacacgcaagaagccaaacacacgtgaacgcaattacgcaagggacgagtcaacttctatcagtatatatcaagcagagaaggaacagcgcaagacatgtttcgtacaatcacatcttgaaccacacaaatatataaaacggtagtgttacaaacaaacaattttggacggagcgtttccttaggcctaataactctctcggaagaattaagcgtaataatttaaactggacttctttttggcttgcacttgtatgatcccttcattgaaatcctcgtgtgtcacctctgtagcatctcggcgtagggcaagcatgcctgcttctacacaaacggccttcagttgtgc

SEQ ID NO: 31062 - DNA, 396 bp, Oryza sativa
  Clone ID: uC-osflM202083c12a1
agatcatacatccatgtctgttcttcttttttcttcagaaagaagcaaccaaagaggtttgtccgtgtactagctactatatatcataaaaccatacatgtttggtttcagcttatgaaatatacaggctaatctccgtgatctgaagagtgatctacatacactcttcatgcagatttagcgaacccgatcctgtctttgccgaagtcgaaaaccgtatgataagcacccatgaagacatctccaagaatccaaagaggaccgcgtggtggaggtatgtcgaacgccatgaacccgctgatgcagacggtttgccctccttgctccagtttcacgatgtactgctctggtgtaagaataaatgtcttgtttgcaatggtgaatgcaagattaggc

SEQ ID NO: 31063 - DNA, 333 bp, Oryza sativa
  Clone ID: uC-osflM202083d01a1
tttttttttgtttttttttttttttttttttttttttttttttttttttttttttttttttttttttttttttttttttttttttttttttattttttttttttttatttttttttttttttttttttttttaaaaaaaaaaaaaacattaaaaaaaaaaaaaaaaaaaaaaaaaaaaaaaaaaaaaaccaaaaaatataaaaaaaaaaaaaaaatattttttaaaaaaacttttgggggggtattacctttggaaaaaaaaccccacctttcttattgtaaaaaataggttttccaccccctgatttcaaaggtttttttaaagatagagag

SEQ ID NO: 31064 - DNA, 369 bp, Oryza sativa
  Clone ID: uC-osflM202083d02a1
atatatgggtcgcccagcgagaggagctcttattgccaggcaattaattaacttgtccaagatacaggcaccccacacgataatcataccgtaccgacgagcataaggtactcttagctacctatataggggggtagctggccaagaataattattctgcaccagattcgttgatatcaacttgagccttgatagagagctggatcgatgtatccatcacctcaatagtagggctggatcttccaacgctggttgtcgccctcgcaccactttcagagcacgatgtccgtgccgtcgcggacgccgccgtggtacttgtcgccgtggaaggcgtcgaacttgaggtagatgttgttcaccatgcggatt

SEQ ID NO: 31065 - DNA, 383 bp, Oryza sativa
  Clone ID: uC-osflM202083d03a1
ataggataccacacgtatatttattatatctatatatacaagactcaaccaagactgattgagatttccaagattctctctacaagtttctgacaaataagaaatgcatcgaagcatcaaggagtgaacaattttcctgaactgttcatgaaaccatgcatctctgatgaagattgtgaaacatctttgatggccttctactcttctagcatccgtgcagagcaggtttcagagcttggacagtgcagagtccatcacggcgacgaagaaatcggcatcctccttggtgaagcacagagggggagtgatcctgaagacgttcccgtagaagccgtctttgccgaccaagacgcccatctcttttatgtgttttatgccccccc

SEQ ID NO: 31066 - DNA, 399 bp, Oryza sativa
  Clone ID: uC-osflM202083d05a1
tctttttcattgttgcagtcaccaaatccctttcaaggtcaaaaggaatagggtccaatattacacctttgacatactcaaatccccgtagcttgttctttgctgcaacagattgcagctctttcaggatatgctctttaaggccttcagacttgcatatttcagcaaaagaacccttgcagccatttgattctgcccacttcatggtgttctcttcatgtggattaactactgccactaacattgatctgaagctgtccccatatacccagacatcttcaacggttggagggaaaacatatactttctccaggtattcaactgcaacatactccccttgtgacaacttgaatatatttttctttcggtcaattaccttcaggattccatctgagttca

SEQ ID NO: 31067 - DNA, 143 bp, Oryza sativa
  Clone ID: uC-osflM202083d06a1
tttttttttttttttttttttttttttttttttttttttttttttttttttttttttttttttttttttttattttttttattttttttttttttttttttttttttaaatttattttttaattttaatatgtatatttatag

SEQ ID NO: 31068 - DNA, 373 bp, Oryza sativa
  Clone ID: uC-osflM202083d07a1
tttttttttttttttttttttttttttttttttttttttttttttttttttttttttttttttttttttttttttttttttttttattttttatttatattaaatttttttattttttaattaatttttttttagacaaatatttaaactattattgggccaaaaaaaaaaaaaaaaaaaaaaaaaaaaaaaaaggatagaaaacaaataaacggaaaaaaaaaggctgcccacaccaaatatagggaactagaaaacactgtgtctgaagggagactctgcccaaaaaggggggaacaaaaaagcaggaagcctaaacctataaagaaatacgggcaacaaaataaactaattttggaaaaaaatgataggg

SEQ ID NO: 31069 - DNA, 304 bp, Oryza sativa
  Clone ID: uC-osflM202083d08a1
accaaaccggttaaaaaggggcaaatggatttttttaggggaaaggggggccttttttagaacacaaatggggggaatcgccgcctgaaacccccccttggaggggaggtgccgggcattgatctcgcctaccgaacgaccgggccccacggttggctttttaacccccccaggggtcatataaaccaaggggaaaattgggccatttttaattaggggacccccaaaacaaaacaggggtaaattggggggggaacccccaaagaaaggggcttttccttgggggtaggtgctaggggggggg

SEQ ID NO: 31070 - DNA, 379 bp, Oryza sativa
  Clone ID: uC-osflM202083d09a1
ataaacacaatgaaatagataactcaggagactatcatttaggagatatacttaaaaactaatcataaccagctcacagagcattcgataactgaatcatttcttcatctcatcacaggcaaatagagaacagcaacattgcttctagaagatagttcactggtttcagaacacaagtaccaaaattttaaaagtgcaaacagatattatcaaagtctgcaagggttggattccacagtaacgtaacatcaaagcacataggcttaacgataacggcgaagagagacagtctggttgcgcttccaggtagccctgcgggacggcctggccttgtggtgagtgtgacccttgccgcgcagaccacggtacttcttgccag

SEQ ID NO: 31071 - DNA, 293 bp, Oryza sativa
  Clone ID: uC-osflM202083d11a1
ctcggaaatttggcttacaaaaaaaaaggaaggagtctaaaaggggaccaaaccggccttttggaagcaaaaaggaaataaaaagctaaaacgctaattttaaagggggaaaaaaaacaaaaatggggaaaaaaaagggcaaatgaaaaaaaattagggggcaaaagggggaaagctggtggtgaaagcaaggctaaaaaaatcgttcgcaaaagggagggaaattgggggaacaagtttggaaggggggggccgggtaaccaggaaaaggaccgagaaaaacagggggggca

SEQ ID NO: 31072 - DNA, 378 bp, Oryza sativa
  Clone ID: uC-osflM202083d12a1
gccaaaagctgcaggcagcgtatatttgtgcatttcataatatagacagccctcaactgaaacgtacagtttttcaggcttgaggggcatgtaagaaggaacaaaagcacactgaaacattcggtagatcaagttcagtgaagtgaacaaaaatgaaaagaaaaaaaaactcagatattttgtacgcatgccctttgaaccggcattacgaatggcagagtggtcttactgcgacctttgcattgtttcatcatatcctctcggagatgtatgctgcaagcctttcaacaggcttttggccttcaactctcactttaccatggcaccttagctttatccgcgccaagtaatccaccgggatccatgcaaagctaaggc

SEQ ID NO: 31073 - DNA, 371 bp, Oryza sativa
  Clone ID: uC-osflM202083e01a1
catggcaacacaacaaacatgtagcactgaaccttttttacaacgagacagaagagttggatttggatcaactttcctaaaatgtagttattacttctactgaacaatgctaccacacaaacaaagctgggaaaagaaaacgcaaggaaataatatgctgccgacacatcaataataacattatgcaaatagaggaattgtttagcagggtcccttttgcccatgctagaaactgaaactgataagccgaccaagaaatcatcatgcctagttcgacttcgcgaagcgtcccttgatcctaaatttgccattggcacgagccttgcgcgattcgaaccggatctgcttgtggaatcttctgttcttcctct

SEQ ID NO: 31074 - DNA, 390 bp, Oryza sativa
  Clone ID: uC-osflM202083e02a1
cagcaaatgtcctgcgaatcaccaggcaaaaaaaagggagctagtacaaagcctcaatacacactggagtaaaaccagcaacggcatctgcgctccacatctcgcgatgtgcagcggtctgagataaacagtttctatgtgatggaacttaaaagtctcttttattcaaaaacacgggagcgggcaatcgctcactatctgtccctctgggtattgcttagttttagttgaggcatgagtaagcgagcgtcttctcctccgacagctcctgggcagtcgcgtccatcttcttccttgagaactcgtcgatcgggagaccctgaacaatcgtccattcgccaccactgcatgttactgggaacgagtagatcagaccagcaggcacaccat

SEQ ID NO: 31075 - DNA, 241 bp, Oryza sativa
  Clone ID: uC-osflM202083e03a1
acgggaaaaaaagggagggaacaaaaaaagggaattggcacacttctttagaaaggaagaagctgcaacaggggagggaatgaccgggcataaacacaagcttggtgaaaggttcgccccccaggggcataacaattccacctaggaaaatcccctagaaaacaaacgggtgaaagcaagcgagctattcaaaaggggaaaaccagggtaaattaacaggaaaaaatcctgaaatgaagga

SEQ ID NO: 31076 - DNA, 160 bp, Oryza sativa
  Clone ID: uC-osflM202083e04a1
gaagggaatgatattagaccattggtactaataactgctcaagtaaggattcacaagctacaaatggagagaaaaaaaatgaaagaaataactcatatgtatcataactaaagtcagggattattcatgcagaaacatgtaattatgataaatgctaact

SEQ ID NO: 31077 - DNA, 393 bp, Oryza sativa
  Clone ID: uC-osflM202083e05a1
gatgagataaactagatatatattcgatttccacgcttgctgtaaaagcgcagcgcacagtcatcagttcatcagcaaccataaactgatagtactccatataatacggaactggttcaggtttccttccaaaggcatgcatccacccaaacagaatgatgctttcgcatcgctagaagttttacgggtacttaggaaatgggagtcttagctattgtagatgagcaggaaatgtatggtaagccgcagttcttcatgtcgaaggcgaggtggaggatttgaagatgtccggcttgtgtttatccatcagggaagtgagggctgtgtccagctccttctcaagctcaaattccttcgccaggtactccttcttgagcttcaccttcttctctt

SEQ ID NO: 31078 - DNA, 394 bp, Oryza sativa
  Clone ID: uC-osflM202083e06a1
ataagctcacacaacacaacttacacaagtcacaaaacacgcatgataatgattttacaagctaaccatttctcgtcctccactatatttgactggcaaattagtatgaaagtgtattaattaatgatctataaagaacacacaataatcatcatctccatctgacaaactaatacagcaatactactatacaatacaatcagtaacgagatctctgcctgcacagaacgaaatcggttgcaaatcacccaggggaaaaaatactactgaaaaaagaagagcaacaatctccagtttctttctgggcaaaatgtgcatcattcttgtctgatcagacgtgaggagctgagctctgtggtgctgtagaaggactcatctgggtagtacccacccc

SEQ ID NO: 31079 - DNA, 381 bp, Oryza sativa
  Clone ID: uC-osflM202083e08a1
cacaagtgcgagatacgccaccacttctgtgatctgttgatcgatcttacacatatgcatgcgtgcgtacacacataacgcgcggacgcatgcatgagctaggtgtaattttatagttgatcaatcattcatatcgattgatgatcagttggctaattatagcttgagcttggcggcgatggcgagggcgccggtgacgacgcggttgacgttgttcttggtggccttgagcgcgaggctgggctccagctcccgctcctcgtaggcgttgccgcagtcgccggtgaaggtggtcgccgccgacattttggtgatgaggctcgccttgctgtcgttggcgtcgatgcagcgctgcaccttctgcagcgccgacaccgtgct

SEQ ID NO: 31080 - DNA, 390 bp, Oryza sativa
  Clone ID: uC-osflM202083e09a1
aatcataattatgaatactttccttgaagagcatcattacacaaaatcctttgcctcccctcttgcatgctcaagaaaaacctaccaattttctcctccctacccttaacaaccaaaaccagccccacctaacacattgccaaagcaccattttgccatctggtaatccctctaccaccaacagctacaagaaagagcaaatatccctgtcccctacagcaggcaattaagattgaattgcatacattaacagtgacaacaatggccctacatgattgaaacattacttgatggcttctggtcctacccacactaccacaacaaccctcttcttattcctagatcagaagcactggtactggtacaagtctatgggtggctggttccatg

SEQ ID NO: 31081 - DNA, 391 bp, Oryza sativa
  Clone ID: uC-osflM202083e10a1
cagaactagtactcggctatgctaatattcagaactcacaaccgagagaagaaaacaaactcaagagtaaggcaaaaccagtaacacaactgtgatagaccactagttacagggagaagaattccaaagaaacacaaatggaaaatgaccaaaccaaaaggaacagatgatctacatatcctaagctccaaaatccagtctacgacaggattcagcctcatgatgtacagccaaatcatctctttaggctcactgcattttgatctcttccaagattctttaacaaagcatccatcacaggtttaacccgcagcgcgatttggaagcaacaaaattaccaccagcaatctgattgatcacttgatccgagcaactagtcctccttggcctg

SEQ ID NO: 31082 - DNA, 390 bp, Oryza sativa
  Clone ID: uC-osflM202083e11a1
ataatagtagagaaaagatagagatagatatgagttatgtactagttgagaatacatgatgagatgttttacacatgcttaaacacatacgatgattatacctccagttttaactgataataactaggtaagtttcctcctgttgtaagtgaccatgaccttccccttgggccccggcatgacgacggtccagtccgtctccgggaacggcgacaccagctgcagctcgaagttgcgcagcaggtggctccatatcaccttgatctgcatgtacgcgaacgcctcgcccacgcacgcgtgccgcccgccgccgaacgccgtgtacgccagcccacctgcaccctcctccctcccggcgccgaacctgcccgggtcgaactcgccggggtc

SEQ ID NO: 31083 - DNA, 380 bp, Oryza sativa
  Clone ID: uC-osflM202083e12a1
ccaatgaaatagcacaatctcgtgctgattcttttcaaaaaaaaatggtgtatggtacaattaacagagcattaattaatggtccaataccctatttgagtcttctgttactgtgtttggtccttagagtataatgtatctgtatgactgtatcatagcaacagactagagtggactaacatatgatctattatgtatcttatcattttgtgtgtacagtacaaaactacctgacaatttaagagtacaacaatatatacgcctggcatcaataaggcaccttctatggtataccacctgccaacatgaaaatagtgtacacatgtatgaactacatcaactgagcttcactgatcccaacttattttccacttgctctt

SEQ ID NO: 31084 - DNA, 394 bp, Oryza sativa
  Clone ID: uC-osflM202083f01a1
ggcaaaatcacacaaaactagctttatttatttatctccttgaaaggccaaatcataaacacctagccattcaggaattaaaatagtactgtacaaccctgggcggtaaaagaaaaaaaagaaaacagcacaagagaagagatatttaaccaatgtgcctattcaatacagacaactgcccagagtcaccgttgaacaggtaaacctccaatggtgaatacaacgatgagaagggcgatgacatgaacctcgtcgatggctgtaagatcctgcttcccttggggcacgggatggtcagaagacgtgccccggtacgcatttgccagatctcaatgatgcctttccgtggagcatggatcgctaggcacaggcaatagtcactctttgtatattc

SEQ ID NO: 31085 - DNA, 377 bp, Oryza sativa
  Clone ID: uC-osflM202083f02a1
ttttttttttttttttttttttttttttttttttttttttttttttttttttttttttttttttttttttttttttttttttttttattttatttttttttttttttgaaaaaaaaaaaaaatttttttaaaaaaaagggttaaaaaaaaattaaacaacctgtttttcttggaaaagggaaaaaaattttaaaaaataaaaaaatatttaaaaaacaacacccattttttaatttaaaaaggaaaaaaaagggggccaaccatgttaaaaaaaaaaaaaaaaaacgaagaacaaaaacaacagagaaaaaattttgagggaaaaaattttttaaaaaaaaaaaagggggagggtttcctttaaaaatatttccttt

SEQ ID NO: 31086 - DNA, 379 bp, Oryza sativa
  Clone ID: uC-osflM202083f03a1
cagtaacgtgacagcatgaatttgaccattacttcggtagcttaaaggcgactttacaatttgcttcaggctcacaaatttcaaaggctgataaccaattctacagctttcagaaaacgtcataatttgctccagcctcgcaaagtcgtagcagcaagaggaatgtgtcatcttccagacataacaagaaattcacagttttctccaaaaatttctgatcccagaagcaaaagatttcaggctcccaaaaagacctgtcttcggttcaacctccgggttctcttctctgtccagtacatttgccttgaccgtcttatcaccttcaattggatctgatacaggtggttcactgacattcttaaaccttgctggactattc

SEQ ID NO: 31087 - DNA, 393 bp, Oryza sativa
  Clone ID: uC-osflM202083f04a1
aactgtgcaagcttctcacatgtctcatcattcctccctcagcctaggaacagtttgtcctaaagctaagtataatgttttacaataattccacaacttgcatgggatacactagctggttttacaaagcttccaaagggaaggggaaaataatatattggtgtttattgatactctaagcagataaaaagaaaaagaaagaaaaaaggaagcattagcttgctcagagaaactaagaagctaaagttggagtgagtgtatagttagtggcatgggctgatacatctccatttgacataatggttgcctgcaaaattgcccaatatcctttaagttagtatttgcacatcttgcttgagtatatctgatcacctaatgagctggctcttgaac

SEQ ID NO: 31088 - DNA, 337 bp, Oryza sativa
  Clone ID: uC-osflM202083f05a1
gcacagctgccacagaattttggtttctattgcaactgtcaagtaaacagagtttgactggctaatacaaaaggcggttccagatgattgtaaacaaaatttgaggggtatacccactggtgtattttaccgctggtgcaatacaaaagaccagcaatgatgctgttacaccaatcttttcaaccacaaacaaaacgatcacttgggcccagcttttccataggaatcccgtagagtaacggttctgttgaacacaagttcctcagccgtcgagttggaattcacagtaaagtaaccgaggtgtttaaacttgaaattcgccccccatcgcttccat

SEQ ID NO: 31089 - DNA, 383 bp, Oryza sativa
  Clone ID: uC-osflM202083f06a1
caacaattgatcatctttattcatgtagaacggagatgaacacaaaaacaataaaacataaacttcttaagggtcaaccctctagaaaatgaagaggtccaacacaagcaaattcagttggaactgcagcacggacgacatggtagaatcagtttgggagtttaaacaggccccatccacatggtatggaaaccaccattgttgcgatagtggattcccctatacatacactctgggacacaagacaaaattattaactcttccaagaaagggaaacaaagagttcctccactcttcagtagccccagttgtcgttacggatttcatcatcgaacttctgcttgacctcaggatgctttgcaaagtattcatctgctgtcatt

SEQ ID NO: 31090 - DNA, 388 bp, Oryza sativa
  Clone ID: uC-osflM202083f07a1
gaccttaaactacttccccaaagtattccgcattatcaaccaaccatccatatgaaagtcattggagtgacaaaagaactctgaggggggcaaatgttgacataataaagggctaagttagttctataataacaaaatggctcccacatattatgtcctctcctcgcgtaacactcactcctccaagcaaaatagttaggaagctaagcgtttgcgcccagctcaaccctcccaggatgggcgtggccacctccctgcgaacctccaccttgattgttgtaataagagttgccaccaccagagcgaccacccctgcctttgttgctgtaccccctctgctggtagtaaccaggctcattatagtagtacccaccacccttacccccac

SEQ ID NO: 31091 - DNA, 408 bp, Oryza sativa
  Clone ID: uC-osflM202083f08a1
gcggacccgcgcctcccgctttcccccgtcctggagcagtggtgcctcgccgaggaacgccctatcgcgaagcccgagatccagtccatcatcaagtatctctgccgccgccgccgcttctctcaggcgctccaggtgcgggacgaacgacgaatctacgaatccccttgttcaccacttccgtcgccgcatcattcgattttgttttgttttcttttctcttgcagctttccatgtggatgaccgagcggctgcacctccatctatcccccggcgacgtcgcatatcggctggagctgatcaccaaggtccatggcctagacagggccgtggagtacttcgacagcatgccggatcagctgaagcagcagcagtgctatggctcgctgctcaaatgctacgccgagg

SEQ ID NO: 31092 - DNA, 383 bp, Oryza sativa
  Clone ID: uC-osflM202083f09a1
atatacgcaaaactttgcagtaaccaaatcgattcacaggccacacatacaggtagtatacagattcgtctacacacaaggttattgcagaggcaaaacacgaggtatgtatatcaaacgctctagaaaagattcatgtgatgaaatacatgatgaaccacgtatgttctcaaggtaaaattaattaatgcagtatagttttaactttgtccatcgatctcaacctgtaactgtgacgacacactggctacagtgccctcgaggtactagcagtatagcagtagctgtagtacgtagcagcagcagcagcaggttcactgtcttgattggattggatcggattagtagacgtagttcttgacgaacatgccctccttggcctc

SEQ ID NO: 31093 - DNA, 391 bp, Oryza sativa
  Clone ID: uC-osflM202083f10a1
ataaagaaatttacaactgcacttaacactgatgatgtggtgaaaggtaaatcttaacagtacaacccctctacaaaggaagtagagtagaaaggaacagggaagactgcaaatccatctccatgtagtcgtatttttaagatggaactacaaccagccttattaacaccaaaggaaaaacagagactaaaatctagctgactgaagtcacaagacctatacgcctataggcaacatcacaagtcgcaacggaagctctcagctggtcagctcatggatcaactgaagagctcagatggattccctcaggaccaggttgatgccgaacgaagccgtgcagatgatcaacccaaagatcgccaagaagttcagccccccaatcttgaggcgg

SEQ ID NO: 31094 - DNA, 375 bp, Oryza sativa
  Clone ID: uC-osflM202083f11a1
gccgatcaaaaaagagatacagtattgatttttattttacaacccaatgagatgtttctcacttcaaacatgcatatacagggtattaataccgacccgtccccttacgttatgtagatatcaaaacgtaaatcaattttgaaattcctcagttcagatatgcatgccaaaaaacaacaaagatttgaatagaatggaataaacgttttgacactccttgttgccaatgtcccttatgcatatgatataatagtctacctggacaaatatccactaaggactagctgattgagtcctccgggacacttgaatcctgaagaacacgatcaggatccagctgaccactgtaatagctagatgggacagcagacagtt

SEQ ID NO: 31095 - DNA, 381 bp, Oryza sativa
  Clone ID: uC-osflM202083f12a1
ggggaactattgcaaaccaaaagcatcttgaggatatcagtcgcggttattcatatttacaatgttctgatcagcccacgaccaaacagtttgcatattggaaaagaaaagaaaacatacacgatgacaagcatacagtaactaacaagccaggaaaagcacgcatctccattacatgtttgaagaaactaacgacatttgaaagaagctgggattgaaccaagaacaacaaactacggagttttatgcgacgatagaaagttaaacggcagtggctgaagcaacggttttgaccatgctttccccaagggctggaccaaagccgttatccaagacaggattggcagaggctggagatttttgtagagtatcttcatatgc

SEQ ID NO: 31096 - DNA, 313 bp, Oryza sativa
  Clone ID: uC-osflM202083g01a1
aaacctcaacacacacattaagaaggcaagcaatcccgagtgcatattatgtacacggacatgacataagttttcctatcctggcaatagcagattcacacttcacaggggttcatttcaacgtggaaattcatcagaaattcgtttgcagtgatgatgagtaatactctccggtctcgacacaagcaaccagcacttgcattagatggatggggctctggaggtggtgtgcaactgggcgtcttcgaagatatccacatcctctagcttctcaggcttcaggcaagccgggatgtaggaggtgtagacggca

SEQ ID NO: 31097 - DNA, 332 bp, Oryza sativa
  Clone ID: uC-osflM202083g02a1
ttttttttttttttttttttttttttttttttttttttttttttttttttttttttttttttttttttttttttttttttttttttttttttttttttatttattatttttatttttaaaataagtttattttttattatattttttgaaattttggttttttatgaaataaaattaatcaaatagaaaaaactaaagctaaaaaaaaaaatgatacaaataaaaggaataaaggcgggccctctagaaaaaaaaaaggtttatgagaaaaagaggtggcataggagtattttaacaagaaaaaaaaccacctggttaatacctggcgatcg

SEQ ID NO: 31098 - DNA, 335 bp, Oryza sativa
  Clone ID: uC-osflM202083g03a1
ggaactgaccaatctggcacacctgcagagatgcaacactgcatctgcatatgctctcatgtacaacaacctgaatctagtcaggaatcaaacaactgaatgctagtatcagtaaggctgacaaccatgagcagagatggtcaagaactactacattgccgttttctctcatcatcatagcaactttttttacatagtaaaaggttttgcttctccctaatgatacactcgggcaaaagcatttgtagagaagatgatgaagaggtcaagaaagaaattaagagtaactaagcctaatagtaacaccactagagaagtccccaagaagggacaat

SEQ ID NO: 31099 - DNA, 372 bp, Oryza sativa
  Clone ID: uC-osflM202083g04a1
aagattgaacaggataacattcagaaggaaacatgatcttacacgacatatggactgaaggattcagtccagcaacagcacgggacaagctgagtaaatctgtacatcatcatcaatagcctatagttgttccttccgttccgacggatcttgcgctgaacaaatcctcgaatcctccatcaatttttcacctcatctcgctaccaaaaaaaatttagtaagaacagagcagccggtgagcggagcctttcagacagggtcacgcagcgctgccgatcgacgtacgggctatacaacgggaacaccaccaggatgcacatatagggggcaggcagaccacatgcgtatttcattcacattgtcctgatcagt

SEQ ID NO: 31100 - DNA, 351 bp, Oryza sativa
  Clone ID: uC-osflM202083g05a1
gacatgaatacacaacgcacggacgaacgatttattcatgtgaaggcatgatttacatccttaaaattctctcgcatctagatatagctagagaggggccagctgctgactatgcatggagctggcacggcagtagtgtacaatgctactggaattttgtattgctacaagtactagacaggtacagggctgaggccagtggatggttgtaggctggcagaatactttccttgcccacagatcataatgtatgatcttcctacagtgatggcctcgttactagcttatttccaagagctttttattgtaactttcaccaccttgaagatgtccaggtacccgattttttta

SEQ ID NO: 31101 - DNA, 378 bp, Oryza sativa
  Clone ID: uC-osflM202083g07a1
ccaggatccagcttccatttccttgattcagattgcactgtatattacaacatagataatacagctaccaataaaaaaacagtcttttacagaagacatacgagtatgaagcgctgccacattagcaaaacatcaggaaaaaaaataaacataatacccaccagattaaccagacatggttcctattgtagtttgggcagatgtaagatatacattacaagatgggtttattttgcttaagttctccttccgttttggggggcttcgggaccgagatgatctgtcggttcttgacaaccgcctaccctcctgatcttgtttggaatctactaattcagccgaaagctcagcggtagtttcaggccatggggtgcgctt

SEQ ID NO: 31102 - DNA, 403 bp, Oryza sativa
  Clone ID: uC-osflM202083g08a1
gttcttcaccgcgaaagaaaaatatatagtatcttatatattgatatatgatgaacataggccaaaacaaaggtgcatactatgattataggcagtaatgcaccagcgggatgcttgatcttagcttagttgccaccagactcctcggaacctgggggcttgtaggcgatgaagctaatcaactgcacctgcctgacgttggcgaagccgctgatacggacaaaggcattagggtaggccttcttggcctactcgagctccttgagcacctgggtggcatcggtgcagccgaacatgggcagcttccacatggtccaatacctgccatcgtagtatccgggagacctgtggttctcacggtagacgaacccaaccttgttgaactcgagacaaggcacccact

SEQ ID NO: 31103 - DNA, 377 bp, Oryza sativa
  Clone ID: uC-osflM202083g09a1
aactaagaccagtttgatttcgtgtttgatacaaaaattaagatggacggattcacaagagagcaccctctacttaagctttacattacaaggccaaccagcagctgcctgccggccgaccactgcgtgcgcacgcgcgcgcaataatcaaccaatcacacacagtacgcacgcacataaaaaccacccatagccttcacgtacgcccggacgcacgcaccggttcgtgccaagctcaagggtagatggttctcgggatgatgatgtcgccgatgttgttgtgccacgggtccgagaggtggctggccaggttctccagtgggccggtgcccgggtacgccgactgttggacgcagaaacccacaaaagccagcatg

SEQ ID NO: 31104 - DNA, 309 bp, Oryza sativa
  Clone ID: uC-osflM202083g12a1
gggggggccactgcaaacggggcaagggcagttggagcattaaaaaaaaaccgggtttttttttaggggggaaaaatttacgggtttaaaaaaataaaaaaacggacccgggttttactaaaaaccaggggcatttttaaaggggaaaaaaaaagggatacagccccggttaaaggggggaaaaaaaaggttaaatattttaaagttccccccaacgggaaaaaaagcacaattattttgggggccaaaaatttaggggaaacctttgggaaaaccttgatttggaaaccaaaggcgggtttcctaaaa

SEQ ID NO: 31105 - DNA, 127 bp, Oryza sativa
  Clone ID: uC-osflM202083h01a1
aggggttattacagatataatcccatcaaagaaaaccaatacggcatgtaacaatatgggaatattaagaaaaaggacctgcttttcccaaaaaaataaagggaaaatagaaaatcttcccattttg

SEQ ID NO: 31106 - DNA, 317 bp, Oryza sativa
  Clone ID: uC-osflM202083h02a1
ggaagggaaaaaacaagctttgggccccttttttccatcgggcagggaaaagcggattttttattaaccacgggtttggaaaaggaaaaacccccggggtttccgggacaagaattttggggggggggttttttaaaaaaggggtttccccatttttgaaaaagggccgggggttttttgggctttaaggcttaaatccaaaatttaaagggtttttggggggggttttaggtctgaaggaaggtcgggtttttggcaccaaggaaaagcctttgcccccaaagggggggatttttcccaacttgggggttttgggg

SEQ ID NO: 31107 - DNA, 391 bp, Oryza sativa
  Clone ID: uC-osflM202083h03a1
gaggagctcaaaattcatattttattactatagtcagggcatccttttgacaacagatatgattgcctgcacatttcttcaaacaattagtgtacacagcccaactctgccctgaagcttatgaaagaatggaatgtgatttgtatgacattacaaaggacaggtacaaactattgtacaaagaatcctatcgagctaacttaactcaaaaacagtcaaaactcgaaactctacagtgtgtcaacaaggggacctccctaaatctgccgatgtaatgtacagagcgtgaccgacttgctcgtcggagatggcagcgacggggttttcctgccaccatgttttcaaagctcgaacactgcacatgatgaaacctccagtaaggcatgagcga

SEQ ID NO: 31108 - DNA, 364 bp, Oryza sativa
  Clone ID: uC-osflM202083h04a1
gaaaattaatactgaccaatataagtacttgaatattgtctttaggccttaacgaaactaatatgagcttgaatattgtcctcaagcaatatgaaaactactaccgagtaaaagactgccggtactttttgagaactggagtaccataggttcaaactatcaattgacgaacatgggacatgtaacgcgagattcaaagagttgagcgaaaaaggcgagcatttaagcacttcacttcctggctccagcacttggatggaattcacatcaggagcgcacgcaggccattgagcatcatcctggcttcatcatccagctcgtcctcgttgatatcatcatcaaagcattcattctcctccgagaa

SEQ ID NO: 31109 - DNA, 376 bp, Oryza sativa
  Clone ID: uC-osflM202083h05a1
gattaacagtaaggaatgaggaactcaaaattgttaactagaaggaggacaccaaagctgagcatcagaacggagaagcggaaagccaacagtgaatcgatgcgttataagattttaaacattggggtcaaggtataggaacccaacgtgtaacaggcactatagcaaaaaggagcaggttgaaactaagaggtggtttggcgtggggccctaactgatggtaccggatatatgatattggggaacatggtatggacagaaccagtctccaaggcaagcagggccggtaagcagggtggaccccagctgggaccacctcagaaatacgacgagtgaattacggttcatgactggcacacaatgctgtggcgggtga

SEQ ID NO: 31110 - DNA, 334 bp, Oryza sativa
  Clone ID: uC-osflM202083h06a1
ggccgccaatccaaacattatttaaacttttaggacaataagaaaagcccgaattccaacggggccacatcgggcttacaaataaagggcatgcaatgcctggcctgttttttaaatcataaccagcccatggaaaacgctaatccagggatcctaataatgggctgcaaatccaggaagggggtgaaaggtgctaattaactgggaaaaaagtcacggaagcaatgtagggcccataaactggggccacggggtacttaaggtggacaaatttggacatacgcagccctaattttatgattccacaaagcaattgaccctaggacatcttatg

SEQ ID NO: 31111 - DNA, 369 bp, Oryza sativa
  Clone ID: uC-osflM202083h08a1
cttgattctagattatatatcacgtagctaggcacatttataatgtcgtatcaggagctagcacttgtaggggtatagtagagtgagctgagctgtacatgtctaggccaaggggtcgccagcgacgccgtggccggcggctttgggcggcggcggcgacggctagggcgcgggaggcttgggcgtgggcgcgggcggcggcggcgtgggcttgggcttgggcggcggtggggtgagggcgcaacgcaccatgcagaccatgctgttctggttgcagctgacgactcaaagcgtcgtggcggggcccttcgccatgcacccgaaggcgcacccgaaccatttgcgtgaaggacccgatcatgcacgcaa

SEQ ID NO: 31112 - DNA, 372 bp, Oryza sativa
  Clone ID: uC-osflM202083h09a1
aacaagagcaacaacaacatctggataacaacagcatacgagtacaaagcaaataaaatggctggacgtccggaccaaacagctgcttagtgcttgctagctagcacaatcagactaccatgcatagtgcacaatgtgttcctcaacaaactgaaaacaacaacggtggttatcacagtgctacaatgatgatgatgatgatacagtgctacaagctccatcatatgcgtgataaccactagacgagatgagatatggcctcttacttctttcccttttggatgactttgactgcattgttcacaccggccatcttctcatctgtgatcggccctccttctggaagatcgaactttctgcgggtcaacgacc

SEQ ID NO: 31113 - DNA, 109 bp, Oryza sativa
  Clone ID: uC-osflM202083h10a1
actttaatactttgggggtttttatagcagaagggaaaggaaatttcaccgcaaatacttattcatattgtccagacaacattttctacccgacactatgctatattgt

SEQ ID NO: 31114 - DNA, 378 bp, Oryza sativa
  Clone ID: uC-osflM202083h11a1
gaactctaatgatagtttcattatatgaaaaactcacctaatgctaaactacattgtcgtcaacaattaattggcggccattatttcatcatccagcctctaatggattctagaaaaaaaaagaacatatgcattccaatggattctagaaaaaagagaacaaaaatctctagtggactaaccacgcatatgcatggatcttgcatgcagacggacggcggtggaattaacgggtggatcacggctggccgacctcgttctcccgtgacatctcctcgagcgacttgcccttgggctccggcacaaggaaggtgaggaggaagccgagcaagctgcagccggcgagcgcgaagagcgagttgcggacgccgatgcccg

SEQ ID NO: 31115 - DNA, 397 bp, Oryza sativa
  Clone ID: uC-osflM202083h12a1
tttttgtatcaactaaaccgttgggttgtcttcaattagatgggggaatccaattaacagcctcgactcgtatcctagctcgtctgagagctaccttcgcttcaaccaattctttcgtaccctcagctctactcacgttagcttcggctatttcaagtgcctgttgagcttcttccggatcaatgtcactacccagttccgcatcatttcctaaaatgatgatctcattattaactattctggcaaaaccgctccacagaaccgccgttaaccattgatcgttgaggaggcgtattctcaagggacccatatctacagctgtgttaatgggggcgtggtttggtaatacgccaatttggccactattagtagataaaatgatttctttcacttcaca

SEQ ID NO: 31116 - DNA, 69 bp, Oryza sativa
  Clone ID: uC-osflM202084a01a1
cactttttctgccctttattttttctctttgggggatgaaacatccttcctggccactgatgcctcagt

SEQ ID NO: 31117 - DNA, 261 bp, Oryza sativa
  Clone ID: uC-osflM202088a02a1
acgcagcaaaggcagtttttatagctaaagttatttcgtccagaagtttccagttttccgtaccaagtgaccgagctacaaaaagaacacattttttacaggattactatgttgttacttctaccagacacaggagcctactgataggagaattatagattctcagaggactctacatattgaaattcttaaccctgaacttccattctcccttggccgcgtcaaatgacacaaattctgcgccatggtcctttgtccact

SEQ ID NO: 31118 - DNA, 217 bp, Oryza sativa
  Clone ID: uC-osflM202089a02a1
caaggaattgcatagagacatttctggcacttgtatcaaacagggtaacagccgaaacaaaaagaagaaaatgtcactagcaaagctaagcaaatgtttactgggctataaaatcgcgaagacaaacacatatttttttcctatttaccaaagcaaaaaattgacagttacattctggggcctatccgattagcatagtttggaagggagaggatta

SEQ ID NO: 31119 - DNA, 194 bp, Oryza sativa
  Clone ID: uC-osflM202089a03a1
caaaagaaatctcacaatgaaacccaacagaaggggtcgatcttaaacatgcattttatccaacttggtccaccctggtcccattcccaattaatcaagaagaaaccaaacctgggtcggtcatcacccaagggggacattcttgcaacaaaagcctttttccccatttgaaccaaaaaaggcctttacaacac

SEQ ID NO: 31120 - DNA, 343 bp, Oryza sativa
  Clone ID: uC-osflM202089a04a1
gacgacgcatgctgcccggccgcagctgggatcctccagattgttcgccctccttttttttttttctggtggtcactcttttgcccttccactgcatgagcctcttcctcaaccttaatcttcttcgcactcacagaagcagagagatcatcatctccaaccttcctcttcctcccctcatcagcattgtcacctgcccagtccttatgcttcttctttttcttctccttggtctcttcagccacatctgcctcctctttcacctttggcttctctggctcaggtgctgcagcaatgccggcaatcattgcatcaccaccagctggaagcacggcattgcgaa

SEQ ID NO: 31121 - DNA, 279 bp, Oryza sativa
  Clone ID: uC-osflM202089a05a1
ctgttgaatttattctttacttataacaaaggggattacattgcccaacaccatagtactcatgtacaaactcccagtgagcccaatcgcataacctgacaactgatctagcaaaccacaaccgttcattgcatttagcgatgaaagagagctgaccactaacccacatacatgctatttaagtggaccaacccaccaaccacgtactccatccttgctataaaaaacaaacctagaattagatatgacatattatagtactgtgaatctggacatata

SEQ ID NO: 31122 - DNA, 288 bp, Oryza sativa
  Clone ID: uC-osflM202089a06a1
attttatttgtgggttcattgaaggtgtatgcggctttttttttttttatggggacagggattaccgcattttaaaattttcttccatggaagaatgtatggtaagttgaaccacttcaatttcggggcgaggaattttaaaagcttatttacgacttatttagcaaaacttggcgataaggctattttaagtttttcatacaagcattggcattgcaaaggtacaccgagagggttgaaacaaaagtgcaaactggtgatggagacaagccgaattaggttacgctt

SEQ ID NO: 31123 - DNA, 253 bp, Oryza sativa
  Clone ID: uC-osflM202089a07a1
cgagaagatcagtactactttattcatgccatgaccatgcatacatatgggctttcacagatccatgaagaattcctcgcccgaaaccgaaaaatacataaagcaaactcactcactctggctgcagagcgaccgtgcgaagtgcgtactcacacgcaattttattcgatcgatcggggccggcacggcggcgcacacgtttacttcgccgcagacgccgacatgatgtcgccgtcgaacggcgcctggccga

SEQ ID NO: 31124 - DNA, 180 bp, Oryza sativa
  Clone ID: uC-osflM202089a08a1
cctacaaaaaaaacaaaaggaaccggttttaaaattaatttcccaactgggcgaaaattcccccggccattaaaaaaatttttccaccctttaaaaaccccccccttttttttcccggggaagataaaaaataactgggggccccccagggtccccgggggggagaggttaacggggggg

SEQ ID NO: 31125 - DNA, 259 bp, Oryza sativa
  Clone ID: uC-osflM202089a09a1
ggaaaaatcattaataatataaatatatcgaaaacagttggttaaacagagtagtcaagagtcgatcgatcgatgtacacggagacaaaatcaaagacctctctcatcacttggattaattaatactagtaatatttagagactcttgggcaagcatagaaataattagcaaatgaggatggtgatgcaggaggtgtagaggctaggcagcaagggaggggtggtggtggtcagagttggggatggtcttgttgtggag

SEQ ID NO: 31126 - DNA, 359 bp, Oryza sativa
  Clone ID: uC-osflM202089a10a1
ttttatagctgtgacgacgcatgctgcccgccgtcggcatggtaggctcctgtgtaggccgccctcggtgcattcttgtccgtgcctccggtcatgtcagctacggagccctggtacatcttggcgatcatggggttgcagacgccctccagctccttgatcttgtcctcgaactcctcggcctcggcgagctggttgctgtcgagccagctgatggcaccgtcgatggcgtcctcgatcttcttcttgtcggcctccggcagcttggacgcgatcttgtcgtccttgatggtgttccgcatgttgtaggcgtagttctcgagcgagttcttggcgtcgaccttcttcttgtgctcctc

SEQ ID NO: 31127 - DNA, 274 bp, Oryza sativa
  Clone ID: uC-osflM202089a12a1
ccacaatcaaatgaagatacttattaataagcaccacggttacatagctattacacaaacttgataattaatttaaacaagaaagtagtcccattgaacaaaactttcatcagtaccaatcccctaaaggtactaatttcattatctaaaatctacaacatcagaaatccctgcgtaaggctgatcctccataatatcttcatctattggctataacttacaggacacctaactttaacatcatttaccacaacaaataagaaaaagtgctgat

SEQ ID NO: 31128 - DNA, 259 bp, Oryza sativa
  Clone ID: uC-osflM202089b01a1
gaacatcaagtcgacacaggatacattccaagaaaatcaacagggaatcaaaacaatatgttcattacaataccaatttgactgatataagatatccttttagactcacagaaacagtaaacaaggtgttctatccaattcttctttggttatgagatatactgcaggcaaagtagtcaacacaagtttgatgactatatacaataataatatcgtgaagtgtatgtttttatatctctctgtaaaggttgagcctgtt

SEQ ID NO: 31129 - DNA, 244 bp, Oryza sativa
  Clone ID: uC-osflM202089b02a1
agctcttattggaactttgcacgtacccgatcaactggataattgtaattcgtaaaacagagtctatttaagctggcttgtgtgctgaacaaataccataaagacaaacaggcatggtgtaattgaatgctcacatatggggagaattcgcttaagcaatgctggctgccaaaccataaaccaacgtaaatatttataaaaacaaggtatgctccgtgacaaatagcggttgaggaattaatca

SEQ ID NO: 31130 - DNA, 250 bp, Oryza sativa
  Clone ID: uC-osflM202089b03a1
aaaatcaacgcgcatataatatccattcaacagaatcgcatctattacaagccttccattataggacgccgatagtgcagtgctgcataagacaatttacactgtccacatgcgttgacattactacagacagtaagactcaaaacgacaacacgcatacattacggtacagagcacaaatataaaaaggttacggttattcgccttaatttatcttaagatggtaggattatataatatagggcaaaca

SEQ ID NO: 31131 - DNA, 272 bp, Oryza sativa
  Clone ID: uC-osflM202089b07a1
gattctcaagctgggcatctcccggttcgctcgccgttactaggggaatcctcgtaagtttcttctcctccgcttatttatatgcttaaactcagcgggtagtcccgcctgacctggggtcgcggtccgaggcgttcgctctcggtgcgtttgggtcctgaggggccaccgcgccggccgcgcgccggggtgcactgcggcctagagccagcgtgagctgtccaccatgcgctgtgcccggcacgcttcgccggcagcccgagcttcggccc

SEQ ID NO: 31132 - DNA, 101 bp, Oryza sativa
  Clone ID: uC-osflM202089b08a1
gggggaggaacaaatggcccaatcccccaaaattacccccgggttggggggccaaaaaaaaaagcctgggtctccgaattttaccaccgccctttccaaac

SEQ ID NO: 31133 - DNA, 258 bp, Oryza sativa
  Clone ID: uC-osflM202089b09a1
agtgacaaatcatcaagagatcagaaccaagcacttattgcatcttccaacagaagttaaaaacattccaaacacatgtccacaacggtgcaggttggttttttgctaaaatcacctctaagcaggtgatcgattacagacagtggcagctgcgataaccctaataggtactggatctcaacaacaccaggaggggttcgtggaaatcatcacttgggcagaatgggatgcacaaaaatgggacagcactggatggaa

SEQ ID NO: 31134 - DNA, 254 bp, Oryza sativa
  Clone ID: uC-osflM202089b10a1
ataaaaaatactactatctgattaggaaataatttttcctttgaaacaattcgtagtacatcaaacattatcaatatcggacacataatccattgaaacatatttacagagcattatatacatcatcagtactctaattgaaatatatgatcctagatcattttcccgttaccatctagtaatcaaatctaaaccaaaatgtctcccaataaaacatttactcgaactgaaagatgaacgcgaccactaccctt

SEQ ID NO: 31135 - DNA, 274 bp, Oryza sativa
  Clone ID: uC-osflM202089b11a1
agcagcaagtacaattaaatgaatagcctctcgatccatgtccaaatatttggaccgaacgaacattgccatacaaagtgtgcaacatccttccttgcatgttgctacaatcttgacaaaccgatcgaattcagttttcaacctgattttacactcttcttcatcaactttacagaaccgtggatgattttttggttacaccggcagcagcaaagtgggaggggggaaaagaatacgcggcgtcagaatctcggacaaaaaaatgtagttccac

SEQ ID NO: 31136 - DNA, 286 bp, Oryza sativa
  Clone ID: uC-osflM202089b12a1
cttgctcacatacgtctttgcctcggttccacttgcagtgaacatttgcataaacctgaagtgctcccatgaagaaaatgcttttgcagcaaaggaagaaaacagaaaattctatgcatgggaaaccccagtggcagaatgtacatcatactcattatttgaaatgcttccgcttaaatgctcaaaacattttaatgaaagtaagaaacagtggtccctcagttgacaacatcaaggaccagcttgcgtgacttcaggacggaccacctcatgcgacggtagtatg

SEQ ID NO: 31137 - DNA, 233 bp, Oryza sativa
  Clone ID: uC-osflM202089c01a1
cagctcctaaaatgcgtatatttgaattacacaaaggaccagtttggtttcatttttgagatacacatggattactatatggctattgaatacaatgcagggcacagtaggggttttacaacagtttttttaaagcaggaaacatcagcctcaatcgaaatgatctgcagagaagtcaggctaatcaggtttttgcagcctccggatggcggtattgtcggcacggaaccttt

SEQ ID NO: 31138 - DNA, 252 bp, Oryza sativa
  Clone ID: uC-osflM202089c02a1
gacagcaactcaataatctttcgatatttcaccgagggtaatgtatggtaggaaaatcgccagacataacagagccggccagactcaactcaaactcaaccctatgatggtaaactgtttgcgattaacgcctccgcctatgacaatgtttggagataaacgcttccaccaaaaaacgaatgtcggggagtgttctcccctacaagaattattattgttttcaatgttaaaaaggcaaaattcaccagatcc

SEQ ID NO: 31139 - DNA, 130 bp, Oryza sativa
  Clone ID: uC-osflM202089c03a1
aaaataaattacttggaatcacacattaaacacacaaccataaattggggcaagagaaacatactaaaaaaacaggcacggcaacaagcaaggcgagaaaaaacaaacacgcttaaagcaataccaaaaa

SEQ ID NO: 31140 - DNA, 272 bp, Oryza sativa
  Clone ID: uC-osflM202089c04a1
ccacaatcaaatgaagatacttattaataagcaccacggttacatagctattacacaaacttgataattaatttaaacaagaaagtagtcccattgaacaaaactttcatcagtaccaatcccctaaaggtactaatttcattatctaaaatctacaacatcagaaatccctgcgtaaggctgatcctccataatatcttcatctattggctataacttacaggacacctaactttaacatcatttaccacaacaaataagaaaaagtgctg

SEQ ID NO: 31141 - DNA, 275 bp, Oryza sativa
  Clone ID: uC-osflM202089c05a1
ataataataataataatattattaatgccattttatgaacattgcacaagctgctgcagcagcatcaaccaaccaacaaaccaaactataaacttcctctgctccatttctgcctccattttcatggacagcaacatcatatctctgcattttttttttcaccggttgtgtgactgaaaatagagaaaacgtcggcgttggccttagctgcttttgggcgcatcggcggcggcggcggcgacggcgtcggggatgccggcggcgagcctggctct

SEQ ID NO: 31142 - DNA, 251 bp, Oryza sativa
  Clone ID: uC-osflM202089c07a1
ggcctatgaagatccaccaaattcacatattacattttaatcataactatgaatactttccttgaagagcatcattacacaaaatcctttgcctccccttttgcatgctcaagaaaaacctaccaattttctcctccctacccttaacaaccaaaaccagccccacctaacacattgccaaagcaccattttgccatctggtaatccctttaccaccaacagctacaagaaagagcaaatatccctgtccc

SEQ ID NO: 31143 - DNA, 220 bp, Oryza sativa
  Clone ID: uC-osflM202089c08a1
atggacaacagcaatggggggaacaatagcaggaacatgtcaacaaaacgcagaaaaataataacggggaaaaaaaatgggctacaaaactggcgggtggtcaccctccctggtccaccttaggagccttttaacaaatcagaagaacaaaaaacaactaatggcagcatatgtacacaagggtgaaggggccacaaccaaacaccggggccttgcccta

SEQ ID NO: 31144 - DNA, 243 bp, Oryza sativa
  Clone ID: uC-osflM202089c09a1
attcgcacagattgtcaaaaagattatttgattttttttttgggatgtaacattccagatcgatccataaattggtgcaagagaaacatagaaacaaacgacaggttcctgtcttggagaaaacgacgcgtctctgcaattcagagtgagttgagtatcgctcaaaggttgtgggccgggttttcatcatgtcagtcatcattatccttccaatgatgcaacatcatccttctgatcagaaaa

SEQ ID NO: 31145 - DNA, 252 bp, Oryza sativa
  Clone ID: uC-osflM202089c10a1
aagggcacatacatgatggatacactttattttgcacattatccacctacacgtatataatttttaagaacatgaagcaaaaatgcaaagcaacaagccgcataaaaccgaaacaaacagataatcactaacagggacacaccaacctatacatagccaatatacggttataagctatgcaagcatgcatagtgcataggagaggcccgagcatttttgaggcacagttgcctaagttcgttttttaaataa

SEQ ID NO: 31146 - DNA, 237 bp, Oryza sativa
  Clone ID: uC-osflM202089c11a1
acaatgggataacatatattgaatatatttgtattacaagttgataacatacgtacatagatgcacgtgcctatataatacaacagtgtccagtacactatataatgggcagcacaacataagaaaatatgatatggtttagtcgaaacacacatttggaagggcatttaacataccccgtactgtacgtcggatgcaaaaacgtttacggtttggtcgatcggtcagttcgggtcc

SEQ ID NO: 31147 - DNA, 275 bp, Oryza sativa
  Clone ID: uC-osflM202089c12a1
cgaaaatcgttttcttcatactatctagtgtcccaagcagaacttttttagacaccagcagcaacaaaatttaacaattgagatcggaaggaacattagcagatggcaaaggaaatttcccgcaaatccttattcatatgttatgacaacatttctcccgccgcatgctcattggggcagacgcagctgaccacctagagcttttagttcaccattattatttagaccaagcatacgttccaagatcagaacacatgcttacaggcgaaaatact

SEQ ID NO: 31148 - DNA, 252 bp, Oryza sativa
  Clone ID: uC-osflM202089d01a1
gagctaaggacaagtggtcaatagtatccattgtgatatgcacttgtgttacatataatagtgtataaacatttgtctcatggttacaaaacaatgtggaaagaaaaagcatccttgtgaccttagttgctaaaaattggcggatgccgcctatacaaaagtaaggggcctcgcccatctgtaacacatttacttcccatttcttcagacagttgctgctttgagggtgagaaaatcagaaatttggtttgt

SEQ ID NO: 31149 - DNA, 166 bp, Oryza sativa
  Clone ID: uC-osflM202089d03a1
ggaccgtgaaatttcttatgcacgtgacaaatttatacaggtgcattgcccatgtacacaggaaaacacgacaaaagacctaaaattccagtgcgttagttgaacccggcgatcgtaggtcggcgtcagctctccatgtacgccgaccatttttccctcgagcatt

SEQ ID NO: 31150 - DNA, 273 bp, Oryza sativa
  Clone ID: uC-osflM202089d04a1
catactacaatactagtattgcatttgtaggctaaaatgcgttctgcatgccaaagacaacatgaaagggttaacacaataagatagtatatgttgctaataggaaaccgtaagcactcaatcagcacttgatgcaacgcagagcagaatgatgagataaactagatatatattcgatttccacgcttgctgtaaaagcgcagtgcacagttataagttcatcagcaaccataaactgatagtactccatataatacggaactggttcaggtt

SEQ ID NO: 31151 - DNA, 272 bp, Oryza sativa
  Clone ID: uC-osflM202089d06a1
agggaccacttattcattatagttcttccatgctgctctaccacagcaaaacgtttcagacaccattaaaccagacttaaggatacacattacaggaaaatagtacacaatgaaacgggacacgaccaaggaccagaccagacaaccatagctgcattggggaagacaaataggcagacttgagaaccctagaacagcaaaaggtccatggttgaggacttactggccaccacggaggcggagcaccaggtggagtgtggactccttctgga

SEQ ID NO: 31152 - DNA, 93 bp, Oryza sativa
  Clone ID: uC-osflM202089d07a1
agcaagcgggaaaccttttataaccctagatgaatttgattggagaaacagatgttcacaagcagatacagggctaccgaaactggatagaac

SEQ ID NO: 31153 - DNA, 219 bp, Oryza sativa
  Clone ID: uC-osflM202089d08a1
aaagggaattgatgccattttatttggtggagaattgagacttgggagtactattacattcaggagaacagttacaaaattactgaattggatacagcctgacagaagattattcttcctaggtggaactgtaggattaaaacgttggggtagaggaaaatgtgcagtacctgagccaaatgaacaggactggcttgctctatggacaaaccaggatgg

SEQ ID NO: 31154 - DNA, 256 bp, Oryza sativa
  Clone ID: uC-osflM202089d09a1
attagtcctaatggcatccatgcattcaaactgtccccttggtacatatgcatacgacacgtgtgactgaaaccattttacacaagggggcatgatttagcacataattaagggcaatcagttttttcttttccgctgaaactcaaaaatctagctagctactgaaggtagttctcatcatgcattgcatctatctctctcaatttcaaatattgtttaggctccattcatcatgaccggcttcttcatctcccac

SEQ ID NO: 31155 - DNA, 92 bp, Oryza sativa
  Clone ID: uC-osflM202089d10a1
attacataaaaaattaaaaaacaaaaaaaaaaataaaaaaaaaaaaacagaaaaaacaaaaaaacaaaaaaaaacaagaaaaaaaaaacaaa

SEQ ID NO: 31156 - DNA, 274 bp, Oryza sativa
  Clone ID: uC-osflM202089d11a1
caacaggaaactcaatctttatatatggccagcatatatatatatatataatcatccgatcctctttagtattaagattacaaacaaatttgagactaaaaatatgcatgcatgggctcaccaaacctatacagcaccaggcaacgatgatggatgattgccaaaaaaaaacacaccaccaaatctcatcaagaaaccaaaggttaaaaataagactagcttaatttgccaggttaattagacagagtagtcgtcgcgattcccacgagatata

SEQ ID NO: 31157 - DNA, 234 bp, Oryza sativa
  Clone ID: uC-osflM202089d12a1
caaaacgcacgaaaaatatatttgaatggggaagtaagctaacacaatattctgtctgtttgcaaagcccaagaacaacatttgtggccggttttggacagggggaacataccgcctttttgttaggccatgaatcttaccttgggttgcgaccatcaatggtcatgcccccatacaaccgggatcgcttggccgcgaaatgtaactggaacccggcatgcaaagaaaagaaac

SEQ ID NO: 31158 - DNA, 250 bp, Oryza sativa
  Clone ID: uC-osflM202089e01a1
caatcaccagcaaatattattgacatcaagcagtatctaacggagtttcttttccaatgttgcaaattagtgcactacatttatgtacaaaaggatcgcacaacacaactgctgactctgacagtgtttgggcatgtcctaatcctgttttttcctaccgttttacacagctgctggtgcaatctgctctgactgctgcaggtaaactatgataccataccagggagggcctgagaccaaacaatctaaa

SEQ ID NO: 31159 - DNA, 253 bp, Oryza sativa
  Clone ID: uC-osflM202089e03a1
aatagtgccaggtgaaacagggtaccacatcctttcaagcatcatcactagatttaattaaaaattacaacatgcgaaggacggattagatcataagcacttcaatgaaaaataaaggttgctcggaatacatctaataacctaaacataatatttctaagccatcctttcatacatcagcttgcatgcaccaaccctgttcagaaacacaaaggaaagcaaacctagaagaactcgaactctagataattga

SEQ ID NO: 31160 - DNA, 244 bp, Oryza sativa
  Clone ID: uC-osflM202089e04a1
cacgacgatcccaaataactaaccatagggaaaagaaacataagatccttaagcatagattccacatatttccccactgatgaaaaggttacacataagagggcgcgaataagcaatcaggggggagaccaagcaatacattttttgcatttaggaacttactggaggaccagattaaattatcaagcccatagagctacaaggcttttaaacacacaaatgctaattaaatacccaggcagtt

SEQ ID NO: 31161 - DNA, 73 bp, Oryza sativa
  Clone ID: uC-osflM202089e06a1
gatgcgaacacaccaagagatgtgcatcgtttctgaggtaaacttaagggaaggtcatacgatttttttctac

SEQ ID NO: 31162 - DNA, 253 bp, Oryza sativa
  Clone ID: uC-osflM202089e07a1
gcaactggaatcccaagcaggtagggatccaaattattttattaatggactggctgtgattagcattcgtaatggtacgtggttctgcaatgcagtcacagtttttaccgaatacattgtagcaggggtagtgtgtttcaggtcttccagacgaggttcagttgagttcagtgcagcttgtttgcgacgtaaaggaggtggctgatgtttgttggggggtagttctgcaggaggcttgtgattggaagttgat

SEQ ID NO: 31163 - DNA, 256 bp, Oryza sativa
  Clone ID: uC-osflM202089e08a1
cttcttattattattctaagtttctaacctgtcctgcaggtgcaagtagcctcagtgctcttcagttcttgcagctactcttgcccccggcttcgattcatcaccagccaggtacttcggttttaagacgcacggtactctcaagtggatcagttcaggtttcccatgcaaatgtacttgagctccaggtactcgtccatgccgtattttgatccttctctcccaaggccagattgcttgacgccgccaaacggcg

SEQ ID NO: 31164 - DNA, 252 bp, Oryza sativa
  Clone ID: uC-osflM202089e09a1
aaaatattctacaccgaagaaaatgatcaatgttatggctgtacagtttaggaagctgagttactcccggatcacaacaaagtgagcaacaaatacaggtagcagaatggtctaccgtttcttatatacaaaattgagctgaatatttgtcggaagtaaataactaataagattattcctgttcgttatccacttcttcttccggttgacaaagctgtcgtcttgcagatggggcataaattctttaccatc

SEQ ID NO: 31165 - DNA, 137 bp, Oryza sativa
  Clone ID: uC-osflM202089e10a1
cattccgatagatagcatcaagcagttaaaacaccataaccaaagcgaactcaattcatggaaacatcacggacgaagaacacctaacactggatggatggatagagggcttatgcgacttgagagagccactggaa

SEQ ID NO: 31166 - DNA, 240 bp, Oryza sativa
  Clone ID: uC-osflM202089e11a1
aacaacaagaaagaaaatatcctgtgctcgtacaaattagtaatagaaatatctaatctctcccaggaaatagtactacttcctgctaatggttgagtagtgggcactgacaggcgatcagctaccggccttcttgttgtcgacatcggagcagggttagcctttcattgatcatatattggccgcataccgcttagctaaccatggcgcggccagactgaaccatacacgtccttcttt

SEQ ID NO: 31167 - DNA, 273 bp, Oryza sativa
  Clone ID: uC-osflM202089e12a1
gaaagcaaagattctcttgctgtaaccctgaagtagtcagtgtccaaggtgtcggcacgatctgacaaaatccgtaaatcacaacgatctatatccttgttcactcaaggaaaaccatcaacattgacaaaaaaaaatgaaggaaaagaactacagtttattggaaacgaaacaacacagcaaaagcatcttactacttgcaatttaacgcaataaaagtgaaagtgtttatagaggtcatgcaaagcacgatttctgaatcataaagtgagg

SEQ ID NO: 31168 - DNA, 97 bp, Oryza sativa
  Clone ID: uC-osflM202089f01a1
attcatgaagggaaaagggaagcattaaaaaggggggggggcaaacaacccaaaaaagcccccggaaaatgaccggaaaacacaagggggtcggaag

SEQ ID NO: 31169 - DNA, 84 bp, Oryza sativa
  Clone ID: uC-osflM202089f02a1
acctaacataacaacacctaacagtacctcagtcctcctattttcaaccgccaacctgggaatatgtccagtattgagcgccat

SEQ ID NO: 31170 - DNA, 121 bp, Oryza sativa
  Clone ID: uC-osflM202089f03a1
cggatgagtgatcgatcactctccacatacttgtatcggaatgtctagcacacgtacaacgtacaaggggagacggtacatcagcatgcggcaacaatacacggaacgtacaacgggttag

SEQ ID NO: 31171 - DNA, 267 bp, Oryza sativa
  Clone ID: uC-osflM202089f04a1
ataggatgtaagagcaggcaagtaaacataaacaacggttatgtacactgcagtaaccaccaatagctcaatatgtatatacaccaacccaaagtgccataaaaacaccaatatcttgatcacgacatgacaaccatgtatggaaagggtaacccacttgactcatatattcatactaaaccatgtacctagaggatgcctttgaatctgacggtataaaaccaatgaaccagacaattttacaattctgagctacaggtaacacgt

SEQ ID NO: 31172 - DNA, 237 bp, Oryza sativa
  Clone ID: uC-osflM202089f07a1
gagcaaaatagcaacgttataatatttcagtaaaccaatatcaacgcaaactgggaattgtcagtatgaggcatcagatgatcacaaagcaaaagaaaaggataccaggatacgatacgagaacctagagagaccgcagcatggacctaccagaacttttcaaaaacaggcttcatatggataagattcattttaagttctgaactacgactacaccatactggcagatcttacaga

SEQ ID NO: 31173 - DNA, 249 bp, Oryza sativa
  Clone ID: uC-osflM202089f08a1
cggatgagtgatcgatcactctccacatacttggatcggtctctctcgcacacgtacaacgacaaggggagacggtacaacagcagcggcaacaaacacgcacgtacacgggtagtactacagaacgcgccaacgtcatgggcgattggtgagaaaacacgcacacctactagtactagctttatccttttttagtgtacaccacacggccgtcgacgatctcatcggctagcgcgatcaatggccgtc

SEQ ID NO: 31174 - DNA, 258 bp, Oryza sativa
  Clone ID: uC-osflM202089f09a1
gacaacaagactaggcattgcatccccaacgcaaaaggaattcctagtatacaacaaggtgaggccctcaaaatttacacgaccatgaggtttccacatgcctgaaaggcgcaacaaagcaactatcatatatagctggatgcggaagcaagattaaataactttggatcacatgagcagctacactaaacaaacagccccgaaaaggttaagcacttaagcttgccgagaggatgatgattcacccagtgaaacaga

SEQ ID NO: 31175 - DNA, 266 bp, Oryza sativa
  Clone ID: uC-osflM202089f10a1
atgtattacaagtctgtctaatttaccaaagggatagatcgatcgattacaatagctgtgtttgacaacgttagattcaatcaaaaacatgggtgggtcaaaaaacagaggggcctataccaacagcaacaaatgatttgatgatgagttaatagaataatatccatcctcctacgaccgagagagagagagagcagtaagtaaacaattaatattggtaaacctggaccttactgaacaaacaacattaattctgctaatacata

SEQ ID NO: 31176 - DNA, 266 bp, Oryza sativa
  Clone ID: uC-osflM202089f11a1
aataaaatactccactccagtatatttagattaaggagaaacagtgacagcaagttctatctcaaggcaaggcatgtggctcatttcaacaacatgcgtgagccaactacagtggagtgctgctgccagacatggacgcaaatctaagaagaccagtgacccaacaaacacatgacattgacaatagtgctgtccctacagggcagagcactctcgtctcatagtagcagtacatgacatgcttaaatatggagtagtacgttcga

SEQ ID NO: 31177 - DNA, 264 bp, Oryza sativa
  Clone ID: uC-osflM202089f12a1
gaatgaacagattctatctactgctataattttgtcactaattattacaggccattctctgactggactgcaatgttggaagaaacttttccaagagcaagaatgcgacaggattattaggtggtcttaacccatgctgaagcccaaagaaattgaggtgccgccagttaacctcttaaagctaaagcttctctccgcgtatgcaacaaaaattagggggaaggaaaacaatcaagaggacggaatcacatcggacgatcagat

SEQ ID NO: 31178 - DNA, 266 bp, Oryza sativa
  Clone ID: uC-osflM202089g01a1
cacaaactgccacagaaaatgcggcactgtacaccacactacacataagcatcccacaatggcgaggaagcgcaatatttacaattttgttccttcccgtcacgccttggagggtacacggagtgaaggaaatacaagtaattttttcagtacttgaaaacgaaaagatcccgataaacggagcaggaaggacctagtaaatgctgttgagaatagtcccacattgaaagtttagggggagtggcaccaacttaaaaggggaggga

SEQ ID NO: 31179 - DNA, 314 bp, Oryza sativa
  Clone ID: uC-osflM202089g02a1
tttttttttgggggttttttttttttttgtttttcaaatataatatttttaaaaaaataaaaaaaaaaaactaaaagagggaaaaaaaatacccaaaaaaagaaaaacaaaaggaaaaaacaaaagaaaaaaaaaaaaaaaaaaaaaaaaataaaagataataaaaagcaaataaaaaaaaacaaaaaaagaaaaaagaaaaaaaaaaagaaggaaaaagaaaaaaacaaaagaacaagaagaaacaaaaaaaaaaaataaaagaaaaaaaaaaaaaaaaaaacaggcgaaaaaaaaaaaaaaataatgacaat

SEQ ID NO: 31180 - DNA, 262 bp, Oryza sativa
  Clone ID: uC-osflM202089g03a1
gatcgatccaattcagattttttttttcacgcgtgcagtagatacacaaatgttagctttcttggacagttacacgtacctttgcagcagcagaagtgcagctagagaagacaaggaaaagaagaaaaaaacttacagggagaacagtagagtagatgaatgtagtagtaaaagacatactagtggtagctagtggtcgtccttaagaagcgttttaaccacagcttaatcaaagacttaattaaggtgatcgtgatgagtc

SEQ ID NO: 31181 - DNA, 152 bp, Oryza sativa
  Clone ID: uC-osflM202089g04a1
gtgagagaataaataattattttgggatcataaaatttcttatattttgatacacatttgaagaccaaaataccaaataccttacattatatggcgtgatagagtaattaaagatttaaatgcacatgcaaattatgcaattgccacccctt

SEQ ID NO: 31182 - DNA, 248 bp, Oryza sativa
  Clone ID: uC-osflM202089g06a1
aaacaaaactttcatttttgcaaaattgaatttagataaatagccgttaaacttatgaatgtggtgtttcgctcaatggtgagacttatgcctgccagcaataccaaaatatacatgatcctcaaatttgccgcacatgactcacctttgtcgcactcagtgtatcagctgtgagtccttggaaatatggctgtcattcaacggcaccggcctcatttaggcacccaaactggcaatggcagagactg

SEQ ID NO: 31183 - DNA, 87 bp, Oryza sativa
  Clone ID: uC-osflM202089g07a1
catagaaaatgcggctctgtacaccacactacacataagcatcccacaatggcgaggaagcgcattattatacaatatactgcttct

SEQ ID NO: 31184 - DNA, 255 bp, Oryza sativa
  Clone ID: uC-osflM202089g08a1
aaaggcaagaatattattcataaatgacgcatgatttttatcaaaacgcttgcaaatgatatcagataagtagagtcaacaagacaaaactgtatctgccaaagcacacctccccaactccacccaattacgccattatttctgggcaaaagcaaacggcttcccattcctccccttcaccagtctcaaaccataaaccccacaacaaatcctcctaagtgacggcatataagatgatgaaaacaaagcaggata

SEQ ID NO: 31185 - DNA, 146 bp, Oryza sativa
  Clone ID: uC-osflM202089g09a1
ggacgcgcgcagaatgcattttatttaggcacgggccacaattaatacatgtataggggatacgtttcgtcggcagacactcacggtatagtaggggagtcgtgtgtacagggatatagtcatatctgcgcgttttttcatgccga

SEQ ID NO: 31186 - DNA, 220 bp, Oryza sativa
  Clone ID: uC-osflM202089g11a1
ggggcgcagggaaagaccattcgctcaatatcaatatttctgggcatttgggcttcaagcaaaggggaaacagaggggttcaagggtccatggaaattctatccgatttaaaggactccaaaaaaaggattagggatagcaaaattcagctcggctccagcagggttcaggacggccttggaaaccttggcccttgccaagaacaagaactcgtggcctt

SEQ ID NO: 31187 - DNA, 253 bp, Oryza sativa
  Clone ID: uC-osflM202089g12a1
cttgaataagaaggcctgaacctgtataaatcttttgtctccaaacccatacacttttccagcttgatagccacccccttttattattgccgaaatctagtttcgacatgtactatagaaacaagttttacatgtaatctattatatctttaaagtaatagaaaaaggagcctccacgttcgctcttacggcctagaaattcccacattaatccaagaaaataagaaaaaagaaaaatagaactagattagga

SEQ ID NO: 31188 - DNA, 266 bp, Oryza sativa
  Clone ID: uC-osflM202089h01a1
ggcatactacagacaaagcgtacataacaacatgaacgagttaacagagttcgatacaacaaattacaccctaggaggataagctcagatcacaatcagttcatagtccctgcctaaaatacgcctagcagttaacttcacaaataggtaccattggtacatgctgttgcttcacaaaagggggggaatcacggcgatcctatggtgcatccaccttgaccagcgcggtactcggcgcctccggggtagctggtgaatactgaagc

SEQ ID NO: 31189 - DNA, 270 bp, Oryza sativa
  Clone ID: uC-osflM202089h02a1
aacacatcaaacagtcgaaggagtccaatcacataggcagcaccatccgagcacagggggaggcaaagtggcctatccaactatcccactatcaaaagagaggactatgtgaaccgagaagaccgagcatgccacactgcagaacaaaacaagcacaacacacggcacattatacggtttagcaacagttacccgggaagccatccaaatgggatgacgatacaggctgaaagatcatgaaaaccactgagaaaagtgctggattatgaa

SEQ ID NO: 31190 - DNA, 264 bp, Oryza sativa
  Clone ID: uC-osflM202089h03a1
ttttttttcttggaacaaacaatagcactatattttatagcacctcaaatttgagcgttaatacattgtacaccatacaaccggttttttggtctcaaaatcccagcttagctagttctaatcctcagaaactgcagtaacagcagtatgcccctagtctgctaaacgaaaactcctttttgtctcgaactagatcttttcatgaactgatctaacatggacaaaccaacccagaatatgcaacaatggcactatctgaactgc

SEQ ID NO: 31191 - DNA, 260 bp, Oryza sativa
  Clone ID: uC-osflM202089h04a1
aaaattaaatgcgtggtccactccatagcacaaatttcatctggagtcaggcacagaaaataatcatatgggttttatttattgagcactccaatgtggggatcgatgagctgctttcagctatggaatgaattgcgtagctctccagctgtcaaagcagatgccatgttggatatgtaggtggttcttagttatctgtcttcgtcttggcctgcctgatcttcctgtccagattgtcgcacgaattgcccgcggatccg

SEQ ID NO: 31192 - DNA, 261 bp, Oryza sativa
  Clone ID: uC-osflM202089h05a1
agaacattagaacacagatgtgcataagcgtcagaaggtatttaattaattattagcaagccatattgtcactgagccacatactagagtaccaaatcatagaggaaggatgggagcagcaactgagcaaagctccatcctgcttagatacattcgagaggctttttttaggcttttaaccagccaagcgcaagcacttcagttaaagcctaaacagagttccagcatgatcagatcatgcgcattacttccacttcttga

SEQ ID NO: 31193 - DNA, 260 bp, Oryza sativa
  Clone ID: uC-osflM202089h06a1
aaaaattgtagctttattcactccatcatttattcgtacgatgattctatatgatctatatatatagtatactaatattatcgaaatttatatataaaaggcagcaggtaggtgcaaatggggccgggatcgaggatgaatggtaatggcggtactactgcgggttgggcggcctggagttggcggcggagactctggagccccattcgaggagctccttgctggtgtcgtccttgtgcgccaccacctcgatgaagcag

SEQ ID NO: 31194 - DNA, 266 bp, Oryza sativa
  Clone ID: uC-osflM202089h07a1
aatgaaccaataaaacttatttcagtctcagtccaaggagattaatacataagtaccataagacagatgagattaagtcaagtttacaacacataagctgagtcagattctgctgactctagatgatatcagggccaagatatcagctctcaaccatgatcaagaaccagggtccaggaagagcacatgccacggacttcagcgatgagggtaaaagtagccagtccagattagggcagcctgcggcgattagatcagtgcaatga

SEQ ID NO: 31195 - DNA, 266 bp, Oryza sativa
  Clone ID: uC-osflM202089h08a1
gagatcaatgaaatatccttgctcatcctgcagccttaattatatatattacatatggtacatacactgggaagaaaaataaaaaaaaataactccttgattaattcccccatttggttcacgcacaccacccaacccaaaagcggccacgaacacaacaagatacattttgctactgctcctccgacctccaatcgttcgatccgagcccatgcacgcgcccgatcgatgcaacagctagcgatcaaacacgaagcgcgcatgca

SEQ ID NO: 31196 - DNA, 225 bp, Oryza sativa
  Clone ID: uC-osflM202089h09a1
atataaagggaagactcgtcttcctgaatggccttttttcccctaaaaatgtacagcaaattttggagtttctattgggacactggctccatatgctagaaaatggggcataaattgacacaaaaaattagggaacattacaggtacaacacaatggggcataccttcacagggaaagaaattacatacatatgggtgcatacgattttctgcacaagtatgtgt

SEQ ID NO: 31197 - DNA, 261 bp, Oryza sativa
  Clone ID: uC-osflM202089h10a1
cacgcacaacgaatattattaactgatgcagggaaactgttttaatgagaatagtacattgttcctctggagggagggatacactcatacacagtgcatgctatgtgatactaacacaaatgataaactgccatgagtactattgttgaaactttaaatggaaaaacaatccctcatgataaataacctcaaaacagtatctgttattgttacatgactcaacagtagagggttacatggatcacggatggaccgacactt

SEQ ID NO: 31198 - DNA, 215 bp, Oryza sativa
  unsure (1)..(215): unsure at all n locations
  Clone ID: uC-osflM202089h11a1
ataaaaaatggtgctacaaaagtaaacactaaaaaaacacattgtaacacttgaataggcggcacatgcacatttagccatcaaggagaaattaccacaaaaaagaatcaacaacaggtccataacaaaaccagaggaccgctcttgaaggggcacttctttattgccggggccaacagatcccaaggaaagcacattntctcactaagaaaaac

SEQ ID NO: 31199 - DNA, 260 bp, Oryza sativa
  Clone ID: uC-osflM202089h12a1
gatcatcaagcaattccattccatatttggtccaaacaattacgcccaaacaagacattgaagatcccaatgagtatcttgacaattcgtcggaagtattcggtcttttgtttttgcgaggaagaaattcattctggcgtcatgcatgcatggatcgatgagaggtgatgcactttgcagcatctggtgtttgatcaataatcacaaaataggaacccgcaaccacgaatctgcatgattaaataaggccctgtgttttt

SEQ ID NO: 31200 - DNA, 263 bp, Oryza sativa
  Clone ID: uC-osflM202090a01a1
catgcagcgcgtcagcgcagagcttgggtgcctctagagctgtgcgccgctcttttttttttttttttggggattgaaacatactccattaatagtattgcagtattatagagccttgaacaacaatacaattggtaatatatataagaatgaactggatattgagggggatctgtgccagcagcattggtggagaacctgagtgcattccttttatcaatctgatatttgttaacattcaccaactcatgattcaagaaaaa

SEQ ID NO: 31201 - DNA, 173 bp, Oryza sativa
  Clone ID: uC-osflM202090a02a1
gcttagagctaacccttcattcaattcaagagccattggaacataccaggtgatcgagccgccccagtttccaactttctgccatctttttttttcctagggatgtgtccttctctcaatatgcactaatgataggaacattaccattcggctactctctcctctcctctctc

SEQ ID NO: 31202 - DNA, 263 bp, Oryza sativa
  unsure (1)..(263): unsure at all n locations
  Clone ID: uC-osflM202090a03a1
aattaactagcatatttaaatttaaaacgtaactgtttgagcaaataccacgaaatgttcaggcgctaagatacggcaataccgatacatccagcatagcaaaaatggcgaagagcacagagtcagataaaggctatagcagaactagggcttccacggagatggggcgccgaatggactaaccatgngcgctttagttcgaccctccttccattcttgctcttcgccggcgtcgttccttcccagcggccggccatgttcgg

SEQ ID NO: 31203 - DNA, 279 bp, Oryza sativa
  Clone ID: uC-osflM202090a04a1
atgggatgtttttattcccacgcaaaaccaacaggtagatgctagatagatacataacatagccggtgttgacagtattatgttaaacaaaaccattctccgacagcaaccaaaccacacactaagcttcttcgctgctcacttcttcaatcacttgcttgggaagcagcttttattttcgatccataccacacttcgcaaaggatcaaaattatttattcaaaacatattttttggggggcccattaggcattgattgaccgattttagtttgttaag

SEQ ID NO: 31204 - DNA, 171 bp, Oryza sativa
  unsure (1)..(171): unsure at all n locations
  Clone ID: uC-osflM202090a05a1
aaagaagattattcataatactgtcttggggagattaagcatacactcctaaatattacaagctctcactttattatatgggctacaaacttacaataaacataaaaccctattgtcgatctcagcatattctgaacctttagaacaggcaagacgnggcataccaaatta

SEQ ID NO: 31205 - DNA, 192 bp, Oryza sativa
  Clone ID: uC-osflM202090a06a1
aggtgtacgcgcgcagcatgcattttatttaggcacggttcacaattcatacatgtatagtggatacgtctcgtcggcagacactcacggtatagtaggggagtcgtgtgtacagggatataggtcatattttgcggcgtttttttcattgccgaatcgttgactttcgtttcacaggggtcagggttcggg

SEQ ID NO: 31206 - DNA, 389 bp, Oryza sativa
  Clone ID: uC-osflM202090a07a1
gccagaggaatcacattcacatcaatgctttaatattgaattgaaaccgtaaaatgttgggatatacatggatactaattgctcaaaccaaggaattctgtgaagcttggataccttcggttgccaccccaagtctcagccacggagtttgtggaatatctccataccttcttcccataagaggaccactcagtccccctggtgaagacctctgaaactttcgtgatcaagatttcccactttctatataacaagggtccatatatattctgtgcctagaatagagaggctgattgttcacaaaccaaacaaaaacacggagccacgttagtctccttttcataatggcaattgcaagagaagcagcatcttcatagtgtatcagattg

SEQ ID NO: 31207 - DNA, 373 bp, Oryza sativa
  Clone ID: uC-osflM202090a09a1
ggcacataaaaaataccgctgtttccattagaatttctgaatgccatacatgtgtgattggttgggctaaccatatcacaatttaatcaatgtcgtcagttagcccttccaaaagtaactgaaaagattgtttgtacaattgcacatctcaaaattgctttcttttcctgtaaatggacgcttaatgacaaatcgatcgtgtataacttccatcaaaagacgaatctatgaaatttcaaaatgggaaagtccctgttaaccggatatgctcaagggtgcgctttagaccatactgaagaacagctcggttgccagctctaaaaccatcgccataggccattgaggtatctgactcaatttggtgcttgaaaaa

SEQ ID NO: 31208 - DNA, 298 bp, Oryza sativa
  Clone ID: uC-osflM202090a10a1
catgactgccaccgcctgacggacgcgttggcaccctatatatcgcgcgccctttttttttttttttaaaaaacttactagaaatgttataattaattgttataatattatggtgccggcgactgattatcagtcgataattaactgccaaaacctttttttcatgttacacagggtgcagaaacactgtaacagtttgtgtagacaaatacgtagatgataacttaagtactacatagatatggctacacggtacaaagtactagaactttttctcctctgaaggaaaggtggacca

SEQ ID NO: 31209 - DNA, 129 bp, Oryza sativa
  Clone ID: uC-osflM202090a11a1
gggtgtactcgcgcaagccggcaccaccattggcacggctcacaaattacacgtgtggactcgctgccttacatgccaagggacgtaccggatacacggggacacaagtgaaccgcggacaaggacagg

SEQ ID NO: 31210 - DNA, 160 bp, Oryza sativa
  Clone ID: uC-osflM202090a12a1
gcacagcaaaatgggaagatatgaacaatcatggccaacgaggggctaacaacagtttagcacagtacaaaaagtaaacacacataacaggaatatgcaatgcaacggaaccggagtatactgacaaaccaatcattaaccagaagaactactttattaa

SEQ ID NO: 31211 - DNA, 372 bp, Oryza sativa
  Clone ID: uC-osflM202090b01a1
gggtcgatcgccatttttttttatcttgagctacagagcttacacaaatttatccgggggactaggctgctggttaatccaagggagggggaaactatcctactactgctctacttatggctgggtggttggctacgtcgatgaatatttacatcagagagttgggaggagttgagaggggcaatggcaataatgataaatcttggccctaaatctttctgccaagagaagaaaaaggaacaaaaggataaacaataggcagtctacatttcatactagctaaagccatagggttggcattgcatcagccatcagataagcaaaagggggggcaggggtgatcaccaacacatcagggggtttacttgactg

SEQ ID NO: 31212 - DNA, 142 bp, Oryza sativa
  Clone ID: uC-osflM202090b02a1
ggctggaaatggatatattccccaagcgtgacaacaacttttgagtgccagtgtgtgtgtgttcccctcccctccctgcttaattacatcatctctaacgtaaatgattctgtgattcttcaacggcgaggaaaatatgacg

SEQ ID NO: 31213 - DNA, 153 bp, Oryza sativa
  Clone ID: uC-osflM202090b03a1
aaaacgcaacactacacaaacacgtcaataaataatcactttaagttacttacaatttccacactttctcagacagcaattgcatcgaaatgcacacacgacgcggtgacccagagggcaaatattcttgacacacctttgataaccaggata

SEQ ID NO: 31214 - DNA, 161 bp, Oryza sativa
  Clone ID: uC-osflM202090b04a1
ggatcaaatatactgtaaccactttatttgtcacactggtgttcgtaaggttcgggtgaagtgaaaacaaaacagtgagcagaaccaaaatcgtcactgcttagctccgagctgaacgctggctgggtctaactgaaggcaacttgacacagctgaccgaa

SEQ ID NO: 31215 - DNA, 109 bp, Oryza sativa
  Clone ID: uC-osflM202090b05a1
tcgctatctatttttttggggaaaatgaagagttggtgtcatttcatttcaatttgcaacctaaatgaaacagcgttatattgcacgaaaaaaaaagggtacaacagaa

SEQ ID NO: 31216 - DNA, 199 bp, Oryza sativa
  Clone ID: uC-osflM202090b06a1
gaaaatatcaaactgtcctgcattgaaatgcaagtattatatgatttgtgatagaattggacaaattgacatgacaaacttttcttataaaagaaatgttacacgaccaaattccatccagctatgagtagttcaccagtatggcaaagaaaccaaacacaaaagccaatgagttgccagtgttaccattacattaaaa

SEQ ID NO: 31217 - DNA, 430 bp, Oryza sativa
  unsure (1)..(430): unsure at all n locations
  Clone ID: uC-osflM202090b07a1
agggaattgaaatggttcagcgatgatgtccgaagtcaaggtgcataaaaccattaaggtacagctaattgatcattacaatcagtcttaaaacggaccaactcgcaaattaaaaaaaaacatttatacctctaacgagaacaatngtgtttcaaatcaaatcgtcagtaaactaaagataccaaaccagcacgagggtaaatcaccaatcccactgtttggcggttttaagcaccactatagagctgtttaccatgcttnnctcccagaataccttctatgccannggtgatnntcaatcattttaccgaaattcttcaaaacttcccaattacaagttgacctgggacctaagttcacctaataccggttgcacgctccatgacctgcctgctaatccgacagttcagcaatagttcccgtttctttt

SEQ ID NO: 31218 - DNA, 209 bp, Oryza sativa
  Clone ID: uC-osflM202090b10a1
gaagaaagaagcattcggattagcacattccaatttgcaacctaaatgaaacagtactaataatcaagcaaaaaaaagggaagtgagaaaccaaatgggatggatggatggagtactgactcggtctggcggcatcttgttcgaagcaaatggggcgttcgtagcacaccccggcggcgctcggctgaaagtgggaccgaccgccgggg

SEQ ID NO: 31219 - DNA, 95 bp, Oryza sativa
  Clone ID: uC-osflM202090b11a1
tttttttgataattttaaatttttttgttttttaatttatttattatattatttttgatataattgttcaaatagaaaaaacaaacgtcaattag

SEQ ID NO: 31220 - DNA, 203 bp, Oryza sativa
  Clone ID: uC-osflM202090b12a1
aaaaataattatgtcttatattttgagatagagggagtaactcataaatattggctctggtctaatcggctccaactctccatgatatcttctagacatatcaccaaaataaaatgtatatattacaacatacatttcttgcatgaacttatatgtcagtgaatggaaaagctagaaccaaatcaattctaacattttgaatg

SEQ ID NO: 31221 - DNA, 112 bp, Oryza sativa
  Clone ID: uC-osflM202090c01a1
aaaaaatggtttttctgcactgaaaggaagcattggctcaactcaagaaaaaagcaggaacagactaaagagaagcttatatgggcacctaaaaccccaagggagaaaaaca

SEQ ID NO: 31222 - DNA, 434 bp, Oryza sativa
  unsure (1)..(434): unsure at all n locations
  Clone ID: uC-osflM202090c02a1
gacacaaacatggtacaacgctttattatatgacaggtataccagagtctcagaacaatacttgcagccaaaatgtttgcattgctcaattatttttatgacagatttctgtaaggttcaagcgacagaaaaacgaggcgctgaaatatactttagagggccggttggtacagttccaaggcaatatcctttcaagctttcgccgcctttcaggggcttgacgggctgtcccgacagctgcacacgagccttcgngccatccttccattcttccaggttcccattttctgtagtagccttggaggtatttcattcctttagcagaacctgttcgaggcccaagaaatggtcctgcaatggcttaccactggatgctccttgccaacctgaaagagagggcaagccagtgattcagttgcccatgagattttcag

SEQ ID NO: 31223 - DNA, 77 bp, Oryza sativa
  Clone ID: uC-osflM202090c03a1
aaacgcaaaagccacggctattggaagcccaccaagaactttatataaaggggaccactaaaaacaagggtgaaaaa

SEQ ID NO: 31224 - DNA, 290 bp, Oryza sativa
  Clone ID: uC-osflM202090c05a1
ctcacgcaaaatcagagaatgaatttagcagaaaatattgtgggcaaaaacaaatgaccccattgtcacagggccagttcgatgggagagcagacgccattatagtgctggcgtgtatatgcatccacaattccttagcttcagaaattttattagatttatttccgtttaagaaaatattttcttctggaataataatatgttgccatggccatggcaagccattgccagccaaacacattataatagttattattaattattattatatattatattatatattatta

SEQ ID NO: 31225 - DNA, 182 bp, Oryza sativa
  Clone ID: uC-osflM202090c06a1
aatggcactgaatcatttttatttcctcatcctttttattcattcctcccagagagacggatccatggaagttttcttgccctcatcaggcaagcagagcacacaccacacggtggcagtggcaagttgctatgacacagagagcgcttaatcagacatctcagagcctataaaccaaacaa

SEQ ID NO: 31226 - DNA, 84 bp, Oryza sativa
  Clone ID: uC-osflM202090c07a1
agagaccggccgggcactttactctataaatcaaggaacaaggcatacataacaaaaaaaagggggttcaaaaaggttaaaaca

SEQ ID NO: 31227 - DNA, 429 bp, Oryza sativa
  unsure (1)..(429): unsure at all n locations
  Clone ID: uC-osflM202090c08a1
gatagaggagatcaaactgtgtttatagactgaactgaaacttgattatacagtttgccacgactcctaactcaagcccctatgacgtggatacatatgtacaaaagttttgacacctgagcaaaatgagtcttagtttccctacataggatacgcttagcttagtnagctaatctcaatgtcactggagtgtttgcccaagaaaggggcgtccaacttttgacatatnngtcaccatcgaggacaacgaacttctgatcgcacgatcgggcgctctcttggcacccccactgagtcgtcagccatggcacagccaaggaatctgagcctgacgccgttcgcccgcaagatgaagcctccgactgcccagcgccggccgagaggcattccgccctgcggccggcgtcccatctttctcccacaggtacg

SEQ ID NO: 31228 - DNA, 415 bp, Oryza sativa
  unsure (1)..(415): unsure at all n locations
  Clone ID: uC-osflM202090c09a1
aaagggtgaaagctaatatcacaaaattataatctcccttataatatttacagaacttacacaccagttttatagcttcacgttattccttaagcaccattaaggtgtttgactaaanctttgagcaaacttactaagagagacacattgtcaaatcctttttttttcttgaaaccctaatgttaccatcaatatttgttctttcaaaaaatgctttgtcgaagcaaaaccacgttttgacacccacgcaaccaaattctgtttgcattcaaatacgattgacactagcccacgttagccacccatttttttcagcctaccgaccattctccaacngacagaaacngatangccacccaacgccttcaatggttgaaaggcctaaaaaatccacctttcagcccctagcctccct

SEQ ID NO: 31229 - DNA, 72 bp, Oryza sativa
  Clone ID: uC-osflM202090c10a1
gtgggtatattttttcccaacaatggccaccggggcggcaaaaaggcagagcggactataacagggtgcccc

SEQ ID NO: 31230 - DNA, 215 bp, Oryza sativa
  Clone ID: uC-osflM202090c11a1
gcatgcagcgcgcacgcgagcgcggggcccctatattgggcgccccctttttttttttttttttaatggaacgggagaaagcttatatcccaaaactataaattcccttctaccatagagacggcttccacaccggttttatggcttcacgaggtacgttaagcacccttacagcggttgactaaggctggggccaatactactagaagagtaca

SEQ ID NO: 31231 - DNA, 166 bp, Oryza sativa
  Clone ID: uC-osflM202090c12a1
ggaaatatgagttgccttgattgtattttaccaacaatagttaggttgtaaaactacagcatcaggatccgagctattgtttctatgtatctcgaggactatacctcacccgagaaatatatcagaagatggtatatgacctagacagtctcatcatatagttccc

SEQ ID NO: 31232 - DNA, 228 bp, Oryza sativa
  unsure (1)..(228): unsure at all n locations
  Clone ID: uC-osflM202090d01a1
gggcaaaaagatttgagaacttgtattatactcatggaagaggcatctgaatttctcatgtactatacaacctgtcactcctgtgtatgaaatggcagagggtccatccatccacaatagaaaaagngaatgggtagccctttgcgccgtataaccagaatgctaattcttccattatgtaccattaccgaatttttgccttttttcttttttttcaccttttaccaa

SEQ ID NO: 31233 - DNA, 60 bp, Oryza sativa
  Clone ID: uC-osflM202090d03a1
aaatcgaatggccagaggtgagtttgttccatatatagacggttaaataaggtgggttgt

SEQ ID NO: 31234 - DNA, 117 bp, Oryza sativa
  Clone ID: uC-osflM202090d08a1
ctgctgcaaaaggttacatgccgtttctcttgataaaacagaccatttagtctcataacaggcatggatgttcccaagtataaaagctcttcagcaacaaaacgcgtcagtttcagt

SEQ ID NO: 31235 - DNA, 280 bp, Oryza sativa
  unsure (1)..(280): unsure at all n locations
  Clone ID: uC-osflM202090d09a1
gacaacgacgacgacggttttatttaggcgtcagagcaaaaggcaaggcctgcctacatataagctgggtactaatgcaagcaaattaaggcctcgatcaaagcctctgattcgacagtangcagccattccattaccgataaaatccttcaatgcnnagccgggcgactgaccgaccgattaggattcagtctgccaggcagccagccagcgagccagccccgcggccagcctgggtgcccaacactttttgcaggttgtttggcaagcccgcagcccg

SEQ ID NO: 31236 - DNA, 107 bp, Oryza sativa
  Clone ID: uC-osflM202090d10a1
aaaaaggattccaatgagcctttatgtaaatggttgatttctattaggtaaccgttcagcaaactgtcggtttgggcagccagagagtttcagccaaaggggcccag

SEQ ID NO: 31237 - DNA, 124 bp, Oryza sativa
  Clone ID: uC-osflM202090d11a1
gcgatctagaacttttttttttttttttttttttgcccaaaaagagaatgtccaagagttttatctttgccgaaagacgaatacaaatctttttaccactgccgcctcatgtcagcttgacaaa

SEQ ID NO: 31238 - DNA, 345 bp, Oryza sativa
  Clone ID: uC-osflM202090d12a1
gccacaagccaaaataaagacataggaattagcaatgtaaatacccgcattccacaacagccgaagggcaataatcaggctcagaacaagtttaaaccgaacagaaaatagagggttttaaacgacacagtgcacacagggggcatatgaaaataacggccaaagcaacgggggccatggccgggcacaaaactaccacttgaacgaggatcatttcttcttggcggcagccttggtcaccttggcaccggggggggcctttttctccacgttcttgatgacgccaacagccaccggttgcctcatgtcacgcacgggaaaacgaccaagaggggggtactcaaa

SEQ ID NO: 31239 - DNA, 417 bp, Oryza sativa
  Clone ID: uC-osflM202090e01a1
gccaccagtaaacctgaggcttctattgattgatgtgttcaaacataaatacaagttatagtcatctgtgtagaattggcacacaggtcccaattgttgcgcacctaatagttgtggatataaaatgcaaagttcgacatttcgacctgagggagcctactatacactttccaaacagtaattagataccatttttaaaaatcaagaacaattatttgtgtacctaaacactttgacgtttgccatggaaaaccaaatatatttggaatttctcattaaaccagaaggcgccagttattttttgaaaggatactaaactgtcaagcctttaagagaatttgggccatgagccaattagaaataccgtggaacattaaagcttctagtcttttctttggacactaattggtggataaa

SEQ ID NO: 31240 - DNA, 108 bp, Oryza sativa
  Clone ID: uC-osflM202090e04a1
attgaatatgcaatatcgatggaaaacctgcattctacttaatgttgcataccaccggtctatgccccccaaaaacaaacttgaataaaaaaggaaaaaaaaattcca

SEQ ID NO: 31241 - DNA, 348 bp, Oryza sativa
  Clone ID: uC-osflM202090e05a1
gggactgaagattatcagctcataatctgacaaccaaccgagttattcgctgcacacatatacagtgactagctgagtgcccgtgcgttacaacggagaaaataattcacacctaactacgactcaatatataaatgatgcaaaaattgtgaaaaactgcaaaagcagaaagggaaccagcttacgccctagaatctctttatttctaaccatgaaccattagaacgagcagaggaggaacccatgccatgataccttagctgttttctgaattttttattcaggagttccaccgaatttccgttagcaattttgggcttgtcgaatcaattgcagcttttcctgaat

SEQ ID NO: 31242 - DNA, 134 bp, Oryza sativa
  Clone ID: uC-osflM202090e07a1
ggccgtaaatggcatcctgggaagcatcaagagaaaaccaaaatacgtctgttccaacaaatatatatacagataccctatccaaactcggaagcctctttgggctactttttccttaaacactaccaggacac

SEQ ID NO: 31243 - DNA, 428 bp, Oryza sativa
  unsure (1)..(428): unsure at all n locations
  Clone ID: uC-osflM202090e08a1
aaacagaaataatgtaaactgaattatcaaattattggattgacaaacgtagaacggtgtcatcactcatcacgggatggttacaaaaccttttgtgttcttgagtaaactagctgattgctatgtacaaatccctgtaaccacanannaagcaaatagcacgaaagcaaaaaaacaaaggatcattgccgggccagttgggcatacactgttttgtttcaagccagaaataacccaaactttaacgaactttccatttggccattctctttgctatgatattcgattattggcccttttctttttcattttcttttctgttttttccatttctttggagacaggccatttgcgccttactgaactattacccccaaattgcctcgtccggggctaccgtggggacaacccttttaagaggagaaaag

SEQ ID NO: 31244 - DNA, 371 bp, Oryza sativa
  Clone ID: uC-osflM202090e09a1
gttatcagaagttcacttatcagtacgagaattcgaacagagactggtccgagatattcttgccaagctaaaatagacgggcgccatctcaggccttggaaaacataaacatgttatgtagcatgcatatatacacacatcgccggataaatacgctagttaaaagctacggtcttcttctctcggcgtatgcgtccacctcgtcattaggaacgtgacaacaacacgtttaggccgacttcgcgaagccaaccctcatcttgccgtagtccgaacacggtatggtaggcacccatgaaaacgtcacccaggatccagagaggaccacggggaggaggggatgtccatggctgtgaatcccctgatgcact

SEQ ID NO: 31245 - DNA, 72 bp, Oryza sativa
  Clone ID: uC-osflM202090e10a1
aaaacggaaaacgccgagcaaaattcactatagttgtgaagatgtccacagagaaaaaagacccaaccgaat

SEQ ID NO: 31246 - DNA, 186 bp, Oryza sativa
  Clone ID: uC-osflM202090e11a1
gggcataactgtatttcatatacacatggacccctttaattaatgggactcaaattataaatctaatctcctcacgcacatgcgaaccacacgtactactctaacaagaaaatccagtgcagcaatgataacaaaagaggacagagaggtatatagacaccacctgtacagttcagtcacaggagg

SEQ ID NO: 31247 - DNA, 65 bp, Oryza sativa
  Clone ID: uC-osflM202090e12a1
tttttgtgggttattttttttatttgtgttatttttgccacaagccaaaataaagacataggaat

SEQ ID NO: 31248 - DNA, 412 bp, Oryza sativa
  unsure (1)..(412): unsure at all n locations
  Clone ID: uC-osflM202090f01a1
ttcgcgccttctttttttttttttcggcacggcctcgcagaatcggcttgcattggactaaccaaataaccatactggaaagacaaaaaagataaaaaaaaaagagagggtaaaaacgagtttaagctacgggatgcagctcactaacatccagaatttacagagttcgttctggaagagtgagacctaaagactgctaacccttctctactacacaaagntcaccattctgtgctagtccactaggccaatggtcacggccaagtaggacaaaaaagagtggcaggattagagcacaagcaggatgttggcagctttaagcgcaccctgagcatcagtcagacgggctaggtcccttcccgagcaatccatcgtctgctggaggagctggagtgtcttgaagagtctcttg

SEQ ID NO: 31249 - DNA, 375 bp, Oryza sativa
  unsure (1)..(375): unsure at all n locations
  Clone ID: uC-osflM202090f02a1
gaaaaaaactagaggtccctccaatataaaccatctagtatttctttattttaactacataattacaaaaggttgatgtagatctgacacctcctttctgtttcatatctcgtatttacaatggaatttttccctacaacctacaaaaatttcacgattctgtgaataccttctttgggtggtacttggctttcccaccttgtggcagaaagcctcctttctgcaaatcctgttattgaatctttttttgttttaactattacctgatctttacacaaggngaaaagattaacctttctgacttcaccaccatggcgatgcagtcttccaggaaagcagaagggaagaactccgaggctccgagctgtctgcgcc

SEQ ID NO: 31250 - DNA, 85 bp, Oryza sativa
  Clone ID: uC-osflM202090f03a1
tttttttttttttttttttttttttttttttttttttttttattttaaatgattaaatttttttttaaaatattatcaatattac

SEQ ID NO: 31251 - DNA, 413 bp, Oryza sativa
  unsure (1)..(413): unsure at all n locations
  Clone ID: uC-osflM202090f05a1
ataggggcaggaaagccttctttttgtatttttattgctgcaactttcgttgcaaacttcagaaatacactcgccagcatttgacggctgattacatatacgcttacaggcttacagctatatttctacatacataagccaaagtggcaatcccatattccagcatctaccaataccttgcagaattgcaaacccttcttccatgaatatcctgatccaattttagctgtnatttcgcgcggcacaacgtactttaacctgtggctngcttttacttttgctgactagtcttggttgtcaaagacaatacatctttgccagtcattgagggcgcccacccgactgctgataatctgtccctgagcccgccgaacgaagagtgcgcccatagatcacgagcagtgaccgcgacc

SEQ ID NO: 31252 - DNA, 194 bp, Oryza sativa
  unsure (1)..(194): unsure at all n locations
  Clone ID: uC-osflM202090f07a1
gagcttgttaggaaaaaaacagttcagtagtataaatggtacgaatgttcagtacaattgtgtcccgttaacatacatcgattttgccaaaagaacaaagggaactttgtatagtcatgagtgtattttgtatagnggttcggaaggtccttgccaatccgaatgtttttgctccaaaaattgttggtggttaa

SEQ ID NO: 31253 - DNA, 132 bp, Oryza sativa
  Clone ID: uC-osflM202090f09a1
aggaaaacaaaggatgaaacggagtgatgcaatgtaacggggaagggaaacagattacaaatcggagcaccaaacatagcaacgatttcaacgaatggtaccactcaccaaacccaaaatccaagagctaaa

SEQ ID NO: 31254 - DNA, 185 bp, Oryza sativa
  Clone ID: uC-osflM202090f10a1
tttttattgtgtcattaaagccttttttttgtatttttattgctgcaactttcgttgcaaacttcagaaatacactcgccagcattagacggctgattacatatacgcttacaggccttacagccttattttctacataccataaccacaatggacatcccaattttccagcctctaaccaaatc

SEQ ID NO: 31255 - DNA, 124 bp, Oryza sativa
  Clone ID: uC-osflM202090f11a1
tttttatggtgttattaaagcccagataatgtaccataattgctgcaactgtcgatgcaaactgcagaaatacactcgcccgcaatagacggcctgcaacatatacgctgtacaggccttacag

SEQ ID NO: 31256 - DNA, 70 bp, Oryza sativa
  Clone ID: uC-osflM202090f12a1
ccacaaaaaaactgggggaattcaattgggggaaggggttcccgaccataaggccataagggttaaatta

SEQ ID NO: 31257 - DNA, 365 bp, Oryza sativa
  unsure (1)..(365): unsure at all n locations
  Clone ID: uC-osflM202090g01a1
aaccaaaaatttgaatcgttttattttgtgacggaagattccatccagtacatctcacaagtaccttgttccagaccaaatacatatatattagcataaagcaaaagagggttgcgttttccagcgcacttcaaagtgccagcttcactcgttgctgggtatctccgcgcctccagctttacaacgngaangctaagtgtatattccacccggtggatacgttatcttaatccctttattatgtgcattaataattagcgttccatacttgatgagtcttcgttcttggatgcataatcgttatttttaggagacagggccttagccagtaattgcccccaatatttccttttgcataactgagc

SEQ ID NO: 31258 - DNA, 187 bp, Oryza sativa
  unsure (1)..(187): unsure at all n locations
  Clone ID: uC-osflM202090g02a1
attgcaaaaacatcatcttcttcttcatcttcttagtgtacacaacaccaactcgatcatcatctcgtcgcactaaacccatcttccccaacccaaagacaacgaactcgctggccacaaantccatccaaccacaatttaacccacttgcttaagctacggttccccccactttcacttgcccggg

SEQ ID NO: 31259 - DNA, 417 bp, Oryza sativa
  unsure (1)..(417): unsure at all n locations
  Clone ID: uC-osflM202090g03a1
atctaatgggaatacattgcaacatccgatagaccgatatgtaacataggtgctttgtgtctttgtattgtcagatgaaaatctgctctacaacattaatacaacttatttgcttccactatatacgtaaaaatcacgaggaaaaaaatagcttacggatgtccatacgaagggaacacaaaaaggggcacacaaaatgcttagtatgcgtcagttaaaacctgcgatggcaatggaggacctcggacccccattttgatttttgatcggtgcacaagggaatgaacccagcaatgacttttatcatattacantcccaaaaaaattgtcacttcagcccgttcgccccatcggatatgataatatattccacaatttcaccaagggttcatccccaccagtcttggaatttttaat

SEQ ID NO: 31260 - DNA, 98 bp, Oryza sativa
  Clone ID: uC-osflM202090g04a1
tgttttgcgcagcgcgagctctttttctgtggtctcgcggagggcggcgggatgaacgtgtccgacgtgtcccggagcggccgggaggcggccagcgg

SEQ ID NO: 31261 - DNA, 180 bp, Oryza sativa
  Clone ID: uC-osflM202090g06a1
gggtaataataataataatattattaatgccattttatgaacattgcacaagctgctgcagcagcatcaaccaaccaacaaaccaaactataaacttcctctggtccatttctgcctccattttcatggacagccaacagtcatatcctctgcatatttttttttcacccggtttgtgtg

SEQ ID NO: 31262 - DNA, 118 bp, Oryza sativa
  Clone ID: uC-osflM202090g09a1
gtggtatccatttttatgggccggaccgaacacagagtgcatggtaggaggggggaaaacaaaagtacccctggacaggggcgggtaaaatcatagcacacagggaagagaagtggac

SEQ ID NO: 31263 - DNA, 175 bp, Oryza sativa
  Clone ID: uC-osflM202090g10a1
gaacgaaatgaaatggggtttgaattatttttcttttctttttccccactttgttcattcattcagtagtgctgccgacgtcatggatcttcaccacttttttctccgtttgttccaaagacctacgtgcgaaatatctctgcaatatagtacatcagtggctaccactgaagta

SEQ ID NO: 31264 - DNA, 188 bp, Oryza sativa
  Clone ID: uC-osflM202090g11a1
gaacaacgggaaacgaagatcttgatccaacttatattaaatcataatgttgcatgattaacatgatcaatcaacaacataggttgaggttagtgataatacacaaaaataaataaaggaacaagtgagggctatgattagctctataactaaagggatgtcctgggcagtagtagtatggttatggt

SEQ ID NO: 31265 - DNA, 133 bp, Oryza sativa
  Clone ID: uC-osflM202090g12a1
gaatgctcaaaaccataccatttcagcaaccgggaaagacaatttggtttggaggttcttaaaaggcgccttaaataaggtaaacagttcgcattacagcttagcagctaaacagtgagtttcgccgaatttg

SEQ ID NO: 31266 - DNA, 336 bp, Oryza sativa
  Clone ID: uC-osflM202090h01a1
gccagttgataagtatcacgtgacataatattatatatttacgcagtgaagccaaacataggcgtctaaaagacaatccatttccattaagcaaaaaaaagagacttgtgttaactattgttgggttcatcgagaactgatatttcaacgtacatatatacaacagccagatttcattattttgatcaccttcataatttatatataccaacgtaccaagcacccaatggaattatggaaaccagtgcaatgctttctatggcagttgtcgtatgaggtgaccactgaatcgccggtatcttacatgacctcgtcttcttggacgtagaggccacc

SEQ ID NO: 31267 - DNA, 83 bp, Oryza sativa
  Clone ID: uC-osflM202090h02a1
ctcagttatttatcaccattcaataatcggcaataagcggagaaccctgaaaccccaggcttacaggggggggtaaacctgcc

SEQ ID NO: 31268 - DNA, 402 bp, Oryza sativa
  Clone ID: uC-osflM202090h03a1
gcccgccggcgtgtccatcagccagcgcgggttcctgatccggcatccggctatcctggagaggtatgtccggcaatgctccggccacgagtagagctggatgttgcgcaggccgttcttccggcactcctgccacaggatcttgtccgccaccagcttcagcagcgcgtcggcaatggcgtgctggtcatgcgggtctaccagcagtccattgttcagagcatttttaatgtcaaccggaccgccgttcttggtggcgacgatcgggagaccgcgagccgcagcctcgatcagggtgagaccgaaaggctcaacaagagcaggattgatgaagacgcccttcatcttccctgtgaggcgataaatcttcggtacgactgactgcttgtgatgcttggggaa

SEQ ID NO: 31269 - DNA, 416 bp, Oryza sativa
  unsure (1)..(416): unsure at all n locations
  Clone ID: uC-osflM202090h04a1
gcagtaataatatccaggtaaacgtctccaaaatggtacagcgccggtacaccggcaaggccagcacactcaccactaccaggtcaagcccggtatcgagaggcactcattcatttcatatattgtactagatgaaagcaacaagcccaatcacatnagtgtcaaagtctatttcacagaacaccgacactaaacaccttccttgcaaggctcataatttgtacaaggcacggaacggtacttaattccccgaacaccacctaatatagtcttcatccgcagaacagaacagcctacaagtcgtactagagcttttctgcttagctgtccctttcgacggacaaaagctgcctgctcgctgaacaccctgatgggtttccattctacattaaccttggtataaagctgctgcttct

SEQ ID NO: 31270 - DNA, 112 bp, Oryza sativa
  Clone ID: uC-osflM202090h05a1
actgacaaatcatgtttatttatgtaaccctgggtaggagaattttcaataagttacacaagaaaatccgacaaatataagggacacctgtgtaaaacaacatgcgaggaaa

SEQ ID NO: 31271 - DNA, 429 bp, Oryza sativa
  Clone ID: uC-osflM202090h06a1
aagaacacttgttgatttcgcaatcagttgcgagttgcaactgggtacattttccggacgaacatccgtcgaccgctttacgaacacagggtttaacaccagcgagcacgttaattacgtacccctaatgaatactttagagcccacttagtgctcttgtttttggcttgcacctggggttcccccaaatctacaagttacctagcccacttaaattttaaccctgtgcccccaaataccaaccgacttaatttagatttaagacgagcgttcgaaattagttgaatgcctatttatctgggcacgcattttgtattggatctaaatcttctccaaaagaagggtagtaagagcccctaagagctggccccgtaggaagtgggccgagggtaggccgaggcgcctccgacgagccggcgcgtttgatgt

SEQ ID NO: 31272 - DNA, 104 bp, Oryza sativa
  Clone ID: uC-osflM202090h07a1
ggaccaaacaggaaaacaaaacgggattaccttttaaaccttaagttttgccaggttttaaacctacaaactttttatgaactgaaaggtctcttggagaaaaa

SEQ ID NO: 31273 - DNA, 388 bp, Oryza sativa
  Clone ID: uC-osflM202090h08a1
gggacaatcgaacaacacattatgggcatgtgtcctgttctgctatagtattctcaaagcagcactgcagggccaacaggattattctcattaacagcattgcaggcctgaggcctcctcacctctgcctaataaaacactactagccttacaggattcctagtttcaaaccagcagcaagattcagagctgcaagaaagaatcataaaatctgcttttaattatttcgctgaacccatttattcgatcctcagtaacaacaatgctgactgctgagcgcatcgcaccagcatctgatatcaccacgtttcggtatccaaatgagtccacagctccaagcttttatattcatcatatggccatcaattaggtacctgcactacaaaca

SEQ ID NO: 31274 - DNA, 180 bp, Oryza sativa
  Clone ID: uC-osflM202090h09a1
ggatgacgaacacgcgacgcaatttggagagtgggaataggaggctctcttgaacagttaagccactcactcccattgatcacccaagctatgtactaacctccaatccaaattacttccaaggaggaactaaagtaaacagcaaaaaaaataaaggggcaaacttgctaaacaggggag

SEQ ID NO: 31275 - DNA, 411 bp, Oryza sativa
  Clone ID: uC-osflM202090h10a1
aatgtaataaaataatcaaaattagaatggattataagatatacatgcaatttgataatgtctaggaagtacaggaatctacttggcccataatgagaaggcccatgttcccctggactgtaccactaccaccttttcaacacggtaaaatgctggctcctaggatctaacatgtacactttaaaggacacatgcttgtccatttataaatatcttgaaaggatagctcccacagaaatgatttgtgattctccttctgaataatttttgatacgctgccgcagaggcttggctttccatagatgttaccggcccccaccttgaatctcttcgcttacttctgattacctcactggttaacagcttataaatcctagcttaggtcttggacaatctctgacattgatggtc

SEQ ID NO: 31276 - DNA, 145 bp, Oryza sativa
  Clone ID: uC-osflM202090h11a1
gcacagtaaaaacggacggatgtactttgacatagcatatgtttagccattacaagccgatctgcagttcaactacttaaggataagaggcactaatgacaggcataactcaaaaataaacttcaaactagcatattgtgtgaag

SEQ ID NO: 31277 - DNA, 172 bp, Oryza sativa
  Clone ID: uC-osflM202090h12a1
gcacaaaagaaaatgatgtataaatccagcttgaactgcaactcacattttatctgcaccaccaccagattaccaatttactgactttaaacaaatatcacacagatggctagcatacgccgtcatacacgtcaactatatcacaatccatcgcgaccagcactttagacgc

SEQ ID NO: 31278 - DNA, 346 bp, Oryza sativa
  Clone ID: uC-osflM202091a02a1
gtgcacaaccattagttcaaatataatttaacaccaaataggttcagttaacacatgcatctgacagaaaattcaagttcagtaaggaaaatctcgagtacatccaagctcagatcattaagataagatatgatgctaatttaatctagggctaccagtacaagatgagaaacatgggccattgcaaacagcaagtaatccagagatcacacttgtgcagcctccctttcacgggtccactgctcaatttgagctctcctttcctggctaccatccctgacaggactcctagtcctggacctgtgccgacgcctgctgccatcgctggcgaagctgctgcggggcc

SEQ ID NO: 31279 - DNA, 421 bp, Oryza sativa
  unsure (1)..(421): unsure at all n locations
  Clone ID: uC-osflM202091a03a1
gattcacattttgatttctgacgaattcttttattttttgtgatgcaagtacaacaaaacccactctcacaccacaaagtcacaagagtccatgtaaaccgagagacccccttccaccgaccttacaaacttgcggtttatctaccgtgctagattcacctagcaggctagcccgatcagtactcgccctgttcctcgtcgtcgtcctcgacttcggcgccgacctcctcgtagtccttctccagcgcggcgaggtcctccctggcctcggagaactccccttcctccatcccttcgcccacgtaccagtgcacgaacgcgcgcttggcgtacatgaggtcgaacttgcggtcgatccgcgagaacaccttcgtcaccgncgtgttgttgctgatcatgcacaccggccttcttacctttg

SEQ ID NO: 31280 - DNA, 434 bp, Oryza sativa
  Clone ID: uC-osflM202091a04a1
cccaaactacagcggcaaatgcatctaattaaacatcaagactcgtctaaacaacaacctgccacaattgacaaaccggaggctgctgcacaagacggtgtacacggttcattttatttgggtgttcgtttccaccatcagattgatataatacacgcgaacaagcagaaacattcggcaacaatttctccaggaaaatcgcggcctatttcgtcatcatcccgagcgagcgttatttggaagagggagtctttttcagacaggcacagcctcaatggcaggagcgagtgaccaacgtcgacgtcggcgtcctagtagccaccctggatgtaggcgttgagccggttcagctcttcccggtgctcgctgaccacggcgcggacaatgtcttcaatggagaccatcccaaccatgcccgtgccgtcgatcaccgg

SEQ ID NO: 31281 - DNA, 106 bp, Oryza sativa
  Clone ID: uC-osflM202091a05a1
gatcataatgcaaattttttagctcctgatcatcttattactacaatttttttggccaatatgctacagtaagttttttcctccctttgcaaaaaagaaaacccaa

SEQ ID NO: 31282 - DNA, 235 bp, Oryza sativa
  Clone ID: uC-osflM202091a06a1
gggggggccccttttcacttgtttttaaaaaggaaaaggggccccaaaaaaaaaagtgccccgtttggttttttttttaccccccaaagggggggtttttttttaaaaaaaggttttacgggggttttaaaccggcccctccccttactttttgggaatatcaaaaacttaaaaaaattgtaaaattcccaaaaaaaatttgttttgcaaaaaaacaaccaaatttttaataaaa

SEQ ID NO: 31283 - DNA, 429 bp, Oryza sativa
  Clone ID: uC-osflM202091a07a1
atatgaacatgatatgataatatcagagtctgtcctgcagaatccccacaacagatcgcccaaaacgaactattttttctgtttacatactactaactaatataaccccggttctcaatcaactccggttctcaatcaactccaagttagtacattccaacatcaacatcacatcacatctcaccgaagcaagggagggatgctcctgagaacaattaacaatcacacgtaaagggccaaacggccctgcacagacaaaatccattacatcctactactactctccgccgtcaaagacggcgaacggcagccatagcttttgacctgctaatctctgaacatgttagacacgacggggtcgagatgacatcgggcatcacaccagtcactggcatcaggttttgatccagatactccattcatctacct

SEQ ID NO: 31284 - DNA, 373 bp, Oryza sativa
  Clone ID: uC-osflM202091a08a1
acagatgaaaaccagacccgatgtttgtaaattctggcagaatccaaccataacctagtaggctcaaggcgacaactttttgaaataaaaacaaaaacctggtttccaaagaaattgcactgataaagggcatttccatttagcataaattatggatactaacaatggggggctttctaattcctggcaggtcccattgaagaatgggaacaaaaaccaagttggcatcaggaagtaaccaaaactgggagaatttgggccaaaaaccttatgaacctacttattttaacccattcctggttaaaacagactggcgacaaagcagttaccggtgattatttacaatgggatcggtaacatatgggggaacttt

SEQ ID NO: 31285 - DNA, 431 bp, Oryza sativa
  Clone ID: uC-osflM202091a09a1
atggcgaaacaataacattaatcaatatgtatataacattacatgtttttatgcaaagagaagaaaaagaaacaggagggtaaacaaggaacttttatcaattttatgtgtaacctcaggtccacgagtaaagctgaaatcatcatttcgcatcggaaaccgatgacagaaatcttgacaacatgaatcctaggaccgaaaagacaaacccgcatcatatacagacgcagacaacttatgtgagataagcttctctccactagtcaagtcggccagttgcttctctcaccatccgcaccgacgacttcatggtttagccatcatcttggcccacgtgtttgggtgcttcatgcctcgacatagggggcaacttatcttggagtcgcattattgttgatataagcattctgtcaccaactatatgccttaac

SEQ ID NO: 31286 - DNA, 332 bp, Oryza sativa
  Clone ID: uC-osflM202091a10a1
agtcggcaaaatgagagcttaattattcttttcccatccacgacaattcagaacgaaaagtgtgctgctacagtacagagtacagaattactcaaccagatcgaaatacacttcgagtctgcagcttcagtttgcgaaaccccaatcaacgaacacctttccaaacaaatatatagctaaaacgaacatggcaaagaaatacagcccaattgaattaactacgaaaactgcacataaacaatccatccgttggttggttccaagtacaaattatttgtggtcttttggatgaacagagtccagactaccgcctgaaacaaaaccttcggcac

SEQ ID NO: 31287 - DNA, 351 bp, Oryza sativa
  Clone ID: uC-osflM202091a11a1
gaccataaggcaaagctgcgagcgccagatcatcttattactacagttttttggcgatatgctacagtagcttcttcctcccttgcaaaaagaaacccaaaccttatttacaacgcaacacacacaccggacacagagcgctcgatcgatcgaagcatacgagacgacgatggcgaactactactaggtaagcgacaacacctaggctatacagggatacagcgcgcggcggcaactggcggggagaccgctgcgataatcaggcgctggccttgttggccttcttggagatggcggaacggatggatttgggcggttgcatcggcttcccgggggcgggcttgcttgccc

SEQ ID NO: 31288 - DNA, 266 bp, Oryza sativa
  Clone ID: uC-osflM202091a12a1
ggggatcaacaacacttcaacagttatgctgatacaggtaggaatgttttggggatttacaggcaaacccaaacaggtctggcttaagcacaacgcatgggccaaaaattatttttgttcatagaggggaaaccgtttttttattacattggactggcttttctacataagggttgggctttgccttctaacacaaaacttgggccattttttattttcactgggggtccttcaggaagtcggggtttttaaccaaaacccctttt

SEQ ID NO: 31289 - DNA, 412 bp, Oryza sativa
  Clone ID: uC-osflM202091b01a1
ctcaaagaccgccagatccgcataaataaacagcttcaaagactgacaaactctgcaccctaacgcataaaaccggttacagtagggcggctaagccaagcgaacaacacagcagcaaacataaacatttgtgcctctgatatgtgcaagctaacggctggaaatctggaatccccttgctgccctttgggtcctgtccagatttcttaatctgcgtacctgctctggtgcataattttattctgcacttgtggtattccacctgctgatgagattgccaggtgcattgctctctcatggttttggcaagctttggtgccaaccaaaacgggttttcatggcatgacaggatgactggttcatacttggggcttgggcccaacatttgtcaggttagtttctacaaacaacc

SEQ ID NO: 31290 - DNA, 139 bp, Oryza sativa
  Clone ID: uC-osflM202091b02a1
agatatggtgtttttttttttcggttttgtcttttttattaaaaaggtgggaatttacttacaaactccacctttcagttattcctacaactaatcaatctcctgcaggggaacaaaaagacttaataaaccccctaaa

SEQ ID NO: 31291 - DNA, 372 bp, Oryza sativa
  Clone ID: uC-osflM202091b03a1
gggaaacgaataaaatcattattggaaaaacatcatcttcttcttcatcttcttaggggacacaacaccaacttgatcatcatttcggcgcactaaacccattttccccaacccaaagacaacgaactcggtggccacaaatccatccaaccccaattaaccactggtaagctacgggcccccactttacttgccggggaccaagttgggggcgtacccccaggcgttgttgttgacggggcccgccagggggccggccaggctctcgagggggcccttgccggggaccatggcctggaccaagaagcccaacctggaaaacctggccaggccgcccttcctgaccccccccaccctgagctccccgaaccc

SEQ ID NO: 31292 - DNA, 346 bp, Oryza sativa
  Clone ID: uC-osflM202091b04a1
actgggatgataacttcgatgttattcatttcatagaataatcgcaactcaaaaacaaccagaacacgtattttttctggtaccctcatcaggcatctgattaaatttgaataaaccgaacatatgtgtccaaaatcacaagtgagaaccacaggtagcaataggtattacagtctttgaatagaagaaaatgataacagataggccggttgaaaactttgtccacgctaatgaagaaacagcaacaaaaagagagaaacaagcaggaggacggcgataacagctcctcttggcttagcattcttgggtccgaagaattagaagcatttcctgtgcacaatggatg

SEQ ID NO: 31293 - DNA, 344 bp, Oryza sativa
  Clone ID: uC-osflM202091b05a1
ggacgaagaaagagaaaattgcgatagattgaaatcacccaatacagcttgtactcgtccatgcattttcgtttgaattgaatagcactactagaaaaaaaggtttttgcaggcgccaaaaatagtttttccaggtgggggaaaggaccgcctatacgcaaaggcttgcaaaaattattttcgctagggacacctccattttcgcaggcggtagattcacccgcctgcgaaaaacattacagcgtataaaaaaaaggggtgccaccgatggcttttcttctccatccgccggttttccccacaaccggcggcattgtcgtcgtcgcgttggcaccgttcgagac

SEQ ID NO: 31294 - DNA, 119 bp, Oryza sativa
  Clone ID: uC-osflM202091b06a1
aacaatccattataaattttacataaagccagacaaccttggaaggccaaacaaattaaaaagcaaaaaaaagaactggggcccacttccaagacaatgtgcgacaaaagaaaaagcca

SEQ ID NO: 31295 - DNA, 428 bp, Oryza sativa
  Clone ID: uC-osflM202091b08a1
cagaaagggactttcctcccaattatagtcctctatattaaaaaggtgggaatttactcacaaactccaccttccagttattcctacaactcatcatctcctccagccaaacaaaagacttattaacccctaaaattcccatcccctcagcatcctttacaaatttttttcactgtcgtacgtcgaagattttattgttcaggatcgacacggccatacagggaggcctaatggacattctagtcagcagtgagcactccgcgtaataaacggtcgcgacaatggaccgtggccaggtgtcaggccgccagacgcgcgagcgcctcgccggcgcgctcgccggtggacagccggagcctccggtagtcgtcgtacttgaactccctgtaccggcgcgggtgctcgccgtccaccagcttccccggcgc

SEQ ID NO: 31296 - DNA, 363 bp, Oryza sativa
  Clone ID: uC-osflM202091b09a1
atcacatcaaagggaattaaacgctgaaaggagggaaacacacggcagtttttacacatggaagatgtttacacacaaacacacttttttgggttggcgctagcccttgataggagccagcaggctagctgacacgtaccggtctttggtagtactaacagagacaggaggcttcttggaacagagtaacaagataagatagcaacatactagataattaattacgtattagataaccacaaggaccagcaaacatggcgggacagagagatcgaccagcctccgatcaatgggattattcagttcaccgatggctgctcccggcctcgccgctgaacagcccggcgtcgactgtgggggagt

SEQ ID NO: 31297 - DNA, 362 bp, Oryza sativa
  Clone ID: uC-osflM202091b10a1
aaacaaaaaaactattttgatttgcactgttgggacaaataaaaagaaacggagggaggatgggtttcaacaagcataccaccaaagattgtcgggactcaagggcgctaaaacaccttccgggacaatgaagcaacagtataaagcatcctatatggattcacgggacatcaaaccacgaactcccatggatttgatggggccacacgggtggacaaaacttattgggccccttccgggtggcttcagcactgagcaaggcccttccggcctggttgacaggatggaaccaacttcaacgggaaccggcgagacaccaccgatttccaaaatgggaagaacaaaacgtcaattcctttaag

SEQ ID NO: 31298 - DNA, 395 bp, Oryza sativa
  Clone ID: uC-osflM202091b12a1
gctgctgaatgaatttattccagcttcggaacttccaaggctgtttgcaacaatccatcagaaatcttacattttgccagacaaccttcgttgtccggacaaattacacttctgatgaatgtatttgtttccagcttccaagactatttgtgacaaatgtaaaacccagtatcagcatgggtaacaaacacattggaaactaactaacaccaagatgctacagagctacatttacatttacatataaaccagaggaaccccaggacctgttggcagcaactaacaggtcctcatttaggctgcaatctttgtactcagccaaagcaccttggatcttcagagagcttgaatgatcatatttccaactttcaagttcaacttccaaggctatttac

SEQ ID NO: 31299 - DNA, 387 bp, Oryza sativa
  Clone ID: uC-osflM202091c01a1
aatcaaatcacaaacatatcatatacatagacccataaactagcatagttcatggtcccaaaagcacaagagtgctccggtgctcccccacaaactcctccggcccatgtggcctgattcggggggttacaatgtaacaacaaaagttacaagacaccacctccctgctgttctacaatataatccttaaattgccttgccaaattttaaaccaaggctacaacaatgcagaaaaaaaaatgcccaactccatgataacttatttatgtctactggacctatgggagaaagcaaaggcctaagcgggtgctaattaataagcagcctcagaatagccaaagccttttctcttttactatagcaaagaggccttccttcttcttcacc

SEQ ID NO: 31300 - DNA, 429 bp, Oryza sativa
  Clone ID: uC-osflM202091c02a1
gcaggacaatgacaatatagttttcacacgatacaagcggaacatatgtcacaatcgcagaagaatttggtatcttagctgaaccagtgtctgaactgccgagatttttcatgggtcattcataattcacattatgcagaacgatgttctcatcactgggatggcagaatacaggtatgcaacaaattagaagaacagatcgatcgattcagaattatccagagaatgcaccataataccctggcctccagtatcactccgcgctcactgggacataaaccttattgccaccatttgatatcttgtagatgtagaatatcagtacaagtgcactgacggcagcaattattccagctggcattacctttcttgttttgatgtatcttattcccataacgacaggtaatgctaccagccaaacagtctgga

SEQ ID NO: 31301 - DNA, 371 bp, Oryza sativa
  Clone ID: uC-osflM202091c04a1
ggtgaaattagtttcttttgcagaaggtaacaaacatagccacaagtaagctagccttcagcttgacactccaagggatcccatagcttcccttgccccacactatccctcttacaaacgggaagaagcacagcaccagccacccacaacacatgaattcgccgatacccggggcacagggcacaccttccgctgtcccgaaagctaccctacatgctccgacagtgaccgcaacgatgtttaacatcgcaagtgccgtcacggggatgaacaccggcgatgagtcgaaggtgaccctcccagggtcagcaccatcggcgttggcatcgtcatcagacatgcttttgtccttgccggtgacctcaaaaaca

SEQ ID NO: 31302 - DNA, 297 bp, Oryza sativa
  Clone ID: uC-osflM202091c05a1
acaaagatccaaaaaaatttaattcaaattaagaacaaaaatttgttggacaaaaggggaaattgaaaaagggaacgagggcccaccggggggcccaaaaattttaacaagggaaaggcccccacaaggggaaaagggttctggggaccaaaatacttttggggaaaactatttccctaggaaaaacaccctttatacagggaccacattccacgggttttaaaaccaagaagggaaaaaggggaccccctttctgggccagggaaactggaacggggggatccgaatttagggggg

SEQ ID NO: 31303 - DNA, 373 bp, Oryza sativa
  Clone ID: uC-osflM202091c06a1
gggcagtatagattaccaataattaagtttgaaccaacaagtataagaaaaaaaaaagttaagtaaacctacaacaacaggtgcctcacagaacacacacataactaccagcccccccccccccccaaacaaaaatacaaccttttttaggataacgcagcacatgattgatttgagtaggtcgatcgatcgacctaggcgtcgatgggcttgcagacgacggtggcgtgcttgaggatctggttgctgaactggccgggcttctcgggggggtccaccttgtccatcccgggcggcggccgcaggtcgaagctctggacgaggcggccgaacgtgatcccgatgatgggcaccgcgaggatgaccccggggc

SEQ ID NO: 31304 - DNA, 328 bp, Oryza sativa
  Clone ID: uC-osflM202091c07a1
cagttacaccacaaattttgctatagtgaccctgtttatttcacttcccatgggaacaaatcaaattgcctcgaaactactcaaacctcaccaaaattaaaattcaagcctactacccaaaaattgacggccagagaccttcccggagaacaagcaactggaacttagacatcagtacccgtagccggagttgtccatcggagtggcgacgggcgcaggctcaggctccttgaactcgacgacgacaacatccgatgggaggaatgtcttggccaccgacccaaaatgctcaagacaacattttaccaccttaagggggccaatgata

SEQ ID NO: 31305 - DNA, 387 bp, Oryza sativa
  Clone ID: uC-osflM202091c08a1
ggagatgagcaccacgacgcacttgatgctcttgcacaccgtctggatcaccgtcggcccgggctccgggatcgtcaggttcaggttgtcgccgaacccctccgcgtacggcggctcgccgaccaccacgatcgcgtagtcgtacttgtcgccggtgaccacgctgctgtccgggttctccgagtacaccaccgtcgtgctgggatcaacggtggccttgatcgccgacaggatcgtcgtgccagcagtgatgttgttgccgggctgtccttgccaggtgatggtccatcctccacactgtctgcccaaatcatcagcatggcttcccgcgacgagaattttaccggctttcttcgggaggggaagcaccggagagtaggaggattt

SEQ ID NO: 31306 - DNA, 53 bp, Oryza sativa
  Clone ID: uC-osflM202091c09a1
gggataaaaataacataacaaaaaaatcataaaaacaacaaaaaaaaaacaaa

SEQ ID NO: 31307 - DNA, 437 bp, Oryza sativa
  Clone ID: uC-osflM202091c10a1
gaacagttaagccactcactcccattgatcacccaagctatgtactaacctccaatccaaattactccaaggagaactaaagaaaagcaaaaaaaaaaaagggaaattgtaaaaggggaggaaaaagaaaagaggaggtgatcatcaggagcacggcgcggtggccgccaggccgagctcgcgccggcggccgaacacgacggcgcactccgggagctcgccgagccccgcgaacagcgcgtcgtccccttgcagctcgcgctcccactcctccggcggcagcagcggcgcgtacgaccggtgccacgtcgggtggtactggtcgatccatccgaagtcgaagttctcatcctcctcctcgaccgccggcgccggcgccaccgtggttgtgaccgccgccggcttaaccacagccttctgttcctccttctgctcct

SEQ ID NO: 31308 - DNA, 286 bp, Oryza sativa
  Clone ID: uC-osflM202091c11a1
ccaaaggaccaaagggccgctggttttggcctaaggagagcccaagggccatgccaaaaaagagccccctacttctaatcaaatggcccctagctttaggccaactcttaaatccctgcaggcatgcccccagacagggggagggcctggacccaacatctaaaactcattgggggcttccccaaaccatcgaaccattttattatgcccctccggctatggccaagggagggcccctcttccaaaccttttggatttcaccctttcctccctacgggaaggggcc

SEQ ID NO: 31309 - DNA, 321 bp, Oryza sativa
  Clone ID: uC-osflM202091c12a1
accacaaaccacgaacttggatattaaagatgccccaaagaagggtcacataaacaacacaggtcacaggagcgaaaggtacaagcaaaccctggataatcgaaaagcaaatgtttttaaaaaccagacccccaaactgatagatagaagcccccacggaccgatcataggatgggagcagtaatcaagcattgccaaggccccaggcaagaaccctgaacccctttaggactcggcacccttatcacccttgaaaccaatggggaactcggagccgacctcctcggagaccttttccaggggggggagggcctcgggggc

SEQ ID NO: 31310 - DNA, 355 bp, Oryza sativa
  Clone ID: uC-osflM202091d01a1
ggcaaaaaaagcaggctgattattaatgcatttgaatttgtttacacatgcaaacaacagtactgacaaacagctctatggtcatattatataagctgtatcattccattgaaaaaaaataaaaaatagaaataaaaaataaaattctgtatctgaaggatctcaggttgagacatggtcaggttcagaatttcagacagtctaaacagtgtcatttttgtctgttgaattctccacgacgattagtatccacgagctgttcgctgaaatcccatagcctcttcgctagctctgcgtctttcgcagcaggcctcggcgtggctttcttgcagtccgcgaagtatttgccggagac

SEQ ID NO: 31311 - DNA, 342 bp, Oryza sativa
  Clone ID: uC-osflM202091d02a1
ggtgaaggtgtaataaattgattgctgaatatcacacatgtcataaaatgaataaaattgcactttgaagctactcccagaactattgagacacacaccaaattacaatgagccagcttacagaaaaacaaaaggaaaacaaaatcacagccccttacagtgattcagtgctgtcatcactctcttcacacaagggtgaagattggattataacccgagctccataagcaagcctttcttctatcttgatcaccttctccttttcctcatggaatgattccacccttgaagaacatagtttaccaagtgaataatcagccatcgctattgcttgcacttttt

SEQ ID NO: 31312 - DNA, 90 bp, Oryza sativa
  Clone ID: uC-osflM202091d03a1
gggcttgatctaaagccaggatgcatttcttgcatgtcaccattagctttatcaaaagaatacttccctcaaacttgtttacatacccct

SEQ ID NO: 31313 - DNA, 401 bp, Oryza sativa
  Clone ID: uC-osflM202091d04a1
aatcaaatggagagtatatcttttcttttattcccatatcaaatggtacaaatattaaactgtctaagaacataactcgaatccgtattaaccaagagtaaagaaacaaataaatacaaacaaaatacgcctcttacaacaacatcatttttcaccagcatgtgttcccctccctattagaagaagcccttcacttcagctcacaagcagcagcttcaagtaacaaaagaaaaaaagctcatcacctcatttgctcagttcatggcaggtcctccttcatgccgcggacgaactcctccgagtgttccttggtgacgcagctggcgagcatccgcgtgccgtccagcggcagcggcgccttgaggatgacgacggaggcgatgaagtcgctgttgacgagc

SEQ ID NO: 31314 - DNA, 216 bp, Oryza sativa
  Clone ID: uC-osflM202091d05a1
gagggtcaaatccaacttattcataaagcatactgctgtcccacaggaaactgtttcataaaactaacatatcatacggactcgatggtccattaaaccagacacaagtagacattaccaccacaaatacttgacgaacagaggctcgggaccgaccaggcacattggcagcctccaccaaaactggcctgattacttgaccacccacggtggcgg

SEQ ID NO: 31315 - DNA, 356 bp, Oryza sativa
  Clone ID: uC-osflM202091d07a1
caaacaccataaccaaagcgaactcaattcatggtaacatcacggacgaagaacacctaacactggatggatggatagagggcttctcgactcgagagagccactggacacgataacgactcgactcgatgataagatgattctgacacggatagctaaggataactggccacgatgggccccaccaatcagttcctccagttcccgccggagtcgccgccgtagccgccgccacggctgccaccgtagccgccgccgccgccgccacggccgccgccgtagccggcgccgccaccgtagccgccctcacggcgcccgtagccggcgccgccaccttcttcgtagccgccgccctt

SEQ ID NO: 31316 - DNA, 346 bp, Oryza sativa
  Clone ID: uC-osflM202091d08a1
aaaccaaagggccctggatccgggatttgggccacaaaaagggatgggggcaatgggaaaaaagggtcttgaatgaaattattgaaaaagcaaggttggccctaaaagggggaaattggcaaacaggacaatggggcttccctattttaggctcaaaatcagggcaaacaagaaagaaagcaaaaggggaatccccctttgggggggggaaacttttggacggaaggggggaggggttaaatcttttacgaacgggcacactcgggggtcttggcaccagatgaatcggcgatctttgggaaaaggaccaacccggcataggggtttagcaaaccaaccgggggac

SEQ ID NO: 31317 - DNA, 417 bp, Oryza sativa
  Clone ID: uC-osflM202091d09a1
attacccatccctaggacggtaacattcttgtgatgaaaatacatatgcccatgcttaaggtaactggatacaaggaacttcacatcacgtcgaaaaggaaatattacaatacaggcatgaacgacacggggaaaaaaaggcttgaagtaactccggtagactcatcagaattacagcgtgcagtactgaacaagtagtaagattttgcaggaaacagttcatagatatacatgactggaatagatccgggtaccggatgaccagattcaccggtagttgcggtaaagtgggctgtacatgcagctctttgcatacttaaccaggtcctttggcccagggcgcctgcttgccaaaccaagttcatatgcctttgctgcaacgtttgctgcaatgtgggcagagacctttctgatgtt

SEQ ID NO: 31318 - DNA, 380 bp, Oryza sativa
  Clone ID: uC-osflM202091d10a1
gggggggagtagcaagcaatgcacagcaaaatgggaagatatgaacaatcatggccaacgaggggctaacaacagtttagcacagtacaaaaagtaaacacacataacaggaatatgcaatgcaacggaaccggagtatactgacaaaccaatcattaaccagagaactacttattaaccagctactaatagtcttctccatcgtcgttctcgccgtctgcacccttggcgccgacttcctcatagtccttttcaagggcagccaagtcctcacgggcttctgagaatttacctttttccattccctcaccaacgtaccagtgcacaaacccacgcttagcatacattaagtccgacctggggtccattgcccgagaaaa

SEQ ID NO: 31319 - DNA, 371 bp, Oryza sativa
  Clone ID: uC-osflM202091d11a1
acacaatcaggtccattgtacttctttcatcaaccaaccagataacattgttttacacaatctgaacgaacgaagcaaatattcgggtacgcggaaagaggagaacgtcgcgcgtctcaccgcagcctgcatgaaagcaatggacctcaccgccgttgctcgccggagatccacactcacttgccggggacgaagttggtggcgtaggcccatgcgttgttgttgacggggtcggcgaggtggtcggccaggttctccagtggccccttgccggtgacgatggcctggacgaagaacccgaacatggagaacatggcgaggcggccgttcttgatctcctttaccttgagcttggcgaacgccttggggtc

SEQ ID NO: 31320 - DNA, 395 bp, Oryza sativa
  Clone ID: uC-osflM202091d12a1
aaccgaacagaaataaacgagtattaaacgactgacatagtgcacattgcgagcagatattaacggtccatgaaacgagagccatggccgtgggcaaaacttaacaaatactagaactagatatctcaactgcagacatgcaaaccaccatttgaacgaggctcacttcttcttggcggcagccttggtcaccttggcaccggttgggtccttcttctccacgttcttgatgacgccaacagccaccgtttgcctcatgtcacgcaccgcaaaacgaccaagaggagggtactcagagaaggtctccacaaccatgggcttggtaggaatcatcttgaccataccagcatcaccgttctttaagaacttgggctccttctccagttccttgccag

SEQ ID NO: 31321 - DNA, 387 bp, Oryza sativa
  Clone ID: uC-osflM202091e01a1
aacatgctaaacaggtaatatccatggatataaccagtcttagttatacgttgcttagcatccccttatttacatatagagttcagaggtgcaaactgcaaatagtgattgcatagaggtgcaaactacactaattcatgacaccataacacaccatcagaacgaaccagttctacttcacccagtgttctgcataccagcagcgatgcccttcatggtcaggatgagagtgtcctcgaggcctgggccgtactcgcttgttgtgttcagcttcacaagctcagcggctggcttccctgagtccattatgtccttggagaggtgagctcgggggcttacatggaagccagggtccctgatacgctttagcgtgcaagcttggcaaac

SEQ ID NO: 31322 - DNA, 420 bp, Oryza sativa
  Clone ID: uC-osflM202091e02a1
ggtggacaatacatttgcaagcttcattgaacatttatgtagcgaacaaacagttcattgacaacattttgcaaagtaggtaggggtgctcaatcatagcagtagcacatggtgtccaaaccatttacacgaatagcattaacacacgtacaaagacttgggcacaatcaaatagagtttatgtccctaggagatttggcgaagctaacataacaagacacctttttttttaactttcacaatagcaaaccatgtagtacagaccataagggagactccatcttaaaactgttagacttcttggttttcagaaaattccctacagtcatttgatctccatcttgcttttgactgtggggcagaaaccattctagttggggtttttggacttatcaactgcccttggagcaaggccaattg

SEQ ID NO: 31323 - DNA, 294 bp, Oryza sativa
  Clone ID: uC-osflM202091e04a1
gtggtgccattaatcataaaatcaacagaatagacaaatccatgtcttgttggcatggatgatacggtgaaaccacaaaagcacaactagtttctgggctcctgtctgtggaaggcacattcataggaaaaaaagatgaataaacacctacgaaagcgttcttttttctttatcctcacctaccaaagtgttgggtctcggtatctcttgaagagggattcgatgtcatcaagaacttccggtgccaaaggcccgtggtgcactggtaaatgcattaatggctcttcttcaact

SEQ ID NO: 31324 - DNA, 364 bp, Oryza sativa
  Clone ID: uC-osflM202091e06a1
gcccaagcacccaaaatctcaactttcatcatcattcttgcaactatacccatgcaagatcacaaaagcacaccagaaaggactttacaagacgccatccttcgacagatttttccttatatgcagaaggacaacaagtatgacatctcaccagttgatgagcgctgaaacatgaagcattgtgctcagtcagtgctttcgcgaagaacggccactccctccctcgctcactcgctaaattttcatctctaacattcacacttactatataggcacaagaaatttacatccaaagacagtcaccctatgaacatatactttttttttttcgatcccggggctaagtaaaatcgaagcacgaagg

SEQ ID NO: 31325 - DNA, 424 bp, Oryza sativa
  Clone ID: uC-osflM202091e07a1
gggaaacgaataaaatcattattgcaaaaacatcatcttcttcttcatcttcttagtgtacacaacaccaactcgatcatcatctcgtcgcactaaacccatcttccccaacccaaagacaacgaactcgctggccacaaatccatccaaccacaattaaccactgctaagctacggtcccccacttcacttgccggggacgaagttggtggcgtacgcccaggcgttgttgttgacggggtcggcgaggcggtcggcgaggttctcgagggggcccttgccggtgacgatggcctggacgaagaagccgaacatggagaacatggcgaggcggccgttcttgatctccttcaccttgagctccgcgaacgcctcggggtcatcggcgaggccgagcgggtcgaaagcgccccccgggtagagc

SEQ ID NO: 31326 - DNA, 64 bp, Oryza sativa
  Clone ID: uC-osflM202091e10a1
ggaaacaaaacacccgtattggattatacccttattcaggattctccagggacaaagaactccc

SEQ ID NO: 31327 - DNA, 350 bp, Oryza sativa
  Clone ID: uC-osflM202091e12a1
aacgaaaaatatcaactgaccccacaaagaacaagggcctgttgattttattatcaaggtttccaccacaaattaagttgtcccgagtctaataaacatgaacaaaataacgggaggcagctagatgagtaacaacacaacacagcggctcagctcagataaggcagccaacaatagcaccatatgcttcagagcacagggcatcaccatctctgcttccctaccctgtatgttttatcagcacaacttcaatcctgtaaaggtaattcagagaatgatattagtaaggtgccacagcagaagcatgcctgctagaaagaatttggagccaccacccttcaatctatttc

SEQ ID NO: 31328 - DNA, 422 bp, Oryza sativa
  Clone ID: uC-osflM202091f01a1
gagggaaatgtagaaattcgtgttatcacaaacagttactatattgtattttgggacaactgtcatgcaaccctgtagaacatctctgctgtctcccccataagaaatgtacaggagaacgaaaaatgtgatgacaagtgtatattgactgtaatctatagctatgacaatgctgagtttctagatggcaaatctacggcttcagcactaaacgaagacgccaggcaaggtttcctttgtatatcatacctgcatcaccagaaaaacttcacagaagaaattgtcatataaatcgcaggtcacgtactatttctcactgccatccttctcgtctaatgctccattaggcttttcagaccttactggaagaacgctgcgccgttctttgccacctggtttagctgatgcattcccataccata

SEQ ID NO: 31329 - DNA, 127 bp, Oryza sativa
  Clone ID: uC-osflM202091f02a1
ggggaaagccttcttgggatgataacgaaattatggcactgattcttttttgatctattactgggcaggtcttgcttacaaacgggtttgatgaaatacttctagtatggacctacgcatatcttgc

SEQ ID NO: 31330 - DNA, 351 bp, Oryza sativa
  Clone ID: uC-osflM202091f03a1
ggcattcaattcatggactaatacgagcagagagacacggagatggaacatggccacacgcagagacggagatacaccgggaccagatcgatctcgtctcaccaatcaactccacaaccttttattgcgcccccgtacttttgctttgaatccgccatgaattacccaagcacgcggcacgcgtgaccgaccgaactactgctgcccctcgccacgcgcggcggcagcggcggcggcgtgggacttgagccagtcgaggacgtcgccgaacaccttgtcgacgttctccttgggctcgccgaccagctggtgccacattcccgggtacacccgcagcgtcttgtccttgct

SEQ ID NO: 31331 - DNA, 113 bp, Oryza sativa
  Clone ID: uC-osflM202091f04a1
tgccacggcctggaggagctcaggatgaagcggatggtggtgtccgaccagagcctcgagctgcttggctcgctcgttgcccgcggttcatggcctcttgatcttatccagct

SEQ ID NO: 31332 - DNA, 57 bp, Oryza sativa
  Clone ID: uC-osflM202091f05a1
tttttttttggggttttttttttttttttgggttttcatcttcttttttatttttgg

SEQ ID NO: 31333 - DNA, 358 bp, Oryza sativa
  Clone ID: uC-osflM202091f06a1
aaattaattctaaatccattctaaatttaagtttggatgtctaaattatcagtgccagattaagtccctacagtttattcatatatacagtgcgcacattacaatgtttaaacagcactacaaacatacgaccgaagtacactatcttagttcagatatctcctgcagcctctcgatctacagaagcaggggattctttgcccttcatcttctcggttgaagtgataatcgtaggtaatttcctcccccggatttatgtggcgttccgcgaagaacactaccttcttctcgttccttactgagattatttttgcgacacagtttggttggcaagagtgggtggtgaatcttgcgatcc

SEQ ID NO: 31334 - DNA, 358 bp, Oryza sativa
  Clone ID: uC-osflM202091f07a1
gaattatgtacagaaaatcaatatggtagctagttatcaccaacatagcgcagcacagcaaagaccgaaagaaagagcagtcaacaacatagattaaaacataatggccatggattcacgatgttcatagccatatacaggtagcaacgacagaaaactagaacggaaaaaaaaaagcagttcttgagtctcatagatggctgccatacatagacagcggatagggaacaggtccaatcaccaaagagttttaggatgcagccttttggatttaagctaaacataacgatatgctacccccaaggtgccatgcaggtgccttccaatctccaataggatttatttccttttttttccc

SEQ ID NO: 31335 - DNA, 354 bp, Oryza sativa
  Clone ID: uC-osflM202091f08a1
ataatactatcactttctttccaaggtcaaagaacatttttgggtagcatctgggccacgccattttacaccaaaaaaacaaaaaaaaaacagagcagctcattttacactgccctttcatctatatcatcatcatcgctaatcagcgagtaacgaacagccttaccatttaaacgaagtaatgtaccgggtgggacactataacttagtatcagcattctgaactgttgcttcttctgactgctacatatactcaaccgaaaatgggcctaagaacggtgactccaagcccgggaaccgcagacaggaagtgcccggttccggggagctcatgggaggtcgcccagctgagcc

SEQ ID NO: 31336 - DNA, 140 bp, Oryza sativa
  Clone ID: uC-osflM202091f09a1
cgccctatggcttccatctccggcgcaggctgcgcgtcactcctcgacggcggcgtgcaggctgcggctgccgcggcagctcctcctccgcccctcccacctccgactacgcgccccccactccatacgcggacctcgcc

SEQ ID NO: 31337 - DNA, 310 bp, Oryza sativa
  Clone ID: uC-osflM202091f10a1
ggaaacaaaacacccgcatgggatcatacacttattcagggttctacaaggaaaagaaccccccatgtttggggaccgcaggggtccaaagggcgaggaaagctaacaaacgatggggcgaacgaacgaaatcaagctgtccaaagaccgggccattccttggggtttatgccccgggaaagaagtttccggtcttaaggtcccttttcagggggatgaacataccgccatcgggcagacaggggaagagaaaccgggaacctttaaatcctccccccaggctgggggcccacggggggaccgggaacaa

SEQ ID NO: 31338 - DNA, 181 bp, Oryza sativa
  Clone ID: uC-osflM202091f11a1
tttttaaatgaattttaaatttcatttttaaattttaattttggatgtttaaattatcagtgccagattaagtccctacagtttattcatatatacagtgcgcacattacaatggtttaaacagcactacaaacattacgaccgaagttacacctatgttagtctaaagatattcttctgc

SEQ ID NO: 31339 - DNA, 334 bp, Oryza sativa
  Clone ID: uC-osflM202091f12a1
aaccaaaaatttgaatcgttttattttgtgacggaagattccatccagtacatctcacaagtaccttgttccagaccaaatacatatatattagcataaagcaaaagagggttgcgttttccagcgcacttcaaagtgccagcttcactcgttgctgggttctccgcgctccagcttacaacggaagcaagtgttattcaccgtggatcgttatctaatccttattattgcataatatagcgtccatcttgatgagcttcgtcttggtgcatatcgtatttaggagacagggctagcagtaatgccccatatttcctttgcatactgagcgata

SEQ ID NO: 31340 - DNA, 332 bp, Oryza sativa
  unsure (1)..(332): unsure at all n locations
  Clone ID: uC-osflM202091g01a1
aaataaatagcgcagtgcaatttgacgtgaagaaaaggatacacaacatggttactgcttctcatgataatctcacgcaaaatcagagaatgaatttagcagaaaatattgtgggcaaaaacaaatgaccccattgtcacagggccagttcgatgggagagcagacgccattatagtgctggcgtgtatatgctccacaatcctagctcagaaatttatagattatttcgtttaaaaaatatttctctggatatatatgtgcatgcatgcaagcatgcagcaacacatatatagnatataatatatatatatatatatttatatatatatat

SEQ ID NO: 31341 - DNA, 385 bp, Oryza sativa
  Clone ID: uC-osflM202091g02a1
agatacgcaatatgagcacaactatataacttaataagcacattacagcacacacatggccaaggcagttatttgaatcagtctccaacatacttcaaatcatagaccacaccatacagcaaacatagtataaacattggcatagagaggacagctgatagcagcttggaatattctagcattactttggtagcatccctctacaaaacatagcagacatcaccagctcttcatcttggccatacacattcaacatggtttgctagggacagaccacactgaccagaacatttcgtctcctcagtaggcaccagctgccatgagcagctcatcaaggctccagaagccctcgttgcttgccccggcttgggtagcaacattttgc

SEQ ID NO: 31342 - DNA, 171 bp, Oryza sativa
  Clone ID: uC-osflM202091g03a1
aaaaaaaaaaaaaagaaaaaaaaccaataaaaaaaaaaaaaacacaaataaaaggaaaaaccaaaaccaaaaaaaaaccaaaaaaccaaaaaaaaaacaacataatcaaaaaaaaaaaaaccaacaacccaaaaaaaaaaaaaacaaaaaaaaacaacccttccgaaagaa

SEQ ID NO: 31343 - DNA, 307 bp, Oryza sativa
  Clone ID: uC-osflM202091g04a1
cagaacaacaatctgaagattaaaccagcaaatctaatctagtacaatttcctggatataattcaggaaaaagacacatatagtccatggtggtacaggaagttacatatagcgatgcgacacgaaatttagcatagaactaacagttgctttccaaagtattacatgcaattactctttgtctaaacatagatttttaaacaaaaatgatttggtcttcagccttgatgattgcactgaattgttttgcctgttcactcctgtgacacattccaggtgccaacatgcatgggtaaaaaagaatcat

SEQ ID NO: 31344 - DNA, 310 bp, Oryza sativa
  Clone ID: uC-osflM202091g06a1
ggaaggaataaaatttccttagatttgcaatcaatatcagcagaagctcaattcaggcaatcaagacaacatgtaaggagccgaacacatcggcaacctgaataacaagtggcaacctgaataataacaagttaagtttatgtagcataagaactgaaccttggatctaataacaacaacaacatggccatgggacacgaaaaggtttcacctttgcggccacagctcacaccgcggagggctcctcgacatctctgccccttccgccgacgccagcggcgctgtggcgcggcaggtcaacccccgtggc

SEQ ID NO: 31345 - DNA, 254 bp, Oryza sativa
  Clone ID: uC-osflM202091g07a1
acaaggaagcatgaagcatctgcttttcatttcagccaaccattttggcaagcaatattcagatcagaggagcgccatcttacaatcttttactctatataaaatcgtttgctgaactgccgttacatgatctgctaaatacagggggcaatggttactatatttgagtacttcttaatatcatttcattttgcttctttcttgcactatctagaatggggacaacaatgggaataatgcaacctggggtcatg

SEQ ID NO: 31346 - DNA, 237 bp, Oryza sativa
  Clone ID: uC-osflM202091g08a1
gggaccgcaaattttcactgagggggcacggtaacaatacatgaacgggtgaacccgataaaggatatatgtacatcgatgaaggggcaaacaacaaaaaaaaaaaaaaaaacgactccctacaaaattgctggctgggggagaacagcccccataagggatttacccccgccggaaacaaaaagcctgcccattattaacatcaattactcaatagggtccaaccctttttttcaa

SEQ ID NO: 31347 - DNA, 230 bp, Oryza sativa
  Clone ID: uC-osflM202091g09a1
gggggcaatggatccatttggacgatctggcgatttttattgaaaaccaagtttggtttcaggcctgtttagaacaagggatgtaggggaaaccaagggggatttgaccaaaaacccactttaaggagccaatttccctataaaaaccccctttggggcaagaccaatatcatggggggccatacagggttattcagcctggttccaaaattgaaaggggaattcttttt

SEQ ID NO: 31348 - DNA, 401 bp, Oryza sativa
  Clone ID: uC-osflM202091g10a1
ctatacaatcattaatttgattaaaacacacacagaagaaatcaacctgatgaacacaccagccaaactgaagcaagaaggaaatacagtataaacacacaccaaattaaactaccagcaacataaaaaaataattaaaaagaaaaaagaacaaccgaaatctatctagaactttttttaataacttttttggctaatctagttcatgattattgcatcttcttcttccccggagcagagtggttgtcttgggtggggttgacgacgccatcgttgccggcgagcatgaggtacttgtccttcctggtgagcatggtgcagcggtagccaagcgcgtggcccatcctcctttgcacgaggttggccacgtcggtggacggtgccctccgttcccttgccgg

SEQ ID NO: 31349 - DNA, 422 bp, Oryza sativa
  Clone ID: uC-osflM202091g11a1
cacacaaaaggtcgctaaattcccttcctccggctagaagaaacctttactcaaaagttcctatgacattatggaattacatgtttgtcctcaggtctttcctttgttttttttctccattttcttttatctctctctgtcacatattcatttttacaaattcagacccttgaatttacacgcagcccaaccacattccccatcacttccacccacccttcacatgcatgcaacgaccaggattcgtccacgtcatccctcctcagcatcgacggccaggattcgtccacgtttgagctccacatgcatcggcgaccgtgcgccacggatcatcgctcctctccaccattgcaccgtgttcgtccgttcgtccgcgcggtcacgacgcgccggtcatgctcaccagccttatcgccgggatg

SEQ ID NO: 31350 - DNA, 413 bp, Oryza sativa
  Clone ID: uC-osflM202091g12a1
atgaaggtgaaaaaaaatttaccattacaatttcgtctcatcacacaggccgtttgtacatatagctcggcgagtaatctctacacaattactccgtagttagcagagcgaggagatgaaaactggaggctgattccagcacataaacctgaaaccagctgctccctccaatcacctccagtacagtaggtactactgcttcttcacttcttcagcttttccaaaaaaaaaaagggacaaacaaaaaccactcttaattaagtaaggccggtcggtggcggtggccggtgggtcgggtcagatgggcggcgggggaggtcagcgggcggcggcggtgcagcggcgctggcagaggttggggatgcggtccatgcactggtagaccggcggggagacgctgaggctggacttga

SEQ ID NO: 31351 - DNA, 391 bp, Oryza sativa
  unsure (1)..(391): unsure at all n locations
  Clone ID: uC-osflM202091h01a1
gaaaacggtagtagaaaaggtagaaaagcagtaagaactctagatgtacgcaagtcgcaccataccatgtacacctcgtgacctcaccctgcctatcaacagggcacccgaccaaactaactcaatccatgaataaaaaggtccttttctctgaacacaagctagtagggttcatcatcaacacaagctagtagggttcaacatcacaactaaacgcagcaggcaaaattgtttgttcctcacaccaagatctccaggtgtggctccttgtctcctgcggctttattttcggnttttttttatttatatggtgaacaaagggaggctgattggcccaggcgaactctcgatgtcggtgcaggctgatcacaacagaggggaggggaaggag

SEQ ID NO: 31352 - DNA, 114 bp, Oryza sativa
  Clone ID: uC-osflM202091h02a1
cataaaaaaaacccaataacaagtataacataataacaacaagaataaaaaaaagctgcttttcccaaaaaaatgaacaaaaataaaaaccatcccatgaggggccacaggcca

SEQ ID NO: 31353 - DNA, 261 bp, Oryza sativa
  Clone ID: uC-osflM202091h03a1
cttaggcccgggacaaatttatacaggggcattgcccatgtccccaggaaaacccgacaaaagacctaaaattccagggggtggttgaacccggcgtcgaagggggggtcagcctccatgtcgccgaccatttccccgagcataatcccgccgaccgggccgccggggggcccgagtccggggcccatgcccattcgtccacctttcctcgccgccggttgttgggccgccgggtagctgtccctccccggcggggggggg

SEQ ID NO: 31354 - DNA, 410 bp, Oryza sativa
  Clone ID: uC-osflM202091h04a1
acctctgggggtaactgaactgaacttagttctgttatccacaacaatttcagtgtgtaacattatcacttctgcactgaaacatgccacaaaggttggtccttaattaccttacaaccatcttctctactattgttcttatgagagagagaggaagcaaagcacattacctatggatacacttttttgagagagagatacaagaacatataccttctggggagtatatactacatgtggataagtattactcctaaatgcactctaacaaaagttaagaaaaataaaaggtaggtatgctttacttgggtctatagttgggcttaatttttctatgcagcccaatataagagtacaaacgaaggcctagggagaggggcggtggacaatgtctatcccacgaaggaaga

SEQ ID NO: 31355 - DNA, 362 bp, Oryza sativa
  Clone ID: uC-osflM202091h05a1
gatgcgaccgaggcagctttattcaacttgtccagaaccacttctctaccgactatcacttttgcatgggtaaaattaactaggtaccacgggttgattgtacagtatttctcaatgggacagacatgccgaaacatcaactatttcccccactctcactactctccatctcaccgtctttcaaaaccttggcaaaatctggcgttggagctgtcaaacatgttagccgtcaggtcccgtctcctccatgtctacagccacaagcatccatgccctctcctactcacttgtttagagctcatccttgagaggctcggctggggccgactctgccttctccttcgcctgaccagcgggttcct

SEQ ID NO: 31356 - DNA, 208 bp, Oryza sativa
  Clone ID: uC-osflM202091h06a1
gggaaaaaaaaaaacctactttattaaagccagggccatgcaaaaaaagggggtttaaaaaacccagaaaaaattcctcgcccgaaaccgaaaaatcaaaaagggaaactaactcattttggggggaaagcaaccgcgcaaaaggggtcctaaaaccaaattttattcaaagaaccggggccggcccgggggcgaaaacatttacttt

SEQ ID NO: 31357 - DNA, 394 bp, Oryza sativa
  Clone ID: uC-osflM202091h07a1
gagaggagtcaaacggtcaaaccttgttggatgtttctcgatgcttccagtaactagtgtcttctagcatttccgtggtttgggccttgttgaagtgggccacatcaagcccaaaagcccagcccaatctagaattacttctgcccatcacccatcaaattctggcagaattcacatgaatttcccccatctttgttcataatgaaatccagttcatgagtttgtttctggcaacaacattttcagtgtaagatgcctggagccctggactggaggggcattacgttccagctttattattgctgctggagttcacacaggcatgatcatcatcattactaatcaacaggggagtgcagtagtggtacctacaggaaacatgctctctcatgag

SEQ ID NO: 31358 - DNA, 320 bp, Oryza sativa
  Clone ID: uC-osflM202091h08a1
ggtaaaactttttctttccatgtaaattatctgcaaagtaagaaagtaacactcccaagttacaacagcacaccatccatatatccatgcaggcagcctgtttgtgcccttgtgcagatgcatttcatttatacaagtagaaggcactcaaatcagccaccacatgaacacacacatgttccatcatcgatcgatctacacatgcatcacccggtcatgcacttacaaacaaaagatctacttgaagaagtacgggaggtcgagcacgtagaggaggaagtaggcccagaggacgccggagatgccgccgaagaagaagc

SEQ ID NO: 31359 - DNA, 366 bp, Oryza sativa
  Clone ID: uC-osflM202091h09a1
acaacagtcttatatgggggcatatatcgaagcgttgatgcacccaagctggcccgggttatgttatttcttacataagatatttttactccatacttttggttaaagaatcattcaaagggtttcatggaaaaaaaaaagttccgccaagggccaaggatcgacattttgaactagaaatgttagatgggcccggattattttttttccacctggggctcttacaaatggggagaatggaatggggtgaattgattggccgacatttattacataaataaccggggatactcggtacggggccgggcgtctaccaatggcgggggggtagcaatagacctttattgaagggtggcctgtggctca

SEQ ID NO: 31360 - DNA, 149 bp, Oryza sativa
  Clone ID: uC-osflM202091h10a1
aaaaaaaacaatttataaattaaaaaaaagaaaaaaaaagaacccaaaaatggagccacaaaagacatgaaaaaaaaaagatataacaagctacaaaaaagaaggggaacaaccgaaacacataaatgtaaaaaaggaaacaaaacaaa

SEQ ID NO: 31361 - DNA, 427 bp, Oryza sativa
  Clone ID: uC-osflM202091h11a1
gcccgcgcctgtggctccggctccggcggccacgaagcaggtggcgccggcgaggtgggcggtggacagctggaggacgaagaaggcgctgcagctgccggagtaccccaacgcggcggagctggaggcggtgctcaagacgatcgaggcgttcccgccgatcgtgttcgccggggaggcgaggcacctggaggagcgcctcgccgacgccgccatgggccgcgccttcctcctccagggcggcgactgcgccgagagcttcaaggagttcaacggcaacaacatccgcgacaccttccgcgtcctcctccagatgtccgccgtcctcaccttcggcggccaaatgcccgtcatcaaggttgggagaatggcggggcaattcgcgaagccgaggtcggaggcgttcgaggagagggaccgggtgaag

SEQ ID NO: 31362 - DNA, 415 bp, Oryza sativa
  Clone ID: uC-osflM202091h12a1
accagccatgacaaagtttactgccagggatgtgcaacgattcacgttcaagtcgacaaggtgacaggtaacctacaacaaacgaatccatccaaccggtttacaccacctataagttaaacggaccgacccatggaccatggtacgacggtaaacgctttttgggcaggacggtgtataacattcacatcacatgtacagcactagagaacggcccagcaaaaagcaaagagcgatcagcacaaggggctgcaacatctacctgcccttctctcgaagagttgatagggcgacgatggtatcagctgcccgagcgacattgctgctgctagcatcgtctggcccagacgattgactgtgcactccactctgtaaatgctggccttttgactccttaggtatgggtgtgggagca

SEQ ID NO: 31363 - DNA, 474 bp, Oryza sativa
  Clone ID: uC-osflM202092a02a1
aaccaaatatgttcatatgatgtgtggccgggacatgacttgtttgcccactcacaaggagaaaatagaacaagaagcaaagtcaagtaggtaaaagacatgtactaattttgttattccttatgccgaagcaatattggatcaaaaatattctccacaatgtcgtggagcttgattgattatatggaatggtgatatgatctctctttgtgaactctgcatcctttcgctcaaaggtcctcggggccattgatatccttgttctcgatcactgctccatctgggatttccagtttgacaccaggttgggctgtgatggtcaccttgcccttcaatgtgatgctagagccaaaccaaacattaccggaaaccttcaaggtgtcaagctcaacaatgctggggattgacttgaagcgaccaaagaaacacccgaccttcttgaactctggacctagttcaattgagggattcgat

SEQ ID NO: 31364 - DNA, 438 bp, Oryza sativa
  Clone ID: uC-osflM202092a03a1
tttttattgatcatacatccatgtctgttcttctttttgcttcataaagaagcaaccaaagaggtttgcccgtgtactagctactatatatcataaaaccatacatgtttggtttcagcttatgaaatatacaggctaatctccgtgatctgaagagtgatctacatacactcttcatgcagatttagcgaacccgatcctgtctttgccgaagtcgaaaaccgtatgataagcacccatgaagacatctccaagaatccaaagaggaccgcgtggtggagggtatgtcgaacgccatgaacccgctgatgcagacggtttgccctccttgctccagtttcacgatgtactggtctggtgtaagaataaatgtcttggttgcaatggtgaatgcaagattaggcatcttcgagatttgatggcagctgacagttgatt

SEQ ID NO: 31365 - DNA, 524 bp, Oryza sativa
  unsure (1)..(524): unsure at all n locations
  Clone ID: uC-osflM202092a04a1
nnnnctnntnattagagactggnagctnagttctttttttcagagtgtatattagtacataactggttattgctgtaacaaaaaaacgtgcggctggaacatagctccacacaaagactgggaagaaaaaaaggcctcctatgtgtacaagactatacttatgatacggaccgcgggcacgggtattcgcctgaaaatacaccaggtgcgctgcgagttctattttacatatgtatatggtctatatgcacaccagccctgcatagcgggcatgatgcgtgcctgaaaagccagttgtcgatgcatcgtgcgtggaacgtgtgctggcaatgaggcaggacccgaacaaattgcgatgctccaaaatcctgaaggcaaactgcacaacaggtatcagtttcctgatcaggattggttgcagcgctgaatgtggttttggggattctgttaattagatctcttgacatgcctcctgtatttccggtttcaaaaggtcattggtgtcaatgaatggtgtactcagt

SEQ ID NO: 31366 - DNA, 353 bp, Oryza sativa
  unsure (1)..(353): unsure at all n locations
  Clone ID: uC-osflM202092a05a1
cnnnttaatanttcttcnnnnnnnnnnnnnnnntttttgggcaaaatatgaacacatttggggttatttatctgcaaacaataacacagttccataccaaatacgcacgataatacatactttaaacagactgagtttaacgtacatcacgtcacatggaacattggccgtcctctaaaactggaatactacattacacacaaacaaactaccaattggggcgcacaaataaatctgcaacaacagatctagtaggagtactagttaacacagccaacaacagcagcacccgttttattctgaaccctctctgcttctgaatcatttggttgcaatgaacagcccccaccttt

SEQ ID NO: 31367 - DNA, 436 bp, Oryza sativa
  unsure (1)..(436): unsure at all n locations
  Clone ID: uC-osflM202092a06a1
ggctatggnnnctcttattggagtatgtaattacatatcgatatgcatgattccacatttccaccaaacaagataaagtaagaagcagcgcgccatcatacagaccaatcaaggggcgttacacaaccaaagagagaagaaatagaaaagtcacagcaagaatacagccagtagtgtgatctgtggatgataaaaatattgtacagcgaatgacttattagaacacagtgcggcgatcttccaagagacaatgtgacacaaagctaaagagtcaaataatactactaaacattgaacaaggaacattattacaaaattgtgtgtccgatcctaatcaaaatnaagaagtttacatattccggctggccaattgagctgagctttccagaagtgatacccctcagatatgcaataaaattcttagtccaagatgtta

SEQ ID NO: 31368 - DNA, 466 bp, Oryza sativa
  Clone ID: uC-osflM202092a07a1
tttaataattttttttttttttttttttttttttgtgggggcatttaaattattccatcggtttactgctacagacgccgcgagaaatacaaagcttgaacacactgttttcaattcacaagcaccgcattacacgactataattggagaaaaaaaaagggggtacatgtctcacgctattgcaggggttatgctggaacaggaatacaagcttctcttttgtttcataagttaacaaatccatcacactgcatgatggctggcggcacaggggaacggaaaaaaaaaagaaaaactagtaagggcgatatcgccggccatgactcccttcaccaccttgggtgccaccatccctccggtcaccgcgtcgcattggtgggggaggggggaattccaccaggctgttgcagaacatatccaagacgaccgtcagggagcaccattgggaccatcctcattccagctg

SEQ ID NO: 31369 - DNA, 449 bp, Oryza sativa
  Clone ID: uC-osflM202092a08a1
tttaataatttttttttttttttttttttttttttgtgttttttttaatttttttttggggttttttccttttacaaaaattttttgacaggcctaatccatttatttgaaaaatttgggggggccaaaaaaaccccccccccccaacttggttcctggggatgcaacattagggggaggtaaaggttttcccttaacatgacaataaccggggggggttttcctaaaaaaaataaaattttcccaacaaattctcggccccccagttacattacttggggaatgcaaaaacccgggggggaaaaacaccatttttaaaccgccttttcttcgttactgaccccctctttgggaacccccgggcccacatttcccgccatataaataacccgggggtaattataaaattggaattcccaagactcgaagcctccaaagtaacacttttt

SEQ ID NO: 31370 - DNA, 393 bp, Oryza sativa
  Clone ID: uC-osflM202092a09a1
tttaataattttttttttttttttttggaaaccaagagagaaattataatattggcaatccaatcatcagtctgggggtgttgaacaatccctccatatacctctcgtgctgtaaagggtacagcaaagctatctgccaacatccccgtaggagtaggtatgtatcaatctatctgtacagactataaagaattcaacaagctagtagtcaccctgatattcccgtagctctatcgttcgggtacagtttcaggaagagagagcgtgtcggagccttcgtacttgctctgggcgggagtgttccggcgagattgacgcttggtcggcacgatcaccttctccatcccgacatcctcggatattgacaaatgtgcctcctcctccctgcctttg

SEQ ID NO: 31371 - DNA, 405 bp, Oryza sativa
  Clone ID: uC-osflM202092a10a1
ttaaattatttcttttttttttttttttttttttttgtttttttttaaatttttttggggtttttcccccccaaatttttttgatagggccggaaaaaattccaagatcacaaccctaaagggtcgtaccccggaaaaaggaaaaattttccaccacccacacaccgacaggttcaaaaaaaaaaaccgggagaagggtaacaccggaccggccgccgttaaatttgacccactgccctttgaccaacaaagaaacattggtgagatcgcccaaaaaaacacccttacaaccaatacaaagccaactcctagagggggcttgcaccaatcgaacgaaaggcttccgttaggggataccaaaacgaccttttcaaaaagagaagcgatgggaaaccaccgccccca

SEQ ID NO: 31372 - DNA, 334 bp, Oryza sativa
  Clone ID: uC-osflM202092a11a1
tttaataattttttttttttttttttttttttttttggttttttttaaattttttttgggtttttccccttttttttttttgggacccaaaactttgggagcccttggccccttttaacaatttgattgatttgggaggagcacatgggacaaacaccaattttttaaaaaggtttaacttccaaaaaaaacaaagcccaaaaagggttttggaggctaaaatggtttgatccaaggcccggggttagaatgaatttgctgttagggccctcctgttcccggtggctttttaaaaagggggttcagccccttaaccacaatggtcaaaattggg

SEQ ID NO: 31373 - DNA, 415 bp, Oryza sativa
  Clone ID: uC-osflM202092b01a1
atcatcatctacaaacaatggggggcccccacttatttttttgcttttcagcagattaattagcgacacaacctcgcgcttaattttgcttcgcgcatgcatgcatggattaaaagattacaagtacagaacacaaaacccagctataacaacaaaaaacacattacaaagtatcacattgttttttctcagctgaacctagtatttcagttcagtccccatctgcatccatcatatccacagctgcttccttccattcttctttacctttggggaagaaaccagctgaaatagtagtagtagtagtaaaaccttcaatcttgtactgctgctacgtgatttcgattgctgctacttacttacttcttcttctccatttgaggcttgttcatcagtagctcatgacgatgagaag

SEQ ID NO: 31374 - DNA, 564 bp, Oryza sativa
  unsure (1)..(564): unsure at all n locations
  Clone ID: uC-osflM202092b02a1
tttttaagtagccaaaactttgatgttacagcttacgggggcaattataatggtctggtgcttctgccacaaacaaatgtttcaaaactcgtcccttttgcaccattaaatatttctccctaggcctttcaaaattgtgaaaaagtattatgaaaaatagactaataagctcgcctaaaagcatatgacaagctactgtaaaacaccatccgttttggtgttttggatggaactagatttctatggcattaaaaatgaacctacagacatgagaattcacagttcccaccgatggtacggcgcaacatgagtgtacagtttgtgaagtgatttaccagttcatgctcacttcgtcactgcacttggcgttaaaattgcatattgccaaagcatttcgtccaatgaagcgctatggaattatctcctgctgtttgctgattgagccttgcatagggttgcaagttctctaatcagctttctctcgtcgctgctcagacgctttggaatctcgacctgcacacgcactagctggtctncacgagcatttgacttcccgaggagcgg

SEQ ID NO: 31375 - DNA, 403 bp, Oryza sativa
  Clone ID: uC-osflM202092b03a1
tttttaataattttttttttttttttttttttttttgggggttttttttttttaacacagggggggccattggactttttttatcaaccaaccagataacattgttttacacaatttgaacgaacgaagcaaatttttgggtccccggaaagaggaaaacgttgggcgttttaccgcagcctggatgaaagcaatggacctcaccgccgttgtttgccggagaaccacacttacttgccggggacaaagttgggggcgtaggcccatgcgttgtttttgaccgggtcggcgagggggtcggccaggtttttcaggggccccttgccggggaccatggcctggacaaaaaaccccaacatggagaacatggggaggcggccgtttttgatctccttcaccttga

SEQ ID NO: 31376 - DNA, 342 bp, Oryza sativa
  unsure (1)..(342): unsure at all n locations
  Clone ID: uC-osflM202092b04a1
nncccnntaaataattttttcaccaactttttttttttttgtgttttttttttttttaacaattccaattgccccctgtctttttatataaaaaggggaaatttaatacacttttatttgccagccagattgagttggcaaccaatttttaacaagaatgacaaaaaaaaaaagggaaaatgaaaagagaaaatttcatcgggcttttggtcgctgttaaaaaaaactcgacacgacatttcttgcaaaattaaacctagtaattagcgggaggagnatgctcgtcccttttacaaacaggcaaaaaagagagtgggaaaatcaaaaaccataaatgggaat

SEQ ID NO: 31377 - DNA, 788 bp, Oryza sativa
  unsure (1)..(788): unsure at all n locations
  Clone ID: uC-osflM202092b05a1
cttttaaattatatcccttttttttttttttttttttaagtgtttttttaaaattttttttcggttttttcccccttttttttttttatttttttacaaggttttcttttttttttttcatcaaacgctttctgcgaaccccaaaaaaaaattatttcccaatgggggggccacccaaacctcacaaaaaaaaaggggaggggacgacccacccccaaaaaaacatagggaattttcaaaaacaaacaaacgcacgaaaaaaaaaatgttacggggggggggctccaaaacaaacacaagagaaagcgccccccaccaattgtaaaaacccccacaaaaaaaatccacaaaaaaaaaacgcctgctaattaaaaaaagggtagaaggggcacaaagatgttctccccagaacaaaaccccaaaaaaaaaattttttggagaaagaccaccccccccggccttaaaaaaaaaggaaaaaaaaaaccccccatccccccaaatattttacagggaaaaaaaaggaaaaccctttacttggccaacaaaaaaacaaaagaaggcgggaaaaaaatctattacctctacccttaaaaaaaaaaataaaaagactcccccccacacaaaaaaaaaaaaattaaaaaaattggggtcaaatccaaaacaccaattaaggaaaccaaaaccaaaaaaagccattaaacaataaggggcgaacaaccacctaaaacacaaaaattntgagtttcgaaccctttacaaaggcaaaaaaaaaaaaaaatttttttttt

SEQ ID NO: 31378 - DNA, 595 bp, Oryza sativa
  unsure (1)..(595): unsure at all n locations
  Clone ID: uC-osflM202092b06a1
tttttatcgcaacatgagcacaactatataacttaagaagcacattacagcacacacatggccaaggcagttatttgaatcagtctccaacatacttcaaatcatagaccacaccatacagcaaacatagtataaacattgtcatagagagtacagctgatagcagcttgtaatattctagcattactttggtagcatccctctacaaaacatagcagacatcaccagctcttcatcttggccatacacattcaacatggtttgctagtgacagaccacactgaccagaacatttcgtctcctcagtaggcaccagctgccatgagcagctcatcaaggctccagatgccctcgttgcttgccccgtcttgtgtagcatcattttgagaaggttgtccattgattcatctgagctgctctcaaataaggtaatggcaaatacttcatctcgggatcgaaggtgggcatgttttgtgcgagattaggcatgccatttccctggggcacggcgatacctagttggtcctcattctctttggcgcttcacctgtcagggtagcaggntcaccatatgctggcatggcagcattaggaa

SEQ ID NO: 31379 - DNA, 479 bp, Oryza sativa
  unsure (1)..(479): unsure at all n locations
  Clone ID: uC-osflM202092b07a1
ttnnatacctactaatatttatttttaaaataccgtgagccttacactcattttacttttaaccgaacaatataatagtccatcagatgcaatgtttaacccctaactccggctctggctacacattgagataaaatgttttgacctctaactttggctatggcttggcttggtggttagtccgaacccaaatgggaacagcgggttgtaatgcttgtcgccgaaattcatcggcagctggtccaccgatttgaaccaagtacgtggcagcttgccggtgaagccgtgatccccgaacagcacgtcggcgacgccgtggccctccgtgccggggagccaggcggcgacgaacgcgtccatggcgccgatgtacggctccaccacgagcggacgcccggagacgagcaccaccacgcacttgacgagcccgcacacgtccttgatcaccttcggccccggcgacgggatggtcaggttca

SEQ ID NO: 31380 - DNA, 395 bp, Oryza sativa
  unsure (1)..(395): unsure at all n locations
  Clone ID: uC-osflM202092b08a1
ctttaaatagggaccacaactctgaaaagagagattncgtatcttttttatcaactcaggggaaatacccccgggcggcgctaattcgaatccctcgggcaaaataagaacagcacccacattcaaccctccctttttcccattagcaagaacttgtttcagttgcatatcataaggaattcgaagaactgcttcaaatacagtatcgggaagcactgcttggggaacttcaatatccacaggcttattcgctaaatggcaattggcacatacaattcgtccagttgcttctcgggggttttcataaccttgctgcgcaaaaatgggatatgcatttgaaatagatgtccgagttattacgtatatcatgatcgatacaaaaatcgaacgagtca

SEQ ID NO: 31381 - DNA, 410 bp, Oryza sativa
  unsure (1)..(410): unsure at all n locations
  Clone ID: uC-osflM202092b09a1
tttaataattttttttttgatccaggttccacatggggtacattacgacagagtaaaaatagtttctcagtagcacgcgaacataggattgttgatgtgaaacacatgcattcgacaaaagggaaatgaaatacgacaacgaaagcagttctcttagcagtagaccaactagaacatgtaagggtaacggcacaacacatgcggcggccaaaaatttagagcttgtcctcgaaatcggagaggggagtcatctgctccttgagacccttcctcttgcggatatcctgcaccagggttgaagcctgcgagccagcttcaagaggatcagaggtcatcatgtcccaatggtcgaacacacactggnggaaggcctggccagatgtcgcagccctaagctggcttgagaaccc

SEQ ID NO: 31382 - DNA, 401 bp, Oryza sativa
  Clone ID: uC-osflM202092b10a1
tttaataatttttttttttttttttttttttttttgggtttttttttttttttttttgtgtttctccccttttttttttttttttccccacaaccgggaacaaatcacgggaattaaaaatggctcctgtttggcgtttacccatgaatttccccattgcccatgggggggggacaattttacccaacgggaaagggccctcccttaaatcaagggggggcctatcagttaaaaagggaccacctttttccaaggaaggggggggggggtgtcattccaaagggggagggggcaaaacactgtttgttcccctgccttctaaaggctgaatcccctgggtttggccggaacggtcttggtcgaaaaaaacaagaaaggatcagggctaaaagctccaaggg

SEQ ID NO: 31383 - DNA, 452 bp, Oryza sativa
  Clone ID: uC-osflM202092b11a1
ttaaataatttttttcttttttttttttttttgggagagcgttttttctgccctgaatggtgataaaccatatcggacatataaattacaaggatacatgagccacctcccctcaaatgcttatatattaattgcacacccttgtcgatcgatcgatctgcgagcgatctggaccgcacaaatataaacgaacggttccgacgcacgcacgtggcatccatagaggatgcacatatacgtacgtaagtacgtatattcacaatgtacgcgtatatacgtacgtatacatacgctataccatacgtatgcatgtcgatcttcttcttctctaccttgggagcggggatgtcggccaggtcgtcgcggtacggcaagggctcgtcgtcgtcgacggcgaggtcgccggcgtcggccttcttggcgtcaacaaccgcggcgagggaggagtcggc

SEQ ID NO: 31384 - DNA, 554 bp, Oryza sativa
  unsure (1)..(554): unsure at all n locations
  Clone ID: uC-osflM202092b12a1
tttaataatttacaaggcacgatttataaacacggagagttctttaatcatgcgaatggttcacagaatacaccaaagtatgtgtaactgcttgtccaagaagatagtgaaggttaatatagcattagcataacatcttacagtaggtgtctacgataagaactattgacaaagtttccacacgctgtaaaatgccaggggtcccttttacataagatggcactccatggatatatgtttacaccgacttgttcttgcaagaattccaacagtcacctcaggaattcagcttgatgccttttcttttacccttgctgttccattcaaagtttcttagttcttgtacttcatggtttctttctcaaacccaattggggggaactgttttgcatattcctccacatcatggcgaagtttttgcaatctcggattgaatgttgctatcagattgcanagtggcaacaaagtccttcagttttgttccacctgctgcagccttaaccttaaagccaagttcactgctgcatcgaagaaatcagcaaccttagcaaagt

SEQ ID NO: 31385 - DNA, 477 bp, Oryza sativa
  unsure (1)..(477): unsure at all n locations
  Clone ID: uC-osflM202092c01a1
tttntaattaatttttttaccactgccagggccattgggggtcttctcacccttcttatggtttttgagcgtcttttcaggcctatcatgtgtctgttgtttgtcctcagtcaccccatcaaggatggttgtctcttcattcatcttcttcacatctttgtgtatttttgactgaatgggctgttcttgaagatcgtcgctgctaggatcagtcttctcaattgcttcttcaggcactttagatgactcggatgtcactgggattgtattgctcaactttttcagctttgcaacaaaaaatccatccatgttgttcacatgaggataaaacctccttgttttatctaaagaagtatggaatcgatgctctcggaaccggatgaatcctggacgtccaaaatctaatccacaaggcacaagctttacgtttcgctttttaagggcatagtcaataactgcctcattctccggaatcat

SEQ ID NO: 31386 - DNA, 468 bp, Oryza sativa
  unsure (1)..(468): unsure at all n locations
  Clone ID: uC-osflM202092c02a1
tttttaatagattcattcattcattcatttgatcaaaggagacgagacgagctttcttcttgcgatcaaaaacacagatgggcaaccacacagttaacacaaactagatagttccacacaaaactaacgatgataacgatcggatgatgatgatggtagctcgattagatagatagataacttggccatgagggccccaccgctcagttcctccagttcccgtcggagttgccgccgccgcggctgccgtagccgccgccgtagccggcgtcgtagccggcggcaccacgggcggcaccgtagccaccggcaccggcgtagccgcttcacggcgctggccgtagccaccgtcgtcgncaccaccaccgtagccgccgccaccgtagccttcgccttcgccgcgctggccgtagcaccgccccttcgcttttnggagaggggcgactgggacttgttgacggtgatgtt

SEQ ID NO: 31387 - DNA, 500 bp, Oryza sativa
  unsure (1)..(500): unsure at all n locations
  Clone ID: uC-osflM202092c03a1
ttttaaataaatttttttttttttttttttttttttttgtgggaaagtaacaaagagatggaatatccattatatacatttgggatccagtcccaaaacaatcgagatccatgcatatgcatgttccatgatcgagctactaatttagttaatcaaccgcggcgactgcagttggaatgggggagatgcatatatatatatatatatatatatatatatatagatatatatatgaacctaagactccttcagtgccacgggggggggggggtggttaatagaatcctgcgcgcgtggggcgcgccttctcttgtgtgtaggtagttggggggggggggtcccaaagtatatacaaaaaatataacctctttgtttcttctcccnanaggaacaaaggaaaaaaataaacaaaaaaaacttaatnttttgtgtgggcgggcgcgagagagaatatatacgtgcgcgcgcgcgcgcgcgcgaatatatatttttttgtgtga

SEQ ID NO: 31388 - DNA, 475 bp, Oryza sativa
  unsure (1)..(475): unsure at all n locations
  Clone ID: uC-osflM202092c05a1
ccccnntgataaaatccaaccacncaanagcaatagactctgttgatgttgtattacaacatgcagcagtgccattaatacgccagtacattaattaagttacacatatgcaggctccattttggtttcttttaatttatcgtattacagaatttctgtagccttgctgatgatcacttggatatcatgtactagtaattaacaataggatgcatacaaaagatggcccaacgacaacagaagatgcgtgcatctgacattgtctggccttatttggttggtagtactccaattaattaacaagagatgatgcattcttgtgccttagtttcttcacatgcttggcttcacgttgagcctattcgcaatcttcacccccaacgacttatcacactgggagaggtagttgacccagatggcgcggagctcaggggagaccttgtggtgcgcgagctccgccgcgaagcggtggatg

SEQ ID NO: 31389 - DNA, 472 bp, Oryza sativa
  unsure (1)..(472): unsure at all n locations
  Clone ID: uC-osflM202092c06a1
nnnnnnnnntaataatttcccncngggcagaaatcattaatacggaggcagaatgcccagcccaaaaccaatacaagagtgccaataataattaaacaaactcaacatctagtacttgactatagcaaactgaagcccgtaccccacacgaaacacaaacttcgatcactgatcgggcttcgctgaccaggccttgaccaatcttgacacgaacttaacaaagctgcagtgcagaaaaagcaccaaactaacacacgccaaacacttccaaattccaaccatggcctggtctcacacacgccccaattaagcgctgctcttgtgctcgccggtggcggcggcggcggtcttgtcttcctcgccggagcccttgtggtaaccgggcagtttctccatgatcttgcccagtatacccttcttctccttcccatccgggctgctcacttcctctgtagccggcggtgggtgtgct

SEQ ID NO: 31390 - DNA, 393 bp, Oryza sativa
  Clone ID: uC-osflM202092c07a1
ttaataattttttttttttttttttttttttttttgtttttttttattttttttttggggttttcccccttttaaagggaaaaacaaaaaaataattttaaacttctaaggggacaaaaaaccaactcgaaaaaaaaatcggggaaaaaaacccaattttcccaacccaaaaacaacgaacttggtgggcaaaaaaccatccaaccacaataaacccctggtaaagtacgggcccccaattaaattgccggggaaaaaagtggggggcaacccccaggcgttgttgttgaccgggaaagaaaggggggtggcaaggatttcgagggggcccctgtcgggaaaaaaggcctggaaaaaaaaacccaaaaaggaaaacaagggaaggcggcccct

SEQ ID NO: 31391 - DNA, 555 bp, Oryza sativa
  unsure (1)..(555): unsure at all n locations
  Clone ID: uC-osflM202092c08a1
ttaataagaaccccagaaacacgttcttattacagggggaaggtctggagcacactgaattactttaagtgcacatctgtttgatgatctccttgttattggcaaggtagctacacagtaagaaaagagaaacggaacaccttgttctgatatgcatccttccctcagaaaacgatgttctgccatggttatgatctgcagactttcctcatgcccttagctcgacataggatcctgagatgcctgaggtgccaatcagggtgatctttccccactcggaccctacaccactgcaccgcattttcaggtgtatcattttagtccccaactcattctccactttcttacgtagataattttcctccgggccaaatgattccagatatttcatgtaacgcttatatgcagatttaacagcatcttctatataaccaggcaaggggcccacattctcaccagttataccacanagatcatctagagccattcttagggtgactagaactccaccaaattcttcacatgcctcagctgcacgaaatacatttagcanag

SEQ ID NO: 31392 - DNA, 552 bp, Oryza sativa
  unsure (1)..(552): unsure at all n locations
  Clone ID: uC-osflM202092c09a1
tntaatanggacgacaactttaaatattgctcagtggggcactatctggagacaacacacacgagagtcatatccagaggaaaacaatcagcccagacggaccactagcaccaaatgcaaagcaatgggaagaactaattcgaccgctaccaccctagtaaaaaccagagaagagagaggaaggggggacaggaagaaaaacattctagtagaacaggagaagaatccatccatcatggtgacagcagcatgaggcatctaaatcgatggtctccaataacatgcggagccatcgatcgatcgatcttcccattttactggccctcgcaggcgtcgcccttggaggcttctttcacctcatcaccaccgtcctccgtgaggtcagaggtccagagggtcaagttgtccctcaggagctgcatgatcaaagtgctgtccttgtaagactccntcccgagggtatccaactcggagatggcttcgtcaaacgcctgcttagcaaggttgcaagccttgtctggagagtttagaatctcgtagtagaacacagag

SEQ ID NO: 31393 - DNA, 430 bp, Oryza sativa
  Clone ID: uC-osflM202092c10a1
tttaataatttttttttttttttttttttttgctgggggagtaaattttactgttttggtaatgcatatatctggaagaaatttacaatttgatgtcggacgaccgtgttgcaaaatctaaatgaacagaagccacctttacaggcttaaagcatatattgttacaaatatattacaaacacgccaattggggtagaaaagaaccacataactcaatataaaagggctgttttaatttttgtttttcctaaataaacatatttacaatctttccacatcgcagtacaaaagtttataagtgataagttgagaaaaatgttgtgaaggctgtaatgtctgcccaacttgggaagagactcttcagtttccttgtacgatcaaggagatactggtcaagtacagctacatcgattctcaaaggttcagaaga

SEQ ID NO: 31394 - DNA, 515 bp, Oryza sativa
  Clone ID: uC-osflM202092c11a1
tttaataattttttttttagctaaggaagcaattgggggagtggatggagggaggcacagtttaaccccttacgagctgtctagcgaatttatttatttattgaacttagctgcctagcgaatttaacccatggtaagagaatatgtacgcagagtttaacccctctgaactgaatatcgtgccaagttgagcgaacgccaaataaatcagcttcagttgatgcagcagacagcagttctgattgccatctgtccttggcaccatctttgccactgtttgctgataatgcgatgaagagtagatagtagtcagatgttgcagttagcgatatctattgactaccacttccaatggttgctgtgttatcaccatgtcacgtattgagctcatatattcccatgagtcctacaaccaaaatagagggatctaaagaggtcttgtgttcttccggagccagtcgagagaatggccactcaacaaaggggaaaccttttcccagacttcgtcatggtat

SEQ ID NO: 31395 - DNA, 511 bp, Oryza sativa
  Clone ID: uC-osflM202092c12a1
ttaaataatttttacaccaatcatcccaagcaaagagaggatttttgacagagtgattgtttagacatgcttcaaacataaaaaaacacgcgcaaagccacaatttattatcagtgttgaagcgacatcatactatcatggagacggataacaaatagtgtccatgagacgaacgatgaaacgactgagcaggagcatcttttattcacgcagagtactatggctggcaagtgatagcagcaatcgatggccccgtagaagataacgcaccggaagcttaatcatcgtactcctggcggcgatggtggtggtgcttctgataacgctgcttcttttcatcatcagagtcattgtcatcatgtttcttgcggccgtagcctccctggtattcgtctcccccgccatagctcggcttgttgtatccaccactctcatacgcaggcttctcgccgtacccatacccataagaaaccctgcgtcttctcctgactgtaaggctttcgcttggggt

SEQ ID NO: 31396 - DNA, 416 bp, Oryza sativa
  unsure (1)..(416): unsure at all n locations
  Clone ID: uC-osflM202092d01a1
ccttttaataatttctctccccncccccaccctccccggggggttttttttttttttttccagaaggaaaccatatatagatggcccattacattatagagagcaaatgcccaatacaaaaagggggcaaacagggcagggggggggccagaatttctaggctaaaagggaccaacccaatggttgacactctgctattggcaaaaggtttacttggaccggaaaatttctaaaaaatcaaccccccgggtctccaggaaaaaacctgaaaccggatttctggaaccgggggtagcttatgggtgaggcataggaagtttataagccttttattttttccgttaatacagaaatcgcccccgtcaatcgccggggggaacaaaaatctgggtggctagccctccatcctgaaaaag

SEQ ID NO: 31397 - DNA, 445 bp, Oryza sativa
  unsure (1)..(445): unsure at all n locations
  Clone ID: uC-osflM202092d02a1
tttttaatgnattgggttctcattatcatatcggtccgggtctctgaacctggcatttacaaattttcaagaactccactggaagtgctgggggctaccaagcatgcaaggactgcttatttggatttacacagcgtaatacagcatggctcaaatctacacagatggaatagctcattttcttgaggaaaaaataatagtaataatctacaaaaaatagtagctcatttgccgatcggttgaagaagactacgacgacgacgacaatggcttgtaccaggatgatcgtgtccactctgactcgatccgatgagttgcgtgctagggcttgtcgacgtcgacgtgttcgctgctgtcggttcgccgtctgcccatcttcccgatcgacgacgcaatgctgcccatgatgctgctggtgctgccgccgtcgccgctggggtggttc

SEQ ID NO: 31398 - DNA, 432 bp, Oryza sativa
  Clone ID: uC-osflM202092d03a1
ttttaaataaattccacacagaatgtacatgaaacaggggggtatcagatattcacattggaccgtctcctctcgaaagcatatgtacatggcgcacgcatgcaggtgcccgggtgtctgcacaaatatttttcacgcccacatgccgtacttcaccggcgtgccggtcggcttgatccatggctcggcgtgcaagaagttctgcacggtgaacttggtggcctccttcttgctgatcaccttcttgtaccccggccagctgacgcggccggcggtggcggcgccggcgcccttgttcccgtactccgcgtaccagagcgtcttgagcccgaagtcgccgctccacgggaggtagccggccttgtctaccaaggcgggggattgcggagttcatgatgagcgtgcgcgagtacttgcgccacgggcgtgcga

SEQ ID NO: 31399 - DNA, 570 bp, Oryza sativa
  unsure (1)..(570): unsure at all n locations
  Clone ID: uC-osflM202092d04a1
ttttaatacagacnccaagagtactattcgttgctacgggcatgtatcaaaagattccggaattgttatctactttcatcatccataaacacaaaattcaacgctaaggtccatgagaccatgacaacaaatccgaatttacgagttcgctcatatttactgttagccaagccttctgaatttgattttgcgttccatcgctatattcatgcatacatctaaagttacctcttattttccaaaagaggttcaacaaggttcacctgatgttttgatggattggaatcaccttcagtaggtttcttcaaaattccagttggctgtccttgcctattctgcgtacctgtgcccttttgacccgttaatctccgaattgatggagccctggcaaccgaagatgcagcggcggcggcggccactcggatcctcttatgaacatcaacatactcatcagtttcatccactatctcctcctgcaatagttcttcaaatacatcttcaagtgtgatgataccaatgacctcaccatcgtctatatcctctgatgaccgagacattgcatatggcatc

SEQ ID NO: 31400 - DNA, 139 bp, Oryza sativa
  unsure (1)..(139): unsure at all n locations
  Clone ID: uC-osflM202092d05a1
cctttaaataatacccccttctttttttttttttttgntgttctttttaaaaattttatcccggaaaccccccattnaacaaaaaataaaaacgccaaaacaaaaaaccaaatccaataacatatttttaacttatctc

SEQ ID NO: 31401 - DNA, 415 bp, Oryza sativa
  unsure (1)..(415): unsure at all n locations
  Clone ID: uC-osflM202092d06a1
ttttaattattaccccnccnccccctttcntttatcggcagcttatttggccatttattagaaaacactatatctatgaatctcttatttggaaaataaaaaaccaaatctatgaatatatctctagggttttgctagaagggacttccttttggttttgggtattcagcaaaattatcaatgcgaaaaatatttattagctaaccattaccaatgtctgccttcctggaaccacagctaagctcctaaaaaattcttcagctcctttttggtgaccctttccaagggatttccggggagggaatcccataagtacaacccttgagggaacttgtatggggcaaggttattttttgaccaactttggaagggtttcaagggcaaggcttgtttccaggccaaatcaaatcttttt

SEQ ID NO: 31402 - DNA, 205 bp, Oryza sativa
  Clone ID: uC-osflM202092d07a1
ttaaataatttccctttttttattttttttttttttgttttttttttatctttttaaagggaaaaacccgtgaggatagaagcaacaaaataatagacactggcaacaaccacacataacactactaccaacaactaaaaatccactccattaaagaagccactgacagcaaccccaagtcgtcaaccccaccgacactcccacc

SEQ ID NO: 31403 - DNA, 929 bp, Oryza sativa
  Clone ID: uC-osflM202092d08a1
ttaaataattttctttttttttttttttttttttggggtttttaaaaaaattataaaacaataaaacccaataaaaaaaaaataacaaaataaaaaaaaacaaaaaaaaaaaaaaaaaaaaaaaaataaacacaaaaaaaaaaaaaaaaattaaaaaaaaaataaaacaaaaaaaaacaaataatcaaaaacaaaaaaaaaaataaaaaataaaaaaaaaaaaaaaaaaaaaataaaaaaaaaaaaaaaaaaaaaatataaaaaacacacaaaaaacaattaaaaaaataaaaaataaaaaaaaaaaaaaaaaaaaaaaaacaaaacaaaaataaataaaaaaaaaaataaaaaaaaaaactataaaaaaaaaaaaccaaaaaaaaaaaaaaaaaacctaataaataaaaaaaaacaaaaaattaataaaaaaaaaaaaaaaattaaaaaacaacaaaaacaaaaaaaaaatagaaaataaacaaaataaaaataaattaacaaattaaaaaatcaactaataaaaaccaaaacacaaaaacaaaaaaaacaaaaatcaaaataaaataaaaatcaaatcaaaaaaaacaaaatacaaaaaaaaaaaaaacaaaaaccaacaaaaaataacaaaaataaaaacaacacataataaacaatattaaaacataaatacaataaaaaaaaaaaataaaaaaaaactacaaaaaataaaaacacaaacaataatataaaaaacataaaataaaaaaaacaaatacatcacaaaataaaaaaaaaatcataaaaaaacaaaacaaatacaaataaatattcaaaaataaaaaaaacaaaaaaaaaaataaaataaaaaaataataaaaaaaatacaaaaacaataaataagtaataaaaacaaaataaaaatcaaaaaaaaacattacatctat

SEQ ID NO: 31404 - DNA, 411 bp, Oryza sativa
  Clone ID: uC-osflM202092d09a1
ttaataaattttttttttttttttttttttttttggggttttgaacaaaaatcgatagtcataacattcatagcattgttatatttcatcaagataacaggaaaatggggtcttggttcagtttgccaagggatccaagatacagcttaaataatgacaatggatacaatggttaggggtttgcagcactcccgaattaggagctgttggtggaccgaacacaacaacaaacttcaatttcctggggccacgagagccacagacctgaatcggggttgctctcgtcgaccaccggtatcacccaggggagctccaatcccatcgatggcagctcagcaaaaacgaatgagcgcgcattggggaaaatgaatggatggatatctaggggaaacctatactaatggacatggc

SEQ ID NO: 31405 - DNA, 441 bp, Oryza sativa
  unsure (1)..(441): unsure at all n locations
  Clone ID: uC-osflM202092d10a1
ntaatanctccaagcacaaccctctttatattcgtgtacaaccccttctgttggttggcttcgaaaactgtatgaaacgagcacttgatttgccccaagttgggcgccacaaaactcaaatatggcaaatgtacaaaatcaaatacaaacgcagtacacatcaaatcaatcgtacattggggatttagggttgttagtgcatcatctggccgtcgggcgtcggatcgataggaaggccatcggcacggtcactcgatttttccttggctttgactggattctttatgacgaaattgacgtattggtagcctccactggtagggccggccgccgctgcgtcggccttgcttgttgcggattcctttgccgcggtggatgcctcggccttacctgccgcggatttctaagccatggcgggtgcatcccctttgccggctgaag

SEQ ID NO: 31406 - DNA, 379 bp, Oryza sativa
  Clone ID: uC-osflM202092d12a1
tttaatatttcacaagtaatcgagatgttacaccttgattgacctgccctctatcttgtacaattctatatggataccagaggtaatcaaatcagaagaaatgaggcacagcacggcgtcgaataatccgccttcgctagcagcaaatgcacattctacagggaccaagcctttttccgccttgagatcacggggagaaagacactgcaattggcatggttggggtccagcccacacacgacaaggggggcctgaccctcggttctaatctaagaattctaatcattctagggctacaacaatggtaggtaagggacccaaccaaattaaagaatggtgggttaaaggctacctggcttggtcaacccccattttgttc

SEQ ID NO: 31407 - DNA, 526 bp, Oryza sativa
  Clone ID: uC-osflM202092e01a1
ttttaataatttttttttttttctccaagaggcaatgggggattaacagatcggtacaattcgcacctcgtgcagttgtcaatagtcgacacagcaaaactatcatcttacataagcagcttcatcaaattattccaagaaaaagaaagcaatcttgcaataaaaaaaaggataagtaggggtaacgattcatcgtagaaacaacgggtggcaactcaagtaagccacgtcagttgaatttgcctatcattattgacagctttgttggttttggacaaagaaaacaaggaaaatggtgctcaaaaaaatttcctccacgtcgcacacacaatgtgcatggacgaggccataatatactgatgccaaaagaggcaattatcttgcctttgcagaatgtaaacatagtacatcggttggagagtctagtaacggagcatgtaggtccggcgcctgaaccagttgtagtccggaagaccctgaatgggtcccattgcagcaatagcgatatcctggtcaaaaatgaaac

SEQ ID NO: 31408 - DNA, 512 bp, Oryza sativa
  Clone ID: uC-osflM202092e03a1
tcttaaattcttccagcaagaaaaatgaaatgttaaaggggggaggttagagcaatgtattctctaccacacagaaaaggcttcaaggccttttatcatcttatacactgatgaatataaatagaagtagtacattgtgtaacctgttaggtcattttgatttaactaatgatacaacaacacaagcaggcagaggagagcacacccacacattagagtacaagcagccgcctcttggctgaaacacaagctctccgatgagccaattttatcttcctcccaactttattagctgaattctctggcgcagtgaagtaaaagtatctagcaccacaagaaaaacagaccaacatcttgttgggagggatactaacacatctttcaattcttcggtcataccatatatagtggcacgcctactgcaacgcagctttaagtgatcatcacacccactttgcgcgcgaaatcgttgtcgtccttcaaatcatcgccttcgccttcatactcctgga

SEQ ID NO: 31409 - DNA, 454 bp, Oryza sativa
  unsure (1)..(454): unsure at all n locations
  Clone ID: uC-osflM202092e04a1
ccctttaataaaaccccccagacaacagaagnatatacggggtacatttacaaaccaaaaagcgggcgcccccacaacactggatgcactacattactaacactaaatgatccatttggttctagataagtaaaaaagagaaacaaggaatgaacaagcccttcaatgggcacccacacacgtttcactacataaatactgagcatcacctttctactccatagcagatccattcctgcctgccttattgagacacaagtttgtacatgaacagcaatgccaacaccttctgtttagctcacccaattaaatttaccaccaaagcagtaataaagaaagctggacaattaaacgcagtttggctgtacttggaggtcgaagttcacaaggttgccgcaacctcctgattgcccaaataatgcagatatgaggttgagctaccaccatgggacaa

SEQ ID NO: 31410 - DNA, 463 bp, Oryza sativa
  unsure (1)..(463): unsure at all n locations
  Clone ID: uC-osflM202092e05a1
ttttaatangtgcgcatgantngatatatggattcctgagtcagactggggtttaaccacaaattttagatgagaaccactttacaaattatatgtacaatgcaagttaaccttaacctaagtgtatgatgctgaagaagcaatggcgttttcagatatccacaagactatttacatcaccccattctccatttatttcctaagctaaagtcgtcagattcttatgtatgaacaaggtcgtgtttctgatcttcttggtgagaaaatgagcaattttttttttcaggagtaggatctgatgagcctgaacccctggaacgagcccttgagcaggttgccaatataggacgccgcgccgccgccgtcgatgtcctcgtntgcggatgatggcagcgcggtcgttgctcttgacgcgcaacacggtgtggccaagctgctcgccgagcgcctccatggccttgcc

SEQ ID NO: 31411 - DNA, 446 bp, Oryza sativa
  unsure (1)..(446): unsure at all n locations
  Clone ID: uC-osflM202092e07a1
ttnaatagtctccaataagcgatctgcagaaattttgttaaaataataacaaagatcgcttgaattctggagagatttaatgcagcattattattgccattgtcgtatactacagttaacactcgcataagcaactaaaaattcacgccacttctgatgccactgatggcgacaccatcttgccatggccaccggcgatgccccccggcgacggtggtggcggcggatcaaccacaaccatgtccctcctccgcgcgacgtgccagaccatgtcggcgaggtcgcgcgccgacgacccgccgtcggccatcgccgccttggcctccgccgtgagcttccttggcctcgcgcgccttgccgccgacggcgtcccgttgtccattatttccttcaccgcgcttgccaccttgtcgttccgaacctgaaccggggagttcacggcgttc

SEQ ID NO: 31412 - DNA, 533 bp, Oryza sativa
  unsure (1)..(533): unsure at all n locations
  Clone ID: uC-osflM202092e09a1
tttattttcacaatagcatcttgatgtgttgatgccggggattataatcaaatacagttcatcacatcatgtcccaacaaggcaacacattgtccactacaacaatacaggcaacaaatggctttgccataccattcacaattccaattccatacaaaaaaaagaggaactatctcacctattgacactgcactatagatcagaaatttacaaggaccggatcatggctgcagaagcatccccttgaggcttcagtgttgtgtgattctgttgacctcaggtgctggtaggaacatctgcgccagccactngcaacgtttgatcaattctgcgcgcttcttcctccagtaccagatcgcagcattgtagaactcgttgcggatcttcttggaagctgctctccagtcgcacttctccatctcggctctagccgtcatcccatgttgtctctgaattccttgtccgtcagcaatagctgaatcttgccaagacagtcttcgaggtcttctggggtgaacagngaagctgtcttc

SEQ ID NO: 31413 - DNA, 219 bp, Oryza sativa
  unsure (1)..(219): unsure at all n locations
  Clone ID: uC-osflM202092e10a1
cctttnaataatatcccctttttttttttttttttttttgtgtttttttttttttttttttccccctttccccccccttttcccctttttctccccccctctcccccctctcctcccccccctccccctncccgccccccaggccccccaaaacgcccccagaaaaacaacccaaaaaaccaccccccaaaacccccaaaaaaacaaaaaaaaccacaa

SEQ ID NO: 31414 - DNA, 434 bp, Oryza sativa
  Clone ID: uC-osflM202092e11a1
ggaacaaagcaaggcctactatatcacaagcactgacccaattacacaacgcctgccccagtaatttacaggacgtgacatacaaatgtgcgttcgccctccattgggaaacttttattacattcaacaccacgaaagactgaagcatgtgcactggacaaatgttctgaataaaagcgtcgcaccaagggccatacatcattgatggatggatacataattagtcaactcaagctctcaggatgacatgaaatgccaatggccgtgtccgcttcttcagacagagctactcgattgcagaagccacccttaataagctagcctggccccatggtcgcactatcagttgcaagcctataggaagcccttgcttatcatgaccaacaggtacagctatcgccggagaccaagaagattgccagctatcacgaatc

SEQ ID NO: 31415 - DNA, 418 bp, Oryza sativa
  Clone ID: uC-osflM202092e12a1
tttatttaggccaaaccatgcaaacttacataagggggaagtgcagtcataacacaatatacactagtttgataaacaaactttattcagcagcaagtaaataaggtaacacaaagcgaatatctgatcctcagtagcgcgccaggctagacaagttcggatcatagagcatcgccatcgagaactaggccaaaccttcaaaacaatgtacattgttggcctcacaatgcttgcagtgaccaccagttcgagcactggtaaatccagcaacagtccacgagaaagattcaacgaggtttggcttagctcggagcggcagcaggtggccatgaagacacattctgtgcgcagtactgccagcatatggaatcccactaggtcatcaggttcagagttctctagaacgggtctggactta

SEQ ID NO: 31416 - DNA, 542 bp, Oryza sativa
  unsure (1)..(542): unsure at all n locations
  Clone ID: uC-osflM202092f01a1
tttttaataatgtaatgnacaagagtttattgatattgggttattgagacataacagcatgcattgaaactctaaacaagacagatattatgagtttgtctagaagaactgtagtattcaaagccctcatccatgagatgttggtggcggcatggggtagggcattggaggcatgtttactggggcaccagggactacagctccagggacaggggcatgcatgccataggctatatgaggtgcagcaggaacaggaagtgtaacaggagtgccaactgcggacacaagaggaccaccaactggctgtccaattgtcgtaccataagcatcgacgcctggaggcgcatttgctggctgtagagactgcttagaggattttccaggatttgctgatgggccatttggctgacctgtgattggcccctgagcagcagatgtatctccattgttcacgctggttatgtcatgtatacttgatcgccgactctctctgttcattgagttcaggcgaataaaatacttctgtgcatgactagctactt

SEQ ID NO: 31417 - DNA, 432 bp, Oryza sativa
  Clone ID: uC-osflM202092f02a1
tttttaataattttttttttttttttttgcttgatgggggcagaatatattgcacgactataccgattgctcgacagcagacagggttaaactaaagctaataatagataccacataatagtcagcctggcataaatgtattgcacaaaacaccaccagttcgaaaggggtatataccattcgagatttggtatataacttttggtatggcatgaactctttgcttcaaagttggagtttctccaatataatcaatggacgatagatggcatcagttactaagttttaagggagagagaactattatgacttctggggcaccgatggttgatcttgcaatttgtttgagttatctggctcgactttcagggagcctggttcgtctatggccatcgcacttgcatcggtaggaacagtttgtttcgaggaacc

SEQ ID NO: 31418 - DNA, 604 bp, Oryza sativa
  Clone ID: uC-osflM202092f03a1
tttttattatttaactatcaattaaatatcttaggagggggtgacactcaaaacataaaatgaatcctcccaccaagatggcccaacaagcagaggtgtccacacgtggagctttattaccaacatactactatatactagtatggctaactatatgacatgcgcaactagggattttccatagagcacctgcttagaatgcggccattgcctctctttacaattcttcaaattgaaaagtgatatatagatgttctacagcttctacacagtaaaaaattctgcggtgctgccaaacgacaaaattctgcagcaacttataagtaatactaactagaagctgatcttattatacaaacaagcagaagctgtcttccaacaggttctccaacaaactagtagcagcttctgcacagctatgcagaagaatggtcccaaaggacacatcatatacaagctccaatagtatcactggtaacctcacgcagcacctgtggtataaaaggcggtgtagggataaaaaggtgcagatacatcagcttaaacacctttttgactgcagtgactgagctgacagaaagaccccaactgcgtcattaaaaac

SEQ ID NO: 31419 - DNA, 444 bp, Oryza sativa
  unsure (1)..(444): unsure at all n locations
  Clone ID: uC-osflM202092f05a1
tttttatgacaatngtagtactattactttaacgaaggagccaatgcatttttcattacaacgtagccaaaatttaaccaccatgatcagccaaaatttaacggcacgtcctcgtccatcttggctcaatctcccaccgcgtcctcccatcttcttggccgccgcgtgggtgctcggaccttgatggtgtttgtgcatgttcttcgatgtagctcatcgtcctccgacttgtacttctccgcgtcctggaccatcttctcgatctcctcacttactcaatggtgtcatggtcctctcccatcgccctcgtacacctggatcaacacaccaggccggttgtcggagtagggnagaagaccggcctgctccttcttggtcatcactcctctggccgtctccagaccaagatgggggcctggacagcggcgccataggcgacggcct

SEQ ID NO: 31420 - DNA, 463 bp, Oryza sativa
  Clone ID: uC-osflM202092f06a1
tttttataatttcgaggaagcgcggcaataaaacatgggattgaattctgaacgataaacaccaggaaccggcgtttatttgaggcaagcactgcccaaaatctcgcaaaagtactgaaaccttagacatagtacacatccatggcaaacatggatgccaaatgacaactacagaaaattatcaaattcgaatgcagctgacggcttctcctgctgaagatgcatattttcccctccattacttggatgtgctctctccatcgacagccaatgggacggcgctggccaggctgcggtatttcagagcatagaacatctcaatgtaacggcgagtctcgcgcctctcaaggttgcttacgtacttccagaatccgtatacaccagtcaaggtcatcagcctctcagagtacagcttccaggtgtacttctcgtaaatcctctgcagacctccctgtgaaatatt

SEQ ID NO: 31421 - DNA, 563 bp, Oryza sativa
  Clone ID: uC-osflM202092f07a1
ttaatagatcaagaaactcaatttgaggggtttgttatataccggtaaatattcgctaccgtattcgttccgtctcgtattcgctccgtatctgtattcgataatattcgatttcatttccgtatccgagttttcgattccgattccgaaaaaaatatgaaaacgaatatgttaaagctagtttccgtccgtttccgatccgtttcaatccctagcttcagctaataccggagagattgcccaccgttgagcatttggactatgtagtccctcttatagatttctgggagtgctaaaaacatctccatttggtttggttcctttgcgaaaatacttgctgcgaagaccacctcgcttccagtaaggccaagcttttgaatttcagctatagctgccactttggccttttgttggggttcctcgcacatcttcttctcttgtgtatgatcggtaccacattccatcactgctgctaccatgctttcatggtgagtgatactctgaaaacgatcatgggcgtcttgaacccttcgatggctgatgctgcctgctgaactctgaca

SEQ ID NO: 31422 - DNA, 513 bp, Oryza sativa
  unsure (1)..(513): unsure at all n locations
  Clone ID: uC-osflM202092f08a1
tttaataataaacaatccacaacaccatatttcatggagcaggttcagaacctgcacaggaatacacactaccggtacagatctcaccttctctccaatactcgtacatccatccacgcggtccacacgaatacgtacatctatacggtacacgtacgtacatctactgcaccgngtacacacacgcacactctcctgcagagacgcgcatcgtcgtcaacctagctagcttagctgaaggcgatgcgtcgccatggcagcacggcggcggcggcgctcacttgccggggacgaagttggtggcgtaggcccaggcgttgttgttgacggggccggcgaggtggtcgtcgaggttctcgagggggcccttgccggtgacgatggcctggacgaagaagccgaacatggagaacatggtgaggcggacgttcttgaactgcttcacctagagctccgcgaaggccttcgagttgtcggcgaggctcagcggttcgaagctgacgccggggtaga

SEQ ID NO: 31423 - DNA, 436 bp, Oryza sativa
  Clone ID: uC-osflM202092f09a1
tttataagaactcaaatcaaatcgaacatttttcaggggttaaaatgtgatgaacatcttctacatcatgtacaacacgagcgatttttttttctgattccacgttttttgcatttgagatcaaagaccgaagaaagcactggattcactgttgcagccttgcaggtgaagagcacaacagatccaggaagtacaatgtgtgaaaacagtcatggtatggtgcctacattctttagccatcccctcccgagcggcctcaaatcgctggatcttcaagtgcggcagtggagaaattgttgattcgtggatatgctgccttttcgtccagttggttttgagtccaaattaacatctttagaaggctagggagctttggatctttctcatgactttggcttgtaagaatggcagcattaacttcacttgcgggcttcaa

SEQ ID NO: 31424 - DNA, 369 bp, Oryza sativa
  Clone ID: uC-osflM202092f10a1
tttaataattttttttttttttttttttttttttgagtgtttttttttttttttttgcggcccatcccaaagggagctaaaattatgatcttaatgcaatttttataaacgatcaaagaatgaaacactggtggaacacatggaaattgtttacataacgttacaacaggggatttatatagacagatacaatgtcttgcactaaaaactgacaatggggacaatggaaccacaacatagaattatcccctactgtattggaaggtttaattactgcaaaatttgaccttcatggtataaccgcatgatacactttcgtggagtgaacatgcccatttttgaaatttcctccaaaacccagggttgggg

SEQ ID NO: 31425 - DNA, 441 bp, Oryza sativa
  Clone ID: uC-osflM202092f11a1
tttaataaatagaaaagccactacattcacacaacggggcattttatttttatctcacaacttcccgcaaccttagctacaaggcagaagaaagagtgaataccaaacaaaaaaaaaaagtagacaagttctatggattacatgcatggaaagacagctgaagaggaggaggaacaagaagctattgacaaaaactaggccactttacactaaaactggcaagcataaaacagcatcaatcactacccgaatcaaaattatcatacactaaaattgccaattcggccaggatgatttaatttagccatcatatacctcgtgtcaatcaatcaagccacagacagaacaagcaccatatgaaaattccagtctagttgttgatggaaccttgatgctttcagccaacaccccaaagacatggtaatatgacaatgaggcgct

SEQ ID NO: 31426 - DNA, 455 bp, Oryza sativa
  Clone ID: uC-osflM202092f12a1
tttaataattttttttttttttttttttttttttgggggttttttttttttttttttctgttaaccccccaaaaaaatacaattcttaacagagaaaaaaattccaactcgaaaggggaggaaaaaaagaaacccatttcctccttgggggggagagacaagaggagttttccaaaaccagtgccgctggttttggggacggttgccaccagggctggcaacccaatttaggggccaagcattgcttaaacgaacaagatccttccctacaaaggggggcccgcccccactgaggtaacagagggaaaacggacctggggtgaagagagagggcacctccttggcgacggaacatttgaaaggtcagtaggggggttgaacgaacgcggccggtttgtggccacctcccccggaggtggccaaaggtgggtgaggaaccccgggggggggccaaa

SEQ ID NO: 31427 - DNA, 336 bp, Oryza sativa
  unsure (1)..(336): unsure at all n locations
  Clone ID: uC-osflM202092g01a1
ccnttaataattcccctttacaaaacaaaggacggaggggcatattaatactttcaccccaaaatacaacttagcgacaatattttaaaaaagccgcttgctttgcccccatggctggcaagctgagcagagcagctaacacaaagaacacgagattactataaaccaaacggcaacgaacgaagaaaatacagggtcttttttgtctgaagatacaccaagcggcacgctttattttatttttagacatcctctcctctttgaacatgggtgtatggcaatgcaaaaggcgatgggatcttggcttaacagaagggaaggggattgccgttccac

SEQ ID NO: 31428 - DNA, 529 bp, Oryza sativa
  Clone ID: uC-osflM202092g02a1
acaagttacagatctctcgatgtatgtgcatactatgatcctcgcctaatctcttcaatgtgtgcttcctcttcttactgtatagaagaatgaaataattggccgactagctgcgtttggtttccagtttcttcagcatttacctatgagcccggctacgttttgggcaatatcttttttggcctgcaatgagaccggtgaatcgccaatgtacataccgaacagagccctgcagaagtctttgctcttaacagcaccaatttgtctgccatcaatttctgttattagctggccatcagaagtttggcagaagtcgatctttgtacccgcaggaataggaatgtcttcattgaagtaagaaccaaaagttttcaagcaatgataatcagtgttgggattcatcttctggaggcgcaggccaagtgacttctcaaatacatctcgcactgcaccaatgctaaggccgttgtagtgaagtaccaatctaactctcatggaaggtttccctaaaagatcattatagaaatct

SEQ ID NO: 31429 - DNA, 511 bp, Oryza sativa
  Clone ID: uC-osflM202092g03a1
tttttaatcattcaatgcctaaatcaggcattcattcgtgtcattcattcagtttcacaaaagtgctgcctaaatgtacaacaaacatgcagcttttcatctccatcccctcacattttcaatctctggcctagatagaaatcaaaaggaggaagtagctactagctagtagtagaacaaagaaagaaaaattcagatgaacaagcagaggagcaagttgtttacatttttgcacaatgttgaagtgatctgccatgagttggaacattatggatcaaggatgatgccaccacacttgcatttccagctcaatggcttgtagtttgagaggccattcaccctgtaggtgaacactgcagcactgatggcagtagcactcaccaccacatgctgttcttgctcggcagcagcagcagcagcagctttggtttgtgtcttctgaatcacctgtggcacaatgggcacttgcacagactcacagtggccacaggacatgcacaccctctacacc

SEQ ID NO: 31430 - DNA, 415 bp, Oryza sativa
  unsure (1)..(415): unsure at all n locations
  Clone ID: uC-osflM202092g04a1
tttttaataattcttcttttttttttttttttttttttggtttttttttattttttttgggggtttcccccccctcccatnggggggcaacaattgaaaagcagggctttcaacaaaggcccacatgaatacaaagcaatccatccaccccaaaaactaccgattcaatggccgaaaaaaaagccggggggaacccgaagggcccattggaagccccagcaacgtggccttcgagaggatgccccacacccctagaaaaaattaaaatttccaaggggaaaagcaaattttgcccgaaaaacaagcttttaaaggcccgtttacccaaagcaagccttaggggcccccaagggaactgcaaagtccaaatagatggggccaaaaaaggccaaacccaccaggggagtcaagagga

SEQ ID NO: 31431 - DNA, 902 bp, Oryza sativa
  unsure (1)..(902): unsure at all n locations
  Clone ID: uC-osflM202092g06a1
ccctttaaataaaaaacctatttttatacanntttatttatgtatttttttaaaaatttttttactttttttacccataatatattaatttaaaattaaattttaaaaaaaaaatccccccccaaaaaaaaaaacaaacgcaaaaaaaaggactaaaccaaaaaaaaaacaaaaaaaaaacaaaatataaaaaaaaaaataaagttaaaaaaagtaaaaaaaaaaaagtgaaaaaaaatacaaaaaaaaaaaaaactaaaaaaaaaaaaaccctatcaaaaaaaataaaaaatgaaaaaaaaaaaaaaaaccaaaactcctttaaaatttaaaaccctaaaaaaaaaaaaaaaaagggggataattcccaaaaaaaaaaaaaacaaatttaaaacccaaaaaagtgttaccccaaataaaaaaaaaacccccgagtccccaacttaaaataaaaaaaaaatattttaaaaaaaaaaaaaagggggcccccacaaaaaaatttaaaaaaaaaaaaattttttggaaaaagtaaaaaaaaaaaaaaaaacccaaaaaaattttcaaaaaaaaaaaaaaaccccccttggaaaaaaatcaaaaggtaaaaaaacaaaaaaaatcccaaaataaaacggcaaaaaaaacctaaaggtcccccaaaaacttccacaaaaaaaaacttcaaaaaaacaccaaaaaaaataagccaaaaaacagaaaaatcacaaagttcacaaaaaaatcacccaaaaaaaacccccaaaaataccaaaaagggcccaaatttctgaaaatgaaaaaccacaaggaactttcctaaaaaaaaaaaaaacaattaaaaaaaaaaaaaatctcaaaattactacaaaatcaaccacaaacaaattaacaactctccacat

SEQ ID NO: 31432 - DNA, 366 bp, Oryza sativa
  Clone ID: uC-osflM202092g08a1
cttgatcctgagagcggccgttttgtccccagcagatactccccggtatatctccagctgccggacagacgtttgcggcagcccgagcttggcctgcaccatctccccttgctccgtcgaccgaagagttcccatcactgagccgggtggctgcgactgaatggcgagataggtcggcccgccgccgcggccgatgctcccgccgcggccatggaagagcgtaaccttgatgccgaacgcgtagcacgcggccaccacatctacctgagccttggatagcttttatgcctaaaagaaacagatcggcgtgcttgccggaatcagagtagcccaccatcacctcttggtgcccgatatggttcttga

SEQ ID NO: 31433 - DNA, 455 bp, Oryza sativa
  Clone ID: uC-osflM202092g09a1
tttaataattttttttacaaagaaccccacatctggggtgcgtttgtaaaccaaagtgtagcgcatgcctcgtgggacaaacaatatcaagtgacctagcaaaataagaaagcacaagcatgagccaaacaaaacaaattctaacaaaacaggcatgctactagcgggtttaatgtcaagcgaggtcataggcaagggcaaagcataaacatcatttggttctcaacaagctaagattgtaggactagcagctaagggatcgatcaaatggctcgaagcatgcacgcatgtaattaataaagagaccgatcgatcggtcagacggcgttgtcggaggagggaggaggtaggcagcaggaggggctgggtgacagaggaggactgcttgccggcggcgattatccggcaaggggcgggattggcccctgagcaaaagatggatgtccactgggcac

SEQ ID NO: 31434 - DNA, 333 bp, Oryza sativa
  Clone ID: uC-osflM202092g10a1
tttaataacatgacaagccactacatgaacactaggggggattagaattataacacacagctctccgcctcctctgttgcatgctcaagaaaagcctgccaaccatacactccctacccttaaccaccatatccggaccaccctaacacattgacaaaggaccagtatgacatccgggaagctcttgaccaccaacaggtacatgaacgctcaaactgccctgtcccctacagcaggcattactaaccgaattgcatacattaaccgctacaacagtggacctacacgattggaacaaaacttgacggcatatgcccctacccacactaccac

SEQ ID NO: 31435 - DNA, 484 bp, Oryza sativa
  Clone ID: uC-osflM202092g11a1
tttaatagtttttttttttatttttttttttttttggggttttatttgaataagtctcgaacatacttcaaattatagaccacaccatacagcaaacatagtataaacattggcatagagaggacaggtgatagcagtttgtaatattctagcattactttgggaggatccctttacaaaacataggagacatcaccaggtttttattttggccatacacattcaacatgggttggtagggacagaccacactgaccagaacatttcgtctccttagaaggcaccagctgccatgagcagttcataaagggtccagatgcccttgttgcttgccccgtcttgggtagcatcattttgcaaaagggtggccattgattcattggagctggtttcaacataagggaaaggcaaatacttcatcttgggatcgaaggtgggcatgttttgtgcgagaataggcatggcatttccctggggcacgggg

SEQ ID NO: 31436 - DNA, 371 bp, Oryza sativa
  Clone ID: uC-osflM202092g12a1
ttaaataataacctattttttttttttttttttagggagcctttttaaaaaaatacagggccaaacacccaaacagatgccaccaacgaaaacaaacaagacaaaaaaaacgaccaggacaaaacaactgaaacaaattgacaacacaaaaaaacagccactgcaagaaccacacacaaaggaatggagaaaaaaaccaacatgaaaacaggagctacaaaggctcacacacaataagctacctggcaacaatactacaaccagcccaaacattgacgaaataccaaaaccgataaccgagccagttaacacaacacgaacacccaaaaaaaaaccctacaaaagtgaaagaattttttagaaaagccgac

SEQ ID NO: 31437 - DNA, 328 bp, Oryza sativa
  Clone ID: uC-osflM202092h01a1
tttttaataattttaaccttttctctttatagttattgagggttaaaattatgttcaaccagaatatgcacataccggcaaaagcggttaattcccaaagtcgtgaacaactacaccaccaaaattggaaggtcaccaagcccaaaagtaaaaggggtacgatccacccaacgtactcgaaaaaacattgttaaggcccttttacgaacgaacaaacggaagacgataccctcaatacggggaaagacaaagtaaagctcaaacgcatcgggcctttgcacgcaaaagagtgaagccactgctcaaatacacaggtacaggttgagtg

SEQ ID NO: 31438 - DNA, 497 bp, Oryza sativa
  Clone ID: uC-osflM202092h02a1
ataatcttaacatacacacaccaaagccatcgggtccttaaaataaatttaacaagcttatgcacatacaatcgaaagggctaaactacggtagacatcattcacctgatcacccctactagttattccaacaattgcaattttacaagtggtacagacagcatatactagtagtaaaaacattatcactgaccttctaccgatgatctaacgaaggaccttctccaccatacctggaaagctctagtaaggttcgggcactctgatcctttggatgcaaaacactgaaaccactcctcaaatagacagctgctgcttgagtgggagggttagtagggcctgtcctagattttcctccaaagatcttacatccagacctttggagcatcgttgaagccagccgaaatcaagcaacatcgggctgaaccatccgtagaagaagaggctcctcagctttccacggcactgaacttttctttgccgagtgcgatgaaaac

SEQ ID NO: 31439 - DNA, 154 bp, Oryza sativa
  Clone ID: uC-osflM202092h03a1
tttttaataattttaacatacacacactatttttattgatgtttttttaaaaatttaacaggctcatccacatacaaccaaaaggactaaacttcgacagacaaaattcacctgatcacccatactggttattccaacaataacaacattacaa

SEQ ID NO: 31440 - DNA, 479 bp, Oryza sativa
  unsure (1)..(479): unsure at all n locations
  Clone ID: uC-osflM202092h04a1
attatgtaaatatatcatatattcgattatatggatatatataatagcagacaggttacatccattagaactcagaatcaccggaattgaacatcaaaagtacaacacaagcagcagcagcatcagccagcagcaaacgacatgattacccacgcttttggatgaagaacaagaagtacgagaagaagaagacgatggtcgaacaccttgatcgagctcaacaatggcgatcgatcaccaatcacctacttggtgaactcgatggcccaggcgttggcgtagatgtaggtggccttgaagccggtgaatccggcggcgcgggcgagctccctgaactccctctcgtacctctccttgccgcgggggttgtgggcgagcatgatcattnngacgtggaacaccccctgctccttcgccgtcgcgtcggagctctccggcagcacgcactccaccaccaccaccttnccgtgctccggcag

SEQ ID NO: 31441 - DNA, 575 bp, Oryza sativa
  unsure (1)..(575): unsure at all n locations
  Clone ID: uC-osflM202092h05a1
ctgncatagaaaaagtaaaggaaggaggatataaatctgcaaatatcaatgaccgtaagcacattgagagagttcatgactctgcaaataagatgtcaactacttctgtggagaaaagcattcccgaaacagtcaaacctatgaaagcaacaaagaataattctaaagcaacagactatcatggaactgagaataagtcacctgatagtttggcttgttccaggcaaacaataagccagatagaaaaggatgtttctgatgctgataaggctgcaaatcatccatccagcgcgatcacagagaatcgtcttaaaccctgcagattcacaaacagtacatgctactgacactgctcaagatttgccttccagtttactccatgatgacccacatttaccagatgttggcagcagtacttctacttctatcagtgacaattgcattcagacagagagcagcacacaagtttgtcggccaacttaaaaatgaagaacctaaagcaaaggtgttaccaaactacttgcgcatcaggccttgcaactgactgcaccttgactgcaacacagactactatc

SEQ ID NO: 31442 - DNA, 267 bp, Oryza sativa
  unsure (1)..(267): unsure at all n locations
  Clone ID: uC-osflM202092h06a1
tttttaatatcaagccaangggagacaaaatgcacaggggattatttaaaagaaaggggggcacaccagccatgaactacaggctacagatcccgcacttacacaagttacgatactacgagatcatttggcgcagggcaaaagagagcggaaatcttggcgcaacacgtacggagagagagtgcgccgggaatacacacagacactcacttcgggtggcgctgatagtggccaacctagcaagcggaggggaagaagaccatgagg

SEQ ID NO: 31443 - DNA, 498 bp, Oryza sativa
  unsure (1)..(498): unsure at all n locations
  Clone ID: uC-osflM202092h07a1
ctttaatanatacacccagnggcatacattgcccatgcgtgattaatttacccaaagtcgcccatcttagccttatactacgatcgagagcacacacgctaactaaatttctgagatcaaagccaaacattccgcatcggcatatgcggtgcaaattttaggtcgacacgtcgccgaacttgtggtccttgacgaacctgccccagtaccagtggcgcgcgaagacgtggcccatggactcgagcggcacgcccttggtctccggcacgaaggcgacggcgaaggcggtcatgacgacgagccacgacgcgtagaagaggaaggtgccgtacttgaagcagcagagcatggcgaggaagcactgcgcctgcacgaagttgaggcccaggttgagcgccaacgacacgccttgcccggcgacctgacctccaccgggtagatctcgccggggatggcccaatccagcgccccccacgaccagtttaagctcgccgagaa

SEQ ID NO: 31444 - DNA, 247 bp, Oryza sativa
  unsure (1)..(247): unsure at all n locations
  Clone ID: uC-osflM202092h08a1
ccccccttataaatggcaccacgacggaccatngctgagaggtattactgaaagaaatgtaccaggcaccccacacagtacatcacagagctagctaaatgagacaccacaatactgaccgaaaaccaccaagaataaagattacacaacatacccaacacgcaaaccacttgacctgactgagaggacgaaaacacgcggctgccaggatgcaacgagcatcacaaagttgaacacttcaagaaaa

SEQ ID NO: 31445 - DNA, 498 bp, Oryza sativa
  unsure (1)..(498): unsure at all n locations
  Clone ID: uC-osflM202092h09a1
tttnataattataattaattcacaacaccatatttgagtgatcaggttcagaacctgcacagaaatacacactaccggtacagatctcaccttctctccaatactcgtacatccatccacgcggtccacacgaatacgtacatctatacggtacacgtacgtacatctactgcaccgngtacacacacgcacactctcctgcagagacgcgcatcgtcgtcaacctagctagcttagctgaaggcgatgcgtcgccatggcagcacggcggcggcggcgctcacttgccggggacgaagttggtggcgtaggcccaggcgttgttgttgacggggtcgcagaggtggtcggcgaggttctcgagggggcccttgccggtgacgatggcctggacgaagaagccgaacatggagaacatggcgaggcggccgttcttgatctccttcaccttgagctccgcgaaggccttcgggtcgtcggcgaggccgagcgggtcga

SEQ ID NO: 31446 - DNA, 208 bp, Oryza sativa
  unsure (1)..(208): unsure at all n locations
  Clone ID: uC-osflM202092h10a1
tttaatantttttttttatttttattttttttttggggtgtttttttaaagaatttgggcggaaccccacgcaaggggaacacaaaagaccctaacaccaaaacgacaacaaccaacaacgcggagcacacgaaagcagacaattaaacagggcaggcacgcacatctactgcaccgaggacacacacacacacaaccctgaaaagac

SEQ ID NO: 31447 - DNA, 363 bp, Oryza sativa
  Clone ID: uC-osflM202092h11a1
tttaataatttttttaaagatccaaggacactatcgaggaaattaatgttcaggtccaaacctgtacacgggtaatatgatacaaaaggagtcaggcccataattatacatgtaaaaaacctaggtggtggttatcatgtctattacaaagttttttttcagccttgattttgttctttagcacttgatttatcaacacgaaatacaacccgccatgcctatgtcttggtgcctatgagcaacttgcaactccattgcagtgattggcaccttactaaattggaaatactgaacaatggaagggagtaagaaaaaaggtaatgaggccaaaagaataccgagagactatgaacaaatgccatt

SEQ ID NO: 31448 - DNA, 561 bp, Oryza sativa
  Clone ID: uC-osflM202092h12a1
tttaataatacgtgaacaatggcttttgcattcacgaggtcgtgagataaatatacaggcttatacaaaaggacggctgccaacaacgtggacctcgcggacaaaatatacaaccgggcccacactggggtaacattttgacaacaaaagaaatttgccgttacaagaaccactccctcagcaatctagaatctaaccaagctgagaggtggagccaaaatggcgcggaaataattatctacctggcattgagactacaattagctcaaagtttggggaaatgaagaaaccgctacccgcgccgcttccacagcacgaacacctgtacagtaactttacaaaggggtaagaattttctgcaaaagctaccagcctaatttcaacatcatcctggtcctgaatttgaaggatgagcatacacactgccttgaacagcaggcttctgctgctgttgctgccgagattgcagctgctgcctctgcccaccaataccatgcccatgtataggcacgccacctgacatttgcctttgcaacatgccttggctagacactgacaaca

SEQ ID NO: 31449 - DNA, 293 bp, Oryza sativa
  Clone ID: uC-osflM202093a04b1
ctcgccgtctcctcgtgtaaccctagcttagcggattagtttaagtgtttgccggagattatggggtcggtggcggcggaggaggtggtggtgttccggtcgaagctgccggacatcgagatcgacaacagcatgacgctgcaggagtactgcttcgcgaggatggcggaggtcggggcgcggccgtgcctgatcgacgggcagaccggggagtcgtacacgtacgcggaggtgggagtccgcgtcgcggcgcgccgcggcggggctccggcggtgggggggggcaagggcga

SEQ ID NO: 31450 - DNA, 455 bp, Oryza sativa
  Clone ID: uC-osflM202093a08b1
tcgattttgaagcgctggatctcggcaagatggacaagacaaatgattctggccttgcttcctatgttgctagccaagttgaccgctctctgtcttggacggacgtgaagtggctacagacaatcacctcgttgccgatcttagtgaaaggagtcatgactgcagaagatactaggcttgctgtcgaaagtggcgcggccggtatcatcgtgtccaaccatggagctcgccagctagattatgttcctgcaactatcagctgcctggaagaggtcgtcagggaggcaaaggggcggctgccggtgttcctcgacggcggcgtccgccgtggcacggacgtgttcaaggccctggcgctgggagcttcaagaattggcggccggtgcttgtctcgttgccgtggaccgcgagggcggcggagggaggtgctgcagatgctcgcgacagctgagctc

SEQ ID NO: 31451 - DNA, 274 bp, Oryza sativa
  Clone ID: uC-osflM202093a11b1
aaagcggcggtggcatgggaggccaacaggccgatgacgatcgaggacgtgcaggtggcgccgccgcaggccggcgaggtccgtgtcaagatcctcttcaccgcgctctgccacaccgaccactacacctggagcggcaaggatcctgagggtctatttccttgcattcttggtcatgaagctgctggaattgttgaaagtgttggggaaggggtaactgaggtgcagcctggggaccatgtcattccttggtaccaagcagaatgcagagaat

SEQ ID NO: 31452 - DNA, 294 bp, Oryza sativa
  unsure (1)..(294): unsure at all n locations
  Clone ID: uC-osflM202093a12b1
ttcagggagtgcgccgctgacgattgtgcagctgctgtgggtgaacctgatcatggacacactgggggcgctggcgctggncgacagagccgcgaacgacgcgatgatgaagaggccgccggtgggtcgcggcgacaacttcatcaccaaggtgatgtggaggaacatcgtcgggcagagcatctaccagctggtcgtgctcggcgtcctcctcctcacagggaagagcctcctccagatcaatggcccttaagctgacagcctactcaacaccttcgttttcaacacctttgt

SEQ ID NO: 31453 - DNA, 389 bp, Oryza sativa
  Clone ID: uC-osflM202093b10b1
gtcgacccacgcttgcgattactactaaccgttaaaagttggcggcggttaatattcgatcgatcgatcatgtggtgtacgtgggcgtatggggcgggtggtgttggcggtggtgttcctggttgcgttggctgccggctatgcagcgccgcccaaggttcaccgtaaccacggcaagttcacggcggggccatggaagcaggcgcacgcgacgttctacggctggcgcgacgggtccggcacgctggacggcgcgtgcgggtacaaggacacgtccatggaaggctacagcgtgcagactgtggctgtgagcacgccgatgttcggcgccggcgccggctgctgcgcctgctacgaggtctagagcgtggacagcccctactgttgca

SEQ ID NO: 31454 - DNA, 394 bp, Oryza sativa
  Clone ID: uC-osflM202093b12b1
tggtccgcctgcaggtaccgcgccctgcatatttggctggtcgccccacgcttgtcggcttgtcctcttgatcccctactgttgctccttcatctttgcctctgtgtttgtgtgtgtgagagaataaaaggggagaagtggtggtggtgggcatggaggagaatggacattggccatgatttcacctcatcatcaggcttgcctctgtctgcctctaaaacacttcccaatagattccatcccctctttatcatccttggtatccaccccacttttctgttcttaattgcaaaggtccctgcagggattacattttggtgggtttagctcgctagctttggtgccatgaacaagctgaagaacactcaatacgttgtccagctgatacttgtag

SEQ ID NO: 31455 - DNA, 219 bp, Oryza sativa
  Clone ID: uC-osflM202093c01b1
tacctctgtgactgacacaaacgtgagggaggcacttggccactaccatggcacctttcgagatccgtactcagagctatcacgagacaaagacaacgagtacgaaccagatacttccagtgaggaacgacatctaggaactgacaaagaggaccagagggactatgctactagagaactaccacctggctaggatggtactacaactggatagaccac

SEQ ID NO: 31456 - DNA, 461 bp, Oryza sativa
  Clone ID: uC-osflM202093c02b1
tatatatagcaggttgtggtactattatgcacaatggattatgtgtttttggtcactatgtactggctgcatataactattttttggccaagaactatggcggcttacgcatagactcactagaggccaataaaaatgtcaaattctatgccgccactgaaagaaattagttaacttatggtattaagctcgctgatgttggtccgatatgacatggctgcagtttgttattaggtttaagatcgatttgggaaaactagattctcctgtaagcttgaacatgtatagttgggcactgtggattttgactctttcttgcactacaaattgtgttttccttgtaaagtagaccatctctggatgttacaccttccaaatgcaaatggaaatatgcagatctaaaggttctacagcttaacacattcaatggctgcttatattcgaatatataaattactcta

SEQ ID NO: 31457 - DNA, 379 bp, Oryza sativa
  Clone ID: uC-osflM202093d01b1
tttaagacgaagaagaagcaaaggcagctagggagctaggctaggtttttgccattcctactcctctttcctctcctccattgataaggaggcaaagagatcgaaacttgctattcattctccacttcgattccatccatcgtttcttgctttcgatcgatcgccatgcaagccaccgatcacgccgacacagagcgcgctctggcgttcgtcgccatgtccgtggaggacaagcacgccggggtcgtcaagcgcaagcgcaccaagaggccgcgccaccacgcggcgccggcctcctcctccgagagcaccaccaccgaggaggaggacatggcgcactgcctcatcctgcttgctcaaggcgccgccgtcgtcgact

SEQ ID NO: 31458 - DNA, 330 bp, Oryza sativa
  Clone ID: uC-osflM202093d03b1
aattggggcaacaatcggccacgcatagagccaccgttcgcttaaacaggggcgcggtaagctgcaccagctagttggttcactgtacgccaggaggccatgagctacgatgaggagcacgtggtggctgtgtccctgtagctagactgatccatgcgggtgattcatctatgcccagacaccgacaacccgctgtccaagttctttctataaaagggcagcgaattcggtctgctggtattgtctgggtaggacacttcttgctcatctgatggcgaactacatagcgtagtgttacaatataggatccccatggggagtctcccattt

SEQ ID NO: 31459 - DNA, 437 bp, Oryza sativa
  Clone ID: uC-osflM202093d11b1
atcggcgaagcacacagaattttttttcccaaatccatttattttcctctcttctctctctcgaatcgaatcgaatcgcctcgcctcctttgttgaattgaatccaagctcgattcgccgccgccgcacgccgccatgggcaactgctgcggcacgccggcgacggcggaggagggcgggaagaggaggaggagggggaagcagaagaaggcgaaccccttcaccgtcgcgtacaaccgcgcgccgtcgtcggcgggggcggcggcggggaggcccgggctgatggtgctgcgggacccgacggggcgggacctcggcgcgcggtacgagctcggcggcgagcctggggcgcggcgagttcgggatcacgtccctgtgcacggaggcggagacggtggacaggtacgcgtgcaagtcgatatcgaagcggaagctgc

SEQ ID NO: 31460 - DNA, 472 bp, Oryza sativa
  Clone ID: uC-osflM202093e06b1
tctcttccgatggcttatatcagtacctgagcaacgaggaggtagttttgcatgttgagaatttcatggagaggtttccagaaggtgatcctgcacaaagtttaattgaggagcttctctctcgtgcagcaaagaaggctggtatggatttttatgagttactagatatacctcaaggggaccgaagaaaataccatgatgatgtcactgtcatggttatttctctggaagggagaattgggaagtcgtccggaacatatgtgtgatgatcagttggaacatgtccgatgtcaatatttatggcgacgcatcaagtgatctcagctgggtcagagcctctgagcaactgcatttatgctcatcaggggagaaacacccacagatggctgacagatgatgcactccatacatttgtcaagcgattggagttggagcagcgttgtctagatttaacttagcacaaacacagtca

SEQ ID NO: 31461 - DNA, 405 bp, Oryza sativa
  Clone ID: uC-osflM202093e09b1
gcgaggacgatcaccggctgctggtctgcgagtacatggccaatggcagcctcgagaaccacctcttccgacgttcatgcaacctctcatggacgacccggatgaagatcgccttggacgtggcgaggggcctcgccttcctccacggcggcgaccggccgatcatctaccgcgacttcaagacctccaacattttgcttgacacagatatgaaggcgaagctgtcggatttcgggctggcgaaggaggggccgcggggagggaagacgcacgtgtcgacgagggtgatggggacgtacggctacgcggcgccggagtacgtcgccacgggccacctcaccgcgatgagcgacgtctacggcttccgcgtccgtctgctcgagatgctcgtcggccgccgcgcgc

SEQ ID NO: 31462 - DNA, 457 bp, Oryza sativa
  Clone ID: uC-osflM202093e11b1
tcgagaaatcaagcaagcaagaagagacgagacgagggagagaaggagaagagggggccggccgcgggcgtcgtcgtgttcctccccccctctctctcctctcctctcctctcgatctccatccttccttccatccattcctccccgcacccttcgcattgctctcgtcgtctcgattcggtcgaggatctccaggaaaagaggaggaagcgatatgggttgcttttcatgctgcggagcggatgatgtcggcaagaagaagaagcgcgacgatccttacgtcccgatccctgatccaggtggtaactatggacgtagcaagcccgggcccccagccccttcgcgttctccccccaccagcagaaatctgccaattgcagtaccggcaattccccttgatgaaataaagggaataaccaagaacttcagcagtgatgctctcatcggagaaggctcg

SEQ ID NO: 31463 - DNA, 379 bp, Oryza sativa
  Clone ID: uC-osflM202093f02b1
gccacacgggagaagacggcggcggggagcccgcggcggctagggttttgattgatttgtcgccggcgacgcgccgcccgccatggagagggagctgctggagacgttcgaggccgccaagaaggcggccgacgcggcggccggggcggacgactccccggaggccgaccgctgcctcgacgcgatgcggcggctgcgcggtctccgcgtcaccaccgacgtcctcgtctccacgcaggttggaaaacgtcttcgttaccttactaagcaccctcactcagacatacaatccatggctacagatcttctggggtactggaaaaagggttgttatcgaagaaagaaagaaaaatggtaccacagaaaatgttggatcaac

SEQ ID NO: 31464 - DNA, 413 bp, Oryza sativa
  Clone ID: uC-osflM202093f03b1
cagatggcgacgacgccggcgcccggctggcgcgccgccgcatccactagctagcgcgccgccgtcttcccccacgtcggccgccgctcttcttccccacctcgccggcgcagcttctcccaccgcgccgcctctcctctccaccacccagtgaactccgccgccatggaaggctctctctctcatccttccaatcgatctcctcgacatgctatgctcatcccgtcgaaaagttcgattcttttgctccgatcgtttcgctgtagatttggttttgttttatttgcgttttgcttttctttcggtctctcttttttgctggatcgatcttgtctccgacgatgtaaatttatactttcgttcttctgaagttggcaatgtggaaagcactatctggagacctgactgggggt

SEQ ID NO: 31465 - DNA, 456 bp, Oryza sativa
  Clone ID: uC-osflM202093f06b1
tctgagttcaagaagatgtttgaccttattgagcaatacaacttgaatggccacatccgctggatctccgcgcagatgaaccgtgtccgcaacggtgagctctaccgttacatctgcgacaccaagggtgcttttgtgcagcccgctttctacgaggcattcggtctcactgttgttgagtccatgacctgtggtctcccgacattcgcaaccgcctatggtggtccagctgagatcatcgtgaacggagtgtctggcttccacattgacccataccagggtgacaaggcctcggcgctgctcgttgagttctttgagaagtgccaggaagaccccagccactggaccaagatctcgaggggcggtcttcagcgtatcgaggagaaatacacctggaagctctactctgagaggctgatgaccctaccggcgtctacggatttgggagtacgtctc

SEQ ID NO: 31466 - DNA, 345 bp, Oryza sativa
  unsure (1)..(345): unsure at all n locations
  Clone ID: uC-osflM202093f07b1
tcgaaagcaagtgcacttgcggcctgtctgttccaagcacttggtatcacacagccgagccatgagaaacgtgacgattcaggttctcttcatgggcgtgatggttcaggttctcttcatgggttgcttcttggcaagaacatattggtagttgatgacaacaaggtaaacctcagagtggccgctggtacattgaagaaatatggggcaaaggtggagtgtgggcagagtgnacaaagatgctctttcccttctacaagtgccgcacaagtttgatctgtgtttcatggacattcagatgccggagatggatggatctgaggcaacttggctaattccagcaat

SEQ ID NO: 31467 - DNA, 390 bp, Oryza sativa
  Clone ID: uC-osflM202093f08b1
ggagagaagctcctctctctctctcttgccttttttttttcttctctttttcatattgttatcttgggatctgatttttgtccccatactgggagggaaagaggagaggagggattgattttctttctcctcctcttcttgttcttcttcttgttgttccactcttattgttcatcatcctcctcctcatagctgaccaaatctctgctgtgacagcaatctctgctgcttggttctgcctcccatgaggagcacaccctcagtgtgattaccaagcaaggaaccctcctaccgcgtcgctgagctgatgaaggagctctgacgactcggatgcattcttctggcatcaatcaattgatccaaccaggcaactcgatcggaatttgagtt

SEQ ID NO: 31468 - DNA, 455 bp, Oryza sativa
  Clone ID: uC-osflM202093f09b1
gaaaaggcctgtgtcaaggagagggtagtagcaccttgctctcctttgccttcagagaaaccggaagcaatggcgtctgctactctcctcaagtcatctttccttcccaagaagtctgaatggggtgccacccgccaggctgccgcccccaagccggtgactgtctccatggttgtccgcgctggtgcctacgacgatgagcttgtcaagaccgcgaaaaccattgcatcaccaggaaggggtatccttgccatggatgagtcgaacgcgacctgcggtaagaggcttgcgtcaattggccttgagaacaccgaggccaaccgccaggcttaccggaccctccttgtcaccgcaccgggcttgggacagtacatctccggtgctatcctcttcgaggagactctgtaccagtcaactgtagatggcaagaagattgtccacatcctcactgagca

SEQ ID NO: 31469 - DNA, 166 bp, Oryza sativa
  Clone ID: uC-osflM202093f11b1
gtttttttttttttttttttgttttcaattttcagaattgtttgtgcagaggtaggaatgcgcatgagtttgtcctgtcctgtatgaggttgtagcttgtatggttggtccgtgcggtttgttctttttttatagccagatttgatgaagaaagcaatcctttcgg

SEQ ID NO: 31470 - DNA, 351 bp, Oryza sativa
  Clone ID: uC-osflM202093g01b1
tgacaccagcagcgtccggtagtcggaggtgatctggtacgggtcgccgccggccatgtcgccggcggcccaccgggagaactccgacggcatccgccgcttcccgtccttgatgatcttcaccacctccgtcaccgacgagcccgccaccttcccggcgggggcggagacgcgcatgatgtagtagcagttgccgtagaacccggcgccgccgcgcgggagggaggcgtggaggagggggcgcgcgttcatggcgaagcagaggttgacggtggtgtcgggctcgaaccccgccgcgcgcgtccggctacggcacgccttggcgatcagtaccttgaacggcgagcacct

SEQ ID NO: 31471 - DNA, 136 bp, Oryza sativa
  Clone ID: uC-osflM202093g04b1
gggggttttaaaatttttttgggggttttacattttttttttttttttttttttttttttttttttttataaaaaaggagaaaaaaaaggtgggaaaaaagaaaaaaaaggaagcccaaagggccggggggggaaa

SEQ ID NO: 31472 - DNA, 400 bp, Oryza sativa
  Clone ID: uC-osflM202093h04b1
ttttcgggaagcgatcgatctcgtgcgggaatctttgggggaggtcgtgcgcgatgatccgctgagcggggggcggccaccagatcagcccgcgcatccaactccggcgagaggaggaggaggaagaagaagatgtcttgctgcggaggcgccgaggaggacagctacggcccgccggcgaaccaggccgctccgccgcccaacgtcaatgctcccgggaatagaggcgggccgagagggccgggggcaggcgcggccgggcgggccgccgaagccggtgaactatgacgtgccggcgataccgttcgaggagctgaagaagatcaccagcaacttcagcgaccgcgccctcatcggcgagggctcctaacgccgcgtctacaacggcacgctcagcgac

SEQ ID NO: 31473 - DNA, 322 bp, Oryza sativa
  Clone ID: uC-osflM202093h06b1
cctgagatcatcgtgaacaggtcaagaaatgggggttttataaacaaaaacgtgttatttcatggactttcaggtgatcctggtgagatttagataatggaagggcatctgagtgacccgaatgctggggatgcctcaggtgctctggtgagcaaagatgatgacctggaggcagttagagaagacgtgatcaagggattccttgacattgataacagtggacgggaaattgggatacaggaaatgggaccagatgaacgagaaggttggcccatgctgtatggcttgttaagcttcctggacaaaaagtttgagaggcttt

SEQ ID NO: 31474 - DNA, 462 bp, Oryza sativa
  Clone ID: uC-osflM202094a01a1
ccaaaatgaagcgggttacccctttattacccatgaacattgccttccctttttccactatgcaagggagaagtagtaccgcattgtttatacattcagaagcatcagagcttggggtaatctcaccaactcctcccgtggtgctgcccgctgcgttccctcatcgattccatggtttattcacgtcagggaacattttgtttccgctcatatacaccttgggttgtgtcttgccctatgatgttggcacttctatggcgtgagtccactggcagatgtggctatcctaccctccctgttcctacttggtgcgggggattttaagctaagcctttctatattacagcttgaccgagttgagtattcagatactagctgcatgaacatgggaggacttgtcccccaagagcctctggggtgtgtcaaactctgcaattttaccatcactaagcaccaggacta

SEQ ID NO: 31475 - DNA, 517 bp, Oryza sativa
  unsure (1)..(517): unsure at all n locations
  Clone ID: uC-osflM202094a02a1
aggggtacttctatgttcttgcgtatcaaccttagtgaacatcagctccgtgaataacagaagtatgatctgagtacaaaaggtcgttccatttactaggctttgccaactttatgtgatgaaacggcaagccagcccacagcgctatatgggtacaatgcgacaggctctttgtaaagcagcgagagagactcatcactgatcacggttcacttataacaacaggctatgttgtagctagctgacagaggaaatgagcttagtggtgcccggtgcctccgccagagccagagccacatccagagtcagaccacagagccggaggctccaccttggcctccaccgtcaccgccaccgtgaccacttccataaccaccaccatgagcaccaccagcacgccgacccatagccggaaccatagccagacccttgcccgtagccggcaggaccaccaccttggccaccaccacgtgtgncaccactaccatacccgtcagaaccaccaacacctgaacca

SEQ ID NO: 31476 - DNA, 544 bp, Oryza sativa
  Clone ID: uC-osflM202094a03a1
ggcggggaggttcctcatgctttgagacgattagataggagttcaatcatatcggacaggtgtacacatctgacaacgccttgcactacaattaacagtacactacatgaacgattacacgaactacaaaaacatttactactgtacaagctcttctataattaagaacgatagccattaaatatcttcacgacagcacgatagtcagggtacgctaagtcgcattcagaacttgccagcatcacataagccgctgcactctgagcagagaccaatgctagaagcctagaactcgaaatggcttcaactagatggccagatttctaggatacagtacgtccatagcatactgatgcaaggtagagattcttggaccatttctccttgacatgttgactagggaaagcagatgttctcagcgtctcttgagtttcatctgtaggcttccttcttgggacgcttaaaacgaatgcagcctgatcccaggttgcagcagttgcagttatccggtaaccattgtcccatctttggtgaattccctcac

SEQ ID NO: 31477 - DNA, 534 bp, Oryza sativa
  Clone ID: uC-osflM202094a04a1
ggacgggggatcttcacattatgggcgtgtgccctgttctgctatagtattctcaaagcagcactgcagggccaacaggattattctcattaacagcattgcaggcctgaggcctcctcacctctgcctaataaaacactactagccttacaggattcctagtttcaaaccagcagcaagattcagagctgcaagaaagaatcataaaatctgcttttaattatttcgctgaacccatttattcgatcctcagtaacaacaatgctgactgctgagcgcatcgcaccagcatctgatatcaccacgtttcggtatccaaatgagtccacagctccaagcttttatattcatcatatggccatcaattaggtacctgcactacaaacaccattctctggcattctggaacatgcgcagccagggactgtgaccacacttctcaagctgccattccctgggataccatggatattgccacatcatgaagcaacgctctgggtgtggcatcatagcaagatgtcttccatcagggga

SEQ ID NO: 31478 - DNA, 482 bp, Oryza sativa
  Clone ID: uC-osflM202094a05a1
gaggggggagattattacatatgtgttaagagcagaggccattgagatggtacataaccaaactgtaaaataaaaatatatagcatattatatattgatatatcatcaacatagcccaaaacaaagctgcatactattattataggcagcaatccaccagcgcgatgcttgatcttagcttagttgccaccagactcctcgcaacctgggggcttgtaggcgatgaagctaatcaactgcacctgcctgacgttgtcgaagccgatgatacggacaaaggcatcagggtaggccttcttggcctcctcgagctccttgagcacctgggtgggcatcggtgcagccgaacatgggcagcttccacatggtccaatacctgccatcgtagtatccgggagacctgtggttctcacggtagacgaacccaaccttgctgaactcgagacaaggcacccacttgtatcgaaggaggtactcgatct

SEQ ID NO: 31479 - DNA, 513 bp, Oryza sativa
  Clone ID: uC-osflM202094a07a1
ccatctgcggaggtactgcccaaaccagctattgaaatttgaacgaatgtaggggtagtataacagactgatgctattattttaaatgtcgccacaaaccaattagccgtcccatttgtacagcagcaattcgcttacacagttacactttaaaacaagccgtttttggcatagcagtggctgggtgttcagacccttggcctcaccctgcgcccgctggtatcgccgccatccgagagctgcccccacacgctctggctcttccctccgctgctgaattcctcctaacacccggggaccgtcctcagtatctccgattgcagcgcggggcagttgtctttgaggtaatcaaacccgtcggtccggattacagctgaaagattttcagcagcaaattttaggcaaacagatttaagctccatagcatgatgtcggtcagccaatgctagggtagttgccacagagtttacagaaatatgcttgcacaagtaagattcacacaataaccgtagt

SEQ ID NO: 31480 - DNA, 547 bp, Oryza sativa
  Clone ID: uC-osflM202094a08a1
gggggacataccattacctatgtgatgagatcagattaaaaagccctaattctcatcgtgctcatttgctcattacatctgcattgcaccatccaagatccatatctgcatatccatagctgatacagctccatcgtgaaaacgtttattcctctacaaggttttgcatgctactactaatgcactatacctttagacattcccaggttacaataccgagtaaacaagctgcctaacaaacattacaatacttgatatgttgtatgatcctgaaggccctagccaagcaattcaagcagactcggcgaacccaatcctgtttttgccaaagtcgaagacagtgtggtatgcagccatgaacacgtctccaagaatccagagtgggccgcgtggaggtggcacgtcgaacgccatgaacccgctgatgcaaacagtttgaccttgctgctccagcttcactacgtactgctctggtgtcaaggtgaaggtcttgtttgctatggtgaatgaaaggtctcgcatgtttgagatctcatcgcagtcgact

SEQ ID NO: 31481 - DNA, 396 bp, Oryza sativa
  Clone ID: uC-osflM202094a09a1
gggcccaaaaaaattcccatcaaaaaggggtgccccaggcaaaagaaaaaatcccccctttccggggggcttttttacccattggggtggaacaacccccttttgggccagggggccccaatcatttgcggggcctaaactttggggaaaaacccgggttttacaaaaaagttggggaggccccccaaaacctttgggggggggtggggaaacctacgccaattttattgggggggggaaaaaacgggggggtgcttgcccaaacaattggaaaagcggctgccttgaatggttaatcccatcccttaaacgtggcaacaggggcgggggcggtaatcccgtcaacacgaaaacttaagggattggacaccgggggaacccgtccttttttttccg

SEQ ID NO: 31482 - DNA, 278 bp, Oryza sativa
  Clone ID: uC-osflM202094a11a1
ccccaaaccttaggggtttttaaaaagaggaattaaaaaaggccccagggggtaaaaattaaccaacacgttttttaaaaacaggaagggaaaaaaaaattttaaaatttaaaaaaaaaaaaaaggtttttttttgaaaaacttaaataaaaaaacggggggacaaatccccaaaaaaaaaattttttgggcccccccccccttttaaaaaactggggggttttttttttaaaaaacatgaacccctaaaaaatgggggaataccagccatggaattt

SEQ ID NO: 31483 - DNA, 150 bp, Oryza sativa
  Clone ID: uC-osflM202094b01a1
attttcatttaacattattaaagtgctaatatgtatcatcaccgtttcttcattacattgcaacttcagaatccagacgggaattgacaggatacaatttccggaagtgctgcaatgccatcggggctgcctctgctttgaccgtcacca

SEQ ID NO: 31484 - DNA, 518 bp, Oryza sativa
  Clone ID: uC-osflM202094b02a1
acagggttacaggagaaggtggcagctgaggagagaatcaggagctgtcacaactcacaaagctatatacaagttcagaagctgaacgagaagagagcatgcttccctcctacaggaagcattatgacttcttggtgctgttttacaaatctgggtgattattggaagatcatgcggtagcagctgcagcttcttctgcgacttgggatccctgttgcagagtgcagatgaggttgcgatccccatacacattgtccacgcgacatgttgttggccagaacttggcgccccgaagccacgctgcagggaacgcagcgtactccctggagtacggcttagtccatgagtcgctcatcagaagttggggcgggtgaggagcactcttgaggacattgttgttcacatctgctttgccactttcgatttctgcaatttcttccctgattgagattagagcatcacagaacctgtctagttcggccttgctttcactttcagtgggttcaatcataagtgtg

SEQ ID NO: 31485 - DNA, 362 bp, Oryza sativa
  Clone ID: uC-osflM202094b03a1
cggggaaaaaattgcgatggcaatatcatttatcaacattcagtaacgcctatgtgttgcaataggaattacaagaaacagctcattacagaaatgggagagttgttctgcgaagagcttgtcaaattgccatgaaattcaaacagaatctctattttcctgtattcctatatttttctccaacacatgctattgtaactgtgtatgcaaatgtagcatacgctagctaaatctattgcattccacctggttccctttcacaatccagtagagttttccagcatgaatcacagtaaggcactgtattccctctgactgaaacattcccttcttatctatccgttggaattgtggtgcaaatg

SEQ ID NO: 31486 - DNA, 441 bp, Oryza sativa
  Clone ID: uC-osflM202094b04a1
ggggcagcttatgagaggatatcttgcattcagaatccagtaagtatgagtgctgcacgctatcgtggatatacagtgcacacgcaggtgacatagtgtatatatctatgtacaaaaagagagcgaacataaatacatcattacatcaacatgcaattaggatgaatccgtcactcagcaacaacacggttccctttgctgtagctgcagagtttcgatcattcagtaacagttgatgttcttcatgaagctagccgttgtcttgtgtttgcgacattgaaccgagggaactagtactggctgcgctgcttaagctagccgtctctcaatcatcctcttcatccttcagatcactgaaggatatgtcttcctcctgccctgctgaattgacgttgcctgttttgctggacacaggaaccacattcttcagccagtccttca

SEQ ID NO: 31487 - DNA, 527 bp, Oryza sativa
  Clone ID: uC-osflM202094b05a1
aacggggaatggttttcagtagcctaggaggcttatttatgatcatagtcagattacacttattggcgataaaataagccctataaattagtgtattgtgagtatgaaagcaaataataaaaaaaaaagggcgtaacgtgttatacatgtcccacggcccgtatatcttactctacaacattgcctgattgacttggctataaaatatacatatagattacatctgtggtcttgtctgtactacgtatagcttcccttccttcactgcaccctcaacatcctgtggggacccataaagctcctcaatggcatgaccagcccgtgcaatgctcgagaggatagatttttggaatccctgatctgtaatgagggggtcggtggtgtagtcgagtatgacttcatcttcctcatccatagggacactatcatacagtcctgctccagcatacccttctaaatcctcaccgttggaatctgaacgaaagatgattgatctctttatgaagagaccaatttgcttgcttggg

SEQ ID NO: 31488 - DNA, 549 bp, Oryza sativa
  Clone ID: uC-osflM202094b06a1
gaaagggggcgtttgcattaatttatgaaagccagaatggttggagttcaccttggagatcagttcctttcaatacaccatggcatatatggtacaagaatagattgagaatcctatctgtcattatgtgctgccaacggccgacagtgtgggctcaaaaatctataaggcttcaaacaaaagcgctacttggaattgtgatgcagagtcatcatacaaatgcctctcgcgattcagtaggcagtgtcaactcaggctcaaattcacccaggggagcaaagtaagaatcgaccatgtccgctgatacatactcaagggcaggtggatcccactttggagctaggcccttctccacaagacgtgctctgacaccctcacgaaattcatgagaaaatttctttgagattccattgatagacatgcggtattcacgcacaaggcattcattaagtgtttggtttctaccttcacgtatcgatcgcagtgaaacttttaacggaagaggagaagcctttttaaacgtttagggccaagtagaccaatcttatt

SEQ ID NO: 31489 - DNA, 430 bp, Oryza sativa
  Clone ID: uC-osflM202094b07a1
cactgaatagtggtttgttaacatacttgcaccatactgactggatgcagaggaacacctatatcaggcatgctgggtttctacgcgaaccatttggaaaaggagacggtttatgaacaaacatgcgggatttaggaaaaggactggacttgaccctgccaaaacatggacctcgggtaactgcaccacgggctcaagcttaaagggtctattcacagccaccctgttcagcatacacccgatgtaatacagcgtgaggccccgtgctgacaccttcctttaaaagcatggtgctgatgcacaggcacactagcacattttgcagacagctgccacccagggaacttgagaagcccgatgtactccaaagcggctagcgattggatggacgcaatggattcatgactgaatggtccacgagcctggggcc

SEQ ID NO: 31490 - DNA, 509 bp, Oryza sativa
  Clone ID: uC-osflM202094b08a1
ggaggaccaaaatttcattgtcgacggattcagatatgctctaggcatcatattacatgagtacgtgtgtatagccggagatcttgcattcacgtgccctgtctcaccgtcaccgaacgatagaccgatagttgtagtagtactcttgcaacaacggcaggtcggagcgcgagagaacaattacgtgcagcttaacacggacccccaaaaaaaaaaaaggaaaaagaaagaacatgcccgaaggaacgaaagcgcttagttgccgcctgactcctcgcaacccgggggcttatacgcgatgaagctgattaactgcacctgcctaacgttgtcaaagccaatgatgcgaacgaaggcatcagggtatgccttctttgcctcctcgagctccttgagcacttgggtggcatcggagcatccaaacatgggcagtttcccatggtccagtacctaccggatagaatccgggtgatctgagattctcacggaagacgaatcccaccttgctg

SEQ ID NO: 31491 - DNA, 527 bp, Oryza sativa
  Clone ID: uC-osflM202094b09a1
ggcaacaatcctattcttttttgtcacaaacccacgattttttttcttgtattcagacaattgtgatgcatacaacaaccaagagtacacaactaaggcttgccactagctcttgcgcaggtatttgctcacttgggctgcaagcgctacagatttggcattgatgtcgttcatcaggtactccctttcggcgcgacggcgttgctgtcgttctctcttggctctctttggggccaaccttgcttctctctccacataggctagcctgaacttctcggcgattggtatttcagggggcgcatttgggttggttggaacggtgggtcttcgaggggcggcagcaacagcccatgttttggggtcaatatctgcgattatggagtgatccagtggtacacttgccagagcttcagctgggaccttgtgtccacgaaggtcaaaaggtgatggctgtgggttgacagtaatacgagggcattccatagatataatttcctttgagttatcatctatctttggccaaacta

SEQ ID NO: 31492 - DNA, 315 bp, Oryza sativa
  Clone ID: uC-osflM202094b10a1
ggaaggccccaaaggagggaaattcaaaaaaaaaaaaagggaaacccactctttttaaaaagggggagggcaaaaaaaaaaaaaaggggcccaaaaaaaaaaataaacaaaaaaaaacgggcccctatgcggtggaaaaaaaaaaaaaaaattaaagcctaaaaaaaaaagaccgtgtgggaaaaacaacccccccccccaaaaaggaagacaaaggtttggaacccaaaaaaaaaaaaaaagttttttgtggggcaaaaagggaaaaatcaaattccccccccattgggaaaaaacaaaaaaggagggggcccc

SEQ ID NO: 31493 - DNA, 371 bp, Oryza sativa
  Clone ID: uC-osflM202094b11a1
aaacatcaataaagcattcttagatgcttatacaagaaatgatgtttacataatccattttacaggccggcctgcttattagcctggagggggtcccccaaaaataaaatgcccaagtttgcaaagcccacatttttgaggaactttacaacttaatatccactataaaaatctacatgtttaatgatatgtccacccccaatgataaatctgatgaatagtaatcatttacatgcccatttaaatcccaacttcctttaaaaaagaagggcagcatgaacatcaatccattccacgccctttagtctcaatagggaagagaaagcaagcaactccagcagggaataaaaccaggttaaaaacaaggatgg

SEQ ID NO: 31494 - DNA, 321 bp, Oryza sativa
  Clone ID: uC-osflM202094b12a1
gcccctggtataatcgtctccaactctccatgatttcttctagacatatcaccaaaataaaatgtatatattacaacatacattttgcatgaacttatatgtagggttggaaagcagaacaaataatataaatttgatgacgtcataccatatcaaggggatcagtcttgaaaggcttacccaaacgaaatctgagcttaacgacaggccactcacctagcagcttagtgagaatgggcagtaaaaccgaaaggaaacaaattccaacagctaaccacagcattcgtggggccaacacggtgtttaaacccgttgcaaacg

SEQ ID NO: 31495 - DNA, 374 bp, Oryza sativa
  Clone ID: uC-osflM202094c01a1
ggggcccaaaagggagctcccaagccctgggctcaataaaaaccttggccatttggtggaaccaacatatttgcccccccaggcccaaaattaacccggggtataaacattcgctgaaacacaaaaaagtttttagtttatttcccatcaggatcctcaggggggggaacgggctttaaccttgacagggtttcaggaaagccgggaaaagctttccaaaaaacccggtgggggaattttttaatttaccaaaatgattggtttgctgggggggcccgttcgggccaacaagccgggacccgggatacccgggggattcccccccaaaatttgccataaaaggtttttctttttttttaccatttaacccccct

SEQ ID NO: 31496 - DNA, 407 bp, Oryza sativa
  Clone ID: uC-osflM202094c02a1
gtatgaaggttacacaaatcctttagtatgatgataaagtcactcctataaaacggtttataaaggttccatttctacaaaaagaacttcacacatgagctctgaacgaataacaacaaggaccccaaaaattagtttcacaaggtgcacacaacatcccggtctattgtcgacagatgaatttataccgatctgtcatactgatacagaaaatagaggctctgtaagcttatgttgcctgctttctgtatgtgtcctttgctgtaccaaacaaacatctgtcgttccctccgtttgatgctcaagaaatattcagcgatctgactcttcatggtttccaagctgacggtggaggctgagggagttgcaaacatccgtggaactgcagagacgatggtgtccttagg

SEQ ID NO: 31497 - DNA, 279 bp, Oryza sativa
  Clone ID: uC-osflM202094c03a1
ggggttctcccccatttacttttcaaccaccagttttaaagcgcccttatacctcagcaccgaggatggaggacagcgccacaggaagatccagacaggactagacgggagacacttccggaagtgctgccacgcccctggggcgtgcctctgagctgaccgtcaccacgaccgctcggcctgagcgacaccgtccatgggggcgtctacggcaatggtttccggggactcgacgcggttcgcgaactggcaagtgaccacgacacaacccgcctggcg

SEQ ID NO: 31498 - DNA, 193 bp, Oryza sativa
  Clone ID: uC-osflM202094c04a1
aattattgtggggataccccctttttgttttttttctttttaacatgggtgtttaacgtcaccgggggcaacaaaagaatgtcccgcaattttgccctagaggaaatcacaaaatgaaaaaccccccggggccgcaccctcctgagagggggaacagggactgacctggagggacagggacaacacacagggc

SEQ ID NO: 31499 - DNA, 493 bp, Oryza sativa
  Clone ID: uC-osflM202094c05a1
ggaccgctcccatttcatcaacgaaatgaaatcagttcaagtgcattacaagactcactcgatactagggatctaccttttcgaggccttacttaaaaaacaacacagtgcaaacttatgaatttcttttatacaatatataaaagattacctagaatctacaagcagaagatagcttcaaagcctaataggatagcctgataccggtatcatatgggccgccgttatgcagttgggctttggcttgaagcgtaccttcacaccttgaaaaagcacaatatagcgataccaatataagcatcgcatgagactatgagatggacttctctaaattgctactaataaaattgttaacctatagtattatatgtttcagctttattataaacttcatcgcttgtctccacatatccctcaaattggggacgatctgtttgttattaagaagcaccaacaaaggctttagtttttcaccagaggcttcattcagtca

SEQ ID NO: 31500 - DNA, 378 bp, Oryza sativa
  Clone ID: uC-osflM202094c06a1
gggttccaagtatgaagtaacttttttgtatggctttacatcattattaaaaggttcaagtatccttaaatggaagacgaatgaaaatgaaagatagctcaagtatccttataaggaagacaaataaaagcgaaagacaagtatatatcctagagtacgagtctacgcctttggcatccagccatttatagtaagacttggcagaaacaatctggatttgaagctttcacctaacattaagaatcattttgtctttctcaagcgctgctttcatttgttgtcaaccttcatttcatgactgtcatcttggggattatgcactgcggttgaagcctctaccggaggtgcagttcctcctgaggcttctgactttgagtc

SEQ ID NO: 31501 - DNA, 483 bp, Oryza sativa
  Clone ID: uC-osflM202094c07a1
agcgaaacaaggtggcaaaccgtaaaccaacataaatttttataaaatttttggatactccgttacagatagggttttaggaattcattaatgcgggtgtactgaacatgtgggtagagcagagttgcttcgggtgcatagtcaccaatgtcgaagtttgttaagcaacctttgtagaaaatggggtaaaaatgtgatactcccactggttgagcaaaattcgtatctttcattgaagccaaaaacttatcaccctgtatatggaatttggcaagaccttttccagagagtttttaccacatcgggatcaagtcgttctaagggaggcaggtatcctgtggacttatggtatattgccttgctcaaggcgcggggatcatcgattgatttgattgtatatgttcccacattattttcatacacaaaaaacactttgtcgtttccatcccgtacaaccaactttttttgggagggagggagttt

SEQ ID NO: 31502 - DNA, 553 bp, Oryza sativa
  Clone ID: uC-osflM202094c08a1
gtcaaggccagcagcgactgggtcatgaacagcatgatgaacggcaccgacagctacggcgtcaccaccggcttcggcgccacctcccaccgccgcaccaaggagggcggcgcgctccagagggagctcatcagattcctcaatgccggcgccttcggcaccggcaccgacggccacgttctgccggcggaggcgacgcgcgcggcgatgctcgtccgcatcaacaccctcctccagggttactccggcatccgcttcgagatcctcgaggccatcaccaagctgctcaatgccaacgtcacgccgtgcctgccgctccggggcaccatcaccgcctccggtgacttggtcccactgtcctacattgccggcctcatcaccggccgccagaactccgtggccgtcgccccggatggccgcaaggtgaccgccgccgaggcattcaagattgccggcattgagcacggcttcttcgagttgcagcctaaggaaggtcttgccatggtgaacggcactgccgtcggctctggccttgcatcgaccgtgctctttg

SEQ ID NO: 31503 - DNA, 539 bp, Oryza sativa
  Clone ID: uC-osflM202094c09a1
gggcgtattaccgttcctttacagaacgagtaaataaaattttcatttaacatttttaaagtgctaatatgtatcatcaccgtttcttcattacattgcaacttcagaatccagacgggaatagacaggatacaattccggaagtgctgtcatgccattggggctgcctctgatttgaccgtcaccacgccgccgccctgcgcgacgtcgtccatggcgacgtcgacgtcgatggtctccgtggactcgacgcggtacgagtacttgcagctgagcacgacgaacgccagcaggttcgcggcggcgagggtggcgaggaacgcgtagtagtagtcgaggcgcgaggcgttgaggttgttggtcacccacggcgtcctccccttgccgccgccggtgacccgctcgacggccgcgaggatggcgctgctcagcaggttcccggcgccgtacgccgtcagcgacatcgccgtcccgaggcttttcatgctctccggcgcctggtcgtagaagaactcgatctgccccaccaccaggaacgc

SEQ ID NO: 31504 - DNA, 449 bp, Oryza sativa
  Clone ID: uC-osflM202094c10a1
gttgtgggaatcattgattacaaaactgttatgagtccgtgccagtctaacatgagtgattaatgacaaagctaacaacataagtattttaagcaatcgagccatagagcatatcaaaacatgaaaacccactggggttgaccgtatctgagacgatatgctctgactgatttgtatgaccagtgacaacacacagggttgtcacagtttgcctccacttatcatgtgatgcgcaattaccgtagtacgcttctggtctttgattttgtgacagactcaataagccggtacatccatcggtcaagcattcctgtcattgcaaaggtaccgccaagaactgcacatagtcgggtgaggaaatgcaggaagttccttctttcttctttgattgtgactgtaattggtgagagatcataccagaagtacacagctggccacgcggacctatc

SEQ ID NO: 31505 - DNA, 73 bp, Oryza sativa
  Clone ID: uC-osflM202094c11a1
ccgggcccaacttggggacaaaaaaaaaaaaagggggggccccccccaacccaaacccgggcccgggggaccc

SEQ ID NO: 31506 - DNA, 399 bp, Oryza sativa
  Clone ID: uC-osflM202094c12a1
ggggttaacacaagcagcaatgtcatgagattacggtgaactcaagcatgtcaccatacagacaatatttttttgttctctaaaacgagttaagcaagccaggtgaataatgtcttggaccaaagaccctgagacaggttcaaccaaacacttccaagacggtcatacaaacatactgaaaatgtcttggcaaacatggttaatataacagcattctaacagtgcagaatagtagggtttttcctggggctggcatcggggaacaagaaaaccaggatccagccatcatttattaactgaacaaaagcgtgacccagaactacttaagtaatttaagaacatcatcgtctcctccgcgatggtgcgacgacagttcgtgtactagaagatagctactga

SEQ ID NO: 31507 - DNA, 537 bp, Oryza sativa
  Clone ID: uC-osflM202094d01a1
ggaaagaagattcgatattgggattggtagttggggcattacaagtttacttgcttgggacaaaacagaatgaacagaatagaatgtatactttgccaagtcgtcccgattgcttgccttcctaattgacacaacccgcagtaccgcacacaagctgcaacctcaactagacactttatttatcaactaaataggcttaaacttagactgaaacttactatgtcctttcatcgattccaccgtgcaatgcagcagctgaaacatccaagacatacacataaatattaactgacacgagtagctatgggaatctgtcgttgcaaaaccatacagatttctccatgccatccacgctaacttgtacaaaccatctgacttgtaatcgaaagaatgcggccgatgcacgctgtccatgcccaaatcaacagcaagctgaattgggcattgcccctctgatcgaccgatcaccttctctgtacacgaagaatgcaaccagcgtacctgacaggctgacacccgcgcgcgaagcatatgagc

SEQ ID NO: 31508 - DNA, 538 bp, Oryza sativa
  Clone ID: uC-osflM202094d02a1
gcctgggactccctctattccacagggatctacatatttcataggtacaccaagaccaagaaaaactaataactctctcatactatatttactctagcaacaaactcgatgtatgcaccatccccaatatttcctagtcaatagcaaattaagatattgcatgtgggttataaatacttgtgtgcatggatacatgcatcaatgttcatttactccaatgcacaaataacgaatagacttaataagtgaacacaaatatgtagatcatttaggaataacctcagaaaaactatacgtagatcaatttggaatggagggagtatgtaaggacaagtatggtcgacagaacaccaaatggtgctctagagtccttcaaatttacctttctactagtactcatgttatccctttgagttctcatctgttcatagacctaaatatgtatccagaatccaagttctaaagatgacctcataccttgcaggaatgtcatccacggaagcgactcggtcgagaacgccaggaaggagattgctct

SEQ ID NO: 31509 - DNA, 384 bp, Oryza sativa
  Clone ID: uC-osflM202094d03a1
caacagggttcaaatccatagtgggaaactagcaaatctgtcataacaaatagcaactcatcatgatgtttcactgcattaatgcagttgttattgtccaaaataaatacagaagccataaactagtgtggtgttcttattcaaaagtaaaaaaaaaaccaaaataaatctcttctcattgacgataaagcgcacagagaggttaatttagctcttctttaagtggtcaaaattggcgggaggtagtcggatttggcgccaaggatccgcgcctgggtgtccgggaagaactccacgccggggagctgcgtgatggtgccgtcgccggcgacgccgacggggtaggcgagcaggtggccggggaggtcgcgctccggcccggcg

SEQ ID NO: 31510 - DNA, 387 bp, Oryza sativa
  Clone ID: uC-osflM202094d04a1
cttaggataaacgggaattcccgcaattgtatcacaacttccctggacataggtaacatgcaaaaccatattccagagactaccatagtcttaaacgcctcaagcgtacccatttcacaatgtcaaaaaggttcgggactaagcttaaaaagactaaacttgaagtaaagcagaagctagatgtagaaccagcaaaatagcctccattgatagggtggaaaagagaacaccgctccgaatcgatccggggagcgctcaaccggccgacttctggaacctggcgcgggcgccgcgaccaccgaacttcttggactcgcaacgcctggggccggcgaccagttgagggcggacatagcgggcaaagatgtccctgaccttcctcttgga

SEQ ID NO: 31511 - DNA, 392 bp, Oryza sativa
  Clone ID: uC-osflM202094d05a1
tcgcgatctagaactattctagaggtacccacctgtgtcggggtcggccacaggtacccctttgttgaaggtcgttcgagcttttcctgggagtatggaatgggttacatactatagcgccgaaccgcctggtctgagcctcgtggagaagcaaaggatagtccacggggctcatacttgagtgatctagagcttgaaactcggaccgatgttcgaggcatctaatttacccattgttacggtgaaaaagcaggcacacgcttgcgaccttaaacctataaccatttctgggctaacctaggatcctgcgtccgtccgctaccaacaaggagcagtacaggaatattgacctggagcgcatctactacgattatcgggctgatgttaggccc

SEQ ID NO: 31512 - DNA, 416 bp, Oryza sativa
  Clone ID: uC-osflM202094d06a1
ggggggggtattcacctactatggataaatacataagtacacatatattgcctttacacgatctcttcatcgatctctgactctttttttacagaactagatcaggctagctgcgtgccatgcatattctcatggcggctatgcaactttatctttttctcactatatcaacaaaggaagatttgaagaggagatgggcaagaaaaaagtaggagattacaagcagggactagctagttacagctgctgatgctgctgccaatgtgcagggaagaaaagaggagacgggtccctttgaattttgccctgagccgggtcgactttgaccctgtttattttctcctcgcaccagtgcagctgctgatcggtgatcttcggcatttgcagcactttggccacgatcttgaggtcgatta

SEQ ID NO: 31513 - DNA, 478 bp, Oryza sativa
  Clone ID: uC-osflM202094d07a1
ggggtaagcccaaaccgcacagaacccgccattctttaaacaatataaactacataatgcaaaacatacttactttgaacttgggcaacagaacgggcccaattttgaactaagctaccggccaaaattgagacatcttgtgacatacactccccaaagctcaaagaaacttatgtaaaaggaacttcagtgctcagctctgcaagagacaaccctccccaggtactcgcatgattaacagaacaaaatggggaatggcaaaacatcaagaaatggcaataaaggaaataataacttacatgtggggacatactatttaacagatatggggctcagcatcagcaggtttgaagaacaaccgggccaacccaagggctaaacatatcactcaatgccacctggactttggttgaaccatggtcgcaacttatcaaaccagcaagaagggggaagaactggccaaggttcttttcgaaag

SEQ ID NO: 31514 - DNA, 543 bp, Oryza sativa
  Clone ID: uC-osflM202094d09a1
aaacggaacatcacagctgaaaatatctttccatcatatatgcagttactcaatggaatattacaaattaaattatcgtcgcgcttagttcctgccatattctgtttgtctgctatgaatttcagttgtacagaaacatctttaaacttaccagaaaaaaaaaagaataaatcagatcgtggtcttctcaatgctcgctaagcaatggagctgtaaaaatagtgaaacaactttgtttcagaccttctggtcaagctctgattgtgatgacttctgagttttctcgctgggcaccgagtaaacctgccgctctttgcctcccggttttgacgaagcattcccgtaccaaatcatgccaatcacagcaagcatcatgccaaggactacgtgaaaattaaggccctcttttccaaagaaaagaaaacccaaggtcaatacaagaatcgtcttcatatggcctagaacttgaaatgagacagctgtgaatcttccaatgcatatgaactggcttagattggtccccacagcaattgtgcacgacaa

SEQ ID NO: 31515 - DNA, 568 bp, Oryza sativa
  Clone ID: uC-osflM202094d10a1
aaactcataacatagcataaacattaattaaggcaatagtatcacaacttccctggacataggtaacatgcaaaaccatattccagagactacgatagtcttaaacgcctcagtcgcatccatttcacaatgtcaaaaaggttcgggactaagcttaaaaagactaaacttgaagtaaagcagtagctagatgtagaaccagcaaaatagctccattgatagggtggaaaagagaacaccgctccgaatcgatccggcgagcgctcaacggtacgacttctggaacctggcgcgggcgccgcgaccaccgaacttcttgggctcgcagcgcctggggtcggcgacgagtagagtgcggtcatagcgggcaaagatgtccttgacctccttcttggatgcctcgtcgacgtacttctggtagtaggcgacgagggccttggcgatggcctggcggatcgcgtagatcttggacgtcttccctccgccgcggacgcggatccttattgtgatgtcctttgagcgtgaccttcccgcgagcaggatgggctccgacgccttgaggcgagca

SEQ ID NO: 31516 - DNA, 539 bp, Oryza sativa
  unsure (1)..(539): unsure at all n locations
  Clone ID: uC-osflM202094d11a1
tgtttgccgcgcgccgtagctcgggtcgaaggcttgctcgacgacgagctccttgaacctctccgtcacctgcagcccgatccccttcccgccgatccgcccggtgacctcggcgagcatgatcccggcgatctccttcacctccagcttcgtcagctgccggaacacgatcatctcgtccagccggttcaggaactccggcctgaagtagcgcttcatctcctcctccaccatgttcttgatcaccccgtacccgccgtcgccgctgccatcgccggcgaacccgagctgcctcccgcccttctcgatgacgccgctgccgacgttggatgtcatgatgatgagcgagttcttgaaatccaccgtcctccccttgctgtccgtgagccggccatcgtcgaggatctggagcatcatgttgaacacgtcggggtgcgccttctcgacctcgtcgaacagcacgacggcgtaggggcgcccgcggatcgcctccgtcagctggccgccctcgcgtagncgacgtacccccgcggcgagcc

SEQ ID NO: 31517 - DNA, 536 bp, Oryza sativa
  Clone ID: uC-osflM202094d12a1
agcaaccatccaaccactcttagttcagcctttcatttctggggttaaaccttgccggttttggcagagcaaacacagtcaacaacacataagaccactgtgaaaattagagggccttacaagcaccaccatgcagagcaaatttacaggttgaaaactggggagaaagccaaaaaaaaaaagaagaaaaaacccaaaagcacacagcgcaggtgtgcacactcacgcaccatccacggtttagacttgcaatgtacaactgaacctattccaggagcaactgaaacagcacactctcatctcaccctgcatgctgggacagcaggggagcacttggggttcggaatcgccctacagtggacgctgttcgtcgttagtctgcggtttactctgtagctcggaaggccactgccaagaacagattgaacagctccatcacttccaccactgccctgcaatggttcaagagtctcaacgacgtcgctcataagaggcctcgcctttgggttttgggtcaagcagtactatgctaggct

SEQ ID NO: 31518 - DNA, 121 bp, Oryza sativa
  Clone ID: uC-osflM202094e01a1
gggggtatccccttttttcttttttttttttttcttttttttaaaaatcatctttttttttttctctatgaaatcttttccaaaaaacccacaacctcctaaaacaacaacaacccacccc

SEQ ID NO: 31519 - DNA, 480 bp, Oryza sativa
  Clone ID: uC-osflM202094e02a1
aattaaggtactccttttttggcttattatttcatatgcactggtgttaaaattcctgcggcggaacaagacttttgctttttcggctggaaagactgagctttccatggagcatcagcagcacaacacaattgaacagctagctattctttttaagtcgatcttgaaacatacattactatgatgctgggattaaagagctggagaagagcttctgtgtctctccatttttttttacatcattgagggaatgatcttggccgaaatgaccggcttttactttaccacaggggaagaaaaccttcttcagtcaggtgtgttgcctccaccatgcattcagggtcacatttgagatgcataaggtgcaagtgtgttgctgcgcagattcacgccgccgcctcttaaagaaacagaagggcccctgtaggtgctcgccctgctgacaaggctggagtcgaggaagactactatgacggttat

SEQ ID NO: 31520 - DNA, 562 bp, Oryza sativa
  Clone ID: uC-osflM202094e03a1
agggaagcgaggcgctatcttgcattgcacataacatagatgttctactttaagcgagacatgattgtactcagcaagccagaatattgttaactaagatcattaggttaccgtgccaggacagttgcacgtacagctattaccatctgcaacaagttcatgatgcttttgctgtttctctcaccaacgcaaactttgccagaaggcctgataattgaagaaatgagccaacaccatcgcagattctcatgtgagcaaatccggtttccttcaacaattccagcttcagatattcagccatgtcgtagttcttgataacccggaagagagtagtgattatgccagcgggagagtagcccaaatcatataattgcttcagagcagagcaagcctcatcaaactttccatcaagcacatttttcaccatattcttgacatgcaacggatgtggttgatcacacaccttgaacacattttcttgattaacaaaacggaacccactaactgtggcttgcaagttggtcaaagcttgcctaatgtcaccatcagcagtaaagattga

SEQ ID NO: 31521 - DNA, 147 bp, Oryza sativa
  Clone ID: uC-osflM202094e04a1
actgagagaacttaagttttcatggggatcatcgtggtatatacaacccggtggaaattaacaagcaaccggcaagtctcagccatggttgccacttccaagttccaacctgactcctatagcaaagctagtagtagaagagtagaa

SEQ ID NO: 31522 - DNA, 151 bp, Oryza sativa
  Clone ID: uC-osflM202094e05a1
gggggcgaaccctgaatccctttgacatatttattcaagggcgaaattccaatagagcaagaagctttatggtaccattaatccaatcacgctgtaggcattgactcgatgagtttgatctagcatttcaaacttttgccagggccttcaa

SEQ ID NO: 31523 - DNA, 421 bp, Oryza sativa
  Clone ID: uC-osflM202094e06a1
gatgggggggctttagcagaaccaaggaaacacgctaagctacataaattttaacagatgggagaaggcgcagagatcgcccagcctatacatcaccagatgcgctgcactgcttgacaaagagagggggcaccagaccacactgggattagggcctcgcctctgcaaaagaccgattcctccacggtgcaatagcaatcacgtcagatcagacccgagcctactcttttccccaatctaggtatcacatcgcaggtgctaggatcttggtcacaaaatcaatagggaagtgaatggaacacatacagggtgaaatggaaatggaacgtatcgatgaatgccccctggagttagggccgttgtcattggtagttgcgagtaagcccacttcgtgatgagctttggcttccagaaggccttg

SEQ ID NO: 31524 - DNA, 287 bp, Oryza sativa
  Clone ID: uC-osflM202094e07a1
gtggggttattccatattcacttgtgttaaaattttctgcggcggaacaagaccttttgctttttccggctggaaagactgagtctttccatggagcattcagcagcacaacacaattgaacacgctagctattctttttaagtcgatcttgaaacatacattactatgatgctgggattaaagagctggagaagagcttctgtgtctttccatttttttttacatcattgagggaatgatcttggccgaaatgaccggcttttactttaccacaggggaagaaaac

SEQ ID NO: 31525 - DNA, 276 bp, Oryza sativa
  Clone ID: uC-osflM202094e08a1
ggctgggtattccatatgcactggtgttaaaatgggggcgggaaaacaagactcttgctttttcggatggaaagactgagctttccatggagcatcagcagaacaacacaattgaaccggtaggtagtctgtgtaagtcgaacgtgaaacataccgtactataacgccgggattaaagagctggacaagagcttaggtgacagttcccttttttaaacattattgaaggaacgacctaggtcgaaatgaccggattgtgctataccacatgggaag

SEQ ID NO: 31526 - DNA, 500 bp, Oryza sativa
  Clone ID: uC-osflM202094e09a1
atgtgatcagaagataggaattagccaggtagtatatagatccgaattattcaaacacgcacttaattagcagcagcaagagtagcgacatttcgaagcaatgtgtacgtcttggcgtattaaaccacacaaaagcataaccacaaccacctcattgtggcgcagcagcagcagctaaaaccgacccgagttgatgcattagctaaggcaattgcattacatattgcggcaagaaacaaaataagcacgcagccatccatggcgtgcgtacgcgcgagcatcaaattaccaggaagactaacctaggttcttcaattctcatcacaaacttttcagtagcttagcgaccattgatttggggccgagatcgatctaggtcatggtagctggggataaggagtaggctagctagctagccgagcctgtagaggccgccgtcgttgatgaagtggccgtccatgtagaaggcggcggcgttggtcgggtggtagccgtccatc

SEQ ID NO: 31527 - DNA, 405 bp, Oryza sativa
  Clone ID: uC-osflM202094e10a1
atgggaaaaacaaaatcttttttttcatttttttaggggacacaacaccaactggatcattatttgggggaactaaacccattttccccaacccaaagacaacgaacttggtggccacaaatccatccaaccacaattaaccactgttaagctacgggcccccactttacttggcggggaccaagttgggggggtacccccaggcgttgttgttgacggggccggcgagggggccggcgaggttctcgggggggcccttgccggggacaaaggcctggacaaaaaagccgaacatggggaacatggggggggggccggtcttgaaccccttcaccttgagctccgggaacgccttggggtcatcggcgaggcccagcgggtcgaaggggcccccggggtagaggg

SEQ ID NO: 31528 - DNA, 395 bp, Oryza sativa
  Clone ID: uC-osflM202094e11a1
acaggggcacgcaaataacgcccccccggggggggacaaatcgtttggttcccccccacccggggacccgtgggacccccctgggggggccccgcttgggggggagcggaatacccccggggggcccggggcccccccccggggaggggcccaacctgaaccccctgagtttcggggggacaacggcctttgccttgaccatggggaagttttgcccgacgcacgcccttggccccggggggaaggacagcaccttggccatggggccccccccgccgttaaaccttatgggggggaaccccccggggggggggccccacacccccttgtcggggggcattgtcccgaacgggaaccttagaattgggcctcccgggaccgttacgccgcccatt

SEQ ID NO: 31529 - DNA, 448 bp, Oryza sativa
  Clone ID: uC-osflM202094e12a1
ggggacactaagattcattcattcattcatttgatcaaagcaaacgagacgagctttctttttgcgatcaaaaacacagatgggcaaccacacagttaacacaaactagatagttccacacaaaactaacgatgataacgatcggatgatggtagctcgattagatagatagataacttggccatgagggccccaccgctcagttcctccagttcccgtcggagttgccgccgccggggctgccgtagccgccgccgtagccgccgccgtagccgccgccaccacggccgccaccgtagccaccgccaccgccgtagccgccttcacggcgctggccgtagccaccgccgtcgtcaccaccaccgtagccgccggcaccgtagcctccgcctccgccgtgctggccgtagccaccgccgtcttcgccttcggagcggcgcgactgggc

SEQ ID NO: 31530 - DNA, 476 bp, Oryza sativa
  Clone ID: uC-osflM202094f01a1
ggaacgaaagtccgtttagaattcatccataggagtaggcatgcatatgctgatatgccaggtttacagatagatcacttgacaattaccgggcatatgccatttatacaatagttaatttgcagcaatgagacgtcgccctggctgaatttactctgaaaattctttgatctcaaattaatcatatgtataatttaggtatgatgggggatcagttgtttttggaggggaccgctgacaacaacccgttggggccggggggacacggcggcttcgggaatggtttaggccaccagggctgtgggggccctggttttggtttcggcccgggctttgggggcttcggctttggcttaggccctgggtttggaggatttggcttcggcttcggccctggcttgggaggctttgggttcggcccaagcttggggggcttaagctttggcccaagcttgggttttggggggctcggcttg

SEQ ID NO: 31531 - DNA, 565 bp, Oryza sativa
  Clone ID: uC-osflM202094f02a1
gtaagagttattgtcgaggattagctcattttggtatataatacggcaggctgtaataattgtagtgaggccgcaacatcattatgactaatagcaagctccttaatcttaagacaacaaaaatggtagcataacatttcccacaaaagagaaatcataacatgcatcagctactttaggtgggggtacattaaaaaaaagaatagaatgaactcagtagctaccgcggtctttggatgataagagacgctaaatcgtctagtccgaatggcatcgaattgttcttactgctgggcacactgtacccttggtccagctccagcatcctcgtcgtcgtcttcatcatatgcttcctgccgcctgtgctgctgcctgcgcctcatctcctcttctatgttgacatcatgcatggtggtctcctcacattgatctagctccatgtctgacaattgattcctgggtcgtggtggcaaaatcttctcaagcgatcggcattggccaggagtgagtgcaccaggctcaggaaactccacgttgaattcaacataaagacgacctttcatga

SEQ ID NO: 31532 - DNA, 348 bp, Oryza sativa
  Clone ID: uC-osflM202094f03a1
aaatcccaaaaaggagaggggggcctcgatgcttatcggcgctaaattaaaaggggggcccggctaaacccatgaaacaccccttgttttaaaaaccgattcccaacccctgggtggtcactttacaccccccacaagccggggggggggcctttgttgaaacaaaacgaccaggggggaacttaatttttttgaaaaagggggaaccataacccgggggaacccatcatcatggccaattggtttataaacgccttccaaccattatcccccaacaatgggtggtcgaacccccttgatatcacccgttgctcctgaaggagcccagggctttttagggccccgccc

SEQ ID NO: 31533 - DNA, 96 bp, Oryza sativa
  Clone ID: uC-osflM202094f04a1
gtgtatgttacaacgaaaatagctaggtacaaggcaagaaaaaaattgtaacatgacccatgagttcacaaccaaggccgagaggcagccacttct

SEQ ID NO: 31534 - DNA, 451 bp, Oryza sativa
  Clone ID: uC-osflM202094f05a1
ggggttggaacaataaaactatgttgccactataatgtcacagagaagtacagagtgcagagtaaaataatctacgggaagaggggagaagggacgcacgagcaagctaattgagctagctagcacgtaatacagagagaccaaatgaatgatcaaacaaataagtttacaacactctatctagctagctacgtcgtcgtacgtacaattttcaatttaatgtcatcacaatcccaactcacacaagcctgccacgagctatacatcatgcttaggtcgatcgatcagctggccaccctgcagtttgtcctgatggtgccggcgttgccggtgagcacgccgttggagcccatcttgaccatggcggcggcgaagtccgtctggaacgagtccgggttgttggtgtagccgacgacctgtgcgggggtggtctggtcggcgaggagcgcct

SEQ ID NO: 31535 - DNA, 458 bp, Oryza sativa
  Clone ID: uC-osflM202094f06a1
aaggagatattttcatatgatagggtgcccccacatgacttgtttgcccactcacaaggagaaaatagaacaagaagcaaagtcaagtaggtaaaagacatgtactaattttgttattccttatgccgaagcaatattggatcaaaaatattctccacaatgtcgtggagcttgattgattatatggaatggtgatatgatctctctctgtgaactctgtattcttttgctcaaaggtccttgaggccattgatatccttgttctcgatcactgctccatctgggatttccaggttgacaccaggttgggctgtgatgggcaccttgcccttcaatgtgatgctagagccaaaccaaacattaccggaaacctttaaggtgtcaagctcaacaatgctggggattgacttgaagcgaccaaggaaacacccgaccttcttgaactttggacccagttc

SEQ ID NO: 31536 - DNA, 484 bp, Oryza sativa
  Clone ID: uC-osflM202094f07a1
catgcgcacgcacgcgtgcgcgtgtaccctctagctcgcgccccctttttttttttttgtgaggggcattgcaatggtgtaggggattacgcaatctaatgctgacagctgaaacaaaagacaatgaggccggaacatcaataatgactaattaacaagggcctcaaacttaagacagcaaaccaggcgacacaccctttcccaccaatgagaacatataacatgcccaagactcctgaggagggggatcgccaaaaaagcgaataccatgaactcataagctaccgagggctttggatgatgggagacgctaaatcgcctagtccgcatggcattgaattgcctgtactgctgggcacactgcccccctggtccagttgcaggcttcggggggccgtcttgatcatatgcttcctgccgactgtgctggtgactgcggctgatctcctcttttatgttgacatcatgcctggcgggctcctac

SEQ ID NO: 31537 - DNA, 181 bp, Oryza sativa
  Clone ID: uC-osflM202094f08a1
atggttgagggggtttacctgtacaatcctaatggaccattactttacaatatgggggtcaaatcacaaggtctaacacgaatgtacttatagttaagacggcataaatggttacataacattttccacaaaagaaaaaccaccacatgcattaacttctttaggagggggtaccctaaaa

SEQ ID NO: 31538 - DNA, 211 bp, Oryza sativa
  Clone ID: uC-osflM202094f09a1
gggttggccccccaatctaccatagtgtcaggctgtcagccaaaatagtcaatactggaagtttaagcatttcatatcaaagcgggaaaagaggtgtaagctaacaacccgagttgagatccccaaaacattgttctagagctagctagtacacgaaatcggtgctaccaattactaatacaactttcagagggacaacctcaggaggtca

SEQ ID NO: 31539 - DNA, 496 bp, Oryza sativa
  Clone ID: uC-osflM202094f10a1
ctgtgttaagcagcttcatcttctcgtggtcatggtgtaccgtacgtgtgcgtgagacatagctaaggtagctagctgccatgcagtaaagtcgttgttgcttgaccggccagttctgttgctaggcatctagctagctacttcttctcaaactgggccagcctgttgtctccaagccttgatttgtaggcagccttcttgtactcatcccatgtgaactccttgtacaggctctgctctccctcccccagcagctgtggcaatggtgcaatcctctgtgctaacggtggccctccaaagtagatgaaggaaaccctagactttaggctgttggccaccaccctgtgcttcacgctcttgaacctcccattggtcagaacctgcaacgagtcgccgacgttgacgaagaaggagtcgcggtcggagggcacggacacccactggccgtcgcggagcgcgatctgcaggccggacgtgccgtttgagcggagcacgg

SEQ ID NO: 31540 - DNA, 197 bp, Oryza sativa
  Clone ID: uC-osflM202094f11a1
gggcagaaaatgctttctacgactgcatatatttacataggtaccaaaaatcaacatcaaggctatatagtttggatctctcgttctgccaaaattagattttattaaaacaaattttagagcctaacaacatgtaattttgttcagatcacatatcaaaaccgctctccacaacgctattcacagttttgttatcg

SEQ ID NO: 31541 - DNA, 372 bp, Oryza sativa
  Clone ID: uC-osflM202094f12a1
aggggaccaaaagcaaaattttttttaagggtcccaaaagcgaaggcccaagccccaaaatgcccatagcagtcccagacttaggggggatcatatgccgcataaccccccaatcctgattggttgaacattcaacatcccggacccccataattccccaaatccttaaacgagcaacccactgggccccccccaacttattttggggcccctgggccacaaacctgggcctagaacaacccccctaagcagggggcttcatcagggaagcccccctttgggaagacggccctgccctcagggcaggccccccggccctcacatgcgggtatgcgcccaacacggatgcctggggaggaacccccaagcata

SEQ ID NO: 31542 - DNA, 416 bp, Oryza sativa
  Clone ID: uC-osflM202094g01a1
gctctaataactggacgtctattgcacagctcaaatcattggacatcatacatttggaaacccatctgaaacacactaaaaagaatttacatcacatgccttttttagccacaatagcaagacctttacgttctttgcccaatcagacagcacaagggaattacacagggtttgaaaagtaattctgggaacactcttttcggaggccatgtagtacccaaccagcaatgctgtcagtactaaggggtacctttaaaaatatttaactctacgatatcggaaggaaaccgtaaaatttacatggaacatatttggggcatatgggaagggagggcacaggcgaaattgtcccattacaatttttgcccatccaaatttgtcctgacagggtaatcaaggccctgtagaactggcat

SEQ ID NO: 31543 - DNA, 354 bp, Oryza sativa
  Clone ID: uC-osflM202094g02a1
ggggccacacaaaaaaaaaccgccccgggtttttcaaaaaccgggggggttttaaaaaaaaaccccccccgggggaaaaaaaaaatcccattccccgggggggggggggaaaaaaaaaatggcccccccggaaaaataaaaaaaaaccccggggggggggagttttgggggggccccccaaaaggggttttttggggggggaaatcgggggggggggggggaaaaaaaaaggggccaaaaaaaaaatggtcccgggggggggccccaactgggggcctaggggacctattttatttaataattaaggggtgccccccccggtagggggggaaatcgggggggaaaaaaagggaa

SEQ ID NO: 31544 - DNA, 465 bp, Oryza sativa
  Clone ID: uC-osflM202094g03a1
agagaaatacctatcttagttaacctcaatatagactaacagtgtctgttggatacttggacgccatcatattacaagctaaaaaacctatcctctgctgtctgctccatgcgtgaaactggggcaggaacctatgcaagatttgcatttcttccccttgctaacaaactcatgtatcatccaaccatgcccaatctcaccccaaaaaccatccataacttttcctttgatatagaaagaattagcgaaaggaggaagaaaacaagtgaccagatgatatcttctgttatgttacaccgaaatggcaaaactccgatgccatcatcacagctctgaaaacaatcgggggttcagacttcttcagtcttcagagaggtagccgagcctgtgttctgtgctgtgtgcagtgtgctagtgctgctctgattcatcagcagtccagtatgtcttgaccgccacaaggac

SEQ ID NO: 31545 - DNA, 529 bp, Oryza sativa
  Clone ID: uC-osflM202094g04a1
atggggaacacaactacattcaacggacacagctgggcctgaagttcatttccgcctgaacagcataggatacagatcatacacacacccaaacactgaaaagtgctaaccatgctggcagcactagtctttacggaagatgatgatacagatcagatgcatgccttgcgactatgttacaccaccatttacagactacagagttttcctttcccaacaacagctggagatccaaaaatctcctaatgcagcgctgtgaggattgtagatccttccaccttgaaggttgcaccgcaaatttcttcttctttggcaggaactgcggccaccttgtgctttgggttctcatagcacttcaagcctccaactccaagagcattggaatagaagcagccttgtgggaaaggtgcaagagacttgccacacgatcctttaagcaggtcaatgttgtcagagaaggcaacagatccatcagcagtaatcccccaatacagagacacctttccctccggatcagaggccacaagga

SEQ ID NO: 31546 - DNA, 376 bp, Oryza sativa
  Clone ID: uC-osflM202094g05a1
attgttacatagaatttcaaattgctgagttaaaaaaaaaacgggaggaggggagaagggacacacgcgcaagataagtgggctagatagcacgaaaaacggtgagaccaaacgaagaagaaacaattgaggcgccaacactacaattagatagggacatcaaagagcgcacaaaaaacaaactaatttcataaccaaaggaactcacacaggccagccaagagggattcatcaagctcaagaccaaggatcagctggccaccctcccatttggcctggaggggcccgccaacccggagagctgacccaaggaaccatcttgaccatgggttttaataaagttgagatggaacaagcccgggttgtcaggggagcc

SEQ ID NO: 31547 - DNA, 445 bp, Oryza sativa
  Clone ID: uC-osflM202094g06a1
atattattgggttttctcacatttttttttttgttttctcacaagggaaaaataaaagaacccccccagaaaagtaggaaaacgacaagcactaagtttgcaattccttatagccgaaacaacattggcccggaaaccaagttcacaaagtcgagaagccagatcgactatatggcagggggaaatgaaggcccactgagaacaatgcacactagggcccaaaggaaactagagacacggatatgcggagacctggacaacagatccagggggaaatggcagcttgacaccaaactggcctgagaagggcacccggcccctgaaagccaggctagagccaaaccaaacatcaccggaaaccctcaaggcgtcaagcttgaacaaaggaggggactgactagcaaccaccagagaatcaccggacctgtttgcactctggacccag

SEQ ID NO: 31548 - DNA, 251 bp, Oryza sativa
  Clone ID: uC-osflM202094g07a1
aatggtgggggggaacaccctgaaattttataccagaacctgggaaccggagtccggcagtatatacggtattacacatgaacattacacagcactgcgaataccaattgccggaagttgataataatccgtgccggacagtgaaaagtcagatgaggcggggaagaaaagcaaagcccgaaacccgaaacagggggggggcacttgaaaattccaaattcttaatacaaaggattcatccggttgaaggg

SEQ ID NO: 31549 - DNA, 415 bp, Oryza sativa
  Clone ID: uC-osflM202094g08a1
aggacattccaaccatatgaggaggaaccacgaaggtacacatattgggttcgttaagcatgaaaactggaaatttccttgaaccaaaacatagcagccgaattaacttgacagtcaacaattgaggacactgaggaaaactaaatctctcttcaggaacattgggagctatgagactatccaaagaagagatgctccatggcgacaagctggctgacaatacatctacagactgcttcctctcctacctgcctttctgcgggtgctgaccgtgggaaccggggtcacatcctcaatgcgaccaatcttcatgccagagcgagcaagagccctaagagcagattgagcaccaggaccaggtgtctttgtcttgttgcctccagcggcacgaagcttgatgtgcagagcattaata

SEQ ID NO: 31550 - DNA, 445 bp, Oryza sativa
  Clone ID: uC-osflM202094g09a1
gggggatcctataataacgaggcatcattaattcgatcatcccttggatgcggcctgcggcttacattaaatctcgatccaaagaagcaaagatgatgacagacagaaattaattaagctagaaatctcctcgatcgatcacacacacacacacaattaaggtacatacatacatgcactgctgcaactgcaactgcagggtcggtgcgtggctactacaagtgtacacatggtacgttggttggcaccatctcgatcgtgtcgttgtgctcacttgccggggacgaagttggtggcgtatgcccaggcgttgttggcgacggggtcggcgacgtggtcgaagaggttctcgatggggcccttgccggtgacgatggcctggacgaagaagccgaacatggagaacatggcgaggcggccgttcttgagctccttcaccttgagc

SEQ ID NO: 31551 - DNA, 344 bp, Oryza sativa
  Clone ID: uC-osflM202094g10a1
gtaatatacaatcaacgttgaaagctacaacgaagggacaaacacgaagacggaccgaacaagacagaggccaggcccccagggagcgagcgggggcaacacaacaaaagggggcgtaaagacagcgggggctgcaaggggcccaactgaaacagatgcaaggcacacagcggggacccaagcaggggcccctcgcgaaaaagatggagaaccagaggagcccacagggcaaacacaggcccccaagggaagaggaaggagagcctaggggcaaagccgcggacgacccccaagtgacaggcgcccgggcacctgcccgggagcacagcccgcaccaagaagcc

SEQ ID NO: 31552 - DNA, 565 bp, Oryza sativa
  Clone ID: uC-osflM202094g11a1
acagcaaaaacttcaaaataggggagatagtaagaagattacagactgaatgaatcagagtacctaggttctaatcctataaattgcacgcacacataaaattgcatgacttgtgaccctggacgcccaactgtgtatagatgcataccgaaatacaaaacattttttcgagtttttttgcacctacaagaataaaaattagaaaattaattttcactagcgtgtccttaagggtgccacccatggaaaccctcaatttcttccggcacggagttgcatgcgagtcagaaaacacccatgtaaactggttattggccatccgcacaaacattttctttagtagtgcaacgaatacacaaatacttcaaggataatagtcatgtcataaatatcattaggcgacgccacagcaaagcatcggggtctactaaccccgacgatttttaacaagcatgttataccccctctattttaccgtcgctgaccctggtcaaaaaaaatattagaccccagtagaattaattagttgaagccacctgtggttagcagtaatgacacaacaaac

SEQ ID NO: 31553 - DNA, 569 bp, Oryza sativa
  Clone ID: uC-osflM202094g12a1
agggtctccataaaagccatagaaatgcttatactgtggtacaaattttgaattctacaacgcttatatttttgaacggggtgagtataatattggcacaagagcaatgtataaacaattaaatccatggaacacgtagttggttggtggtcgggttggacatgagacggattggaactatatactatcgatattgattagccattgcacctgttaaaaagtgtatctatatgtgtagggctatgtatgtatgtacaagggaaaactagcctctaatgcctataatgccttctggtccagtcgctcgttccagttcaggcacctgatcaagctgcggaaccagtcaccagtttggtcagatttattaactgttgggagcgggtgctgactcatggatatttgaacagagtctccccttgataattgctgcctccttttgccatcaaatgatacccaggcgttacttcttgcatcatctggaatcttcaattcaagacgagcagaatcaggaaggatgacaggtctaaatgatagcgagtgcgggcagaattggagtaacagcatacacg

SEQ ID NO: 31554 - DNA, 422 bp, Oryza sativa
  Clone ID: uC-osflM202094h02a1
catcctcttcttttttttttctatcgtgtataaaggacatatattgcaaaaaatggctaaatacggtcccggagcaatttttgggaggggcacaagtttgccttatggtggcatcggcctatttccacaaaataaccaaaaataggaagtatttggccactgaaaccgggcccgatcttttttaagaggggactatttagaggttcatatatcggaggggacccaacaggggaacccatgggtggtacttagaggggggagccacccttgtacccaaagccagctggaaaggttttagggatgaaaaggtccaccacccgggagccggtatttctggcaaggaaggggaccaagaaggggcccttggggggcgaacacttttgagggtccaggtgttagacccccaatccctgggggccacc

SEQ ID NO: 31555 - DNA, 502 bp, Oryza sativa
  Clone ID: uC-osflM202094h03a1
gggggagagcttaattatggggttcccatccacgacaattcagaacgaaaagtgtgctgctacagtacagagtacagaattactcaaccagatcgaaatacacttcgagtctgcagcttcagtttgcgaaaccccaatcaacgaacacctttccaaacaaatatatagctaaaacgaacatggcaaagaaatacagcccaattgaattaactacgaaaactgcacataaacaatccatccgttggttggttccaagtacaaattatttgtggtcttttggatgaacagagtccagactaccgcctgaaacaaaacctccgccactctataaacaggtgcgattctggagctccagcatcacaacttattatttccaccacgattgaatcactgtatgaccgaagatgatcagaagatgatgtctttgtcccttttttcaccgggaaccaacatgttggtggcaggacccacagagatacccctcttgagggcaaccttcttc

SEQ ID NO: 31556 - DNA, 391 bp, Oryza sativa
  Clone ID: uC-osflM202094h04a1
gggaaaaaagaaaaggcagggctagctgtttttaacaagagcagccaggccctcctcctgtaaataagacagtaaattacccccaatgggactgacaatagttgcactgcacttgagagtacatataagaagggcagctcaatttgtgcttcttttgctctttgccatactaattaacaggagcggattaggcagggtgatggggattagattagctaattaattggggacatggagcaatatccctttgggacggcttaggtaaaggtagcactccactttgctagtaagtcatgaaggccccatcggtggccatgcctcctgagagactggctagctggcgaagtaaagagggcggcatgagcttaaagcggccgttgaggggggcggt

SEQ ID NO: 31557 - DNA, 575 bp, Oryza sativa
  unsure (1)..(575): unsure at all n locations
  Clone ID: uC-osflM202094h05a1
aacatggaatattactgtagttgcgtgtaaaagaattactgtacatcaaccttcaaaattactgtattttgaacaaacggcaatatttcggatgcacaactgctctggccataggaaggaaatggctcatctcagtaggtcaacatttcacttagaagcggaatttcgcacgcctttacaacaatttcactatggatactacaagcgcatacaaaattgacttgcatcatggcctaactctaccggtaagttcatctcagaaagaagtcacaagtcctacacctaggtcctctgcaagttcatcccagagtggaatgagagtcaatacaacaagaaacactgaaactatcaatgctgctctcctccacgttccgacatcgctcacatcattcaagcagggcttttcaggtgttctctgacatattagcacgtataagccccaaggaagagatagtggccccccaagcaccccgagtccaagcaatgagtatgttgtcaagccaaatccaaacaacgcattcttgccgaaagcaccctgtaaagctcttccaccatcaagacatncaacaggaagc

SEQ ID NO: 31558 - DNA, 381 bp, Oryza sativa
  Clone ID: uC-osflM202094h06a1
gattggggatatttggaattaacaggatgctgcattggcagacaggttccagggtcaaaatccctaaagggtacactcagactcaagacatatgctcggctaaaaacttcttttttactcctttggaaggcagtagtactaacaaggtgatctatgtctttccaatcaaaagcaacctactgggtgtatcggggcaacaaacatgcacggacatgggataatggacgctaatccttacgacagattttacatggttgtattcggaaagggcctggctgacaggagcttgatttttagattactccaaaagctgattgagggggggacgtcatgcggcatgggaactatttctgaggatgtccttcacagtttgcagcttat

SEQ ID NO: 31559 - DNA, 445 bp, Oryza sativa
  Clone ID: uC-osflM202094h07a1
agggaacatctgataagtgcgaggaagcaaacctgagtattggcaaaatggcaacattgaataaatgcccctaatttgcaacacaagcagcccaattatctttggacttctcaacaacatttgatgctagaagaaaggagtgaaaagagtgaatatatccataacacatagataaatataggctaaatcctgcatctgtatagtatgaccgacatcaatggaggagaaattgaacaggtcacgctgtatttcccatcatgtatcctctcactggatcacaacactctagagctcaaactcctccttccggagtgccagctttgcaagtttcttactcatcctcaataagagcgaaatattggttcctttctgctggcctgaacatgtagaacatgaacaggtagaatgccacagtggccaccttctctgcggcaacacttaccca

SEQ ID NO: 31560 - DNA, 252 bp, Oryza sativa
  Clone ID: uC-osflM202094h08a1
aaattgtatgggtaatctccaccgacacatgaatacattggaagaataaatcgactacaagaattcatgtcatcatacaagattgagggcggcactcaaacggcagcggcctgaagatttcatatctacaacggagcgacacatgaaaaacttgaacaacgatactaacagagaacaactgtctgtttgacaaaagggcagcctctactgcgtggaaagatgaacaacgagctatgaaaaacgatggtcaac

SEQ ID NO: 31561 - DNA, 429 bp, Oryza sativa
  Clone ID: uC-osflM202094h09a1
ggggcaagaaaaaattgcatgattaatctttagcgacacaagaatacatttgaagaataaatcggctataagaattcatgtcatcatacaagattgagggtggcactcaaacggtagaggcctgaagatttcagatctacaatggtgcaacacaagaaaaacttgaacaaagatactaacagaaatcaactttctgtttgacaaaatggtagcctctcctgtatgtaaagatgaacaacgagctataaaaaatgatggtcaaccaaattcctcttcgacgcagactctcttcagcaccagcagagtgtagagagctatgaggttcaggtgtggaatatggaaaattattatgcaaccgcgggcatgtccttgagccaggcatcaagcggcttgccgatggagtagacgatgaacccaatctccctgagc

SEQ ID NO: 31562 - DNA, 281 bp, Oryza sativa
  Clone ID: uC-osflM202094h10a1
ggggtacatacgaaaccaaaaccatactattcaatgatctatcaggcactgacccaacgccctctggaccggcacccaaatgttaatagaccgacctagcaaatggcattgaggctaactgttcgaggtggaacatgtggccccaccggataaaggacgtgaacactgttaatacacctgcataccagagatgatagacacgctgcatgtgtgtatacgaaccatcgtgacacatcttgggagcggaagcagcaaccacgtgggctcgagcagggcaagac

SEQ ID NO: 31563 - DNA, 533 bp, Oryza sativa
  unsure (1)..(533): unsure at all n locations
  Clone ID: uC-osflM202094h11a1
ggagaacaaagacctgaatagagccacagacgaagtcaaaaccagactatgcattgtatcatttgccaaggacccgacaaagacttgaccgccacccaaaagctcataaactgtacaagcaaaagccaaacatcctcctgctcgcgggtctatcatttgtcagaccgcatatgcgagtgaacactggtcgacaacaattcaaatcgatatagcacactcatgttctattcaaacatggaacaaacttggggcaaaagcagatccacgtggatcggcaggctcgacttattctactatggcacttggatgcagcaaatttggcaaacactccggcagtgccatcattttcagcagaccgggattttgctctgtagcttataacacctctctgcaccagctaaccagcttccactgtatggatgctgctacgttagcttactaattttcttgtcaacctctttgcaggaggtatttcgtctgtttttcccagtaagtcagacttgccgagcccagccttcagtaacggngcagca

SEQ ID NO: 31564 - DNA, 474 bp, Oryza sativa
  Clone ID: uC-osflM202094h12a1
gaggtaacatttcagtggcatacattgcccattcttgattaatttacccaaagtcgtccatcttagccttatactacgatcgagagcacacacgctaactaaatttctgagatcaaagccaaacattccgcatcggcatatgcggtgcaaattttaggtcgacacgtcgccgaacttgtggtccttgacgaacctgccccagtaccagtggcgcgcgaagacgtggcccatggactcgagcggcacgcccttggtctccggcacgaaggcgacggcgaaggcggtcatgacgacgagccacgacgcgtagaagaggaaggtgccgtacttgaagcagcagagcatggcgaggaagcactgcgcctgcacgaagttgaggcccaggttgagcgccaccgtcacgccctgccccgtcgacctgaccttcaccgggtagatctcgccggggatggcccagtacagcggcccccacga

SEQ ID NO: 31565 - DNA, 470 bp, Oryza sativa
  Clone ID: uC-osflM202095a02a1
ttttttttttttggggtttttttttttttttttttttaaaaatttttttttttttttttttttttttttttaattttattttttttttatattaaattttttttttccaaaaaaaaaaaggaccccccccaaaaggcctaaaaaaaaaaggggggtaaaagaacaacaaaaagggaacccccaaaaaaaggttaaaaaaaaaggcccctagaccaacctttccagcgggcccttaaaaaaaactaagggggccccttttaaagggggctatttaaccaaaaaaaaaaacaagggggggaaacaaaaaaactgggaaaaaaaaaaaacctttattttccccgggaaaaaaaccccagaaggggcccaaggaatggggaaaaaaccgggggaaggggtgtaaaaaaccaaaaatttttttaaaaccccagggggaatcatgaaaggaaaaaagttgggggggggggtccccc

SEQ ID NO: 31566 - DNA, 421 bp, Oryza sativa
  Clone ID: uC-osflM202095a03a1
tttttttttttggggtttttttttttttttttttttttttttttttttttttttttttttttttttttttttttttttttttttttttttttttttttttttttttttttttttttgggaaacctaaaaaaaaaagtttttttaaaaaaaaaaccccggaaaaaaactttttaaaaaaaacgaaaaggggcaaaataaggggtttataaaaaaaaattttaaaaaacaacatttaaaaggggccaaatggctaaaaaaaactttaaaaaaggggggaaggcccaccgggaaaaaaaaaaatttaagcctggggggggaatttcaaaacgggggtttccccaaaagggggggcaaaaaatttttggtaaaaacccgcaaaaaattttgggggggatttgtaaaaaaaaaaaaattttggggg

SEQ ID NO: 31567 - DNA, 321 bp, Oryza sativa
  Clone ID: uC-osflM202095a04a1
aggagaaagtcatatcataattgcaaactgcctaaatgtttgactgctaatcaaaaggccataaaaggtccataggtggttattattcctttgtttgtaagctaaggctgtccaccatgaaaagaaattcatacagcaggcatttatcaactcaatgcagctcaacatccagaaagagtgggtctgatttagtctacaatttcagaccatgtgttgtgaatgtacaatgaatcacgtacaaatgacaatacaacaaaagttaagcaagaatagcttgtaccggtagttgtgataacggtagactatgggcgtattctttcc

SEQ ID NO: 31568 - DNA, 404 bp, Oryza sativa
  Clone ID: uC-osflM202095a05a1
agacaagaacgacgttaactaggattcaacattgcatagtgcttacaacaaaactcgttttcgaccaagtggtgattcttcttaccaaagaaaaccaccatggtctcgaagaattatcttttacttgtagtactacatgaggaaaaaaatatgcatggttttccaccaccaattcagaatctaaaatgcaacggtactctggattggtactcatctagttacaggaagtagtctggtatcaggagattgcccaccatccagcaagccagctcactctagccatccactcctggtgcatacgagctccattaatctgggacaaggttatgtacattacatcaaaaaggaaaggctctcgcatcatgtagctgaggcgcttgtcacgtatgatacgataactggga

SEQ ID NO: 31569 - DNA, 100 bp, Oryza sativa
  Clone ID: uC-osflM202095a06a1
gggggaacccaatgcatcttgtccataaatcatagcaggagggccatgtcctgtcctggtaacatccacaaacatatagcataagttcagggcaccaatt

SEQ ID NO: 31570 - DNA, 160 bp, Oryza sativa
  Clone ID: uC-osflM202095a07a1
tttttttttggtggtttttttaattttttttgttttttttttttatttttttataatattataattttattatattaattattttaaaatattaaaataaaaaattacaaaaaaaaaaaaaaaaaatgtaaaaaaacaaaagaagtaaaaaactcacacc

SEQ ID NO: 31571 - DNA, 320 bp, Oryza sativa
  Clone ID: uC-osflM202095a08a1
gtggggacataactaacgcttatacagggacacctagatacctcgttcaagccgaattcatatgactgaatacaacaggaaactagagtactatggacaaaggtatatgattcaccaacgcaaccagagcaacggtgaaaaacgagtcgcgcccgcgaaacacatacattcttatcccaagacgatcggatagcactacattaaacgaatgacttaattgtgatatgacgatcatatgggccttacctaccgtaggtgccatagccgtggagcgatcaagcgaacgatggaacggatgatatcggaacagatgatcactt

SEQ ID NO: 31572 - DNA, 389 bp, Oryza sativa
  Clone ID: uC-osflM202095a09a1
aacaaacatggagagggacttcaaaggcagaaggatccaactctttctttctttttttccctctgttttcaaagaaagagaaagggggtaattaagcctgctttttgacatctgcatttgaaacattcagggtcattgaaccccgggggccctttgcatcccaaaaatggggagaccaatacccgaacaaggaaaactgcgccatgtttttcacattctttcagttatgagggaggcagcgagcattgcatgtagagaacccatcacttagttaacaggtgggggctatttccccgctgcaacaaggggaccactgggaacaagcttcagggacacttccttgaatattctgcggttgagagagttggaaactgctctcgagtattgcc

SEQ ID NO: 31573 - DNA, 366 bp, Oryza sativa
  Clone ID: uC-osflM202095a10a1
ttttttttggttgtttttttttttttgcgtactgcctacctgtttttttttttttttttatttttttttttgtccattggtgttttttttttctatgaaaaccaccgaaggttgtacaccacaaattttacttgtacagcaagctttggaaaaaaaaatgaaaggttgtgcaccaccaattcagaatctaaaatgcaacggaactctggattggggctcggctagggacaggaacccccccgcttttaggagatttcttaaaaaaccccatggtagcaaagggtgggggcccacataacggggtgtctagggccataaagggggccagaaaaaagggtcaacccaaaaaaaaggaaaggtttcccg

SEQ ID NO: 31574 - DNA, 433 bp, Oryza sativa
  Clone ID: uC-osflM202095a11a1
agcaagtaaatgagtgcaaatgcaccacagttttttgagcttttgattgcatcaaccaaagagattttggcaggaaaaaaaggcattgccagaagttaaggcaagctatgtgtgacttgatacaccctatacatccatctgccacagttattgatgagatcacttctgcgaaaacggaagcaaagaaaggtttgagctttattctgactaaaggaacctagtgttgggtgaaactgactgtacatttgaatgtacattgaaccactgaaaatgtgatggtgagcctaagagagatcagtaactcttgagagatggctgccatggtcatggtcatcactggacctgtggcttgacaatcctcacgttgctatagaagcgcttgaagtccttcatcgcctgctcttcaatctggatcgagcgaatcgaggacgga

SEQ ID NO: 31575 - DNA, 431 bp, Oryza sativa
  Clone ID: uC-osflM202095a12a1
caggaaagcatgccaaaacaactccaaatagacagaaacaccttattttatggtttttgatacaccgccatccatatttttcttaatatggttatctatgactatgatacaccgccacctgtatttttcttttctaaaaattctgtgtgtattgtattgtatgtcgttccacatgagagcagaaatgcctacctagctacttctctattgctcaatcactgtggctcggtacaaaccatttcttttactatacaaaaatgaagctaaaatcattggaagcacacttaagtatctgctgagtatggtctgggatcaccataactagttcccttgaactcatagcccatctttgtatcaatctcttcacaaggtatatagctaaccaaattctccatcaaatggccaggtcccttaagcctctgaatcatgct

SEQ ID NO: 31576 - DNA, 613 bp, Oryza sativa
  Clone ID: uC-osflM202095b01a1
atatgttagggccttacaccctttatttgtttgaattgttagttcattcctttaatcttctttcacaaacaggcatgcgcggccccataccacgaattgatttcagccaaggctgaaaaaaaacccccgaaaccaaaaccggggggcccaccagggggcaagcggaaaagaggccccaacaaggggggaaatcaaaaaacaaaccttcccacccacaaaaaaagaccaatacaaggggcgccccaaggacggagaaaaagcaaacaaaagggggggagaaaaaaaaaaaaagccccaaacacccacccacgggggaaaaacccaaaacccccggccggggcccagttcaaaaaaaaaaaaaaacccaaggggagaaccccaaaaaccaaaaaaacccctggtcattttgagaggaggggcccaaaacaaatggggggggaactattctctcaaaaaacccccccacaaaaaggccgacaaagggcgggggagccgcccaccccccccacaagggggggaggccccccccccggggggaggcaaaaaaacccccccccccccccgggggggagagggggcccccccccccacggggggaaaacccccccccccc

SEQ ID NO: 31577 - DNA, 486 bp, Oryza sativa
  Clone ID: uC-osflM202095b02a1
cgaatgtaaaatggattgattaagaacaatagttctgacccggaaaacaaaatttgtacatatgatttgacttcgctaacaaaatggattgcgcatctacatcgcttggaatgttgtaatctaatgctctattaaactaccaactgtggaatggtagatttgcatggcctatctacaaacctcagttcgaggtggtgtggcttttacaagatttcaagggcgcaagatgtcaaatcaaggggaaaaacctctgaatcctgtaccaagatgagatcattggcaaaaactcattcttccaactccttgagaaaatctacattatcaacaaatactgttttccagccatctggatctgtgcaagcagttatcttcgtattaattccaggtaatgggccaggttcacgagttatttgtccaccattttgtctaatgacttccgcagtcttgtagacatcatctgtgctaatagcaatctgtgcataagca

SEQ ID NO: 31578 - DNA, 434 bp, Oryza sativa
  Clone ID: uC-osflM202095b03a1
gataggagaaaaacatatataatttggcgtgtctcattacaattacatgctctagttaattagaacagtaagagaggaagtgaagaaaaaaaaaaaggaaaaagaaaaaaaaaagaaaatgctcggtgaaggagagctttgacctctccaatggaggagagtgtaaacaagctactctacctctcctcaactactacttatcccggccggcctggcctgctagccggcggcggcggcggcggcgcgtggcgttcacatgacgctgcaggcgttgggggtctcgtcgtcgaacatgcggtactcgtcctgcagcggcggcgcgtgcgccgtccccggcgggctgtagtagtcgcggtagtaggcgtccggagacgagtgcggatacggcaagtccagggccgacggcgaccactgctgctgcattgcctgcggct

SEQ ID NO: 31579 - DNA, 329 bp, Oryza sativa
  Clone ID: uC-osflM202095b05a1
catagagcatggtaaagccacagctgcagcctgcagaacaaactaccgcaagggacaagcctatcagttcaaagggacaccattcagagtcacaggagcaaagctagaatgtacacatggacccatttttccggacctgaccaagaagcacccacggtcacagagaagtttttgaagataaaggcaacatctatatatctattccaccactatatcagggggagcagtaactccaaaggactcagcagaagcgtccaccatttttttgacctcatctgggttggcaccaacaattttggtcaccaccttcttggccttgatgagaaaaa

SEQ ID NO: 31580 - DNA, 420 bp, Oryza sativa
  Clone ID: uC-osflM202095b06a1
caatgaacgaacaaatatataaacgcccaatagttaaggttgcaccgtgattgatgccagcactccagattaagatgataaaatgaacaagagaaatagaacagaagaaatcaacttcgctcactagacgaggcagcatctacggccatcttagcatggagaaattttacaacgatgcatgttatattgtcggtgcttccacgggcaaaagcaatctctgccagcttccgggctgcggcctcagggccctcctccgcctttacaaatgcaacggcatgctcattggacaccacatcccacagcccatcactagccaaaatcagaaactccaaatcatcatctatttcttgttcctggacctcaggctcagcaacaacgaatcgcttcaagaaacgattaccaaagcccgagacattgcta

SEQ ID NO: 31581 - DNA, 213 bp, Oryza sativa
  Clone ID: uC-osflM202095b07a1
ccccacccggaaaacaaaattcgtacatatgatttgacttcgctaacaaaatggaccgcgcatctacatcgcttggaatggtgaaatccaatgctctattaaactaccaaccgtggaaagggcgaattggatgggctatctacaaccccaattcgaggtggtgtggcttttacaagattcaagggcgccagatgtcaaatcaaggggaaaaac

SEQ ID NO: 31582 - DNA, 493 bp, Oryza sativa
  Clone ID: uC-osflM202095b08a1
aatggggcgaagcttcgttttattcaaatttcaaagaacacataatgtacaacacacaattgcacgaataactacgtacaaacccgcatatcacaaacttccagcctatcttctcattcttcccctccctaagttgctggtgcacgttgtaacaacatgttcttacttctcctcaaactccacatcaataacatcaggccctgagcttcttgaactgctggctcgtccagaggacctattgtttggctgccacactatgttttggcaattcatgcaccgaatcacttggttgcggtaacccacaaacctccgtttgcacgctgggcatgtcccctcaatggcgacccgattaccaaatgtcccaaggagaagtggcgcagcaaaaggcaggacaaatgtaccaaaaatgaaaactctgaatagccatcctgacagtgcaaaccaaatgaaaaagatcgtagtgaaagctctcccataggtgtgggcatgaagt

SEQ ID NO: 31583 - DNA, 559 bp, Oryza sativa
  Clone ID: uC-osflM202095b09a1
aaaggcaagaatattattcataaatgacgcatgatttttatcaaaacgcttgcaaatgatatcagataagtagagtcaacaagacaaaactgtatctgccaaagcacacctccccaactccacccaattacgccattatttctgggcaaaagcaaacggcttcccattcctccccttcaccagtctcaaaccataaaccccacaacaaatcctcctaagtgacggcatataagatgatgaaaacaaagcaggatactccagagtcgtcatggcgaacttcaagttgacacttctcatgccacagccgctagtcgtgctgggcagcctagtaccggtagtgcgcgggcttgtagggaccctcaactggaacgctgatgtagtcagcctgcgacttggagagcttggtcagcctggcaccaagcttgcccaagtggagggcggccaccttctcgtcgaggtgcttgggaagaacgtacaccttcttctcgtacttgccagtgctcttctccttccacagctcaagctgagcaatgaccttggtagtgatgagcaggacatg

SEQ ID NO: 31584 - DNA, 502 bp, Oryza sativa
  Clone ID: uC-osflM202095b10a1
ggaaattagggcacaataacgtctcatcgaaataggaattcttatacagctatcttttgacgctacacggaagttcgacgctgggaaagtttgactacaaatggactcaacatatgacaacacaacatagcaagttttaacaaacttggcgcattccagcaagtaggatctctcagccatggttgaaggactggtaaaccggaacctgagaaatcatatgcccaagattgtcatagcaatgggggtatatcattgctggagttggccactgtgggtagacagcagttccagaagaggagcccatagataaatcgggttggccaaagtacacagaaggttggtttcttgacatattagcagactgcataaaaccaacaccatactgcataaactgtggcacaacaaaattgaagccaccaggactcacattgaagtcgtgcactgggcccctaacatacctcttgtaggtacgatcatagtcaggatcactacgatccttttc

SEQ ID NO: 31585 - DNA, 89 bp, Oryza sativa
  Clone ID: uC-osflM202095b11a1
tttttaattgttgttttttttttttttttgtttttttttttttttttttttttttttttttttttttttttatttttttttttaatatt

SEQ ID NO: 31586 - DNA, 410 bp, Oryza sativa
  Clone ID: uC-osflM202095c03a1
ggaccgtaaccagcaattggtatattaactcgagcaaacttaaaatgctcgaaaaagttgttcagcaacgaacaaaaaaaaaagctttaagcaaaataaaactaatcacattgttgcccaatggcagataaactttgagcataccaactgacgacggttacaaaatcctaccagctgagagcatcttcctcttgtttattggcccgggggaaaaaagggtaaaatgcggttaactttttcgagtttatgctcagttattagcatcaaagatgctcaaagggttaaaaaaaaaaaaaaaaaaaccgcacccgtgtaggcgtgtgtagcttcaagcagcaacctttttgcaggggttctccagccactccatggggacacttttggggctttcgagcgggaggccaagagca

SEQ ID NO: 31587 - DNA, 378 bp, Oryza sativa
  Clone ID: uC-osflM202095c04a1
attgcaagaaacatcatcttcttcttcatcttcttagtgtacacaacaccaactcgatcatcatctcgtcgcactaaacccatcttccccaacccaaagacaacgaactcgctggccacaaatccatccaaccacaattaaccactgctaagctacggtcccccacttcacttgccggggacgaagttggtggcgtacgcccaggcgttgttgttgacggggtcggcgaggtggtcggcgaggttctcgagggggcccttgccggtgacgatggcctggacgaagaagccgaacatggagaacatggcgaggcgggcggtcttgatctccttcaccttgagctccgagaacgcctcggggacatcggcgaggccgagc

SEQ ID NO: 31588 - DNA, 160 bp, Oryza sativa
  Clone ID: uC-osflM202095c05a1
attatattactataataacaacataaaaaaaaaaaaaacaaaaaaaaaaaaaaaaaaaaacagaagcaacaaaaggccaaaaaatacataaacgtagaaccacagaaaccaaaccaaaacgaaactactaaaacaacacacccaaaaaaaaaaccggcga

SEQ ID NO: 31589 - DNA, 111 bp, Oryza sativa
  Clone ID: uC-osflM202095c06a1
ggccggtcaaccccatcgaaatggtgttttatttgctttaatcattacaacatcttttttttgtatattgagcaaaatccaatgggtacaaaagactctgcaagtcataaa

SEQ ID NO: 31590 - DNA, 399 bp, Oryza sativa
  Clone ID: uC-osflM202095c07a1
aaggggaacatgtggcgcaagatgacctgctgatgatcccaacatgtaaacacatcatatagcataggtgtgagtggtaggggaacattgcatattacacaagagtgccatgttctggagtaacagtggattttcaaggtccaaagatggatatagacgaacagaaaaacgactgtaggaaacaaagactacttatgcaaattgataaggaagaggtcttgaacaaaaggcctggctagaataggagtacatccgctggtgaaaacgatattgaagggggaaacaaaagttgtagcatactttatatttgattaacttgatgtcgcccttgctggggctattatccttgaacaatttcttagcaagtggggccgaggcttgaggcatggcccttttttt

SEQ ID NO: 31591 - DNA, 434 bp, Oryza sativa
  Clone ID: uC-osflM202095c08a1
gcaatccaacagcaacaaaagcagatggcaattggtggtggaagttcttacagcggttttacaagggtggtcgactgaacttaaaaagccgaagcagtttgtatctctaataattactaacaccggttacacaaacaagcgaaactaaattaatcaaggtagtacatacatacatacaacaaatcccaccggtttgattaacaacagtaacggtgatgataatttaagctggaaacaacaaatcatgcacctggctgactggcaccccccaccctctctcacacacactccctcacatgcaaacgatatgaccaagtccaaccaggccagcagcagcagagcagccatggccatctaagctcagttgctggggttgctccggaaggagcccagcgccttgatggctgccgcccggaggatgtactggtgatacg

SEQ ID NO: 31592 - DNA, 440 bp, Oryza sativa
  Clone ID: uC-osflM202095c09a1
atccagtgaacaaccaagatttatcaggtgattgagttgggagtctatcccttcaatcgaatcgatttatacaaccatctttgatcctatactacaaattgattcctgccaattcttttagaaaaaaaaaaatactacaatctctgtagatcagaacacaacctcgtttacatcttacaacagctgaatcatatgagaacggtagaacaaacagttgttaaatacatgctacttcaagcctaattgtaggcttgtagccaatgaacttctcacaattccaggttgaattcatgtgtttattgtcaaatagcaggctggttcagcctaattttaataaattaatggaatctgcaatcccaaactccctttgtaatttgtatgggggggccatctacttgcactgcagctgcttttgcaatggctttgagctccatgtcagc

SEQ ID NO: 31593 - DNA, 525 bp, Oryza sativa
  Clone ID: uC-osflM202095c10a1
gggtgcaaaacagatccctattccacagtatccatgagctcagtactggagctactacatagatgggtaaattaagcagaagtactcaggcagattaatgcctttcaaacagccaaaaagaacactagggtgataccacagtcgtttaccagaacgcgataactaaaacaacactccccatctctagccggcgtagctgaaacctgagatcttgtagatcctgatggttccatctgtgtaaccagcatagagggtgcttccatctgcgctccagttcaagcttgtgcagtagagcatctggttcttggagacagggatctcgggcttaaggtcctgcacaatgtgctttgactcaagatcccagatcttgatagagtcctgggtcgccgcgcagagccagtagcggttgggcgagaagcagagcgagtgaatgatggaacccgcgtcaagcgagtacagcctcttgccctcagccaagtcccacagcaggtaacgccatctttgccaccggacgcgcacagagaa

SEQ ID NO: 31594 - DNA, 485 bp, Oryza sativa
  Clone ID: uC-osflM202095c11a1
aacatccagaaacaaactcaacatttttttcaaataaatcctcatttgaagatagcatcgatattaatattaacaatacatgaggaatgaaaatgaataacaagaggaacaaaagctgcagaaatacataaacgattggaagtcgactcaaattgcaaaaaacttgcccttgtcaaagttttttagcacgttggctgctgctgctgcttcggttgctcaccctgccaagcccagactatgtccttcaaagctggtctcatctcttggttcaagaccttacggtattcaagtgtatcaccatttgtcttctttagctccacaagatgaaagtttggggtaacctcgaatatctctgcatcaatgcccataacacctttccttccaggcttggagccttccatcttcaacagtccaccatctttctttgtgagcttcaaccgcaagccctttgcaatatcctcaatcttagatatgattggtgaagc

SEQ ID NO: 31595 - DNA, 231 bp, Oryza sativa
  Clone ID: uC-osflM202095c12a1
agccaaaaaaaaaataataagtttttaaaaaaaaaaaacataaaaccggaaaaaaaaaaaaaccacacaagatttaagggccaagcaagaaccccaaaaaaaaaaacaggggaacacacaaaaagcgggcccataaacaaccgagatacacaaaaccccttggtacctatgaagcccctaaccctaacaaaacaccggcttgcttcttgaaacccccaagaaccccccccc

SEQ ID NO: 31596 - DNA, 441 bp, Oryza sativa
  Clone ID: uC-osflM202095d01a1
tcgttcgcgatcggccgcccttttttgttttttttttttttttctatggtttttttttgtaacatttttcatgaataatgtcttacacccttccccatatataacttgggtccaaaatggtagtagtggtagccaacttaaccatgcaactcaccaagtctgtaccaaccagaacaacaatgtttggcttcaaaacacatgacaataccataacagacggttccaaaacacttggcctaggcacacacccatcaaaatcaagtaaaccatgttccgaaaagagaagacctccaaccatttttatcaacaccagcactcgccgccgcataccctatcgtgacgatgaatagggttcaaggctcgacggctgcacacagaaccggtagcaacggttgcggctttcctctgcccaaggtgaaaccccgcgtgccatctggcatg

SEQ ID NO: 31597 - DNA, 503 bp, Oryza sativa
  Clone ID: uC-osflM202095d02a1
ggctatgggaatcaagcagcgtccattatcttctctcattcaactaatagggtacaaaacttgggatggcagtccaccatcatattataattatatgatctacttcgtattctcaatctgccgagttccatcagttcacgcatcatcgacaccagtcatagggtcagcttccttgggctcctcatctccaccatcgttgccctcttcggccagggcatccttcatctgataatccaccttgaaatcgtagtctgcatccatgtcggtcagcacgctgaacttgtttgccttgcgcctcttcttctcggctttcctcttgcgaggatcaagtattccctctgctgtgtacagcttgtcattctgtgtgctcgcgctggccgtcttggctccttcacgctcatttgcatcggacatcgactcatcatggttttcctgcgcaggttcattctgcttcttgccatcctctagcatctcttcgtcaatctgcggtggggcattagatg

SEQ ID NO: 31598 - DNA, 340 bp, Oryza sativa
  Clone ID: uC-osflM202095d03a1
aattattaatttacaaactttgtaatgttagtacaccaacatattataactaaacgaactaaaaccaaaaaagaaaaaacaggcccaaaaaaaaaacggggcacaaacaacagaaaaagggacaaccgcccagaaaaacggaggttcaccaaaaaagcccccaagaaacggaaaaaaggggaaaaaaaaagacacggggagagaacttcccggaaacaaaagggacaaaaacccaaaaaagaagggggcccaacgttaaccaaagaaaaaacaaaagcccggaaggcgccaaaaatgggcaaaaaacagcacgttccacccaaaaaaccctcccgacacc

SEQ ID NO: 31599 - DNA, 413 bp, Oryza sativa
  Clone ID: uC-osflM202095d04a1
agagaagctccacatgcaaaagtatatattccagtgtataatatccaggtaaagccaaagcctacacaaaccaaccacagaaccacattctcaccaggtcacctaaacttctaaacaagtctttgtgggagatatccaggtagtatatatattgcgaatcctcacccagagtttaccatgttgaacattgagatgtactgcacacaggaatggacatcagtaccatataacggacgattgctgattactattactggttgcaatgtaacacttcggatacaatagtacattacagagctagctaaatgcgaagccacaataccgtcagcgcaagacgatcataaataaagcttacacaacatagccaacatgcaaaccattcggactgaccagagatgagggttcttgaagct

SEQ ID NO: 31600 - DNA, 296 bp, Oryza sativa
  Clone ID: uC-osflM202095d05a1
accctaatgaaactttttaaattttcagggaccaagccaaacaggccggggacaagaacaataacgcactgccaacaagcccggagcagcggaaggatcaaggggacgagcgccgacatcgtccatacggcaaacagcccacaccacccagcaccgggaccatcctaacgataacagggtgaaagcgaactccaccatcagaaagacgcccacagattcgacaacagggcgcaagacttaaaacgacggcaaagcactaagcaggaacgaacagcagaacgggctgaagaacgcag

SEQ ID NO: 31601 - DNA, 411 bp, Oryza sativa
  Clone ID: uC-osflM202095d06a1
aacacaccccagcaatcatttaaaacagaagtacagagttggcttgttttaacaacatgaaatggtgttagttcagaaaataaaaatagttagctgaaaacagaaaaaaaaaatctatgtttgagattacacaaaatgtgagtgagaacagacacgaatggccacggcacagacgaccttttcaataattaagatacaaagctaatggtcaaaagccaatctaacttgttaaattggtgttacaagtttgcctgtacctgactaatcgactagagtagtagtacacactacacagctgctaactgcatgatcggatcaaaacggagaaaggttttgtggaacaagttcaattttaacagtcacagttggtgaagctttatgagataacttcaggtgcttttgaaagatttt

SEQ ID NO: 31602 - DNA, 462 bp, Oryza sativa
  Clone ID: uC-osflM202095d07a1
aaatatatatagccggagctttcatagatttcattcacatatgcctcacccaacaacatatagtcgtagcagataccactcttacatcaagtcagagagagatcaggtgaaacaaaaacaaaagcagagcacggccggtaaaatcaaaagacgatgaacaaactgggaacacacgaaacaaggtgggagacatcatcgaatcagagatgaacaattaaacgaggctatatatgacgatgacggcttagttgccaccagactcctcgcagcccgggggcttgtaggcgatgaagctgatgagctgcacctgcctaacgttgtcgaagccgatgatacggacgaatgcatcagggtacgccttcttggcctcctcgagctccttgagcacctgggtggcgtcggtgcacccgaacatgggcagcttccacatggtccagtacctgccgtctagtatccagggga

SEQ ID NO: 31603 - DNA, 516 bp, Oryza sativa
  Clone ID: uC-osflM202095d08a1
aacatggaccatatatccattcctatcaaaggccttgcttcaccttacaacagggtacaaagtacgccgactaattccaagttccatcgactgggtcattaattatcatcatctacaaacaataatctgcccccacttatttttttgcttttcagcagattaattagcgacacaacctcgcgcttaattttgcttcgcgcatgcatgcatggattaaaagattacaagtacagaacacaaaacccagctataacaacaaaaaacacattacaaagtatcacattgttttttctcagctgaacctagtatttcagttcagtccccatctgcatccatcatatccacagctgcttccttccattcttctttacctttgtggaagaaaccagctgaaatagtagtagtagtagtaaaaccttcaatcttgtactgctgctacgtgatttcgattgctgctacttacttacttcttctttttcatttgaggcttgttcatcagtagcttatgacgatgag

SEQ ID NO: 31604 - DNA, 461 bp, Oryza sativa
  Clone ID: uC-osflM202095d09a1
ggaatcaaaaggcccccaaccaagcccaagtgttagcggaatgtcatccaagaacacaacaatactatactacaatgggaagccagctcaaatgcaggaaaaagaactcttgaggttgtttcacatgtgcaccaaagaggcaaaaaccactccatgcttccctatttatacacatactactagcagtatgcatacataactacaaggtagctaggtgcagtccctaaaaagacctaagcccatcactagccagcaactaaagataattaaccctacatactaatccttacaagaggcatatatatcgaagacaatggaggaactaccatctcaaaaagatttaaatctctagcaaccatttgaagcttcttattcatgccagttcgcatgtcccgtgccagtgatgaccctactgttcaagtggcgaggtgggtgactgaactgctagccgttctgatacc

SEQ ID NO: 31605 - DNA, 471 bp, Oryza sativa
  Clone ID: uC-osflM202095d10a1
tcttccgccgcgctgctagctagctgatggttagttgccgccgccgccgctgcagaggtcgaggagcttcttcctcccctcggcgacctcgtcgaataggtcgtcgatcagggcgatgacgtcctcgcacccggacctcagcgcgtcggcgcgcagggcgacctccgccgccgccgccgcgacgtcgccggccctgtccacggcgtccctggcctgctccaccgccgccctggcgcgccggaactcgtgcatcatcgcgcctccccctgcgtcgacgacggagggcgacacagccgccgccgccgccgcggcgcgctgctgcgcgcgggcgagcgccgacgcgaacgcggcgccgaagtaggcgccgcagtcggtggctccgccggcgccgccggcgtcgggccagtagtggagcacgccccaagagaggagcgtgaggaggaaggaggtgagcattctggtcgcgcagag

SEQ ID NO: 31606 - DNA, 374 bp, Oryza sativa
  Clone ID: uC-osflM202095d11a1
ccgggacttctgcggcaaatccatttaattaaacatcaagactcgttttaacaacaacctgccacaattcacaaacagcacggctgttgcacaagacggtggacacgggtcattttatttgggtgttcgtttccaccatcagattgatatactacacgcgaacaagcagaaacattcggcaacaatttctccaggaaaatcgcggcctatttcgacatcatcccgagcgagcgttatttggaagagggagcactttttaagacaggcacagtctcaatggcaggagcgagtgaccaacgtccacgtccgcgacctagaccccaccctggatgtaggcgttgagccgtattagctcttcccgaggctcgctgacc

SEQ ID NO: 31607 - DNA, 417 bp, Oryza sativa
  Clone ID: uC-osflM202095d12a1
gaacaaggagcgtttgactgaacatctgctaacaaagtgagctaccgagttacaaggtacaggatcagcagtgacagaaaatgagcgaagtgaagtgaagtaacagttgctactacattgagcgggaagaacattggctggaacaattgcaagaattgccatgggttatctacctactgagaacagacagggcttctttgtggctttgctattgggaagatcttgaggtgcatacaaggaaatgtagtgcactttactccagaggctttaccaaagttgtttggagggagaggcacctgtggggactatcttgattatggcatgagcttgtaaatgatgacagcaggcaaatcttggcagcaaaccggtctgaaggcgtttgtaaggccacatgatctatcaattggccagatcttt

SEQ ID NO: 31608 - DNA, 349 bp, Oryza sativa
  Clone ID: uC-osflM202095e01a1
gccgggacatgacttgtttgcccactcacaaggagaaaatacaacaagaagcacagttaagtaggtaaaagacatgtactaattttgctattccttatgccggagcgatattggatcaaaagtattctccacactgaaggggaacttgattgattatatggaatggcgatatgacctctctttgagaactgtggatactaacgctcaaaggaacccggggccattgatatccttgtcctcgagcactgctccatctgggatttccagatggacaccacgttgggctctgagggaccccttggccttcaatgccatgctagagccagaccaaacaataccggaaaccttt

SEQ ID NO: 31609 - DNA, 315 bp, Oryza sativa
  Clone ID: uC-osflM202095e02a1
atacatatgttggcgaagaactggtggcaagaatgctgaactgcacatcaggtaagtcacaaggttgtaagtaacattagatgaatgaagatgtacatttttcatgtttttggacagatatgcttagattctgccttttacggatacatccatgctattttgcaagccatgtaactgatttataattaatgcagcctctccggtggttccatgacgatcatcgcattactcgttatcatcatcagccaggtcgaactgcttgagcagcgcgccgcagacgggcagtgggatgtccttgaggtagccgagtgggtt

SEQ ID NO: 31610 - DNA, 328 bp, Oryza sativa
  Clone ID: uC-osflM202095e04a1
cgcagataaatcaccaaacccaattgagatgaggacattctcaagagtgctccacttgagggaatgctttcacaagtcagaccatgggatacgccggggatgggcccgagttatgacatcaggttaaggattatagcgaacactacgtatgaggggtgctgtgattctatcccagcaatagtaggtcctcgagaccatagaccgtgggcacaatcggacatcggaagaaagcataggggctgcgaaaacagcacttcgtggggaatttagtgacttaaggacccattgtggggctccagcacggatccaaatgtgcccttattacccg

SEQ ID NO: 31611 - DNA, 235 bp, Oryza sativa
  Clone ID: uC-osflM202095e06a1
atgcgcgcgcactttagcttgtttttctctacagagtgcgccctctctttttttttttttcaggagtatcaaaatgaaagtttcggcgggttcccaaaaataggccatttaagttcagtaccaacaaatttattaaaatcggatttagaaatattcaaatggcccataggaaaatcaattgggctcagttacaattcatcaaacacatgcacacgaaaattgtgtttccaacaat

SEQ ID NO: 31612 - DNA, 401 bp, Oryza sativa
  Clone ID: uC-osflM202095e07a1
gttgtccgaaacacacacaaactgctactaccacgaaagaatatctctagatctctcttcacctacgcatttgcaccggtacaaacaacacaccacatggtatgatgggtagtcaccggcacacgagggagaagagctgagtcgttgaatatcagagagaggaggctactactgaaggagtactcccagtaccactactgaatacactgatgatcgatcaaaaccagcaggggtggcggaacaggccggaaagcgcgggcgagacaaagcaccaacgccggcaacgccgctgcattgcaatgcccaccaaactccggccggcgccgtgcgcccccaccaccgacgagacggaatccactgcccccttgtgtggctttagatgagatggaacaggaatggcg

SEQ ID NO: 31613 - DNA, 338 bp, Oryza sativa
  Clone ID: uC-osflM202095e08a1
aaggggaataataaaaactaatcagtaataattaataatgacggtatgtaagcttttatataaacgaaacgatcctgctttaaatacaaaggatcatcctcctcacatagaactgttattttgaacttagccaggacactaagctatagacttacgtaaaacacaactacacttattccattctaagatccttctcacattggtccacgttctaacaggtcccatctgaatggaggagctgcataaacccttggacaggggtggagtagtaggacgacgcatactcagatgacggcgatgcccatcacggacaggattattggcctgtacaggaaggt

SEQ ID NO: 31614 - DNA, 405 bp, Oryza sativa
  Clone ID: uC-osflM202095e09a1
ggctggatgctgatacatgttctaatttgaaaatagacatgtctgttatacaacttctgtgctttcttacatcactgtctgctttaacattcaacagagctgagactccagaattccgaatacaaaccgaaatccttgcaccagcatagagaacaccggtgattaatttgccgacaaaaatatactcgaaagaacatgggagtactataccaggacacttgtattggctcagcgtgaaccatactcgagtagctggccggctcacgattggtaacaccaatagataggaaaaactgcttgtggcgacgagcgcgtatcggtgttgttcttctgtagagttcaccatgggatatggtgactgggattacggcggacctatacttggatatagcccggcgagccgcc

SEQ ID NO: 31615 - DNA, 414 bp, Oryza sativa
  Clone ID: uC-osflM202095e10a1
atggatcaatcaaaaatacatgtaagatcatagctcaatttggaataatacaaagtgatttcaggtatctaacctgtccattgcaatgactaaaccagctgctgtccattgcaatttcgttttgttcatgtctgtacttaagattggaacagagaaactcaaatgattttagcaagcgcaacgcaataagggtactgtgattctttctgagccatgatctgtcctcaagaccattgaagattgttttcattggacatcggaagatcctattttggctcgaatcacagcacttagccaaaaattaacttactcaagtacacatttaaaagtgctggacagctccaaatgttcccttctgacgccatttgttactcatcactttcacttttctcctcactttcgtcatcttggtta

SEQ ID NO: 31616 - DNA, 354 bp, Oryza sativa
  Clone ID: uC-osflM202095e11a1
gtacggtgagcgcgccggacggcctgccgagcagcaccgccgggaggtcggggaggggccgagcctggaactcggcgacggggatcgacgccatgaacggcgacgagttgccgaaccggcgcgggacgaggtgcgacgcgagctcggagcataagtcctccgccttgagcgcatgggtgtccgactacgggcccttgaacgtagggcaccattacttcttggggaaaagccaccgcacggactaggagttgcgcggagggtccaagccgaaaacggagaaacggcggaacatgcagcccgtgccgacgtacatggggccctggaggccgcatagcgcgcgcatgttgccatagc

SEQ ID NO: 31617 - DNA, 455 bp, Oryza sativa
  Clone ID: uC-osflM202095e12a1
gtgtatattattttgttactatttgagtgatatggaagcatgttcttgcatgcacttgaggggtgaacattcaatttcactgtaagaattagaacactatattttggagagaataaaaggcacaaaacggaccgtaacatggtgagactctaactgatggatgaaattaaatgggctactatatactgcaacaattagggaaactttattcttaaatgctctctgtgaaatcttaattatttcttagatacatagcatatgcgtgtatatagggattccaagtgcactgcactgttgcggtctggtcgatcgaatcgaaggaactgcatgcatgtagatgctcatggcgccggggccgccggcgcagcgacgttgggagatggaactgtcgccgccgcagtcccagtctcagaaagatattccgggaggacagcttctatgagagccaacaagct

SEQ ID NO: 31618 - DNA, 363 bp, Oryza sativa
  Clone ID: uC-osflM202095f01a1
caggaaacatgaaccatgcaaaaacatggggcttatatagtagtacattgagttcacaccgaaaattggggggtttaagtaatccaaccaaactgcccccaagtttgaacatcaccttgggttgaccaagaaaatcggacagggtcgatcggaacacagccttttttttttatccatctttacttacgcttggtcaaatttgtttgatcagccgcaaatctgtactatacatgcacactgatccaccggaaattgcagtttttaatgcctcaagaaaatgaagcaaagggttcgatcggggtcggggtcatgggaatttaagttcacaaggggaccttttccattttgcggaggagggcggtg

SEQ ID NO: 31619 - DNA, 353 bp, Oryza sativa
  Clone ID: uC-osflM202095f02a1
cttacaatgagttgtcttttataacactgatccaactatttttcattcatcaatccttacaatcagcttatctctatggagataggaatccattaattcttacaatcagcttctctctatggagatattgatcagcttatctctatggagataggaaaacaatagttatgcgtcttttataagactgatccaactacttctcatccatcaatccttacaatcagcttatctctatggagataggaaaataatagttatgggaagttgatccttaggatcagcttatctctataggagctagtaaaacaataggtgagtcggacatgagtcatatacacagattgtacgtatag

SEQ ID NO: 31620 - DNA, 204 bp, Oryza sativa
  Clone ID: uC-osflM202095f03a1
agtgcgacactcccttttttttttttttaggtgggtgatagacagtgggtgggtgaccccatatatccaaaattattacaaaattttggaatttgtgaagccaaggagtttggatgttaaaagctaaacagaacttaaacgtgaatcgcatttgggaaggtttgcaggcaggacttctgcaaggttatggtaccggtggaatga

SEQ ID NO: 31621 - DNA, 444 bp, Oryza sativa
  Clone ID: uC-osflM202095f05a1
gaagaggggtagatgggcatcgtgcgtattcaactatcaacatgtgcacaggtatcttacaatataaataattgtacaccaaaaagaatgccttcatcgagcaccggaggacaaacaggaagctacaaaaagcagcagcagtgtcgatgcagaaggaaaatatgatgattctgaaacgtaatttacatctacaaccttacgcgaagcaaaataaaatgccccaactcgcttcgaatatctggtgacttttgattgtttacacgaatgtgatcctcaatttacagcacttcacctagtttgatcttttaggttgcggaatcacggttgggaggtcatcattacaatttctggacctttgcgactaggacatgatcaccctttgcagggtcctcaaacttttgcgatccaggcagtttaaatgatcacccatacaatgcttttatg

SEQ ID NO: 31622 - DNA, 188 bp, Oryza sativa
  Clone ID: uC-osflM202095f06a1
gcgcgcacgcactttagagcgttttttctacagagtgggccccccttttttttttttttatggggaggtttgagcgggcaggggaaaccacccacgcgcacatgattcagtgacaccatgcatgaagatgctgggcttatgatctttccactccaggctatgccatcaggattcaagtacctgggaca

SEQ ID NO: 31623 - DNA, 370 bp, Oryza sativa
  Clone ID: uC-osflM202095f07a1
acggtgggtttttttttacggggggactgcaccccgcaccgatttattgggtctaacaacaaattgatatcgattgagctggcttcgttgtagatcctataataacgatccatcattaatgagatcatcccttggatgcggcctgcggcttacataaaatctcgatccaaagaagcaaagatgaagacagccagaaattaattaagctagaaatctcctcgatcgatcacacacacacacgcaattaagggacatacatacatgcactggtgcaactggaactgcagggtcggtgcgtggctactacaaggggacacagggcacgctggttggcaccatttcgaacgggtcggtgggctaacttgccggg

SEQ ID NO: 31624 - DNA, 409 bp, Oryza sativa
  Clone ID: uC-osflM202095f08a1
ggggggcttgagacaccgtagtcgaaacatcccaaggattaaacatttttccttacacaaactatctgcagattctagacctagcttctccaactatctgaagcttttcacgagctacatcattttgatacattttacagaagaattactgtacaaaacgcatacaaaaattattgtaccaaccaaacttcaaaacatacaaaaatttagcaatgcaactacaggttatcgatttggtaatgctatgtacaaagacctggaagtaatttacaagcgcatacacaagacgttagatcctagaaatatccaggcgttggcatggtggtcatcccacagctcttttgaattcgcttatcaaaaggccttcatccatctttgtcgacttctcgagcaatctttctttgcatag

SEQ ID NO: 31625 - DNA, 429 bp, Oryza sativa
  Clone ID: uC-osflM202095f09a1
agcatgacaactgaaatgattgagaaatgaacctaaatctggtggattaaagtacatgtggttgagcttatacgttgtggttatggagcacatgttatgccaaatctccagactttcagcttttcctggctcttattctagatgtattctacagaatttatcgaacagataaatttaaccacaatatgcatttcactaattgagttttttggtagcttagtcattactggtcctaaacatacttgcactgctaacagctttcctgctctttttgcactgctaacaagtactgctggtgttgcagaccttagcaacgtaaagggttttttgttgcagttattaatacacttgttccttgtaggtttgcagcatgtagaagcttttgagttttgaatgaaggcaccgcgagaccgtgtgatcagccaaaac

SEQ ID NO: 31626 - DNA, 462 bp, Oryza sativa
  Clone ID: uC-osflM202095f10a1
ggatccctggagcttcaccagtccgtcctgcttcttcaccttgaagctctctgtctcagcaatctgctctagctttgacactattgctgatgctggtttttgtgtcatgaaccgtgagtctgccttctgctctttgtcgttctcaaacaggcctgacagatcaaatcctttggagagggagatgatgtcaaatgcattcaagctcactggcttcaaagagcttgctggttcttttgccttgccttcattgtccttgtgatcagcactgaaagcagtctggacatccttgaggttgtttgattcatttggctgtgatagcatcactgctggtttgtaccccttcttgaaccatggatgctcaactagcttctcaacggtgatcctagtgtttggatttggatcaagcagcctggacagaagcctttggacatcagtagtgaaccactgggggaacttgacatc

SEQ ID NO: 31627 - DNA, 449 bp, Oryza sativa
  unsure (1)..(449): unsure at all n locations
  Clone ID: uC-osflM202095f11a1
acatgaaacaggcaggtatcagatattcacattggaccgtctcctctcgaaagcatatgtacatggcgcacgcatgcaggtgcccgggtgtctgcacaaatatttttcacgcccacatgccgtacttcaccggcgtgccggtcggcttgatccatggctcggcgtgcaagaagttctgcacggtgaacttggtggcctccttcttgctgatcaccttcttgtaccccggccagctgacgcggccggcggtggcggcgccggcgcccttgttcccgtactccgcgtaccagagcgtcttgagcccgaagtcgccgctccacgggaggtagccggccttgtctacgaaggcggngatgtcggagttcatgatgagcgtgcgcgagtactcgcgccacgggcgtgcgaggtagctgcggacggcggggcgggaggcgttcccgagcgccgac

SEQ ID NO: 31628 - DNA, 521 bp, Oryza sativa
  Clone ID: uC-osflM202095f12a1
atgaaaagttttgcccgtacaggacaaaaaatacatgcacacatgattcagtgacaccatgcatgaaattgctggtcttatgatctttccactccagttcatgcattcagtattcagtacatgggacacgctggtgatgatcatgagtcatgacaacaactcagtaggaatggttaacaataagaatggggcatggtatgtttaaagttcgacattatcagctcggcgtgtcaatacacccaggccacaaccaagaatcgacaaaatgtcttgtgtatgttaaactgagaaagctggtgttattttgtgacattacagccaagattggtcctgaacatgataacttgtttgaacctattaccacattgggacttggcaaacagctaccaaatgcaagcacatagggagatgaagttactgggctgctgtaccaactcgggtacattgtcaccaagctccaaaaatttgcatggattcctctacttaactggtttcgaggccaagatcttgcagacaggcat

SEQ ID NO: 31629 - DNA, 387 bp, Oryza sativa
  Clone ID: uC-osflM202095g01a1
aatgtgattcaaggaaaatttgcacaatggctaactagagaacaaaaaatagggtacagacctgaacagcccacagtaagaaccaaaagatcaatcaatggtccacgtgtaaaagaattacaacagataaagctgtgacagtgtgaaactttgttcctctcgccgtcctaattaccttccctgtgtgacttacaacctagtcttagctctgaatcaagttccttccctggagcgtctcatgctctcatcaatcaacttgaatgtcttctttacaagtttctggtctagggccgtagttctgtagattttgaagacgcggtccacacggtcaggcttgctgctctggaagtagagctcttcaaacttttttttgacaaaactatatgc

SEQ ID NO: 31630 - DNA, 436 bp, Oryza sativa
  Clone ID: uC-osflM202095g02a1
caaacagatgtggccatcatatatgtatatgtagcacagtttgattcctctttgctagtcaaaagatggtatcatcaatcaataatagttacagtattgattccatggagtagtaggattacaacaattaaggacgatgaagagaaaggggtggctggcgatacacatagagaggcaaagcagggggtagcttagttacaacttacaaacgaagctctgatcgatcaagtctgatttgattgatgcagctgaagaagaagaggaagaagacgacgatgatgatgcaatcagctgctgacgtacttgtcgatgatggtggcgagggtggtcttggggacggcgccgatgacgctctccttcttctcgccgttcttgaacatgaggacggtggggatgctccggatgccgtagttggtggcgatgtttggtgagtcgt

SEQ ID NO: 31631 - DNA, 273 bp, Oryza sativa
  Clone ID: uC-osflM202095g03a1
gacccgtgagaaaggcaggttgtctttgcattgcatatgcagtgtgattatgtaaacagtaaactcaaccgctccgtttattactcctcagagcatctccaacagtctctctaaatacctatttggctaactctccatctaatttgacaagtcaaacaagttgtttactccatcagcctctccatttatcctctctattttgagcgtatgacagtgggacccacatgtcagtctctgcaaccctttcttcttcctcattcttctccccccttt

SEQ ID NO: 31632 - DNA, 154 bp, Oryza sativa
  Clone ID: uC-osflM202095g06a1
cgagaggtcgtccgcgcggcggcgtgctccaaggagcggggagggggagttgggggacacccccccggggcgcgggaagggcccctgctgtcgacggcgtggggcctgcccggccgccggaaggggcgggaccgcggcgggggccgggaaaggg

SEQ ID NO: 31633 - DNA, 378 bp, Oryza sativa
  Clone ID: uC-osflM202095g07a1
cagggggatgtggacatcatagggggatatgaagcacacattgagtccaacaatactgacacaaaaggtggtcatcaatcaaggagagaaccaggttaggaagggctgacagggccatatgcaccacccaggggacgatgaacagaaaggggtggctgtcgatacacagggaaagggcaagcttgggcaagaatagtagcgacttaggaacgaaggcttggtgagataatgcttgcttaacatgatgtacattatgaacatggggacgaagacctctagtacgaattaatggacggaatccatacttactgcaaaaaggggacaggcgaaaatttgagtgggatgagatttcggaatgctattaacaggtcaaggacc

SEQ ID NO: 31634 - DNA, 98 bp, Oryza sativa
  Clone ID: uC-osflM202095g08a1
ggcggtacccccccacagtgtgattcttctttgatagaaaaaaaatggtatcatcaatccaatatagttacagtattgaagtctttgtgtagtccgat

SEQ ID NO: 31635 - DNA, 348 bp, Oryza sativa
  Clone ID: uC-osflM202095g09a1
gtggggttaggggagccgtaggaccttcaggcttcagttgacacaagatgtgcaagtttacacactatgaatgctagaattaacacaggaaagatgaagctttaaacacaggtaggttaatcaacagttacagtttaaaattaaattagagacaagcttacaaactagaaaagctagggcaagataatatctaagagatcatgacatccggagattgacaactccactctaacacagttcgacacaacttcttgttactcatgcccgggtcctcttgttggtgcagtccgggcacttgtactgcttgatatgcttggcacgagcgggtgtgatcttgacgcactttcc

SEQ ID NO: 31636 - DNA, 357 bp, Oryza sativa
  Clone ID: uC-osflM202095g10a1
gaggggcgccgccgcggcccgctccccgctcgtcctccaccgccacccccaccccgcgcaccaccgccgcctccgcctcctccccctggtggcgggcggcgggggaggctcgcccccgcgtgtggggaggaggatcagggccagccgggagaaggggcggcgggtcgggattagggttttcgcgaggtacagccaggcccaggacttctccactcgcctccaagatagagctggcgaattgcctaagttggttgaggaccttctacagacatcaattagcacagggccacgaggtgcttttaggattgcccaagggaaccaagctgtccttggggttggtggggagtgtctaaaagt

SEQ ID NO: 31637 - DNA, 491 bp, Oryza sativa
  Clone ID: uC-osflM202095g11a1
tagtagccgccatcgccgccgcgtcggaggtggcgaggtaggcgtcggcgcccaggtcgtccatggcctcgccgcgcttcctcgccgacgagctgatcaccgtcacgtggtgccccatcgacttggccaccttcacgcccatgtgccccacgccgccgagccccaggacgccgccgcggagacctggcgacatcagcccgaagtgcttcagtgggctgtacaccgtcagcccggcgcacagcagcggcgccgcctgctccggcgctagccccgccgggatcttcaccacaaacttctggtcgacgaccatggcggaggcgaagccgccctgggttggccggccgtcggtgtagacgtcgttgtaggaccaaatcctcttgttgcagtactgctccacattggccttgcacggatggcactcgcggcagcagccgacgatgacgccgacgccgacgacgtcgccggcgctgtacttggtcacctccgggccg

SEQ ID NO: 31638 - DNA, 441 bp, Oryza sativa
  Clone ID: uC-osflM202095g12a1
gccgccggggcagctggggacgctgtggtcgacgctggaggaccagcgcggcggggcgcgggaggtgcccctgctgtcgtcggcgtggggcctgccgggcggcgggaggggcggggacgggggcgggggcggggaagggggtgggctgatggagatcatgattcatgacaacaactcagtaggaatggttaacaataagaatggggcatggtatgtttaaagttcgacattatcagctcggcgtgtcaatacacccaggccacaaccaagaatcgacaaaatgtcttgtgtatgttaaactgagaaagctggtgttattttgtgacattacagccaagattggtcctgaacatgataacttgtttgaacctattaccacattgggacttggcaaacagctaccaaatgcaagcacatagggagatgaagttacctggctgc

SEQ ID NO: 31639 - DNA, 223 bp, Oryza sativa
  Clone ID: uC-osflM202095h01a1
aggtccttggaaacaatagcatctgattcatcggtttctctcggagcaaataattccaactaattttgagatatacacaaacaacgaggaagataacctttacaagaatggcggcatcctctgaggatgccatggaatgatatccactatctggggggctttgcggcattcgctccccgggggggtcttcgagtaaaggcttcaaggggatgggtctgcatgg

SEQ ID NO: 31640 - DNA, 320 bp, Oryza sativa
  Clone ID: uC-osflM202095h02a1
gctcctgaagggagaagaggaaaaaacccgactggttttggccggccaagtcgcgaagcgcttgccaagaggggtggtatagcgactgtacaatatcaatatggcagggtcttaatctctctcacatgttatgatggaatcgctctcacatgaagtagctcagtgctttcttcttcctcgaacccgcctcgccatataggtcgttccattgaagaagttcattcatgtttgctgaatcagatgaaacgcttgcacaaacctgctcatgggcagatttgaaatcatctaaggtcagaggacgaatgttcttactaccatac

SEQ ID NO: 31641 - DNA, 174 bp, Oryza sativa
  Clone ID: uC-osflM202095h03a1
aaaaaaaaaaaaaaaaaaatttttacccccgaaaaaaaaagaaaagggggggaaaaaaagggggagcctaaaaaaaaaaaatccaaaaggcgaatttacaaaaaaaggaagttttaggggataaaaaaccccttaaaagaaggcccccccctaataaaaaaacaagcgggggga

SEQ ID NO: 31642 - DNA, 395 bp, Oryza sativa
  Clone ID: uC-osflM202095h04a1
aaaaaacccaaaacaaaggccggagacccccaaaacaaagggccaaaaaaacccccggggctagaccccctatttttagggggggttaacgcgggagcccccaaaacccagggggggtgggtaaaaaagcaagcttgtggccggccccccggaaaaatccccggggggggagaaaaaataggggttatggggttcacaagggggggcaggggtggaccttctgggaaatgaacaggggcaaggaggggcccccgggggggggggggccggccaaggggggggggttgccggggacaaaaccggggggggccctcttggagaggggcccgcccactgacgggggggggggcaaggggcccgggaccccaggcccaaatttcgcccccttcccgggg

SEQ ID NO: 31643 - DNA, 167 bp, Oryza sativa
  Clone ID: uC-osflM202095h05a1
acacatctggaaggcattgcgttttattggaaattcaagacccacacgctctcattcttcagtaatggtggacaggacagaaatttcagacagcagcacagcacaaggctgaccatccagatgaacatttcagatggcaaatgcccacttgtaaccggggacaaccc

SEQ ID NO: 31644 - DNA, 297 bp, Oryza sativa
  Clone ID: uC-osflM202095h06a1
aaaagattggggttccccccctatataaacgaaacaaagcatcgaaacaagctgataattaattcccagaaccaagaaatctacggttgccagttaaactccccggaaaaaatgaccaataaaggacctaattacattgtactttttttcaattcagggcataaaacaaccaacttataccctacagaatcgaccaccaattcttttgagggattttggagccaaaacaccttgcctacagacataaaccccaaaataagatgagtggggtcaaaagaaacaggtctaacaggaaga

SEQ ID NO: 31645 - DNA, 321 bp, Oryza sativa
  Clone ID: uC-osflM202095h07a1
gttggtgatgtgtggggttttttactggttttggccggccaagtcgcgaagcgctggccaagaggggtggtatagcgactgtacaatatcaatatggcagggtcttaatctctctcacatgttatgatggaatcgctctcacatgaagtagctcagtgctttcttcttcctcgaaccgccctcgccatataggtcgttccattgaagaagttcattcatgtttgctgaatcagatgaaacgcttgcacaaacctgctcatgggcagaattgaaatcattgtaggtcaggggggaaaaaggcctcactaccatacaattgcg

SEQ ID NO: 31646 - DNA, 256 bp, Oryza sativa
  Clone ID: uC-osflM202095h08a1
gattgagtaccaatccactaatgatattataacaatatatgaaaagtgatacaatgtacggttcggcggctagttcatcaaattcctggaaaatcatatgatactttaatggaagaatggaacaatctatggaaatttaaacttgaacacacacactcataagaggaccatattttgaaaatattgaagtacatgtacgaagggctccgtaggatccattgacacttgggtttttatggatgaatattccatagga

SEQ ID NO: 31647 - DNA, 244 bp, Oryza sativa
  Clone ID: uC-osflM202095h09a1
agacaatgtgcacccaggatctataaagaaaatgggatggggggctgatctttaaatcgtaaggatcgatacaaccgatcttgcacctatcctccagaaagacccctgcccagtcttttaaaataaaaaaattactttattatctgtggaacagtctaaatcccttaaaacattgaacaacagcttaaccatctgagaacggcagagccctcaggtggtaaatgcaagctccttcaagcctaat

SEQ ID NO: 31648 - DNA, 466 bp, Oryza sativa
  Clone ID: uC-osflM202095h10a1
aaaggtatatagccggagctttcatagatttcattcacatatgcctcacccaacaacatatagtcgtagcagataccactcttacatcaagtcagagagagatcaggtgaaacaaaaacaaaagcagagcacggccggtaaaatcaaaagacgatgaacaaactgggaacacacgaaacaaggtgggagacatcatcgaatcagagatgaacaattaaacgaggctatatatgacgatgacggcttagttgccaccagactcctcgcagcccgggggcttgtaggcgatgaagctgatgagctgcacctgcctaacgttgtcgaagccgatgatacggacgaatgcatcagggtacgccttcttggcctcctcgagctccttgagcacctgggtggcgtcggtgcaccccgacatgggcagcttccacatggtccagtacctgccgtcgtagtattcaggggacct

SEQ ID NO: 31649 - DNA, 289 bp, Oryza sativa
  Clone ID: uC-osflM202095h11a1
actaaacatttcttttatttatgcagaaaatcaatcccaaacccaaaaaattaacggatgccagttaaacccccacgaaaaaaagaccagaaagcacccaaaaacaaaccaccgtatcaacccaaggcataaaagacccaaggagacctacaaacccacaccaatcagtcgagggaatcggagcagaacactcgccacagactaaaccccaaacagctgccgggtcaaagaacagacctcacaggaagaagcgacaacggggcaacccggtacagacggggacgacgac

SEQ ID NO: 31650 - DNA, 461 bp, Oryza sativa
  Clone ID: uC-osflM202095h12a1
gagttcaagttctcgccattatattaacgaaacagagcttcgaatcaagcagtaaatcaatcccaaatccaagaaatctacggatgccagttaaatccccaggaaaaaatgaccaagaaagcacctaattacatattactctctcaatccagggcataaatcagtcaatcatacctacagatcgacaccaatctctcgagggatttggagcagaacacttgccacagactaaaccccaaatagttgttgggtcaaagaacagagctcacaggaagaagcgacaacggggcagctcgggggagacggggacgacgacctaagacgacctcgcggtctcgctagcccatgcgtgctccatcctgtgccccgtggcctcctcacgctgccgtcgacgacaccgaggcgcgagagagaaggatcccggcccggagagcaccatctgacgcattctgagatgaggg

SEQ ID NO: 31651 - DNA, 290 bp, Oryza sativa
  Clone ID: uC-osflM202096a01a1
gcccatgcgaaactgtaaacatggggatctttaacgtaaaaccatttagactgactttagtaccacactttggtacatagtttcctcaggaaagaaagaaagcagagaaaataaaacacttctaccatacaaagggatttactgatttatcaacaaaatcgaagctcaagtaaaattaacaagggaccatttaaacgcttattgttcttcacaagcataatacatacaacaactgcaagaacagaagaacgggtccgtcgccgatcgatcactgtaggcgacgcccgccg

SEQ ID NO: 31652 - DNA, 118 bp, Oryza sativa
  Clone ID: uC-osflM202096a02a1
gtacaaaaacccaaaacatttttttttaaaaaaagaaataagggggccaaaaaaaggcactggtaaaaaaaaagggttctacagagaaatcaacaaaaaaaaaaaccaagtattttta

SEQ ID NO: 31653 - DNA, 312 bp, Oryza sativa
  Clone ID: uC-osflM202096a03a1
gggctagtataggatttttattccatgatcaggaaaaaaaggtttagtgcaactaaagggtaattagcatttcacggtcgttttacagaagtgattttacatgtatatgagcccggcgaaaattttacatgtatatgagcactatatataggacactctttacatgtatgcataactttgtcccttcatacacctcacttgttcatgaaatcgatgcccttctgaatgctctccatcagctctttctttgccatctccaagccagctctctcaaaatcattcaacggccccagagggagaacctcttcggct

SEQ ID NO: 31654 - DNA, 387 bp, Oryza sativa
  Clone ID: uC-osflM202096a04a1
catgcacgccgccgtcagctggtgattctccagaggatccgccctccttttttttttttttcaggggtaagcatcatttgcattacttccaatatatcagtgaacagcacaaatcttttccttgtccctcaacagttgctaaaggatgaaagaactgcacgagactgattctcttatacttgatacaatggatatccttatttagtcttgtcaccaaaattgattcctacgcagatgggcacaaccatcaggtgccttctccacaccacacaaatggggcatcgcggtagccatagcatccgccgctattgaaatatgctgctcacagagccatcgcgatgaacatgccagattgtttctgccacaaggttcgccattgagagcact

SEQ ID NO: 31655 - DNA, 62 bp, Oryza sativa
  Clone ID: uC-osflM202096a06a1
atcacgaaggtgttatgaatatcaaatggcgaactgtcaaggccaaacaggataaaggctgc

SEQ ID NO: 31656 - DNA, 95 bp, Oryza sativa
  Clone ID: uC-osflM202096a07a1
aattgttctattgtttgtgtaacactagatacccgcataggagccatcaactcctctatccatgtgccgaggcaacaacccggccacgcccaaaa

SEQ ID NO: 31657 - DNA, 315 bp, Oryza sativa
  Clone ID: uC-osflM202096a08a1
ggcctgcggtccaatcaaacgatcattcctgtgttttttctgtattttgcaattctctgttttacacttcaattcctatcaggatgaatgaactgtactttttttatggaaaggcataggaagtcccgtagtagttgcatcaattaagtcagaaaaccttggccagaaagaatttaaagaaaaaaaaatctgaatattgttctcctaattacctgtgttttggagaactaaactaacaagaaaacgtaacatggatgggggacataaattacagatcgtcgggtggtggcagagtgtaagaatactttattcccc

SEQ ID NO: 31658 - DNA, 314 bp, Oryza sativa
  Clone ID: uC-osflM202096a09a1
agatgaaatagaccacggtcatcgcacagctcattgtctcagaagtgtcgattggtacaattagggagtatgcaactctaatcactccacacactgttaagtaataacatacaagtatacaacagtggtttgctgagcacctgttcagcgatgaatattgtcccctccagggacaacaaaagtaaaaaaagaaaagaaaagaaaaagaatcatgtatttgaattctggctgttaatttagttccttgagctggttcccatgatgaatggccatcaattataactgactatgacctttctatagccgagtaactg

SEQ ID NO: 31659 - DNA, 250 bp, Oryza sativa
  Clone ID: uC-osflM202096a10a1
gggggagaagtagaccacggccctcgccccaatcagcggcttagaagcggggattggtacaagccgctagcttgcacctctagtcactccacacactgggaggcaataacatacaagtctacaacagtggattgccgagcccctgaccagcgatgaatattgtggccttcaggggcatcaaaagacacaaaggaggcggaaagactaagaatcaggcatgcgaatcttcgctgtgaaggcagtttcttga

SEQ ID NO: 31660 - DNA, 100 bp, Oryza sativa
  unsure (1)..(100): unsure at all n locations
  Clone ID: uC-osflM202096a11a1
aattgataactttgattttctaagaggagaaaggttccatgtgaacggaacttgcacatgggaaaagcaangcctaagggacggggtaacccgcgcaaaa

SEQ ID NO: 31661 - DNA, 301 bp, Oryza sativa
  Clone ID: uC-osflM202096b01a1
aaggattaatcctttttccctttttaaattttttatttttttttttttttttttttttttttttttataaaaaaaggggggggtttttaattaaaaaaaaccccccatgaaaggggccataaacaaccaacccggttttctaaattaaaggggcaacaaaaaaaggggggaccttttgttttccaaaacccccccaagtgggtgggaaaaaaaaaaaaaaaaggggggggggaaccacaaacaaccctttgaccccgttaaaaaggccccggaaaaacctaaaaaaaaaagggtcgggaaa

SEQ ID NO: 31662 - DNA, 321 bp, Oryza sativa
  Clone ID: uC-osflM202096b02a1
gagggtgaaagtgaaacatattttcattgaacaacactaacaataaaagaggaaacatcctttcgtagatattcagtaaattgaacttaatacattatatagctgctgacgtaatggagattatatgttttttttgtatgcatcattggggtgggcggttcaacatggaaatatacagaaagcaaaaacaaatcgacacaaaccaagcttatcactttcagcaaccaatatttcatcaacaaagagcccagattagcatcaccagcatgttaacagcagctgctagcggcagcatcggcttctggcggcttctgcttgaag

SEQ ID NO: 31663 - DNA, 318 bp, Oryza sativa
  Clone ID: uC-osflM202096b03a1
atggagatcattttctctctgtttaacagcagcaagaaaagaagtagtaacaacttaataataattaatttaaagcagtgcatgcatgcagatgcagattattcagaaccaaataaaacgattaattaataataactcatcatctcagctactagctcatctgaatctccatatgatagtgagatctcgtgctgctgcttctgctgctgatgatgatgatgagatgtatgatgatctgtgtatatcgatcgatcgatcttcttcagttcttggctgccactccctcggcctgcacctgcacctccttgctgttcatct

SEQ ID NO: 31664 - DNA, 135 bp, Oryza sativa
  unsure (1)..(135): unsure at all n locations
  Clone ID: uC-osflM202096b04a1
aaaaggacggccgggggaaccccccngaaaaaagaaaaggcaaggcaagcccgcccaaacaagagcagccaggcccaaccccagaaaagaagacagcaaaccacccccaacgggacagacaagagcagcaccgga

SEQ ID NO: 31665 - DNA, 295 bp, Oryza sativa
  Clone ID: uC-osflM202096b05a1
ggagagaagcaagcaagcaactttgttggatgaagattggaaacaggttacagacctggaggccccaccggcgcgatggttagtttctctgaacaaattgatctccgccatggccgccaggagggaccgaattatgttcagctgtccacgagtggaaacgggagggtgccggggatgggccggcacggtgccttgatcggggccttcaaggcaaaaaaatggatcgctccatttttggcaaaacctcacaatgaaagctgagaatcctacgtggccaaaacagacgcttaccctt

SEQ ID NO: 31666 - DNA, 288 bp, Oryza sativa
  Clone ID: uC-osflM202096b06a1
cagacggtatacaaatgcatcgcgttatatacagaaggtctcaggacgaacacctgacagactgacagaacaaatcgtaatattgactggcaaatggatatggagactaactctaccacatcttgcaacatttcaggctggccaaagatttatataagcatttgtcaagtgattatgtacagttggcttcagtaaggtctcgaattttagagtctcgccgatactatagcttcagtaccaggccaattggactgtggtcgctgaatgatacatcaggaagaatgtatg

SEQ ID NO: 31667 - DNA, 310 bp, Oryza sativa
  Clone ID: uC-osflM202096b07a1
gaggaagaaacaaaagctccaaattaaaaccatcaacagcccgatcgagtttgcattactagatacacacattgcagccttccttccctctctccatgtatcgatatatcaacccggccacgcacaaaacatttgttcattccctactcgagctgcgcgtaccacaccccttggatcttgacatccttgggcaccttggcgccgaggtctgtgtccgacggctgcacgctactcgaagacgccaatcacctcgccggtctctggcttgctcttggtgacgctcaacgtgatgttgcccgtcgacgacgag

SEQ ID NO: 31668 - DNA, 310 bp, Oryza sativa
  Clone ID: uC-osflM202096b08a1
ataactagtactcggctatcctaatattcagaactcacaaccgagagaagaaaacaaactcaagagtaaggcaaaaccagtaacacaactgtgatagaccactagttacagggagaagaattccaaagaaacacaaatggaaaatgaccaaaccaaaaggaacagatgatctacatatcctaagctccaaaatccagtctacgacaggattcagcctcatgatgtacagccaaatcatctctttaggctcactgcattttgatctcttccaagattctttaacaaagcatccatcacaggtttaacccgc

SEQ ID NO: 31669 - DNA, 319 bp, Oryza sativa
  Clone ID: uC-osflM202096b09a1
ggggttgttaagcaaaatcttttttaaaccacttaatatatgattcggacggatactgatcaacttgtaaatacaggtcttctatacacaaacgcttgctgaggttacaaacagaagtacagacttgacgatttgcgaatagacatttcaagcttagacaatacaagtcaggtgtcagatgaaaatcgacacacgattttcgtcattttcttcggtcatactgctccctcaagaatggatgcctaagcgcctattgcgctgttagacggctagctggaacataccttaacagaccttgcaaaaggtcaatgaactcgcc

SEQ ID NO: 31670 - DNA, 326 bp, Oryza sativa
  Clone ID: uC-osflM202096b10a1
ggatcgaaaagcacggcatgatgatgatcttgaaaaaagaaaaggcagggctagctgtttttaacaagagcagccaggccctcctcctgtaaataagacagtaaattacccccaatgggactgacaatagtagcactgcacttgagagtacatataagaagtgcagctcaatttgttcttcttttgctctctgccatactaattaacagcagcggattaggcagggtgatggtgattagattagctaattaatttgagacatgtagtaatatccctttgggacggcttagctaaaggtagtactccactttgctagtaagtcatga

SEQ ID NO: 31671 - DNA, 271 bp, Oryza sativa
  Clone ID: uC-osflM202096b11a1
ggggaaccaaagggtggtaataacccacttgggattttgggcatgtcacattacatacaaaaagggattgccttaatttttcctttacaggggtaaaatttttccttttaataatctacatgctaaggattaaacccccaaactttggggggccctttaagaaacaattattagtttaggtggagcccaaacaaagcggaagggggaacaaaaagggcctttaaaaattttttcattggaattggaggggcaaaaaccatggggggtgggg

SEQ ID NO: 31672 - DNA, 221 bp, Oryza sativa
  Clone ID: uC-osflM202096b12a1
atcagggaacagcacaaatcttttccttgtccctcaacagttgctaaaggatgaaagaactgcacgagactgattctcttatacttgatacaatggatatccttatttagtcttggaaccaaaattgattcctacgcagatgggcccaacccttaagggcccttctcccaccaccacacaaatggggcatcgcggtagccatagcatccgccccttttgaa

SEQ ID NO: 31673 - DNA, 316 bp, Oryza sativa
  Clone ID: uC-osflM202096c02a1
atcagatgatggtatggaaccaaattgattacagaagagttcatggggttagtatgactgcatacatcatttcaaccgggcaaacttgagttctttgcattctgcagactgcccaagacactgttgaataacttctcttcatctgaatctgaatctgaatctgaggtcatataagaatgttttgataagcttgtagccttttctgcattttctgtgatcgaattgtcaccaccattacctctgttgattctagagcagtccactataccaccaatgccgtgctgtttcttgctagaacaaatagtcttactagtgt

SEQ ID NO: 31674 - DNA, 235 bp, Oryza sativa
  Clone ID: uC-osflM202096c03a1
gtgttcaccgcgtttacataaaaaaagttatttacaagagcatttttaatcttggaaaccaagaaaaataggagcaagtcaagccaccatagggacaccaaactccgggaaaaaacaagaagggaaagaaaaaaaaagtccccctactaaaaaaaaaaaaatcaaggaaaaacgaaatcttaagagaaccccgttattaagggaaaaataaaagactaccaccggaatagcaagc

SEQ ID NO: 31675 - DNA, 324 bp, Oryza sativa
  Clone ID: uC-osflM202096c04a1
gaaatggggaacgcaataccgcatttcataccaacacatctagaaagaggtttcagtggatgcagcattgcagttgagcataacagcccaccgagacattgacaacgtactgaggatggccataggccgaacaaattttattacagaggcgactcacagtggtagtctgctggttcacactggccctagcctagatgcaaaacaagagtaccacgggcaatgtactagcagtagtagactagaaacctcttaagcatcagcgaaccccagttcggagagcttgaggtgggcctccttgtagtcttcaaagaaagccttctcatc

SEQ ID NO: 31676 - DNA, 183 bp, Oryza sativa
  Clone ID: uC-osflM202096c05a1
caggcagcgcgcatgaagagcgtagtaccctacgagatggcgccgccctttttttttttttttgtggtttttttaaagagttgggcgttctcccccaatagaattaacaggaacatgaggatacaggatggaacgactccaaaccaaagcccctaggacgtggatacatatgcacaaaagtaa

SEQ ID NO: 31677 - DNA, 180 bp, Oryza sativa
  Clone ID: uC-osflM202096c06a1
gggggggttaagaagttttttggggaactgaaaaaaaagattaagaacaacgctggatcgtccacatgaacagaaagtgaaaagaacccacaattgggtatggcaactaaaatgacaccaggccgacagattacaatctgagcagcgattatcataaacagaaggcacgggaggaaatgc

SEQ ID NO: 31678 - DNA, 189 bp, Oryza sativa
  Clone ID: uC-osflM202096c07a1
aaggaaaaccccgatgcccccaaaaaaaacattcagcgcctcggtaggggaggtaacacaagaaaaaggccacagaacctacacaaccttcatgcaggcatccttgcatggggccgaccaccaacaaaccaggcatgtattacccacaaaagaagggcgggggggaaccgtggtatcgtgccatgcagg

SEQ ID NO: 31679 - DNA, 179 bp, Oryza sativa
  Clone ID: uC-osflM202096c08a1
agcgagaggtaaaagagaacggggaaacacccaaaaaaaagaagaagggcataggtaggagagcaagcagaacaggaaggccaaagagcgaacatcagggtgaggcaaacaggcaggaaacgggacgaacaacaataagccaagcagggatgaacgaaaaaacgaaagaacagggggaa

SEQ ID NO: 31680 - DNA, 320 bp, Oryza sativa
  Clone ID: uC-osflM202096c09a1
aggggcgggcaacttttatttctgtacaaagcgctcacatttctcttggttctttttggaacaaccagaatcctctcatcgccgaaaatttggcgcatgtggttctgtacatgtgtttgtaagccgtatccaaacaatgccaacccaaccccaaacaaaaatttagtaacaaaaagagaagaaaaaggaagcagccaaagcaaacagcaagcttgtcaatcgaagctggacgatcgactacaccgctctcgcaggtactcctcgagggggctgaggttgctgtgctctgtgcttgagatggactcggcgtcctccacgtc

SEQ ID NO: 31681 - DNA, 309 bp, Oryza sativa
  Clone ID: uC-osflM202096c10a1
agaggagatcaaactgcgctcatagactgaactggaacttgattatacagtttggcacgatttctaactcaagcccctatgacgtggatacatatgcacaaaagttttgacacctgacaaactgatctagcttccctacatggatagctagctagcagctatctcatgtcatggagtgttgccaagaaggcgtccaacttgacattggcacctggagacaagaacttgatgcatatgggggccctggcacccatgagtgtcagcatggacagcaagatcgagccggcgccgtgggcgcagatgagcccc

SEQ ID NO: 31682 - DNA, 338 bp, Oryza sativa
  Clone ID: uC-osflM202096c11a1
ttttttttggggttttttttatttttttttttttttattattttttttttttttttttatttttttattttttttttttttaatttattatttaaaataaaaaataaatttatataaaaaatttaattaaaaaaaaaaacaaaagaaaaaaaaaaaaaaaaaaaagaacaaaaccaaaaaaaaaaaaaaaaaagaaaaaaagacaaataaaagagaaaaagaataaattataaaaataaaaaaaaaagaaataaaaaaaaaagcaaaaaaaaaataaaaaactaaaaaaaaaaaaaaagaataaaaaaaaaaaaaaaaaaaaataaaaatctttatat

SEQ ID NO: 31683 - DNA, 303 bp, Oryza sativa
  Clone ID: uC-osflM202096c12a1
agggaattgaatctccatagtgcataaaattatggatcttccacatgttatgcaactgacaaaatcacacaattgtgcaggccatataaaatgatacacaacaaatagcttcgtatctagtctcgcagatccttccatcggcttcttgagtcacaatgcgatattgtcagtcagagaggatttatccaataatgccgctcatctgcctgaaggcagagggcacggcaaagctaaatcaaactatacacctaaactgaaaatttcagtgacagctaaatgaaagtttttgtggcttctttccac

SEQ ID NO: 31684 - DNA, 288 bp, Oryza sativa
  Clone ID: uC-osflM202096d01a1
gagacctcccaaaaaaggaagaacaagaacatttatttatttattttccgtatgtgaaatcacgcaggcactgatctacattgcaggccattcttaaccataaaacacaacattgtgaaacaaatatttaagagaaaaagaaaagcttgagaaaagcaagctccttttcttctacctactactactactgagaacctatttggcaggactttaacttacaaatttaacttcaagagttggttctaaagtgtagctgtaaaatagtctaaatccaactttacattttta

SEQ ID NO: 31685 - DNA, 319 bp, Oryza sativa
  Clone ID: uC-osflM202096d02a1
attgaggccttttttctatctaattttatccacttagtctagctatctagtttatctaccggctcgaactcgaatttgatcgctttccatatttcacaagctgcggctagttcaggactccatttgcaagctgatcggataatttcattaccttcacgagcaagatcgcgcccttcgttacgagcttgtacacaggcttctaaagccacccgattagctgctgcaccaggtgcattaccccaaggatgtcctaaagttcctccaccaaattgcaatacagaatcatctccaaagatttcggtcagagctggcatatgcc

SEQ ID NO: 31686 - DNA, 334 bp, Oryza sativa
  Clone ID: uC-osflM202096d03a1
gccgccgccggcgcgtgcctgcgccggccgctgctcccgccgttggcccagaagcacccggcggtcgtcgcgtccgccgccgtgccacccgccatcttcgccgccgccgtcgtcgccggctccgacttgcacctcggtagcaccagtggccgcgccgacgagcacctcatgtcctcctcgtcgtagtcgtcgtcgtcgtcgacgtcttcctcttcttcttccctcacctcctcttgctcttgcacggatgccatctcttcttgcctctcctcgtgctgcgcttccgccgccgccgacgccttctgcgacttgcggggagagggcgcggcgatct

SEQ ID NO: 31687 - DNA, 317 bp, Oryza sativa
  Clone ID: uC-osflM202096d05a1
ggggggtctaaattctaatagaggtaacagaagaacattagttacatctaagctgttacacgagctagcacgagatgagctatgtcgcccgactgttgtacagacactaggcaaaaccacagcgggctattataacttataatagatctctccctctacatacaacacgagagcaggtaggcgcacacgctaaagtgctaaaaactacagcagccgacgagcagggcagggggggtttcgcttcaagattggtggtctctgaagaggcgccttcggttgggggctgggtgcttctcctcgggcgtgtccgcgaccac

SEQ ID NO: 31688 - DNA, 321 bp, Oryza sativa
  Clone ID: uC-osflM202096d06a1
aagggggggttatttggttacctgttggccatccaaagtaccttaatggggtgagtcgttgaaacattacaacttaaaacatactgaccatgcaacagcataatactggtggcagaaaaagctacctacgtgcaattgtgcaaacccttactcaacaaaattttactaatgaaagaacctaatacttaataattctaatagttaagggtctgcttacactcatggagctctaggaatggactgattagaaggcgaaccttgtcatcctgaaaatgtacctgcagcagcatccacgcaaagactcaactgcatatatctata

SEQ ID NO: 31689 - DNA, 310 bp, Oryza sativa
  Clone ID: uC-osflM202096d07a1
gaacaaaagaggaattagtgccttactccataatttctaggaatcagaaagagggattagtagagatgattgccgcaaaaaaaaaggataatatattcagttccaaatgactaaaactgatcccaaattatggttactacatagtcgaaaaacagaaggctgcggaagacggatcgatgatggccatggctgtacttgaaacagggcatataccaccatacaggcctgaaatcacacgcagaaccttaaacgagtacctcattttcaaataagtcgggcaacctaaactgactttaagctctccaattac

SEQ ID NO: 31690 - DNA, 182 bp, Oryza sativa
  Clone ID: uC-osflM202096d08a1
ggggggaggttaaggagatcactgatgaaccgaaaatcaagaggaagagcataggtaggagaggtggctgaacaggaagaccactgaaccaacacaaacgggacgcagccaagctggcgcggggactacggacaataatccaagcagatattgaccaaaaaagaaaggacggggggaaaagg

SEQ ID NO: 31691 - DNA, 177 bp, Oryza sativa
  Clone ID: uC-osflM202096d09a1
ggggaaggctaaggagatcactgatgaaccgataatcatgaggaagagcataggtaggtgagctggattaactaggagaccacagaacctacaccaaggggacgcagccattctggcgtggggactacggacaacaatccaagctgctattagccaaaacttaaagaacgggcggaa

SEQ ID NO: 31692 - DNA, 316 bp, Oryza sativa
  Clone ID: uC-osflM202096d10a1
gggggactgcaacggatacctgtgacccacccggaacctaaccctatcccttctgcggcggagcaaggacgactacaatactactgcgccaccgcctccgccaccgccgccgtcgtcgagcccgactccaagggtggagcgggtggcggagccccgaagccggaaaggaagggggcgatagacttcaagtggatccgggagaacacggacggcggagccgccaacatccgcgagccgcactacggccccaacctggacctcgtacataaggtctacgacaaggacctcgccttgcagaaggaagatgaacggctcc

SEQ ID NO: 31693 - DNA, 329 bp, Oryza sativa
  Clone ID: uC-osflM202096d11a1
tttttttggtggttttttatttttttttttttttcttttttttttatttttattattataaaaataaaaaaaaaaaaaaaaaaaaaaaaaaaaaaaaaaaaaaaaaaaaaaaaaaaaaaaaaattaaaaaaaaaaaaaaaaaaaaaaaaccaaaaaaaaaaaaagagaaaaaaagtagaaaaaaaaataaaaaaaaaaaaacaaaaaaataaaaaaaaaaaaaacacaaaaaaaaaaacaaaaataaaaaagttgaaaaaaaaaaaaaaaacaaagaaaatcaaaaaaaattaaaaaaaaaaaaaaaaaaaataaaaaaaattatgaat

SEQ ID NO: 31694 - DNA, 216 bp, Oryza sativa
  Clone ID: uC-osflM202096d12a1
aaaagggaaaaaaaccccgccctttttttttaggaagggggggcccaaaattttccgggggtaaaaaaaaaatggtcttcttcaaaaaaaaactaaaggtcccccccctcctttaagggcccggacctttttaaaagccgctaaagtttaatttttggggagtaacaaaagggggcaaaacccctccccaaaaaaacccagggggggcgccttttt

SEQ ID NO: 31695 - DNA, 317 bp, Oryza sativa
  Clone ID: uC-osflM202096e01a1
caagagaataatttcacaaggtttttacgttaaccactcttaacaattccgactagcaatactaaattagttatgtatggtcaagcaataaaataatgataatatattttggatggatgaaactagattaattatactaattatgtaacatacatccaaaatctataatattgggttcatcatctgatttaaaaacggaggaggcagcaatataaaacctaaagagtccagcttgaaaaaaaaacaagaacggtaacgaaaaaaataccgaatcccttaccctaccaagtaaagcaaggaagccctgacaaaatgaa

SEQ ID NO: 31696 - DNA, 112 bp, Oryza sativa
  Clone ID: uC-osflM202096e04a1
cccccattattaattgtttaaatatatatatgatttaatacagaaacaggagaactaaggtacaaagaagaaacagactaggaccgatcctaataaaaagatgcacaaaaac

SEQ ID NO: 31697 - DNA, 295 bp, Oryza sativa
  Clone ID: uC-osflM202096e05a1
aggatcaagacgcaagtattatagcatcacaaaatagtagtatttcgcaaggataatagcagcatcacaaaatagtagtttctggacgcgagttttcaggactatcaggactatcaacgaaagagacaagagacagtgaaagaacttttaggggacctaatatcacaacatcacaacgggaccggggttattacaactcttagtgaaccttcattacagcattacaagagaccgaagtatgagtataagccgggagcacagcgaacaaacttttagtgaacctaggatcacaaca

SEQ ID NO: 31698 - DNA, 249 bp, Oryza sativa
  Clone ID: uC-osflM202096e06a1
gcaggccgacgttggaaggtagtctccagagaatccgccccccttttctttttttaatgtgtagtttttaagagggggggcggacccccccccactaaaaatacgccgcggcacgctctagaaagagcgggaaccactctttacataaactatggagcctaaacccgcaccacgtcaactggcaatccacaactgggcaaaccgaaaacaccttgttttacgcaatcaaattatacccctaagaggcgg

SEQ ID NO: 31699 - DNA, 110 bp, Oryza sativa
  Clone ID: uC-osflM202096e07a1
ggggggaggttaagaagaacggcgataaaccgaaaaacaagaagaagaacataggtagaagagcaggaagaagaaagagaccaaagaaccaacacaaacggcaacgcagg

SEQ ID NO: 31700 - DNA, 183 bp, Oryza sativa
  Clone ID: uC-osflM202096e08a1
ggggcgaggtaagggagatcggggatgaacccaaaaacatgatgaagcgcataggtagaagagctggaagaagcaggagaccaatggaccaacacaaacggcatcgcagacactctggagcggggactacggacaacaacccaggcagctattgcccaaaacagaaagagacggggggaaacg

SEQ ID NO: 31701 - DNA, 192 bp, Oryza sativa
  Clone ID: uC-osflM202096e09a1
ggggggaggttaaggagaacggcgacgcacccaaaaacaggaggaaccgcataggtagttgagctggctcaacagggagaataatggaccaacacaaagggaatcgcaggccatcttgctcaatgactaccgacaacatgctaagcagctattaacgcaaaaaagaaagcacggggggaaacgggttatcgt

SEQ ID NO: 31702 - DNA, 300 bp, Oryza sativa
  Clone ID: uC-osflM202096e10a1
aaggaactcatgcctcaggtctggggcttccctgtaattcccgttaagaaaaaaaaaaggtatttacatgcccaaactcctgtaaagaaaaatgaattctataaaatcgttgggaaaacataatcagatgttttctcgcggtatgcacggatgatgggtataaacatttaaacatttttacgagttacaacttacaatcacctaactagtatccaagggatggggcaaatcacctaattagccactacatgaggatagctcattgataccctttctgtcgcataggattgcagaatccaa

SEQ ID NO: 31703 - DNA, 244 bp, Oryza sativa
  Clone ID: uC-osflM202096e11a1
ggggaaaccaaaaaaatcatttttggaaaaacaacaacttttttttaaattttttaggggacacaaaaccaacttggacattattttggggcactaaacccatttttcccaacccaaaaacaacgaacttggtgggcccaaatccctccaaccccaattaacccctggtaaagttaccggcccccaatttaatttgcggggacaaaattgggggggtacccccaagggtttttttttaccgggt

SEQ ID NO: 31704 - DNA, 304 bp, Oryza sativa
  Clone ID: uC-osflM202096e12a1
aggacggaattttttggctttccactaaaatatgcagagtcagctctagaaagagcaatatgacttttacataactatgtagctaaactgtacagtcaatgtcaatcacactgcaaaatgtagaattttttttacgcatcaattatactcttggggggaaaaaaggctgcactggtggttcaacaaaggggcattggagaaacctgaagaccatcctatatcttcccggggttcttcagtctaaaggattcgtcaagcctggtgcagggacaaggaaactgcataatctaatattcattggcct

SEQ ID NO: 31705 - DNA, 347 bp, Oryza sativa
  unsure (1)..(347): unsure at all n locations
  Clone ID: uC-osflM202096f01a1
atgcacgacgtcacgtcaagacttgtgagtcctcctagagttggtctcgncctcactccggggnntccatgaattgaaggctcaaatcgtaccccaaccaatgnagaagtcccttggggcccgcnnncgatgaccaatcaannccgatcannccacatgnnnctcggaaaggcnnaaggccccaccnnncattcattgnnacacanngaccgnnttcannggcaacntntaccccaagagtnnngatccatnttnnnattgtttttgctttttgtcaataccttncnnttcacattcnnctttttcaacttataatnnncagccagccatttaaagcttcaaattgt

SEQ ID NO: 31706 - DNA, 398 bp, Oryza sativa
  unsure (1)..(398): unsure at all n locations
  Clone ID: uC-osflM202096f03a1
atgctcnngccgcacaaacccngtgggcgcgagcgcgcggggcggagcgggggccgtcggtggcnnagactcttgggtgggtaggtagncnnaaatattcnaaaatgagaaaccnntttgaagggcnccgaagaggngagaaaggggttcccatggtggaacccggcaccnttgcacanntgggtaagcncnngatccctaaggggggacggnnggtaaccnncccggcagnnagaggcgcgnnnaccacgcnngcgtgncnncccgaaagggggaatccggggtttaaagaattttcccccgaggcccggggnacgnnntggccggttggaccggccggacgtttaggggaaagtccccnggaggaaccggcccgggcgggggggcccctccgggga

SEQ ID NO: 31707 - DNA, 279 bp, Oryza sativa
  Clone ID: uC-osflM202096f04a1
cgcctgaactctttttttaagataatttctgggggcgggcagcttatcagctttacaatttgcaccgcgctgggccgttggcgccgcatcgaacatgcaatcgcccattttacattcctacctaggttttcgtcagaatgccaagggcgagcccagaattccttacagggtaatcggcgatgacaaaatccgccggggatacctaacctggaccattttgggctccgggaaccgacgggcgcgtgggctgaacagagaccccgccggggccggggggac

SEQ ID NO: 31708 - DNA, 184 bp, Oryza sativa
  Clone ID: uC-osflM202096f05a1
gccccctttttttttttttaagggggggtatgaatagcatagcggagacccacaacaatacaatcaagtttcccgctcccagatagcccagaaaggagcacacactaacagctacgaacacaaccaaacacagctgcatacggaaaaaacaacaccttgccagccgggcaaaaccacgaaccca

SEQ ID NO: 31709 - DNA, 101 bp, Oryza sativa
  Clone ID: uC-osflM202096f06a1
aggggggggctagggagaaattccgtgaaccccaaatcatgatgaagagcataggtagtagagctggtccaaacaggagaccactgaaccagcaccaacgg

SEQ ID NO: 31710 - DNA, 102 bp, Oryza sativa
  Clone ID: uC-osflM202096f07a1
ggggaaggtaaggaacatcactcatgaaccgaaaaacaagatgaaccacataggtgcaagagctggccggacaggaagaccacagaaccaacacaaacggaa

SEQ ID NO: 31711 - DNA, 177 bp, Oryza sativa
  Clone ID: uC-osflM202096f08a1
aggggcgaggtaagcgacatccggaacaaacctaaaaggaagaagcacagcttcgatagaaaacctggaaggaccaagagaccaaagaaccaacacaaacggcacgctgccacgcgagccctgggcctacggacaacaatccaagcagctatgagccaaaaaataaaaaacgggcgg

SEQ ID NO: 31712 - DNA, 313 bp, Oryza sativa
  Clone ID: uC-osflM202096f10a1
gggttgaataaaacccactgctgaattccataccgctatcatctatattcttgttttctgatctccaacataggatcatccaggggaaatttagtacacaataatcgccagctaattatcataaaaactacccctttccagctgagtgaatcttgttcttgtaccatcacgtacatgtcttgctgacttgtagaaccctatagctccaatagccaaccttcatttttccatttccgatgtcttcccgacgtcctactcaagagccggtgccacctcggttgggttacctttaaacacattagagcctgatgat

SEQ ID NO: 31713 - DNA, 284 bp, Oryza sativa
  Clone ID: uC-osflM202096f11a1
ccccatcatcaaaggaccaagcattagaactagcgactattttaataggataaagcagtccaatatatgtttgatacaggacaagcattcatcaataataatacgcagttacacatacgtacatagacatacaccgggcttaactgtttatttaagcaggggccaagcgaaggcaccccttcacatgagcacatatatacttactcgggacaggaaaaaatgcagaagcccccaagttgccacctggggccacttggcccaaattacgggctgttacttagctt

SEQ ID NO: 31714 - DNA, 305 bp, Oryza sativa
  Clone ID: uC-osflM202096f12a1
gcaataaacaagccaatatccttgtattaattatcgagagtacttccaatgtccaaacaggtaaaatctaacttataaggtaaaacaaaatgggccagctataacaactagatgcccacttacaagtaatcctcgtgaaatccaaccaccatcacccaagaactgatcctcacaaaggaatgtcgaagaactatcaaaaagtaatcgcccagacaacagaccacttttaagcgacaagcttcagtataattggcaggagggaacacaagaagcaagatagcactactgtgcagacaaacccttat

SEQ ID NO: 31715 - DNA, 263 bp, Oryza sativa
  Clone ID: uC-osflM202096g02a1
ggaaagcggaggttggttttataaaaaaccctgccccgcatgaggggacggggcaggatttcatgatgggatcaccatttataaccaagacccatccaggcccgtttgggagccctaaaagattgactgacccccgcccacactgtgcaacaacactacggttttaattagagcgaagaacaaagggaaaggggggcctacataaaaccggggcccgaatgcaagcaaaaaaaggcctttatcaaagttttgatcgacaggat

SEQ ID NO: 31716 - DNA, 346 bp, Oryza sativa
  Clone ID: uC-osflM202096g03a1
ggccgtgctcctgccctcgctcgccttcctcccgcgggccgcgcagcggcgcctccgcccgtggcagctcctgctctgcctcgggtcgcccgaccgcgccgcggacgccgccctcgccgcggagctgggcctccgcctggtccacgtcgacgccaaccgagccgaggaggtggccgacaccgtcatggcgctcttcctcgggctgctccgccggacccacctgctctcgcgccacgcctcgtcggccccggccgctgtcgccgctgggtggctaggctccgtccagccgatgtgtcgcggcatgaggcgctgccgcggcctcgtgctcggcatcattggtcgatcc

SEQ ID NO: 31717 - DNA, 316 bp, Oryza sativa
  Clone ID: uC-osflM202096g04a1
acgatggaatagcatgtcattaataaataatcagtgttaagttgtcacacctgaaaatatcttctgctcacacatatgtagtggcaaacaagtaatctgatgctggtactatttcctgttacagtaatctgacatcggcaacattttccatttacagccttctatggatgtcttcaaaggcatgcttcatgacctagagattggccgtgccaactctgatggtgctgaccaagggtttcttgtcggctgctacccagacttgcttgatagaccaatgttccaccctcctgagaatggcagcaagctcaacgggaca

SEQ ID NO: 31718 - DNA, 127 bp, Oryza sativa
  Clone ID: uC-osflM202096g05a1
atggggtccccctttgtgtattttttttaccaaatgcaggacaaaaaatggaaaaataccagacccacacacaggcggggactttttgcaaagaaaaccgagtcgttgctgggtaaacacaaagaac

SEQ ID NO: 31719 - DNA, 273 bp, Oryza sativa
  Clone ID: uC-osflM202096g06a1
tttttttttggggggtttatgtaatttttggggttcaccttttttatttttaataaaataaataaagggcaaaaaaataattgaagaatacaaaagcagaaggggaaccgaaaaacctgaagagaaagcaagaacggaacaaagtaacatcccaaggcaaggcaacaaggagaagcagacaggggcaaactacatggggggaaaaaaaaaaagaaaagggaggggaaaaaagaaaagacggggaaaaaaaaacgggaaacaccaataagggag

SEQ ID NO: 31720 - DNA, 306 bp, Oryza sativa
  Clone ID: uC-osflM202096g07a1
gaccaccaacagagaggcaggtagcaagtcgtcaaggtattattgatggacaacaacacaaccacggtaggtagggcccagtttcatctatcatcatcgcttatgagtttatgaccaagagggagtttgatccctttgctcgagctaactgactgactgactccaagctagtacatgcgacgacgctacgacgaccatgcaaacgatgcaaaaagaaaacactggtaaatatgtacacagtacactggtcactggctgcaagcagccttgcacaggaagagaagagagaagatctagaggagtgat

SEQ ID NO: 31721 - DNA, 324 bp, Oryza sativa
  Clone ID: uC-osflM202096g08a1
gttggtattaatttgttcgtttagtataaaccgccaataatgcaataaaccatttaattaggtacaggtgatcaatcactcgacaattaacaaaagtacatgacgcagcatcatccaaaattatagaactttgcatcttccaatcttttcttcggcagctactaccttcttcttcattcccggccgatcatccgtcggccggcaaagcgtgtcgcggcggccggccggtgatcgatcgacggcgacaagtttgccgtcgttgttggttacaagcgagacggcatgacgccgagcttgtcggccttggtgatgacgtggttgcgg

SEQ ID NO: 31722 - DNA, 209 bp, Oryza sativa
  Clone ID: uC-osflM202096g09a1
ggtgttcatgaattagggtaaatggaacgacctatagaagcacaagggccggcggagacaatcaaccaattagcacaatgcaggagagcaaggaaaccacgaatagacgtccaagaaagaagatatgaatgaccataaagaacacaggtagatgggatgatcgacatattataatgaataagtatgtcaggctgcataaacaaagaaaa

SEQ ID NO: 31723 - DNA, 298 bp, Oryza sativa
  Clone ID: uC-osflM202096g10a1
atgaggcctacagttgtggattcttttcaccaaatgcagtacacattattccctaataccattctatcacacatctgtgctttcttgtacatcataccgcggcgcttttttctttttacattgaacaacaggaggccactaattacaggttctccttggtaataaaactcgctgagactgtaggtcaggtcattcctgggaatgggaatccatggggcatggtccgttatccacgggggctagtggatcaaacatgggcgagtttggatccatgcgccctgacgcaatgcccagcttg

SEQ ID NO: 31724 - DNA, 206 bp, Oryza sativa
  Clone ID: uC-osflM202096g11a1
gggagaaacaaccctccaaaaatgggggggaaacgggggcattttccagaaccatgccaaccagggggattacaaaacccaacacattaaatggtttaagggaaaaaaaaagaatttgactggtgttcggaaaagggggaaaaaaaggtaagatcccaaaaaacaaggggggcttgccccccaccaaagcccccgccatttccccc

SEQ ID NO: 31725 - DNA, 308 bp, Oryza sativa
  Clone ID: uC-osflM202096g12a1
ggctaggagggccgaagcacaggcctcattttccatttggaataagttaacttttggtctcttaaattttcgacgaatccgaattccgtcgttgaaccggaaaaccagatacggctgtcaaaaccggtacaatatagatcccatggtaagacaacagttttagctgacgtggcacctacatggctgatttaactcggtctttatcccacgtggaattgacgtgacgcttacgtggcaattttatctagaaaaaaataaaaaccatgggcccacacatcagttacagtaaaataataaaaattaaaaat

SEQ ID NO: 31726 - DNA, 268 bp, Oryza sativa
  Clone ID: uC-osflM202096h01a1
ggatcaaagaatacaatgggggacacagattccataaccatgtgtgtgacaggggtgtttcataacaaatatataattgtttgaaaaaattaacagttttgggatttttttattttccactgatacaaaaaattgttgcagcttgttgatttataaccaattaaccatgcaggttacacatccttgatctacatccggcgtatgatatgaacctgggcagaggtcagtccacttttaacaaagaaggggaccacatttttgaccaggg

SEQ ID NO: 31727 - DNA, 355 bp, Oryza sativa
  Clone ID: uC-osflM202096h02a1
gctcttttcactcactttgtattcggggggcgcagtgacggtgtctaccgagtgtaataattacgacgacaacatacgcacacatattgacataattaagcctgctacgttacaaagcattatgcataaacacgcgtaccgtgccgtgcatgcatacagatacatacaggcactccacttattttacaaccattcacactctcacactgaaagtcccaaataaaactgacaacagacgcatgcatcgatcatatcatatgcatgatcgtccatagtcgtagattggaaattgaacaacgaaatcaagaacaattaatcaagcaggtgatcgatctctcgtatcaaatgaacatcg

SEQ ID NO: 31728 - DNA, 385 bp, Oryza sativa
  Clone ID: uC-osflM202096h03a1
ccgcgccgtaagctcgttcctctagagatggcgcgcccttgcggtgaggcaccggggggggatgctgctacgctccggcgcgtggctggtgcgcgtggccgacctgccccccgccatcgcgctcgaccgcgacgaggaggaggggatcctaggcgccgccctgcgggagggccgggctgcctacgcctccgcggacctccgcaacaaggcccagggggccgcagcttttgagggggctgatgttgccctacacatgggtgtaccagattcgtctatcaacaactttcaccttcattattcagttaaatgttgagggaacaaagaatgtcattgacgcttgcattcggtgcaaggtgaagagacttatctacaccagttcaccaag

SEQ ID NO: 31729 - DNA, 317 bp, Oryza sativa
  Clone ID: uC-osflM202096h04a1
agccaaaatgcaggaacagcatcactctattccatgcatccattgattaactgaaaacccaatagcaatacagcatggactacgttacacactgtagcttgcagttcaacggattgaaatccagcgtacagtagtagccccccaggcaattgcaacagctacgtcaaaagcatgagtagttgcttcaaagaatggaagcaaagataggtacaaccagatccgtatcatagtgtgtcttcttgacattcttcctataacagcaagacagggaacaaacaatgtcaaataataaacgatggaggccgagaaggcgaacg

SEQ ID NO: 31730 - DNA, 248 bp, Oryza sativa
  Clone ID: uC-osflM202096h05a1
ggggaaaacaataccacaaaaaacaaacccccccattttggggaaaccaaaacacaaaaaaaaggggaaaaaaccacccacggtttaagcccacgggaaaaaaaaaaaaccggggggtaaaaaaggaaccttaaacaagtttaggggaaacccaaggtccccaagaaaagttgaaaaaaaaatttcgcataggaaccccgttaaaaaaattttgaaaccaagaaccctaggccccaaaaaacaaaccc

SEQ ID NO: 31731 - DNA, 314 bp, Oryza sativa
  Clone ID: uC-osflM202096h06a1
ggcggtaataaagggacgaggtccaacgtctgcacatcctgcttacaaacaacggccatgcggtgcctggcctgctttctgaatcataaccagtccctggaaaacgctaatccagcgatactcatattgcgctgcgcacacaggaagcggatgtaagctgctcattcactaggaaataaggcacgggagcaatgtaaagcacatatactgtgtccactgggcactcaagatagccacattttgacatacgcagacttattcttgtgagtccacatggcaaccgagcctccgacaggttacgatccatccataca

SEQ ID NO: 31732 - DNA, 355 bp, Oryza sativa
  Clone ID: uC-osflM202096h07a1
gccttccaccactcgtcttcggcggaggtcgtgacggggtcgacggcgtggatcgggaaggggctgtcttgcgtgtgcgcccagaggagggacagcgacgcgcgcctctccttcgatttgacgccagttcaggaagagtgcctacagaggttacagaaccggctagaagttcagtatgatagttcaaacagtgatcatcaggaagcattgaaggacctctggcgtgcttcttttcctggagctgagcttcggggactaatatcagaacaatggaaagagatgggctggcaagggaaagatccatctacagattttagaggtggaggcttcatctccttggagaacttagtgtact

SEQ ID NO: 31733 - DNA, 287 bp, Oryza sativa
  Clone ID: uC-osflM202096h08a1
gggggtgctgctccagtaaaaaaaaaactttttttagtctcttctaatataaaataaaatggcagagctcctacctgcttctttgaaaaaaatatactgaactatttgagagagcatggaaaacaagttaaccaagtatattcaatagaaattctttcggtagtgatcttacacgcatggcatgtaacggtgccctaagagcaaggctaatagtatagcccattgccggctacactccattttatagccaacgctgcagccaactgctcataacagtaggtttgtct

SEQ ID NO: 31734 - DNA, 270 bp, Oryza sativa
  Clone ID: uC-osflM202096h09a1
aaaaaaaaaacacaattttttttaaaaaaaaatggggaaggggatgtaatccttttttttttttttccacggaaaaaaacaaaaagaaaataaacccaaaaaaaaaaaaaaaaggggagtaaaattttttggcaagggcccatggaaaacagaatgggataggccaaaaaaaaaatttggggggtcaaaaaacaaatagggtgggggccgggaccccaatctaaatgggggggggagccaggggaaaaactaattaaattttgggggggg

SEQ ID NO: 31735 - DNA, 306 bp, Oryza sativa
  Clone ID: uC-osflM202096h10a1
agcataaaagcaggtgacttctttcccaactcatgcatttgacgagatgtactgtttatggttctgccacaagcaataaactaagaacatggtattctccccaataaacaacaaaaagagaaaaactacaccgaccacaaaagcctaccatacaacaatggcagttttaacttgagagctttgtcttccccttggatcgctaagtcagaatctgagctttctttctctgcctacaaacttcttctatcaacagcgctgaaaggtgggtggatgggtgtccgtccaaccgactgcttgctgcttgta

SEQ ID NO: 31736 - DNA, 218 bp, Oryza sativa
  Clone ID: uC-osflM202096h11a1
gggaaaaaacccaaaaaaagggggcagggaaaaaagaaaaaacaggggggggcaaactatacagggcccacaggccccagggggccagaaaaaaaacccttttatcaaaccccccaaaaagggaaggggcaaaggggaaaaccccccccgggaaggggaaaaaacacctttttttaaaaaaccccccgggggaccttcacttcggggtcccttttttt

SEQ ID NO: 31737 - DNA, 240 bp, Oryza sativa
  Clone ID: uC-osflM202096h12a1
ggggtgttaaacaatttaggggaaaaaaaaacaaaaaagggcaacagaaaccacacaaaaggaaaaaaaagcttaacaggcaaaaacgggcaggtggaaaaacatgaaacgggacataaaaacaccaaaagaccaggtaaaaggtgaaaacgaaccctcgttggggaaaaaacgagccagaatgggggggaaacaccaatgaacaaacctttccaaaaacagggccagtcccaaaaggac

SEQ ID NO: 31738 - DNA, 515 bp, Oryza sativa
  Clone ID: uC-osflM202097a02a1
gtacagcctgtggttttattgcatgatggggcgggtaaaaaaaaattactaattgtacatcacttgacaggcctctctcactgaaagctgaaaccccctaaaccccgaagaaattaacagttgaaacgaatgggtaaataataaactcagacgaggccgacgagcttctcgctgaggtcccagagcttcctggccttctccgggtcgctggcctcctgcgagagctggttctcgaacgacgccgagtccttgttccagctccagtacacgccggacttggtcaggctcgggtcgcccaccacctgcgccagccgcttcccggactccgcctccgacacgaaccccttcgtcacgaaccgctggaacggcgggaacagcagccggaacagcgggatgtgctcgcggaacaagcccgtcgtcgcgatgcaccccgggtacagcgacgcgaacgtgatcccggtctcctcgtggaatctccggtggaactcctgcatcgtcagcatgttacagatctt

SEQ ID NO: 31739 - DNA, 394 bp, Oryza sativa
  Clone ID: uC-osflM202097a04a1
accaatagtggagtttgaaccaacaggtttaagaaaaaaaaaagttaagtaaacctacaacaacaggtgccttacagaacacacacataattaccacccccccccccccctaaaacaaaaatacaaccttttttagggtaacctaccacatgattgatttgggtagggcgatcgaacgacctaggctttgatgggcttgcagacgacgggggcgtgcttgaggatctggttgcttaactggccgggcttttcgggggggtccaccttggccatcccgggcgggggaaggaggttaaagcttttgacgaggcggccgagcgtgatcccaattatgggcagtgcgaggatgaacccggggcagctggggcggccgacccccaagggcacgaaacgg

SEQ ID NO: 31740 - DNA, 506 bp, Oryza sativa
  Clone ID: uC-osflM202097a05a1
aacaaaaaaatcatctttgcataaggagtgtactacatccagcagcatgaacatatagtgtttaaggtatcggacatggaagatacttaaatactaagccaaacggttcatatttcaaaattcagctaacacctcaaacggtttcactaatcatgcagatcacacttcatgccagatgttcacttcttatacttctttggtgccgccgcagtttgagcaggcactgctggagcagctggctctcttgggccctgagccaacctctcgtcacgcctggcaatcttcctctcacgactggccttgctcttggcacgcttagcctcaaactggtcagagaggtgtcttctctcttgccttctcagccttagacttgtggatactttccatgagaacacgcttgttcttgaacatgttacccttgaccttcatgtacatgtcatgatacatgtgcttgtcaatcttcttggcctcacgatacttgcgcagcaaacgcctgagcacacgca

SEQ ID NO: 31741 - DNA, 316 bp, Oryza sativa
  Clone ID: uC-osflM202097a06a1
gacggacaaacacaccagaatcaaaatgtgaacttgtcttattaaaatcccgaaagtctataaccactagggcagtctcaatctacaaccccccccccggaatatatttttcacaactactgtaaatcatcacccttaatcctccagcaagatctaggggatgaggtctggatctattttacaacattcatgaacttgaaactttcatttaacaggctaattttcatttatgaatttgtgatggccataacgagcaagcaaattttcatttaacaagcagcggcaattagaatctcgccttctagaaacacattcg

SEQ ID NO: 31742 - DNA, 565 bp, Oryza sativa
  unsure (1)..(565): unsure at all n locations
  Clone ID: uC-osflM202097a07a1
gataaaatgatatagataagaatcaaaacgttagtgacttgctttgatgaaacaggaagacaaaaacacaataagaaggatgatcacaagaagcacagccataggctagctaataaagatccccaaagatgaccacaggtagcagcagaggtgagcatcagttacactaagaaaatggctaaagataaaaacgagtacaaacacatacaagtgtggataggacattaggaattgctacgagcgtacaagcaaccacccagctccatacacacctgggggctgggcaaagctttcatcctctttctggccttgggatcaatcccctccagcatccatgacatcgacggtgaactcgtactcctgatcgcagcccagataagaatcggacatcaggtagatcatgtactcctttctcccagcttctgaagcagcggtgaactcaagcttcactcgagccctctctgaagtgcaaccctcttgattgcaagcaactgattggtagagctatcaccaattaccagccaccagccttctttcttgggcttngggtacctggggcatgaac

SEQ ID NO: 31743 - DNA, 515 bp, Oryza sativa
  Clone ID: uC-osflM202097a08a1
gtccgcaggtgacttatcagcacgaacacgccgaacgcgaacacgtgggtgaccggcgtcgccttgcccgtgcgcaccatcttcggggcagaggtaacccatggtgcacgacgactgtgcgttgatctgcgggtcaacgcacgggtcgtcagtctactaaggccgaagtacgcccagcctgccgttcatctagccgtccaggagcacgttgctcgccttgatggcccggtggatgacgacctgctaccatgtctcgcggaggtagagcaagccggacgcgacgcccttgatgatctgaaacctctgccaccaatcaagaacaggcttgggcttgacgtacaagtactagccgaggctgtcgttggacatgaagtcatgcaccagcaggagctcgcccttgcgccggcagtagccgagcaggtggacgaggatgcggctgcggaggtggacgatgctgacgaccttcgcgatgaactccttcatctctcgcttcgagccgagcgacaccctgttca

SEQ ID NO: 31744 - DNA, 463 bp, Oryza sativa
  unsure (1)..(463): unsure at all n locations
  Clone ID: uC-osflM202097a09a1
ttttagtanaatcacattttttttttttttattttgggtggttttttagatttttttgagcggtttaccaccattttagactatattgtttatgataaactactactgcaaatttggagcgagctatctacacagatcactgtacgacaaaaggcaagcagcaaaaaaaataagctgacccctcaaaacgcgacaacgataaatggaggaacgaaagcaaaaaatacaaaagagaccacgctgaccaaaacgaaatactagccgattacacgtaagagaagacctaaaacgaaatgaacataacaagcgggcgcctgaaaggcttcacactcaatgggctgaacttgctcgctaaacaaagtccagcccgggcgatgcagacagggaagccaggcgggcaccagctcccatgacccatgaaccaggtcgcaccatcaactgagcaacagccccaaaccaaaaa

SEQ ID NO: 31745 - DNA, 431 bp, Oryza sativa
  unsure (1)..(431): unsure at all n locations
  Clone ID: uC-osflM202097a10a1
tttnntttgtttttctttttttttttttttttttttggggtttttttattttttttttgggggttttttttttttttttttggaaactggattaaacactttacttgaaccccctactttgcctggggaaccatttttatacagtttttttgggaaatcctaatccccttttaaattttttaaaaaggaaattttgcaaaaaaaaaatggtaattaagccatttccaaggtcttcctttggtctccaatggccccggggggggggctcctcgttggggggcgccccccttttccggcgccgggggcgggccccccgcacgggggggctggcccagccccatgagttgagcaccttgttggaggggatcccccccataaggccccaggcgaagggaatggggagccgcattagcccccggggggggaaaccc

SEQ ID NO: 31746 - DNA, 493 bp, Oryza sativa
  unsure (1)..(493): unsure at all n locations
  Clone ID: uC-osflM202097a11a1
gttgataatcctgggagataacacaatgcacagttgtactcaagtcaactgacagtgaaagcatgttaatataaaaagtggatctcctatgatccttatcttcacttcagttcacagctaatccccctagttaacaagtctatgcgaaaccactcttatgcatcaacaaggtatctacagtccaaataatgcatggctcctcgccgccacatcaccctcagttgaagcagttaacccagaagacggcgaggatttcatagagtggatcggctgttgttggtgacccgcattggaagcatgcttaatcatcacactctctgctgattnggggtcactggagagaccagatggaccaaccggcggctttggtctttttggcccggcgcttgggcggtggcgcttgcagcatttcatgggaagaattgctgccgctcatcaagctctttctgtgcaaagagcagaaatccatgccccattttgcactcgtggcaca

SEQ ID NO: 31747 - DNA, 396 bp, Oryza sativa
  Clone ID: uC-osflM202097a12a1
atgttataaattcggaatcaagtattttacattcatgtacaacaacgctagctacaaagtgaaaacatggatcgggagaataatgtctctctctaaccactagggcaatctcaatctacatcccggcctaatgaagctattagttacaactactgtaaatcatcaacctttatccctccagcaagatctaggggatgaggtctggtctattttacaacattcatgaacttgtaattttcatttaacaggctaattttcattcatgaatttgtgatggccataaggagcaagcaaattttcatttaacaagcagcggcaattagaatctcgccttctagaaacacattcgaacaacctcccatctttccgactgaaaatgttcagttctcctccatg

SEQ ID NO: 31748 - DNA, 570 bp, Oryza sativa
  Clone ID: uC-osflM202097b01a1
ctatctctctcttttctccttgttttctatgggggttcattccgatagatagcaacaagcagttcaaacaccataaccaaagcgaactcaattcatggtaacatcacggacgaagaacacctaacactggatggatggatagagggcttctcgactcgagagagccactggacacgataacgactcgactcgatgataagatgattctgacacggatagctaaggataactggccacgatgggccccaccaatcagttcctccagttcccgccggagtcgccgccgtagccgccgccacggctgccaccgtagccgccgccgtcgacgacacggccgtcgacgtagccgtcaccgccgccgccgtagcccccgcctccgccgccggagcggcgggactgggcctcattgacggtgatgttgcggccgtcgagctccttgccgttcatgccctcgatggcgtcgcgcatcgactgctcggaggagaaggtgacgaagccaaacccacgtgaactccccgtttcctgtcgttgatgatcttggagtcgaggatctcgccgtaggtggagaag

SEQ ID NO: 31749 - DNA, 579 bp, Oryza sativa
  Clone ID: uC-osflM202097b02a1
atcgatcatctttattcatgtagaacggagatgaacacaaaaacaataaaacataaacttcttaagggtcaaccctctagaaaatgaagaggtccaacacaagcaaattcagttggaactgcagcacggacgacatggtagaatcagtttgggagtttaaacaggccccatccacatggtatggaaaccaccattgttgcgatagtggattcccctatacatacactctgggacacaagacaaaattattaactcttccaagaaagggaaacaaagagttcctccactcttcagtagccccagttgtcgttacggatttcatcatcgaacttctgcttgacctcaggatgctttgcaaagtattcatctgctgtcattgtgctgatatttttcttcatctcctgcaattcagcaagctccttctctatcctctctgactccttcagagactccttttctgcttctttcagctcaacaagcagcgcatcaaactttggcttgtactgaggagtcacggtgtcaacgtactttgggatttcaatgctttcataagcttccttgtacatatctacaacttta

SEQ ID NO: 31750 - DNA, 264 bp, Oryza sativa
  unsure (1)..(264): unsure at all n locations
  Clone ID: uC-osflM202097b03a1
aaacccctttaataaaaacccccccccncaacacacgacaaaacggggggaaaacaaaaaaacaaacgggcgtaaacccccaaacgcacaaccctctaaaaaaacaaaaggcccaacacaaacaaaaacacaccgaacacaaccacagacaacatgaaaaaaaaaaccaccaaattcaaacaccccccaaccaaacggacacaaaaccaccacagcccccacagcccacccccctaaccaaacacactgccacacaagacaaaa

SEQ ID NO: 31751 - DNA, 459 bp, Oryza sativa
  Clone ID: uC-osflM202097b04a1
caagaactctccttgaaaattttgtagggggatccgtaacgattcagatgcggatgaaacactgctgattcccactcagattacacacaatacaaatacaccgacaaactgcctcaaaaaccaccaaattgattcaaaagtaaaacgggtatgagggatcttcccaccgagactgactaaacctaaccacagacaattggatccactggacccagattattcaaaaacagatggctatgacggcatcgtcctcgcaaccgaagggaacttgcagctatggatatcctcacttcgcgctggcgagctgggtgcgggatgagcttggcggccgaaaccatgttggtaagggcgggcttgacttcgttgtacttgcgggtcttgagaccgcagtcagggttcacccagagaatgttagtgtcgagcaccgcgagcatcttgttgacgcggtccgcaatctcc

SEQ ID NO: 31752 - DNA, 512 bp, Oryza sativa
  Clone ID: uC-osflM202097b05a1
actatcaggggtcaatatattagctgagaattgaatgtattacattacatgttacatgaaggaaagtccaaagccatttcctattgaacaacacgcagtgcaactgactgtattccaattgtaagatacaaacagaggaatctccacccttacccatttcccacggtattcatacgatccagaagacatacaaaagttgaactatatggcaccttgccttgttctatgtaatcaatatgacgggacggggtatgacttcctatgagaaacctatctgcttcaaaaacaatgcacacacagggaaagagtcatcatgcatgcttattgattgtcaccagggagagaaatgtcaatttatatggaataaataacaacaacattgtgtgcagaccgttccatttgtcaagccttggacgtgttctgatttggcttgaaaacataccttaccagagaatccttgattgacaaaagttctggaaattccgccttcagcttggtacaatcaagctcat

SEQ ID NO: 31753 - DNA, 504 bp, Oryza sativa
  Clone ID: uC-osflM202097b07a1
actagtacatggtgttgccttgtgggtagatcatggtgcaactgatgaaacaatacatttgtggttcagtacatttctcaccaaacactggccttgtgatatgtagtacagatgagaaccacatgtaatataatgtaatgtaatgactgctctttctacattgccaggactgcagattaggagaatttggtcctcggatacattctgaaatatacttgtactgaagatgaacattcccagcggtatcatccgcgttgtatatggcttgaaaggggcattatgacattatgagaagatacacttccatgagctgtatatatagctgattatttagggtggctaatttgtagcagagttgcatgaatatttcttctacatgctgctgggtttgggttctttctccgtgatcacgagctcgttccactccgggttgcgagggaggtaagtctcggagatgtaggagcaggtgggagggacgcgcatgccgcgctcccgcgcgtgggc

SEQ ID NO: 31754 - DNA, 612 bp, Oryza sativa
  unsure (1)..(612): unsure at all n locations
  Clone ID: uC-osflM202097b08a1
ttttnataattttttttttttttttttttttttttggggggtttttttaattttttttgggggtttttcccttttttttttttttttttttttttattttagggaaaaacccgacccaaaaaaaaaccccccccggggggtttacaaagggaaaaaaaaaaggaatgggcccggttaaacaacaccggaaccccccttggtgaggggctgaaaaaaacccttttaaccaaaaaaagaaccgtcaaaaaaaaaaattttacaaaaaaaaaatgggggccccaaaaaaagggggaccacccccccccctttacaaaggggaaaaaagcctttttttaaaacccccggggaaagaaagaaaaaaagggcacccccgggggaacccatttggggggggcacccaaacagggtccgcccaaaaaaaaaccccccccaccctcggccattttgggaaaaaaacatttcccaaaaaaaacaagggggtcccccccgaaaaaaaagggggggccacttccccccaaaaaaaaaacgggggaaaaaaacccacttaaggggtctcccccggggggcccccttggaaccaaatttaaaaaacggttcaagggcccttttatt

SEQ ID NO: 31755 - DNA, 156 bp, Oryza sativa
  unsure (1)..(156): unsure at all n locations
  Clone ID: uC-osflM202097b09a1
ttttatantttctttttttttttttttgggcaacacgggggcttttaagccataataggggctaacacatgttcgcatatcatgattaaaagcacttcaaatttaggaataacatcaaaccaccggataaaagggtggccgttcgcgatctaaaac

SEQ ID NO: 31756 - DNA, 349 bp, Oryza sativa
  Clone ID: uC-osflM202097b10a1
tttttgttttttttttttttttttttttttttttttgggtttttttttttttttttttgggggaaaaagcctttggattctcagggcataaaaaaacaaaattatttggtgatcatccccactcggaacaaattttttttgaactaaacccccaagcacatgaaccgggggggtaaccaccctaaaactccccgccttgcacggaccgacgggaggagttcatacttcatggggttgctactggtttgtttgggcccttcttctactaccccatgactggttttgttgggcttattcccgaagaaaagggaaccgactccaatctaatgccatttgaacaccccccatt

SEQ ID NO: 31757 - DNA, 358 bp, Oryza sativa
  Clone ID: uC-osflM202097b11a1
agaaaaaaagtacactttagtagggatatcacataaattacaaatacaaatcaacaagaaattttataaccccaaaaaaaataagagaaagaataaagccgatggacatacagagcagcacaacaatatcggtacacggttcaatcgatctcgatcaattcggattcggattcggttcaccactccagttcagtcatcgtgcatacggcatgcatgggcgatgcatttgttcgtcgtcgtcgtcgtctccttagcttaaagggcggcgagaatggcgccggccaagacaccggggggggggacgacccacctggagacggcggtggcgggcgcggcggccttctgggtggtgtcgtcg

SEQ ID NO: 31758 - DNA, 452 bp, Oryza sativa
  Clone ID: uC-osflM202097c01a1
aatctatcaacggcattctgattgaagatagtatgccaaaataaacatgtttatatatcaactcattccaacattatgcaaactaaacaaacaccaacgatcttggggatctgatcagtattgtttctctatatttcccccattttggagaattaaaaaaaacttcacaaaatggttaaattaagcaaactgctagatatatataggagatcaaagccctaggggtttattttcaccagagactaagtcaatacccgaaccaccacatcagcttgagccaagcctagcgcaaggttcgttcttgacttgatccctctgcaactcaccccatttaatttgctcatctatgcaaatatactccacacactatatataacttaattttatttttatcctcgctcgcatatcgtctctcgaaaactctacctgatcaacgattgagttgcatccat

SEQ ID NO: 31759 - DNA, 484 bp, Oryza sativa
  Clone ID: uC-osflM202097c02a1
gacacaagcacaagcacacagggtattattattgattaagatatggtgattcttctccgatacaagcattacttagtctagtagttgacatatattaaagattaattctttgagcaagcatgcatattcccatacaagctagtatcagcatacttaggtagattgctggcatttgtaacagggaggagcagagccagagtacaatacttaagtcttcttcatccagctgttatacatgatgatataatccatcatcatccatgtgtgttttacttgaggatgtacttgagcacaccgggtatatggatcctgtagaagtagtcctcccaatcgatggtctttgggtcgaagttgaacatttcatcgtcttgagggttcctgctcttccccatcctctgcctcagcctctccaagtttatgtcgtcgaagcatcctttgaagaaggcgaaggggcccgagacgtcgacgaggtgcatgacgtaac

SEQ ID NO: 31760 - DNA, 367 bp, Oryza sativa
  Clone ID: uC-osflM202097c03a1
acactagtacaaggatatatttttataacaaattaatggggtgaaggatgaattagcaccccacacacacatacatttcgggaattatttattacaaatcgggagggttgcatttgaaaaaaacaaccaaacacttgacggataaattaaccaaactttgattaacaacaaacaatcgactgggaatttataaaaatatggatcgccggaaccgtttcgggcggatggagtcctggagatggaaaccggggggcgcttgatcgatcgatcgatcttacacatgcaccttgggtgccacgccgggggggccctaaacggcgccggggagagacccggaaacttttgggggggtttcaatttcaggttc

SEQ ID NO: 31761 - DNA, 534 bp, Oryza sativa
  Clone ID: uC-osflM202097c04a1
gacagcaactcaataatctttcgatggggcacctagggtaatgtatggggggaaaatcgccagacataacagagccggccagactcaactcaaactcaaccctatgatggtaaactgtttgcgattaacgcctccgcctatgacaatgtttggagataaacgcttccaccaaaaaacgaatgtcggggagtgttctcccctacaagaattattattgttttcaatgttaaaaaggcaaaattcaccagatcccgttagtgcaggaccaggaataaacacttgttcgtcatcattttctgccagtttaggcaccgcccgagccgtacttctttccaaagaagaggatctgcagctggtcatagcctgagagcacaccagcaccagcaatggcacgtaggatgttggcaccagcacccttgaacagtgacttggcaccctcgttttcaggatctgggagaaagcatccatggagctcttgtacttgacagccttctcagaggtcatcatcatccttctgcggacggtatcaatggg

SEQ ID NO: 31762 - DNA, 439 bp, Oryza sativa
  Clone ID: uC-osflM202097c05a1
ctccttttgtaatttcccccttcttttttttttttttagcggtctttttttaaaatttatgggcggaatcacccccaaaaagggccacaagccatcaactacaatgatagttcctcttacaaactttaacacaccgttaacaaggcttcactcaaaaataaagaagggggtaaacttcgtccgccccaaggaccaccttgtccacttcactcccaaacacaatccaccccaaactttatatcttacaaacgttaaaacaaccaataagaagccactcagagaaggtctccacaaccatgggcttctctgtcaatcaaattaaccataccaccatcaccgttcttgaggaacttagattacattccccagctcacttaccagatcgcctgacgaccttggccaccagctcaacctctttttttgcaattttgaacgattt

SEQ ID NO: 31763 - DNA, 469 bp, Oryza sativa
  Clone ID: uC-osflM202097c07a1
acattacattattattattcattaatgacggggcaaaatacatcgcttgtcggggtaatcatattacaaaattctatctgaacaaaacaccttaagtacatagtcatattgtacaaattacaaaagtcgatctgctctcgataactttacgagattgattgattcgttcattcacaaggcaattaacacctcaaattttacaacaacaacatcatgagcaatagctgaaactttgaaagcagaactccagtctgtctgtataaccagcagcagcaggcagcaaagcaaactgttcgatcacatctcgacagggaacctcttgtacaggtccgggttgtcgagcctgggcttggcgatgacctgcagcgacgtgctcatgaacgtgacgacgccgttggactccatcatgttgacgtccttcggcctggtgccctcggggagagaccactcgaactggtggaggaggtgc

SEQ ID NO: 31764 - DNA, 374 bp, Oryza sativa
  unsure (1)..(374): unsure at all n locations
  Clone ID: uC-osflM202097c08a1
acaggtaagagattttatttgggttcatcgcccgcggggggggctcaaatctccccgtggctgccccgccggggcactccgaccccaacgacccaacggatcccaaaccccccacccatcgagctcgccacggggcctgcttctccaccaggggggagcatcccaagccgcagcgtcgctgcgcggaggcaggggtagcaccggtggatcggggggcgggggcaagcggcgccggcgccgcatccgtcctcatcgccaccttccccacaacacaaggtcccaggttcgatcgatcgatccatgtcatgtcatgcatgatgatgcataggccaccgcaggcgcggcgggcggcgtcnctctgccctgctaggctc

SEQ ID NO: 31765 - DNA, 574 bp, Oryza sativa
  Clone ID: uC-osflM202097c09a1
cgatctcttgataattcacaggtgtaaatatacatcagaggaagggaattcatggataagcaacagtcagtgattttttgcggtacaagataaaccctacaacgtgacagaaatgtacttcttctacaagtaattattattactcaatgtaatcacatttaactcacaacagattataccctctcgcttctacatgcatatacaattaccgacatgaaatatttctaagtattatatatatcctgtattcatgtgcatggcagaagttcttgatatattgcttttgacgcttacgaaagaaccaaaacgttcttgccatgccgatgcaggtgatatatccctcagttcctagcctcattcataagctggcaacctttgcactgtattaagtttatttgctgcatcgacgttgaaggtcgaactcagatccccttatgagtttcaaagatgtacttcaaatgcaacaaaccagaagggattgatatctgcaaatatttcctttggtgattctctagataactgtaccatctggaatcaccgcatttttaagcactaccgttatcccagaacgaat

SEQ ID NO: 31766 - DNA, 517 bp, Oryza sativa
  unsure (1)..(517): unsure at all n locations
  Clone ID: uC-osflM202097c10a1
ctccttnattattcaccctttttttttttttttttttttgttttttttaaaaatatttttggcgttttcccccaccaatcttttaatattttatataattttcacaataacaaaccccaaaccctcccaaaaaacaaaataaaaacccccaacaaaaaaaacccacaaaaaaaaaaaaacaaacaaaaaaaaaacaacccaaaacaacaaaaaacacacacaacccacaaaaaatacacacccaaaaacaaaacctcccaccccccccaaatacacaaacgtcaaaaaaaacaaaaaaattgcctcccacccacacacaaaaacccacccctacccaccctacctcaacccaccaaaaaattacccccacacccccccgcgataaccaccccccacacccaaaacaccaaaaaacccataaaaaaaaacccccaacacccaaaaaaaccaaacccaatttaaatcccaacaaaaaaaaaaacccacccacccaaatcaacccacaacacccaaaatc

SEQ ID NO: 31767 - DNA, 502 bp, Oryza sativa
  Clone ID: uC-osflM202097c11a1
ggctcagaacaagtttaaaccgaacagaagatagagagttttaaacgacacagtgcacacagcgagcatatgataataacggtcaatgcaacgagtgccatggccgtgcacaaaactaccacttgaacgaggatcatttcttcttggcggcagccttggtcaccttggcaccggttgggtccttcttctccacgttcttgatgacgccaacagccaccgtttgcctcatgtcacgcacggcaaaacgaccaagaggagggtactcagagaaggtctccacaaccatgggcttggtgggaatcatcttaaccataccagcatcaccgttcttgaggaacttgggctccttctccagctccttaccagatcgtctgtcgatcttggtcaccagcttagcaaacttgaccgcaatgtggagggttgggcagtccagcactggggccgtagccgtgccgatctggcagggtggttcatgatgatcacctgggaggtgaagctggca

SEQ ID NO: 31768 - DNA, 473 bp, Oryza sativa
  Clone ID: uC-osflM202097c12a1
actaatattagcatggatatatcagtgtgtgccaataatccaatatctacttgtcctttaacaacgtgatatatatgttggtcttgtataccaaagttactccatcttgacttttagatatgttgaaatccctcctttggtaacatttattcttttctcatatatactcaggcagatggagccgggcaagagtagagaggcggcacaccacctttctcgttggcgcaggtggagatgatgtccgccggcggcgagaggcggcagacgtcgcggaggagggcgaaggcgcggtcgacggggatgtcgacgccgatggcgcgctccaggtgtggttcacgatgtggcacaggcacaccgcctcccccttcacgatggacgacagccccgcgcagcacccctccggcgccgccgtcgccgccttgtccttgaagaacggcaggcacgggctcagctccagcagcgacgccagcacg

SEQ ID NO: 31769 - DNA, 533 bp, Oryza sativa
  unsure (1)..(533): unsure at all n locations
  Clone ID: uC-osflM202097d01a1
aaagngaacggcaacattccttgcctaagaaattattttttattccctttgtgatgggcgaactaacactgcccgattctctctttgcttttcttctcttaagttttaactatttccacaagacatatatacatctatacaattgtaaaaaccctgtatgtaacatgtacagcctaaaaaaagatcctatgggaaaactataccaaacaagaagctaatgctactaaaatgtagttaaaaaaatttgggagaagctaatggaaaacttgcggggacgtataatattcgctttcgccgaagaatggtctcaagtcctcttggcacatgaactccaaagggaaggaaacgagatggcccctaacggcctgtaatttttccataggatcggtgcctgccagatccccatccttgtgagtttctgttatctctacagcaacacccaggtcaatggttgtgtggccgattttctccttccggtgagcaaatccttgcctaaattgggacctagaatggatgtgatcattgggaacaca

SEQ ID NO: 31770 - DNA, 584 bp, Oryza sativa
  Clone ID: uC-osflM202097d02a1
atgacagtcttgaaggaacagcatgaggtctggcaagttaacaaatggtacagctttcgaaggtattattcaaaattttctatcctgaaattacaacggatggtcttagtacagtttgcaatcaaaacacgacgatgaatatatatttctaaatgatcaaaacaggtgtggtacaacccattgaagcatcttacataagttttacaatttcggtgccatcaggagaaaaaaaaaacaagcattatactgctatcaattgatttgtcaaactgccattgtggcgccactgactagctgcgattgtgccacaagctaaaaaaccttcgatgagtggagggcaagatcaggagagtttcatgttcttcaacaggctggtgatgagtgcctccttcgacggtgctcgttgcttgtaatccttcaatagtgcctctgaagccaagctctgcagttctgagctttcctcttccttattcctccctttggtcaactgattgattgccgagctacacaaacacacgccaaagagggctcttgtattcttgcctccagtcaactgtattgtagatgcataatattttctagct

SEQ ID NO: 31771 - DNA, 412 bp, Oryza sativa
  Clone ID: uC-osflM202097d03a1
aaaaagtacattttaacaaaaaaaaaaaaaaccccccaaaaaaaaaaggaaaagctcaaaaaaaaaaaaactaaaaaaggcccccttgaaaaaaaaaaaaacgggcaaaaaaaaaaaaccccgcttcgaatttaacccaaaaaacccaaggaaaaaaaaccccgggggcattttgggggccaaaaaaaacctttaaaaaaaaaaaacaaaaataggccaacccaaaggtgaaaaaagcaaaaaaaaaaatggggggtaaacccaaagttaaaaaaatttcccccccttttttccccggccgggaaaaaaaaaggggggaaaaacccaatcccccaaccggggccacccccttcttaaaacccaaatttgaaaccacccccccttataaatttataaaaaaaaaattctcccc

SEQ ID NO: 31772 - DNA, 390 bp, Oryza sativa
  unsure (1)..(390): unsure at all n locations
  Clone ID: uC-osflM202097d04a1
cttctttggtaatgacccgcngaaaaaggaaaaatcaccgggggattttgcaacagattgtgggggtgcaaacccaagggcagcgcaactgacagtcaaaagaacgccaaggcaagacgtcaaggacacaccaactcttgtaaatgagaaaatgctcacctatgcaaagcactcatgaaatttgctgacccacaccaggaagaacccattcttcgtccgatcgaactggccatgtcacaggctcctcaaggagcgcgcgttgagccaaagaaaaagtgagagccggaacaaccaccgttaggatggcgaaaggataaccaggaagaaagctcgagcaacattaagtgttactgactcttcctgaagaagttttcagtcttgaggcccaac

SEQ ID NO: 31773 - DNA, 347 bp, Oryza sativa
  unsure (1)..(347): unsure at all n locations
  Clone ID: uC-osflM202097d05a1
tcctttggtaataaccaccaacnagangcaggagccggcggggatttttaaacgggtttgggggttacaccctattggaaccgattctttgatacaaaggtactccagaaaatgcattgaagtgcaaagtatctttgttcaaatcagctgttactattaacaccgtattaacaaattgcaaaagatcttgtattcaccataaaacacatgctgtggcactattctttctaacttcttagaggcaataaccgtggtggctttttcttatgagcaaagtggtaagagaagctctcaagacctcttcttcctttaagtttcctacgacttgttagacgcgttcttgagca

SEQ ID NO: 31774 - DNA, 248 bp, Oryza sativa
  unsure (1)..(248): unsure at all n locations
  Clone ID: uC-osflM202097d08a1
ttnatgataacccaaaaccaatcatttccatcattgatgaattttaaacataacgtccgcgcacaacacacacaaaattattacaacaatcatagctctccatacacagaccaccaactcacacgtaaactcgcctccaactaatttaaccttctcaaggacaatagtccacccacccgacctttcaattaaacctgataacaatttgcacaaaaaaaaactcccccaataccctgcacgttttcacc

SEQ ID NO: 31775 - DNA, 540 bp, Oryza sativa
  unsure (1)..(540): unsure at all n locations
  Clone ID: uC-osflM202097d10a1
agtaagaactaagatttttattttcctttgtgctgttgcaacagattatcagcatgcatgaccaatggaattgttacagagcgtcagaagaaggccaaggcaagagggcaagatcacaacaactcttctcaatgagaaaatgctcagttatgcaaagcagtcatgaagcagaagtgcacatgtcaggatgtacccatgcgtcgtcagatcgtactggccatgttcccgccttctcaatcgagggcagtttcaagagaagaagctgcaagatccgcaacagcggcggtgaggaggtcgcaaggataacgaggaagaaagctggagcagcatcattgtcactgactcttgctgaagatgttttcagtcttgaggtccaaccgaatgtagattgtgcgatgatcatggctttcgtcattgttctggatcggatctgctggaagccatacacacctatgatactgaagaagaggcanaactagtgtccttcacgaagagagagccggagaaggagatggtgggtatccatgcttacgtgttact

SEQ ID NO: 31776 - DNA, 585 bp, Oryza sativa
  Clone ID: uC-osflM202097d11a1
atcaatcaccaaaaggcaaacaaattagtggcaaatgaagatgtgttttcacgtttcgatcaacgcgaccaccattacagaaagatccgtgtcatgtagcatgctagtatttgcaaagctactacgacgacaaacctgagaagattcacaccgtatcaacaaaatgcaaaagaacttgtattcaccataaaacccagttgaagtgcggctctgtcataatacgtagaggcaatagccgcggtggttttttcttatgtgcaaagcgggaagagaagctctcaagacctcttcttcctcttcttctcctccgacttgtcagacgcgttcttgagcatgatgacgaggatccggacaaggacggccacgaagtcagtgaagagggtgaggtgcgtgcttgatgtagtccatgtcaccgtggtgagccctctcgatgatctcctgcgtgtcatacaccatgtaccccaggaagatcaacaggccaaagtaaacctcaaacatgaagctgccggtggagtggccaaagatggatgcggcaaactgcaaccagagcaggatggagaggccagaagagagcaaaccaccaag

SEQ ID NO: 31777 - DNA, 492 bp, Oryza sativa
  Clone ID: uC-osflM202097d12a1
atgacagtcttgaaggaacagcatgaggtctggcaagttaacaaatggtacagctttcgaaggtattattcaaaattttctatcctgaaattacaacggatggtcttagtacagtttgcaatcaaaacacgacgatgaatatatatttctaaatgatcaaaacaggtgtggtacaacccattgaagcatcttacataagttttacaatttcggtgccatcaggagaaaaaaaaaacaagcattatactgctatcaattgatttgtcaaactgccattgtggcgccactgactagctgcgattgtgccacaagctaaaaaaccttcgatgagtggagggcaagatcaggagagtttcatgttcttcaacaggctggtgatgagtgcctccttcgacggtgctcgttgcttgtaatccttcaatagtgcctctgaagccaagctctgcagttctgagctttcctcttccttattcctccctttggtcaactgat

SEQ ID NO: 31778 - DNA, 444 bp, Oryza sativa
  Clone ID: uC-osflM202097e01a1
ggaattatcagctgagtagatcaactgctatttggttcacttcgtttttacatgttacaatctcatctgtgtttcccagtgaggaggtagtatacaaacattaccaagaaaagctggtaaaacctacaatctaacaaaattcatttgcccgcatgcaaaatctttgatgacgtgtatttcttttctgtgtgttcagtgtttgcttagtgtgggcagggcaccaagatggcacaagcaactgcccacactgggaaatgctttccaccactgtgttatcaccaattctgcaactgcgatgccacgcttttcaccactgggtgatacttcgtgtgtagatacttctttgcgttttctgaaccaggttgcccaagccattcatcatataatcttttcgcaatagggttcttgaaggggttggataccgatacattttggatgtacaca

SEQ ID NO: 31779 - DNA, 494 bp, Oryza sativa
  Clone ID: uC-osflM202097e02a1
aggacaggttaaattataatcacattcctgatacagacaaacagtactactagtggtaacctcttacatcaacactttcttccgttcgttctgcagttctctccctcacatcagaggtaccctcttgccactaactgacagagttgacagcaaccatcaaaattaattccaaaaataacagataagtgtttttaggtggaggcatccggcttctactacttcagattcttggacacggtccaacgacgaggtggggatttgaccgactattcggaccgtcgcgccggagtccagtgtgggagcgccgggctgaagtggctggacacgacgcgcgagtcgagcagctcgacgatgggcgggaacgtgacgcagcgtggcaccttgtactggttgatggacgcgccgcgggagatggcgtagtccatgagctcctcgaatgtgcccgggcggacgacccggatctcgagcggcccaatcgagccgtccgcgacgcg

SEQ ID NO: 31780 - DNA, 246 bp, Oryza sativa
  Clone ID: uC-osflM202097e03a1
ctttttaaataatttctctttttttttttttttttttttggggttttttttatttttttttcgggtttcccccccaaaaaaaaaaaaaaaaaaaaaaaacaaaaaaaaaaaaaaaaaaaaaaaaaaaaaaaaaaaaaagaaaaaaaaaaaaaaaaaaaataaacacacccaaaccagcaaaaacaaaaagagcgaaaaacccaaaccccaacccaaaagacaaacccccacacagacccccccaca

SEQ ID NO: 31781 - DNA, 103 bp, Oryza sativa
  Clone ID: uC-osflM202097e07a1
cttctttggtgaataaacaaacgaacatccaataacatgaacgggggggatttattaataaacatggccgtgcataaacactcataaagtccatacataataa

SEQ ID NO: 31782 - DNA, 378 bp, Oryza sativa
  unsure (1)..(378): unsure at all n locations
  Clone ID: uC-osflM202097e08a1
ctttngtgaaaaccgaaccgcaacgattcagatggaggtgaaacactgccgattcccacggagattacacacaatacaaatacaccgacaaactggctcaaaaaccaccaaattgattcaaaagtaaaacgggtatgagggatcttcccaccgagactgactaaacctaaccacagacaattggatccactggacccagattattcaaaaacagatggctatgactgcatcgacctcgcaaccgaagggaacttgcagctatggatatcctcacttcgcgctggcgagctgggtgcggatgagcttggcggccgaaaccatgttggtatgggcaggattgaccaagttgaacttgcgggccttgagaccgaagtcagg

SEQ ID NO: 31783 - DNA, 365 bp, Oryza sativa
  Clone ID: uC-osflM202097e09a1
acaaagacaaacatttattgcataattggacaaagattggacacaggtaacttataaggaaagataaacaggactcgtacattgctggtgaatataacgttacgagcacttcaagacgacggattgacctaaagtggatctttcaacagtggatgaactggggaaccactaggccctcaaaggtaggctggggctggggctgcattgtaaacactggccgcaacaaacgtgactctgctatgaaggggaagctggatgatccgacaggcacgagggaggaggtagacctagaaatgcgaagtgcagggctaggggacacacaaagtctaccgttgcacggtacaacgttgaatgtccagaaatag

SEQ ID NO: 31784 - DNA, 500 bp, Oryza sativa
  unsure (1)..(500): unsure at all n locations
  Clone ID: uC-osflM202097e10a1
gtaaacaaggatgctacaatatattattgcagaaacggcaccaaggccgtttctattattcataggtaacatcccaataacaagaggagacagagcaccaaccacacaccacattccactgaactcacccccaactaaatcaaactagaaaactcccaaattcaatcgaccttactttcttaaggaaaaagagcagtgcctaggaatgcaaagcatcctgaaatatctctcttctcttttcatctctgaaaccagagaatggaaacaaagcaaagaaactccaatgctctcctctttcagagtctcagcctgagatgttggccagctcacttgttcgacggctcgccctcgacggccaacgggacggtgctagccatggtgcggtacttgagggcatacagcatctcaaggtagcggcgggtttcacgcctctccaggttcgagacgtacttncagaatccgtagacgccggtgagggtcatcagcctctcagagtagag

SEQ ID NO: 31785 - DNA, 538 bp, Oryza sativa
  Clone ID: uC-osflM202097e11a1
gtgttgaactcaaagcaaacaatcactgggaatgtgcccaaatactcgacaattgccgagtacacagcggatgcaaaggtaagtcaagatacataaataactcacattgcatctgtacctttattatagatagattcatcaaccctccctccagcaagcttgtataatgcaacaaagcaacccccaaaggttttgatcacaaaactatatatgcccatcaacagtacgactccttaaaatcccatcaagataacaaattattgggcctataatactcatccgggcccactgcaatccaggtcactggtggacactggggttcacaccttctacttggtggcttctgcctactccttaggttgtccaactcttgtatctgcagtaggagtgggatgtttggagatggcagttgcgagatagcatcgcatggagaagagggtgttcttttttccgtcaagcttggccgctccttgaatctccttcttcctgacatcaagggcgatcatcactcctcccatatcacaatccctgttggcag

SEQ ID NO: 31786 - DNA, 533 bp, Oryza sativa
  Clone ID: uC-osflM202097e12a1
agaaaacaaatgagcagtgatatctgtgaactttcgcttacacatagatagcaagcagtctagtagtggaccaatccggccttctgcacgcatacagtcactcacacgctactacgctatctttacatggagaacatatacatatattgcgacatagaagtgcatatgacatataattagtgtgcacatgtgtgcatgctgctgctgcatgcagcgctagattattcgttcgcagcaggtagcgaagttgtgtgatcagttttgtcaggcgtggtccggctcaccaggaagagcagcgagaacatcaggaggagcagcgaatacatggcggtctatgtcgtcaggtggactagcgaacacttggtccggatcatggtctacgtcatcatgggggctagagaacacgtagcggtggtccggatcatggtctacgtcatcagggggactagagagcacgtagtggcccgcgcggagaggcctcggcagtctggccgccgccgtggtcttgcagccgtcgtagcactgcccgaagc

SEQ ID NO: 31787 - DNA, 421 bp, Oryza sativa
  Clone ID: uC-osflM202097f01a1
acaaaacaccagctcaagtaagtaaaatgcattcgcaattcagagaagtgaacaaaagagcggatcaaatatgtctcagcaacatttgacatcaagtgcatcacaatggtagacggatttcaagtactccaaactcagacagttatactaaaacattcagctagaagaggctagaccattgatcatcaccatcaacaaaaatgttttccttgtttatagcacatcgccttgcttccacttccaagagttgtctactttgaggctgacttgtccttggttttctgtattttcaagactttcttcacaattttctggttttcaaccaagaaagcacgaatgatcctttcccttactggaggtccagagagcactccaccatagggacgggtcacagttctgcgggtcctagacaacctggatc

SEQ ID NO: 31788 - DNA, 458 bp, Oryza sativa
  Clone ID: uC-osflM202097f02a1
gatcacttctttatttcattcaacgtaatggggagttacaaaatttggtaacacccacaggggacaaaaaacagacgctaacaaaaagtacatcaaccctacacctacagtaaaaaaatactgtgtgacctctttctttcaagctgcattatgtataccaaactctatgattctatgagaaaaaaaaaagagagaccagtctgtcgaacaaaaaaacggcctactggtccatgggggagaagggaccgttctcacaaactgctaactaatcatattcacactgcacgaagtcgcctccatttaaacagaaatgtcaaaacagcactgatttcgggattcccttatttacactggaatggatctgcactctgcatcaagcatacgtgtttgatctgaccctgcggaataattcgttcaccatgaaaaattattccagggcgtacaactgctgtttggct

SEQ ID NO: 31789 - DNA, 383 bp, Oryza sativa
  Clone ID: uC-osflM202097f03a1
attcctatatttcatttttcaccaaattcggagataaaaaacaatacctcgacctgtcctgtaatccccgaaaaaacaagagccctccaactcgatgcatctacaaagctatcgccgttaccacttgttagtaatgttcaacctctaggccaccagaaaataaagaaaaaagagggtggtcggtcagtagaagtccagcactcctgatatggtgatgggagggtctatggccacccgcttcgccttcccttccgtgactagctgcggcagcgtgtttgcctccttcggcgcaacgcctggggcggtccacagggtggcgtgcggccagtcgttccgggacgcgatcttctcgccgttcaccgtcccgagctccacctcgaggg

SEQ ID NO: 31790 - DNA, 530 bp, Oryza sativa
  Clone ID: uC-osflM202097f04a1
ccgcaacatagacatatcacattagatgggaaaaaaaattatagcattccaagagatgcctaccataaacagcaagcaaacagcagtaacataaatataatgacgataacctgctagaggagatctattctcggcattttaatttggacaggaagagctgagcatcacttgccatagatatactaatattatttactaatccatctcactagccatagatagattactgacattattgagtaataattaatccatctgcacataatagatcagtagccttctgcctcacttcacagccttgccattggaagcgactttgtcttcaacttggggttgggaggcggcccatcgaaaaacttggatgctctctcttcttccatctttagcgtactacacatctttcttgctgaggaaacttggctgttggttgaggaagaagatcttgcccacatcctatcagtaattgaaactttgttctgcttctctgtgatcctgtaaaacgggatatagcaatgccgaccatttacttg

SEQ ID NO: 31791 - DNA, 507 bp, Oryza sativa
  Clone ID: uC-osflM202097f05a1
cagaaggaacgggaatggggggttcaatataaaaccatgggggtagatacatagaatagagcactacatatttttctcagcactagggaggttcattcaaacattaaaccacaggtaggtctgaaaaggcttaaattactagcaaaaagtatagtcctgccaaacagcgcaagagctttagcacaatgacatgggatcaccactcaacggttggccttggcaacacgctcgatctcatccttcttcttgatggcatagctgttggatgagcccttggcggcattaataagctcgtcagcaaggcactcagcaatggtcttgatgttcctgaaggcgctctccctggcaccagtggtgaggaggtagattgcctggttgaccctcctcaagggagagatatccacagcctgcctccttacagcacccgaagacccaatacgggtcgcatccttacgagggccactgttgatgatggcgtctacgatgacctgaatggggttggcgtca

SEQ ID NO: 31792 - DNA, 252 bp, Oryza sativa
  unsure (1)..(252): unsure at all n locations
  Clone ID: uC-osflM202097f06a1
cacctttngataaatcaccccccaaaaaacaccacccaccgggacaattttaaaaaatttttgcggttcccacccaaacaacctaaaacaattccagcttacaaacttttaactccacaaactatattcctaaccgtccaaaatctcaaaaattcctcaccttgaacaacacacctcttttttcatacaacaaatactgacataaaccaccacacccaccgacgcttcccaacacacaacaatctcctaccc

SEQ ID NO: 31793 - DNA, 165 bp, Oryza sativa
  Clone ID: uC-osflM202097f07a1
tttttgtggttaccctcttttttttttttatttttgggggcaaaccaatcttttttggggggtcaaccacgccagaaattcacaccaaatgtaactcataaagctatcactgctaagagagtaaatcgatctgccctttaaaatgaaagctcatcccaccaaacc

SEQ ID NO: 31794 - DNA, 427 bp, Oryza sativa
  Clone ID: uC-osflM202097f08a1
ggggactgggaatatgatgaacattagtgggggaacacaagaacacaatggcgcggacataacagggatacagctattgacactttcagcataataaccagtgacctcatttattattgccccaagccatcatataaaagggacttcagaaaggtagatcaacagctcataataattcacagtgcatgtctattttcaaaaccatttacaacgaaaaggccggtctaatggcgttcctttcccccaacctacgcccagacgacctctacaatctgctttgctttcttccttccattggaccattcacggttcaggggaagtataatcaagaggtctccaatagattgtaactgggactaattgaccagcactggcaactggagggtcaggatgggctccccaatcaagacatgatccatcatataca

SEQ ID NO: 31795 - DNA, 501 bp, Oryza sativa
  Clone ID: uC-osflM202097f09a1
gtaaacaaggatgctacaatatattattgcagaaacggcaccaaggccgtttctattattcataggtaacatcccaataacaagaggagacagagcaccaaccacacaccacattccactgaactcacccccaactaaatcaaactagaaaactcccaaattcaatcgaccttactttcttaaggaaaaagagcagtgcctaggaatgcaaagcatcctgaaatatctctcttctcttttcatctctgaaaccagagaatggaaacaaagcaaagaaactccaatgctctcctctttcagagtctcagcctgagatgttggccagctcacttgttcgacggctcgccctcgacggccaacgggacggtgctagccatggtgcggtacttgagggcatacagcatctcaaggtagcggcgggtttcacgcctctccaggttcgagacgtacttccagaatccgtagacgccggtgagggtcatcagcctctcagagtagagc

SEQ ID NO: 31796 - DNA, 546 bp, Oryza sativa
  unsure (1)..(546): unsure at all n locations
  Clone ID: uC-osflM202097f10a1
ccgatggaaaatcacatgaattgttcagtgtgtacagcgaatgtaattaaatgtgcgagatagactcaattttctatggggaaaatcagcatggggtgcctcgacactgaatgaacatgcagctacatctataattttttttagaattcttcatgtacataggttgaatatgaaataatacttcagagctactgttaccatgtgcctgcttcatcacttccaaatctttcgatcagctgacacatgagctgtagaacaaacaatgaaatatatcgccatgaaagtatagaccttgaaacttcacttgtctcaccatattgcgtgcaaataatgtgaattaagttgaccatactgagtggtagtaaacaaaggtccaatactggttattggaacaaacagtgtctcaaagttctttcaactctaacatcttgtgggattggcacctgacctctggggattgtcttgattaattgcaacttaaccgngatggaagatgcagggacagagcgctggtgctggaagcgatgcacctctggtttcttcccg

SEQ ID NO: 31797 - DNA, 483 bp, Oryza sativa
  Clone ID: uC-osflM202097f11a1
ggggggaaaaaaagactgactattgccttgatcagttgccaagagcgacagggcatgtgactaacactactaaaaaaccgtttttgcaaacgggccgagcgagcttcaccgccaaccgcatgcgccaaatcgtctgcaaaaatgcaaatttttgcatgcggttagggcacccgcatgcggtcacttataccggccacatgcgaaaataaattcagcaaacaaaaaaaataaaatccaaaaccccccaaaaaaataaaaatccaaaaaatcccaaaccctagcccgccatccacgccacgttttgcgccccccccccccccccgggccgcccgccgttgttgccccgttggatccggcggggggagcaccggatccattggcccagccgacccaccgacgttgccaccggcggtgccgtttcccccaccgcccgccattgttgccccgcggatccgtctcccccgctgcccgccgttgttgccc

SEQ ID NO: 31798 - DNA, 518 bp, Oryza sativa
  Clone ID: uC-osflM202097f12a1
gatatatcatcgttatgcagaaaatgccgggctgcaccaacagctgcctatcattttggcccatttcccccaacaatacgttaacccagaggtctaaataagaggggggaaaaagaaaaggagaaatcaacatatgtacaaatgatgaagaaaaaagagagaaaaaaggggggcaagatgctatctactgacttggtcggatggagcagatgagctcctttctatcaacaaaaaagatgggtagtcttgcatcggctcaagccggaaaaagcgttgtcgtcagtcgtccctgaaatctctcctcccatcccgggaagagtccctgctggacgccttgatcgcgtcggccatcatgagagcaactgtggccttgtggagggcaaggtcagccttgtgcatcagcaggtgggccttctctctctagagcttggccatggccaccgcatgctgcgctgcactggaggcatctcgctgcttgagctcctctatgtcgacgcggcggcttttggacgcacccg

SEQ ID NO: 31799 - DNA, 399 bp, Oryza sativa
  Clone ID: uC-osflM202097g01a1
aaaacacctttttatgttttttaattggggggacacaatgaagagggggccgttattcattatagattttgcatgctgatctaccacaataaaacgtttcacacaccatgaaaccagacattgaggttccacattacacggaaatcgtacacaatgaaacggaacacgatcaaggaccggacctgacaaccatagctccattggggaagacaaataggacaacttgtgaaccctagaacaaaaagaggtccatggttggggacttactggccaccacggaggcggagcaccaagtggagtgcggactccttctggatgacgcaaaccgcaagggtgcggccattcttaagctgcttaccaggaaagctctgacccttatggaccggggagaggccctcc

SEQ ID NO: 31800 - DNA, 340 bp, Oryza sativa
  unsure (1)..(340): unsure at all n locations
  Clone ID: uC-osflM202097g02a1
acttattctttgtggaaaaaaaatttcgaaagagagcacagggaaaaccgatacattgggggaagaaaataaataattatatatcctacatccgaacaaaagcaactggcaaaactaatcaattaattaagaatctagctagcaaacgacgtgctagatttttagacgagactaaaaatcaaccaaagacttttacaaattggcgatcgattccctcaaaatggaacgcaaattttgcaggaacatttggcaaaaatgccatgtttcatgcacttgggacgcttgactctgcctttggtggatttngcctcaagccaacagtcctacatgcaagttggac

SEQ ID NO: 31801 - DNA, 401 bp, Oryza sativa
  Clone ID: uC-osflM202097g03a1
gggggaaggaacaggttttaaaattaatttcccaactgggcgatattttacccgtacatttaacacatttttccacccttttaaaactcctcctttttttttccggggaaagataaaaattaacttggggccagccagggtcgccggggggaagatgttaacagggtgggcgtccttttgggggccccggaaataacggggagcaggttgttgccaaaggggtccttggggggcttgggggggttttcgacgggccccttcccggggacctaggcctggatgaaaaaccccaggtgggagaacatggcccgccgcccgtttttgatcttcttaaccttaagcagccccccctggtccgggttgttcgccagccccagcgggtcaaatgggccacctggggg

SEQ ID NO: 31802 - DNA, 566 bp, Oryza sativa
  Clone ID: uC-osflM202097g04a1
gttctaaaattgatcggattctttcgagtgttaagtgagacacacgcatcatgctagtacacttttacgccaatacaacactcacgtatgtgcatcctagcacatatcaaaacaaagattgaacaattgtattacactgacacgctttgacaattaaatatacccacctatgcataagctatcttctagaattaaattataaaacacgagtttttttgccaagtctaaaaactcatacccaagtcgacctttcaatcagatactgagttgagccatactgaaatccagcaaccggattggccggtgttttctccaattgccaggaggcattgcaatttgcactctagatccccatcacgcgatgcttgtcggggtcatggcctccctgccgcacccccggggaccacctgaatctcgacgtcccagagaagggacccacaagtcgacggctacaggaagtaaatgccagcgttctactaagatgtatcatatttaatacgagtatatacccgtaacaggtagcaacaaaacagacggtcacactttttcacagaggaaacatacca

SEQ ID NO: 31803 - DNA, 390 bp, Oryza sativa
  Clone ID: uC-osflM202097g05a1
gcacaaccccccccggccaagggttttttttttaaacaaaaaaagggggggaaggggaaaaaacccccccacacacccaaccctttggggaaatattaaaaaaaaaacgggggggttgctttttaaaaaaacccccaaacccttggcggaaaaaaaaaccaaacttttataaaaaaaaaaaaaacgccgggaaattaaaaaaaaaatgggccccccgaacccttttggggggaaggaatcttgaaaaaaaaaaccccggccccccccatcgaacgaactattccaaacattccccttgggggcccccccggggggcccctaaaaggcccccggaaaaaacacccgaacattggggggggtttcaaattccaatcaaccccccccccgggg

SEQ ID NO: 31804 - DNA, 371 bp, Oryza sativa
  Clone ID: uC-osflM202097g06a1
accaagccaaaaattgaaatctgcctgtgttatcaccagtatatatagagggcctgaatctattaaactaaaatcatccttgcttgcaaaatctgaagtacaaaaagtagaatactagaagtacaaaatctgaagaagttctcaactagtacaagacatcttattattcatacaaccaaaactagcataacaaaaaagcactccagaagctgccaacagtgataataatccaactcaaacctcactttttatcatcttcctgaaccaacgtgttgagtctttagggtaccgtgtgaaagtgctccggtctacatagacgattccaaattttgaagtgaacccgagccgccacttgaagttgtcaagcaggg

SEQ ID NO: 31805 - DNA, 405 bp, Oryza sativa
  Clone ID: uC-osflM202097g07a1
aaaaggcaaaacatgaacattagtagaaggtttaccaggtagaagtagagccctagagttacttaagagagcactttatacattcaccgggtgataaagatacaaaccacattcccaaacagggacaggtgacttaacaaccagacatttgaacaggttttaactaacaaattaaactagaaataaccttaagtttccaaaggggggttactgggtggacggacatacatgtataaaccagttccaagttccagcctttttgcaactaatgcaaaacctatttgagaaagacctataaaattaccgggttaacaggaaacccttccaccatggaaacaaagggaaaaccatggggaactttaaaagcttaaggggctttttttttaaacgctacaaggttatttt

SEQ ID NO: 31806 - DNA, 588 bp, Oryza sativa
  Clone ID: uC-osflM202097g08a1
gaaaatgaatcgtacttgtaaatttaacaacagaaaggaaatgaagaaatgtgccataatccacaactggtatgttaactcgagctaacttagaaggctcgaaaaagttattcatcaaaggataaagctctaagcaacttaaactaatcacattgttgcccaatggcagattaactatatgagcatcctaacagcgatggctacaaaaatgtaccagccgatcgagagcatcttcctctagttattggcctgggaaaaaaatattaaaatgtggctgaacgtttcgagtttatcctcagttattaacatccaagatgataattgttagaagaattaacagcagcggtgtaggcgtgtgtagcttcaagcagcagccttcttgcagtggttttccagccactccatggtgacactcttcggtctttcgagcggcagaccaagagcacggtcccaaatgagctgggatcctatgcctatgctcctcgaaactccgaaaaggacggtgtaataccgagcttcagataatccaaagtggttcagcagaactccactgtgagcatcaacattaggccatgggttttgaccttg

SEQ ID NO: 31807 - DNA, 454 bp, Oryza sativa
  Clone ID: uC-osflM202097g10a1
agcaataaagggcgcaagttcatttcgagctgatgatcaacaaattaaatctgccatcttcctactgcaaagacaccaatcgttccagtgcgcttccgtttcgattagaagtttagaactcttgacaccatggttacggctagccggcccagagcatgcatgcacacgcacatacatgttactacgtttctctttttggttggatatgatcagtagtagtacgccgggagccactccttgccgttgatgaagtcgatgttgatgaacttgtcggcctcctcctgggtgagctgccgcgaccacggctcgcgcttcgtcgcttcggagcccggcccggtgcagttgaactccccgagcatcacgtggtcggtggatccggtgtagccgtagctggtccagccggccgggttgatggtcttggagaggtaggtgtcggcgaaaatgacgcgcgagt

SEQ ID NO: 31808 - DNA, 353 bp, Oryza sativa
  Clone ID: uC-osflM202097g11a1
gggaaacggaaatttaaagaatgcaaactaatagtttattggggccttaataagaaacaaaacttgttgacaggggcagcccctcttatcaaaatagtttttaacttatcaacaaaagaattcatttcgccccaaggaactttttggggagcaattttttttggtctgtacctagctgtaaataaagcccccttctaataacttaaaacacaattggggggaggggcactttgttttttgaaaaaacacaactgggagtatttttgtttttacaatcccctggttttttagcaggggatgccacatgtttgggtatttgggcccgagacccggggggggaatggatcgatgcc

SEQ ID NO: 31809 - DNA, 521 bp, Oryza sativa
  Clone ID: uC-osflM202097g12a1
acattcatcaacatgattgttcacgcagagaatatggcattattgcctacagacttgtgctttgttcttgccagtttcgtcaaattcatctagtctatggaaagtcactgtagccaccagataagtaactattacaaacattcagtgtgttcaaatcttgttctaaggttacccacaatcatacgtggttctacacaaaatactatatatatatataatcattaaaattgtttggattcatctgtgtattatcccgtcgttggatcaacccaattttgcaaaggagggtcaagccttgagctgcttcactgactcgtcaacttactgattttggatgcacactagaacaatctaaattactcccaagtttcatagaaactcaagctctgcatgctggcctccaaattctccactgatattgatctgaagtcatcagagaacaaatcttgattgtttgtttccaaatttcttcccttctgggcatggcgcatgtttttcttttcttcgtaaaaataaaaatc

SEQ ID NO: 31810 - DNA, 461 bp, Oryza sativa
  Clone ID: uC-osflM202097h01a1
aaccaacaccaaaactattaacaccaggtagatgctttagacaaaactggggttatcttctgttgcataacccttttgtgaatcctccaaacattgcatccacgtaaagggcaaatacaacatagcaaaaaactgacagggaaaaccttagattccacggcagtacatcggtacatcatatctccgtaccagtgatcataggtatagttggataagctcatcgctcacaacagatggtgtcagaacaccgagatcagtcagaagcagcgtgagatactggggaggagtgtagtctctcgctgaagtctcaacctccacaccagccggaattggaactccaaaatcaatgggtcggtgagctggtgtcatgtccttctggtccaacggatataggcgtgcaaacttgtaactttcagcagccacataaacaggtttgttcatactgtgagcgacgagagcta

SEQ ID NO: 31811 - DNA, 65 bp, Oryza sativa
  Clone ID: uC-osflM202097h02a1
cccccttaaataaattcccctcttttttttttttatttaaatttgttgttttttaaaaagatttt

SEQ ID NO: 31812 - DNA, 524 bp, Oryza sativa
  unsure (1)..(524): unsure at all n locations
  Clone ID: uC-osflM202097h03a1
gttaactcgngcaaaatccttccattccaggggtggggagtaaatcctactataaaaatttcttcgctgaatcgacaatcatatggcattataaagatacaaaaattaaaataatagtactaccactaaagtaaataatagtaatcgccagacgttgtcattcagcagtatgatgggcctcgatgtgtgctagcagaagcagctctggttcgatctcagcattccaagccaactcacttaccagcgcacataacgcttaaattacatcagtgtatcatcatcatcagaaactgtttcagacaccccaaacaaaaactccacatacccaaaacaaaaaagaacaagacgagaagctagaatctacggcagtttccatcatcaccaagaagccaagcaggcaagcatttgtcacatgttccatgagtagccaccacctgcctggtcacccaggaacagcccactctcctccagttcagtactgatcagattcccaagattgtcaagatcatccaactcatgcagag

SEQ ID NO: 31813 - DNA, 554 bp, Oryza sativa
  unsure (1)..(554): unsure at all n locations
  Clone ID: uC-osflM202097h04a1
gncgngcagattccaactatcatgccgacctcagagataccctaaagttgattttgtagtctctaaatatttagtttattttatggcattttcatttgaatagctcggctactgtcatgctgaggttctacaacgatacaactgctgcgcaaaatcttttgatctaatacacgtaaggaaagatcctccaaggcacaagcttgcaatattctacccagatctccttgtacttctctgagcaccttgcttcgtcccttcgttccctccatatcagcaaaatgaacaggtatgttgggtagaagtatgggatcaccgaactggttccacagggtaagctaaatgaaagagctagcagtatatccccaagataattacagtgccttgcaattccccagtagccagatacaagtagctttcccccgacaagtttgggagttttaccccaaataagagctttagggctcttcttgaagacatgtttttggttattggctcctctgaacacaagatagccaataacaaaaatgagcagttaactgtagcagccaaaaggg

SEQ ID NO: 31814 - DNA, 569 bp, Oryza sativa
  Clone ID: uC-osflM202097h05a1
atcagaaaatcaatatggtagctagttatcacgaacatagcgcagcacagcaaagaccgaaagaaagagcagtcaacaacatagattaaaacataatggccatggattcacgatgttcatagccatatacaggtagcaacgacagaaaactagaacggaaaaaaaaagcagttcttgagtctcatagatggctgccatacatagacagcggatagggaacaggtccaatcaccaaagagtttcaggatgcagccttttgcatctaagctaaacataacgatatgctacccccaaggtgccatgcaggtgcctcccaatctccaatagtatttattccttttttttccctgtgtacatgctccgactagaagacttcgaattcctcaatagaaatcgctaacgggcatgtcatcaaagctccagaggtccatgttgctgacaacatcctgtgatccatccaggttgagaaggctatcaattgagtcaccagcaccatcatccagaaggaacctcatgtagggttctaaatcaagcagatcaacagcactgttctccataacaggagggac

SEQ ID NO: 31815 - DNA, 360 bp, Oryza sativa
  Clone ID: uC-osflM202097h06a1
tccttttttcttaccctcctttttttttttttttcttttgtgtttttttaaattttttttgcgttctaacacctctttttttaaaacgcaaaaaaaaacaaaatgcctttgcccaaaaaaaaatccttcaaaactaaattgtcacaacccggagactctccccacaaaaaatatcgggactaaaatttcccccatcccccccattaggatacttttaattcaacacaacacgccccacaatttcttttaaacaacctctccttaataccaacgctcatcaaacaaatacccatcctaccattaaacaaactaaagaattcccagaaaaacaccttttaggacaaaacaaacccctgttta

SEQ ID NO: 31816 - DNA, 431 bp, Oryza sativa
  unsure (1)..(431): unsure at all n locations
  Clone ID: uC-osflM202097h07a1
tttnggtaatcacacgaggaaaataaaatggtacgggggcatttcaaatgtttttacggcaaagcagaactacccgctgtacataatcggttggtttgtttcaatgcctttcaaggcagcatgagtcccaaaacctagtttagagcatctgatggtattaacatttcaacattaatagcatctaacggtagccaatacacgcttaacatgttgttaatcatccagctcaacaagctgcgcccttctttcggcagctttcttcctgacgaaaatcccccatctcatggcggcctttatcttgagccacccaacaacagctttcccagatgaacgggtgcgctcacctttgaacccaaggtttggtaatggagatggcatgtacgttgggaagccgaaaggcgttttctgcaaactggtagacgctccaccca

SEQ ID NO: 31817 - DNA, 497 bp, Oryza sativa
  Clone ID: uC-osflM202097h08a1
ttttaataatttttattttttttttttttttttttgggggtttttttttaattttttttgttttttttttttttttttttttttttttttttttttttaattttaaaaaaacaaagggaaagttttaaaaaaaaaaaaaacaaaaggaaaaaaaacttacaaaataaaaaaaaaagcaaagggaaaaaatccctaaaaaaatataaaaacaaactgaaaaaaaaaaaccgggggggggggaaatgcaaatggaaaaaatttttaaaaaaaaaatatttattcttagggaaacttgtgttttaaaaaaaaaaatcaccgcaggaataaatgaaggggaaaaaaaaaaaaaaaacccccccgcttaaaaataaaaaaatttttattttttccaaaatataaagaaagagtagaaaaagtaaaattatttttaaatgggggaaaaaaaaaaaaggttaaacaataaaaaggggggaaaaaatttttaagtgggaaccgcc

SEQ ID NO: 31818 - DNA, 567 bp, Oryza sativa
  Clone ID: uC-osflM202097h09a1
aggactatcaaggatagcattagctagcggcattatgaaaagcacaggcctggtctagctattacatgtgtttccaccccggttcaagataaactggacagtggaacactctcatcaacagatcagcaaataacgctgtttcactaacaaaacatttaaaacatttaaagcatattaaacatttaaaacatatttaagtaaccgggggccaaacccacctagcataatcaattgcaattgtaatacagcagtaaaacaaaaggggtaattctgccgcggccacctggtaaaaactgaaacatcatcacattactgaatgtctgttcgaatctgagactagaagtccaaactcaagcatcaggtgataataagtctttagttaacagaaagtacgagtagcccaagtggtatgattgccaactgggatttgaaaacaaaaggtgtatgatcaatatttttctcatcacatatacgaaggtgtattgatttagtcgacctcctcaatcttagggccagcaccactcccaccagcagccggagcatcatcgtccattccaccacccatgt

SEQ ID NO: 31819 - DNA, 589 bp, Oryza sativa
  Clone ID: uC-osflM202097h10a1
gagccacccaaaatcatattcgtgcaactgtgtgctgggaaagtatcgaaacatacggttgaaacatgctacatcgtgtaaggtataacctctgtccgaatcataacaacattccaacaaaagctcaaagcggcacaacaaggagacacgaacctcaaagatcaaacaaccctataccctggcgacggtggcaaaagggagaacttgaagtaagaagaaatgtgcaattaaattcctatggtgtcacctagggttcattccgacgccgtgtagttaatagcggataatatcactcaagatgctaaagaagtggttgatatctatcttttcctctccaccatagactgcttccgcgcttcctcctgatggcccttgtgcagccatctcaacgagtgtgtacagcttcttgattggcatatcgtccagtgcttctgcagccgcatcaatgtccgcttcatcgaacacattgagatgccgcaacacctttgtagcatcctcctttttcagtttggggacatggtatgtcacggagaacacgtcgcacataccaatggattctagaaagcctactttacttgttgtccaataa

SEQ ID NO: 31820 - DNA, 429 bp, Oryza sativa
  Clone ID: uC-osflM202097h11a1
ttttatatttccccctatttttatttttttttatttttgttttttttaatttttttaagcgtctacacaaaacatctacaacatccaagaaacaaccattgtccaaaacataacaacataccaacaaaagctcaaagcagcacaacaaggaaacaccaacctcaaaaaaaaaacaaccctaaaccctacagacaaaggcaaaacctagacctccaacaacgaaaaaatcccaacaaaaatcctatggagtcacctaaggttcaaacccacaccccgtaataaacaacggataatatcactcaagaagctaaagcaaccgcaaaaacaaaaccaatcctcaccaccataaactgcttccccgcatacacctgaaggccctccaacacccaacaaaacgagcgtgcacagcccctcgaaaaacataccaac

SEQ ID NO: 31821 - DNA, 571 bp, Oryza sativa
  Clone ID: uC-osflM202097h12a1
gagccacccaaaatcatattcgtgcaactgtgtgctgggaaagtatcgaaacatacggttgaaacatgctacatcgtgtaaggtataacctctgtccgaatcataacaacattccaacaaaagctcaaagcggcacaacaaggagacacgaacctcaaagatcaaacaaccctataccctggcgacggtggcaaaagggagaacttgaagtaagaagaaatgtgcaattaaattcctatggtgtcacctagggttcattccgacgccgtgtagttaatagcggataatatcactcaagatgctaaagaagtggttgatatctatcttttcctctccaccatagactgcttccgcgcttcctcctgatggcccttgtgcagccatctcaacgagtgtgtacagcttcttgattggcatatcgtccagtgcttctgcagccgcatcaatgtccgcttcatcgaacacattgagatgccgcaacacctttgtagcatcctcctttttcagtttggggacatggtatgtcacggaagacacgtcgcacataccaatggattctagaaagcctact

SEQ ID NO: 31822 - DNA, 445 bp, Oryza sativa
  unsure (1)..(445): unsure at all n locations
  Clone ID: uC-osflM202098a01a1
gagannantggggttcggccaaaaccaaagccatactttttggattaaagatccaacagggtcagagaacacgcaagctcagaactacacatgaccaaaattggggcaagtttgggggtacatatccgctaatacagggggggatttatttctcgattctacgagctttttaactagagctcgaccgggaaggcaattacggatagaaatgagcatcctgttttaacaaaacccatgcacacaacagggggcatgaaccgcatggtattcaccatcaagtttaggagggctccacgggggcgcggaacttggaaccagcgtagacaggagccgtaccaagcttctacttaatcctaagaagctggttgtatttggaaaggggctttgatcgggagggtgctacaggattggattgacccgggggcaaaccaacaggcaaattagc

SEQ ID NO: 31823 - DNA, 494 bp, Oryza sativa
  unsure (1)..(494): unsure at all n locations
  Clone ID: uC-osflM202098a02a1
nnnttnnnntttgttnntttgacaacaaggcggacacaactttaccagaatgcaccaacctagatgctctaccaagagtaatctaggattgccgaataacaacacgcctcgagtacaatatcctgaacaatgtatacatagcactagccaatgctattccctcgcctaaatcctttacttgcgtatagaagcatagttccagtccccgcatagataaataataatacatagaacgaaagtggcaaggaaaaatttaatgcgcaacatgcaaagctaattttcttgcgtacttagaacacctgcaaaaaccttaagcttgtcaatttacagcctaccgagctcagatgtgtgcctttaagggcgttaagcttctttctgacgctccatgtttgcacaaaaatgctaatactgaatatactccaacaagagaagatatatgcaacggaaggaggtacaatcacaactcagggcatgagtgggggggagtgtttgct

SEQ ID NO: 31824 - DNA, 310 bp, Oryza sativa
  unsure (1)..(310): unsure at all n locations
  Clone ID: uC-osflM202098a04a1
tgggcagnagagagttcagcaaaggggtcaggtgcttgggacccgagtatctgacatggcatacatggaaagaaaaggtgctgcttcttgtcttaacatgaatagtagaaggtatatatccccgaagtactggttttagaccatgtatgttaacatatgtcgtactattgatgagaaactgttcagtgaatcatgtagcctttgcagttgatcagctggagatcactttctcaagctctaaatgatgtatgcgccgtacaggttcattgattacttgattgcgttgatggcatcttctgctgggagaaac

SEQ ID NO: 31825 - DNA, 175 bp, Oryza sativa
  unsure (1)..(175): unsure at all n locations
  Clone ID: uC-osflM202098a07a1
aacnncnggagcgcgaggccaacaacatatgnatcggctgggttgagttagaacacaagcacaaaagattacatggtttggtacgattagaacaaaaaactttagatagggcaaggttgtgccccggaattaacaatggtattggtataggaaggaatcaatggagctaactaag

SEQ ID NO: 31826 - DNA, 136 bp, Oryza sativa
  unsure (1)..(136): unsure at all n locations
  Clone ID: uC-osflM202098a08a1
agtanagaggggaaaggcccataccatatgaataaggtggggggagggactttaaaaggacagaatacaaggggtgttaaggttattcagaggaattaaaggggctgggcggttgttttgataaaacgtattagca

SEQ ID NO: 31827 - DNA, 133 bp, Oryza sativa
  unsure (1)..(133): unsure at all n locations
  Clone ID: uC-osflM202098a09a1
gttaattggagnaanaagcggacagaccccaacaatgngnaaaatgtgaaggtgcaaaacttagactcacggactatatggggtctcaaagtcatgcagtgtgaacaaaacgctagaaaaggggtgcaacaat

SEQ ID NO: 31828 - DNA, 469 bp, Oryza sativa
  unsure (1)..(469): unsure at all n locations
  Clone ID: uC-osflM202098a10a1
atatcttattttggaaaatagcgtttaggcccgaacccatagcantngcttaaatgctaatcaaaagtctatgagacacggttgaaaagcagactataggagctgattggcacgcattgagatgcatcacacaatagattgagcttgagaggtaatgcattggaaggtctgaagtactatggtggctcagatgtaaatttaacttctgacttggtggaggccagcaaccagggggaaagcaaatcatgtagatgctttgctattaagacgaattctgttggggccaacctcatcgctagccgggaccgtggactccttcgcttccactgagcacctcttgtatggtgtgaaaccggccctgcgagagtggaggttcaggtttgacaattcattaggaaaggaagctcttggctcatccgctgtggcgagtccttgatgaataatagcggcattgttgttgaggtcaacc

SEQ ID NO: 31829 - DNA, 91 bp, Oryza sativa
  Clone ID: uC-osflM202098a11a1
gggccaaaacaaatagtatttttttaattgataattaaaagtttttgagaaacggttgaaaagtagagtataggagtggattggaatggat

SEQ ID NO: 31830 - DNA, 236 bp, Oryza sativa
  Clone ID: uC-osflM202098b02a1
aaaaaaaaggggggggaaacggagaaaaaaaggaaaggggaagaagagggtgaggaaaggagaataaggggaagagatggagagaaaaagacaagagagaaggacagggggcaaaagggattacagaaaaagagaagaagaaaaggataacaagaagggaagaagaaaacgaaggggacgataaggaggaagcagaaacaaaaagggaaaaacaagcagaaggaaagcgaggacag

SEQ ID NO: 31831 - DNA, 323 bp, Oryza sativa
  Clone ID: uC-osflM202098b03a1
gttgtgaattaagacaacagggggatcgccccaacccactagcaaacatacaggttgttagccactgacatatgttgcaaatgcgtgctacaagagcttaatagtcgaactaaaactacctacatgcagtacctgtggcctagcatcagaggtaaggcactatacttggactacaagaggtcctccggacgctaatagtcagtgaccagttattaggatgggactaaagcaagaggcgatgcagcgataaatgcgctctaggaactggacattgaggaacggctgattgggttttaaatgagtgacggaaaggaggggatgga

SEQ ID NO: 31832 - DNA, 213 bp, Oryza sativa
  unsure (1)..(213): unsure at all n locations
  Clone ID: uC-osflM202098b04a1
catgacgcgatgaagtttgttccttagagtgtcgcccttttttttttttttttgttttgatttttaangatttggggacggcccaaaacaatganngtttgtggatgtgaggagacagtgaagggtaaagaatgattgggattagagaatattacatggaatacatggaaagagaaggtgatgatatttgcaataacatgaatagtagaaggt

SEQ ID NO: 31833 - DNA, 398 bp, Oryza sativa
  unsure (1)..(398): unsure at all n locations
  Clone ID: uC-osflM202098b05a1
agttgtgaatttgatngatttcggcactgctcaaacccataaatattcatacaaatcacattccattcttgtgtaaagatcaatgcacattagacccaatagttgcacatctgtcacacgacatttttttcataggatcaagaacatgaattctgcacataaacaggctttttgctttagccttgggaagagggatgctgccgcgagtattggttcaccagcaacagtatacatgactgatcaatctactaggttgcctctgcagagagtatcttgagctcagcccaccagaaaggcgagagccggggcgttcttgcctccggcgagatgttgagagcttgtctcagtttgcgggaggcgtctctcatcgttggcctcttatctgagtcgggatcaat

SEQ ID NO: 31834 - DNA, 534 bp, Oryza sativa
  unsure (1)..(534): unsure at all n locations
  Clone ID: uC-osflM202098b06a1
acttgttnntttaagngnggatggcgaggcccacaacatatgtatcgcctggtttcagttagaacacaagcacaaaagattacatgttttgctacgattagaacaaaaaacttagcataggcaatgtctgctccccgcaataaccactgcatttgtatagcaaagcattcattgagctaactcaggttattgtatctgtactgttcaggtagccgataacctgtcatgactatcttgtctgcaaacatcttgccggtctttggcataatatgccagtgcattggcaggttaaaatcctttactttgaggttgcttccctggtcaataaatgtgtacttgtttgctgaatggatcaaaaacttggcgtgctcttttgatggtataatgccatcccagagggaaacttgattcaaggcattttggggagtctcatattcagctgtgacaaaaacaaagacctacaaacattcaatgaagtatcattaagaaagcagcaacaggaaaaacttctttagtatcgaaaagagtttagat

SEQ ID NO: 31835 - DNA, 315 bp, Oryza sativa
  Clone ID: uC-osflM202098b07a1
agggggtgggggaaccgccccattccattatattagacacactggatatataactaataaacttgaccggatatgatgagaggcacaggaactgcactgctccatacggggtttgtgtgcaccatataaccataacggtgcacgaacgggcttttatacaacatacttaccaatggaacgcgtaagaatacagtaaaggagggcgcataacatgacaaaaagttgcagcacgctagcacgacaaacacggaattgctaaccacactgttgggggagaagagcaatctaatggagggacttgatctgtgccataca

SEQ ID NO: 31836 - DNA, 422 bp, Oryza sativa
  Clone ID: uC-osflM202098b08a1
caggagaggggggaatgccctacaccaatagcgactaaacaacaaccagaacacgtatttattttggaaccgggatgaagaatctgattaaatttgaataaaccgaacatatgtgtccaaaatcacaagtgagaaccacaggtagcaataggtattacagaatttgagtagaagaaaacgataaccgataggcctgatgaaaactttgttcactctaatgaggaagcagcaacataaagagcgaaacacgcaggaggacggcgagaacagatcctcttggcttaacatccttgggtccgaagaattagaagcatttcctgtgcacaatggatgggccagactcgtagtactcagccttggcaatccacattggccggaatgcgctgagagatgccaagatggaccgttcaatccagacactg

SEQ ID NO: 31837 - DNA, 403 bp, Oryza sativa
  Clone ID: uC-osflM202098b09a1
agggtattgcccctttcaaatagtaaaattttatgggttaatatttagtattacgtaaaagatgggatgtaaaggtttttcaatggagtacaacgcaaggattttttttaaataatagaaaaagtatcagaggggaagcagttgaaggaaaaacaaactggttcagaagaacaccgtcaatcaatgatagtgtttgaggaggagaaaaaaaataaggtgaggagaaaaaaacatggagagcagcataaaagtatggaggatgtaggaactacgcggggtgcaagaatatttggttcggggggctacttatgggcggaaggaacaactggtgatgtgttggagataccctcaaaaggtggaggatgagatttggtggggaattttgaaggagaagctttctaaa

SEQ ID NO: 31838 - DNA, 412 bp, Oryza sativa
  unsure (1)..(412): unsure at all n locations
  Clone ID: uC-osflM202098b10a1
atttttacgattgttgatttgaggggntgcggaagagcacctgcacaacggcgtggagggggaggcgattgatctgcacggggtacatggtcgaatccgacgacaggtgattggagttgatcaaaccgaaaagtctcttattctcaacataagataaacaccggatgctctttgagatacatgtatatggcgcgggatagcccgtacagcacggaccgagttgagaggggaaccatatcagtgagggcgatgaacttcgagagagggaggaagggggacttagcaatctgagccagataccaatcaaccaggttagtgatagatagcttgaatctgcgggagacaccattgaaggagtcaacatgaccatccatggattactgatcatcatcgtctggtagcttggaagcat

SEQ ID NO: 31839 - DNA, 331 bp, Oryza sativa
  Clone ID: uC-osflM202098b11a1
ggggaggcccaaaacaaatgttttgaaaggtttgaattatgaaacataaagaaaagaatagaggtgaagatatgatgggatcgaatgagttaacacagactatgaatgcacccggaaatgagcattagaatccgcaaagaagagtgaaaagtgaattgggtttgggggatgtattcagggtgattgagtaaacgtaaacgtagaaagatggatccgttggaaataaattatgcagaattagaggggattggcgggagcgttgtcagaactaaagggaactgggagatgtggatatcctgacttaaagatggtgagttggggggggaagaga

SEQ ID NO: 31840 - DNA, 536 bp, Oryza sativa
  unsure (1)..(536): unsure at all n locations
  Clone ID: uC-osflM202098c02a1
cttgtgngttttancagntgcgaggatccccaacatcagcccatttttgcccacttgcccactatatatattcagctgctaggataaaaaacatgagagatacactgaatggcatcaaacaaataattaataaggcctaatttgctgcccatttaccattcgtgattgaatcaatgccgcttatatatggattccttccttgagattagctgaattattgtgggattgggaggcaccaggatgttcactgcttagggtaccggcttgaggccgaagcggcaacagatatgtttcatgttgagctgctctgctgggatatgaaagataggtctattcagctgtgtgtgaccgtcctggcttgtgttgagctcggatgtgctcagcctggccagatctagtgttttggtgagctgtgagtacctttctagcaatctatgccgcaccacgcgatatgtttgtgcatgcgccttcactactccgtgccaaattactattttatagttcggggataattagaatacctatattttacatgt

SEQ ID NO: 31841 - DNA, 482 bp, Oryza sativa
  Clone ID: uC-osflM202098c03a1
acgtgaacttatatttccattagatagccgcaatacaaacggggacgcatatttccattacatagctcccataaaaattacagagcatgcatgtaaatataccaaaagggaagagcaaactacgatcattagatctgatgctttatttgagctaaatgatcatattaacatagagagcctcttcatctgtaccaactgaaactgaaaacgcatggataaagcataggaatcaaagcctcgactccaaaaaggcggccacaggtagcacatgatttgttgctaccgggtatccacgtgacgtcgtgacctgcgatgagcatcgcgctacacttggtacgccattccaacttctatcagactaatatgtggaatgtgcagtgtgaccgatggacctctgcagttcttccggaggaaagagtagccaacatcaattgcaaatctcttaaaaaaactagaggtcttcctagctttgatatagacat

SEQ ID NO: 31842 - DNA, 292 bp, Oryza sativa
  unsure (1)..(292): unsure at all n locations
  Clone ID: uC-osflM202098c06a1
gaacagnnaaaaacaaancaattgaagaggaaangnngngagacnagaggaanaaaaccacacaccccgcctaagaatgcacaacggcatgacccctgttttacccaacaaagatgatctaattagccaccaaaaacatgattttgggaaagaaaaaggaaaagaaaatgctcaagaggacaagtttccagcgtttggaaatcggcctttgagcctagagcttggggtcgccggctcgttagaaatcgagcgagacggggagcatcagggcgaacacctgtctcgccggggg

SEQ ID NO: 31843 - DNA, 227 bp, Oryza sativa
  Clone ID: uC-osflM202098c07a1
tagaacttgagccacaacattggtttacctattacagggcttaacagaaactgctacaaaatcacaaatcataatattgcataagtaaaaaatgactaccaaagttggcgaaagccttcatgttgcatcgtatccaggtgtccactcacttgcaagcaatattgtttggggaataatattttgacaaccaatctgatgggcaagaacgagtccttatttgagggtgt

SEQ ID NO: 31844 - DNA, 343 bp, Oryza sativa
  Clone ID: uC-osflM202098c09a1
gccctatacaaaaaggaagttatatttttatgagatatttcttaggttaatagaggagattgaagttaatataacagacgggaagaggaaactaggatcattaaatctgacagattattagaggtgaacgaccgtaataacatacagagcaacttgatggaaaacgcagaatgaaactgaaagggcagggataaagcataggaaacgagaggagggaaatctaaaagaggatgggaacacgggtgaggatgagcagacggtaccgaagattaacgggacgtcgtgaccagagataaaaaaaatgcataaaatgaaacggcattcgaactgatatcaaactaaa

SEQ ID NO: 31845 - DNA, 337 bp, Oryza sativa
  unsure (1)..(337): unsure at all n locations
  Clone ID: uC-osflM202098c10a1
gagcactagcggtgcttcccattcctaatgtntgatggtgcgtttaggttggcacctccggttaagttgatcaaccaaaccccttgtgacagaccttgcaccacgtatcacctctcctcttcacaacaaaacatcaaacgagcgcagcttcaaagtataaccatgcaacgcgcgcacacgcgtacatataccagagtacacaccaaaaccaaaaaaacgagcctagcaatactacccattttagcacccaactttggtcgtgccaactgcccccaagtttaaccgcgccttgtattcatatattcatagaatggagggaatgcgacggcgttcgatg

SEQ ID NO: 31846 - DNA, 278 bp, Oryza sativa
  Clone ID: uC-osflM202098c11a1
aagggaattgcgacaaggcccatccacagtgagaccgggcacaatacaatacattattactgaagttatggacaccgatatcattggaactttatagggcaataaccgaatttgtatttgcataagttttaccgttcaaagtgcatacatttaatttgagaaaatccggggtacagataggactctgggtaatacgctccatatgagccttagcaaagaaaactggttctcctgatttatggagaattcgactggaatgatgcaaatgagggttaaat

SEQ ID NO: 31847 - DNA, 530 bp, Oryza sativa
  Clone ID: uC-osflM202098d01a1
gacgtgcaaattttattttatggttaatagccaaaatgatgcctatcgaagtggcacattgacaatcacaaacattacaacactctccacgaccggtgaacacattagcatcagactagattttttttttcgttgagagaatcgatagtacacgatgatacagtaaatttccaatatcccccatgttgtcctaatggttcttgctttgacaaaaatcaggaacagatctcaatttgcaactaacttgaaacacgcaacaacagcggtcaccggtgaccccattcttctccccctagtttcatcggcgttcacttttatgcaatttcgcttgaccttttgaagtgtgtacaaagctggaatatctaggtaatattaagaacaaccgagtcttcacttggtgtagaggacatcctcccatgggtggcggtagagtggttgcttgagcctcttctggtcaaaggtgtgcccgatgagaccaattgaacgcgcaagcacaaagagtccattaagggaaccaatctcaacaatct

SEQ ID NO: 31848 - DNA, 196 bp, Oryza sativa
  Clone ID: uC-osflM202098d02a1
ggcaaaaaccccttttaataaaaacaactttttaatatgaagaacctataggatcacattgaccagaacccggccggccacagaacaagatttttggagtaagaacgtatgtgtagaaaaaaaaataggctcacacaactacaaaataagaatcatttccggttagccggggatccggggggggcataaatccgag

SEQ ID NO: 31849 - DNA, 458 bp, Oryza sativa
  Clone ID: uC-osflM202098d03a1
gagaaagagggagaattttttattttattgaaaggattttaaaaaaaatttaattctggataaaaaaaaaaattaaccaaattttgtttattaaaagatgggggggggttaaaaagggaaaaggtctaaatggtgggctttaaaagggaaatttctgtaaatgggaaaaaaattagataaatttggggagaaaaagatgggaggaatgaaaaaaaaagggggctcttaaaataaaaggattaaaaaaaggttgaagaaaaaggttttgtagggatctgggaggggggtttttttcgtggggaaaaaattcatgggtggggtgggtgttgtttatggttttagaaattttttaaagtttttggattttaataaattggggaaaaaattaataaataaaattatgggtggggaattaattataaaaaagggattttaaaataaaaaaaaaattttttata

SEQ ID NO: 31850 - DNA, 446 bp, Oryza sativa
  Clone ID: uC-osflM202098d04a1
gtaacatacacatttaacagttttccctaatactccttcctccacattacattgaactggataatatataggaggcgcagtattttccagcatccatgattaattgggttccatagagatcttctagttgcctgcgtaactttcacaagctatatcttaaggctctccagaaatcgtgtcccctcagaaagcgccacaaagtttcccttgatatactcaattctttctatggacttgtagcgtgcctctgctccgttgagcttgagcacctccgggatcggcttcaccattccatcgacataggcttcatgaaatgtcacgatggtggttcggcctttctctgcgtccgcgagtactctgtgctcgacgctcttgtacgcgccattggtaaggacctcgagtatgtcggcgacattgatgataaagtgcccgggcgaggtcgcact

SEQ ID NO: 31851 - DNA, 502 bp, Oryza sativa
  unsure (1)..(502): unsure at all n locations
  Clone ID: uC-osflM202098d05a1
ggtgtgnattcaggncatactgtttattcacatatcactgatgctacacaggccactaatttctttacaagggttgcttgccagccccgtgtggcgaggccaatacacaaaatcaattacacgagtgacatacaagtaaggccaggcacaatgcataatataatcacacgaaaatcgcatttgctaggacacgatatgctcttcttctatgcaacctacagaagttgggtgccaccaaatgggttggcttgctgatgcccgttgttcgccattgggaatgggccaaaaccagaatccaaaaatgggtttgttgcagggcccatgcccacatgctgcggttgcattggtggtccaaagggattcgcttgcatcatagttggaatctgttgatgctgctgagacatggcagccatttgaaccgatggtggaggagcaacttggttcgacattacgaaaggatcatttgacatgaacgggttgggagctgaagaaccatataact

SEQ ID NO: 31852 - DNA, 360 bp, Oryza sativa
  unsure (1)..(360): unsure at all n locations
  Clone ID: uC-osflM202098d07a1
aagaggcacaaggacaaacacaaacannacaacacacaccacgaccggcgaacacaggagcancagacaagannngagggnccgccgagagaaccgagaggacacgagganacagaaaagccccaagaccccccaggcgggccaaagggcccnagccccgacaaaaancaggaacagagcccaannngcaaccaaccggaaacacgcaacaacagcggncaccggngaccccagacgacacccccaagaagcagcggcggccacnnaaaagcaaacacgcncgacccaaggaaggggggacaaagcaggaaaanccagggaacaaaaagaacaaccgagncancacacggggaagaggac

SEQ ID NO: 31853 - DNA, 357 bp, Oryza sativa
  unsure (1)..(357): unsure at all n locations
  Clone ID: uC-osflM202098d09a1
agggatattccgctaggcctcttcccaaaaggaaangaaatgtttgcagggatagttaattatcatgggaacagaaaagaatttatatctatgagctattgtcgggctcaacagagaggaccggaacaagatgatcatccgagtgcaaccggtatcaaaagtgtgccaatcacaagaacgggggatttattcatatgttaacaccgaactgaacatcaactccaccagcagctacccaaccatgacagtggcctggatttagaccaccgctacgcaaatgcaagctggcccccaatttattggcccatgaattgaatttacaagagaccaccggacttcttaaatccgtgaacaaat

SEQ ID NO: 31854 - DNA, 288 bp, Oryza sativa
  Clone ID: uC-osflM202098d11a1
gcgttatgctcattccactgattttacataggttattaatttctatacaagggatgggaggaaaaacctagtggcgaggccaaaacagagaaacaattacacgagtgacacacaaagagggacagaaccaagggaaaagataaaaacaggaaaattgggggcgctaggaaacgatatggtcgtcttgtatgcgatgaacacaagaagggggaaaccaaacgggtaagattggtggaacccgcttttaaagatagggaaagggggaaaaaaggggccgaaaaaggggaa

SEQ ID NO: 31855 - DNA, 463 bp, Oryza sativa
  Clone ID: uC-osflM202098e01a1
aggtggaagacttttgcatctcagaaagcccggcaaaccctcctgtcctcaattgagcaaacatcaagcacattttcagtttgcgcatcagctcaactgctcaaaccgaaacaaacacaaaaagaaactgaagtagtgtactagtggtgtttccatgatctgggcttgggttccaacacgagggacgcgtagatcagctcgttccacgcgtccggcacgccggggaggcaccagtggctgcaatcctgcttcctcctcgacaccttcttccccgccgccgccttgccgtacaccgacgggtggccgtccctgcggaagttggtcagcttcgtcacgttgagcagccgcaccgggaaccgcatcctcccgatcacctcctccacgatcctcatcttccgcgggtagctgccgatcaccgcccctctgagcgtcggctccctctccccgctgcacgacccacccg

SEQ ID NO: 31856 - DNA, 495 bp, Oryza sativa
  unsure (1)..(495): unsure at all n locations
  Clone ID: uC-osflM202098e02a1
gccattcactcctgttcatccaaatgtcacaggtaatacctctatttggcccaattgggctggcgcatgtacactcggcaaagccccgttgtgtttctagtacatactatataagcgaattatacatatatcagacgacgatagatagagagatgatataacgccggtcgacgatggatggatcgagatcagaggcaagcgagggcctggagcgagcccttggagatgcccttggcgttggtgcagacggccatggtcttgttgtccttgccgtcgtacttcaggttgacgtcgagcagctccatgccgctgcagggcagctggtcagagcagagtaggctgacggcctccggcgtgttggaggtgccggtgatgttgcggaacgtcacgttcttgatggtcaccgtcttgctccccttcttctcggggcnagccttttcggggcagtacttctggtccacgatcacccgggtggccaccccgtccattcgaatg

SEQ ID NO: 31857 - DNA, 132 bp, Oryza sativa
  unsure (1)..(132): unsure at all n locations
  Clone ID: uC-osflM202098e03a1
ggagaaaatcggggtggcctaanacccaaaatttttaaggattattaaggtggagggtaagaattaggaaaaaggaaaaaatttaatgattttcacacaatgaaagaggcaagatacaaagaacgggagaag

SEQ ID NO: 31858 - DNA, 430 bp, Oryza sativa
  Clone ID: uC-osflM202098e04a1
aagaaaaaggggctttcccggagaccaccaaatacaccagccattacatctgcaagatatttcttttagctggatggaactcactccacgtgcttggcaaatacttattccaacattttctggaaccatatatatatatagtttccatcatgcaccagatgggcttatttttcatacaaaaatgatcaggaacaaaagagggtctggtacaaacagtggtttgtcccatctccctgttgacgagggaaatcggaagttgtaaaaggccccaacaaagacagcacctacaaaggcttccgacctcaaatgttacaggaggcagaaacaattgagtccgtgaagctgaattgctgcacgggggttatttttccctgtttaggcttaagaagaacggatggcggacattagctgccgaggcatgaaatagaat

SEQ ID NO: 31859 - DNA, 454 bp, Oryza sativa
  unsure (1)..(454): unsure at all n locations
  Clone ID: uC-osflM202098e05a1
aaaanctactggaacaacaatggaccgtactccttgcagactctcaccaatacagtcagtcttcccctgtagatttcccttttgccacggccaaactccagcgccctgtaaaatttccgggcacactaacaaaattgctgtgtttagagcaccctaagctacaattatttttgttgctagcttttagcttctaatgctgactacccctggttgctactacatagaaaggaaatgccaaagtggcctctgatcaacccctcctatgatgatgcctcttcctgcgtgggggtttctgaagcatggacatgtgatccatgtcttggggatctcttgagtcggagggagctcctcctgtcagccagttcagtgcctttcctgcagcatccttttccgcaagcttcttgttggcacacggctgccctacaaactgcatgccattgaactccacggtcga

SEQ ID NO: 31860 - DNA, 202 bp, Oryza sativa
  unsure (1)..(202): unsure at all n locations
  Clone ID: uC-osflM202098e06a1
aggngcatacatacatgcactggtgaaactgcaactgaagggacagtgcgtgggtactacaagtgtacacatggtacgctggttggcaccatatggaccgagttggtgagctaacttgccggggacgaagttggcggggtatggccaggtgttggaggggacggggtaggaaaccaggtagaagaggatttacatggggcct

SEQ ID NO: 31861 - DNA, 175 bp, Oryza sativa
  Clone ID: uC-osflM202098e07a1
tcaggaacggaccagtgtgcaggaaaaccatgcgataaagaacatgtaggaataggcgatgcgactagacatagagggatgttagaaggacgacgaacggaggatggatcgagatcacaaggaggtcagggtcaggagcgaggcctcggagatggccatgggggaggacgcatac

SEQ ID NO: 31862 - DNA, 427 bp, Oryza sativa
  Clone ID: uC-osflM202098e08a1
attcaaccatggcggcgtgccccctctcaaacatatcatgtttggctagggctacatgaaagagacaccaaacgtgcacatcatgaataaatctaacggaatccaaacaacattatcaggttatttgaatcgatgatacagcggttgacaccttccttgatcttgggtcaccagcttccaatgaaacacctcggggatcttctcgaacaagaagagggagaacaccagctgagctccaagctttggctacagcatcacttgcttcacccaaaatcactgagaaaactgcatcaaagccaccggccccaggaactccagctagtagaacaccctccatattcatagtggcatccagaagttgagtttgtgattttggctcaattggaacaccagctgctatgcccatctctcgcatatgaagccttat

SEQ ID NO: 31863 - DNA, 376 bp, Oryza sativa
  Clone ID: uC-osflM202098e09a1
acgagacaatgcgaatgcccgagcaccaaaatattacaggactataaccctggagggcaataaccaggaaaaaggaaaaaatctaccaccacccacacactgacagcgccaacacacaagaccgggagaaggctaacaccggaccggccgccgctaagcatgactgaccaccgctagaccgacaaaggaacgcagacgagatcacctaaaagaacaccctcacaaccaacgcaaagccaactcctagagtgagcttgcaccaatcgaccgagaggcttcggctaggggatgccaaaacgacgtcttcaagaagagaagcgatagaaaaccggcgtcaccgtacgtgggggctcaaagaagccaagactgcctctcg

SEQ ID NO: 31864 - DNA, 382 bp, Oryza sativa
  Clone ID: uC-osflM202098e10a1
agagcagggggaacaccccattacctttaatttggggaaaaatcaacactgtaccattgcaggatatctccaaacataaatgatactagtggatagttgagacgtgaaggacatttgcaaaccctgatgctagtatattctgaaccaaccagaaatgtgaacatcaaaaccaggtaaaaaggactccatggaatctcagcattcataacttaggtaaaaactcggagaaactaaaagtttccaattgcaaatacaaagattggcctacgaggagaagcaaaacagggccgggatagaaaaccatgacctcagaacaggggtcaagaaacatttcactacttgtggtatctatgatcaggcttttgtctcctgagctaccttt

SEQ ID NO: 31865 - DNA, 230 bp, Oryza sativa
  Clone ID: uC-osflM202098e11a1
ggggttagacatttacaaaattttatttattttataaaaaaaataatgataaaataggtgaagaaaaaaataaaaatatggttaataaaaaaaaaaatggaaaatatgaaaaatatggaaaaatttgagtgaattatagggatataagatataattaatggtataggaagataataaattgaaaagataagtaaagttaagttttaagaaaaattagggaaacttaaaag

SEQ ID NO: 31866 - DNA, 311 bp, Oryza sativa
  unsure (1)..(311): unsure at all n locations
  Clone ID: uC-osflM202098e12a1
nnntnnnnagtgttagattgaacaattaagcgcttcaccattagcagaaacagaaggatatgtaactatctacagaaatgatatataggagctaacattgcttaggatcattaatagatgcaggaatctacaatacaatcgcgcagggacacattttgggagctagtacacgtgctgcaacgagaactagacatcgcttgctgagcgacaggagcagctagtaacccatggagttgcagattaacagcatcgctgaagatgtggatcatggccaaaaagattcttatcaacggcttggttgagactttcac

SEQ ID NO: 31867 - DNA, 436 bp, Oryza sativa
  Clone ID: uC-osflM202098f01a1
aaatcctgatgtggggttattacccttaacacttattatgggcctttgagatttaataggataagttgggcctagcccaattattctaacactattgactatgtcttactgaaggaatacatttatctttacaccagttcctaatttctttggcagtttggcactgaaaagatgtgtcagttacatgcattctgtcattctgatgattctggtgatctggtttgataccaagcagcacattatgctctgaaactgtgacagagatagacattcaccttatccatatatatgctctgaaacgtgatgtttgtataagtttctgttaatcctagggtaattttttccttcttatttgcacatgatcacctggtgtcatctgctgctgcactgtcatcggctgtctctttagaaaccatattttgattcagtacaaacc

SEQ ID NO: 31868 - DNA, 459 bp, Oryza sativa
  unsure (1)..(459): unsure at all n locations
  Clone ID: uC-osflM202098f02a1
gcgtaataaactgcaccaagttgacaataccacaaactggagtttcaggctaagttacattagttatttcgcgctctcacctcaaccgtgacaacaacgttcatcgcaacagggaaaatctagcacgcataaatagaaaaccgctacttgccaactacgtgcttctcatataaggcgacgatgtccttcttgttgggattcttcagttgcaggagttgagcaccaaacccatgcttagtgagctcctgcttcagcttcagcacagtgaacttggtgtagtcttcagtctccgtctcctgcgcttgctggctcccgttgttagtgtcttctcctacaaatacagagccaccgtcctcggtgtgattgctcttaaacgggctcgtcgtgctttttgatcgtttncttcgcctgccagtgttgtcatcgtcgatatccatatcatggacagactcagtagct

SEQ ID NO: 31869 - DNA, 461 bp, Oryza sativa
  Clone ID: uC-osflM202098f03a1
gtgactaatctaagatggccgcatttacacaggaacgccaaaattttagatacatatgctttgttttgagcactaaaatactaactcaattacaatggggatgaacccaagaacatggcctgctcaaagcagtgctacagcctcttggagctgacatctctcatcttcccttttcattttatagctagtttcccgccagaacaaaatggttcaagtctcagttcttgattgcacacagccacagaaaggtgccctcttctttttcttctgcgcaccgccgcgcttctccttccttccatacagataatccctcagaagaacccgagtgcgcttatcggagaccttgagcctcctgtactcatgctcctcttcaagctttagcaggacatactgtatcttctgaagttccagttccaatctccccacgttttccgatcctttctggacctgtccggatattt

SEQ ID NO: 31870 - DNA, 429 bp, Oryza sativa
  Clone ID: uC-osflM202098f04a1
aaaatatcataagtcccttcatgtcgaaatgcaatttaaatcttaagatataaatgcaatggtaatataatatggttagaggtaacaaccaccatggcatttgtgtagatcaaaagctcgtgtatcagtaacatccccaacaaacatttgacaatgacaacggtaagaaaaatagaacatacgcagaccattatttatcttgaactgaagatcaatgcaccgaatggaaatattgccaatataagcaccaattggactggtatatagacactgtggcattgatcgccttgaagacaaacggaaatatgtagcgaactcatcatcgctagctagtagaggtgcacttggaaccaagctagcagagatgactcagttgtgcgtacgatatcgatatcggtttggcgatggtcttccagaatgtgcaggcat

SEQ ID NO: 31871 - DNA, 201 bp, Oryza sativa
  unsure (1)..(201): unsure at all n locations
  Clone ID: uC-osflM202098f05a1
aaaatttatgcgannatgtttattgggagaggtagatgatcacctagaggttttgtttaccattattatttagaccaaggatacgtgccaagaacagaacacatgcttacaagggaaaatactaatagcctggttggttgttttacagaataaccaaatgataaactttaaggggaaaaaatggcacggaatgaaaaacaa

SEQ ID NO: 31872 - DNA, 406 bp, Oryza sativa
  unsure (1)..(406): unsure at all n locations
  Clone ID: uC-osflM202098f06a1
aacttgaaatttgaatcgntttagtgttgccaccgaagcttccatccagtacatctcacaagtaccttgttccagaccaaatacatatatattagcataaagcaaaagagggttgcgttttccagcgcacttcaaagtgccagcttcactcgttgctgggttctccgcgctccagcttacaacggaagcaagtgttattcaccgtggatcgctatctaatccttattattgcataatatagcgtccatcttgatgagcttcgtcttggcgcatatcgtatttaggagacagggctagcagnaatgccccatatttcctttgcatactgagcgatagtacgggcgctgcttgaattgccacttccagctgtgttcagtatagacatcttgatccattttttcttatc

SEQ ID NO: 31873 - DNA, 386 bp, Oryza sativa
  Clone ID: uC-osflM202098f07a1
ggcggctatcccctttcacactttttttaggttaaaaggcaaaaaaaatccaatttatttagattaaagggagggcttggccaaccccattatggaaaggcttttccgaaaaaaattaaaaactgtaccagccttttaatgggtaaaagtaaatggccgaaagcaaatgaccgaaattaagataggagtccattaaaaagggggggaattcaggcacttcatagtcgatagtccgcttagccggggttctggattccaagaaaaaatcccttcatggctgggatgggggggtcctccagaacgggggggtactaactggaggggtaaaagttcaccagtttcgggggcggtttaaaccaggccatgatgttcttgacatggggggg

SEQ ID NO: 31874 - DNA, 419 bp, Oryza sativa
  Clone ID: uC-osflM202098f08a1
aaattaacaaatatacggacaaccccctgatcaattatcattggtaaaactttttctttccatgtaaattatctgcaaagcaagaaagtaacactcccaagttacaacagcacaccatccatatatccatgcaggcagcctgtttgtgcccttgtgcagatgcatttcatttatacaagtagaaggcactcaaatcagccaccacatgaacacacacatgttccatcatcgatcgatctacacatgcatcacccggtcatgcacttacaaacaaaagatctacttgaagaagtactggaggtcgagcacgtaaaggaggaagtaggcccaaaggacgccggagatgccgccgaagaagaagccgccggtgaacttggcccagccgtcgggggtctgcagcttgtccgcctccttcttgc

SEQ ID NO: 31875 - DNA, 422 bp, Oryza sativa
  Clone ID: uC-osflM202098f10a1
cgcgcaactccttaccaatatgttttgacaacatttctcccgacgcatgctcattgtggcagacgcagctgaccacctagagcttttagttcaccattattatttagaccaagcatacgtcccaagatcagaacacatgcttacaagcgaaaatactaatagcctgggtgggtgcttcacagaataaccaaacgacaaccttaacagataaaaatggcacgggatgaaaacaaagcagcgaatcgtcaccagaaggcccattttacttatcaaacactccatcattctgctccaacgcatcctctccccaggggagaagattgcccagtttacctttcttaacaggagcagggttcaccatattctcagcctcgaagcagtgcagaacagatttgggcgacccaacagcaacaggtacgttt

SEQ ID NO: 31876 - DNA, 417 bp, Oryza sativa
  unsure (1)..(417): unsure at all n locations
  Clone ID: uC-osflM202098f11a1
aattgttattttgaanngnttgggggcggccctaaaccttacagcatgcaagttttaaagcgcattgaaataaacgagttttaaacgactaacattggggacaatgagggcagagattaacggtgcatgcaaagggggcaatggccgtgggcaaaagttaatgaacgctaaaatttataaaaggcggccgggataaccaccacttaaaggatgctaatttttttttgggggtagtcttgggcaccttgggaccgggtgggtcctggttcttcacgttcttgaggaggccaacagagaccgtttgcctcatgttacgtacgggaaaaggaccaaagggcgggtgctgatagaagggctacacaaccatgggcttggggggaacaatttgaaccataccagcatcaccgttgttgagga

SEQ ID NO: 31877 - DNA, 357 bp, Oryza sativa
  Clone ID: uC-osflM202098f12a1
aaaaaaattgggttgggccaacgcccggctaacaacagtttagaacagtccaaagagtcaacccacataactggattttgcaatgcaacggaaccggagtgtactgtccaaccaattattaaccagagaactacttattaaccaggtactaatagctttatccatcgacgttatcgagggttgtaccctgggggccgacttcctaatagtacttttgaagggcagccaagtcctcacgggcttttgagaattgacctttttccatttcctcaccaaaggaccaggggacaaacccacgcttagcatacattaaggcgaacttgtgggcgatgcgcgagaaaacctcactaacagcag

SEQ ID NO: 31878 - DNA, 390 bp, Oryza sativa
  Clone ID: uC-osflM202098g01a1
cacatatggcgccttcacattgaacgagacaggattacagatgcggttacacaacaacctgaaaaaaaaaaagaacaagacaaactgatagagcaaactgcacagctctcttgcagtttcagctgactgaaaaaaatgaaaaaaggataaaacgccgaagatatgtgaacactaaaactctggctgatacaccgatatcactagcaacttcgcaagtcgatttcaaccctttcatcatctacccatgttgtttttcttccatggagcaaccaggcactactgatcaaagacacattaggtacgcggcggcggcgcccacaacgggcggaaatggaggtagatagcgagagaaagacccccctttaatggccatgatctttatcttattgc

SEQ ID NO: 31879 - DNA, 469 bp, Oryza sativa
  Clone ID: uC-osflM202098g02a1
gtaagattgcccgatttaagcattatccatcgccatctctggcgttgttcagagacatcacgctgacaagtgacaactgatatggaagagcacgggatagcagtcatagcacgcagcaatggcgatggggatggaggagagaaaggatcgattactacagctacaaccaggcggcgtccttgatgggcgtgacgacggccttggtctggaggtagttgcggaggctgtagacgcccttctccctgccaacgccggtcatcttgtagccgccgaacgggacggccgcgtcgaacacgttgtaggtgttcacccacaccgtgccgaccctcaatgcccgcgccagggtgttcgccgcgtgcaggctctgggtgaacacccccggcgtcagcccgtatggggtcgtgttatgccttcgaaccacctactgcaccgtgctgaacttgaggatggactgcaccggcccgaatat

SEQ ID NO: 31880 - DNA, 383 bp, Oryza sativa
  Clone ID: uC-osflM202098g03a1
gggttaggccttataaaatattttttatttttttttttttttattttttttttttttttttttatattattttaattaagaggaaaaaaagagaagggggggataaaaattttttaaaaaagggttttttaaggtgaaaaaaaaaagggaggggagggtcttaatggttttaaaaaaaaaggttttgaaaaaataaaaaaaaaggggggggaaaggaaggaaaaaggaattgggttaaaagtggaaaaaaaagaaaatttgggacaaaggaaaaaatggggaaaaaaggggggaaaaaaaataagggggtttttaaaattaaaaaaaaaacttgtcaaaagaaattgccccaaccggattaggggttgatgttgggttttgtt

SEQ ID NO: 31881 - DNA, 492 bp, Oryza sativa
  unsure (1)..(492): unsure at all n locations
  Clone ID: uC-osflM202098g04a1
ggttgtgtgcatactcttaaatccatgcgaccgttgataaatgaacgtagtaataatgttaggcttgtcaaccatgtacatccttagttatcctacgcagctagccgttgctaattaaaacatatactaccgttcaaaattgaggaaacaaagattttgcacaaatttgagatctgagcctactgcttttctacttttccccaattacatgttgcgcgcacaattatgcacaaatgcacaccacactaacacacacaagcgcgccccccttaacacatactcacaggacctatcgtttttctgacttcactgggactcccttgtacatgcccacacgctgctttaggtcatctcggcgtggcctggcgaccgtgttgtttggatcaaataggagtacctcctcgaatgccttgagcgcagacttcagatctttcttttgctcatatgcgnccccgaggttgttccaagctgtcacatagcctggctgaagct

SEQ ID NO: 31882 - DNA, 475 bp, Oryza sativa
  unsure (1)..(475): unsure at all n locations
  Clone ID: uC-osflM202098g05a1
aatgataaatagcccttcttagtttttgcaccaaccagggacacgaattggacaaaagaagaagagggagaggagctgaagaactcaacacaaaatgcactaagctcaaaccaccacctcaagctgccaacgccaacgccgcggcgaccgtggcggcggcggtaacccacctggcgagcacggacggcgcggcggcggccttgtccgcgacgtcgtccgcgggggtgccgtcgggcgagtcggcggcggaggagtcgtcggagggggcggcagcggcggaggtggtggacggcttcttcttcttggncttcttcttggggccctccggcgcgggcgccggtgccaggtcctcggtgaccttgaagagctccttgggctgcaggaacttggagatggcgtagacggcgagcgggtcggcgtccttgacggtggcggtgacggaggccgagttgaccttggtgtcgagcaggacgct

SEQ ID NO: 31883 - DNA, 484 bp, Oryza sativa
  unsure (1)..(484): unsure at all n locations
  Clone ID: uC-osflM202098g06a1
agttcaagaaagctgatatgcagcctacggntgcacttntattgttgngtagttttacaagtgtgtgatccaaaaatatagttctactttgcaataataaaaaaaaataaaagaaccaatgctacctcatcatacatatgaagaaaataaatcaagaaaggttaaggttacaaaagaacgccctacttatagaactgtgtacatgaaacacgctcgtgttatacatggaatcaccctcgaatgttcttgcagcccataggtgaaacctacagatgatgggagttatctattcacatcgatgtctaatgaagtgttccataggtggngtgattctgagtaccttcatccaggaactaccgaagctcatcatgaaacccataattattttctgtgaataaagcactgtaaaatacatatgggttctcaatcatcttttgcaaactcagttgcccatctttgtttgtggaagcctgtgttatcacat

SEQ ID NO: 31884 - DNA, 261 bp, Oryza sativa
  Clone ID: uC-osflM202098g07a1
gggaaatgaaggaagactatcttgagttatatggaagaagataagagctaggggaactgatggagatagctgtaaactgtgatagaatgttaaacggacacaatataagaaaacataggagcgggaggaataaagggggaagctagggggggataatgagcgagttaactgacattaattgagtggggattactgaccggtttaaagtggaaaaacatgtggattaaggtgaatgaaagaataggccaagaggaggagaga

SEQ ID NO: 31885 - DNA, 350 bp, Oryza sativa
  unsure (1)..(350): unsure at all n locations
  Clone ID: uC-osflM202098g08a1
agggaanaaccggagggcccaangccaagannnaannngnnnaggaaaagggaagataaaggttttacanttttacagataccacccatgcatagccattttccaccatcatgcacgttgatacattctacgaggctcgtttcctaatcatctgaaacaatcgatcattcagttaaactagtcccctcgtcgcccgctagctgctttgcaccatcataaaaccaaagattaatgctacgattaaagctgatgatgtgatcatcacgtagggacgctccagactgctccctggacttcgtcgcaggccctggggatgagcttcaatgctcccccctgacttgcagacccca

SEQ ID NO: 31886 - DNA, 415 bp, Oryza sativa
  unsure (1)..(415): unsure at all n locations
  Clone ID: uC-osflM202098g09a1
caggttggctgctcttgttttttttgctcctccgcggctcacgccccacccctgaccgaggacttgctcggcggagaagcgcctccaggtgtcgcggcacatcatgcgcctcatgaggtccttggccgccggggacacgccggcgaacagcctaggcgggaacctgacgctgccacggaggacggaggcgagcacctcggcggcggtctcgccgccgaaggggagggcgccgccggagaggagcacgtagaggaccaccccggcgctccacacgtcggccttctcgccgtactccccgccggcgacgacctcgggcgccacgtagtggggcgtccccacgaggccctcggcgctgccgncgctctccccgacccacgcggccgacccgaaatccgcgagccgcgcgcgcggtgtg

SEQ ID NO: 31887 - DNA, 451 bp, Oryza sativa
  Clone ID: uC-osflM202098g10a1
ggatgaaattacaaatcctttgagcacactcatgacactaaaaggggtacattgtgtaaagtttaatccaacaaacacatcacaacggacagattcagggattcagtaaaacattgccgagattcctactgatgctattgcttcagtgacctacaaacaaaaatgcaggaactgtgaaagcatgaatccatccctaggcatcaagacttgaacatttgaaacagctaaacggtagcgccatcattttgctcccaaccgccaagtctatcttcgggatcataatttgtgaacaagcggaattcatttcctagcttgtttgaatgctgaggcttgaatccacagggacgcacatttaggagctcaaatgccctgtccctctgaacttcccctgtcagtaacagcaggaatgagccttcaggatgtgcgaggaaagataccgtcttggcaacct

SEQ ID NO: 31888 - DNA, 281 bp, Oryza sativa
  Clone ID: uC-osflM202098g11a1
atatgtgtgttatttaaaattatatttttattttgtatttttttaattttattttagtaaaaaaggggggtaaaaaaaaataagaagaaaaaaaattaaaaaaggtaaaggggggggggaaaaaaaaaagggggggggtgtttaaatgaaacacgaaaaaaagatgtttttttttattggggtttgaaaaagaagacaaaagggggggggtaaaaaagatgggtgggaaggatgaatatttaagaagagtgaagagttataaatttggggggggggtgagg

SEQ ID NO: 31889 - DNA, 445 bp, Oryza sativa
  unsure (1)..(445): unsure at all n locations
  Clone ID: uC-osflM202098g12a1
accgngacaacggacaagccaacctcgaattaagcatcgtaaccagttaacactagagagtgacaaatgaaattacaaaattgttacaacaatatacgccagccgatcatcagagcaaccaagaaagcccgggttgctttttcatcgccactccgacaagatcacctggcctttaactaaatgactcccgtatcttacctttcctggaagtcagttcaggatggattgcaaagttcttccatcttttgtgttaggatttacgcctgcttcatgctgaagctgctgcagtctggtttccgcctacccagtactgcttcacagcatacagcaccttcttacgcaccatggggccgtcctcgtgatcgaccagcctcgtgttccatttcatgccgagggcgagcctgttcaccttcgtcaggatatcgacatcgtcccttattatgac

SEQ ID NO: 31890 - DNA, 387 bp, Oryza sativa
  unsure (1)..(387): unsure at all n locations
  Clone ID: uC-osflM202098h02a1
aaattatagngacaacggaaacgacacttataaaaagaatttatgaagagtagttacaccaaggtgtatgacagaactgaatacatgagtatactcgagaggtaagagtaaccccgtaaaaaacccaacaacaatagctctcaagtgtgattgatccaattagctaaatcaacgaaagaatgttaaatactggaaggaacgacattccatcacaggctaaaccgaatccagaacagtactaatcctaggctaggtaaactgccggagggcgcagagagacacgcccaagctgctcggaagcgtacttgctggatgacggtttagtttggtttcaggagcggaagcatgagcgttgacaaggacctttagacacttcctgaggtggga

SEQ ID NO: 31891 - DNA, 333 bp, Oryza sativa
  Clone ID: uC-osflM202098h03a1
ggcccttatcaaaagattttatgatttgttgtttgataattgtgtatgagagtactgattttattttgatagtaaggagaaaatagtcccggggggataaaatttttttaatggggggttttttaaagtgataaaagaaggtggacgcacggggggatctgtattattagaaaagagggttttaacttcacaaaaaaaaggggggggaaaagagggcaaatggtaagattggtaaactggaagaaggagcagagtggggggccaaggaagctcgggtgcatactgggggaaaaaaagtttggggttgttattaaaaaaagaaaaatgagtgtt

SEQ ID NO: 31892 - DNA, 96 bp, Oryza sativa
  Clone ID: uC-osflM202098h04a1
gaaaatattaaaggtgtaaaacttagacttatggaatacatggggtttaaaagtgatgcagaggaccaaaatgctaaggataatggttgaataatt

SEQ ID NO: 31893 - DNA, 479 bp, Oryza sativa
  Clone ID: uC-osflM202098h05a1
gattgtagcataacaaagggctacctgtcgctgccctaccatttcattatacttcatcaggtaaaaacagcaaaacaaagggcaagaggaaaaaaaaaggaaaacaacacacacatgcacagtaacacacacaaccacatctgctcaggtgaaatgacgcatccaaatactgcctccaccggtagaacagatgtatagttccactatgacttgcaaaccggcttggaccactccttttatttcttgtttgacaaaaggagagccctctgcaaagtacttagtaatagagtgaaccttgccaccaatcacctctggtagccagggagccatctggattctgctcctgctccttttgatttcctggtgatgcattaccctgctttgggggagtgttgccataaaactcccgagcaccgtaatgcacagaagagccaaaatatggcgactccgatgactcgtttggatatgattggttacca

SEQ ID NO: 31894 - DNA, 373 bp, Oryza sativa
  Clone ID: uC-osflM202098h06a1
gttcatgcctcattcaatgatggagtacaagtttataggtacggttacacacacaagtagtagtctctgcagtagaggtaatgaaaacacgtacatgcagcatttgaacaagtaaaaaaaacagatgtgcatgtccgttttccagaatatatatgcaggattagttaagaacatatataggtagaaatatattttgcaccaattaattaagcagattaagatgggtacgtagtatacattagcaagcaagcaccaaacctgttgattagatagatagatagatagatatctggagcggtatcattagatgatgatgatgtgtatagatgaagtattgagctgatgcaagaggaggccttggattccatgggtg

SEQ ID NO: 31895 - DNA, 477 bp, Oryza sativa
  unsure (1)..(477): unsure at all n locations
  Clone ID: uC-osflM202098h07a1
ttnnnnntttatgaattcaacnaacaacgtatatgctatgtccaccacaagaaacattgatagtcaacggaaaatggatggtacaacaagcaattcatgctattttttctactgcaacattgttacagtgacaatcctagaaattattacactttaaaaaatgcttaacgatttgttagtctgattcatcaaataactgatatcaggacggtgtaacaatccttccatgatttatgaataatccttccagccaatatcattcaagtgaggctaaccacggatttcagcttttggctattggaaatttgtaaatctacagcaaagtgaacattcttctcataagggcatcttcgaaggagtacctggatggccggggtatttctttggagaaatgcactcctttatgtacacaacagccgtccgttgaccatgaggtgccatagattcaacatcacatatttctaacatggagggaac

SEQ ID NO: 31896 - DNA, 354 bp, Oryza sativa
  Clone ID: uC-osflM202098h08a1
ggttaattatagcgacatcagccacagcttttatccaaaaccaggaggattaaacgtacgccacaacacagagtaaaagagctaagtagaacattatcatccacgaaaatgtcgtcacatgcatacatctaaaacaccatttttctgctgccataagcgccccactcttacttattcagttcaggacttcaggcgaaggctacctctcaccttcaggcgcggtgacctcacctactgggtcttcgccgactcgctcttcgacggctgggccttcggcgataactggccgaaaaccttggcgatgcgctcggtggggatggcggtgaggtactgtgctacgggggaacccttgtc

SEQ ID NO: 31897 - DNA, 206 bp, Oryza sativa
  unsure (1)..(206): unsure at all n locations
  Clone ID: uC-osflM202098h09a1
tttttnntttttttttttaaannanagcggggagggccannaccaacgaacgaaaaaatataaccctcgaactttatttgcatgcatacatatgcatgatgaattgcttgggagaattacattatcaattatactagctatatatcgcgtagttaattataggataggcgggatatatataaaagaagagatgtatttaggggggt

SEQ ID NO: 31898 - DNA, 348 bp, Oryza sativa
  Clone ID: uC-osflM202098h10a1
agtaacatcctactgcatagcacccgcacccgaattgcaaaatacagagtaccagtatagtactcttaaactttcttgtgcaaccataatgcagcctcaacagtatgtataagactaccaactaccaagaccggcgacacggtcaacaaaagtcaaaagatagacaacctgtgagtctgagactaatgagtctatgacctgagactccacgcagtaagaggtaaactaagaacagagagagaccaccggaccatgcgacgaaaggctgtcgtcagatgaagaacatgtggcccaccagatccttgtgcagcgccgggaagcttctgaagtcggaagcgcccgtgccgg

SEQ ID NO: 31899 - DNA, 496 bp, Oryza sativa
  Clone ID: uC-osflM202098h11a1
attgtaaaaacagagagagaacattgttttcactaataatttcaagtttcctagtacagagatgccaaatcacactgaaaaaacatatattgatcatgtgatatacaccgttacaaaaaaacaatctcactaatgtaaatgtggtcttagtcaggattcaggaagaatacatcacatttcacaagtagttattttgtcagttcagacttcagagccgaggcaatgaaagaaggttgtatagtccaaggttcgtatatccttcgagctattgggtccaaggaagctgcccagggtaaggcaccagaccacagtatgagaacagacccttcagctcagggcaaccattcggatatggaatggcacggtgaaatggatccctcttaagcctcttcatatgaagagaacctaagcatccataaggatcttcctggaactgagatctaacagcggcttcacccttgacagcagactcccttgcagtcagtgtagcaggggt

SEQ ID NO: 31900 - DNA, 412 bp, Oryza sativa
  Clone ID: uC-osflM202098h12a1
atatgacacgctcctttattcattcatcattacgtgatggagtacaagtttataggtacggttacacacacaagtagtagtctctgcagtagaggtaatgaaaacacgtacatgcagcattcgaacaagtaaaaaaaacagatgtgcatgtccgttttccagaatatatatgcaggattagttaagaacatatataggtagaaatatattttgcaccaattaattaagcagattaagatgggtacgtagtagacattagcaagcaagcaccaaacctgtagattagatagatagatagatagatatctggagcggtatcatcagctgatgatgatgtgtatagatgaagtattgagctgatgcaagaggaggccttggattcgatgggtgaggaaatgaagtagtaaaatga

SEQ ID NO: 31901 - DNA, 69 bp, Oryza sativa
  Clone ID: uC-osflM202114a02b1
tctgttcgctgcaagcggccttgctgccaaagacgggggtcatataaaagatcgcaccccttacacccc

SEQ ID NO: 31902 - DNA, 289 bp, Oryza sativa
  Clone ID: uC-osflM202114a06b1
ctcgctgtcagcgccggagcaggtgctggtagatcctgttgcagcgtggcttgttgatcccggtgagcagcagccggtgccgccgctcgagacgccatcgtacatggccagggcctcgtcgacgctgccacagatttttgcttgtgcagcgttggaaatgcttgtgcagaccggtggagcaatcccacctactggtcttataagggagcagagattgctgctgcaagccgccctatgacgccggagaatcggtggggaggggtgatccaggtgagcgatcaacacggcg

SEQ ID NO: 31903 - DNA, 366 bp, Oryza sativa
  Clone ID: uC-osflM202114a07b1
tcaatttccccctcccccttcccttccctctccgcatcagcaacccacccccacccctcgccgccgccgccgccgccgcagtcgcggctcccgctccccaaccgaggaatccgctgccaccgccgccgctgcgggcgcccgcgcgcgcgacgtcccgctgcctacgacgtcgcccacggctccatgactatgatgactcctccccccatcgagcagcagcaggaggacgaggagatgctcgtgccgcaccaggagctccccgccgccgccgtcgatgtcgtcgccgacgccgtgcagccgatggaagttgtggcgcagacagagcctgccaacgcggcagagagccagccgtctggaggaccccgc

SEQ ID NO: 31904 - DNA, 479 bp, Oryza sativa
  unsure (1)..(479): unsure at all n locations
  Clone ID: uC-osflM202114a08b1
gctggtatcgcctgctggtatccgttccgttattccctgttcttcccacgcttctccaccttcccttccctatcccatcgtgaggtgggttctcttcggcggctgctgatcggcggcgggggaaggaaggggatgggcggcggangcnttgagttntacgtctctctttttccttctccctcttctgttgctcctcttcttctcttcttcctcttcttctctctttccttcttctttcttctttttttccttctcttttcccttttttctccttttttttgctctctctctctttttttctttttctctctttcctcctctttttttgcctttccccccttttctttcctcttttttcttttttttctttctttctttttctttttctctttcctttcttttttttttccctcttcctttttttttttctttttctccctcctttcctttctttctcttttctcctttcttccttcttc

SEQ ID NO: 31905 - DNA, 601 bp, Oryza sativa
  Clone ID: uC-osflM202114b02b1
cctttccttttttcccttttcttccctcgcgtccttggtttgtaataaatcgagagagaaacggccatttttgtttccttcttcttgtttgttttcttgcttgcatgttgtgtcgagacgtgggagtgatggtgatgaggttttctttctctcctctttttctcttttttttttctttttttttcttttttttttttttttttttttttttcttttttttcttttctctctttttttctctcttttcttttttttttttctctctctcttctctttttctctttttttctttcttttctttttcttttcttttttttttttttttttcctctttttttttttttttttttctctctttttctttctctttttttctccttttttttttctcttttttttttttcctttttttttctttttcttctttttttctctcttcttttttttctttttttctctttttttttcttctcttcttcttttttttcttttttttttttttttttcttctttttttctcctctctctcttttttttccttctttttttttttctctttctctttctttttttctttttttttttctttttttcctttctt

SEQ ID NO: 31906 - DNA, 512 bp, Oryza sativa
  unsure (1)..(512): unsure at all n locations
  Clone ID: uC-osflM202114b03b1
taccttctctattccaaggtattacattggcacccacatctttccagaggtccttctaaatgatatttctggtccagacggggattcattactattgagcttgaagctcgctgtggatgtacttgtaagtagtcctggtactgttttctgaaagctcagtgtttcactctaatgatctgaaaactattgttaaaaaaatgttatcaaatagactaattttacaaagtcaggtcacagtgcacaaactaactaatcatcattgaaatcctacatgattgatgtacatgccaaacatcttgaattctcaatacgatacctgttcgatgacgcggctggctgaaaagcctgtgggctatgaagggcactatttgcatatgcctgcatttatgattcttgggctgatctataatgttcacctgcnggttggttcctgtccttgtgcactcggattagctacccctacagctattttgataggaacttcactgggtaactttctatgtcataatgtt

SEQ ID NO: 31907 - DNA, 362 bp, Oryza sativa
  Clone ID: uC-osflM202114b04b1
ttcacttcgctccttccttccttcccgcatttggatttacccccaaatcttctccaagtccaatcgacctcatttcattcgattcatcgatcgctcggcgcggcttagggtttttggcggcagcgatggcgtcggagaagcacttcaagtacgtcatcctcggcggcggcgtcgcagcgggatatgcggcacgggagttcgccaagcagggtgctaagccaggggagctcgccatcatctccaaggatggccgtggctccttatgagcgccctgctctcagcaagggatacctctttccttagaatgctgcaagactcccaggatttcatgtgtgtgtcggcagcggaggagagaggctttt

SEQ ID NO: 31908 - DNA, 385 bp, Oryza sativa
  unsure (1)..(385): unsure at all n locations
  Clone ID: uC-osflM202114b05b1
ttccgcatgaccgtcaccgacgccgacatcgccgcccttgtccgcgcccgcggacacatgctgcaggagctcaagctcgacaagtgcatcggcttctccactgacgccctccgcctcgtcgcccgctcgtgcagatccctgagaactttatttctggaagagtgccatattactgataagggtggcgaatggcttcatgaatttgctgtcaacaattctgttctggtgacactgaacttctacatgactgaactcaaagtggcgccagctgatctagagcttcttgcaaagaattgcaagtcattgatttatctgaagatgagtgaagtgngatctttcagatctgattaggtttttccaaacagccaatgcgctgcaagacttt

SEQ ID NO: 31909 - DNA, 254 bp, Oryza sativa
  Clone ID: uC-osflM202114b07b1
tgtgagcggcagcaagtgttcactgcgttcttcttctcgatttatctttcttggtttcttgatctgtagcttattagcggccatgtgcggcggagcaatcatctccgggttcatcccgccgtcggccgctgcggcggcggcggctgcggcggccaagaagcagcagggcaggagggtcacggccgacgtgctgtggccggggatgctgcggaaggggaaggcggcggcggcggaagaggatttttgaggccgcc

SEQ ID NO: 31910 - DNA, 149 bp, Oryza sativa
  unsure (1)..(149): unsure at all n locations
  Clone ID: uC-osflM202114b10b1
ntcgtatccacgcgcattagcaacatcttccaacattgtaagatccctgtccagttcattagcaatggccaaagccgtcgccctactccttgcagccatcgcggtattggtccgtgttagtgctagtgtactgccacgttcactgcctg

SEQ ID NO: 31911 - DNA, 178 bp, Oryza sativa
  Clone ID: uC-osflM202114b11b1
tacttcgtcttctcctcctccaccctgtgtctctctctctctctctctctctcttctcccctttgatccgccgcttcccctctctctctacctctcgcggcgaattcgccgagagggcgcagggaatcatattaggagaaatcccctttttgtaaccgtgcctccggatccgcacagg

SEQ ID NO: 31912 - DNA, 465 bp, Oryza sativa
  Clone ID: uC-osflM202114c03b1
ttgatagagagagagagagagagagaggagaatgagcttttgttgtgtatagtagcaggaagtgaacaaaaaggggggactttttcattattctctgatcatcattttctttcttggttgatttttttttttatttttccacttttttcgtcttcttttatttctttttttattcattttctactttccttttcttttttttcatttctttctctcttctttacttttttttttctttcttttttttctactttttttctttctctctcttttttttttttttctccttctcttttcttttttttttttatcttctttcctttctttctttattttctccctcttttctttttttatctatattctctttctctctactctcttctttttttatcctcttcctccctttttcattttttcttttattctatctctcctctcttatttcatccttttattttattc

SEQ ID NO: 31913 - DNA, 206 bp, Oryza sativa
  Clone ID: uC-osflM202114c04b1
taggtggcaaagcgaggaggaggagattggggatcggaaatccaatcatccaatccaagattccaaaagtggttggattaatcgagtcatcgagatgagctcgccgggcggcgtgaacgagtgggaggactcaccgggggagatggagcttgatgtctgtcggtccgtgacatagattaagagaattcgcaaaatggatctgagga

SEQ ID NO: 31914 - DNA, 78 bp, Oryza sativa
  Clone ID: uC-osflM202114c07b1
ttttgaaactgtagtccacgccgcaacggtgcggtaaacatcaaggggggtccaattcctgtacagtcgcggcatccg

SEQ ID NO: 31915 - DNA, 500 bp, Oryza sativa
  Clone ID: uC-osflM202114c08b1
tatctgtgtctgactgtgtttacaagtggattggataattgttgctgcagaacatgacatcttggaagttaaaaatgttgtaatatgcaatttttttaaacttgcaattcgaatgtcagttaataaataaataaattaaattatagtataataaattaatagtattttataaagaaaaataatgtatataaataaaaaatattttttatatatttggggtgttcttttttaaggtccctttttttttatacctgttatttctatttatttttttttttttatattttaccttaatatttatatctcttttccgttcttttaaataatttttattttttatatatacttactatatttatatttttttttcttcttttgtaatatatattactttttatatttatttgataatttttcattatatgttactttaccctcttatttttatactattctttttttctctattttatttattaaatattcacttatttattttt

SEQ ID NO: 31916 - DNA, 609 bp, Oryza sativa
  Clone ID: uC-osflM202114c09b1
tctagatcgcgagcgccgccctttattgttagggataattaaaaaaaaaaacctttatttaactaaaaaaaaaaattattaatatataaaaaaaaacaaataaaaaaaaaaaaaaattataaaaaaaaaaaaaaaaaaaaaaaataaataaaaataataaaaaaaataaaaaaaaaaaaaaaaaaatatataataaaaaaaaaataaaaaaaacaaaaacaaaaaaaaaaaattaaaaaaataaaaaataaaataaaaaaataacataaaaaaaataaaaaaaaaaattaaaaaataaaaataacaaaaaaataaattaaaaaaactaaaaaatataaaataaacaataaaaaaaaaaaaataaaaaaatatcaaataataaactaaataaaaaaaaatacaaaaaaaaaaaaaaattaataaaataattaaaaaaataaaataaaaaaaaaaaaaatcaacatataaaaaaaataattaatataaaaaaataaataatatacaaaacaaactaaaaaaaaactatctaataaaaaaatattacaaatagaacaaataacaaataataaacactaaaaaaaaaaaacacacaataataaatataaataa

SEQ ID NO: 31917 - DNA, 336 bp, Oryza sativa
  Clone ID: uC-osflM202114c10b1
tttagcttgcctttttaccaccttcatccagtgatcccagggaggttgtggaagcagtccacatgacctttgaagcacttaggcgtagacatctgcaactggatgaaatacaagagactagcaaacgggctgacctgaaggctggcgccatcatgatggcaagcaatatcagggctaatgtgggaaaaagggtaggacttgttcctggagttgaaatagggggatattttctatttccggatggagctatgtatcattgggctgcatgctcccagtatgggtggcactcattttatgtatcgcttattctttatttatatatatttcttcctacct

SEQ ID NO: 31918 - DNA, 245 bp, Oryza sativa
  Clone ID: uC-osflM202114c12b1
tacaagcccaagtcgcgtcgcaccgaagcagagtagagaaggagaggagcggctctccatcacccgtccgatcgagtgatcctattgcttttcgctctcttcatcctttgctgtatgccgccacttaccttcatcttctctttctccttttttttactattttattacatttattctcatactatttttcttttcttattctttacacaccttcttttctcctttctttcattctcttctatctt

SEQ ID NO: 31919 - DNA, 456 bp, Oryza sativa
  Clone ID: uC-osflM202114d02b1
tgaaggaatccaccctccaccttgtgcttaggctcaggggaggtatgcagatcttcgtcaagaccctgactggcaagaccatcacacttgaggtcgagtcctcggacacgatcgacaatgtgaaggccaagatccaggacaaggagggcatccccccggaccagcagcgtctcatcttcgctggcaagcagctggaggacggccgcacccttgccgactacaacatccagaaggagtccaccctccaccttgtgctcaggctcaggggtggtatgcagatcttcgtcaagaccctgaccggcaagaccatcacgcttgaggtcgagtcctcggacacgatcgtcaacgtgaaggccaagatccaggacaaggaagggtatccccccggaccagcagcgcctcatcttcgccggcatgcagctggaggatggccgcaccttggctgactacaacatc

SEQ ID NO: 31920 - DNA, 54 bp, Oryza sativa
  Clone ID: uC-osflM202114d05b1
tacttgcccttcaaggtgattgctggacctggtgacaagcctatgattgttgcc

SEQ ID NO: 31921 - DNA, 496 bp, Oryza sativa
  Clone ID: uC-osflM202114d06b1
ttcctatccccacctttgccaccaaatgctgagccaattaaaactgatgatacaaaaaagttatcaaaacctaagagggccttgatggctcgctctggttgtggcacaaatgggcaggcgatacagctgctgacgaaccacttcaaggtttcactgaaggcagcagacgaatttttccatcactactatgttaatctgaagtatgaggatgatagaccagtggatggaaagggcataggtagaaaggtgctggacaaactccagcagacctatgcgtctgagctggcaaataaagattttgcatacgatggtgagaagagcctgttcaccattggtgctcttcctcaagcgaacaacgagtccacggcagctcttggaagacttcaccacctgtaagtcatcctccaatgttgtccgcccctgcaacttccagttcttgaactgaccagacaatgtctacaacgccccttcctacataaccccttttgttgctccc

SEQ ID NO: 31922 - DNA, 146 bp, Oryza sativa
  Clone ID: uC-osflM202114d09b1
tgacgagtaccccgtcaccaccgaactccagaaccgatgtgtgaacatgattgcacacctcttcaatgctcctctaggggactctgacacggccgtcggagtccctactgacttcttttcccccattcttattcttctttttttcc

SEQ ID NO: 31923 - DNA, 487 bp, Oryza sativa
  unsure (1)..(487): unsure at all n locations
  Clone ID: uC-osflM202114d12b1
ttcgaagtgtcatttggggactccctgtatctctgggagatgatgtgggctctggaatatgatcccgacatcttctttgccgcttgtgaagatgcaagtgctcacaaaagtaaagtatctaaatcaaaattgagaggggtacgccattttggcaagtgggacaaagacaaagataaagagaattcgaaaaatggatctgaggatactgatgntccagttccattttcagttttcatggttgcaagtgttctcaaggaaaaaagagaaaagctattacaggaagctagaggacctggatgatcttattaggattctgaatgatgtaaatggaaatttagatgccaaaaaagcttgtgctggtgctttgaagcttcataagaaatacctgaaaaaagtacagacaaagaaaccctaaactgtaacatatcttctcactgggtgatttcttttccatgtggacatagcaaactatacttgacagaatgct

SEQ ID NO: 31924 - DNA, 463 bp, Oryza sativa
  Clone ID: uC-osflM202114e01b1
tttctttgttcgcaagagaaagcacaagaaggtgaactcgtcttccaagctcctcaagtacagcggctccggcgggacacctcgctccatgggcggcgacatggagtccggcagtgtcaaggacctgcagactcacctcttcagctacgaggagctcgaggaggccaccgattccttcaacgagaacagagagctcggtgatggcggcttcggcaccgtctacaaagggatacttcgagacgggcgcgtggtggcggtgaagcggctgtacaacaacagctaccggcgggtggagcagttcgtgaacgaggcggcgatcctgtcgcggctgcggcacccgaacctggtgatgttctacgggtgcacgtcgagccagagcagggagctgctcctggtgtacgagttcgtggccaacgcacggtggccgaccacctgcacgggcaccgcgcgcaggagcgcgcgc

SEQ ID NO: 31925 - DNA, 222 bp, Oryza sativa
  Clone ID: uC-osflM202114e02b1
tccattccctataatggcgaactcaccgacgccgacaatgctggcgttcctggctcttgggctagcgctcctcctctccgccaccggccaggcgagcgcgcagaactgcggctgccagtcgaacatgtgctgcagcaaatgggggtactgcggcacgggcaaggactactgcggagatgggtgccgctctggcccgtgctactgttgcggccgcggtggagg

SEQ ID NO: 31926 - DNA, 526 bp, Oryza sativa
  Clone ID: uC-osflM202114e05b1
tctctcagttcagttctaccacgtacaacagcagaagtgagagagggagaagaagacaagggaagaggaggagcttagctagccagccatggcgaggcgctctccttgcctcgccgccgccatgctcctgcttggggcgttggcggcggcgagcgccttcattgatgaagcggcggctgctggccgggggctcggccatggcgcccgcttcatgagcaagcagggtcgtgtgacatacgagaagctgccggagccggagccgaagccaaagccaaagcctcatcctaaacccacgccaaaacctgagcccaagccagagccggagccaaaaccagtacctgagcctgagcctaaaccggaaccaaagccagaaccaaaacctgagcctaagcctgaacctaaaccatacccagagccaacaccggagccgaagccagagccaaaacctgagccggagcctaaacctgagcctaagccagaaccataaccagaaccaaagtcgttcccagagcccgagccagagcca

SEQ ID NO: 31927 - DNA, 229 bp, Oryza sativa
  unsure (1)..(229): unsure at all n locations
  Clone ID: uC-osflM202114e06b1
tagtcactgctcttgctgctgctgctactgcttgcttgcttgcttccctccgcttgctcagctggaaaagaaaatctgaatattcgcaagaaactgatcttgttcattntaggcattcattcattcattcctgcagctagccgtttcgattctggggctataaatcggcgccttgctgggttgctcttcctactcgtgcttagtttcttttgcgctgtgctttgctagc

SEQ ID NO: 31928 - DNA, 310 bp, Oryza sativa
  Clone ID: uC-osflM202114e07b1
tggacacccgcctccccctcctcctcctcctcgccggcgtcgtcgccgccgcggcgcctctgctcgccaccgcccagctctccgccgacttctactcctccacctgccccaacgtcgagaaggtcgtctccaccgtcatcgagcgcaagttcaaggaggaccctaccaccttcgccctcctcctccgcctcctcttccacgactgcttcgccaatggatgcgacgcgtcgatcttgatcgacccgctgtcgaaccagagcgcggagaaggaggcggggccgaacatctcggtgaagggctaccgacatca

SEQ ID NO: 31929 - DNA, 98 bp, Oryza sativa
  Clone ID: uC-osflM202114e12b1
tgattaattacttctcgtctccaccggaaaagctcgccggcggcgatggcgagcgcgatgaacggctgcggcggcggaggcggcggcggcggcggcgg

SEQ ID NO: 31930 - DNA, 531 bp, Oryza sativa
  Clone ID: uC-osflM202114f01b1
ttctctatctctgctgatccacccggcgttggttcgcctataaaaaaagagaggagtttgggggaggaagagagagctcctctaggtgtgatatcctcttctgctcttatctgatcgcccttattgagcacgcattggggtttgctttcctggccccacccacgcccacttacattactgttcgcatatcgctaccccttctccctcttctttaccacctagtcccttcttcttctatgctcccttctccatccccccttccttcttctcttcttcccccttcctttcttctctcttctccttcctccccctctttctctccctccccctcccccttttatctctctctcctctccctcttactctccccttctctttcccccccttctctccctattttctctccccttttttattttctcctctccttccttaccctctctcattccctcccccctcttctttctccccccttctcttctccttctcctcctcttttctccccctcctctttcctccttccctcttttt

SEQ ID NO: 31931 - DNA, 282 bp, Oryza sativa
  Clone ID: uC-osflM202114f03b1
tccactcgtccgtgtcatcaaagaaggtcacaagagctttccttgcgggcactcttcatggcctttcgctggtctaggcttccttgcatggtacttagctgggaagatcacagtttttgatcgtagaggccatgttgcaaagctatgcatagtatttatgcctgttcttactgctgcacttgtggctgtttctcgagtggatgactactggcatcactggcaggatgcacttgcaggctctccgataggatttactgtatgcatcattcttgttattctgta

SEQ ID NO: 31932 - DNA, 90 bp, Oryza sativa
  Clone ID: uC-osflM202114f04b1
gtagaagctggtggtgtaccgggcaaatgcgggtcggttcacataggacaggccgcgcgttcctccagatgacattaccctcccctttta

SEQ ID NO: 31933 - DNA, 499 bp, Oryza sativa
  unsure (1)..(499): unsure at all n locations
  Clone ID: uC-osflM202114f07b1
tagaaaatgagaatagaagaagcagaagaagtttttgatcaaatggatctgcaaggcatttcgaggaatgcaatcacattcaatactctcatcgatggtttgtgcaaggacaaaaagattgatgatgcttttgagcttattaatcaaatgataagtgaagggttgcaacctaacaatatcacttacaattctattctaactcattattgcaagcaaggtgacataaaaaaggctgcggatattttagaaactatgactgcaaatggatctaggcggactgttgttacgtacggtactctgattaacggtctatgcaaggctggtaggacacaggttgctttgaaggtactcagaggcatgcggataaagnggatgaggcctactccaaaagcttacaatcctgtgctccagtctctcttcagacggaataaatangagatgccctgagtcttttcaaggagatgcaaagcttgggtgagcctcctgatgctctgacata

SEQ ID NO: 31934 - DNA, 61 bp, Oryza sativa
  Clone ID: uC-osflM202114f12b1
tggaagcccgcaggcccccccccgctaaaggggttaacttaacccaccgaccctttctttt

SEQ ID NO: 31935 - DNA, 257 bp, Oryza sativa
  Clone ID: uC-osflM202114g07b1
tgcgaggtaaacgagccacacccacagggcagggtccttttaaaagggggaggcgttattaccacgaaaaaagaaggactaggtgatcactgacactgaagttggcggcggtaggtaggtcatgaaaaatcagatgagctatgttcaaaccgggaaagcggatagaaggcgaaaagaacagatctcagacgatgagggaccgaagcaggtacctcgacgcctgaagctgttgcccaagggcggggccaagcgcggtt

SEQ ID NO: 31936 - DNA, 145 bp, Oryza sativa
  Clone ID: uC-osflM202114g10b1
tattacttccacgacacatggaaattatcgaggaaattgacaagcggttcaaagatatggtaatctccacccggaaggaattggagggaaagattttttcttttatcattttttttcatcttaatttcctttacttctctttttc

SEQ ID NO: 31937 - DNA, 300 bp, Oryza sativa
  Clone ID: uC-osflM202114h02b1
ttcagcaccaccccttctgctgcatctcccacctccctctgaattgtgggcctgaggcgatggctgcgctcgccccgtccaagatgctcggcacccggctcaacttcgccggctcctcccgctacgccaccgcggcaccgaccaccggagcgcagaagatcgtctccctcttcagccagaagcccggcccgaagccccagcccggcggcgtcaccttcttgagccccgacattgggtgaagagctcgccaagtggtcctgccctgccaggagtgatattatggtctctaagggtctctct

SEQ ID NO: 31938 - DNA, 58 bp, Oryza sativa
  Clone ID: uC-osflM202114h06b1
taagtcacggcccaccccgcggctccccccggggccgtttaacatcacagcccccccc

SEQ ID NO: 31939 - DNA, 119 bp, Oryza sativa
  Clone ID: uC-osflM202114h09b1
tcgtaccaccaccatactcttcttggcacttggcatgaagagtcacatccagacgccttgagttgtagctagcaccagtggctcagcttgcccagtgctgatgcatcgatcagtggcag

SEQ ID NO: 31940 - DNA, 377 bp, Oryza sativa
  Clone ID: uC-osflM202115a01a1
agggcagcaaagcagagcatggaacaagctgcgattaaaatggacaggttcagtagttatcctaacaggttcagaagggcgggatccagcctaataacatccaccccccaggtggttcttaaacaaacacgacataaacaagacttccaaaacatccacaagttcaggccataacatagcagccaagcggctggtcagcagaagaacatggggctcctgactttgttatgcaggcgaggcagctcgggcaccggagcgctgcccgccgtggtatggccaccatggctcgactacgttttcgacatcttgtcgaacttgatgaactggctgacctgagcagcaactagatgcgcgttgcaaatgggtgcaacgactga

SEQ ID NO: 31941 - DNA, 59 bp, Oryza sativa
  Clone ID: uC-osflM202115a02a1
cccccccttggtttttgaatgcttggggggctccccccccccctcctttttcttccccc

SEQ ID NO: 31942 - DNA, 473 bp, Oryza sativa
  Clone ID: uC-osflM202115a03a1
ttggtttttttaaaatggggggttatttcactttttttctgggggtaattgaaaggggccttaaattagggaaaccggggcacacacaggttgggcctaacatgagcttgcgaattgaccaaccttcctttggggccaacaactaaaaaaaggtttgtctggggcacatggttctaatttagtagcaaaagctgggtgttggaaaacctcattcctacccaccaacggattttaagcgttggcaaaagcctggggggcaagatcccacttcctttggtcctgaatgatgctgagcttgatgcccttgcccttgggcaggctcacccaaggcttgttgcccttgccaatggtgaacacattggccagacgggtggcgaattggtggcccagggcatcctcaacgaggatgggcttgaagctgcctttatgcttttccctgttcttgatcacaccaacacggcctgtgtttcttt

SEQ ID NO: 31943 - DNA, 354 bp, Oryza sativa
  unsure (1)..(354): unsure at all n locations
  Clone ID: uC-osflM202115a04a1
tgggtttttattattagggggggttcccttttctttcttttcaaanggacaccattcatatatccatgcaggcagcctgtttgggccctttnccaatatctttcatttataccaggggaagggacccaaaatagcccccacatgaacacacacaagtttcattattgatcgatctacacatggattacaccggtatgcacttacaaacaaaaaaactacttgaaaaaatacgggagggccagcacctaaaggaagaaataggcccaaaagacccccgaaatgccccccaaaaaaaaaccgccggtgaacttggcccaaccgtcgggggtctgcaacttgtcggccttctttttg

SEQ ID NO: 31944 - DNA, 317 bp, Oryza sativa
  Clone ID: uC-osflM202115a05a1
tttttggtttttttttttttttgttttttttttttttttttttttttaccgcaaggaaattttttgacatgaaaacctttccgggtccgagttcaataaaaattcaggatgcaaggggttttgggcaaatgcaacctgggaaggacatgtcaccaatttattaatacaactttcagggctgaatacaaggcataagggcaggttggtctacaaatcccgacctttaggtttaagagctcccaagcaggttcttgaaatccctctcaaactaagagggaggggggggggcccataattttcccccccgggaccctttt

SEQ ID NO: 31945 - DNA, 276 bp, Oryza sativa
  Clone ID: uC-osflM202115a06a1
ttttgtgtttttttttttttgggttttttttttttttttttgtttttatttgtaattttttttttaatttgttaacaagggtgggggcctcaacaggggaacaaaatccagaatggtaaaaggggacccggaggggaatttacaaacaacaacgacctgacaagggacaaacacccccccggccccaaaagggaaaagaaacagaaacccccgggggaagggggaacctattaccaaaaaaaagaggtgaggaaaaaaaacctcatgccgggggaa

SEQ ID NO: 31946 - DNA, 400 bp, Oryza sativa
  Clone ID: uC-osflM202115a07a1
attatgtcttggttcagtagttatcctaacagggtcagaagggcgggatccagcctaataacatccaccccccaggtggtacttaaacaaacacgacataaacaagactaccaaaacatccacaagttcaggccataacatagcagccaagcgggtggttagcagaagaacatggggctcctgactttgttatgcaggcgaggcagctcgggcaccggagcgctgcccgccgaggtatgggcaccatgggtcgacgacgtgttcgacatcttcgcgaacttgatgaactggtttacctgagcagtaacgagatgcccgtagcaaatgggtgcaacgactgatatggctgtagggctcctctggtagacataggaaagggagtggaccaactcctgaagat

SEQ ID NO: 31947 - DNA, 316 bp, Oryza sativa
  Clone ID: uC-osflM202115a08a1
ctccttagttttttaaatgtttgggggtttacccttcttttttttgaggttcttaaaaggcccctttatttttgtaatcattttttttacctctttttatcttaccatgacttctgaatttgcctacaaaacaaaagggggttacaaccaaatatattaacccctgggccacatagaccccaaataaaaaagcggcgggcggggcgaaaaaaaaaaaaaaaacagccagccccggcccccaaaaatttacagtggtttcaaaaggggaggaaaaccccccacccccccccttttatctggggctctaagggccccc

SEQ ID NO: 31948 - DNA, 453 bp, Oryza sativa
  Clone ID: uC-osflM202115a09a1
ttttgttgacttaaaatgggaggttattccactatctatactagtataattgcatggtttttcattatcatcatccacagatacacattggtgagcattaagagtacattctgctttaccaatactcctatgatgcctacaaaaaagtggctgcttcaaagtatcacctggaatctatatagtagcaaatgcagtgagatggatggcctcctttctctacacaaaaggaggcttcagttgcacaaagctgccatgttctaggcctaaatatactttgtgagtcaaactccgctgaatgccatggagtttcatcaggcaaacgggcttcgatatatacaagactcgaccacaggttatattgttatcctaaagtgcatagatcttcttgtattcgctgttcagtagctctgtatccgaatcgactgatatggaccacgactggctggtggatga

SEQ ID NO: 31949 - DNA, 331 bp, Oryza sativa
  Clone ID: uC-osflM202115a10a1
ttgtttttttttttttttttgttttttttttttttttttttttacaacagcacaccatccatatatccatgcaggcagcctgtttgtgcccttgggcaaatgcatttcatttatacaaggagaagggactcaaatcagcccccacatgaacacacacatgttccattattgatcgatctacacatgcattacccgggcatgcacttacaaacaaaagatctacttgaaaaaaaaccggaggtcgagcccgtaaaggaggaagtaggcccaaaggacgccggagatgcccccaaaaaaaaagccgccggggaacttggcccaaaccgcgggg

SEQ ID NO: 31950 - DNA, 277 bp, Oryza sativa
  Clone ID: uC-osflM202115a11a1
tgtggtttttttttttttgggtttttttttttttttttttttttcacaggaaggaaatttattgacatgaaaaccatacagggcccgagtacaataaagattcaggatgcaaggggtatagggcaaatgcaacctgtgaagtacatgtcaccaatttattaatacaactttcagggctgaatacagggcataagggcaggttgctttacagatcccgacctttaggtttaagagctcccaagcagcttcttgatatccttctcaatactaaaagggg

SEQ ID NO: 31951 - DNA, 421 bp, Oryza sativa
  Clone ID: uC-osflM202115b01a1
gggagcggcttcaacatcaaaacttcttatatcacagacaataacaatacaatgaacattttcatgcggagtactaacctacaacacctttcagatcgaggacaaagcccagagagaggaaaccacccatcgtcttcgtcgcattagatacacacatttgcaataccggcaaaacaccgccaaacgggatgctcctggagcacaaatgtcgctcagcagtcgaagttggcgcagctgttggtggtggtggtctcggagctgccgatgaacgggtcgatcttgacccataggagggagaagacggaggcgagcaggacagaccagagcacgacgatggtgggcgtccggttctggcgacccatgagacccttgaggaaggggtacaagtgcatgatcacccacatggcgaagaacacctttg

SEQ ID NO: 31952 - DNA, 423 bp, Oryza sativa
  unsure (1)..(423): unsure at all n locations
  Clone ID: uC-osflM202115b05a1
agacagcaactgaataatctttcgatatttcaccgagggtaatgtatggtaggaaaatcgccagacataacagagccggccagactcaactcaaactcaaccctatgatggtaaactgtttgcgattaacgcctccgcctatgacaatgtttggagataaacgcttccaccaaaaaacgaatgtcggggagtgttctcccctacaagaattattattgttttcaatgttaaaaaggcaaaattcaccagatcccgttagtgcaggaccaggaataaacacttgttcgtcatcattttctgccagtttaggcaccgcccgagccgtacttctttccaaagaagaggatctgcagctggtcatagcctgagagcacaccagcaccagcaatggcacgtaggatgttggnacccagacccttgaca

SEQ ID NO: 31953 - DNA, 468 bp, Oryza sativa
  Clone ID: uC-osflM202115b06a1
ttttgtttgctcagggacatgaaagaatacattacacatacacaaaacttcacataatccaaacgcccgaactatacaaacacaaataacaacacaccaacttaaatatgaaaaataatttagccacaagtactgcttggagttgcttcagcatcaagttctaccctagattaggcatgccaagcttaatataggagggtgcttccttccttaaacagtacaaagatgctgctgccatcacctctggagattctaagctcatcatcaaggtaggttgtgagcaaccaagactcagcattgtcagtcctaattggtatctttagtggaggttgaccagagatggttctagcaactgaggatgctgcattttcaattgatgaaaatatgcccttcaatggggtcaggtcaatattctgcccaaataactcaaacttctcaggtagtacaatagaatcagtcaattgtgga

SEQ ID NO: 31954 - DNA, 443 bp, Oryza sativa
  Clone ID: uC-osflM202115b07a1
ttttgtttttttattttttgggggtttgattcaacataaaaaagttttatttctctttcaagggccatgaaattaaacctttttatgcgggcaacattgctacaacaccctttaaaacggggacaaaacccaaagagggggaacccccccttggtttcaccctattggatcccaacctttgcaatacccggaaaactaccagaaacaggttgcttccggggcccaaatttcgctcaaatattcaaagttgccccactggtggtggtggggggctttggacctgccattaaccggttgatcttggccccataggaggggagaacacggaggctagcaggacagaccagagcacgacgatggtgggcgtccggttctggcgacccatgagacccttgaggaaggggtcaagtgcttgatcacccacatggcgaaaaacaccttgc

SEQ ID NO: 31955 - DNA, 471 bp, Oryza sativa
  Clone ID: uC-osflM202115b11a1
tttgtttttttttaaggaactgaggagccgttctttataaaactatagggaaggattacaattacactcagctcagaagaaaacagcatgagattacaacacattattgtgaattgcaatcactaatcattagaggtgctcaatgcccattggcaggtcgatagggtgggtacctgcttaacccatttgcggaattcggataatcacttgactgatatgggtaaccattcatatctgccccaaaatttggcaaggagaggtctgtttggccgtatggccactggttcatcatcatatcatcaaactggccgttggagtatgaaggcagatcaaaatgcgaataactcctctcccttagcccccgagaagtaccgttcaaagaattatagaaccttgggatttcctcgtcatagtattgctcaggctgatcaaacaggtatggatcagattgagcaaacatgccataatcag

SEQ ID NO: 31956 - DNA, 444 bp, Oryza sativa
  Clone ID: uC-osflM202115c01a1
tttgttttttttttttttttttttttatctttctcaagtgattctgatgtagcacttttgatatgagaaacatctctatacaacattggaaaaagaaaaaaaaaagaggaaaaggttagtggtccttcctttcccttttgtcccctcaccctagaaatacaattggcgcctaaaatatgctcagattacaagccactggactacccccttcaagtgtgcaacgaagggcacattttcttacacacacacaggcagatacaagctgatttgcctaaagcgaatagagagttgaaaagcttttgacacctccggtgggggttcctgatcaagcaggaacaggagcagcagggcaccaatgcaacttcttaggcatcgtcgtcaaccttggattgccctgtgctcttggggcccaaactagcttgaactgccactttggtcccaatg

SEQ ID NO: 31957 - DNA, 460 bp, Oryza sativa
  Clone ID: uC-osflM202115c05a1
catcctcccctaaacacggtttactgaatttgcactatgcaaaacaacagaaatccaagaaagcaggtagtaataatcttaaaacaagcatgatcagacgataaaattattccacacgactccgagcccaaagtactactctttcttggggtgaagatcaatataatcaacagggccatgaacgtcgaataaatcagcccaaaatccattcttcctcctcgggttgcaccccatgtcccggcatagcttatcattgtaccagatgtgaaggaatccgatgcaggatctgcgaaagtaagcacgagaatagcgcttcatgaacttctcccattcctggacatcattctgcatcacactgatgcttggcaacctgaagccaccatccatgaaatgtgcgagccacttggcccttaattctgatgtgtacaggtttgccaagctttctgaatagccgataacc

SEQ ID NO: 31958 - DNA, 409 bp, Oryza sativa
  Clone ID: uC-osflM202115c06a1
ttttgttagaacacaacgcatttctgcgttttttttttggctggaaatggatatattccccaagcgtgacaacaacttttgagtgccagtgtgtgtgtgttcccctcccctccctgcttaattacatcatctctaacgtaaatgattcgtgatcttcaacgggaggaaaatgacgctctcttcgacctccagagcggttttcctcccgagacaaaaagcacaaatccaaagctccccaaaaggctgtacaaaatggcaaaaagaagaaaaaaaaaagggagatcgaatgatcccacatcggaatccgacctcgaggcgacggtgtatatgagcgtctgaccgtgctagctccggagcgcgaccgcggcctcgtgcacgagcgagccggtggccttcgcgaaccgtgcgc

SEQ ID NO: 31959 - DNA, 464 bp, Oryza sativa
  Clone ID: uC-osflM202115c07a1
gccgggttgctccgcaggctcctcccctcccacgcccgcagcttatgattccagatcgtctccaagggtggcaactgcggcgggtcaagctgcttcaggattagtaatgcggatggctcgcgcagaaatggagcagaaattctgatccagggtaccacagcggtcgagctcgcctctggtctccactggtatctcaagtactggtgtggtgcacacatttcttgggacaagactggtggcgcacagctggcctcggttcctttgcccgggtctctaccgcaagtaaaagggacaggagtgaagattgagcgacctgttccgtggaattactatcagaatgttgtcacctctagctactcatttgtctggtgggattggaaaagatgggagaaagaaattgactggatggcacttcaaggaattaatttgccttagcatttaccgggcaggaagctatctggcaa

SEQ ID NO: 31960 - DNA, 415 bp, Oryza sativa
  Clone ID: uC-osflM202115c11a1
ttgtttttttttttttttttttttttttttttttttttttttttttttttttaccccattataaggactataattaagttccctcaaaagataaggtctacaattttttaaatacgaaccactccgataatttataggtggggggggtaatcacagctaagcaatggattggttggacatgatgctgtcttccacgaacgccctgttttcaccgacgaggttccggatgtcgccggcaaactccgggaagaagtaaaaggggtgtttggcctccgggaactccaccacccggaccggtttaccctttcggcgaaggatggcggggtacctccggtcccagttttgtagagggttgagggccccgacgaccaccattgggggggggaacgctttttggagctggggctccgggccc

SEQ ID NO: 31961 - DNA, 451 bp, Oryza sativa
  Clone ID: uC-osflM202115d01a1
ttttgttattctgaacaaacccatctgtttgaatcgattgatcatctgaccaagaaagcatctatttaaaatttgaggatccgatcaagaaagcatctactactacttgaccatctgatcatcaagatcgaacaaacaaccaatacaataaaaatactaataataataatgacagcattaagactcagatttaatttaattgtcctcacaccaaactttacctaagcatcattaatcaagctaccatctatcactgcatcacaagctcaagaagcctctcgcttcacgcgccggcgccggcaaattgatcggccgcggcgagctctcgccggcgagcgctacggcggtggtggcgccgtcgccgtcctccacgacgcggtcgccgtagatgtgcaccgtcctcgggttcggcccgcgggagatgacgcaggtgtagtccttcgatgacggc

SEQ ID NO: 31962 - DNA, 268 bp, Oryza sativa
  Clone ID: uC-osflM202115d05a1
ttgttttttttttttttttttttttttttttttttttttttttttttttttttttttttttttttttttggaaagctggaaaggcccaaagccatttttttttttgcagctcaatttctcataaaattcccctggacagaccccatttaaatggggcataaatggcctaaacataaactctccaaatccaatggcatacattggctaaacatgaaccctccagatccaaaaccattgttgctaaaaagaccccaggcaagcccggccc

SEQ ID NO: 31963 - DNA, 320 bp, Oryza sativa
  Clone ID: uC-osflM202115d06a1
gcaatcacgaagagaccggttggtattaatttgttcggttagaataaaccgccaataatccaataaaccttttaattaggagcaggggaccaatcactcgacaattaacaaaagggcatgacgcaccaccatccaaaattatagaactttgggttttccaatctttttttcgggaggttctacctttttattcattcccgggcgatcattcctagggcggcaaaacgtgtcgggggggccgggcggggatctaacaacgggaacaagttgccccccttttttttttacaagggaaacggtttgtccccgagcttgtcggc

SEQ ID NO: 31964 - DNA, 64 bp, Oryza sativa
  Clone ID: uC-osflM202115d11a1
tttagtgtttttaaggattaggggttcttcctttcttctatactttgacaacactacaaagacc

SEQ ID NO: 31965 - DNA, 361 bp, Oryza sativa
  Clone ID: uC-osflM202115e01a1
ttttgtttttttttttttaaaaagccctaattctcatcgggctcatttgctcattacatctgcatcgcaccatccaagatccatatctgcatatccatagctgatacagctccatctagaaaacgtttattcctctacaaggtttcgcatgctcccactaatgcactatacctttacacattgccaggttacaataccgagtaaacatgctgcctaacaaacattacaacacttggtatgtcggcagatcctggacgccctagccaagcaattcaagcagcctccggtaacccaacgctgactttgccaacggcccagacagtgggggttcgattaccgaacccgtgcgcaacagtttaat

SEQ ID NO: 31966 - DNA, 412 bp, Oryza sativa
  Clone ID: uC-osflM202115e03a1
ggattctctagtaaaatgcggccttctgatactagcatactagcccattgtacatcatcactgtcatctttgatgcaatctgatctactagaaattcaagcaatttttcaaaggacttccagatgctcgttggaatgcaatgctggttctctctcttatgcacatgcctaattgcctatagagtgaatcaaccaaaaatggtcaaagacaacacaatcgtactaagctccagttaccagtaatctccacaagaacatgaaccatccttcatgtgatggaagcagttggagtctctcagtatgatctccctgccgtacacctcggcgaccatcttgatcgcggcgtggcagtcgccgcacacccggaggttcttgtacacgcggatgggcgcggcggctggcacggcgaggag

SEQ ID NO: 31967 - DNA, 375 bp, Oryza sativa
  Clone ID: uC-osflM202115e04a1
atgacgggtcgcgcgccggccgccgctacttcgttgccgccggggaacgctccgcctccttcgcgcgccccaccgcgctcagcgccgggatcacgctccccgacgccatacgcaaccgctaccgtgtcgaggaattcaccaaggaggaacaagatgaaatgtatgtcttctcatcaagtcagaagcgcgtgtcagtggaattggttggcaagaacaaagttgaggaaaagctgaaaaacctcaatgatctgaccagtgcatctgtatcctacatggagtaagctcaattgggccaggagatgaactaaagaatttggctccaaatctcagacagcttgatttaactggaaatcttctctcttagtggcagatata

SEQ ID NO: 31968 - DNA, 457 bp, Oryza sativa
  Clone ID: uC-osflM202115e06a1
ttttgttacaatatcactcatcttgatgtaaacatgtagtaataaatatcatcaggattcaggaaagtgatcctgatgctatgttgcaagtctgcaacaatgtttcctccccctatgtgttcatctcgccgcacaattgctgccagattctgctacatagcaaccattacgcatctagtaaaccgccagaaacaaaaaggtttcttacaaatggcgtcgatccaaccacctgaaagaatgaaagaatcggagcaacggccaggattattgctgaagcaatacgaaggccgaagcagccaggaccaaaaccagtgagaggacactgctgagatgggtcctgaatccactattgctcattggaatcctctgaggcattgcacactcgtcgccgttgaaaaagacctttgaagggaaaccatctccagcaacaacattgatgccaggagtcagcttcttg

SEQ ID NO: 31969 - DNA, 485 bp, Oryza sativa
  Clone ID: uC-osflM202115e07a1
aaacaagttaataattgtggagtatatttaaaatcggaggagcggagtagtacacacacgggtaattagatccaatcgccaccacgcgaaatcaatcgtccaccagctagctcatcgtcgtcgtcgatgatcaatactcaaatacacatgtataattgcgacgcgcgcgtgccgtccgtcagccgcggcaccggttgatcctgctgcagccgcgagtgtacgggttggcctcctgcatcttcgagacccccaggaggcagggtgtgaaaaaccgccggtaaccgcgcggttaccgtggttaccgcccgtaccgcgggggtacggttacccgtaccgcgcggtacggtttaataaaattcgtccaaatttaaaaattttaaaaaaaagaaaaaaatcaaaaaaaaatagggaaggtagggcttgcgcggtacggtttaataaaattcgtccaaattcaaaaatttaaaaaaaatgaaataaatcaa

SEQ ID NO: 31970 - DNA, 476 bp, Oryza sativa
  Clone ID: uC-osflM202115e08a1
atcccggtctcctcgcccagcaccgacgggcggtcgcgccggagctccagagcgtcgcggaggaagcggttgtagtccaccatggtgtagttgcgcgggttgcgggtcgggtgcggggagatgatgaggtcgcggtcgcggtacagaccgaggtacccctgcgggaagcagtgcacgccggcgtcctcgtcgaagttgatgacgtcgtagttggacagcttgcggagcagcggcgtgtacttctgcacccaccacggcttgtagttggtgatgaggatctggacctcgcccttgaggtgcgccgtcgtcaggaatagcgggatcatggcatcggtcatgtcgtgaagaagttgtccgtgtacccggccacggagaacaccacggcggggacggcgtgctgcttcgtgcactagggggccgccgcctcggagggcacggacttgatagtcaccttcaccacgcccgggaggaggaaa

SEQ ID NO: 31971 - DNA, 122 bp, Oryza sativa
  Clone ID: uC-osflM202115e12a1
gtgcgtcctcagggggtctttagcgcgagaggggattctacaccgacgcattttatttgcggggtcccacccatatgcatccggctccctttccccaactgtgcccaaacctgtgttcacct

SEQ ID NO: 31972 - DNA, 474 bp, Oryza sativa
  Clone ID: uC-osflM202115f01a1
ttttgttgaacgaaagtacgggtagaattcatccataggagtaggcatgcatatgctgatatgccaggtttacagatagatcacttgacaattaccgtgcatatgccatctatacaatagttaatttgcagcaatgagacgtcgccctggctgaatttactctgtaaattctttgatctcaaattaatcatatgtataatgcaggtatgatgtgtgatcagttgttttctgagttgaccgacgacgacgacccgtcgggctctgggggacacagcggcttcgggaatggtaatggccaccaagggttacggggccctggcttcagcttcgagacagcattcagaggctttggcttccgtgacttgttgctgtgtctgacgcgaccggagctgaatgcatcataaatctggctgtcaagaaccaaatttttgaacgagacaggcaataggatgtcccgagggtttgcgtgttatc

SEQ ID NO: 31973 - DNA, 484 bp, Oryza sativa
  Clone ID: uC-osflM202115f02a1
ttttgttcacttttcatctcagcttccctcaggaggatcaccgactattaagcataaaaacacagccgatcaaaccctcccctattaccgccatttacaaagcagaacactgcttgcatcctactatgggagctcacaccgtctctccgcatgcatgtgtgaaagctatcagccattcacctcccccttcggtgtatttacagctgaaaccttccagacattctgctgcaaattctgccaaggcgtagactccgtgccactacctgttgtatgcaccacgggaagcaaaaaactggtagtctggatggctggtacgactatcccgcagccagtcagaagcagcttgctgcaagaagcttgccagctgccgatctccatcagtcgaagaccatattgaattgctgaacttgtaagaagccataccaaaaacagatagtggtatagtcggtttgctaccaggaccccagtattttacagcaccacc

SEQ ID NO: 31974 - DNA, 359 bp, Oryza sativa
  Clone ID: uC-osflM202115f03a1
ctttgaaattccttttccttactgatccagcaaaagtgccaaatcaaattgcttcttacaatatgatgcgaattatgacacattcatattctacaaaaaaacttgtcaaagtgcagctattgcctatttccactgcttgccccacatgcatttccaaaagactgcatggagagttcagctcctccaaacaatatggaatttggtcagtatggatactgtcactgcagatatcatctcatctttatcacgacgagccgacgggaagaagcttgataatggcagagatgggcatcccaatgaggccaaggagaacactggcaatccactgcagcgctgtgagtggtatcgtgttcgcaaac

SEQ ID NO: 31975 - DNA, 312 bp, Oryza sativa
  Clone ID: uC-osflM202115f05a1
agaaaaaaaaaaagcaaatgtattatactgtcgagtcgcatatctatacatatttgcagagaagttatatcttgtaacttctcgtacaacaaagaacaggttgaactgggaaagctatagagcaaaccaaaaaaaaaaaagaattgggatacaaacacagaaggaacataaaaaggcaccttctttgctaggggaaaaaagaatcatataccactgatgattttacaagaagagattgggtgcttcaagttaccttttaagataacatgcactttaggtgaaggtaattatcctgtctgcgattcttgtacg

SEQ ID NO: 31976 - DNA, 469 bp, Oryza sativa
  Clone ID: uC-osflM202115f06a1
acacacaactcttcgaatctgaaaattcacgaatacaactggttcaagagcaaccacaattatatcagtacagtagcagcttcatatatttacaaccactcccgcttccacgaaaagatgaactttcagtaagtaaaccaaccactcctcccaagtgcaagtgcatcactgtcacctgtctttcgtaacactacagttttgcctgaatcaaagctttactaaaaagcctcgcccagttcacgaccaatagctacaacaggagaggaggaaatcaaatggaaaagaaagcaagatgcaggcatcaagtcaatccacatagcgcaaggatcaactatcccttgttattcttcatgacgatgatgttgaagttatccgccctgaagctcgcatctcatccagagttgttgctaaccagtccaatccttcatagaggccatcgcctttgagagcacaggttccttggatatgc

SEQ ID NO: 31977 - DNA, 428 bp, Oryza sativa
  unsure (1)..(428): unsure at all n locations
  Clone ID: uC-osflM202115f07a1
tttgtttcggttccaggtaatgcacaagaaaaacacagtgatcctgcatctgaagcacccctccagcatgtatgttactctgagttcatgtcaaggctattcagttccctggccagcacaaattcagcaggtttctagccttggccaggctgaaatgcctcagtactcgtcattgctgtatatgctgctataatgcaatgccgattaaatagcaagccggtaaactacccagtttaatttattttgcaatctcttcgagctttttgagtataaactttgtgttaggtctcaatgatggtgaagggctacagcaagctgttgccaactcgaagaaagcattcaaattcttttgcttccctgacttcttgctctgcctgacaagatnggagctgaatgcatgagaatcttgctctcaggacccaattttt

SEQ ID NO: 31978 - DNA, 368 bp, Oryza sativa
  Clone ID: uC-osflM202115f08a1
tttgtttttttttttaaaaggagatatttttatgcttctgttcattaatccacataattttctcgtcaccgaattccaatacaaacaccaaccttgaaatcctgctacacaactgaaccagcaaaagtgccaaaacaaaatgcttcttacaatatgatgcgaaatatgacacattcatattctacaaaaaaacttgtcaaagtgcagctattgcctattcccactgcttgccccacatgcatttccaaaagactgcatggagaggtcaactcctccaaaccatatggaatttgggcaggatgggtactggacttgaaaatttaacttaattttaataacaacgagccgacggaaagaagcttgataat

SEQ ID NO: 31979 - DNA, 216 bp, Oryza sativa
  Clone ID: uC-osflM202115f10a1
ttttgttgatgggataatataaatgcttaatagtaatcgagtctgtgagggagttttacatcatgcaagagtggctttatttcgccacttcattaactacattacacatattgaagctgcattgcggttgctcttaccttatcgaattacagaatgggtgtcgccctcctgatgatcacttgaaggccccgtccttgctaggggcaataggatgca

SEQ ID NO: 31980 - DNA, 462 bp, Oryza sativa
  Clone ID: uC-osflM202115f11a1
tttgtttcacacaactatggggatctgaaaattcacgaatacaactggttcaagagcaaccacaattatatcagtacagtagcagcttcatatatttacaaccactcccgcttccacgaaaagatgaactttcagtaagtaaaccaaccactcctcccaagtgcaagtgcatcactgtcacctgtctttcgtaacactacagttttgcctgaatcaaagctttactaaaaagcctcgcccagttcacgaccaatagctacaacaggagaggaggaaatcaaatggaaaagaaagcaagatgcaggcatcaagtcaatccacatagcgcagggatcaactatgccttgttatccttgatgacgatgatgttgaagttatccggcctgaagctcgcatctcatccagagttgttgctaaccagtccaatcctgcatagaggccatcgcctttgagagcacaggt

SEQ ID NO: 31981 - DNA, 188 bp, Oryza sativa
  Clone ID: uC-osflM202115g01a1
aacgtgtgggggggtccctttccaccgtatagtctttttttttctgccaagacccaccaaacgctttgtttttccacatgggaacggaaaaaggggtctctccacccggtctcccagaacaacggaacggatccctgtccttctagggggaaaccccggaggtggttcctagttcctgcccgcgggcg

SEQ ID NO: 31982 - DNA, 384 bp, Oryza sativa
  Clone ID: uC-osflM202115g02a1
gcccgcgttctcagtgtctcgctggcgcgcgagcggttcctacaacttcgcttcttctcggcggggctacgccccttctccatacgcctcccgtcccccgccggcgccgtaaccagatgccacttgtgggcaccagcaatgactgatgaccgtcccgttctcctgacgcacggcttcggcgcctacactcacgtggcagtgggcgtactacctccggccgctcctcgacgacggcttcgaccccatcgtccccgacctgctattcttcggcgactcctgcacgctcgccgccgaccagatccgaggtgttccaggcgacggccgtcaaggccggcatggacgccatcggggtgaggcggttcgacgtggacggcatcagctacc

SEQ ID NO: 31983 - DNA, 497 bp, Oryza sativa
  unsure (1)..(497): unsure at all n locations
  Clone ID: uC-osflM202115g03a1
ttttgtttttttttttttttgggtttttttttttttttttttttttttttttttttttttttttttaaatattttttcctgctgacaaaagctcataggctaacagaggctggcattcgagatagacgcgtcgccaaattaagcactagtgaacagcacgaggcttccgagggatatcgctcgtggcggcgtccacagacagtaacggtttgtgatcgagtcaccccacggcgagaacagccgataccatcgtacgcaaacacatggatcggatcatccagcgcaatgcaaggttaatagctgagaagattccagtgcccaaactgcagcaggggttccagggattaacaaatttcttcattacgccaaccgacaaagtgtcagtgtgtggctctaggcagactcgttgccgccggagccagagtccacgttcatggcggctgcgccacggtagacagcanattccttctcagatcgtttcttgtcgacttgagact

SEQ ID NO: 31984 - DNA, 131 bp, Oryza sativa
  Clone ID: uC-osflM202115g05a1
atctgcatccaggagttcctttaaattagagcgcttatcacggcggcggtgtatgtcttggatggaggacccaacggcagctttccggatctgcattgctctacgtctgatgacgggcatgtcattggaag

SEQ ID NO: 31985 - DNA, 447 bp, Oryza sativa
  Clone ID: uC-osflM202115g06a1
ccgcatttaggagggcttttaaagttagggggcctaacctcttttgcgtttttgtctttttgggatggccccctaaaaggtttttccatctacatttttttacctttggttgccggcattgtcactgtaagaatgggaagctttttcgccaccccttggtaaagtactttggggtcccagttattcttattaggtgcaaggtggacacccttgtttttggaaacaaactctatttcagacaagccaatcaaaggagagtcaggagactcagtttttccactttcgccgttctccttcactaaacgattctcttgaaacaatacatcattgaactgctcgagcgttattttatacatgcagacataggagttctcagtgtggtttatctcagggttgagaaaagcaccaccaccagttccccagcaaggagtggaggatctaccaaaa

SEQ ID NO: 31986 - DNA, 150 bp, Oryza sativa
  Clone ID: uC-osflM202115g07a1
tttgttttttttgttgctggggacattaaacatctttgtttttttgatcttatgcttagagacaaaaccacatcaattcttgcgaacataagggatatatatttatggatattgctaccacaaggcatgaatcatgaatatgaccttggc

SEQ ID NO: 31987 - DNA, 366 bp, Oryza sativa
  Clone ID: uC-osflM202115g08a1
ttggtttctaatttcagaatggactttttgataaccggcctgcagtcgagcgatcgcctagctaaattaaccaagcagccaaggcaatccagcaatgctgaacgctgcgtgtatatgcatatgaacatatgatcgatcgatcgatcagtggatgcagatgccggggagcttccactggaacttgcccgagcgccgctcgtcgggcggcgccgccgtgtagttcctccagacgtcgaggacgcctcggaggtcgtgcatcttggcgccgaggcccacacagcagttggcatggagcgtgcagatcttgttcagaaccctgctgagctgacagaagccactgatgtaggtggtgtcgagggactgggt

SEQ ID NO: 31988 - DNA, 435 bp, Oryza sativa
  Clone ID: uC-osflM202115g09a1
tttgttttagttcttaaatgggtatgttataacataaccaatccatggtaaatttttgttatacaaatcattcttcctgttttacaaaagctcataggctaacagagtcttgcattcgagatagatgctacgccaaattaagcacttcttaacagcacgatgcttccgagggatatcgctcgtgtcggcgtacacagacagtaacggtttgtgatcgagtcaccccacggcgagaacagccgataccatcgtacgcaaacacatggatcggatcatccagcgcaatgcaaggttaatagctgagaagatttcagtgcccaaactgcatcagtggttccagggattaacaaatttcttcattacgccaaccgccaaagtgtcagtgtgtggctctagtcagactcgctgccgccggagccagagtccacgttcatg

SEQ ID NO: 31989 - DNA, 457 bp, Oryza sativa
  Clone ID: uC-osflM202115g10a1
tttggttttttttttttttgagaaaaataatttcatccgatttgataaatctgaccaagtacgaaccaagttaagacgaaaaggaagtgacatgttctctcggatgtcacctaaatggataaaattcgtcgtcgaaattcaaacatttcaatccgaacccagaaccctgattcatcatatatactctacagacgtgagctcgagctcgttgtcatcaaccctgcaatctcctttgcaaacctttccatcaccggaggcggcagtagcatcgacgccgccaccgggtcctcgccgtcggtgttcctgcacctcaccaggaaagtcgccagcatcggctgtgccatgccgctaatgacccagtccccgcgcccaaagtttagctccgtgaagagccgcgtaaggtccgacaccacgtacaccccgtcgaacaccatgccgtgcccacgcagtgatgcca

SEQ ID NO: 31990 - DNA, 469 bp, Oryza sativa
  Clone ID: uC-osflM202115g11a1
atctgcatccaggtgcttcccttccattagtccccttatcagggtggcggagtaggtcttggatggaggacacaatggcagctctccggatctgcatcgctctacgtctgatgacgggcatgtcattgtaagaattggaaggttatcctcctccccaaggtaaagtacattggagtaccagctatccttaataggtgcaaggtggacacccttgtttctggaaacaaactctatttcagacaagccaatcaaaggagagtcaggagactcagtttttccactttcgccgttctccttcactaaacgattctcttgaaacaatacatcattgaactgctcgagcgttattttatacatgcagacataggagttctcagtgtggtttatctcagggttgagaaaagcaacaccaccagttccccagcaaggagtagaggatctaccaaaaacaatctatgaggcacagtct

SEQ ID NO: 31991 - DNA, 466 bp, Oryza sativa
  unsure (1)..(466): unsure at all n locations
  Clone ID: uC-osflM202115g12a1
ttttgttttttttttttttttcagaaaagcatcatttttttgctttgcttcttggatttgggaccagaatgtatatgtcaaagacatgataatacaaatggggcactagaatctgacattctgtctaactacctatctagaaaaaattatatgggtactcaaattctcaacttgctaatcatcactagaacacaatagttaagaagcatgaaatccttgcacaaggttttgtcaggcttgcatattcttactgttaggattcattaatttacggtagaatggccgaagaaacttggcatcatgtttctgcctattcggtcttccatgcattaagtatcaaagtgaagccaaaacgatgcgcttgaagctccttttcattctgagagcatgaccttgacagtaattttttcatggattggcctgactgaaacaagaacacngcacatccattcgatgaaccaaatag

SEQ ID NO: 31992 - DNA, 461 bp, Oryza sativa
  Clone ID: uC-osflM202115h01a1
ttttgtttttttttttttttgggggcaccgaaaccagcaattggtatattaactcgagcaaacttaaaatgctcgaaaaagttgttcagcaacgaacaaaaaaaaagctctaagcaaaataaaactaatcacattgttgcccaatggcagataaactttgagcataccaactgacgacggttacaaaatcctaccagctgagagcatcttcctcttgtttattggcccgggggaaaaaagggtaaaatgcggctaactctttcgagtttatgctcagttattagcatcaaagatgctcaaagagtgaaaaaataaaaaaaaaaaacccgcacccgtgtaggcgtgtgtagcttaaagcagcaaccttctttgcaggggttttccagccctccatggtgacctttttggttttttaaaagaaggtgaagccccccgtttaacccccccccccccccccccat

SEQ ID NO: 31993 - DNA, 378 bp, Oryza sativa
  Clone ID: uC-osflM202115h02a1
tttttgtttttttttttttttggtttgggaaaccaagtgtaacaaaaagattagtttgaaacaaatgaaagaatacagtgtgtgttccccgtccacccagttacatacatacatcccaaggagttcatcttctccttttttcaagagaactcaaaactgcttggtacaaaccagtactagttacatgatcagtagcaatggcgtcgaattgcaggtattgcagatgaaaccacctttgttcttttccccctctagaataaagatggagaaggaagaaaaaaaaagaaatcaatagtaattacctcccagcattaattggcattggtaagaagagattagatgctgattagattaataatcaagctgatctctactcca

SEQ ID NO: 31994 - DNA, 410 bp, Oryza sativa
  Clone ID: uC-osflM202115h03a1
ttttgtttaaacaagtgcattgtgacacagcatgcattgcattgcgtgggtttacttttcttattctttttacagcagtgagccaatgatgcatcaagcagcaccagcagttgcgaaaagcatacaggttaactgcaaatgcaggatcaatttattctaaaatctaaacaggtttcaatgaaaatttacaacgatcgtgttcgaagtttcgattccaccctaggagcagtaagaaaacacagttgatttgccgaaacatgtttctgtgctccatctgattgcaagaattatggcagtatcaggttttgcctaaacattttcttcatagctttggcctggattcgtagtcgacattgctgtccttaagaggggccaatgtcccgatgatagactcgtatatcccaatccct

SEQ ID NO: 31995 - DNA, 473 bp, Oryza sativa
  Clone ID: uC-osflM202115h04a1
ttggtttagtcaaacaatgggcaggtttgtagcaacattatcaatctttcgtgacaaaacatgcacagttgcatgaccgaactactaccaatttacaatttgtgagaccaacatatggaacaaaaaccttgtttgtggctgtcaaactggtatcattagtgggaaaagaacacctgctacaaagaagtgtcagacactagaagtagatcagcaaccatttcatcgatcaaggaaccaagcaactctgttgtaatgtcaatgccagattcgtatgactccaacttgaaatctacccagctccccagaggactactcatttctttgtacacgagttcatccaccatccactcctcagcaaccttcagatcagtcatctccgcatagatttcttcagctgtgagcttcttcagaattgccatccccaagaaccatgagccgtagccggcattgaaatagtatgcacatctcacact

SEQ ID NO: 31996 - DNA, 470 bp, Oryza sativa
  Clone ID: uC-osflM202115h05a1
tttgtttggtaagaccataacatcaagaactctccttgaaaattttgtaatttgatccgcaacgattcagatgcagatgaaacactgctgattcccactcagattacacacaatacaaatacaccgacaaactgcctcaaaaaccaccaaattgattcaaaagtaaaacgggtatgagggatcttcccaccgagactgactaaacctaaccacagacaattggatccactggacccagattattcaaaaacagatggctatgacggcatcgtcctcgcaaccgaagggaacttgcagctatggatatcctcacttcgcgctggcgagctgggtgcggatgagcttggcggccgaaaccatgttggtaagggcgggcttgacctcgttgtacttgcgggtcttgagaccgcagtcagggttcacccagagaatgttagtgtcgagcaccgcgagcatcttgttgacgcggt

SEQ ID NO: 31997 - DNA, 388 bp, Oryza sativa
  Clone ID: uC-osflM202115h06a1
gaaaatgaaatagcaaacagcccggccgttgctttttatttaaggggggggaaaatccaaaaaataaagaaagaagaagaagaagagaagagaagaggggaaaatgaaaggggagaagatcgatcgggggcccgaagtatccatggcatgtatgcaatcggccccctagagatgtgatgtgactggatcggagctagacaagggggggcttgccccggcccatggtgaaaccccgggtgccgccgggcatcccggggccccgggcctgaggaggccgcttgcctggcctggaggggcccttggggcgggggctcgccggcagcttgagaccagggctcgccggcttaaagtgccccacactgcccgcgggggcccactgcgggctgtg

SEQ ID NO: 31998 - DNA, 460 bp, Oryza sativa
  Clone ID: uC-osflM202115h07a1
ttggtttttttttttttttgtgtttttttttttttttttttttttttttttttttttttttttttttttttttttttttttttttttttttttttttttaatattacacctgaaatacaaaaaaaaaattagattctaaacttatccggcacaaaaggagacaggaaagaaaaaaaaaaaaacaggagaaaaacacccccaaacctgggggggggcccccccccccggccccggaaaaaaaaaaaaccgaaaggagggggaacaaacaaaaaagagaggcaaaaacccccaccaaaaaaaaccccccaaacccaatcaagaaaaaaagccaaggaaccttggggcccaaaaaaaaaaaaaaatttccaggagggggacaacaaaaccctttttggtagcggggaaaaaaaccccaacactgcctgacgggggaggaaaaaaagaagcattaggcgggtcc

SEQ ID NO: 31999 - DNA, 428 bp, Oryza sativa
  Clone ID: uC-osflM202115h08a1
tttgttttctcttggacttggtctgggttccagtatgtcctgcatggtaattggtaaataaatacacggtatcgttgcagggatgatgtgcctattcttaatattacaccgatatactatagtatagttagattctcagctgagctgccaccagaggagagaggagagtttacagtggccgcaacagctttgcagccccaagacatcaggtaggaatgccaaatcttgctaaggaaatggcatgtacagataggattaggatcaagctcaaaacaaaacccatcaaccagatcacatgaaccacaaaaggttaatcatggcaaatcgttaaggaaacctctcagacatgacatctgcctgcttgtccattatccttatgagcccgatgtgtatgtatatcgtgtctgagccccctgcactagctctac

SEQ ID NO: 32000 - DNA, 377 bp, Oryza sativa
  Clone ID: uC-osflM202115h09a1
tttgtttttttttttttttggtttttttttttttttttttttttttttttttttttttttggacccacttaaaagatcctattttagattgggaattcaacaaggggaggggttcactgttttcacatttaagaagaaggggcccctgttacatttcagaagagaaacgcctagggttttccggttggctccacagggggatgggttagccggtttgggttgaaaaccttaccctttttttttatttgacataagggccttccctaatattaaaggttttttaggggggaagccaattcatgacacaaccaacttttgacaaaaaatgggcccgaggaaccggccaaaaataaaggggtggtaaaaaggggcgaaca

SEQ ID NO: 32001 - DNA, 471 bp, Oryza sativa
  Clone ID: uC-osflM202115h10a1
ttttggtttgtgataaactagagatatattcgatttccacgcttgctgtaaaagcgcagcgcacagtcatcagttcatcagcaaccataaactgatagtactccatataatacggaactggttcaggtttccttccaaaggcatgcatccacccaaacagaatgatgctttcgcatcgctagaagttttacgggtacttaggaaatgggagtcttagctattgtagatgagcaggaaatgtatggcaagccgcagttcttcatgtcgaaggcgaggcggaggatttgaagatgtccggcttgtgtttatccatcagggaagtgagggctgtgtccagctacttctcaagctcaaattccttcgccaggaactccttcttgagcttcaccttcttctgttcatgcaatctgatcagtttgtctcgttcggcttcaaattcctcaacatccttcacctggcagtctatgaagt

SEQ ID NO: 32002 - DNA, 449 bp, Oryza sativa
  Clone ID: uC-osflM202115h11a1
ttttgttttgaggaacagctggctcgtagagataaaacaacagataactccgacatgaaattgccaaatgacaggtgtatgaaacacaggtaaaatgccgtaccccctaggtacaaaccattgagacataaagaaaggaaaagaaaaaaaaaaagggcgtgcgacccctcggtacgcagacttctcttcacattgagctagaacacctaggaacaatggtgcaggccctgacacttattattgctgaacatccacatgatgatcccaatggttagctccagagcaaattttctcttttgatttttacctacatttacaggcaaactgtgtttctggcttcatgatgaataaaagggaaatttgcatgatcaatcaggactaatggacgccagggataggcgcttccaccatgagatcgcggtcatgctatccgtatggacttgaggaga

SEQ ID NO: 32003 - DNA, 403 bp, Oryza sativa
  Clone ID: uC-osflM202115h12a1
ttttgttttttttttgacgacaactttaaatattgctcaataaaacactatctggagacaacacacacgagagtcatatccagaggaaaacaatcagcccagacggaccactagcaccaaatgcaaagcaatgggaagaactaattcgaccgctaccaccctagtaaaaaccagagaagagagaggaaggggggacaggaagaaaaacattctagtagaacaggagaagaatccatccatcatggtgacagcagcatgaggcatctaaatcgatggtctccaataacatgcggagccatcgatcgatcgatcttcccattttactggccctcgcaggcgtcgcccttggaggcttctttcacctcatcaccaccgtcctccgtgaggtcagaggtccagaggg

SEQ ID NO: 32004 - DNA, 87 bp, Oryza sativa
  Clone ID: uC-osflM202116a01b1
agattccttgagcttcgaccgcaccggaccggggggggataaagaaagaatccccccgagacaccaggcatggcggacaaaccaagc

SEQ ID NO: 32005 - DNA, 69 bp, Oryza sativa
  Clone ID: uC-osflM202116a02b1
ggagatacatactcaaacattcccacaaacgctgagagtgcggtcacatggagagaagcggccggaaac

SEQ ID NO: 32006 - DNA, 296 bp, Oryza sativa
  Clone ID: uC-osflM202116a04b1
cgccgttcttctcgccgccgccgccgacccgcggagcgggctggtctactgcctagccgcgcaccacgtcgccccgcgggaccccgcccgggccgccgccttcctcgccgcctgcgacgacaacctcggtgcagcgacggagtaccaagagggcgggcgttccgcgcgctgtttgcgctgatcggggaggagagggacgagcaggtggcgatcgagcggcactgcgagttgctgaaggaataccccagggacctcacgtatcccaagagagcccaactcatctgcttctcacatgg

SEQ ID NO: 32007 - DNA, 386 bp, Oryza sativa
  Clone ID: uC-osflM202116a05b1
ggcgttttcgtactcgcctctctccgcgcctccgcgctgttcctcctcctctcccctctctcccttctccgccgccgtcgcagcatcaacccaatccgccgccatgagggagtgcatctcgatccacatcggccaggccggtatccaaggtcgggaacgcgtgctgggagctctactgcctcgagcatggcatccaggctgatggtcagatgcccagtgacaggactgctggtggaggtgatgatgctttcaacaccttcttcagtgagactggtgctgggaagcatgttccccgtgctggatttgctgatcttgagcctactgtgattgatgaggtgaggactggttgctaccgccagctcttccaccctgagcagctcatcaat

SEQ ID NO: 32008 - DNA, 152 bp, Oryza sativa
  Clone ID: uC-osflM202116a06b1
ctcgactgcgatgacgtcgactacgagcacttcaacggggacggggtgtactaaaaaggactcgccggacacacaccacacaccaacaattacaacaccattggtgcgcaaacccaacataagcacctccagagcaacaacaaagttcatct

SEQ ID NO: 32009 - DNA, 222 bp, Oryza sativa
  Clone ID: uC-osflM202116a07b1
tttaatgtctctcttcatcttctcgctctcgatctgctacagaagctatagtagccagcaaatcaatcgatcgatccgtacaatggcggccatgaagatgaacaagattgccgtggcggcgctgttcctcgtcgccgtggtggtggcggttccttcttcttttttttctccttcttgtttgcttttcttttttcttttttttctctcttattttctttcttc

SEQ ID NO: 32010 - DNA, 399 bp, Oryza sativa
  Clone ID: uC-osflM202116a08b1
tgtaaaggtttctacctcaacagtaaggagacttccgacccttcaaggaaaaaccattccaaagtctctcagtatcggatggcatttgatacaccaagaattactaaaacagagacatcaaagttgaagaacctcatttcagcatcattcaaacccttgtctcttaccatccccataggcgacggtttccacgaattgtttcctgtgggtcactgtcatttatagcagataaagtcttatagataagccaaagtttttcatttctgttggctaacaaggggaggcaaaaattgagttgcgctctcaagagtgtacaatgcttacacttgttggcacatgagattcttttgctcagtcacaggcacaactttgtgctggcatgcagctcaaggctccaac

SEQ ID NO: 32011 - DNA, 385 bp, Oryza sativa
  Clone ID: uC-osflM202116a12b1
gcgattgggcagcagtcgctgatctacgcgttcgtggcgaggggcacggtggtgctcgccgagtacacggagttcaccggcaacttcaccaccatcgcggcgcagtgcctccagaagctccccgcgagcaacaacaagttcacctacaactgcgacggccacaccttcaactacctcgtcgaggacggattcacatactgtgtagttgctgttgaatcagttgggcgacaaatccccattgctttccttgacagagtcaaggaagatttcaccaaaagatatggtggtgggaaagcagctactgctgcagcaaacagcctcaaccgaagattcggatcaaactaaggagcacatgcagtattgtgtgaccaccctgaggaaatca

SEQ ID NO: 32012 - DNA, 382 bp, Oryza sativa
  Clone ID: uC-osflM202116b02b1
aaggatggtgacggcggcgctgcgagagatggaggtggcgggtgctcaggccggcatcctccccctcctcctccgtcaccccgcgtccctccggggctccctctccctctcctgcggcggcgcccgccggagctgggcggcggcggcggccacggcggaaggaggaggaggagaggagggtcgcggctacgagagggtgcccatggacacccccggcgcctaccgcctcgtcgaccgggccaccggccgcagcgtcatcgtgtggggcggcaccgacgacgtcagcatgccctcccccgcggtgctctccacgaccacgcgcgttcccgacccgccaaaagaaaatgggagaagtacaagtattggaaattttggcagactc

SEQ ID NO: 32013 - DNA, 186 bp, Oryza sativa
  Clone ID: uC-osflM202116b03b1
ctccgtgtgatgcggcagcaagtgttcactgcgttcttgttctcgatttatctttcttgggttcttgatctgtagcttattagcggccatgtgcggcggagcaatcatctccgggttcatcccgccgtcggccgctgcggctgcggcggctgcggttgccaagaagcagtagtgcagtagggtcac

SEQ ID NO: 32014 - DNA, 382 bp, Oryza sativa
  Clone ID: uC-osflM202116b05b1
cctggatggctcgcttccgggagacttcgggttcgacccgctggggctatcggacccggaggggaccggtgggttcatcgagccacggtggctggcctacggcgaggtgttcaacggccggacggcgatgatgggcgtcgtcggcattgtcgccccggagctcctcggcaagctgggcctcgtccccgccgagacggcgatcccgtggttccagaccggcgtgatcccccccgcgggcacctacacctactgggccgacccttacactctcttcgtcttcgagctcgccctcgtcggcttcgccgagcaccgtcgctttcaggactggtacacgccgggctccatggggatgcagtacttcctcggcctcgagaagtacctc

SEQ ID NO: 32015 - DNA, 491 bp, Oryza sativa
  Clone ID: uC-osflM202116b06b1
tttgtttcacgttcatagttagcacatggctggggctgctttctctttgtattaaagcccctgacccactaaaatctggtttgctggaaaacgggaacaactattttatctcaggataccagatggtcccttctttgtaggccatgtacttgcatttgagtattggtgataacacacctgactgattgaatttcaagggatgacgaaggaacctgacttattggagggaacaaagaacctgtcttctcaaagcagagggataacccagaaggccagaactgcaatccacttgctcgacacagtttcttgtcccagcaagctagctctcccctccaccacatcagcaccggaatttttcaactccgagcacacctctctgatcaggtcaggtcagcttcagcttcccctcgtgccattcgtgtgaactactaccaagtccttatctgaccaatagccattgtacggtatctatagtagaagctagagaaatg

SEQ ID NO: 32016 - DNA, 144 bp, Oryza sativa
  Clone ID: uC-osflM202116b07b1
ttactcgctggatgacaccaagacatggccggaggacgaggtgctgctccggcccgtggggcgctttgcactcaaccgcaacgtactcaactttttaaacgagtacgagcatctggcgtttactccattactagatatatatca

SEQ ID NO: 32017 - DNA, 195 bp, Oryza sativa
  Clone ID: uC-osflM202116b08b1
tcacatcccaccaccacgtctagggttccgccggtcctccggccgccgccgccgccgccgccgacccccctcgatctcctccccgagccgtcataggtggtggcggttgcggttcttttcactttttctctttatttttttttatcttatttttattttttacaatctttttttttttttgtctctatatttttt

SEQ ID NO: 32018 - DNA, 191 bp, Oryza sativa
  Clone ID: uC-osflM202116b09b1
atacttcatcacctcctcctccgtctccttccgccaccatttctcccccaaatccgtctcctcctcctcccccacccaaatctcccacctccgccgtcgcggaatccgccgcgacgacctcccctcgatccgcccgatccgaccccggatcggatcccaccgtcgccgcccgcgcgcgtggtggttgggtg

SEQ ID NO: 32019 - DNA, 525 bp, Oryza sativa
  Clone ID: uC-osflM202116b11b1
ttcccttctccaccggctcctgctccgccttgtgtcgtgccggcgttctccatcgccggcgtgcggagcaccgagatccacccgagatgtggcgcggctgcgtctcgcgtggcctcaggagcctctccaagggcaagggctcctccttcttccgcccccgtctccgccgccgctaggctcttctccaccgcctcgtcgtcgtacacggtggtggatcactcgtatgacgcggtcgtggtgggagccggcggcgcggggctccgtgcggcgatcgggctctccgagcacgggttcaacacggcttgcatcaccaagctcttccccacgcggtcgcacaccgtcgcggcgcagggtggcataaatgctgctcttggaaacatgacggaagatgactggagatggcatatgtatgacactgtcaagggtagtgattggcttgggtgaccagattctattcagtatatgtgcagagaagcaccaatgcaggtatagaacttgaaactatgggtggcatttcaagactga

SEQ ID NO: 32020 - DNA, 101 bp, Oryza sativa
  Clone ID: uC-osflM202116b12b1
tcggatggctccatgttcgccatggcgaagctggacctgtcttccctagatggcatagaggacgacttccacttctgcagcaagctggccaaggaggaatc

SEQ ID NO: 32021 - DNA, 562 bp, Oryza sativa
  unsure (1)..(562): unsure at all n locations
  Clone ID: uC-osflM202116c02b1
aaccttgcgacggcccctaccatcagggcgcattagtcctgcacatgctgccatgtgggctactagtgttggagttgctggaacagctttgttggcttggaaggctaatggtttggcggctgggctcgcagcttctaatcttattctgtatgcatttgtatacacaccattgaagcaaatacaccctgtaaatacatgggttggagcagttgttggtgccataccaccacttctagggtgggcagcagcttcgtctgaactgtcactgaatgctatgattctccctgctgcattgtactattggcaaataccacattttatggcccttgcatacttatgtcggaatgattaccttgctggagggtaccgaatgttttcttttgctgatcctactggtaaaagaactgcatgggtatcactcagaaattgtctatacatgctgcccttgggattttttgcatacaactggngtctcacatctgagttgttcagtcttgaagcatcacttctaactttgggcttacaattgagctctacattgtgctggagccacccccaaact

SEQ ID NO: 32022 - DNA, 81 bp, Oryza sativa
  Clone ID: uC-osflM202116c03b1
cacattcccaaagctaagcttcgagctcccccattgagtcagcgatctagctagtagctggttggttaaaaggcctttatg

SEQ ID NO: 32023 - DNA, 301 bp, Oryza sativa
  Clone ID: uC-osflM202116c04b1
ggagactgctattcacttccactcccttccccactgccttcctcctctcactctcactccccctgcgaccgccgccgagaggccatggcggagcaagctccactggcgccgatgcctcgagtcaagctcggcacccggggcctagaggtgtccaagctggtgttcgggtgcatggggctcacgggcgcgtacaactcgccgctcgacgacgacgccggcgccgccgtcatcgcgcacgccttccgccgcggcgttaccttcttcgacacctccgacgtttacggccccctcgccaacaaga

SEQ ID NO: 32024 - DNA, 456 bp, Oryza sativa
  Clone ID: uC-osflM202116c07b1
tagtttcactggttgcatcagttgattcgctttcctcgtatcatgctacgtcattgctggtcaatttaagtccgccaacacgtggagttgttagcagagggattggctttgaagggatttccactcttatcgctggagtatggggtacaggaactggctcgacaactctaacagagaacatacatacccttgagaataccaaaatggccagcagaagagccttgcagtttggcgcagtcctgttggtcattttttcattctttggaaaaattggagccctccttgcctccattcctgttgctttggctgcctctgttctgtgcttcacctgggcactaatcgtcgcgcttggcttgtccacattgcgatacacccaagccgcaagctcgagaaacatgataatcgtcgggtttacgctgttcatctccatgtctgtcccagcttatttccagcaat

SEQ ID NO: 32025 - DNA, 164 bp, Oryza sativa
  Clone ID: uC-osflM202116c10b1
cggaaaacccggaacgacccacgcgggcgggagacagctattcacaagcacaacgaaccacacaggggaccgacagaaacagggcagggggggggcgaccgccgacgagaggccaagacggagcaagcaacaaaggcgccaaagccacgagccaagcacggcac

SEQ ID NO: 32026 - DNA, 80 bp, Oryza sativa
  Clone ID: uC-osflM202116c12b1
taaatttgggaggctgttgaactaccgctgacacatcatgagctgtacaagcagattggccttgatcctccaagaggcat

SEQ ID NO: 32027 - DNA, 72 bp, Oryza sativa
  Clone ID: uC-osflM202116d01b1
tgttttccagaagcctcctggtgtcggtgggaccccgagccgatcgatcgatcgaatcgaatgccccgccgt

SEQ ID NO: 32028 - DNA, 127 bp, Oryza sativa
  Clone ID: uC-osflM202116d04b1
ggagatgatgtgaacgcctcctaacatgcaagacagttctgctggtgcagtgcctactacggtttttaatttcattttcggtgtatagctatttgttaccagatcgtgcatttgttgttcgtattgt

SEQ ID NO: 32029 - DNA, 144 bp, Oryza sativa
  Clone ID: uC-osflM202116d06b1
gcgacttgctccgctgcttgcgctcgcccagccgtcgtcgtcttcgcgtcgccggccgccgcgcggcggcgcgccgcctcctccgtctacctccctggtcggcctctgcgcggcggcggcgtcgtgcgatgcagcgctgggcct

SEQ ID NO: 32030 - DNA, 154 bp, Oryza sativa
  Clone ID: uC-osflM202116d09b1
taacccccttctctttccgccgccggacgccggcgagtaccggccggattcttggctcggccatcttgcctgcctcgctgctacctgctcgttgtgtggaagaacctctcttccaagggaagagtagagggaggcagggaggggatgggggagg

SEQ ID NO: 32031 - DNA, 660 bp, Oryza sativa
  Clone ID: uC-osflM202116d10b1
ttataatataggaaaaaaaaacaaaacacaccaagccaaatttaattgacaatgggatcgctttccaccaacatcgtcctttgtgcttattttattttttgtgtatttttatttttttattatgttttgcttttattattcttttttattttttttttcttttttttttcttttttcttcttttattcttttttttttcttattatttttcttcttttttttattttatttttttcttttttttattctttttattcttatctttttttttttttttttatcttttcttttttttctatttttatttttttttatttttctatttatgatttttcttactttttttctcatatctccatctttttttttattcttttattacttatttttattcttcttattctctttcttatctttctttatctttttactattattttcctatttctttttctttctttttgtgtgtattcttttacctttttttctctcttttcttattttttttttttttcttttcttttattgtttatttctttctttacttttttacttactatcttattttatttcaaatttctctttttttatttattttacgtctatttcatttttttacttttttttctattctattcttattctcttcatctttatttc

SEQ ID NO: 32032 - DNA, 445 bp, Oryza sativa
  unsure (1)..(445): unsure at all n locations
  Clone ID: uC-osflM202116d11b1
ttaaatcacatgttggacagagtacatcccaggcagtaaagattgatccgtcatcagaaagcaaggaagactttaagccactgcagcatcccttgataccaagtactgttgttccagattccagtataaataaccttccgaagaacatggaagagcctacaccaacaaacatggaagagcctgcaccaacaccctcaacgaagcaagagggaaatgccagggatgagactcctagaagcactgtcgctttaaatggtgggttcctgcagaattcagttggccaggacttagtccatcttggtgtggcgagaactagttcaggctttctagggggaggtaccagtacaagtacaggatccctgcgctgcanaatggatcttgatcctgcatccagcagtatggaccatttcaaacaccagatagaaagaaagtggtctcaggatga

SEQ ID NO: 32033 - DNA, 107 bp, Oryza sativa
  Clone ID: uC-osflM202116d12b1
atgactatctgctgatatttctgcacatatatataatgttttcttctccatctgcactctctggaaagaagaagaagaagaagcagaagaagcttggagcttgagct

SEQ ID NO: 32034 - DNA, 213 bp, Oryza sativa
  Clone ID: uC-osflM202116e01b1
cgcttggcatgcagccctgccggagatgcagacgacgaccgtgcccatggcggcagcggcggcggtggcgccgtccaccaccacctcctcctccgcctccttcaaggttgcggcctatgcttggtcgtcatgccggagcagctcctctccggcgacaagattggtcgccgcccccaatcaccagcgaccaccgctagttgttggagccattgt

SEQ ID NO: 32035 - DNA, 175 bp, Oryza sativa
  Clone ID: uC-osflM202116e02b1
aaatttaatttaagaaaaaaagagaggaagaaaacgagaaaatatttaccttcctcttctccgtatctagctcgatccccgaagaaattcgccccggaatctctcgatccgctcgatccattcccccgatctgtcgatcgttccttgcgaacccttggttcccggggtccccgac

SEQ ID NO: 32036 - DNA, 113 bp, Oryza sativa
  Clone ID: uC-osflM202116e03b1
acgatgctataagacacacattccaaaagcatctgtggccatcttctcctagtcctaggctcgcgtcaatggcggcgtccaccatggcactctcctcccctgccgccctcgcc

SEQ ID NO: 32037 - DNA, 155 bp, Oryza sativa
  Clone ID: uC-osflM202116e04b1
agcactgcctgcagtgaccaacagcaaccaatcagcaaatcagcaatggagagggctctgatgagcctcatgaggcggcgctccctcctccagagcggtggacgagcaccgccgacgatggtctcctcctctcggtgtcttatcactttctcttc

SEQ ID NO: 32038 - DNA, 126 bp, Oryza sativa
  Clone ID: uC-osflM202116e05b1
cagaatcaaatccctctcactcccagatacctgctgctgccactagcccactaccatggatccttgcaagctccggccgtcgagctcgtacgacacgaagacgacgacgactaacgcgggagctcc

SEQ ID NO: 32039 - DNA, 62 bp, Oryza sativa
  Clone ID: uC-osflM202116e06b1
cgagctcggttcgagcaagaggagcgcgcacccccgggacagcataactcgacgacgccggg

SEQ ID NO: 32040 - DNA, 57 bp, Oryza sativa
  Clone ID: uC-osflM202116e07b1
tgggcctagctaacctccggccgcaccggacggtcgattcattttccacctgcccgg

SEQ ID NO: 32041 - DNA, 206 bp, Oryza sativa
  Clone ID: uC-osflM202116e08b1
taaacacaccaagctcagacaagagaagagaagagaagccaagaaatcatcatcatctcacgcatttcttgctcgaattccagctcgattgagcatcatgggttacaacgagctgattccggggttgccggaggaggtggcgagggagtgcctcatccgggcggggttcgaccagctgccggcggtgcgccacatcttgcgccagt

SEQ ID NO: 32042 - DNA, 59 bp, Oryza sativa
  Clone ID: uC-osflM202116e09b1
gcctgcagtaccgaactcggattcccggtcagacccacgcgtactgttatatacacaca

SEQ ID NO: 32043 - DNA, 346 bp, Oryza sativa
  unsure (1)..(346): unsure at all n locations
  Clone ID: uC-osflM202116e10b1
tcgccttcgcctccggcgaactctccaccgccccctttcctacatcccaccactattttataagccagcccttcatctcatctggagatctggttctactcatccaggaaagccccaatctttatcatagcaaggaggtcatgtcggaatcggccctcgacanacatatagtggtgaaaattcccgatcatgttctgccagatgctttcataggagaaagtgttggtaaaggtaaagaagatggagcaaccgtagataacatggacccgtcccgcccttttctagttatcaagaagtctgatttggataaggctgatgaggtggtgcgggatgccttccttgatat

SEQ ID NO: 32044 - DNA, 355 bp, Oryza sativa
  Clone ID: uC-osflM202116e11b1
ttaatgtacgactagaaactacatggactgtcctaaggaagtttggttatgataatgaaatcaagcttagagatgaccttattccaacaattaaacgagcgcccgatcaaaccctggagttgacaggtcaagccattgatttcttgagaggaattttcaatatgtttgacacagataatgatgatgctttgctacctgctgagctggatgatcttttttccactgcacctgaaaacccatggtctaataatccatatgtggactgtgctgaaaggaatgtcttgggtgggttggtccttgaaggatttcttctccaagtggtcttttatgacacttctagatccagcaatagttt

SEQ ID NO: 32045 - DNA, 336 bp, Oryza sativa
  Clone ID: uC-osflM202116f02b1
cacctactttaccccctcccccttcctctccctctccctcttcctcctcggcgacggcgatggagggcgctgcggcggcggcggcagtgcccatggtgaaggtgcgggtaggcgacggcgtggagttctcggtgcaggcccggcggctagcggagctcgcgccgggatacatatgggacctgcccgccatcgagtccggcgacatctacgacaccgtgcagttgtaccgcatgaacgccgagctcttcacgagccgcgccaccggcgagctgctttcccagggggtgctgcgcgtgcagagcatcttcgcggagagggtccacgacctggacaccc

SEQ ID NO: 32046 - DNA, 213 bp, Oryza sativa
  Clone ID: uC-osflM202116f03b1
gccgttcacttcaccattccaccaactagctagctagctagccacgccatccctttctcctcctccttcttcttcttcttcttcttcttcttggtccggagagagtagagaggagggcgcgcagcgagatggcttgcccggcgcagtcgatgctgtcggcgagcaccaccagctgctgcgcgttcctgaggagcagcgccgccaccaagccac

SEQ ID NO: 32047 - DNA, 122 bp, Oryza sativa
  Clone ID: uC-osflM202116f04b1
atccgtacttttccatcagattacgagccttaccccccgtgagttctcttctaacaaacctctggcccttccacatctatagagctcctctaaggcaggacgccgcaagatagggaggagat

SEQ ID NO: 32048 - DNA, 468 bp, Oryza sativa
  Clone ID: uC-osflM202116f06b1
gcatttgactatggactagtgaagttcgacagttcaggccgtgtaattcaattttctgaaaaacccaagggcactgacttggaagcaatgaaagtggataccagctttctcaattttgccatagacgacccgactaaatttccctacattgcttcgatgggagtctatgtcttcaaaagagatgttcttttaaaccttctaaagtcaagatatgcagaactacatgactttgggtctgaaatcctcccaagagctttacatgagcacaatgtacaggcatatgtcttcgctgactactgggaagacattggaacgatcagatcgttctttgatgcaaacatggccctttgcgagcagcctcccaagtttgagttttatgatccaaaaactcccttcttcacttcacctcgatattttgccgccacaagtcagataaatgcaggattaaagatgcgataatttcccatg

SEQ ID NO: 32049 - DNA, 236 bp, Oryza sativa
  Clone ID: uC-osflM202116f07b1
tctaatctttagcttttcctgcctccctccttctttccctcctctcttctcttctcttctcttccatctcctaatcttcccctaacaagtcctagctaaattcagatccttagttgctggtttttcttgttccttctctgagctagatttcttgctgctgagttgaagctagtatcatgagtccaccgagtgtgatagggcaatctggggacacaacctacaccaaggcgtttgta

SEQ ID NO: 32050 - DNA, 200 bp, Oryza sativa
  Clone ID: uC-osflM202116f09b1
gcatgtaactagtaactaataaagtgatgacgatggatcgtcccaacgtcgccgtggccgcggtggggctgctagtggcggcggtggcggcgacgctgccggcgccgtcgtgggggcagcagcagccagccaacaagctcatcaccagcacctccggctccggcatagggttgtccaagtggctggcgatgaaccaggag

SEQ ID NO: 32051 - DNA, 493 bp, Oryza sativa
  Clone ID: uC-osflM202116f10b1
tgttgaggataaagaacaagatgttggtaacgccaaggatagtagtgttgaagggttgaaaagcgttctgaatttcttcaagtctcggattcctgaattcaaagttcaagtaataaatgtagatgtgtctgaggaagctgaattagcttcagattcgtcagaagaattagtgcaagatgatgtgaagagcacgtcagagaactcattggaagattctaccactgaggagcttcagcaggatgatgttccagatggagattcagactcagctgaagatagtaaaagtccagaaatgaagctcttcattagtggagtggttcataacaaggaggatgctggagcaaaatcatatgttcgagttccagctgaaatcaataatttggaaaaggattccttcgaactttacattcctggaaagggtctgatcgagatctggctgatacaaaggcttgcaaacagaaaagtgctgatatggcttgccaactggcatcag

SEQ ID NO: 32052 - DNA, 156 bp, Oryza sativa
  Clone ID: uC-osflM202116f11b1
taggtcaaggaaattaagttcctcattggtgacattgaggccagtcaaggtgccttccagtactttgggctgagggaggatcaggtaccactcatcatcatccaggatggtgagtccatgaaatttttgaaggcacacgttgagcctgaccaaaat

SEQ ID NO: 32053 - DNA, 57 bp, Oryza sativa
  Clone ID: uC-osflM202116f12b1
atctctcccaagggcaaaaaagataatttcattcgatggatctatcactaggcgcgg

SEQ ID NO: 32054 - DNA, 235 bp, Oryza sativa
  Clone ID: uC-osflM202116g03b1
cggttacgatgctcatctgcatcgtgctctacgaccggttcctcgtccccgccgtgcgccggcggaccaagaacccgagggggatcacgctgctgcagcggatcagcctggggatgctgctccagatcgtgacgatggtggtgacgtcggtggtggagagccagaggctggggtacgcgaggaggcacgggctggtcgccaccggccggcagctgccggtgacgatcttcatcct

SEQ ID NO: 32055 - DNA, 424 bp, Oryza sativa
  Clone ID: uC-osflM202116g06b1
ctccttctcaccgagccgcgcggcctcgccaaggaccggcagcgatggggaagagcagcagcaagaagaagaaggacaaggtgatcctgcccccgcagctgccgccggaggtggacgacgacgacgtggtggtctctgacgaggacgtcgagttcttcaggggcaacgagggccacgcccgcgcgctcgccacgctcgacaggaagtccatcgacagctacgtcaccagggtcgcccaccacgacgaggacgaggtcgagcgcctctacgaggagcgcgagcgcaggaggaaggcggtcgaggccctcaggcccaagaaccacgacgacgacgactccgaggtcgaccgcgtcgacgcccttcccgtcaagaccctgcaaggggagctggtctacaacaacgcccagaaagcgagatttgatga

SEQ ID NO: 32056 - DNA, 65 bp, Oryza sativa
  Clone ID: uC-osflM202116g07b1
ttccgtgccggaggcggaagaccaccctcccaggagagggttcaatttaaactaaccgtcccaaa

SEQ ID NO: 32057 - DNA, 205 bp, Oryza sativa
  Clone ID: uC-osflM202116g08b1
tttgctgacgaacgcgccgttcatgctcaactgggattgcgatcactacatcaacaacagcaaggccatcagggaggcgatgtgcttcctcatggatccgcaggtcggacggaaggtttgctacgtgcagttcccgcagaggttcgacggcatcgacgtccacgaccgatacgccaaccggaacaccgtcttcttcgacatcaac

SEQ ID NO: 32058 - DNA, 68 bp, Oryza sativa
  Clone ID: uC-osflM202116g10b1
taagataccctggccccacgccccctcctccctgtgcttctattgtccccaccaaccagagagagagg

SEQ ID NO: 32059 - DNA, 125 bp, Oryza sativa
  Clone ID: uC-osflM202116g11b1
tcacgatcgaacgcagtagatgcattggctgccagctcgatccgcaccgacgatactccggcgaggcaaagcgcggcgtaaggaggaggaggaaaagtggccgggatggagtcggacgacgaccc

SEQ ID NO: 32060 - DNA, 60 bp, Oryza sativa
  Clone ID: uC-osflM202116g12b1
tttagaacatcagaatcaggaacttatgaatttgagggcagagattgatgggatgcctcc

SEQ ID NO: 32061 - DNA, 256 bp, Oryza sativa
  unsure (1)..(256): unsure at all n locations
  Clone ID: uC-osflM202116h01b1
ctgctggagtacaccagtgcatcttcttctaatgtttcaaatgaaggcttggtgccttatactctggaggatctgcaaagttacttaaacaaatttgaaccatcatattatacaaagaatggaaaagaccccttggtctatccatatgttctgctgttaagcatccaattgcttncagcaattctttatttgtctaaagaagttggagaggaaggataccatgtagaagctgtgcatatttcaattgctttatctg

SEQ ID NO: 32062 - DNA, 75 bp, Oryza sativa
  Clone ID: uC-osflM202116h02b1
gccctacccaccaggacaccacgacgagcgccacgagtccaccttcagctccgccgatgacgactagagcaccgc

SEQ ID NO: 32063 - DNA, 321 bp, Oryza sativa
  Clone ID: uC-osflM202116h03b1
aaaataagcaaacccatcgattgaaccaacccaaccgcacgcgacgcgacccactccccaccccttccccctcccctccccgccgctgccggcgatcgccggagatgtcatggcttgcccgcttccttcgccaccctcctcaacatccccgaagatgacccaggcgccgacgaccgccccgacttctacgccgccgccgtcgccccggttccctcctggcgcattccggattcggcgcaattcgggccttcccacccttcgcatttgggcgcgggggagggcgtcaaggaggaccttaccgagctgtccaaacccctaccc

SEQ ID NO: 32064 - DNA, 405 bp, Oryza sativa
  Clone ID: uC-osflM202116h04b1
gtcggttctaattaatttacctgctccacctcctcctgctccccctgatcggatcggcccggctcctcctcctccgccgccgccaccgccgccgcagataggagaagatggccgcacttgataccttcctctttacctcggagtctgtgaacgagggccaccctgacaagctctgcgaccaagtctcagatgctgtgcttgatgcctgcctcgccgaggaccctgacagcaaggtcgcttgtgagacctgcaccaagacaaacatggtcatggtctttggtgagatcaccaccaaggctaacgttgactatgagaagattgtcagggagacatgccgtaacatcgggtttgtgtcagctgatgtcggtctcgatgctgaccactgcaaggtgctttggaacatcg

SEQ ID NO: 32065 - DNA, 119 bp, Oryza sativa
  Clone ID: uC-osflM202116h06b1
ccaggtcactccacctacgcggtcgcccaccgcgccgtcgccgtttccggtcagcccctcaccgccgcctcccgatcgccaacgacgtcgtcgtcgttgggcctatccctcgtcaggtt

SEQ ID NO: 32066 - DNA, 333 bp, Oryza sativa
  Clone ID: uC-osflM202116h12b1
tgaaatgtttggatggtatccaaggccccatctatgttggtactggatgcgtctttagaaggcaggcattgcatggctatgatgcccccaaaacgaagaagcctccgtcgaggacctgcaactgctggcctaaatggtgcatttgctgttgctgctttggtgacaggaagagcaagaagaaaactacgaaacctaaaacagagaagaagaaaagatctttcttcaagagagcataaaatcaatcccctgcatatgcacttggtgaaatcgtggagggtgctccaggagctgaaaatgaaaaggcctgatttgtctaccaacataagctgttaa

SEQ ID NO: 32067 - DNA, 220 bp, Oryza sativa
  Clone ID: uC-osflM202117a03b1
ctaccatagcccctcctccgagagtccgaggtcgatcgtcgtaatttataggacgctcgctcaactacatgaaccagatccgtcagtcaggactgtatctatttattctttcatttccataaatacaaaaataatctatcattaaatacacttttatttatacaactcaaaataacaatctatatatagtaaataaattataattatatattctcataaa

SEQ ID NO: 32068 - DNA, 424 bp, Oryza sativa
  Clone ID: uC-osflM202117a04b1
gtcggcacacgggagcggcccgtatagggggatcggttgcattcctcattcgccattgcatctgcgcgcgtgattcgggcttcttttccttattgtcacctgtttcccgcacggcatgccgccttctcagaggtcggacgattggatttggagcccggggcccagccttgcctcaacgtctgtgttgtcgggttcttattggattcttgaccggattggattttggcgggtccaatttttgctggtttgctccgattcttggttgatttggtcggaagatgatcaagtggggcatcggtagcagcgggacgcccgcggattcgtataatgaggtccgctcggattgcacggatgacgtgcccaagagcaagttcaagatcaaggcaggaaaaacattggagtgtcccgaaatggcaggctgcat

SEQ ID NO: 32069 - DNA, 492 bp, Oryza sativa
  Clone ID: uC-osflM202117a05b1
atagtaaagcccggtgcccgctgccggaccgattccagtttcgacccacacgcccgctttcgattaaaaagaacaggagaattatccccacttccagagtccaaaccatacccgtacatggcggacggccagcttgatccggccggcacgcgcggcgctagtactcctcctgatagcgctgttcttgtgcctcaccctcgcagtccactgggcgggctttgacatccgacgaccttgactaagcccacgccgacccggacttggtagacgacgaagaccaccaggggttggacgttgagctaacgccgacgacgcgcatatcgatcttcatttcaaatagttgcccaaccggaatggccaaaagcaacaccacctgcggtgcaaactaatagcccgatcctgaacccggcgctgaccccgccgaaccccaccccgacgctcgatctctgggacgaggacgagttctagggcattcctgtcccggaagcgggc

SEQ ID NO: 32070 - DNA, 233 bp, Oryza sativa
  Clone ID: uC-osflM202117a06b1
gacccacgctagcgatctgtactaactgaagaactgctctcatgcacgacagatcaccataaagatcgcgtcataagcactgttgttagggtttctttcatgtagggaaaggaaaggtgatttcagttgcctgactgctgcctgaattgtctaagcatttcacaagcaaacgcatgttttagtactgctggtacgttttccactatgcctttttttcatacatcaaccactct

SEQ ID NO: 32071 - DNA, 489 bp, Oryza sativa
  Clone ID: uC-osflM202117a08b1
ctgaaaaggcctgtgagagtgtacatggatggatgctttgacctcatgcactatggccatgcaaatgcattacggcaggccaagttgttgggagatcaacttgtagtgggagttgtaagtgttgaggagttagtattattttttatttaatttattatatttttttattatatagtttattatttttatattatattttaatatgatttattaattattaatagattttttttatataatttttttataatattttattatttttattaattttatttatagttatttttatattttttttttatatttattattttatgttattaattgttgttttattttatttttttattttttttattaaaatattatatttttttttatatttttttatgatttttattatttttatttattaatttatgtattttttttttaaatgatatattttttttaaattattaatcttttttatatttttatttttat

SEQ ID NO: 32072 - DNA, 501 bp, Oryza sativa
  Clone ID: uC-osflM202117a09b1
ttcagatttgatgagagattcaaccaagaagctaaaattttttgcgactgatgtgcattgctgaaccagttttctgttgcataaagagtcctgaaacttcttgttgcaaactgaagtggtgttctaaccagttttcttcttgctttctcattagcttctcttgaatctttctgtaggtttctttccttgttgggaaaggaacgtgttttttttataattttctttctattattattttttcttcatttctttttcttctcttctattttttatttttttattttttttctttcatttattctaatatctatcttttcttaaattttattttcttttctattttcctttttcacttatctattcttttataattttttcctctttccccttctttattctttttcttccttcttttctttatttttcttatttattttccttactcactttcttattttttctttattcttattattttttttcatttttttcttttcttac

SEQ ID NO: 32073 - DNA, 512 bp, Oryza sativa
  Clone ID: uC-osflM202117a10b1
gtcggcacaggaggaaggttgctaaggggggatcggctccattcctcattcttcattccatttgcgcgcgtgattcgggtttcttttccttcttgtcacctgtttcttggtcggtttcccgccttctcagaggtcggtcgattggatttggagcccggggcccagccttgcctcaacgtctgtgttgtcgtgttcttattggattcttgaccggattggattttggcggttccaatttttgttggtttgctccgattcttggttgatttggtcggaagatgatcaagtggggcatcggtagcagcgggacgccggcggattcgtattatgaggtccgctcggattgcacggatgacgtgcccaagagcaagttcaagatcaaggcaggaaaaacattgagtgtcccggaatggcaggctgcatttagcactgatggttgtcttgatattgcctcagtcctaagccggatacaaaaggaggtgtgcatccaacagtaggggagagggttgggg

SEQ ID NO: 32074 - DNA, 463 bp, Oryza sativa
  Clone ID: uC-osflM202117a11b1
gcccgctccggtcccggaccgcgagttcccgcgccacgacccacgcgttcgattaaaaagaacaggagaattatccccacttccagagtccaaacctccccgtccatggcgacggcgagctcgatccggccgccacgcgcggcgctagtcctcctcctgctcgcgctgtccttctccctcaccctcgccgcccacttcgagggctttggctccgacgacctccactccgcccacgccgacgcggcctcggcagacgacgaagacgacgagggcttcgacgtcgagctcccgccgacgacgcgcatctccctctccacttcaactccttcccctcccgtcaccaccaccaccaccaccacctgcgctccaaaccctaaccccgatcccaacccgacgctgaccccgccgaaccccaccccgacgctcgatctctgggacgaggacgagttcgagggcatccctg

SEQ ID NO: 32075 - DNA, 261 bp, Oryza sativa
  Clone ID: uC-osflM202117b03b1
tatgtagttttctctatagtctcagctcttcttccaccaccacccagctcctcctcctcctcctcgtcgttgttcgccaccaccgctcggagagatggcgagccagaccgccgacgccacggggttcgtcgcgagcgacccgctgtcgtggggcaaggcggcgctggagatgacggggagccacctggacgaggtgaagcgcatggtgccgcagtcacgggaggccgtggtgaagatcgaggggttcagccttcgcgtcgg

SEQ ID NO: 32076 - DNA, 225 bp, Oryza sativa
  unsure (1)..(225): unsure at all n locations
  Clone ID: uC-osflM202117b04b1
gtccctttttctctctctctctctctctctctctattgctccccatctccccgatccacccgtctttctccaaaccctagccgagctagatctccacctccgccgcccgncgncgccgnctccggcgaggccccaccgtcacagatccccccgcgatggcgttccgccgcctcctctccgccgcagtgcgccgtcgttccgccgccgcggcggtttctgtcttcg

SEQ ID NO: 32077 - DNA, 449 bp, Oryza sativa
  unsure (1)..(449): unsure at all n locations
  Clone ID: uC-osflM202117b05b1
gagaataatttcaagaattcagaacactgcattccttgtgcatcatcaagatccattaatcagcccaccactacactgaatcgaattctgaagaacatgaaactaaaactatagacacacgagcacacacatgcattaaccctctgacctcttcttttgcatcaatcgaagatcaaaaaagctactgccacatgaacaattcaagatcaagtcttaatcaccacccactaaaaccttattaaaccatcatcaattcattatcatcatcatctaaacctccgacgagccggacttggcnggcggcggttggcatggcggcctctggtggtggtgggtggccctgatacttggggtccttcctgacgatgcgcnttcataccagtgctttgtcgagagcatccagatctccctgatgggcacctgcttggtctnccgcaggaggaggatga

SEQ ID NO: 32078 - DNA, 297 bp, Oryza sativa
  Clone ID: uC-osflM202117b06b1
gtacgcctttcgtccattcctttttccctccctccctcgcctgcctccacctccacctccacgggcgtcgcatcacaacgcaggcgcacccccagcaacctcctcctccaccaccgcagatcgcgctgcgaatccgcccgcgggcggcggcggcggcgaggacgcgagccccagaggagtacggaggagccttcgaactaataggggcacgcgaaaaataaaataacgtggaggtttaatgcctcacgtgtttatacccctccactcttactctttttttatccatttttatctctg

SEQ ID NO: 32079 - DNA, 501 bp, Oryza sativa
  Clone ID: uC-osflM202117c03b1
gtggaacatcaagctgcttatcaagtcacttagcagactgttgtgattgctcaggaataacacgggggagctttctccattgggaagcgctgatacaggaatttgctattagtgtagcatttcttgaaaaaaggaagaaaatgagaggaaagcgcaggttgagaatgagattagaaagaggtcatttggagagaggggaaccaagtttttgaatagtggaattatagtctttggtttttgtttacaagataccttattttcggatattattaatacatgaatagtacggtgtaattttgtatattttgtcgtttgttctgtctcttctttttttctttttccttctctcatttcttttcaatttatttcattttttaatatctactcttcaattctctttttattttactctccttctttcttttttctcactattttcttttctaactttcatcttttttctccctcttttttctttcctcttttcctctatcttcatct

SEQ ID NO: 32080 - DNA, 251 bp, Oryza sativa
  Clone ID: uC-osflM202117c06b1
tcgttgagattgatcgaatcacaccgtgtgcatttgggggtgctcgcaagaggcgcgggaagctttgctctaataaccaagcgaatgtgcttgaggcatctatgctttggagaaaacgggtgacttcattagcttctgaattccctgacattgagctggcgcacaaggatgttgataatgcagcaatgcagcttattaggaaaatctcagccggttgacacacattgtcacaaacaaaattttttggggac

SEQ ID NO: 32081 - DNA, 521 bp, Oryza sativa
  Clone ID: uC-osflM202117c09b1
tttacgagctagctagatggcttctttcggcgtggcccccgttggaaacgcggcgagcggcaagaagatcttccggaccaagtgcgcgcagtgccacacggtggagcgcgggggcgcgcacaagcagggtcccaaccttcatggcctcttcggccgccagtccggcaccacccccggctacgcctactccaccgccaacaagaacatggccgtcgtctgggaggaaggcaccctctacgactacctgctcaaccctaagaagtacattccgggcaccaagatggtgttccccggcctgaagaagccgcaggagcgcaccgacctcatcgcctacctcaaggaatctaccgcctaacccatccatccatctatccatcatctgcttgctgcaaatatatatatatatatcggatattatgtttgtgtacccctatgttatacttcttccgtattttaatgtatgacaccgtttgatttttcgaccaacgtttgaccattcgttttattcaatttttttttgg

SEQ ID NO: 32082 - DNA, 445 bp, Oryza sativa
  Clone ID: uC-osflM202117c10b1
gtgagtaataagttttaaagagaagaatcaatggattcatgattaaacccctcctacttcttgtattttattacaattttgattaagtgagggatcaaatataatatgtagtcaactttatttgatggtaacttggaggattagaaatatgactattgctttccaattagctgtttttgcattaattgtgacttcctcagtcttagtcattagtgtaccccttgtatttgcttctcctgatggttggtcaaacaataaaaacgttgtattttccggtacatcattatggattggactggtctttctggtagctattctaaattctctcatttcttaaatgtgtttagtatttagtagcccgatacaaaataaaaaagggccgtttattcggattgtgagacgcattaaaatgcaatttgcgccccgaattgattgacagacaatt

SEQ ID NO: 32083 - DNA, 227 bp, Oryza sativa
  Clone ID: uC-osflM202117d01b1
agtaatgatcagttggttcagccgtcggcggttcttcttcccttaaatcagatgacagatttctttctgagggtatccaatgatccagaactttatcgtaagatagctggcgtactagttgaggcaaatggcgttgataacatgctagagttttcaccggatagaaaattttcacattaggtttttgcaccatactcaatattttagccattattgtaatcccacgt

SEQ ID NO: 32084 - DNA, 381 bp, Oryza sativa
  Clone ID: uC-osflM202117d02b1
tctgactcactcaccgtattgcgcatttgtgaattgtgagtgtcgaatccacgagttggagttcgtgctcgatggggtcgcaggcgatagaggcgcacagggtagtcgaccctggtttcaacatcgtcgccaacaactctcttctcctacgggtttcgcggtgggcgagatttcctagcgagtgtgacgagtttttcttcatccccgaagaaaagcttaaggacctggagctcccgtcgctggacggcatggtgaccttcctcacccgcttttttccctacctcgccgaattccaggccgtgcgctttcttcttttacttcaaaaccgacctgctcgtcgtccgtcgcatcgtcgcgttcgacatcggcattgggcgattc

SEQ ID NO: 32085 - DNA, 92 bp, Oryza sativa
  Clone ID: uC-osflM202117d03b1
ctaaaaatctctccccaatctcgcgaggctctcgtcgtctaatcgaatcctctcgtgtcctcaagatgcagatctttgtgaagacattgacc

SEQ ID NO: 32086 - DNA, 394 bp, Oryza sativa
  Clone ID: uC-osflM202117d10b1
tcatttgttgacaaacccctctatatttcgaaagcttcatcagagcaccgtgcccaacaaagtgcttttacaaatcgttttctcgaatttctcagagggtttagattgtgtgattatcgtagtgttcttatttttaatttttctgttgttttttttgtttttttttaatatttttttgttatttttctttttattctcttttttttatttttcatcttacttttcttctttttaatcatttttttttttttatctatatttttttttatttcttctatttttacttttaaaattttttcttcgtaatatttttctttttttttatttttttttttctcttttatattttctttatatttattcttttcttatttttttttttttctattcattt

SEQ ID NO: 32087 - DNA, 195 bp, Oryza sativa
  Clone ID: uC-osflM202117d12b1
ccggtggttagcttcgttttcttcttgtttaatcaatccaaggagtgtggaaggccacacgccaagattatatctatgctaatttgattagcagtaggattaattcagtggctagcgtagcttgattagttggtttaattagttggagagtaaagaagatgttgggagtgttcagcggcgacgtggtggaggtgc

SEQ ID NO: 32088 - DNA, 144 bp, Oryza sativa
  Clone ID: uC-osflM202117e03b1
gtggaaactgacgacacctcctccggcgcggcgagacgaatctacgcgtaccgagtaccgacgcggcgaccgcctcgctccgtccctatcctcgccgctccggctgattccgtcgcggagcgcgcgcggtcggcgaggagttct

SEQ ID NO: 32089 - DNA, 252 bp, Oryza sativa
  Clone ID: uC-osflM202117e07b1
tccggattgggaatatatctaaagccaacctcccaataatccgatctctcccagttctgttcggatcaaggctgtgtcgatcgcaaaaaagaaaaaaaaaaacaatttccttttggggtggttcatctgttgatcacttctttgtttcccgcgttttgttggggattcgatttttggtttaagattttttacacgttggtcttgatactttgtttatattcttttttttttatttttctttttttctttttc

SEQ ID NO: 32090 - DNA, 565 bp, Oryza sativa
  unsure (1)..(565): unsure at all n locations
  Clone ID: uC-osflM202117e12b1
tttcggtcctgctacgacgacgaccgcctccgagagctcaaggccttcgacgacaccaaggccggcgttaagggccttgtctacgccttttttactatttttttttttcatttttctatatttattttttctctatatttatattttattattttattttacaatttaaattattttttttattatttaatattttttttttttattttttttttataatttttattatttttttcttttttatttatattatttttttttttattttttttattttattatttttttttttatttttttaaatttttaattatttttttatttattttttatttctttatttattattttatttttttttatattttaattttattttttttatatttaatctattttttttttatttattttaaaaaantttcatttatttcattttttaatattattttatttattttttttttttatattttaatattttattttctttttatttttttttatataattttattattttatttatatatttataattaatatatattattatttttcttat

SEQ ID NO: 32091 - DNA, 432 bp, Oryza sativa
  Clone ID: uC-osflM202117f02b1
acggatcgtctaaaaaactttatgaggacaatgagtatgctctctacacggtaacattgtttgctaaggttgttgacaactttaaggtccgtgcacgtgaaaaaggttttcaggttcgcgattttgagtatagttctgaagcacaggaaagtaggaaggaagagctggaaaagctaatgcaagaccaggaagcaatgagggcatcacttctgcaatggtgctatgccagctacagtgaggtattcagttcctggatgcacttctgtgctgtgcgtgtctttgtagagagcattcttagatatggtcttcccccatcattcctgtctgctgttctagcaccttctcaaaagggtgaaaagaaagtaaggagcatcctggaggaaactctgggcaatgtccatagtatttactggaaattttaagacgatgttt

SEQ ID NO: 32092 - DNA, 88 bp, Oryza sativa
  Clone ID: uC-osflM202117f03b1
ccttccttaacaaacaaagcccctcctcttgtttgtaccttgttttttttttataacagctcaagcacagggagaggagggttgagga

SEQ ID NO: 32093 - DNA, 437 bp, Oryza sativa
  Clone ID: uC-osflM202117f05b1
tttcctttgcagaccagttggacaacttcgacacttaatcacattaagcagtgtgcacatgatatgcttttactccctggtgatctctcttatgcggattatatgcaacatttgtgggattcttttggacattggtggtgccacttgctagcaccaggtcctgtatggtgacagactgttattatgaggagtgtaggatccctttttcttagttctcgattttcaccattcattctttttttaatatcccctctttcattggtttcatccttttcataattttaacttttttttactccctttcttgtttgttttactttacctatttttcccatgttattcttttcctcctattacacttattttcttattctacttttttatctttactatcccttattatttttccccttcctttatcttcttttttcttcttt

SEQ ID NO: 32094 - DNA, 127 bp, Oryza sativa
  Clone ID: uC-osflM202117f07b1
tttaagctcacagttcagttctaccacgtacaacagcagatttgagagagggagaataagacacgggaagaggtatggagcttagctagccatcacatggtttttccgctttccgatttttgacttt

SEQ ID NO: 32095 - DNA, 485 bp, Oryza sativa
  Clone ID: uC-osflM202117f10b1
gtgagagagaggccgagcagcgaccgcggcggcgctctcccccctcccgccgcctccacccaccccgtgctcgccggcggggcgaagcctccggtgacaatccccgatccgatcgccgcgctcctctcctctacccccatcccctcctcctccgacgcctccgcccgcccgccgccgtacccgtaccaaccggaaagcgcagctgatccgatggatctcaaggatagcctctccaaatttaagcagcagcaagagaggtgccaatcatctttggccagcatagctgcatcgacctcaaaaccaaagcacagggcccaaccggttaatgctccatccgcttcagcatggccactacaacctatttaagttttcaaatgttacagaaaggctacaacacatcaattcagttaggaaatcttctataggagcacagatcaaacttgtcattgaattgctgccaagacaagacatgcttttactgctga

SEQ ID NO: 32096 - DNA, 440 bp, Oryza sativa
  Clone ID: uC-osflM202117f11b1
atcgttcgcaataaagttagacttctcgtctctctttgtgcttgtgcttagttgtccgtgctagaagacggcaatggcgtcgacggatcccatgacccgccgcttcgccgtcgcgtgcggcgtgctcagccagtacgtcaaggccaactcctcgcagccgtcgacggcggcgccggtggctcaaggtgtgagtggcctcatggccgccgccgccgccgccgccgcggcgcctgtggtccaggaacccggatgcgaggtggacggcggggggcagcagttcacgatcttctacgccgggaagtggtgggtggatcgaccgctgcacgccggccatggcggacgagctgatgcggttcgcgtcggcggccgtgcgtcgttctgacgcgccagaggcgccgtccgcgctggtggacatgccgatcgcgaggaaggcgtcgctg

SEQ ID NO: 32097 - DNA, 148 bp, Oryza sativa
  Clone ID: uC-osflM202117f12b1
ttggaaaacagggactggaggccactcctgagggtgtgttctagtgctgaagtgtccgtgctagaagaccgcaatggagtttactgttaccaagaccccccccccacacctaatgagagtggtgtgctcagtcagtactttaaaggcc

SEQ ID NO: 32098 - DNA, 471 bp, Oryza sativa
  Clone ID: uC-osflM202117g01b1
tcgatgtttctgacgatggatcacctatgtataacttttgaggctctggcagaaactgcagaatttgctaggaagtgggttccgctttgcaagaagcacaatattgaaccacgagctccagagttttactttgctcaaaaaatagattacctgaaggacaaaatccaaccttcctttgttaaagaaaggcgggcaatgaagagagagtatgaagaattcaaggtacggatcaatgctcttgttgcgaaggcacaaaaagtacctgaagaggggtggaccatgggctgatggcactgcttggcctgggaataacccaagggatcaccctggcatgatccaggtgttcttggggcacagatgggggcttgacactgatggtaaccagttgccacgggttgtctacgtcttttcgtgaaagagggcaggattccagcatcacaagaaggctggtgcaatgaatgcattggattc

SEQ ID NO: 32099 - DNA, 120 bp, Oryza sativa
  Clone ID: uC-osflM202117g03b1
cgacccacgcgtacgcttccatttaatgttgtcacagttggaaagcattcttatagcaaggtgggaaggtccatggctatcctcaacactttcattggtttcatacaggtgtcaatcgcc

SEQ ID NO: 32100 - DNA, 368 bp, Oryza sativa
  Clone ID: uC-osflM202117g04b1
acggttcgttgtctttattggattagcatcccatgaaaatgctgaccaaagtgattcacggtctttacgtgtggccctgagcctgtactggagttaaagagggtttaaggggacatgttgttgtagagatgagtgaccttgacaacgagcctttggtgaaactggttggaggtgaactaattgaaacagttgttgcccatgatgtgattggacgtttgatgatacaatgtgcactccaaccaggcctggcacagatatgggaggatattttggggttttgaaaacgcaattgttttttcatttaaagatggccagaatttatgatggcatgtcaatttgggaatgttttaatcatatctttttgactc

SEQ ID NO: 32101 - DNA, 217 bp, Oryza sativa
  Clone ID: uC-osflM202117g06b1
cctgtccagttcattagcaatggccaaagccgtcgccctactccttgcagccatcgcggcatcggccgtgttagtgcaagtggaatgcgacgcccccgtcgagaagagcttcaacaaggccctcctcgcccctgtcgataagcgcttggatgaggcaactcaggccattaacgaggccgccgactccggtgcggatgctggcctaccagcacaaaag

SEQ ID NO: 32102 - DNA, 448 bp, Oryza sativa
  unsure (1)..(448): unsure at all n locations
  Clone ID: uC-osflM202117g07b1
ctcaaaccaaaccctagccggcggcgtcgtcggaatccatggcggaaggtgcgccgatcatctaccttgaccccgccacggtggcggaagcgcgccgccgcggcgacgacccgtgcaagctggaggagtgcaccaagtacttgatgacgcacatctacgggttgctccctggcccacccgtacccatcgccgccgcccgtactcacgccgcctgcgccgacgcagcctccgacggcgtcgaccgcatcagcgccctccccgacgcgatcctccgcaacatcgtctcccgcctccccgtcaaggacgccgcgcgcaccgtcgcgctctcccgccgntggcgcccgttctggcgcttcacgccgntcgtccttntggacgcccacctctttccgtgaggtcgaagctttggggtcttcgtcttttgcccgacgcgcgccgacacgccgga

SEQ ID NO: 32103 - DNA, 193 bp, Oryza sativa
  Clone ID: uC-osflM202117g09b1
ctaacccctctcactcccagatacctgctgctgccactagcccactaccatggttccttgcaagttccggccgtcgagctcgttcgacacgaagacgacgacgacgaacgcggggagctccggtgtggaacgacaacgaggcgctgacagtggggcccagggggccgatccttcttgaggactaccacctgtt

SEQ ID NO: 32104 - DNA, 507 bp, Oryza sativa
  Clone ID: uC-osflM202117h01b1
aataaagcgtaagaaaaataaaaggagaaaaaggaatagagaaattggggaagagagctacctcgaatcgaagctgcgatctccacctggtgaaataggagaattgatgaattgctgagatttggtgattagagggacctttgctgctgaggcattgtggtacacttaaagcaagggtgtgtaaatggcttctttcatttgatatcatttacttattttggtatgttcctgatacctatgtttggggttaatttctctcttttttgtcttctttcttttttctttattcttcttttattactttttttattcatctcttttacttttgtttttatttcttttattattcttttatctttttctattctctattaattattttattatcttatcttattttctttcttttcttttcttttttttttcttttaatttttttattttttttttttttttctttcttatttttttatttatttttttttcttattcttttttttatttttt

SEQ ID NO: 32105 - DNA, 458 bp, Oryza sativa
  Clone ID: uC-osflM202117h02b1
gtttgatttgtacaccttggtcgatggctttgtcatccgcaacccagccagaacaaacccatcaaacccttcgattgagcttggacctgagttcaagaaggttgccaatttcctggcccggtttaagtcaatccccagcattgtcgagcttgacaccttgaaggtctctggtgatgtctggttcggctctggagttacactcaagggtaaggtgaccatcaccgccaagtcagggaagttggagatcccagatggagccgtgcttgagaaccaggacatcaacggtccgggggatctttgaggctgcttacggaaacccttcagatatatttagcttagcgttttgtaattgtcgtgggcatttggcagtcagggctcgatgatcctattacagaataattgtaatcatcttggctcattcgtacttctgttttttggtgtcccaaggccgttgtatt

SEQ ID NO: 32106 - DNA, 245 bp, Oryza sativa
  Clone ID: uC-osflM202117h07b1
ccgtatccctattcggaacagacccggtaaacccttcgattgagcttggacctgagttcaagaaggttgccaattttctggcccggtttaagtcaatccccagcattgtcgagcttgacaccttgaaggtctctggtgatgtctggtcgggctctggagtttcacttaaggttaaggtgaccatcaccgttatttcagggaagttggaaaatccaagatggagccgtgcttttaaacaaggacat

SEQ ID NO: 32107 - DNA, 459 bp, Oryza sativa
  Clone ID: uC-osflM202117h09b1
tcgattattctgacgatggttcagctatgttaacttttgaggctctgtcagaaactgcagaatttgctaggaagtgggttccgttttgcaagaagcacaatattgaaccacgagctccagagttttactttgctcaaaaaatagattaccttgaggacaaaatccaacctttctttgttaaagaaaggcggtcattgaagagagagtatgaagaattcaaggtacggatcaatgctcttgttgcgaaggcacaaaaagtacctgaagaggggtggaccatggctgatggcactgcttggcctgggaataacccaagggatcaccctggcatgatcaaggtgttcttggggcacagtggtgggctagacactgatggtaacgagttgccacggtttgtctacgtttcttgtgaaaagagtcctggattccagcattacaagaaggctgtgtcaatgaatg

SEQ ID NO: 32108 - DNA, 341 bp, Oryza sativa
  Clone ID: uC-osflM202118a01b1
ctcctcaccactccattcctcccatcccatcccaccacctcatcgcctcgtctcgtctcgcctctcctctccaccctcctccacttgtctcccctccgactcgccgcctcttcctccgccgccgccgccacagagtgaggttgctgaacttctcaaccagcagctagagtttttcagtattagatgggctgttcctgtttcttcactcgctgaatctaacttccttgatttgatcggatgaaagcagcgacatttgcttctgattgtagctttactggtgccatttgaataagaagcccttctcttaattaaaaactaagaaatggatcgcaatgatactt

SEQ ID NO: 32109 - DNA, 317 bp, Oryza sativa
  Clone ID: uC-osflM202118a04b1
attccttgaaaagaagaagagaagaatctgaaaaactttaagccgctatgggtctgcaggaggattttgagcagtacgccgagaaggcgaagaccttgccggagagcactagcaacgagaacaagcttatcctctatggactctacaagcaggccaccgttggagatgtcaatactgctcgtcctggcatattcgcccagagggacagggcgaaatgggatgcatggaaagctgttgaaggcaaatcgaaggaggaagcaatgagcgactacattaccaaggtgaagcagctctggagggagggctcttcttttatt

SEQ ID NO: 32110 - DNA, 205 bp, Oryza sativa
  Clone ID: uC-osflM202118a05b1
cttgttagcttagcctttgcagttttatctcggatcgaggatgagggtgaaaagggccatgcaccctgacagggcgccacggggtggctccctacagacgaagaccactacgacgaactcgcaaactcctgtgtggaacgacttctaggcgctaacgacgttgcccagcaggcgcttcctgctggcagactaccacctgatcgag

SEQ ID NO: 32111 - DNA, 106 bp, Oryza sativa
  Clone ID: uC-osflM202118a07b1
ttaggattaattacttctcgtctccaccggaaaagctcgccggcggcgatggcgagcgcgatgaacggctgcggcggcggaggctgcggctgtcggctgtgttgtg

SEQ ID NO: 32112 - DNA, 201 bp, Oryza sativa
  Clone ID: uC-osflM202118b01b1
tttgcctccgcctcgtccgccgcgtgccgctgttcgccaacatggacgagcgcctcctcgacgccatctgcgagcgcctcaagcccagcctgtgcacggaggccacctacatcctccgggaaggggaccccgtggacgagatgctgttcatcatccgggggaggctggagagctccaccacggacggcgggaggatggtgt

SEQ ID NO: 32113 - DNA, 251 bp, Oryza sativa
  Clone ID: uC-osflM202118b02b1
gcgccacctgactctctgtcgatttcgtgctctcctcctttcgcgagcgcgttctttggaggggagatggcggaggagccacaaccagaagccgtgcccgacgcgacgaagacaaccgaccttgcactatccgcatgttaattgaacgcgcctggcatgccattgtcaaacgatagcaacctgaagccgcaaggggctatctacttgaaggagaacacgttccgctcgaaagatccacgacatcacagtga

SEQ ID NO: 32114 - DNA, 188 bp, Oryza sativa
  Clone ID: uC-osflM202118b04b1
gctctgtcgcacggcaccaaataaaagcctcgggtcgcctcgagctgtccccccatcccccaactggagagtagtagatcgattcgatccaccctccgattcctttaccgaaccgtgggggaaatccgcgccggggatgtcgtcgtcggtcggaggcggagggggaggtggctctttccgccgcccct

SEQ ID NO: 32115 - DNA, 278 bp, Oryza sativa
  Clone ID: uC-osflM202118b12b1
gcaccgacccggacttaccgtcctgatcgacccacgcgttttctctaatagttctcaaacatagaaccccaatggaggtatttttttatgggcccgcacgaagattttgagcagtacgccgagaaggcgaagaccttgccggagagcactagcatcgagaacaagcttatcctctatggactctacaagcaggccaccggcggagatgtcaatactgctcgttctggcatactcccccacagggacagggcgatatgggatgcactggaaagctggtg

SEQ ID NO: 32116 - DNA, 398 bp, Oryza sativa
  Clone ID: uC-osflM202118c04b1
attctttacaggttcgagcagtggatgatcaggcatggccgcgcctacaccgacgccggtgagaagcagaggaggttcgaggtgtacaggaggaacgtcgagctcgttgagacgttcaactccatgagcaatggctacaagctggctgacaacaagttcgccgacctgacgaacgaggagttcagagccaagatgctggggtttagacctcatgtcacgattcctcagatttcaaatacctgctccgctgacatagcaatgcctggagagagcagtgatgatattctgccgaagagcgtaaattggaggaagaaaggggcagtggtggaagtgaagaaccaaggagattgtggttcttgctgggcgttctccgcggtggcggcgatgaggggatcaac

SEQ ID NO: 32117 - DNA, 457 bp, Oryza sativa
  Clone ID: uC-osflM202118c05b1
ggtatgggtgcccactggaggatgtaactacaggattacaaatccaatgccgtggatggagatcagtgtactacaaccccaaaagaaagggattcttaggcatgacacccacctcactaggccagatcctggtcctgtacaagagatggacagaagggttcctccaaatatccctctcacggtacagccccttcttattaggtcatgggaagatcaagctgggtcttcaaatgggctactctgtctgcggcttctgggccgtgaacagctttcccaccttgtactatgtcacaattccttctctttgcttcctcaatggcatctccctctttcctgagaaaactagcccctggttcataccctttgcgtacgttatggtggccgcatactcctgcagcttaacagagtcactgcaatgtggtgacagtgcaatggagtggtggaatgcacaaaggat

SEQ ID NO: 32118 - DNA, 277 bp, Oryza sativa
  Clone ID: uC-osflM202118c11b1
ctcagccgcttcgggatcgggaagcggaggagaggggaaggaaggccgtggatggagatcatcgctctacaaccccaaaagaaagggattcttaggcatgacaaccaacctacttagccagattctggtcctgtaccagagatggacagaagggttccttcaataatctttttcacggtacagtcccttcttattaggttatgggaagtactatctgggtcttcaaatgggctactctgattgcggcttttgttccgtgacccagcttacccacctt

SEQ ID NO: 32119 - DNA, 71 bp, Oryza sativa
  Clone ID: uC-osflM202118d08b1
tctactcgtcgatgagagctctgggcgagaggctcctctccatgttcttcaaggcgctcgcacccgtctac

SEQ ID NO: 32120 - DNA, 386 bp, Oryza sativa
  unsure (1)..(386): unsure at all n locations
  Clone ID: uC-osflM202118e01b1
gctgttctctaatcttgaagaaagcaatggaagtggctcagcaattccaatggaaagaaaacatgcatcgcttcctaggtctactactgttcactctactccaattcctcccaaggaacaacctcttgcggcctcattgaagagcagcaggcctgtctctgatgaaccttgtaaaaacccctgggtcatgggaggattttctggaaatattcccacttcttctcaggtttcacaagtggcaaaaccagtggcaccagggagacctgttgngtcagtatttccttatgagactggaagcaccaatgatccttatggtccaaggggaccagtgatgagttcagggtatcctccccagcaacaaattctacaagcatatggttatcatc

SEQ ID NO: 32121 - DNA, 363 bp, Oryza sativa
  Clone ID: uC-osflM202118e02b1
gcgttcttttagtccgccccgtgccccaacggccgacgctgctgcacgagacggtccccggccgaatctgccgtgcgcggtttggcacagtggcacacgcccaaattccatccctcccgttcctagccggttcctcttcttcctccccccctcgcaaaaattcaaaaaaaagcttgcgctcctcccgtcctccggcgccgatctgctcgaaggaggccacccccaaccttcccgaccaaaccaatggctttctccaacgaaacctaccgcgtcgagctccgagccgccgcccgccagcttggggagcgcggactctactccgccgtcaaatgggcggtctagctgttcgtttgtatctagccc

SEQ ID NO: 32122 - DNA, 286 bp, Oryza sativa
  Clone ID: uC-osflM202118e07b1
tctctctcttctcccctatccattaattactcgcttcgtggtcggaatccatggccgccgccgcagccgctgtcgggaaccctaacgcggttgccgccgctgagttggtctcggcgtctagggtcgtgtcttctattgaagagcagcaggcctgtctttgatgaaccttgtaaaaacccctgggtcatgggagggatttctggaaatattcccacttttttctcaggtttcacaagtggcaaaaaccttttcttcttctctatttttttatttctttttttttttt

SEQ ID NO: 32123 - DNA, 457 bp, Oryza sativa
  Clone ID: uC-osflM202118e09b1
cccagccggcctcctcggtttttgtgtatcccgtgcgtcgatccgcattcttgactacttcgcagtggcacaactaccattcacacgccaagagaacaccatcatccagacctgtgtcgtcgcatgcacctcgatcacattcaccggtggctttgggacatatattcttgcaatgggaaagaaagcagctgtaggggatgtcaatgcccaaaataacgttgaggagccaagctttgccaggatgatcaccttcctcttccttatcagctttgctggcatgttcatcatcatgcccttcaggaaggtcatgatcattaggcaccggttgacattccccagcggcacagcaacggcgcacctcatcaatagcttccatacacctcaaggtgtcaagcaagcaaggaaggcagtgacattattgtttaaatcggttggaggaaccatcgcatggtcgctc

SEQ ID NO: 32124 - DNA, 229 bp, Oryza sativa
  Clone ID: uC-osflM202118e11b1
tgtctatcctactcctatcatgcacagggatgtgcgaggaggcgatatgcttcgcaacagatcgaggagatcagtcggtgccaagcaaggaggcgtcaccgccatggcgcagcctgagccgccgccgccgtcatcgcaatcttcgtcgtcgttttactccttttttcccgaggtccctttcccgaggccgtttatggtgctttcgcacgtgtcgtaagctgtgtttttg

SEQ ID NO: 32125 - DNA, 371 bp, Oryza sativa
  Clone ID: uC-osflM202118f01b1
tgagaaatgcattgaagcttttagctgtggcataccttaatataacacatgggtctaagttctggcatgtcccattctggttattttggagtcttctggcactaaagtgtttctacaggattctggcacgtcatgtagcatctgtaggaataagtcttggctggttggtcttggtcttgtggtgcctttttcctgcttttcagctttctaggacagcatctctactttcagtttggatgctctaggacagttaggacagcagtttgttgagatgctctaggacagtttgttgggatgctctgctctaggacagtttgttgggatgctgacagcacccttttagactagcatggctgcatggctgctacagc

SEQ ID NO: 32126 - DNA, 258 bp, Oryza sativa
  Clone ID: uC-osflM202118f05b1
gcaggagcttgagcttggagagagacaacaatggcggctcaggctcttctctctgggaggcagctgctggggaggccattgcaatcttcagtctccaggtcttcttccttcaggaaggcacccttcatggtcagggcagaggccactccccctgccaagcaaggtgctgacaggcagctgtggttcgcatccaagcagtccctgagctacctggatggcacgcttccgggagacttcggtttcgacccgctggggcta

SEQ ID NO: 32127 - DNA, 508 bp, Oryza sativa
  Clone ID: uC-osflM202118f06b1
ctggtagctggagatgatcaaggaggacatgggcagctacaagatcggcgcctgatgcagcatcgatcgcacacacaggggcgccgtgcttagtacttgcggctaaatcgtcatgtgtatggccggctaattttcgtggttaagcgtgacacagtgtagtgccactgatggttcgtttgttctctctgttcttcatgttcttagtcttctgttttcttcttattctcctctcctttatttttttattttttttggtgaggacacgcttgatgggagatggttacattctcttccttttttctctgttgtcttgttgcatttcttattgtttctttcttttaccttcttctttttttcttttttttatacttgttggtgttttttttgtttatgattttttatcttttatttacttctcatctttttttaattttttttattacttttttttcgttttttctttactttttttttcttcttttcttctattttatcttttttactttat

SEQ ID NO: 32128 - DNA, 306 bp, Oryza sativa
  Clone ID: uC-osflM202118f07b1
gttgaatcgaacgcttatgtaggtagtcgatattgtactgaactgcattttgtggatacgttccccggtctattgcttccgtggatgttatgcgagcgtacggtacatatggatttccttacatgacaacatatgtactggagaggaatctggacgactaaccagaggccgcaagccagctagaacaggggatcctattcagtgagtgcccaaccgcgtggttccgcttacatttacccgataagtttggatccaattcgggagctgtcttgggaagtttatgggagaaatgggcatgggaccatc

SEQ ID NO: 32129 - DNA, 169 bp, Oryza sativa
  Clone ID: uC-osflM202118f10b1
gttaaactcaagggtattctgggttacgttgaggaggaccttgttttcacagacttgcagggtgacatcaggtcaagcatctttgatgcaaaggccggtattgctctcaatgacaactttgttaagcttgtgtcttggtatgacaaccaatggggataccagctttgcg

SEQ ID NO: 32130 - DNA, 108 bp, Oryza sativa
  Clone ID: uC-osflM202118g06b1
ttcgggttcaacaagatggggggttacatcaacagcagcaacggcggcggcaactacggtggcaacggcggcgacgtgaaaagctacttaaacaagtctgtcggtagg

SEQ ID NO: 32131 - DNA, 341 bp, Oryza sativa
  Clone ID: uC-osflM202118g07b1
cctatggttgcttccactgtcaccaaagggggactcgccatctaccttgttcctcagttcatgcgaatttcatgcggtcctgggctgtgactgggagtagattgagggttgatctcgtttgcggagtaacaaatttgcaagcctacaactgctagggagaatttgactaaaaatggggtcgtgttgcagcagagctacgtttccagattctggtcgaggaggagcaaacggttatggctatttttaccagacaaaacctgttcagacaactcctaggtataaccattctcagccgccgccgtcagttgaggtgagtgtcacaccatcagcatatgaaccct

SEQ ID NO: 32132 - DNA, 157 bp, Oryza sativa
  Clone ID: uC-osflM202118g09b1
tgttatcgtcagtcctgccgaagcatacgtgggacaattcgacaccaagccactctcaaagatggcatgctttagatgactagagcgacggccttatttacttctgattcttatttaataataattcatttattaatttaccttttccttattaatt

SEQ ID NO: 32133 - DNA, 135 bp, Oryza sativa
  Clone ID: uC-osflM202118g10b1
tcgtcagttgcacccgtgaggccgtggcactgcagaagcagtcaaaccaccaccagctcacgcctgccaagtcccaagcggcgacgcaacgcgaaggaaggagccccgaagccccgccgtgcctcttccgtaaat

SEQ ID NO: 32134 - DNA, 505 bp, Oryza sativa
  unsure (1)..(505): unsure at all n locations
  Clone ID: uC-osflM202118g11b1
tgcattttctacagaagagaatcatgctgccagtacttcagttcatgcgggcagtattaacagttccgcgtaccctacaattcaaccgagctatagcaccccagacccttctcagaacctttaccaggggacttcacaatatgctgtgccaagtaaccagtatcaagattaccagcaacaatctaatacagcatatggaacatacaacagtacatattctcaacaaccaacccagatgtttgttccatcaaacaccactccagtgatctcccagccaaatgcaactccagcaccagttccacaacaaccagtgaaggcatttactcctaccaacttgccaggtctaaaaaattctgagcaataccagcaaccaactttgggctcccagctttatgcgggtgctaatccaccatatacttctggacaatcgactncatatcaaggtgtacctnccaccacataccatcagcctagaccatctacacaatttccaacagttcccaca

SEQ ID NO: 32135 - DNA, 287 bp, Oryza sativa
  Clone ID: uC-osflM202118h01b1
catactgggcgcagcggagatcggagatcgccagatcggggagggaaccagagcgccgccgcctttcgtccggtggggattctcgtctcgcagaacacgcaagcagggcgctgtacaaccccaacgcctagacagaggaaaaggcttgagggagaccttttctaatcctgctcctctcggccagcgacctgccgaagcagattcttcacatcatcgacccacctctgtttacttgtgctgttctcacactcaaactctaccagaccttgtgccgtgctcaggccaaa

SEQ ID NO: 32136 - DNA, 66 bp, Oryza sativa
  Clone ID: uC-osflM202118h10b1
tggacatggcagcatcgctccaagccgcgggcaccctgatgcagacgatcaagctttttttctccc

SEQ ID NO: 32137 - DNA, 428 bp, Oryza sativa
  Clone ID: uC-osflM202119a04b1
tgtcattttggtcttgtcgtttatgctgttgaagaaccaatgagtgcagagcttgatggtagccctagaattaaaatagagcaacattcactaacacagaacatgcatgctgatactcaactaggccattctagaattaaggaagctcttatgcgcaaaaggatcacaggcggaattcttgatagtaatagcttaaggacgcttaaagacaggagagatttgttttacccgttttctctcatcttgcacaacactaaaccagatggccatcaggatcttgttggcttagtaatctcaatattgcttctcgcagattttagcttagtgttactgacttttctccagctatattcatactctatggccgatgttctcttagctttatttgttcttccacttgggatactatcacctttttctgctggaat

SEQ ID NO: 32138 - DNA, 481 bp, Oryza sativa
  Clone ID: uC-osflM202119a05b1
ggtattgcttatgtttatgatgtggatgggaagttcagtagccgttgcaactatgagctagttgacttgtatgctgtagttgaagaggatgacatcacaacattgagaatgatgatacaacagcacagacttcatacacaaagtgatttggccagagatatactcttgaattttgatactgtcctcccaaaatttataaaagtatatccaagggattacaagcgggttttggataaactaaaagaagagaaggctgctaaagaagcagagcaaaaggcaagagaagtggtggataagaagccagttgaagtaattcaagctccaaatggcatttcagttaagacagagaaagtaatgaacgaagagccatcaagccgaccattacgagtttcaaatgctgtaaaagatccgaggtttcataaaatatgagcgagagggtactttttacagagatccaaatgagcgtgtgaaagattggaat

SEQ ID NO: 32139 - DNA, 376 bp, Oryza sativa
  Clone ID: uC-osflM202119a06b1
agtctatttttatctcacacaacccaactgcacaagcacaacgctagctcagtgaaggagcagtgtgctctttgcctctttgctatggtttgcttgctgctaagaagctaggcttggttaactcaagctatgagaaccatcacagcaagaaacccccatgattccctctccttctgtaggatgcatttcaagcggccgaatcttggcaagagctacagccatggcgccacgcgaggggcggaggaatacatgaagagctcggaagctcgagaagaagaggatgaaactacaatggcggactcctgtgtctgtccgagatgccatactgaggacttcagttctcctaccaagaagccgccgcgggagcagcattctc

SEQ ID NO: 32140 - DNA, 538 bp, Oryza sativa
  Clone ID: uC-osflM202119b01b1
gtttgtcatcacctcgtgtgacaaacgaggaagtccaaaaggctgctgctgctctgaaggggtctgaccaccgccgtgctaccaatgttagcgctagactggacgcacagcagaagaagctcaaccttccagtccttcctacaaccacaattggttcattcccacagactgtggagctcaggagagtccgccgtgagtacaaggcaaaaaagatctctgaggaggagtacatcagtgccatcaaggaggaaatcagcaaggttgttaagatccaggaagagcttgacatcgatgtccttgttcacggcgagcctgagagaaacgatatggttgagtacttcggtgagcagctttctggttttgcattcactgccaacggatgggtgcaatcttatggatcacggtgtgtcaagccaccaattatctatggtgatgtgagccgccccaccccatgactgtgttctagtccaagttggcgcacagcatgacctctcgccccatgaaaggaatgttgactggtcccgtcacaatccttaac

SEQ ID NO: 32141 - DNA, 503 bp, Oryza sativa
  unsure (1)..(503): unsure at all n locations
  Clone ID: uC-osflM202119b07b1
gttagagagatctctcccgagctcgatccggtccaccgcgacacgaagacgaccatggcgatggctcgctcccagcttgccgccgtgttcctcgccgtcctcgtctcggtggcgccgctcgccggcgcggcggacaacctccaggacgcgtgcaaccggacgctgttccccaaggtgtgcatccaggcgctgacgacgaacccggagagccggacggcgaacgcgcggcggctggcggagctgtcggtgtacgtggcggcggaggtgggcacggcggtggcggcgttcgcgcaccacgagctgaacggcgtgaaggaggacgccctgttcaagtgcgtggacagctgctccgacgacatcgagaaggcggtggcgcacctcagcgcgctcacccgcgagctcaccgacgccaagttcttcgaggtcaaggcctggctctccgccacgctcggcggctcctncacctgcgaggacacctgcaaggacgcccccatcagcgagat

SEQ ID NO: 32142 - DNA, 521 bp, Oryza sativa
  unsure (1)..(521): unsure at all n locations
  Clone ID: uC-osflM202119b11b1
tcggctacgccaccgcggcaccgaccaccggagcgcagaagatcgtctccctcttcagcaagaagcccgccccgaagcccaagcccgccgccgtcacctcctcgagccccgacatcggcgatgagctcgccaagtggtacggccctgacaggaggatcttcttgccggagggtctcctggaccgctcagaggtgccggactacctcaacggagaggtccccggagactacggctacgacccttttggcctcagcaagaagccagaggacttctccaagtaccaggcctatgagctgatccatgccaggtgggcgatgctcggcgccgctgggttcatcatccccgaggcctgcaacaagtttggcgcaaactgcggccccgaggccgtctggttcaagaccggcgccctcctcctggacggcaacaccctcaactacttcggcaacagcatncccatcaacctcatcgtcgccgtcgccgccaggtccgcctcgtcggcggcgccgagtactaccggatca

SEQ ID NO: 32143 - DNA, 463 bp, Oryza sativa
  Clone ID: uC-osflM202119c04b1
ttcggttaagttcccagatagccagcagcgatcgtagtgtgtcgcaacatggcgccgcggctgttgtcgtgttttggcaggggcagcgcgacggcgtcggcgccggatcagccggaggaggcggcggtggcggcgcggatggtgcacgaggaccagcagcgggcggcggcgggcgagggaggcggcggggagcgcggcgtggtggtgctgggcttccacgtcgactactgggactaccgcgggtggaaggacccgttcgcgtccagcgcgtggacggtgcggcagaaggcgtacgtggaggcgctccggctcgacacgctgttcacgccgcaggccgtcgtgcagggccgcgcccactgcgtcggcaccgagcaggacgccctcgcccaggccgtccgcgacgcgccccgctaccccgccctcgccatgaaggtgacgttccagcggccgaacccgagcacgc

SEQ ID NO: 32144 - DNA, 374 bp, Oryza sativa
  unsure (1)..(374): unsure at all n locations
  Clone ID: uC-osflM202119c11b1
gggtcaattcaattttcacatttcgtttgctatatacttcgttattttcccgtggggaatcacagaattgctgaagggcgtgccaacgcattttgtgcaggcaggagctaccttttttttgcatggtgatttatacacagctgcgtgcagaaagacgcagtgcaccatcatctacgtacaaaacttggagaggcatgtgcagaggttaggcagccatgtcatatatattatgtccatgatttatatctcgaaagtgccctccatctcaagctgcccgctggcctcctcctcctcgtcttcgccgacgtacaggtacggngttgttctccaccggcttgaagttgtagaagacgaaaatgtagaaggccaggctg

SEQ ID NO: 32145 - DNA, 506 bp, Oryza sativa
  Clone ID: uC-osflM202119d04b1
ctcactctcccacccaggtaaggagagggaggaggaagggaacctcgaaggcggcggcggcggcggcggagatggtttccctcaagctgcagaagcggctcgccgccagcgtgctcaagtgcggcaagggcaaggtctggctcgaccccaatgaggtcaacgagatctccatggccaactcccgtcagaacatccgtaagttggtcaaggatggattcatcatcaagaagccccagaagattcactccaggtcccgagcacggagagcccatgaggctaagcagaagggacgtcactctggctatggtaagcgtaggggtacaagggaggctaggctccccaccaagatcctgtggatgaggaggatgcgtgtgctcaagcgtttgctgcgcaagtatcgtgaggccaagaagattgacaagcacatgtatcatgacatgtacatgaaagtcaagggtaacatgttcaagaacaggcgtgttcttatggaaagtattcacaagtct

SEQ ID NO: 32146 - DNA, 485 bp, Oryza sativa
  Clone ID: uC-osflM202119d10b1
gtgcagtgccaagactcgggggggcaattttgctccctcttcccgctcgtgcccaggccggggccttgcttgctagctagctttgaagccagccagcaacgccgccgccgcaggcatgaaggggagcggtgcagcgatgccgtcgtccatgttctacgtccacgaggcggacgtcgcccaaatccaccacttcctcgaggagtgctccctctgcggcaagtccctctccggtgacatcttcatgtacaggggagacacgccgttctgcagcgaggagtgcaggcagcagcagatcgaggtggacagggcgaagcaccggcggaagaagcgtgcggcggcgcacgcggtgtcggtgcggaaggagcaccggaaccaccaccaccaccaccggtaccaccaccagcagccacagccgcggccggccatcgacgccaacccgtggggcaccgcgcgagggcccgcgtgcgcgtgtgagaccgatcgag

SEQ ID NO: 32147 - DNA, 554 bp, Oryza sativa
  unsure (1)..(554): unsure at all n locations
  Clone ID: uC-osflM202119e01b1
ggctttagcagcgcggcctgcgcatcaccgaggagcgggtctcccacgagagccccgccgcggaggcgccgctggagtgcatccaggtgaggctctcacacgtacagtccaagttcgtcggcgccatcagcgacggcggcgacatcgtcctcgaggggagggtcaagtacggcgtgccgcacctcaccgtcgtcgggccctacgaggtggacgtcagcctggagggcaacctgatcctgtgccggcagatcgaccagcccggcatgatcagcaagggcggcaacatcctcgggcagacgaacgttaacattagcttcatgagcgtctgacggaccttgcgcggtgagcangccatcatggccatccggcgtcgacgaggagcccgacaggagaccctcgagcacatcggccacatccggccgacagaagagtcgtctttctcgagctatgatgaacaggatcagcagcagcagcagttcgtccgattcaaagtaggtaagctaagctaagtagcagcacgtaattggngccaagtggccacaggtggcaacttg

SEQ ID NO: 32148 - DNA, 281 bp, Oryza sativa
  Clone ID: uC-osflM202119e04b1
aaacatccctcccctccctcctccccctcaaatccctatccctatctcgatcggatcttggttattccatggtgcgttgctgattagtttgtttgaggtgaggatttgaggagatgaaggtggatacggagatggagaggctgctcgacgagatccccatgctgcaccatggcgacctcctcgggcggcgcgacgcggcgggggatgatggcggtggtggtgtggttggttttttttgcgtgttttgcctgatcagggagcttgaggagatgggggtggtg

SEQ ID NO: 32149 - DNA, 405 bp, Oryza sativa
  Clone ID: uC-osflM202119e05b1
atagaaaagaaaaaaaaaaggaaaatcgtgtctcgtctcgtctcgtcttcgtctcccccgattcccgagcagcttctcgaaaccctcgcggcctcgattccggcgatggcggagcccaacccgcaagtggagagggaggtggaggtggaaggaggtgaggaggcctaagctgaggtacttggagttcgtgcaggtggcggcagcgcaggcgacgatctgcctcgcggggctctacgcgcttgccaaggaccacgccggcccgctccgcctcggcgtcgacgccggcgagtacgacgtcaagggcgtagtcggacccacctacggacggttccatggtgtcccgctcgacgtactcccatttcgcgaccgcagggtggatgacactgcgcaagagctggaccgaca

SEQ ID NO: 32150 - DNA, 275 bp, Oryza sativa
  Clone ID: uC-osflM202119e07b1
gtccacccccccgcctccgcacccgcctccggttgcctcctcccctctcggcgggcggcggcagcagcggcggcagagtcagcagacctcgccgggaagctaaagccctaaagctcgcggaagggtttatcgcaacgggcgatggcggcggcggagcagaaggggaagaagccgaggaccgacggcgcggaggccgagcccgtcgacgccgccctgctgcagtccatcgagaagcttcaggagatccaggacgagatcgagaaggtgagtcggcg

SEQ ID NO: 32151 - DNA, 503 bp, Oryza sativa
  unsure (1)..(503): unsure at all n locations
  Clone ID: uC-osflM202119e08b1
tttagacaccaaaggaacttgttttttgtatttttcttttcggtagctactttctacatctctcttatttggatcacgtattatcctttttcattccacgaccgacgaccaatgttccgacacctcgccgccctgatcctgtccgccgtcgtcttggcggcgtccacaagctccggcgtcgtcgatgcccgtcctgtccacaccggcccgtaccacgtcgtcatcagaaccgccgccaagcccagccgtcgcctgatcgggctcgggcggcaatgccgccatatgcaaagaggtgcactacaggccgctgtgcggcacgctgacgacgctgcggaggnggaatgacgccgcagcagctgctggaccggcgtggcgggggccggagtccaaggccatgatggcggagaagcggctggtcgacgtgatgaaagtccgcgcggtgaaagccgaaggcacgagcatgtcgtcgacgctcgacacgtgcaagggcgcctactcgtcgc

SEQ ID NO: 32152 - DNA, 462 bp, Oryza sativa
  Clone ID: uC-osflM202119e09b1
tctgtttctaaaagcagtttcagtttcggctccattgcttattaatttacctctacagaagaatgggcacagagatggccaccgtggaggtggagggcatcccatttcctcaggagatcaccgtcagtaagccgttatcactgctagcccatggcattacagacattgagattcatttccttcagatcaaatacaacgccatcggggtgtatcttgaaaaggacaatgtactatggcatttggagagttggaagggcaagaaagcagaggagcttgtgcaggatgatggcttctttcaggccctagtttctgctcctgtggagaaactattcaggatcgtggtgatcaaggagatcaaaggatcacagtacggcgtgcagctggagagctcagtgcgcgaccgtctcgtgtcagtggacaagtacgaggatgaggaggaagagtctctggagaaagtgactg

SEQ ID NO: 32153 - DNA, 461 bp, Oryza sativa
  unsure (1)..(461): unsure at all n locations
  Clone ID: uC-osflM202119e10b1
tcggtggaggcggttcgctgtcgccgcacggctcgtcgtcgacgaccaccacctaccccaccgatgacgccgtccgccacctgcttaaacccgcggcctccacctactgccccgcgcgcttacttggatcggcgagatggggtggaagggcatcctggggttcgaccacggcgttgtgcaggcgccgctcgggcccgacatctccggcccggagctcgccgccgccgtcgccaacgccggcggcatcggcctcctccgcctccccgactggccggcgccggatcgcgtgagggatctgatacggaggacgaggagcctgacggagaggccgttcggggcggccattgtgctggccttcccgcacgaggagaacctacgngtggtgctggaggagaagctcgccgtgctgcaggtttactggggagagttcccgagggagcgagtcgatgaggcgcacctcg

SEQ ID NO: 32154 - DNA, 419 bp, Oryza sativa
  Clone ID: uC-osflM202119e11b1
ttggttcggctgtacccggtgttcgttctcgacccgcggtacctccgccccgaccaggccgcgccgtccccgggctccgcgcgcgccggggtcgcccgcgtccgcttcctcctcgagagcctctccgacctcgacgcgcgcctccgccgcctcggctcccgcctcctcctcctccgcgcccgcgacgacggcgacgtcgccggcaccgtctgcgccgccctcaaggactggaacattgggaagctgtgcttcgagtccgacaccgagccgtacgctctggcccgcgacaagaaggtcatggatttcgcggctgcgtcagggatcgatgtgttctcgccggtgagccacaccctatttgatccagcagaaatcatagagaagaatgggggtcggccgccgatgacataccaatcgttcgt

SEQ ID NO: 32155 - DNA, 452 bp, Oryza sativa
  unsure (1)..(452): unsure at all n locations
  Clone ID: uC-osflM202119f06b1
tttccatccaccgcgccacgccacgccacgacacgccgcgccgccgcgccgcgccgcgccgcccgccccccgccggcgaccatgtccttggcggcgaccttcgtgttcctcctcgtctcggcgctgcagatgctcgaccaagtcctcgatctcgtcaagaagaggggatcgattactgatgaccagctcaagctacggctagaaatcacgcagattctcaaggaggctagtgcactatccacgccctcaacgtttgcacaagccgcaaaactcaagcggctggctgctgctaaagaaaaggaactggcaaaattgcaacagcaggacatcaaagggaagcagtctttatacaaccaatacggacgagttattgttgttttccaagggttctaatctacggcttgctcattcnttgtggtttggagtgctcctgtaactactgttcccaaaca

SEQ ID NO: 32156 - DNA, 306 bp, Oryza sativa
  Clone ID: uC-osflM202119f07b1
gttagaaccatccctagcagctccctcccgctgactatgaaattcttgctgccgaacattgtactggcggcgtagtcatgccggttgctgcagagaacgatcatttcaatgacaacattaacgacaatctctatctcctaatgcagagctgtaaatgcacactcgtctatcagaccgagctgaggacccttacgaactctcaggcgttacttgtgaccatatataagaactatccacgtgttgatcagacagaatcacattactaacctatggtgcctaatgacaccaggcatcatgttcaaggaa

SEQ ID NO: 32157 - DNA, 465 bp, Oryza sativa
  Clone ID: uC-osflM202119f09b1
ttggaggagcttgagcttggagagagacaacaatggcggctcaggctcttctctctgggaggcagctgctggggaggccattgcaatcttcagtctccaggtcttcttcctccaggaaggcacccttcatggtcagggcagaggccactccccctgccaagcaaggtgctgacaggcagctgtggttcgcatccaagcagtccctgagctacctggatggcacgcttccgggagacttcgggttcgacccgctggggctatcggacccggaggggaccggtgggttcatcgagccacggtggctggcctacggcgaggtgttcaacggccggacggcgatgatgggccgtcgtcggcatggtcgccccggagcttctcggcaagctgggcctcgtccccgccgagacggcgatccccgtggttccagacccggcgtgatcccccccgcgggcacctacacctact

SEQ ID NO: 32158 - DNA, 450 bp, Oryza sativa
  unsure (1)..(450): unsure at all n locations
  Clone ID: uC-osflM202119f10b1
gtttattatagctagtgaacactgggaaagaccgtgcgaaagtgagcctgttaatgacatgggcgaattctatcggaggtttttctcatcactctggaggccattttaatgagcccttcattgcggaggatggagtttcaggagttcttctgcatcacaaaacagcaaaggataatcctccggttacttttgctattgctgcctgtgaaactcagaatgtgaatgtgacagtcttgcctgtatttggcctctctggagaaggccatgattcagccaagcaaatgtgggatagaatgaaacagaacggccactttgaccgtgaaaatttcgaggctggtaccagtatgccttcatcttcaggggagacactttgtgcaagctgtctcagcatcaacctgggtagagccacatggtaaatgtactggtngatttgggtttggcttggtcctc

SEQ ID NO: 32159 - DNA, 502 bp, Oryza sativa
  Clone ID: uC-osflM202119f11b1
tcgtgccaataacagtaattgccggcttcaataaaataaaagctttagtgcataataattcaatgcttgccgccgctcttcgaacctcatcaaaacttgttgtaagtgatgatggaaaaagagtaaagaggctgcagtcatttactgtatctgatatgcaggacctgcagtcccgaatagttgttgcagaaaatcttcctggtgatccctgttatcagaatcttatgaagatcttttcaactgttggcagtgtgaagaccattcgaacctgttatcctcaatcttcaaatggcaatagtcctgctactaatagatctgccaagctagatatgctgtttgccaacaagctgcatgcttttgtggagtatgagacccttgaagatgctgagaaagcgattctggagcttaatgatgagaagaaactggagaatgggcttagagttaggttattgaatacttgcatgacaaagggggcagggcaagggaaaagggagtgcatgaa

SEQ ID NO: 32160 - DNA, 524 bp, Oryza sativa
  Clone ID: uC-osflM202119g02b1
atcaatccctagctagctagctagctaagctagcacgcacccatggcgtcgtcttccacctcgagctcgctcgccgcggcagcgatggtggccgtcgtcctcctcctcctgggtgccaccgccacgtccacccaggcggcgcgcctcctcgacgaagaactccccaccgccgccatcccggcgatccccggcgtccccggagtgccggcggtcggccccgggatcccggtgatccccggcgtgcccggagtgccggtggttggccccgggatcccgttcgtgccggtgatccccggcgtgccggtgatcgtgccgatcatccccggcgtgccgatgatcgccggcatgacaaccctgccagtgccgccatttgtgccgccgattgatcccggcgccggcgccggattctcggcgtgccgcggcgtcgtcaccaccgtgcggaagacccacaccgccgtgccgtcgtcgtccaccgtgcataggtgtaatcaactcgcgagccacatgccgcgtaagtataccgt

SEQ ID NO: 32161 - DNA, 468 bp, Oryza sativa
  Clone ID: uC-osflM202119g04b1
gtcttttcgtcttcctctcctctctctcgtttcgattcccccgcgagagattcgatccaaccaaacccacccgctaccagcgtcttctccttcgcgagcaagttttttgagagtttgcaatgggaggaagcgaatacgatgatgactgggagttgcctagcgctgacatcactgtagttctttgcggcaaacttggctgtggcaagagcgcaactggcaatagcatcgttggaagagaagcatttgtatcagagtactcccatgctagtgtgaccagtacttgtcaattggccagcaccgcgctaaaggatggccgtaccctcaatgttattgatacgccaggattatttgaaatgaccattacatctgaggatgccggtaaagaaattgttaagtgtatgagtatggccaaggatgggatacatgcagtgctgatggttttttctgccacatcttcgtttactcgag

SEQ ID NO: 32162 - DNA, 435 bp, Oryza sativa
  unsure (1)..(435): unsure at all n locations
  Clone ID: uC-osflM202119g07b1
ctcgtcccaatccttaggtacacgcctccctctctttcctccaatttttgttcggagggaggacgaatttcagttcttgtttctgtttcgatctccaaccaaatctggcccaagaaaatttgagtttcttgtgtggtagatgccaccaatgtgtgccaagcccctctgagatctcaccggctgatcagctgatgtagtttgcagtcgaattttgttccgtttttgggggcaagattgtgttcttggagctgtagattggttatacatttttttttccatttcttggctcagttttgtccattcgacgaggaatttctcgtcgtgtttgttgttgattgaattgatccaatctttgatgcgccaagaagcaagatgaacacgaattactcgtccttnccattgacctccatcgagctccaatccaaccagcgcaca

SEQ ID NO: 32163 - DNA, 501 bp, Oryza sativa
  Clone ID: uC-osflM202119g11b1
tcgctgacgcgtgggaaaaaaaaactcgagctcacgcgcacacgcacgcgacgcgacgcgaccccgaatcggaggcgaggccgccgactccgagcggatcgggccgaggtcgacggcatgggcggcggaggaggcgaggccgggggcggcgacggaggggagtcctctcctgctgcggctgcggcggcggcggtggcgggggccgcggcgctgcacatccggtgcgcgaacgggtccaagttcaccgtgcgggccgacctcgacgccacggtgggggcgttcaaggaggtggtggcggggagctgcgacgtgccggcggcgcagcagcgcctgatctacaagggccggatcctcaaggacgagcaaaccctagaaagctatggtgttgaaacagatcataccattcatatggtgcgtggcgctggtcccccagccggatcagctgcacctgctgcagccagcccccaagcttcagctgcttctagcagcggcccaacagat

SEQ ID NO: 32164 - DNA, 418 bp, Oryza sativa
  Clone ID: uC-osflM202119h04b1
tgtgggtccacgactgacatggccgccacggcgtgctccacggcgcctcttctcggtggagctcgcctccccgccgtcggcgccgccttgccgccgacctccgttctcctcctcccccagcgcaacttcccctctcctctccgcctccatgacgcaccgaggctatctctgctccgggcgagggcgtcgtccgacgacacctcgtcctccgccgcgaccggcgacgagctcatcgaagacctgaaagctaagtgggacgccgttgagaacaagtccaccgtcctcacgtacgccggcggcgccatcatcgccctctggctgtcgtccgtcatcgtcggcgccgtcaactccgtgcctctgcttcccaagttcatggagctcgtcgggctcgggtacacaggctggtttgtgtaccgct

SEQ ID NO: 32165 - DNA, 377 bp, Oryza sativa
  Clone ID: uC-osflM202119h08b1
tcgctccttctagaaccttccactcccgctcctcgtccgggcaaggaggtgccgcctccctccgcctcgccggagatggcgacgatggagaacgtgatcgtgctcgtgaaccgcatccagcgagcctgcaccgtcctcggggaccacggcggcggcgacggcaccgcctccctccccacgctgtgggaggcgctcccttccgtcgccgtcgtcggtggccagagttccggcaagtcatcggtgctggagagcatcgtgggccgcgacttcctgcctaggggctcaggtatcgtgacgagaaggccgctggttttgcagctgcacaagacggaggacggtgtgcaggagtacgctgagttcttgcatatgcccaagcg

SEQ ID NO: 32166 - DNA, 537 bp, Oryza sativa
  Clone ID: uC-osflM202119h10b1
atcaaaaccccccaaaaccctagcctccgccgcccgccgccgccgccgccgcgcaacccccgagctcgagcggcgcgatgaacatcaagggcggaggccgggtcccggtgcccccggccggcgcgggcacgctcgtcaagctggtggtgctcggcggcacggccgtgtacgccgccgtcaacagcctctacaacgtcgagggtggccaccgcgccatcgtcttcaaccgcatccagggaatcaaggacaaggtataccctgaggggactcactttatgattccatggtttgagaggccaatcatttatgatgtccgtgctcgtcccaatcttgtggagagtacttctggaagcagggatctccagatggtgaaaattggtctccgtgtccttacaaggcccatgccagagaagctaccaactatctacaggactctgggggagaacttcatgagagaagtttgccttcaattatccatgaaacacttaagcttgtgtcgcacaatacaatgcgagtcagctaatcacacagagagag

SEQ ID NO: 32167 - DNA, 419 bp, Oryza sativa
  Clone ID: uC-osflM202119h11b1
ccgcgccggaattgccgcgtcccaccacgcctgtggtatgaggtgtgcactgctcttgcacatgctggagccatagaagaactcacgttggacaacggcgagggtccgacctttggcatccaccttggcacgacctactcgtgcgtgggacggaggcagcacaaccgcgtgtagatcatggtcaacgaccagagcaaccgcaccaccccctgctacgtcggctttaccaactccgataggcttatcggaaatgctgccaagaaccacgtctgcatgaaccccattaacaacgtttgcgatgccaaacgttttattagcaggagggttagcgatgcttttgtttagagtgacattaaaatactgtccttcaaggggattggtggacctggcgacaagcctatgattggtgtccagtacaa

SEQ ID NO: 32168 - DNA, 447 bp, Oryza sativa
  Clone ID: uC-osflM202119h12b1
gtggtattcctttgcgtttgcaggggagggagaagggagaatcggccatggccgtagtagaggcggccggaggaaggcgcggggtggcggtgggggagcggaggaaggcgaatgcgaaggaggcggcggtgggcgccatggcgagggctctgttctacccgacgctgctgtacaacgtggtgcggagcaaggtccaggccgagttccggtggtgggacgaggtcgatcagttcattttgcttggagctgttccattccgtagggatgttcctcggttgcagaagcttggggtgtatggtgtcataaccctgaatgaaccatttgagactttggtgccatcgtcgatgtatcagagtctgatgaaaggttgttgggttactgcaaattcagttatgtttcaattggaagtttcttatgacaccgaatgcttctctgctgaaattttag

SEQ ID NO: 32169 - DNA, 61 bp, Oryza sativa
  Clone ID: uC-osflM202121a01b1
ctgctcacaccgacacaaacttctcctcctcccctacgtctcgccaaagactaaggatccc

SEQ ID NO: 32170 - DNA, 452 bp, Oryza sativa
  Clone ID: uC-osflM202121a02b1
ctgtctctcgtcgcgatctcgccgaaaccctagccaaaacccccgtgggggaggggatcggagagatgctgcacgagctcctcctcgcgctgctcggcttcaccggcgacttcgttctcgacgccgcctcctccccgtcggccacccgccgccgccgccctgttcccccggaggccgccgccggcggcgacgtgggccccgcctccttccgcctcgcccccgacctcaccttcctgcagacgtacgagaggagtgctattgaaaggctcatatccttgggcttttactacagagaactaaatcgctttgcaactgagtctcgtgacctgagttggatcaattctcctatagatgtttcaccaactcatggtgagaaaactgtgaaggctaaagtgagaaaagggagtgcatacaggagagcgattgccaatggtattgctgagattttgtca

SEQ ID NO: 32171 - DNA, 302 bp, Oryza sativa
  Clone ID: uC-osflM202121a04b1
gtgttttccgagaaggagttccatatgtccaccctgttcgtcttcttcaccgccatctactgccttggcctcgtcacctacggtatcgccgttccatctggtctcttcatccctgtgatactcgctggggctacgatcgggcgcatagttgggacacttctgggtcccatatctgatcttgacccaggcctcttcgcactgctcggtgcggcttatttccttggtgggacaatgaggatgactgttttattctgcgtgatctcctctggagctcacatacgatctctacattcttccttttc

SEQ ID NO: 32172 - DNA, 280 bp, Oryza sativa
  Clone ID: uC-osflM202121a09b1
tgcaggaccggtccggttccggttggtcctccgccgccttctcctcggaggcgtcgtcgtctccggtgggttgcaggatgttaatgcgatggggtccaagacgaaggggtgctgcgggtggctgatcgtggcgctggtggcgtcgctggtggcgacggcggcggtggtggccatcattgaagaagaaggtccgcggggggagcggtctcaagctcaagccgttgccggtgcccggcccgcccggtgccattgactccaagtaccgggacgcgctcggggt

SEQ ID NO: 32173 - DNA, 307 bp, Oryza sativa
  Clone ID: uC-osflM202121a10b1
tattaagcaggttttctgagttaatgcacagaatatagagaattttccagttaatttgcttatgagatcagtaaactgctatggatatatgaagcagaagtgaagctcacactgtttcacactggtgaatgatcagtattttgtctgtttcagatcttagtgtccctagatatggaaggaagagaggcaggcttatggtaagccctggtgaatatttgtgggaggacagcatgaggactcctgttttagactagatgccagtcaccggttgttattttttttactaatgaccttttttaccgagatt

SEQ ID NO: 32174 - DNA, 542 bp, Oryza sativa
  Clone ID: uC-osflM202121a12b1
tatattggtacgtaaacgaagtggggcattccggccatcatggttcccacgccggaattcgaggattgaagtcatgccgagttggtagtttcttatctcttactgtctttaacttaatattgcctttttttcctctattttctatttatttattatttttttatttttttttatttttcttaatatttatttagatctttcttaacttgttctattttttttattttaattatcattatctctgttcatttttttctttttttattattttatcctatttaatattatttttatatataatatataatctttccttattatatattttatattttattttttattaatatagtctatcctattatttatcatttttatatttattatttttttatattttccttttattttttttattttactttttttaatttatatttccatttttttttttctctttttttcatttcttaattactttttttactttttttttatcttattttttttttttttttctctttattccttttttatctctt

SEQ ID NO: 32175 - DNA, 358 bp, Oryza sativa
  Clone ID: uC-osflM202121b07b1
ctcaccctcccgtcatcggctgccaccctgcgtctatcgccgtcgctgttggatgcaggtcgttgtccggcgtttgactgctctcgctatcggatcaaggttgtcgcccatcgtcgggcatcatccactgtcaccgccgctcgccggctcgccgtccgatcgagcaggccagcacccatctccagcgcccaccaggtgagttcccacccttgcactgcagccaccctagccaccatgttcaattaccatgaaacattctctttcttccctctttcatgttctttgtaggtgaaccaggcatagaggatgtggtggaggcgtgggggcctatcaccatcagcttgaatttccgggatcg

SEQ ID NO: 32176 - DNA, 334 bp, Oryza sativa
  Clone ID: uC-osflM202121b09b1
tctcgtgacaacaacctgctgggcaagtttgagctctctggaatccctcctgctcccaggggtgttccacagatcactgtttgcttcgacattgatgccaatggtatcctgaacgtgtctgctgaggacaagaccaccgggcagaagaacaagatcaccatcaccaacgacatgggcaggctcagcacggaggagatttgagatgatggtccaggaggccgagaagttcattgtagatgatgagttacacattatgttggtggagtcctttattgctttgtttaacttcttcatcaaacatgcgtttcacctattattgtttttattatttttt

SEQ ID NO: 32177 - DNA, 83 bp, Oryza sativa
  Clone ID: uC-osflM202121c03b1
ccgtaattccctttcgacccactcgtccgtctgctctctagctgaactgaagcaggggaggggaggagtttttttatcaattt

SEQ ID NO: 32178 - DNA, 555 bp, Oryza sativa
  Clone ID: uC-osflM202121c05b1
ccacgcgtccgctctttcgcgcgcgcctgcgtcgtcaatggcggaccagctcaccgacgaccagatcgccgtgttcaaggataatatttatctttctttcttttttttgttttttctcaatttctctttatttttttttttttattttacttaatttatttttttactttttttttcttctattaataatctttacttttcctcattttttttattattttttaatttatttttttattaatatatatattttataatttttcttcatattttattttttattatctctatattattctattatatctttatttttatctcttttttttttacttttcataaatttttatcatattttttttaatttttctttttttttttattctataattacaatatatatctttttttattatttcatatcttttttttatcatatattttaattattattctctttattatattcattattatttttattctcataatttataatatttttcttctatcttatatcttttatattattatctatttatattattttttttc

SEQ ID NO: 32179 - DNA, 499 bp, Oryza sativa
  Clone ID: uC-osflM202121c06b1
tctattagaaaatcacggcacgtgagcttgcagagacagcaatggtgagagttggcgccgcctcctcttattattttcatttcttttatattttttattactctctttattttttttttttcttttattttcttttttttctctttttcctttactttttttttctcttatcttttttctttttaatacttcttttttcttttcttcttatttcttttcatctactttttctttcctttttacttttatttttctctattttctctctttttatttttttcttattttacacctttctatttatttacttcttatatctctaccatcttcttctctcttctttttacttttttttttctctttattatttttttttatctcttccttttatccaattttatttctttctttcttttcctattctacttatttatatctatctttttttcatctttatttttcattttttcattcacctctttacttattttattctttt

SEQ ID NO: 32180 - DNA, 426 bp, Oryza sativa
  Clone ID: uC-osflM202121d01b1
cgtgagcttgcccagcaaattgaaaaggtcatgcgtgctcttggtgactacttaggtgtcaaggtgcatgcctgtgttggtggaacctctgtccgtgaggaccaaaggattcttgctagtggtgtgcatgttgttgttggcacacctggacgtgtgtttgacatgctacgtcggcaatctctccgcccagaccacattaagatgtttgtgctggatgaagctgatgagatgctctcccgtggtttcaaggatcagatctatgatatcttccagctccttccaccaaagatccaggtcggagtgttctctgctaccatgcctcctgaggcccttgagatcacccgcaagttcatgaacaagcccgtgaggattctcgtgaagagagatgagcttacccttgagggtatcaagcaattctacgtcaat

SEQ ID NO: 32181 - DNA, 513 bp, Oryza sativa
  Clone ID: uC-osflM202121d05b1
tttctagcgagagatcgaagcaagctgctacacagatctcacgacatgtccgaggctttttcttacatttttaattttttttttttctacattttttttttaataatattaattttttttaatattaaatctctatatattatttatatttattcaatatttatttataattaatttttataaaattttataatttttaaatttttaatatattttaaatatattatatttttatttttattatatttatcatatactatatctcttcttttttttatatataattattattattactattttattattataaaattaatattttataactttatatattaattatcacatttttttttttttatttttattatttttatttttttcaaattatatttttatttttttttatatttaatattattttctattttttttattatatttttttattttttcattattaaataatttatcatattttcttttattattttatttccttattatatt

SEQ ID NO: 32182 - DNA, 627 bp, Oryza sativa
  Clone ID: uC-osflM202121d08b1
ttccctgttcgtcccacgcgtccgttctctcttcgtgttaagcgcgcagaggccaagggagaaatggaaaaaataacgaaaaaaaatgagaaaaaaaattggactcgccaccgcggcgggagaggcttacggttcaccttcctgttcttttttctttatcttttttttacttctctgtctttttactttttttcttttttttttgtttttttttctttttttttttttatttcttcttttttttttttttttttttttttattttttctttatctttttcttttttctttttatttttttattttctttattttttttttctatctttttattatttctttttttctttttattttatttattttttttttttttctatatttattttcttatatttcttatttcttttttttttttcttatttctttttttatttttctttccttttacttattactttttattcttttttttctttatttcttattatttttttttatttttctttttcttttattttcttcaatttctaactttattttttttttttctttattctttttattctctcttttttatcttttttttttatctttatctttttattttttttcttctcatttttta

SEQ ID NO: 32183 - DNA, 577 bp, Oryza sativa
  Clone ID: uC-osflM202121e02b1
ctcgcgtccggtttgtctgattcttcttggactgatacggatggtggacttgttctcgttgcgcgtacgttacaagaaccgtgacggcgtgtggctgtggacattgtccatggtcgtgatctttttttttcctttgatttgttgtagtttatagttttttttttttattctattttatttttttatttttttttattttttttttatttttttatttatctttttattttattctttttatttttttttttttttttttttttaattatttattctttttttatttttattttttttttttctttttttttttttttctttattaattttttttatctatttaatttttctattttatattttcttttttattttttttttttttttttttattctatatctttttttttttttttcttttctttttttttattatttttttctaattcttatttttattttttttttctttttttttattatttcttatatatattttttcttttattttttttttctttttattttttcattattattttttttttatatcttttttattatatttttatttttt

SEQ ID NO: 32184 - DNA, 79 bp, Oryza sativa
  Clone ID: uC-osflM202121e04b1
tactgaatcttaacaactggagtcaacctcctttgcgctgcttttagctcgctcccctgccctgtctcttggagaagat

SEQ ID NO: 32185 - DNA, 280 bp, Oryza sativa
  Clone ID: uC-osflM202121f01b1
aagattaaaaccatccacaagccacgcgcatgtgggacctgcatgtttaaggcgagctcaattgaattaatatccttttattggaagttggaacagaggcttttatcaattaaaatcttgtgccagctttggacgcgatcccgtttgaacactcaggtgttttttttattttctcttctctttattcttatctattattctttccatttttttatttctttttatcttattctcttaattcttttcaattattatttatattttatttttagtttcttct

SEQ ID NO: 32186 - DNA, 228 bp, Oryza sativa
  Clone ID: uC-osflM202121f04b1
ccgctcttttactccggctgcctcgacctcctcacggaggcacttgtggcctagagcttcgatccttactacttatatattttttatttttaattacatatattatcatataattatttttttttctcttttttatacttattttttatttttattttttattttattattattttttctatatttattttctttatatattttcatttttattataatatttttata

SEQ ID NO: 32187 - DNA, 91 bp, Oryza sativa
  Clone ID: uC-osflM202121f08b1
acgcgtcctccctcaagagggcagacatgttcaagtacgtgggtattcctctctagcctcccccgcaaagccagcaaggacccggtcttcc

SEQ ID NO: 32188 - DNA, 79 bp, Oryza sativa
  Clone ID: uC-osflM202121f09b1
tatcggcggaggctacggctgcagcagctgcgagaccgttagcagtgatggtggagagtacactctcatcttaattttc

SEQ ID NO: 32189 - DNA, 53 bp, Oryza sativa
  Clone ID: uC-osflM202121g08b1
actttctcgaaaacagatgagagagcaaccgaagggggggatgtcttttaaag

SEQ ID NO: 32190 - DNA, 54 bp, Oryza sativa
  Clone ID: uC-osflM202121g10b1
tacggcccacgcggagcagcagagagtggcgggctcagtgtcgggctcgccgga

SEQ ID NO: 32191 - DNA, 576 bp, Oryza sativa
  Clone ID: uC-osflM202121g11b1
tgagaaggtaactgatcgatctgcaagctcgattggttgattggcttttttcatttggtgatcaattgatgatggaattgggggtgcagagttggggggcgttggcggagacggtgaggagggtggtgagggagttcccgcggctgctgctggcctggggtggatggtgttctgtggtgcgtttctcctctttgtgttctttgctcggttcttttgttttttcttttctttttctgttcttgttttgtttttctttttttccctttctcctttctttttttttctttttcccttcttttcttctttttctccggttttctttttctttggttctttctcccttgtttttttgttcgttttctttttgttttctcccttttctcttgtttttttttttttttttttttccttttttttttttttgtttttctttccttttttttctctctcttgtcttttttttcttgtccgttttctcttttttcttgttctttttcgtcttcctttctcttgtttgtttttctttctcctctttctgctcttttttttttctcttttttgtcttctttttctttt

SEQ ID NO: 32192 - DNA, 52 bp, Oryza sativa
  Clone ID: uC-osflM202121h05b1
acattctcgaagaaggcggcgaggccgtcggcggcgactttttaaaaagaat

SEQ ID NO: 32193 - DNA, 84 bp, Oryza sativa
  Clone ID: uC-osflM202121h06b1
agctgacgcagactatggagcagccagggtcatgttgaggcctgcttgccctggatctggtgtaaccgcaggtggagctgtcag

SEQ ID NO: 32194 - DNA, 106 bp, Oryza sativa
  Clone ID: uC-osflM202121h09b1
gtccacgacgggccgttcggcgccacgggcgtcaagcggctgcaggacatcggcatgatcgacgccgtgcccggcatgcgcgccctcgacatgaacaccgtcgagg

SEQ ID NO: 32195 - DNA, 421 bp, Oryza sativa
  Clone ID: uC-osflM202121h12b1
tctcctcactacaggctaacacaatggcagctcccgccatcctccgcctcctccctcttctcctcctcgccgccgccgcgaacgccgccacgttcaccatcaccaacaagtgccagatcaccgtgtgggcggcagccgtgccgtccggcggcgggcagcagctggacccggggcagcagtgggtgatcgacgtgccggccggcacgacgggcgggcgcgtgtgggcgcgcacgggctgcagcttcgacggcagcggcaacgggcggtgccagacgggcgactgcggcggcgtgctgcggtgcgcggcgtacgggcagccggccaacacgctggcggagttcgcgctgaaccagttcagcaacctcgactttttgacatctccctcatcgacggattcaacgtgcccatggactttcctccc

SEQ ID NO: 32196 - DNA, 344 bp, Oryza sativa
  unsure (1)..(344): unsure at all n locations
  Clone ID: uC-osflM202122a01b1
tataatagcagcgtcgcctctcctcctcctccgtaaggcctacgcttccagaaccgtgtgctcgaagctcccgctcccccccccttccgctccaatggcgaaggaaccgatgcgcgtgctcgtcaccggcgccgcaggacaaattggatatgctcttgtccccatgattgctaggggtgtgatgttgggtgctgaccagcctgttattctacacatgcttgacattccaccagctactgaatctcttaatggccttaagatggagctggttgatgctgcatttcctcttttcaacgnaattgtcgcaacaactcatgttgcggaggcctgcactggtgttaatg

SEQ ID NO: 32197 - DNA, 346 bp, Oryza sativa
  Clone ID: uC-osflM202122a02b1
ttcggatctgtagcaaagagcgaagagcgaaggtgcgggctgcagctacgcttggtcgcttgagacctagggtacgagcaacaataatagagagtgactgagtgagcgagcactgagtagcaagggcccggcacaaacaggacgcagccggcaacgtgtacgtcgaaccaaacagagaacagctagctaatcgatcgggcgccatgaccaaggacgacgccgtcccggtggcctgggcgcctgcgaatagtccttccatcaacatatatctcctttacctaacctcattctccacactgggggcgccaaccaacggggggggggagaacgggggggattagggggg

SEQ ID NO: 32198 - DNA, 344 bp, Oryza sativa
  Clone ID: uC-osflM202122a04b1
atgacttgctcctctctttagccattggcttcggccgaggctgttgagacattcctcaccaccatgggcaccctgccaccattcccgcccctcctcctccttcgtcgccgtcatcttctccttcctctcctcgtcgtgctttgctgtgaccagccatgaggcggcggccatcgcgcggcgccagctgctcaacttcgagaagcacggcgaccacgtccacatcgatatcgacatcgagatcaaggtgagcaacccgcggctggcggcggcgcacagggcgctgcacgcgctgaagcgggcgctctactccggccccggtaactttaccgtctactgggccggcc

SEQ ID NO: 32199 - DNA, 189 bp, Oryza sativa
  Clone ID: uC-osflM202122a05b1
gtataaatgcacctgtctctcttccaatggaaaactttagaatgctatcttcggaaagagcctatcggtgtagttgggttgatcacaccttggaactatccttctcctgatggcaacatggaaggtagctcctgccctggctgctggctgtacagctgtactaaaaccatctgaatcggcttccgtgac

SEQ ID NO: 32200 - DNA, 184 bp, Oryza sativa
  Clone ID: uC-osflM202122a07b1
tgttaacgctcagcagcagcagccgcctccgggccgagctcatctacagctccccgcctcgcatggaggcgccgccggggccggagcccatggagctggacgcgccaccgccccccgccggcgtggcggcagtgtcagtggcggcggctaccgcctgctcagccagaagaagaaggatgagggc

SEQ ID NO: 32201 - DNA, 428 bp, Oryza sativa
  Clone ID: uC-osflM202122a08b1
tctgtaacacgcacacacgaaacacaggagtgagggagaagaatataaggtaagagagtgctagagagagagagagagggcctttttccattcacctatatgcattctgttgtcattattactgtcttgctttctctctcttaccttttttcattttttgtcctgctcttattctttctcccttctctttccccttcttttctttctttttccctctctcttatttcatttttctctttctttttttcttcctttttcttttttcttttttccctttttcctcctcctcccctcggccctcggggggggcggttctttcttttttttcttcttgggggggggggggggccatctccccttttctctcttcattttctcttccttctctttcctttatctttttctttttttcctttcttcttctttct

SEQ ID NO: 32202 - DNA, 195 bp, Oryza sativa
  unsure (1)..(195): unsure at all n locations
  Clone ID: uC-osflM202122a09b1
tcggtcaggtgcgcgtgcgccgttgtagattggtggttacttttgaaaatagggaggggtaaataaaaantaattattttataaaaattattaatattttaaaatattaataattataaaaaatataaaatataaattataaaatattatatatttaaattataatataaattatattattataaataatattat

SEQ ID NO: 32203 - DNA, 202 bp, Oryza sativa
  Clone ID: uC-osflM202122a10b1
tcgttggatacctatacttcactaggatcattgggtggtgctctgaagacaatcaccagactacaagtacagatgggtgagtgttgccgcagaggaggtggccactgtggcattctacctgttcatgttctacatgttcaggccagcagagaggaaccaatatttcgctcttgatgaggatgaggtggttgattttgaattt

SEQ ID NO: 32204 - DNA, 81 bp, Oryza sativa
  Clone ID: uC-osflM202122a11b1
ttgttctagggtttcgcgttacgaggattaccgtgtagaagctaacaaaggggggtggccacaaacaagcaccactccgac

SEQ ID NO: 32205 - DNA, 302 bp, Oryza sativa
  Clone ID: uC-osflM202122a12b1
tcggtccttttttttttttttttttttttttgtggtgaggtgccaattaacttggtaccacatccaaaacggaaattgttatacatggacgggcctacgatacagtgacagattcagacatacagtacgtgcatcaaacgaaattattattcccctgattaactgtttgggggagaaggtcgtaagagagcacgcacgttcttagcaaaatatatgatcagggatttcattacattacattacatatgccctgtaattactggattacaggacactgtttgcattggtttctattaagcctg

SEQ ID NO: 32206 - DNA, 576 bp, Oryza sativa
  Clone ID: uC-osflM202122b01b1
ttctttttttcgcgctcgattctaatcctaccggagagcaaaagcccacgcgcgaagcaaaagctcgccgcaaatggaggacgccgcggtcgtggaggccgtggtgagcggtggttcggttgttttcgcgccagctctagatgtctggcactcactctgacgctcaggctgcggctgagagagtaaaaggctaggcgttatctgtttgaaagggattgtgcataatttattgctaagcgagtttttgcgtgctttgtctgcattgtttttgctttttgtgcttattgattagtgtccttttttttttctttttagttttgtttccattattcttttttttttcttaatctcttatttttttctctttttggtgtgggggggggtgggtgtattctttttctttttttttttctattattttggggggtctatttttttttttatttcctttttttttcttttattcttattttttcttttttattctatattttcgacttcttttttttttcgttttattattctaatatcttttttctttcttgacttttacttttaaactaggtctgtttcttt

SEQ ID NO: 32207 - DNA, 238 bp, Oryza sativa
  Clone ID: uC-osflM202122b07b1
tcgctgacacaaacccaaagctaagcttcgaggtcccccattgatcagtgagctagctagtagctggttggttaaaaggcctttttgttttgtttgagttggagcagaggagaagaatggcggctttgcttgtggtcggggtggttttacagatttgttaagttgaaatttttctttatcaataagtattttgtaatatcctttttaaatttttctttttttatatcacttaatattt

SEQ ID NO: 32208 - DNA, 321 bp, Oryza sativa
  Clone ID: uC-osflM202122b10b1
tcgctgacgcgtgggcggacgcgtggggccaccaattatctatggtgatgtgagccgccccaaccccatgactgtgttctggtccaagttggcgcagagcatgacctctcgccccatgaagggaatgttgactggtcccgtcacaatccttaactggtcttttgtcaggaatgaccagccgaggtttgagacatgctaccagattgctcttgccatcaagaaggaggtcgaggaccttgaggctggtggtattcaggtcatccaaatcgatgaggctgctttgagagaaggtctgccactccgcaaggcggagcatgcttt

SEQ ID NO: 32209 - DNA, 244 bp, Oryza sativa
  Clone ID: uC-osflM202122b12b1
tctattaaattgtctctgtgcatgcacttgtggttggtgcactacgacacatgcacaagcttgtgtaaggacaacatggcttgttgttcttctctcctccggctgatgattctgccggttgcttttgctgtcttggtcatcgcttcggttgctcatggcgctgttgtggagcacactttcaatgtgggcaacctatccataagccggctgtgccaaccggagatgatttatcatggcggtgaac

SEQ ID NO: 32210 - DNA, 257 bp, Oryza sativa
  Clone ID: uC-osflM202122c02b1
gtagaacagcaatgacagcagcatggacaggggtatcagtagtgttagtagcacttccaatggaagtgaacatgcagttgctgcttaaggtggtgtcctttcagctgatgcatactcttgggtgtgccattattttgatttgccattctacattgttcggattatgaatgaattcattctttatacttccttccttctatcagctcttttttttttttttcaagtcttctcttatatactttatttttactaatttt

SEQ ID NO: 32211 - DNA, 74 bp, Oryza sativa
  Clone ID: uC-osflM202122c03b1
actctgcggtgctgacggcggccaccacagacgagggggcttatcaaaaggcacggaccattctctcgcgcccc

SEQ ID NO: 32212 - DNA, 544 bp, Oryza sativa
  Clone ID: uC-osflM202122c07b1
tcgttcttttattcctatagtatgaattgcagtttgggcgttgttagaagttgttgtacgtaactgaaagttctgtcttaaatagttgaataattttttcttattttttaatttcaataacattattattattaattattatttatattttttttaatatattattataataatttactttattttaaattatattttttttattatttatttaacatattattttataatctcaattttataactatatacatataaaatattatatttattatatctaattattaaattattttaatatataaattctatttattttattatatatattatatctaattattattcatattatataatttaatataattttattactattatattatataataatatttttacaaaatgaatattataattattgtgaggatagtagcaaattaattaattattttcaaccatttattttattttatttactataatatatttttattatattttattataatattatacataatttaattctcatcttttt

SEQ ID NO: 32213 - DNA, 119 bp, Oryza sativa
  Clone ID: uC-osflM202122c09b1
tctgtccttctcacccccactcttcatatacctggggctgtttttaagtgagcggggctatttctctcttactaaaactattttgtaaaaccttttcactaagagattattcattcttt

SEQ ID NO: 32214 - DNA, 569 bp, Oryza sativa
  Clone ID: uC-osflM202122d09b1
gttcttctcaactgcacgcttcagataccttgtgctgttttcaagtgagcgggactggtgctctcttactaaaactcttctggaaatccttgccaagaggagtttggccagtgatgaactatcacaggaaactctggaaatgctctcagagatccatctcctgaacagggcagtgaaaaggaaaagtagccacatggcgcgcttgcttgtacagtttgttgtcgtgtgccctgatgattccaaattgtaccccttccttccaaatgtagctggcccaggtggtttgactccattgcacctggctgcatccattgaggatgcagtggatattgttgatgctttgacagatgatcctcaacagattggtttgagctgttggcactcagcgctagatgatgatggtcagtcccctgaaacttatgccaagttgaggaacaacaatgcgtacaatgagcttgtagcacagaaattggtggacaggaaggacaaccaagttactataatggtttgcaaagaggaaattcatatggttcaatcaggcaatgttggtgagaaaataaatctgcatt

SEQ ID NO: 32215 - DNA, 505 bp, Oryza sativa
  Clone ID: uC-osflM202122d11b1
tcgttcacacagtctccactcacacgcattgcggaggagaggcgacaatggaggggaaggaggaggacgtgcggctgggggcgaacaggtactcggagaggcagccgatagggacggcggcgcagggcgccggggacgacaaggactacaaggagccgccgccggcgccgctgttcgagccaggggagctcaagtcgtggtctttctaccgggccgggatcgccgagttcgtcgccaccttcctcttcctctacatcaccatcctcaccgtcatgggggtctccaagtcctcctccaagtgcgccaccgtcggcatccagggcatcgcctggtccttcggaggcatgatcttcgcgctcgtctactgcaccgccggcatctccggaggacacatcaacccagcagttacttttgggctgttcttggccaggaagctgtccctgacccgggccatcttctacatagtgatgcaatgcctaggggccatctgcggagctggagttgt

SEQ ID NO: 32216 - DNA, 369 bp, Oryza sativa
  Clone ID: uC-osflM202122e01b1
gttggaggccgcagccgcttcgggatcgggaagcggaggagaggggaaggaagggagagaggcaggcgacccggccgcgcagcttccccccctccctctctctctctctctccgccgcccccccctcccccctaccaccaccaccacccgccgccgccgcacgatgagctccggcgcctcctctcccccgccgactgcgccctccgtcgcccatgacgggtgggtcacctcgcacgtggatcccttcctcctcgaggcgctcgtcaaccctcgcctccgcctcatggttctgcgcatggcactggatattcagatatttatgctgaatcctcaactgcctcaatacgaattccagcatcttacaccttc

SEQ ID NO: 32217 - DNA, 542 bp, Oryza sativa
  unsure (1)..(542): unsure at all n locations
  Clone ID: uC-osflM202122e05b1
gtcaatcttcctcatgatgtcaacagcaatgatgtgcgcagatttttccattcacttggggttggttcaattgaggaggtgcgtgtaacgcgtgataaaggttttggctttgtgcgttacagcacccatgaagaagctgctctagcaattcagactggtaatggacaacttattggcggtaggcagatcaagtgttcctggggaagcaagccaactccaccagggacagcatccgcgcccctaccccctccggcaccagcaccattcaatcctggcatgtcggcgaccgacctcctagcctacgagcgcaccctggcgctgagcaagatggcagcgaacccggccctgatgagtcagcacgccgccctaaagcaggctgccgccatgnggatgggcgccggagccagccaggccatctacgacggcggctaccagagtgccaacgccgtcttctctagagtgacctgagtacctgaccccccatgaagcagaccaccaccattgcctgcctgcctctgtatgaccaangaggatgatgatga

SEQ ID NO: 32218 - DNA, 495 bp, Oryza sativa
  Clone ID: uC-osflM202122e06b1
ttcagagcaagaagctcagctcctcctcctctggcggggcagccatggccaccaccgcgtccagcctcctcaagacctccttcgccggcgtgcgcctccccgccgccgcccgcaaccccaccgtctccgtcgcgccgcgcaccggcggcgccatctgcaactccatctcgtcgtcgtcgtccactcccccctacgacctcaacgccatcaggttcagccccatcaaggagtccatcgtgtcccgcgagatgacccggcggtacatgaccgacatgatcacctacgccgacaccgacgtcgtcgtcgtcggcgccggctccgcggggctctcctgcgcgtacgagctctccaaggacccctccgtcagcgtcgccgtcatcgagcagtcggtgtcccccggcggcggcgcgtggctcggcgggcagctgttctccgcatgggggtgcgcaagccggcgcacctgttcctcgacgagctcggcgtcgcgtacgacga

SEQ ID NO: 32219 - DNA, 459 bp, Oryza sativa
  unsure (1)..(459): unsure at all n locations
  Clone ID: uC-osflM202122e08b1
tcgccgaaagccacccacactctccgtctccggctggggcgatctcnaagggtgggagctcgctgctgctcgcgctcgccgtggtgctgtcggcgccggcggcgagggcggaggaggcggcggctgcggaggaggggggcgatgcggcggcggaggccgtgctgacgcttgacgcggacggcttcgatgaggccgtcgccaagcacccgttcatggtcgtcgagttctacgccccgtggtgtggacactgcaagaagctcgctccagagtatgagaaagctgcacaagagctaagcaagcacgatccaccgattgttcttgccaaggttgatgccaacgacgagaagaacaagcctcttgctaccaagtatgagatccagggtttcccgacactcaagatattcaggaaccagggcangaacattcaggaatacaagggcccgagggaggctgagggca

SEQ ID NO: 32220 - DNA, 429 bp, Oryza sativa
  Clone ID: uC-osflM202122f04b1
tttggtcatggcacggtggctacagctgccggggaggcgtcctgctcgtcatcgtgggcgtcgccgccacggccgccgccgccgacgtcgtcgtccgcgacgacgagaagtgcgccgcgtgcggcctgcccagcccctgcggcacgacgtgcacgtacgccagcccgccgccgcccgacgtgctgccgactccggtctactacccgccgccgccgcccgtctactaccccccgccgtccccgccgccggtggcctaccctccgccgaccacgccgtcgaccaactgcccgccgccgccgtacggaggcggaggctacaacccgacgccgagctacaacccgacgcccggctacaacccgacgccgtcggggtggttcacgccgccgaacatgccgtcctacctcacgccgccggggacgctctacccgc

SEQ ID NO: 32221 - DNA, 464 bp, Oryza sativa
  Clone ID: uC-osflM202122f06b1
ctctctctccatctctctcctccaatcgctggggcgctcacgcacgcgcgctctacctacctgagggcgaggctggtgccgatggcaatggaggctgcggcggagaggagcgccggagcaggggcggcggcgacggcggcgccggagagcggtggcggtggtgcaggggagaggcggtcgcggttcaggcggatctgcgtgtactgcggcagcgccaaggggaggaaggccagctaccaggacgccgccgtcgagctcggcaaggaactggtcgagaggggcatagacctggtctacggcggtggctccatcggcctcatgggcctcgtctcccacgctgttcacgacggtggtcgccatgtcattggggtcatcccgaaatccttgatgcccagagaggtcactggtgagcctgttggtgaagttagagcggtctctggcatgcacgagaggaaggctgaaat

SEQ ID NO: 32222 - DNA, 450 bp, Oryza sativa
  unsure (1)..(450): unsure at all n locations
  Clone ID: uC-osflM202122g04b1
ggcggtaggatcaggtgcatgcaggtgtggccggtgtgagggcatcaagaagtgcgagaccctctcctacctgccaccgctcaccgtggaggacctcctgaagcagatcgagtacctgctccgttccaagtgggtgccctgcctcgagttcagcaaggtcggatttgtctaccgtgagaaccacaggtcccctggatactacgacggcaggtactggaccatgtggaagctgcccatgttcgggtgcaccgacgccacccaggtgctcaaggagctcgaggaggccaagaaggcgtaccctgatgcattcgtccgtatcatcggcttcgacaacgttaggcaggtgcagctcatcagcttcatcgcctacaagcccccgggctgcgaggagtctggtggcaactaagccgtcatcgtcatatatagnctcgtttaattgttcatctctga

SEQ ID NO: 32223 - DNA, 428 bp, Oryza sativa
  Clone ID: uC-osflM202122g05b1
gtaagattaagatcggaatcaacggtttcggaaggatcgggaggctcgtggccagggtggccctccagagcgaggatgtcgagctcgtcgccgtcaacgaccccttcatcaccaccgactacatgacctacatgttcaagtacgataccgtgcacggccaatggaagcacagcgacatcaagatcaaggactccaagactctgctcttgggcgagaagccggtcaccgttttcggcatcaggaaccctgacgagattccgtgggctgaggctggtgctgagtatgtcgtggaggtcaccggtgtcttcactgacaaggagaaggctgctgctcacttgaagggtggtgccaagaagggttgtcatctcagccccgagcaaagatgcttcgatgtttgtctgcggtgtcaacgaggacaagtacacttc

SEQ ID NO: 32224 - DNA, 571 bp, Oryza sativa
  Clone ID: uC-osflM202122g06b1
ctattcttgagctcaatcagcaacaacatctatctccttcttgcttagttaagtccttcgccctcccaagaagaagaagatgtcttgctgcggcggcaactgcggctgcggcagcggctgccagtgcggcggcggctgcggcggatgcaagatgttccctgatgtggaggccacagccaccaccaagaccttcgtcctcgctgctccatccaacaaggcgagctctggaggaatggagatggcggtggagagcggcgagaacggcggctgcggctgcaacacctgcaagtgtggcaccagctgccgcggctgctcctgctgctcctgcaactgaatctatcgtcgtcgtcgcccggctgcatgaggatttatcgtatggatgctgctactgtcgatcagagctttgatcgaggccttaatttgcttgcattagtacccagcttatatgtaggcaggccttgccttttgctctgacgcctaaatagaaccgtcgtcgtcgatgtcagcgtgtgcgtgtgtcgatcaatgtgggatggatccctagctagcttggatgatcatctatcatcat

SEQ ID NO: 32225 - DNA, 384 bp, Oryza sativa
  Clone ID: uC-osflM202122g08b1
tcggttgaacgtggtgaacgcgcacaatgcctggatgaccacttgcaaggccaacggggaggctacccttggtacataccacggtgatgctgtgctcggcgagggtgcctctgagagccttcacgtcaaggactacaagtactgatctgcctctggtggtggctgaagatccgattggacatcctccgtatgcatatttagggttctgagtgtgggttggctatcaagcgtgcaatcttacgggtatcaaaaacttttgtcgcaataatctgaacctgtgctttttaataattaatacctgtcatccgtagtagttttttgggattactgtaatcaaatgctgcgtattgtgaatttggagcagcggctttaattacatgctat

SEQ ID NO: 32226 - DNA, 274 bp, Oryza sativa
  Clone ID: uC-osflM202122g12b1
tcggttatagatcgcaagctggccttctcctgcaaggagagcatgcttaagcagggggtcccctacaccaagcagtttacgttcttggaccatgctgggatcaacgacactccagacagcgagcatagctagtggacgctggctacgcttaccgacgtggaggaggtgaagactggggccaggatgctggcgatctgggctacgacaatcatgttctggacagagtacactcagatgaccaccttctccgagataccagcgaccaccatggacc

SEQ ID NO: 32227 - DNA, 345 bp, Oryza sativa
  Clone ID: uC-osflM202122h01b1
acattgaacaacagtggggggtggtttcaattaatcgggggtcatacaacccagtgaaaccctttttaacttcatatcctacaatttgatttcattttgcttaagctctactcaatctgggaacatcctagaatctctgtgctatttcctagacctcttctcctattcatctaaaagtttgaacaagctgcttaattaaccatattattaatcaatttcaactcctctatcatcacatatcttaatatattagctttgatccaaccaattcatctatcattaatagattcaacaagaaaatatgaataactaggttcatcaatttaagaactggtttttactttt

SEQ ID NO: 32228 - DNA, 506 bp, Oryza sativa
  unsure (1)..(506): unsure at all n locations
  Clone ID: uC-osflM202122h06b1
ttttaatttgtaatgtagggttgcttataatgggcgaatgttcatatgcagccgggtagccctgaatatatagggatcttacacatgtttggtgattctgaagcttgtgctttctcgattcacaatttacttcaagctggaaagagttacggtctggctgctggatcatgggtaggtccatacgccatgtgccgggcatggcaaacccttgtctgtaccaatagggagcatcatgaagctgtagatgggaatgggaattttcctatggctctttatgtggtatctggtgatgaagatggtgaaagagggggagctccagttgtttgtattgatgtttctgctcagctttgctgtgatttcaacaaanatcaatcaacctggtctccgattcttttgttgggccctctggttcttggtcttgacaaactttatccaaggtaatcaccaagctattaaaataccatgctttgtagacttttgtggacagtgtttggttatctgatata

SEQ ID NO: 32229 - DNA, 303 bp, Oryza sativa
  Clone ID: uC-osflM202122h07b1
tcggttgccttgtggctacactggctgcctggggggcggccttccatcgatcgatggtgcaaacaggccagtgcatgcctgtttagcttctcatcctactatttgatttcccttttcttaagctataccttatatgggaacatcctaaaatatctggtctctcttcagcacctctgctactattcatctgaaagttgcgacaagctgcttaattaaccattgtattaattaaattcagcttgctcatcatcacctactgttatatatttgcttgagtccaaccagctgatcgatcatcaattg

SEQ ID NO: 32230 - DNA, 551 bp, Oryza sativa
  unsure (1)..(551): unsure at all n locations
  Clone ID: uC-osflM202122h11b1
tctgtctcgcggagggaaacccgcttttgccgggagcaaacgaaaccaagcggggggaggagaagatgttgctgcaccggcaccggcacaggctgctctgctgcggcggcggcgtcgccaccgcccccggccggttcgccggcgatgccatcgcggaccatcagcaggcagccgccggcgccaagaacgcggcggccacgtcgtccgcgaggcagctgtcgtgggcgcaggtggaggccatgacgcgtgggttcacgtcggccgtcntctgcgagggcggcttcagcaccgtctacctcggccgcgtcgccggctccctcgcggccgtcaaggtccaccgcagcagcgagcgcctccagcgcgccttccgccaggagctcgacgccctcctccgcgtccgccacccccacatcgtccgcctcctcgcgttctgcgaccagcgagacgagggcgtgctggtgctggagttcgcgccgaacgggaacctgcacgaacagctncacngcggctgcggcggcggcgcgatgccttgggcccggcgggtggcggtg

SEQ ID NO: 32231 - DNA, 221 bp, Oryza sativa
  Clone ID: uC-osflM202123a03a1
gggaacggaaaaattcttaaacccaggacaaaaataaaacaggggcattgcccatgtccccaagaaaacccccaaaaaaaccaaaaaatccaaaggaacgataaacccagaatcaaaagcggggtcaacctccaagtcccccaccaatttcccgaaaaaaaaacccaccaaccggccctcaagaaaccccagtaccagagccccagccataaacacacctt

SEQ ID NO: 32232 - DNA, 386 bp, Oryza sativa
  unsure (1)..(386): unsure at all n locations
  Clone ID: uC-osflM202123a04a1
gcgcgtgcgcgcgcgcgtgttttgggccctcacctgcgcccgcccttttttnnnttggggttttttggggaccccgctttttccaccggggtgtggtttccaatttaaggagtactaacagtcaatcttaatttgatgagtgcatatattaacttgatctcaacatcgatcgggcatgtcttgggtactgttcctcccgggctgttcaggaatgagtcccccgcctgagcctcttgtccactgggcacgagcctcatgcccatcggcggtagcaccttgaacatgttgggcaccgccggtggcagcgtgaagagcccctcgccggagatcaagcccgctgcgacggcggccgacaggatctcggcgctcatggtgtccatcttctt

SEQ ID NO: 32233 - DNA, 237 bp, Oryza sativa
  Clone ID: uC-osflM202123a05a1
cggacccagggccggctaaccagactggaggcactagtaatgggaagaaacacgagagccacgggctcgctctaggagatcctcaacaagcgctctacgagggaaggagcgttcacagtcaagcaggcgagcgtcaccaccgggcgtcgacacagggctgactacagatatctgccttggaaccgtgggaacgcatggtagagaaattgagttccggtggtgcgccttgagcatgca

SEQ ID NO: 32234 - DNA, 346 bp, Oryza sativa
  unsure (1)..(346): unsure at all n locations
  Clone ID: uC-osflM202123a06a1
tgcccccgccctttttttnncggggggttgggggggaattcggggttctcattcctgcgccaaacagctacccaccggtactagcgcaacagaggggaatgcatagaacagaagaagtcgcctgcgaaaaccgcgaaatgtgggagcacccgaaagagggaatgccctattgcttattatacagtgacgatctgcctacaaaaagtatagcttgcaagctaggagccgccatgggatctgaaagatgacatggactgcgctggactgggccgagggctgtttctcctgctccttggcgcttcccttcctatctgcgcacctcgggctctgccacgccccgggccgc

SEQ ID NO: 32235 - DNA, 339 bp, Oryza sativa
  unsure (1)..(339): unsure at all n locations
  Clone ID: uC-osflM202123a07a1
nnttggtttttttggggnntttccctttttttccccatccaccactttctcctaggggggggtatatcttaggagggccaagaaggccttatgtggttggcccaggcttatttatcaaacgacccaacttagacattcactatttaatttaactgggccaaaatcccctaaaaggaacggtctcaccaaaaactacttagtttacagggggtttcatcactggcgccagaaggggacccttcttacgggggggcacactgtcctctgggggcatcctcctcctaatcttcgtcgaacgcttcctgcttccttggatactgctggcgcctcatctccttt

SEQ ID NO: 32236 - DNA, 401 bp, Oryza sativa
  unsure (1)..(401): unsure at all n locations
  Clone ID: uC-osflM202123a09a1
ttttgggacatgaactcaataacctttcgaaattncaccgagggtaatgcatggaaggaaaatcgccagacataacagagccggccagactcaactcaaactcaaccctatgatggtaaactgtttgcgattaacgcctccgcctatgacaatgtttggagataaacgcttccaccaaaaaacgaatgtcggggagtgttctcccctacaagaattattattgttttcaatgttaaaaaggcaaaattcaccagatcccgttagtgcaggaccaggaataaacacttgttcgtcatcattttctgccagtttaggcaccgcccgagccgtacttctttccaaagaagaggatctgcagctggtcatagcctgagagcacaccagcaccagcaatggcacgt

SEQ ID NO: 32237 - DNA, 483 bp, Oryza sativa
  unsure (1)..(483): unsure at all n locations
  Clone ID: uC-osflM202123a10a1
ttttgtgtttttttgggntttgcgttttttccccttttttttttttttttttttttttttttttttttttttttttttttttttttttttttttttttttttttaggaaaagggggccgggggggaaaatttttaaggggcagggggcccccccaaattttttccccggggggggggggaagcccaaaaagccccggggccccctcgggggggggggggaagccccccgggagggggcgggccgggggcagaatgggggggccccggcccccttttttttaccccctttggggggggccccccttcccagggggggggggttttttttttccgggggggcccaaaccttaggcccccgggtttttgggggcccggcccgccaagaaagggggggggtctttggtccggggccgggggggccctttttcccgggccccccnatggggggggggggtcaaaacgggcccccccggggggggggat

SEQ ID NO: 32238 - DNA, 399 bp, Oryza sativa
  Clone ID: uC-osflM202123a11a1
ctcgtacccagggcacggatgaacagactggaggcacaactaatgggttcatacacgagagccactatctcactctaggtgatcctctacaagccatttaattgaataggagcgttcacagacaagctgcagagcttccaaactgctcgacgtcaaacagcaaacaatatagtactaccttgatagcaagatgtcgcattggcatgtgatattccaatggcattgcctaagacaaggattttcccacatttttcccaaccagagaatctggtaatctgctgttgatgagatcccgcagttcaaactcactagggaacctctgctcagctaattttgagaaaaccaaatctccattgcagtaaacttcaaaggcaccagaactttggaggaaagattgcg

SEQ ID NO: 32239 - DNA, 398 bp, Oryza sativa
  Clone ID: uC-osflM202123a12a1
caacgcaaaacagctacccacctctactaacggaacatagcggctagccatctacagttctagacccctacaaaaaccacatatcaacatatcacccaaaaaaggcaagaggcaagaacgaagcagagagataccatatcggtatttacagtcacgcaggatacaaaggaaccacagatcgtgggcagtccgacctcttcccggcaagggagtagtatgcaagtatctgagcttgactatctacacaaggttcaccatcttctctcattcgatttgcattctcagaactgggaggtgtaaactctatgttccagaagggcctggccatgagcatgagatcgtgaccagtcttagaagccttgtagccctgtacccacacgtatctcaaggaaggcata

SEQ ID NO: 32240 - DNA, 296 bp, Oryza sativa
  Clone ID: uC-osflM202123b01a1
taaaaaacagagccaattcaaaaaccaaagaaaagcatgacaacaaacaaatacaaaaaatgcaacaaaaacgacaaaaaaaaaaggcaaaaaaaaataaccataagcaaataacacaacaaacaaccagaatcaccaaggacaacgactcacacgccgtaacacaaacagaacaaaagcaaaatcgacccaaaggctgcaagagaaagagacgccataaaacaaaaataggtcacaacacacgcaacgcacaaaggcacaaaaacccacaaaagcaaaccaaggaaagggaaaac

SEQ ID NO: 32241 - DNA, 445 bp, Oryza sativa
  unsure (1)..(445): unsure at all n locations
  Clone ID: uC-osflM202123b02a1
tnnttgggggttataaagacatatccatgtaccccgtcagggatcattaacattgattaataaacaacacactaatatacaggacaaataaagtagctgcctttttctagggagaactcggggctaccggaaatggcccatttataagttcatgtgcattcttctctccggctagttcaatccacaacaaaagcacagcagtatgaatggcagctttggtccaagcagttgactatatatgttccctgaagcctttgggccaaattaaactctgaaaagggctctacatggccataactggaaaaaagaagccctcgacagactacctgccagcaaaattaaagggggaagctaatcatttaattgctgctccttggcaaactcctgaatccaataaccgnggtgctggtgtgtcaccctgctgcagccctattgatgcactacc

SEQ ID NO: 32242 - DNA, 165 bp, Oryza sativa
  Clone ID: uC-osflM202123b03a1
tttaaaaaaatatccgttaaacaaaagcaaaaaaacacaaccaaaaacaacaaacactggacaaagcaaaaaaaaatccagccaaacgcccaaaaaaaacgaaaggacaaaagcaaaagcaaggagaaatataaaagcgaaaaaacaattaaaaccaatggaaaa

SEQ ID NO: 32243 - DNA, 416 bp, Oryza sativa
  Clone ID: uC-osflM202123b04a1
ggggccaaaggggtttcctatgccactgggcaagcgggcaagggtggtacattgaaaagctcacgtgaacgagctaagaaataactaggcaggtgtgtgttgaccttgaaattttcttcaggattgatccaggctccagtccaggtcaggttgtgaaaaaacttcataatccgtggggccatctacaaagctattaactgcctgcatcccttccaacaaggatggctggaagcgatcacttctagagggcagcaatttataaaagactaacaaactaagaggacatattgcctgtagcttcataggatcaccttggactgcaaagaatagtaacattgcacaaggaagaaaataacgcagaattgcctgatgcagatcccatgtccctcagcttcccatcattgcctgcaggaaac

SEQ ID NO: 32244 - DNA, 427 bp, Oryza sativa
  unsure (1)..(427): unsure at all n locations
  Clone ID: uC-osflM202123b05a1
ggcgtgcgcgcggtggtgtgtttgggccctcttctgggcgcgctcttttttttttggtgtgttttttgggntttcggggggtttccaaagggggggctcatgttttatgaacaacaacccagtttgggcatatttggtggaactttactctttctccaaccaaggggacggccgaaggcaacatagctcactctcagggggtctcactgggttaccttaccacaccacaaagatggtcagtcagtcagtccaacggctggcaacatctctgaataattggcagttctcctacgggccagcagccgcagggcagctggatctacaggctggcttcaatttcttccagggggggccctttcgtctggggcccgatgaagaatttgaaaacatgggacgcccctgcaatcaccccaaacggcgagaagag

SEQ ID NO: 32245 - DNA, 309 bp, Oryza sativa
  unsure (1)..(309): unsure at all n locations
  Clone ID: uC-osflM202123b06a1
tgggcgcgcttttttttttttgggggaatttgagaggcaaaaacatcatcttcttggcatcttctagggacaaacacacggacatatggggactaaacccatttcccaaccaagaacgaatngtggcaaaaccatcaacaaataaccatgtaagtaggcccaattcactgcgggacgaagtgggggtacgccagggtgtgtgaggggcgggaggggcgggaggtccgagggggcctgcgggacaggccggagagaagcgacaggagaacagggagggccgtctgaactctactgagctcggaagcccgg

SEQ ID NO: 32246 - DNA, 459 bp, Oryza sativa
  Clone ID: uC-osflM202123b08a1
tttttgtttttttagttttttttctttttttcttttttttttttttttttttttttttttttttttttttttttttttttttttttttttttttttttttttttttttttttttaaaaaaaaaaaaaaaccttgggcttggtggggaaattaaaaaaaaaaaaaaaggaaaaaaaaaaaaaaaaaaaaagtaaaaaaaattaaaaaaaggacccgacaaaaaaggggaaaacccaaaattttttaaaattttgaaatttgggggggaaaaaaaaaaataaacaaaggtgtgaaaaaattgggaaaaaattggtccaaagacggaaggaaaaggggggttttcaaaaaagggggctgggctattaaaaggcccggggaaaaattgggggggtaaacccccgtttttttggaaaaggggtctgggaggggggtaaaagtttttcaaagggggcctgggggg

SEQ ID NO: 32247 - DNA, 307 bp, Oryza sativa
  Clone ID: uC-osflM202123b09a1
aacgagaacaacagaaactcggacatcatattaaaaacaacacaaactcttcaaggcacaaatcctccgggctaaacgccgggcaactgctaaaagggaagatcaaagcttcctaatcctaggacaacaattttctttctggggctagtcatattcccttggctgatacatacatggaacggaatgcaaaggagtatatagctgggtaaagttgcaaaagaaatcccccggaaagcccgtgctggaactggatggatataaaataaccggggggtcttcacgagggcacaccgttggggaagggcgc

SEQ ID NO: 32248 - DNA, 433 bp, Oryza sativa
  Clone ID: uC-osflM202123b10a1
gccgccctttttttttttttgtttttttaagttttttttttttttcaaaccatcacgggagcatggcatgcaaatatatttatatgcacacaattgcatgcatatatatcagtaggaagcactaggtacgtgctgatgattacacaaagacacatcctgatccttgctcataattaatttcttgcaaatcatatgtagcctgtagggtagggggcagcaggcaaacacatatataagaatagcttaatcgctaggtttggttttttgagatcaatttcattttaggagaatcatatatattatcgctaggatcgataccaatgacttcaattcattcaaggttgctcccatgattcacggggcatacggcagctgtttggccgacgacgacgacgatgatcatcttaagcattgaggtggctcaacatccatg

SEQ ID NO: 32249 - DNA, 426 bp, Oryza sativa
  Clone ID: uC-osflM202123b11a1
tttgtggttttttttgggttttttccgctttttcccccttttgttttttttttttttttttccaaataaacccccattgggggatggcctcgattttaatattacccatcctgggggaaggaaaaggaatcccggggggaccaaaggcggcagaaatccctaaccgttgggaggccccctcaaatggcaaaaacctggccctgggcaaggtttttaagcccgtgggcggcggctgcggcttggggggctcccccggccaggcccagactaggcccttaaaggggggccccatctctggggccaggcccttccggttttcaggggttccccccttgggcttctttggccccccaggatgaaggttgggggccccccggaatatctgggcataaaggcccatacccccgttccttcgggctgggggcc

SEQ ID NO: 32250 - DNA, 372 bp, Oryza sativa
  Clone ID: uC-osflM202123b12a1
ggcgacgaatttatcagatatgctctagatacatatcttgggtgtatatagccggagctttgttttcacatatcctcacccaacgataattggagtactcttacaataaaaccggtcggagagggagggaagagattattacatatgtgttaagagcagaggccattgagatggtacataaccaaactgtaaaataaaaatatatagcaaattatatatggatatatcatcaacatagcccaaaacaaagctgcatactattattataggcagcaatccaccagcgcgaagcttgatcttagcttagttgccaccagactcctcgcaacctgggggcttgaggcgatgaagcaatcaactgacctgcctgac

SEQ ID NO: 32251 - DNA, 433 bp, Oryza sativa
  unsure (1)..(433): unsure at all n locations
  Clone ID: uC-osflM202123c01a1
ccttacgtggccccccanaaannttnnngggggatcataaacaaaaccggacaaccccacagaaggaatacaggagtgatgacactccaaatgggctattgtacatgcggttaaaagaacagaaaaatcatacgcattagatggcactatgacctggacctacaacaataaataggtccgcttcatctttaacccttacagataaaaacaagacttctaaaattgtacaattgatgaagtcagaggaaatatgggacagcagccctcggccctcgcatccggttattctcctctgtctctgtgaagaatttgacctctctttccattgtctcactgaagcttaagaaagaagcaacatttccacatctgtagcaataattaggagcggaccacacagttacaaggcctttgtcctgaaacaagtactttaagc

SEQ ID NO: 32252 - DNA, 106 bp, Oryza sativa
  Clone ID: uC-osflM202123c02a1
aaagaggaaaaaaaaatgaaaatgagaaaaaaagaaaaaaaaaaacaaaaaaaaaaaaaagaaaggcaaaaaagaaacaaaaaaaggaaaaaaacaaattcaaaaa

SEQ ID NO: 32253 - DNA, 473 bp, Oryza sativa
  unsure (1)..(473): unsure at all n locations
  Clone ID: uC-osflM202123c03a1
ttttgaaccccttatgtgagaccgccctaaaaannnnaattgtggtttttaganggattttagtattgaactataaactccagcatccagctaatggaaatctcacacctttaatttacaaccatcctttgaaaggattgggacacatttgacacgcaaagccaaagccaaatacagctcctcatcttccatttctttgaagctcatgaatcaaatcagtacaaaccaaagaacaaacagtacaataaatactacagtactagccactaattaaccacatccaaagctacaggctacagctcgagcgccggtgagacatgaacctataaacatttgctactcgctggagcttaattcgtttagaacgtttatttgtttccaatcgaattcacatacaataatttctagtactacccaactggttaacaggctagccgagcgtgccggtgctatcgtcgtcgtcgatgccggcg

SEQ ID NO: 32254 - DNA, 412 bp, Oryza sativa
  Clone ID: uC-osflM202123c04a1
ggaacaaatcccttcctgacgttcccattcaacaagaaaatataaagccgtgatggtcagaacatgtgcaaaatcttacaaagagggaaagttaaacttgatacaaaactgagagcacacatgcatgcccagaaaggtgagtcgaccatgagtgtgtatataatcccttttgttcgcatcaatggcgcgataggtgaaagcgaggacggttcgtgaacttccgtccgttagctttgacataacgcgtgatgccaaagcaaaaaccagaccatagtagtgacagcaccaattggaaaacatcattacgtgctcttctcagtgacattttcaagaatatcacggcagccaaaagcagagcaaaagcaaggcggaaggacgcgtgattcttttaagtcctttggttggagttggc

SEQ ID NO: 32255 - DNA, 502 bp, Oryza sativa
  unsure (1)..(502): unsure at all n locations
  Clone ID: uC-osflM202123c05a1
aactgtccttattgactgaactgaaacttgattatacagttgtgccacgtaactcctaaaactcaaaagcccctanntgacgtgngnnattacattnatttgttaccaaaaagntttttttgaaccacccttgnnagaaaaaaattgnattccttagttttttcccccttaccattnggnattagnccttagnnctaagttnaggccttatttctncaattgttcattggcaagttgttttgcccaaagnaaaggtncgtccccaaactttggacatttgttccacctttcgaggaccaagaaccttntgatgcagaaatggggcgccctggcacccatgagtgtcagcatggacagcaagatcgagccgacgccgtcgccgcagatgagccccgacgccagcgccggcgagagcatccgcccgcggccggcgtccatcttctcccacaggtacgccaccaggctgccgatgcacatgccgacgggcacgcgcggcggcatg

SEQ ID NO: 32256 - DNA, 395 bp, Oryza sativa
  unsure (1)..(395): unsure at all n locations
  Clone ID: uC-osflM202123c06a1
cttgagaaatgataaattataatagaagtacaaattggagaaaagataaaataagagtacaaaaatgggaatcgaagctattgtacacaagatcaactgtaagaaaaaaagnaggcaggccagtaagaagtaaaataaagctgtncccctacaaaagtgcgacaaacgatataatggaaaggcacggaaaagcaaaaatttacaaaaaggcttccaacgctgcctaaaatccccttttccttggccgattacatttatatcgaatgagcctcaatgcggggtttaaagctaaaacgaggcgtgcgtctaaaaaagccttaaacgctaaaatgggctgttcttgctcgctgagcaggttccagcccgggtgttgcaaacagggtagtaaggcgggc

SEQ ID NO: 32257 - DNA, 401 bp, Oryza sativa
  unsure (1)..(401): unsure at all n locations
  Clone ID: uC-osflM202123c07a1
ttgggggaccttaaaatnttttcccttctgcacatacatactctcatgttgttgcatttaaccatttacataattgagcctttttttggtctttgctcctgtatgtcccttcagaaagggatccatgccttgattaatccggtttcagtcccgcagaaaataatgtcatttgcggtgaacatgctcgtgatcttgttccctgcagatagcctccctactttctgctgattctctctcaaccatatctgaatgatactagggcttttgtcgcagttcaggtagatgaagtcctccaccactgccattgcctctacatttngtccctttgatatcgccatcgtcattgtaggtttgcatcgcttcttccaatcctttaaggtggatccttccacttgagtacc

SEQ ID NO: 32258 - DNA, 449 bp, Oryza sativa
  Clone ID: uC-osflM202123c08a1
aaaaccgccctttttttttttgtgtttttttaaatttaaatctaaaaaaaaataaaaaaatttaattattaaaatattattatttaaatttttttttgaaaaaaaaaaaaaaaaaaaaaaaaaaaaaaaaaaaaaaaaaaaagcaaaaataaaaaaaccaaaaaaaaaggggaaaaaaaaaaaaaccaccaaggggccgaaaaaaaaataaaagcagcagggaaaaaaaaggaaaaccaaaaaaaaaggcccccccggggcaaaaaaaaaaaacggaaaaaataaaataaaatggtaaaataaaaaaaaaaaacaaaaaaaccaaagggcaaaaaaaaaccccaaaggctggctaaaagtaagggcccaaggaaacaaaaaacaaacaaacaaaaaaagggaaaaaggcaaaggaaaaaagttaaaaaaccccccaaaaaagccaaaaa

SEQ ID NO: 32259 - DNA, 441 bp, Oryza sativa
  Clone ID: uC-osflM202123c10a1
gcccgccctttttttttttttgttttttaagaaaaatctctagcatcccatatattgatatatcatcaacatagcccaaaacaaagctgcatactattattataggcagcaatccaccagcgcgatgcttgatcttagcttagttgccaccagactcctcgcaacctgggggcttgtaggcgatgaagctaatcaactgcacctgcctgacgttgtcgaagccgatgatacggacaaaggcatcagggtaggccttcttggcctcctcgagctccttgagcacctgggtggcatcggtgcagccgaacatgggcagcttccacatggtccaatacctgccatcgtagtatccgggagacctgtggttctcacggtagacgaacccaaccttgctgaactcgagacaaggcacccacttggatcgaagcagtactcgatctg

SEQ ID NO: 32260 - DNA, 447 bp, Oryza sativa
  Clone ID: uC-osflM202123c11a1
gcgcccgcccttttttttttttgttttttttgggttttttcgtttttttcccattttttttttttttttttttttttttttttttttttttttttttttttttttttttttttttttttttttttttttttttttttttttgggggcccacttttggggaaaaatttttttgggaccaggggggccccggccccccaaatacaaaggcttttttttttttggggccccccccgaaaatggccccccccaattttttcccaaaggggggggaaaccccccgtttttgggggaaaaaattgggtgggcccttttgggaaaaaaaggggggttttcggggaaaaaattcccgggggttttggggaaaaaattttttttccccccgggggttgaaaaaacttcctctgggggcccaaaaggggtttttggggggcccccccccccgggggg

SEQ ID NO: 32261 - DNA, 173 bp, Oryza sativa
  Clone ID: uC-osflM202123d01a1
ttttttttttttttttttttttttttttttttttttttttttattttttttatttaaaaaataataatattaaaaaaaaaataaaaaaaaaataaaaataaaaaaaaaaatataaaagaaaatataaaaacataaaaaaaataaaaaaaaaaaagaaaaaaaaaacctaatcc

SEQ ID NO: 32262 - DNA, 468 bp, Oryza sativa
  Clone ID: uC-osflM202123d02a1
gggggagcttaataagaagcttgccgactgtaaagtaattccaatgggggtatatgtaaattctttacaagaagatctagatgtgtggccgcatcgctgctatttattgttcagtctcgctaagggaaagccttctccaagaaacttgcaatatctattaactgttcaatcttgctcggggaaaaccttctccaagaaacttataaatcgtctcgaatacaaattgggatcaacagctgatatcgaaagagggtcgaattttagtgatttgacagcatgctcaactcttttggacacattatactcttgtagtatgtcgatgataccaaggtataggacaacatcatactcttcaatggtgtccctgttttctacttctaccttcacgtcctcttgcactttccgagctcgagctggcatattcacccctagctgaacacggaaccttccagtgcctggcaaaacaag

SEQ ID NO: 32263 - DNA, 407 bp, Oryza sativa
  Clone ID: uC-osflM202123d03a1
atatcccaattgggttaagaagaacgaatttgaatacagatacataatacattttacaaaatacattttgggcattttcaggggtatacgagtccaaacgaatataacgaatctccaaaaggcctagttaatccacaggacgtgacataacgaacgcaattcggaacgagaaaccgaagaagtcacttctccaaaaaattagctatcgaacaacttgagaccgaacccgacatcctcgcagtgccgaacgtacggctagacggcggccgagaagacctcattataggccctgcaccaaaggatcggcggcaagtgaaggcacggctccaccgacgtcaaactgacgcacgccacctacgaactatccttgacccaaaccggccggaacaggatccacggcttgacac

SEQ ID NO: 32264 - DNA, 377 bp, Oryza sativa
  unsure (1)..(377): unsure at all n locations
  Clone ID: uC-osflM202123d04a1
tttttgtttttttggggnngtgcgggtttcccccctttggttttttttttttttttttggggcccgacccccaatagggggggggtcgcctaattggcccttgggaaagggggggtcccccactgggtcctggaattcccgggcgggggccagataaaacccggggtcccccaaactggagggggaacgtcacccccccaataattcccaacaaagcaggcggggggaaacagccgccccccttaaaaccggcttgctcggggtgggcctctggcccgggataatcgctgaggccgggtccgacccgctttggaagggaattgcccgggggcccccctggggggggatggccacaggggccgcccccatggaggggc

SEQ ID NO: 32265 - DNA, 280 bp, Oryza sativa
  Clone ID: uC-osflM202123d05a1
aaacccaatggcccagttggcatgtaaatggcgagacgaatctttggggtctaattccgtcttgattggacaagggggggctcaagtaaacattggctaatgcccaattaattaggcttaatagattcgcctcgcagtttataagcgaaaccggcaaccgggttgggtattagcctacattaaatccttcaaaggggccccgatccttcaaaaattttttttgggcccccgaactaaccccgccaagcaccaaattttcagcatgttatctctcaagaaa

SEQ ID NO: 32266 - DNA, 257 bp, Oryza sativa
  Clone ID: uC-osflM202123d06a1
taggcgggccctgggccaattcccctgtctgtccgactttgcaactggcatcgcacagatgcaccggtcttagagagctcatcggccccgctttgtcgagatgggaatggaggggagggccactcaatctgaagccctgcccggcccgcgcctcgggccctggggccgtcaacatcagcagccgaaaccgggccatgggcgcccttgtcctccccgtccagatagccagaccttgcgttgagagctagcgtctggca

SEQ ID NO: 32267 - DNA, 162 bp, Oryza sativa
  Clone ID: uC-osflM202123d08a1
aaaagaagagaaaagaaaagcatgaacaaaaaaaagacaccgaaaacaaaaaaaaacaaacagacaatgacaaaaaaaacaacacaaaagaacagagggaaaaaatcaccaaggaagccaaaaccaaaaaaaaagcagcaaagaccggcaaaacaacgacgc

SEQ ID NO: 32268 - DNA, 464 bp, Oryza sativa
  Clone ID: uC-osflM202123d09a1
tttttgtatttgagggacaagtgcaaagttcaaagaaaaactaagtaactacacacgggggaacaatagacaggccgagtacgatgagacgaagagaatgaagagatgaactaataggaatcccagagctgataaataacaggagagcaagcccgactaatactactccttagaagcttgcacaaaatactcccgagcaatctcactaaccagacgctccaaggcggaaccatcagagacaacgccgtgcgagagacgtgccggcgatcttgacggacttgcagtacccctgcctcgggtaatcgccgaacaccgtgtagagagccagcatgctgggcgaattgacgagcccaacgccggcggcgaacaagatcatcggggcctgagtgaagacgccgagcgagtacacgagcttaaccgttgacggcacgccgacaccggtgatgcacggcgtcaggaccgcc

SEQ ID NO: 32269 - DNA, 466 bp, Oryza sativa
  Clone ID: uC-osflM202123d10a1
gcgcccgccctttattttttttggtttttttgggttttttcggggttccaacaagggcaattagattatgtccccttctttattacgaagagaaaatacagagcaaaaaaatcttggttctcaacatcaattaagggggaaaagaatctgacagaacaggaatggaaattgcctgtgcctccatttccctgttagtctgctactgccatccaacgttttatgccattagaaaacctccaaactcattggcgctatactagctatatcccgctgcagaggcacttatgtttgccctcagaatagccaaaaaaagatggtaagatttcaaggggggagccaggagtattatgtggattttgaagggggaaatgagaacctacaaacggagtttgattcatcattcatcaagatcatccttaaagctagtcgatctcggcatactgggagtgcgaggctgccagaagag

SEQ ID NO: 32270 - DNA, 437 bp, Oryza sativa
  Clone ID: uC-osflM202123d11a1
gaaccttattagaggccgcccttttttttttttgtttttttagttttttttgttgttccggaatctggcgaaaggtattttaaatgttcattttctaatcaaacgttcgattagacagtctggccggttccagaatggacagagagataaattaagcagggatcggaccggacgcatcactcgatggcgtccttgagggtgttgccgatgtcgaaaacgaagcggtacctgacgtcggccttggcgaggcgctccatggccgtgttcacgtagtcggcgccgatcacctcgatctccgccgtaacgccgtgcttcgctgccaggtcgatcatctcctgcgtgtccgccatgccgccgatgcagctcccggccagcgtcttgttcgaagcaaccagagcgaagggagggatctccatgggcttctccggcaggccgac

SEQ ID NO: 32271 - DNA, 432 bp, Oryza sativa
  Clone ID: uC-osflM202123d12a1
gcgcccgccctttttttttttttggtgcttaaaagaaatcgcaggtgagccaatctcaaggaaacttacataggagaaagcttgctcagagtcatattagacatcttgcctccgttatgtacacaaaactcacagttgcagcagacaaattatagccttgagcgtcgaaaatacttgatgggattgaaagggccgagttgccgcgcagaagccaatgttggccgtccgtttggggacactgttggtttgatgtcccatccttcaacgttcttcggaacacaaacatcaaacagaatttggccaaggactccttgaggctccatgctgggtggataggatagttgtcgcctctgttcatcaatcaaagaatccggatccctagattcattatggtcctttgaacttggcaagaagaagtggtccctggggccg

SEQ ID NO: 32272 - DNA, 373 bp, Oryza sativa
  Clone ID: uC-osflM202123e02a1
aaaaaccccttaattgcaaaaaaaaaagaaaaaggcccagccaaaaaaaaaaaaatatgaacctcaaaagtaaaaaaagtaaaaacccaaaaagggtttttggacaaaaaaaaaaaaaaaaaaaaaaggaaaaacaaaaatgatccttgggaaaaaaagtggcgctaaaaaaatctaagcttccaaagggaaaagttaaatgcaacctgacaaaccaaaaaatgtaaaaaaagggagggaagcccccgttttaagcgaaaaatgcaaaaaaaacaacaaaggcaaaaacccttaaggcaaaaggcagctaaaacaaagggcttgaatttaaatgaacttccgaaaaaataactggagaaaaaaacaccacgtc

SEQ ID NO: 32273 - DNA, 236 bp, Oryza sativa
  unsure (1)..(236): unsure at all n locations
  Clone ID: uC-osflM202123e03a1
ttttatttttttttttttttttatttgggaaaaaaaaccccaaagaaaattttaaaaaaaaaaaaactgcccaaaaaaaccaaggggttcaaaaaaacaaaaaagagttataaaaacccaaaaaaaaaaaaaccctaaagcaaaaaaaaaaattgaaaacgcggatcactagcaaaattcgccgctaaaaaaacccggtacaaacctggggcacaaaaacnagtgccgcctgccgg

SEQ ID NO: 32274 - DNA, 332 bp, Oryza sativa
  Clone ID: uC-osflM202123e05a1
acaaggccggtcatctgcctgaaggcagagggcacggcaaagctaaatcaaactatacacctaaactgaaaatttcagggacagctaaatgaaaggtttgggggcttctttccacagacacttttcttgcttgatgagggtaaagctagaccagactacagtcttttcaggattacaaaaagaagcgaactctaaatgccagcacaggtatgctctttatgcagctcctaaaagctggatcaaacatggagactccacagcaggtggggctgccactgcaagcttcttggtacttgagctcttggcatcaggtcttctggccaccttcgggg

SEQ ID NO: 32275 - DNA, 376 bp, Oryza sativa
  Clone ID: uC-osflM202123e06a1
tagggtatagtaatccaaatgcaatccttggttatgtctggcgatctctacaatctacattgtctatgtatccgacatagttcgtgccttaccattacttttaggataggtggttttgctctggtctgcctctgtattcgtgggaacttgctgctgctgctcttttatctccttcccttttccccagaggaaggaatagaggccaatgattatcataaatgctcctagcaagctcccgacggaggtgtcgtttccgagcagcatcgagtcaaggacgacggtgatgatcagcgcaagcgagttgaacatggaggggttggttggcccttgccgtgacaccgcccacgtgatcaagcagatggtggccgccgtgttg

SEQ ID NO: 32276 - DNA, 200 bp, Oryza sativa
  Clone ID: uC-osflM202123e07a1
atcatcgtatcactgggagaatagaatacatatggtttgggacttgggagaggcagcactcagagttgagcatgagcagctgcagagacagaggagccatcctccaccctgaagacagcaattgtcttcaggaagtctgagtaccagctagcagagcgcctcggctgccttctccgttctgcgctgctgaaatcgacggc

SEQ ID NO: 32277 - DNA, 425 bp, Oryza sativa
  unsure (1)..(425): unsure at all n locations
  Clone ID: uC-osflM202123e08a1
aaaaaaanaaaaccctaaaaaaccaaaaaaaaataaaaaatatttatattaaaaaaaaaatcgaaaaaaaaggaaaaaaattcaaaggaaaaaacaaaaaaaaattaaaaaaaaaaaacccaaaaaggcgaaaccaaaaaaaaaaaaaaaaaaaccaccaccaaaaaaccaaaaattccaaaaaaaaaaaccgaaaaaaagtaaaaaccnggaccggccgccgttaaaactaaaacaaatgccgttaaacaaaaaaaaaaacaaagatgaaaccgccaaaaaaaaaacccttaaaacaaaaaaaaagccaaatccaaaaaggggcttgcaaaaaacaaacaaaaagcttcggctagggaaaacaaaaaagacttatcaaaaaaaaaaacgaaggaaaaaaaacggcggaaaagggggggctaaaa

SEQ ID NO: 32278 - DNA, 193 bp, Oryza sativa
  Clone ID: uC-osflM202123e10a1
tttttctttttgttgtttttttctttggttgttttttttccgggccaccgaaccgggaggttgtcggggcgggctagggccggggcccggggggggggggccaaaggcggggccccccgccgggggggcccccagcggggggcggcggccccggggggcggcgccaacgggggggggcccggaaggcccgggg

SEQ ID NO: 32279 - DNA, 150 bp, Oryza sativa
  unsure (1)..(150): unsure at all n locations
  Clone ID: uC-osflM202123e11a1
ttttgggtttttggggannggggcgttaacccaggtggacaccacacgaacatacggagcccacggccaagaaccacccgggggaccccagacgtgggcagacatgggacaggtcctgccaaaggaccccgccataaggacccacagggg

SEQ ID NO: 32280 - DNA, 422 bp, Oryza sativa
  unsure (1)..(422): unsure at all n locations
  Clone ID: uC-osflM202123e12a1
gcgcccgccctttntttnntttggtggccggggaaaatgcgggaagcgccgcgatggataagtgaagcctatggcatgacccaactccccctgggaatggggtgctaaagccttgacacttttacaggtaccacccatgcatttccatttgccaccctcaggcacgttcatcccttctacggggctcgtttcctaatcatctggaacaaacgatcattcagttaaactaggcccctcgtcgcccgctagctgctttgcaccctcataaaaccaaagattaatgctacgattaaagctgatgatgtgatcatcacgtagcgacgctcccgactgctccctggccttcgccgcaggccctgtggatgtgcttcatcctgtccactgacttgcagaccccactgcacgacccatcgaacgacgcc

SEQ ID NO: 32281 - DNA, 405 bp, Oryza sativa
  Clone ID: uC-osflM202123f01a1
gaaaaaccgttcctccaaatacagatcaaaaggcattaaagaaggggagaagaaaagggggaaaagtatgtgcccggtctaattaaaggacaccgcagcttcctctttagctctctcttctggagcgatatgctatctttgatgtacataacaaatcgtctattttcttttgccatttacacaacgctatcaaaatctacaacatgtgcatctcctggggatctctctgtcttcccggtgccaccaagctagtaggagtaagcactggaatacttacactcgaaatcatggggtatgtaccgtggacctatatgagaaccagcctaactgatccgcaagggcttctgataatctggtactttcacagctattctgaaagaaaaatcgtttcatcatcctgcctag

SEQ ID NO: 32282 - DNA, 422 bp, Oryza sativa
  unsure (1)..(422): unsure at all n locations
  Clone ID: uC-osflM202123f02a1
ttttaccacaaaacaacacatgcatatcaatgaggaagtaacaaaaacaatatgccatgtacatgttgttcacctcacaccaagttggtgaaacaattacaaagtttatggaaacttgaactacacactgcctgcctatatttacaagcgtccttaagaacacaacctttgaatgaatcgttcatacaaaattacagatggttcactaaacccattgcaatatcctacacctcacataaattccttacaaaaatacatattgtacaagaattacatgctctaaggtgaatcaattttatgattttggtgattcagactttgtgtgcccaggtttacctatgatggctttcttcacttttgctagntgatgcttcacctttgatccaacaccagacaaaatgttatgttttttatgtgatacc

SEQ ID NO: 32283 - DNA, 129 bp, Oryza sativa
  Clone ID: uC-osflM202123f04a1
acgggagacatacaatagttgaaaaggcaaaaacgtaggtgcagaacgagaacgaggaaaaaggtgcaaagcccaagaggggagcaaataacaatgagcataaacgggatggagtaaaaaaaaacggaa

SEQ ID NO: 32284 - DNA, 319 bp, Oryza sativa
  Clone ID: uC-osflM202123f06a1
agacgaaagaacattctatagacaacacacacgactttgcacaaaaagacaaaggcacacttgcaaggcgattaccaaagcaaaccaaaaacttatccatttttcaccgttaagcgcaatgaataaataatatacgaggctagggaaatttcacgactgaacaatcacgtactataaggtatataactggatagtccacactgtcactgggacacgacaatgggtgccaagattttagttcttcgaccattccataactgccctatggaacatctcggcttcctgcatgagtctgaggaaatgttttaaatactgggtc

SEQ ID NO: 32285 - DNA, 445 bp, Oryza sativa
  unsure (1)..(445): unsure at all n locations
  Clone ID: uC-osflM202123f07a1
gcatgcacgctgacttaatttttggacccttccttgacacccgccctaannnnnnaattgggatattaagnnccctcctttattacgaagagaaaatacagagcaaaaaaatcttggttctcaacatcaattaagggggaaaagaatctgacagaacaggaatggaaattgcctgtgcctccatttccctgttagtctgctactgccatccaacgttttatgccattagaaaacctccaaactcattggcgctatactagctatatcccgctgcagaggcacttatgtttgccctcagaatagccaaaaaaagatggtaagatttcaaggggggagccaggagtattatgtggattttgaagggggaaatgagaacctacaaacggagtttgattcatcattcatcaagatcatccttaaagctagtcgatctcggcatactggg

SEQ ID NO: 32286 - DNA, 457 bp, Oryza sativa
  unsure (1)..(457): unsure at all n locations
  Clone ID: uC-osflM202123f08a1
cggcgcatgcactctgacttaatttttggacccatttaagacccccgcccttttttttnttttgtttttttaaanaattcccttttttcccnatttttttttttaaggaccccggaccaaaaaaaaaccaccaatcaaaaaaccatatgcatatggctggaacaggattttacaaacatataggggggaacacggcgcaacacaaatgacaaaaccgataaaatatattttagctacgtagcattgcccccttttaatggacaagggaacggaataacttaaaagaacaagctccagcactggtggatgcactaacaacttaatcaaaggagcgtaacaggctagcagccaaggagctggtttaagcctttttcccaaagaagagtctactcaacaaggtcccaccctggttctttttcttcctcttcttcatatcaacagaaacaggggttagggg

SEQ ID NO: 32287 - DNA, 520 bp, Oryza sativa
  Clone ID: uC-osflM202123f09a1
tttttgtcctttggacgaattatgaattaacaaattatcaaaccatccaaatgaggaacatagataattttccagtcggacgctaactgatagggataaaacaactatcagcaatgacagattgttctatatatcctttatttgggaggtcccgtctacgtgatatcagcatctatggactgcttggatcgacaacaatttgtaccgatgctgtaaatgttcattcagtccagaatgagaactcgaatggtaatggtgatacagccaaaatgactttaaaagaagggaaatgaagcactgaagttggcaagagtatcttgtaaaaagctcagttggctgccagtcttgaccggagctccgcagcaaccgcatcaatgaactcttcagtgttcaggtaatggcttcttgtgacgtttgaagacccgtgaataagaagagcaaggtctttggtcatcttcccagattccacggttccaacgcaagcagcttcaagttttagtgcaaagtcaagaagtctagc

SEQ ID NO: 32288 - DNA, 307 bp, Oryza sativa
  unsure (1)..(307): unsure at all n locations
  Clone ID: uC-osflM202123f10a1
cccccccggggggtgttctctttgcgctcctcgggggggcctgggggccccggctttcttggggttgtctgggcttttcccctttcggggggggggctttttcccggggccctttttttttgtnggggtggggggggggtggggccctctttgtcccgggggggaaaattggggtgtgggggggcccccttttaccaaatttttggggggcaaatttggggggggggtttcccgcccctttaaaaaaaccggggctggtccccgcagggggggtggggggcccaggggggggggcggcttttggggg

SEQ ID NO: 32289 - DNA, 432 bp, Oryza sativa
  Clone ID: uC-osflM202123f11a1
caagaggcgcatccaagaaataaaaatattgatgacacaaccaaatagaattgtcatggggataactaatagttaataaatcatttgttcattctatggcaagaaaaaggcaccacggtgcatattaaagcatgaatataaatactacaaagttactaggccaaacaacaacctgttcagatacatcattaaaccatctgctctttagaaatattctacaatgatgatcaaaactgacaccttttagtaatagtacacaataggatgatcaactagcgttgcctcgccttccggttcatttctatcaattgtgtaagagagacagcactccatctctcaattccttcttgaagttgtgcgtagagtaggcgcttcacagagtcgatgcaaatacttacggtgccaaactcatacactggcataccattgtag

SEQ ID NO: 32290 - DNA, 297 bp, Oryza sativa
  Clone ID: uC-osflM202123f12a1
taaacaatttcaaccaaaagaacaaacaggtcaacataaattacaaaaaaaccctcaaggtcaagagcctactcacaacttgctgcaacactaaaattatatctggcggacaaaatcaacctctgcaaaaattcaaggatgggagaaaaagggacccgatccacaagaaaggccaaagtaggcaatctaaaacacaagtttcggccggccgcttcaaattgcaaatggaagaccccttggctagaaaaaggcaacccgaaacctgaaaaaagggaaaaagccctaaaccaaacgaac

SEQ ID NO: 32291 - DNA, 438 bp, Oryza sativa
  Clone ID: uC-osflM202123g02a1
cgccctaaaaattttttttttgtttttttaagaaaaaatcttattttcccaatttaatataatttttttttttttatttttttttttatatattttttatttgggaaaaaaaaaaaaaggaaaaataaataaaaaaaaggttttaaagggggtttaccaaaaaaaaacgttttaaaaaccaaaaaaacaaatttaaggaaaaaaaaaaaagggaaaaaggacaaaaaaaaaagggaaaaaaaaaaagaccaaaccaaaaaaacaaaactccaatggggaaaaaaaaaagggaaaatttgaaaacctaaaaaaagaggggctccaagggtaaaaaataaaggggcaaaaaggagggggagaaaaaagtgaaaagagaacaccttttggaaggtgaaaacccaaagggggggggcaatctaaaaatggttaccaacaaaa

SEQ ID NO: 32292 - DNA, 389 bp, Oryza sativa
  Clone ID: uC-osflM202123g03a1
ccttaatttttttttttgtttttttaaaaaaataaactttttttacccgttttttttttttttttttttttttttattttttttgaaaaaaaactccaaaaacaaatcttaaaataaaaaaaactgcccaaaaaaaacaagggtaaaaaaaaaacaaaaaaatttttaaaaacccaaaaaaaaaaaaaaactaatgcaaaaaaaaaacttgaaacgcggatcaatagcaaatttcgcgctaaaacaaaccgctcaaatttggggccaaaacccttgccgcctgccgggggaaaaaaggcctccaccaagcccccggacaataccggccaaaggccctggaaaaaattggcaaaaaaggggttgaaaaaaccctcaaaatccttaaaatt

SEQ ID NO: 32293 - DNA, 351 bp, Oryza sativa
  Clone ID: uC-osflM202123g06a1
ccccattgggcaaactactacaagaggccgggaggaacacataatcgggagggattgcgacaatttacagcaacaggggtccggagaccgaggcaggaccaggacaggcggccggggagctgccctcttcattggcactggatttttgcacattgggaatccatgggaaccgggccttccctcccgtcgtcgtggtggcaccggagtccgatgagaaaaatggccatggcgtgctcataagccggatcgctcgccggcgtcggtgaaggaggcggggcgattgttcgggcggctgtcgcggagtgggttccgagccttggcgccgatgctcatgttgggcccgaaggccgc

SEQ ID NO: 32294 - DNA, 277 bp, Oryza sativa
  Clone ID: uC-osflM202123g08a1
gggaaaggccgaagtttggcaacctacacaagctgtttctatgcatgtatagtgctatataggatggatttttgtgtactaataatatcttgagctatctacagatcatgagcttgatattgtcgctggcacagggttgttgttcgttgggttcttctcaccccaatgcagcagcatgctctcccagtagcagaacttctcgtagcagatagtcagtcttggatcggtgatatttcgccgccaatgtccatcttccaggtttgccttctcagcctgc

SEQ ID NO: 32295 - DNA, 423 bp, Oryza sativa
  unsure (1)..(423): unsure at all n locations
  Clone ID: uC-osflM202123g09a1
gcatgcacgcttacttatttttggaaccttccgtgcgcccgcccttaatttttntttgtttttttaaaaaactaccctcataaacgccgagacagcatctctgccactgataaaaactttacaacggacgaaaataaacacaccgtttattctgttcaataaaacagggtgaaagcagaaaaaaaaggcagaaaaatcacctttttcgcttggatactctcgatttgctagctacgcgtgacgcagatttcttcgtcgctttgggcatttcgcactgggggcacagccagtcatgttctgggacagcttccaggggagggtcgcagcagtcgatgtgcatacctacaccgcagccggtcgagccatcctcgttgccgcagatgagcatcacctcgccccggtccgtactcccgcacgccgagc

SEQ ID NO: 32296 - DNA, 312 bp, Oryza sativa
  Clone ID: uC-osflM202123g10a1
cggactggtccgtcagctgctggcaccggaagtactccgggtcgaggtagccgaagctgcccttgacggcggtgctgacgtgcagctggttcatcccggggccgtccttggacagcccaaagtcggatacctttgcgacgaagttgtcgtcgaggaggatgttggcggtcttgacgtcgcggtggatgatcccctgcgccgtgccggtgtgcaggcagcggaggccgcgggcggcgccgaagcagatctccagccgctgcttccacgtcaacgccggcaggtccttgcccgagatgtggtcgcggaaggggc

SEQ ID NO: 32297 - DNA, 461 bp, Oryza sativa
  unsure (1)..(461): unsure at all n locations
  Clone ID: uC-osflM202123g11a1
cggcgcatgcacgctgacttatttttggaccctcaatctgcgcccgccctttttttnatttgggtatttaaacatgcggcccttatatacccctccatcataacaatttacaacacaaggcgcagatacaacacgggttacaaatatgacacgctcctttattcattcatcattacgtgatggagtacaagtttatagggacggttacacacacaagtagtagcctctgcagtagaggtaatgaaaacacgtacatgcagcattcgaacaagtaaaaaaaacagatgtgcatgtccgctttccagaatatatatgcaggattagttaagaacatatataggtagaaatatattttgcaccaattaattaagcagattaagatgggtacgtagtagacattagcaagcaagccccaaacctgtagattagatagatagatagatagaaatttggagcggaat

SEQ ID NO: 32298 - DNA, 334 bp, Oryza sativa
  unsure (1)..(334): unsure at all n locations
  Clone ID: uC-osflM202123h01a1
naaaannnnnncggtggnaaatgagccacaaatgtttacggattatatgcacaaaacttcatctgattatttacaggcaatgctgaatgctcatgctgaaaaaatgctggatgtagctcataaaccagcagagcgtgccagctgtgcccaaaaagatttcaagactgccaaactcgtatgtacatgatttccttttctccgcttatatatatttcacggtttaactaaacaaccacaggaataaacatgtgaacgaaaacgttatttcccatgttcaattcttttcatagcaacaatcttcttggtgtagaaaatccatcctataacataagac

SEQ ID NO: 32299 - DNA, 296 bp, Oryza sativa
  Clone ID: uC-osflM202123h06a1
ttttctgggggggcattaattcaccgctaattgaacggggggcggctttacccctgcccgggcccggggcatttaccctgggaaggaaggcccaagggggggcaagcccaacatgggggggaaacctgggggggtcggtcggtcctcggggttctgcccctggtcggcgccggtgccgaacttgccggggccgggggtggcgggggcgctgaggagaaggcgccgttgaagggggcgggcggctcgatctcgttgggggggacgccgggctcgatgttgggctgggcgggggcccc

SEQ ID NO: 32300 - DNA, 365 bp, Oryza sativa
  Clone ID: uC-osflM202123h07a1
aaacaaggggagggagaaatacaaattactatactacaaaaaaaaaccaaagagcactacaacactcaaacaagacaatattcttatatacaatcaaacaatgcataaactagagaagaagctacacaatctaaccggaagcaaatatcgatcaccaaaaaaaaaagttaaaaccaccgatgacatacttacaggacataattgtaaccggcaaaaagatcatcaactaccttttcatgcatttgggatagacatgatatgctctatattttctccatattcggtaaaccttaatgaaattgtgcaaacctcaatcagcttaaagaagtgaatgagactacaaggcgcgacattggacaaccaac

SEQ ID NO: 32301 - DNA, 444 bp, Oryza sativa
  Clone ID: uC-osflM202123h08a1
gcccgctgtagtgccaccggtgtgatttttgtgctggaacgtccatttcccgacgcgcgcgcgaacccgagcgcggcgtagaaccccgagtcgggaaccgggatgaccacgtcggcgcccgcggcgggggactcctccgcgagcgcgcggccgaaggcggtgcggcgctcgtggacggcgtgcgagaagacgacggagtttgggagggcgaagtagatgtgctcgaagacgcaggagcggcgggggcggtgcgggacgaggcacgctgaggagacggacatgtcgcggcggtcgacgacgaccacctccccgggctccacctcgcgctcgtaggtcgcctcgatgaggtccagcgcgcaagtctccgacgcgaacgcgacggtgccgttgcggcggcggccgagcaccagcgggcggaacccgtgcgggtcgcgcacggcgaac

SEQ ID NO: 32302 - DNA, 406 bp, Oryza sativa
  unsure (1)..(406): unsure at all n locations
  Clone ID: uC-osflM202123h09a1
ccgccctatattttntttttgttgtttttaaaaaaattttgtttttttaaccctttttttttttttttttttatttttttttattttttgggtaaaaaaacaaagaaataaaaaaaagtaaaaaatttaaaaagcaaaaagttaggcaaaaaaaaaaggtttttttaaaaaaaaaaatttaaaaaaaaattgcaaaaaaaggaaaaaaaaaccggaggaacaaaagctcctttttcaaaaaaaaaaaagaagaaagaaaaagaaaaaccaaaggagcgagcctattggaagaaaagggaaaaacacttggttttttaaaaaaaattaaatcacctttgcaaaaaaaaacccgggaaaccaaggaaaaaaatgccaaaacccaaaggagggtttttgggctttggcc

SEQ ID NO: 32303 - DNA, 193 bp, Oryza sativa
  Clone ID: uC-osflM202123h10a1
aattttttttttttatatttatttttttttttttttttaaaggaaaaccaaaaaataaaattggaaaaaaaaacaaattaaaaaaacaatttaatggaaaaagcaaaaaatcttaaataaaaaagaaaaaaaaaaaaaaaggtaaaaaaaaagggtttaaattttaaaaccgaaaaaaaactaaatgacggag

SEQ ID NO: 32304 - DNA, 289 bp, Oryza sativa
  unsure (1)..(289): unsure at all n locations
  Clone ID: uC-osflM202123h11a1
tttccccggcctgggcctgggccgcctccaaacngccccngggcgcggggttcccccgggggtgcggccccccgtttggccgggggagttcccggctgggggcccgttgccggccaaaaagggtaagggacgggaaaaaccatgaacagggaagcgaaaacaaaaggaggaaggccaagaaaaaaccgaccctgcaaagaggaggccagttcccggagaaaataaggcactaccggaccacaattggaaaaaacctaaaacaagggtttgggaagcaaagcaacaacgc

SEQ ID NO: 32305 - DNA, 336 bp, Oryza sativa
  Clone ID: uC-osflM202123h12a1
gccacaagagggtcacaaaacacacagggcacagcagcgaaagctcaagcaaaccctgcataatcgaaaagcaaatggttttcaaaaccagacaccaaactggtagaagaagccccacggacagatcaaggatagcagcagtaacaagcattgccaaggcaccaggcaagaaccctgaacctctctagtactcgtcaccctatcaccctcgtcaccatcgtcgaactcggagccgacctccccgtagtccttctccagcgcggcgaggtcctcgcgggcctcggggaactccccctcctccctgccctcgccgacgtaccggtggacgaaggcgcg

SEQ ID NO: 32306 - DNA, 420 bp, Oryza sativa
  unsure (1)..(420): unsure at all n locations
  Clone ID: uC-osflM202124a01b1
cttgtgcctacgccaagctgcgcgtggagaggatgagccagcgccacatcggtgccgggcagaagagggcggccgaggctgagaaggaagagaagaagtgaaaggattgcaacctgcaacgttaagaatagatgccctaagttttattaccattattgttatcagcttctcctgatgcgagactggcattctgatcttgctgctgtctgtctactcttcagtttgagcttgtttgggtttttgtctgaagtgaaccaaactaagtgcatactacttgtcttaagatgaattcagtcatttcgctacgtctcatttacctgccagccatatggatgatagtagatgcttgtgttttcattcgccananaaaaaaaaaaaaaaaataataaaaaaaaaaaactcaaaaattatattaatata

SEQ ID NO: 32307 - DNA, 586 bp, Oryza sativa
  unsure (1)..(586): unsure at all n locations
  Clone ID: uC-osflM202124a02b1
gttattgaggagaagaaaagatggcggctttcgggggcgctctacgcgttgtcccctcgccgccggctgcggagcctcgtcggcttcgctcgagagaacaaaggcagggctgcagatctcgaaggtattcaaaagtcgtggcttactacgctctcactactccgccgtataaacttgatgccctggaaccttatattagcaagaggacagttgaacttcactggggtaagcatcagcaagactatgtggatagcttgaataagcagcttgctaccagcatgttctatgggtacactctggaggaactaataaaagaagcatacaacaacggcaacccattaccagaatataataatgcagcacaggtatggaaccatcacttcttctgggaatcaatgcagccagaaggtggtgggtcaccagggcgaggtgtcctgcagcagatagagaaggattttggctcttttactaattttagggaagagtttatacgctcagcattatcacttttggngtctggcttgggttggcttgtcttggagagaaaagaacgaaaattttcggagtccatacacaaaatgcatca

SEQ ID NO: 32308 - DNA, 578 bp, Oryza sativa
  Clone ID: uC-osflM202124a03b1
gtggtacgcgtacttacccacaagttaggtgcgggccatggcaccattcatggcgtgcgcctcgccaccggtactcacgctggccctgctcgcgtcgtgcggtgcccttctcgccacctccatgctcccggcgcgtgcgacggcgggcagttgcttggacgtcggcgacatggtgatgatggacaggttccgcgcttggcagggagctcacaaccggtcgtacccgagcgcagaagaggcgctgcagcggttcgatgtgtaccgccgcaacgcggagttcatcgacgccgtcaacctgcgcggcgacctcacttaccagctcgccgagaacgagttcgcagacctcaccgaggaggagttcctggccacgtacaccgggtactacgccggcgatggccccgtggacgactccgttatcacgacgggtgccggagacgtcgacgccagcttctcctaccgcgtggacgttccggccagagtcgactggatggcccaaggcgccgttgtgccttccaagcccaaacgtcacatgcatagctgctggcgttcggacagcggcgccatcggagcctgacatg

SEQ ID NO: 32309 - DNA, 425 bp, Oryza sativa
  Clone ID: uC-osflM202124a04b1
attcatagaaaggcgagttcatactcgcctctcggcgcgcctccgcgcttgacctagaactcgaactgctctcccttgtacgtcgacagcagagcatcaacccaatccgccgccatgagggagtgcatgtcgatccacatcggccaggccggtatccaggtcggtaacgcgtgctgggagctctactgcctcgagcatggcatccaggctgatggtcagatgcccagagacaggactgttggtggaggtgatgatgctttcaacaccttctttagtgagactggtgctgggaagcatgttccccgtgctgtatttggtgatcttgagcctactgtgattgatgaggtgaggactggttgctaccgccagctctttcaccctgagcagctcatcaatggcaaggaggatgcagctaacaactttgc

SEQ ID NO: 32310 - DNA, 303 bp, Oryza sativa
  Clone ID: uC-osflM202124a05b1
gtttccgtcgggatccggccgctcgccgcgcgcgggaatccgtgacctgatcggcccttcctgccgtgggagtatttctgagaatttttttttttgttttctcctttgctcggcttctgctggttctgaatttaagagctcgttttttttatttctttaccccgcttgttggaatctccagcgtgttgaaaaaaaattcgtggacatctgtgggaatatgtctctggtcgggcctatgatttggttatacttcagttcagagtgtctcgatattagctgtccccgctggtgttttgttttgat

SEQ ID NO: 32311 - DNA, 545 bp, Oryza sativa
  Clone ID: uC-osflM202124a08b1
tttttatctattctgataagattgtgattaagacctgtgggactacaaagctcctgctcacaattccaaggattcttgagcttgctgaagggctttctatgccacttgctgctgtgaagtactcccgcgggatgttcatcttccccagtgcacagcctgctccccacaggagcttctctgaggaagttgctgtcctcaaccgctactttggccatctgaaatctggtggtaatgcttatgtgattggagatccagcaaagcctggccagaagtggcatatctactatgctactcagcacccggagcaacctatggttacccttgaaatgtgcatgaccggactggacaaggagaaagcttcagtctttttcaagacttctgctgatggtcacacatcatgtgctaaggaaatgacaaaactctcgggcatctctgacattatcccagagatggagatctgtgactttgacttcgaaccctgcggctactccatgaatgcaatccatggctcaccgtttctaccattcatgtgacccctgaggatg

SEQ ID NO: 32312 - DNA, 483 bp, Oryza sativa
  Clone ID: uC-osflM202124b06b1
ctgcttttaattctaatcccccccaaaccccctccaaaccctaaccctactacgacctccccttcctccgccgccgccgccaccgccaccgccaccgccacgtccagcctccggtcgcctgttcggatcgaagcgatgtcgtcggacgatgaggtcagagaggagaaggagctcgacctctcctcctccgacgtcgtcaccaagtacaaggacgccgccgatatcatcaacaatgctcttaagttggtagtgtctttgtgcaagccgaaagccaagattgttgacatctgtgagaagggcgattcttacataagagagcaaactggcaacatctacaagaatgtgaagaggaagattgaaagaggtgttgcttttccacatgtgtatctgtgaacaacacagtctgccatttctctccgctagccactgatgaggcagtcctggaggaaaatgatatggtcaaaattgatatgggatgtcata

SEQ ID NO: 32313 - DNA, 560 bp, Oryza sativa
  Clone ID: uC-osflM202124b07b1
ttctaacatacatcgatgccgatggtaactggcaccgtgccagcaagggtgctcctgagcagatcctgaccctgtgcaactgcaaggaggatgtaaagaggaaggtgcatgctgtgattgacaagtatgctgagcgtgggcttcgttctcttgctgttgcaagacaggaagtacctgagaagtcgaaggagtctgctggtggaccatggcaattcgttggtctgctgcccctgtttgatcccccgaggcacgacagtgctgaaactatccggaaggctctccatcttggtgttaatgttaagatgatcactggtgaccagcttgctattggtaaggagactggtaggaggcttggaatgggtacaaacatgtatccttcatccgcattgctcggacaaaacaaggacgcttcacttgaggcacttcccgtggatgagctcattgagaaggctgatggttttgccggagtcttccctgagcacaaatatgagatcgtgaagaggttgcaagagaagaagcacatcgtcggtatgaccggagatggtgtcaatgatgcccct

SEQ ID NO: 32314 - DNA, 547 bp, Oryza sativa
  Clone ID: uC-osflM202124b08b1
ttacctcaccgagcgagcagctagctagctgcggcgatggcctccagagcggcggcggtcgccgtcctcctcctcgccgtggcggcggcgccgctcttcgccgcggcgagcgcgcatggccgaggctaccttggtgccaagtcctggcctcctgacggcagcctgagctcatcaagctccggcgaggctgcagcggcggacgtcgacgacggccacacggactggaagtgctactcctcctgcatgagcaagtgctgtcaccgccacgacgacgacgacgacgacaaggccaatgccaaggccaacgccaccgccggcgccgccgccgtcgggctcgacgatgactacaagtgcaagaagcagtgcctcggcaactgcttcaaggacgtgccggccgtttgctaccacaagtgcgtcgacgactggtgcgcgaagctgccaccatatagctccgcgaaggtgcagtgctcaagaagtgcggcgataaatgcttccaccacggccctgaacctgtgcccaagctcaagcccaagccgagcccaccaaa

SEQ ID NO: 32315 - DNA, 470 bp, Oryza sativa
  Clone ID: uC-osflM202124b10b1
cttcatcttcctcgcaataggcgatcgatttgccggcttgccatggctgcacgcaccaaaggcctcgctctgggacgcgccccatgccgctgctgttcccattgatctaggatcactccggtctttcctttcatgctgaattcagtgatccagtatggtcttgtggcaaaacacatgcaaaataacatactagctagatatgtgctcctctcttacaaatatactctactttatgagtcaggctgtgtttagttcagtgcaaagtttggattttggttgaaattgaagatgatgtgactgaaaagttgtgtgtgtatgacatgttgatgtgatggaaaaggactgaagtttggatccaaactttggatctaaacacagcctcagtcagacagtaagacaaataattcagttcggtctctagctatgatggtccgtgcatgtcatcgaatgcatttatgcacactcataaa

SEQ ID NO: 32316 - DNA, 538 bp, Oryza sativa
  Clone ID: uC-osflM202124c01b1
ctaaataacttttggcccaattagttgaggatgggatgaacaggcgtatgaaggagggcacttacaaaggaaagaaattcaatgcgatctgtcacttttttggctaccaagctaggggttcactgccttcaaagtttgactgcgattacgcctatgttcttgggcacgtgtgctaccacatcttagctgctggtttgaatggttacatggctactgtgacaaatcttaagagtcctgcgaacaaatggcgatgtggtgcggctccgatttcgtctatgatgaccgtgaagagatggtcacgtggtcctgcggctactcaaatagggaaacctgctgtccatatggctactgtcgacttgaaaggcaaagcattcgagctattgaggaacaattctaccagcttcttaatcgacgacatctacagaaacccaggaccactccaattcgaaggagcaggtgctgattcaaagcctatttcactgtgcgtggaagatcaagactatatgggcaggatcaggaaactccaggaatacttgga

SEQ ID NO: 32317 - DNA, 528 bp, Oryza sativa
  unsure (1)..(528): unsure at all n locations
  Clone ID: uC-osflM202124c02b1
ttgtggaccaacagcaacgacgagtgcggcgcgcggggcgacgagcagatggagttcgtccgcggcttccgcggccacgcccagatcatggagagaggtggctacgccctcttcaccccgcactacatcacctggtactgccccgaggccttcaagctcacccagcagtgcaagtcccagtgcatcaaccatggcaggtattgagcgccggacccggagcaggatttccgggaggggtacgaggggaaggacgtggtggtggagaacctgaggcagctgtgcgtgcaccgggtggccaacgagaccgggcggccatgggcgtggtgggactacgtcatggactacaagatcaggtgctccatgaatgagaagaagtacagcaagggctgcgccgaggacgtcgtcaaagccctaggtctgtcgcttgacaggtgctggaatgtatgggcgatccagaggccgacaccgacaacgccgtcttggccaaagagcangaagatcagatcggccgtggatcgcgaggggatg

SEQ ID NO: 32318 - DNA, 393 bp, Oryza sativa
  Clone ID: uC-osflM202124c04b1
tttcgtaaagagagagagagagagagaggtagggggggaagaagagtcactccacactccacactctcatcccctggtccctttcttggatcatgagaaaccgcgcaacaaaattgcaattctaggcagcatttggaccggggacttggctacgtggtgtttggccatggatcgcagcgtggaattaagaccggcgaggactcagcgacggaggcacccgcgtcattcctacgcttctgtgcccgtcggcttctcgcagtgagagagagagagagatcgaccaggcgttcactgaattttactagaactcggcatgaagcgacccggcggtgccggctgcggcggaagcaccccatcgttcgtcacgatgggtaattctagtgatgatggata

SEQ ID NO: 32319 - DNA, 442 bp, Oryza sativa
  Clone ID: uC-osflM202124c05b1
tttgtttgcaaacagaatcaagatcaagaaaggggtggagggcgtgaaagttgaagccactcactcctgaaatgtgaggcggaagtatgccattttatggctgacaacacaaccaactcatgaactgatggtccaatcaaggaccaaatgaacatgaaatctgtcgtagagtatttcaaggaaatgtatggcttcaccattcagcatacacatgtttcctgccttcaggtgggaaaccaatataaggcaaactatctaccaatggaggcctgtaagattgtcgagggtcatagatatacaaagaggttgaatgaaaagcatatcacatcattactcaaggttacttgccgcatgcctagagaacaagagaaggattttttacaagttcaacaaaatggatttgagctagacccttatgcaaaataattttggaattaacatt

SEQ ID NO: 32320 - DNA, 392 bp, Oryza sativa
  Clone ID: uC-osflM202124c11b1
tgttagcggaggaggaaaaatcaatctgccgctaccctcctcgtcggtgtcgggctatttatacactccactccctcctccctccccttcctagttcggcccaccccccccccctctcccctccacgccccgctccgatccactcagtgagcgaagatggctccaacatccatgagccttgctgcaaagacgccgcttcccttctcgacacttccttcgagtggcgttgcacagaggccagtttctgtgactgcctccctcgagcacaagactaatgatgccagaaggaagttcctaaagctcgcgcttgggaacctcggggtcgggcttcccaccttgttgggtgctaagagagctcttgctgaagagcaaggtgtctcgtccgcgagaat

SEQ ID NO: 32321 - DNA, 352 bp, Oryza sativa
  Clone ID: uC-osflM202124d02b1
gacccacgcgtccgttcattcgtccggctgcatgctagtatgcatgcggatatatatccagagaacggtggcctatacgaaataatccatgaatatgtgggctgggattggggagcatatgcacaccagcactataatggcgtttgctctgccatcgaactggccctgtgacaacggggcgattggctttggcccacaatattttctgctaaattcattctctgattttgcgtgagattatcatgagaagcagtaaccatgttgtgtatccttttcttcacgtcaaattgcactgcgctatttatttaatggaacggacagaccaacagcgccggacacaacaacaacagag

SEQ ID NO: 32322 - DNA, 516 bp, Oryza sativa
  Clone ID: uC-osflM202124d03b1
gtggttattgggcgggaattttcgggaggtgggggaagagagggaacgccgggagcgttgcggcgacgacgatgctgctgcggtggctggcgcggccggcggagaggtgcctggggcgaggcggcggcggcgccggacggggaggaggggatgggttgctgtggcacgcagggctgaagccgcacgcgagcggggagtactccatcgcggtggcgcaggcgaacgcggagctggaggaccaggggcaggtggtgacctcgccggcggggacctgcggcggcggctacagcggccacggtggccccgaggcgtcccgcttcatctcctcccgcctcttgccccacctccacaggtttgcatctgagcaaggtggcatgtccaccgatgcaatcaagagggcattccatgccacggaggaggagttcttgcacatggtcaagcgatcctggctcaagcagccacagattggctcgggtgggtcatgctggctcgtcggagcaatcaccgataacgttc

SEQ ID NO: 32323 - DNA, 534 bp, Oryza sativa
  unsure (1)..(534): unsure at all n locations
  Clone ID: uC-osflM202124d06b1
atactttacagcacatcggaagccaagccccaggaaagaggaacgcacgagcagcatatgtcacagagggccagcgtcccacactcctcctccatagccttcgccctccattcccatctcctcgtctccagtgagatgtgccccagctcctattggcagcaataggaatagaaaagattgctcctttcttttgagctttcttgcaattttggtcttctttccttttgatttggtttctttccgtccgatttgtgaagaggaggagcaatggggttcaagggatttgtggagggtggcatcgcgtccatcgtcgctgggtgctcgacgcacccgctcgatttgattaaggtgaggatgcagctgcagggggaggcgtcggcggcggcggcggcggtcgcgccggcgcatgcggcgctgcggccggcgctggcgttccacgcggggcaggccgtggcgatcccgcatgacgtgattgcgccgncgaggaagccctggccgatagccgtctgcgcgcaaaaccttccggccggaggg

SEQ ID NO: 32324 - DNA, 490 bp, Oryza sativa
  unsure (1)..(490): unsure at all n locations
  Clone ID: uC-osflM202124d09b1
gtagagggccgcgtggggcggcggcggcactcccccgacccccgagccgaagagcgacgcggacgcggagggcgcgggctcgctggatcgggtggagctcaatgcaggggcgggcggcggccgtgagcgcgaggacgacgagggggaggacgaggccgtgggggcgaggggggtggagatgaacggggaggacgccatgagccacgacggccacgacggcgatgaggatggcgatgacgaggaggacggcgacgacggcgaggaggaggaggaggaggatgatgggaggngggatgacccgatgacgactccacccccgatgcgtcgccgagggcggaggcgaaggcggagggcgagagctccaccgtattgggcgggctgcgccaaccagcccgctgagcccgaccccttcctcgacggtgacgactctggaacggaggaggagcaggcggcgttcatggtggagctggagcgcttncacagggagcac

SEQ ID NO: 32325 - DNA, 509 bp, Oryza sativa
  Clone ID: uC-osflM202124d10b1
tcggttacgccttcatggccaagatccccaacgccgtgctgggacaggggtatgggatgactgaggctggacctgtgctggccatgtgtctggccttcgcaaaggagccattcgaggtcaagtccggctcgtgcgggacagtcgtcagaaacgcggagctgaagatcgttgaccctgacaccggcgccacccttggccggaaccagtccggggagatttgcatccggggagaacaaatcatgaaaggttatctgaatgacccggagtccacgaagaacaccatcgacaagggcggttggctgcacacaggagacattggttatgttgacgacgacgacgagattttcattgttgaccggctcaaggaaataataaaatacaaggggttccaagtacctcctgcggaacttgaagctcttctcatcacacaccctgatatcaaggatgctgccgttgtaccgatgatagaccgaaatgcgggtgaagtgtcagcatgttccatcacatca

SEQ ID NO: 32326 - DNA, 544 bp, Oryza sativa
  unsure (1)..(544): unsure at all n locations
  Clone ID: uC-osflM202124e02b1
ctgatatccccaagaattccttctcgaaaacccgagaggagagcgagagagaagaggaggcggcggcggcggcggcggaagcacatggagatcatctccgacttacaggaggaagaggctccgccgcggcagcagcagcaaccggcttctgtggcggcggcggcggggagcggcgactaggtcctcgcggcggagctggagcggaggggcggcgcgatccccttcctccaggcggcaatcgacgtggcgaggcggcggtccgacctgttccgcgacccctccgcggtgagcagggtcacatcgatggcgtctgcggcgagggcggtggtggaggcggaggagaggaaggctatggatgccaataggaacgcggatgaggccgagaggaaggcggccgacgccgagaggaaggcgaatgcgcccgcggagcccaagccggagagctcggcggggaaggatagcatggaggtggacaagaaggangaggggcacgtgaggaaaccaaatgctggcaatggtcttgatttgaagaagtactcttgga

SEQ ID NO: 32327 - DNA, 457 bp, Oryza sativa
  unsure (1)..(457): unsure at all n locations
  Clone ID: uC-osflM202124e08b1
tcgttcgctgcaggtcatggccaacatcgcgtgcgccgtgattggggagaccggcccgttcttgcaagggtgggtgacatggaaccagatcttgctgttcgtcgacgtcgcctgctgctgcgccgtgctcttcccggtcgtctggtcgatgcgatcgctccgggagacgtccaagactgatggcaaggcagcgcggactctatcgaagctcaccctgttccggcaattctacattgtggtgatcggttacctatacttcactaggatcgtcgtgtatgcgctcaagaccattgccagttaccagttccggtgggtgagcgtcttggccgaggaggtggccacattggcattctacctcttcatngtctacacattcagaccggccgagaggagcagatacttttcgttcgacgaagatgangaggaggctgctgagatggtgctccgggaagaggaa

SEQ ID NO: 32328 - DNA, 321 bp, Oryza sativa
  Clone ID: uC-osflM202124f02b1
atcattttatgcagtatcacaacgtacgcatgcttggggctgcacgcaccacgcgcgcgtgcatgtaactgtgacgggttataatcgatctgttggatggatatggatcatggatgcaggcaatgcagctgctcttctgtttggacccactgaattcgcccgtgcatgcaggcagcttctttgtgtgtgtacatatgcaactatgcgagaggcaggtatatgtgagcaaaaggcccccaaatgcaatgagatcgatacacatgtttgactgttcgtcttatacaagagagaatcaatgcttgattctattaactaatattt

SEQ ID NO: 32329 - DNA, 365 bp, Oryza sativa
  Clone ID: uC-osflM202124f07b1
ttgttttcgatccattccgatccatgaaatttctgctggtaccgtatagagcgagggcggctccagccatggacgtcatcatccacaagatcatggacaagctccacatgatcatacgcgagcacatgatggtggacgagcacaagaaggagggggtgcaccacaagaaggacggggagcacaaggaaggcatggtgaacaagatcaaggacaagatcaccggcgaccactgcgaccgcaaggagcacatggtgatgaacggcaagaagacgaagaacgacaacaagcacggcaaggagggccacaaccacgaccggcacagcagcattatctgcgacagggactgaatcgacgtgcccacacac

SEQ ID NO: 32330 - DNA, 529 bp, Oryza sativa
  Clone ID: uC-osflM202124f12b1
ctgctcactgcatcaatggccgcggccaccatggcgctctcctccccggtgatggcccgcgcggcgccgtcgacctcctccgcgctcttcggcgaggcgcggatcaccatgcgcaagaccgccgcgaagcccaagccggcggcgtcgtcggggagcccgtggtacggcgccgaccgcgtcctctacctcggcccgctctccggcgagccgccgagctacctcaccggcgagttcccgggcgactacgggtgggacaccgcggggctctccgccgacccggagacgttcgccaagaaccgggagctggaggtgatccactcccggtgggcgatgctgggcgcgctcggctgcgtcttcccggagctcctcgcccggaacggcgtcaagttcggcgaggccgtgtggttcaaggcgggctcgcagatcttcagcgagggcgggctcgactacctcggcaacccgagcctgatccacgcgcagagcatcctcgccatctgggcggtgcaggtggtgctcatgggcgccgtcg

SEQ ID NO: 32331 - DNA, 294 bp, Oryza sativa
  Clone ID: uC-osflM202124g01b1
ttctcttttcttcccctctcgttagggttagggggggggtttctctgtctcggttgcggtcttcgcttccacttcccaaaattctcgagtcaaacctcgtggcgttcggccatggcgacggcggcggtgctcggatcccacgacgccctcgacaaccggatgcatctgggggccttcgtcgtgtcccctgcttcaaagcccaagcggcggcggtacagcaaggcggcgtcgccgccccccaaggtggcggcggtgagctcgccgtcggtgggtaagtcggctgcgagggtggcg

SEQ ID NO: 32332 - DNA, 104 bp, Oryza sativa
  Clone ID: uC-osflM202124g05b1
cttactcgtggggtttgtttaattattattggcactcttgtattggtttaaaaaaaaaaaaaaaaaaaaaaaaaaaaaaaaaaaaaaacataaattaattattc

SEQ ID NO: 32333 - DNA, 535 bp, Oryza sativa
  unsure (1)..(535): unsure at all n locations
  Clone ID: uC-osflM202124g07b1
tcgtttcgttgttggcaaattcgttgaattctagggggaaggcatgggaaagctgtctttggccgacagggccacaatcgcaaacatgtcgcctgaatatggagccacaatgggtttcttccctgtagaccatgtgacactagattatcttaaattgactggccggagtgatgaaactgtggcaatgattgaagcatatctgcgagctaacaagatgtttgtagactacaatgagcctcaaacagaaagggtttactcttcgtatcttgagttggatcttaatgaggtggaaccttgcatttcaggcccaaagaggcctcatgaccgtgtccctttgaaggaaatgaaatctgactggcattcttgcctggataacaagagttggtttcaaagggttttgctgtaccaaaggaacaacaagataaaaggtgtgaaaatttgacttccatggacaacctgctgaactcaaacatggcagtgttgtcatagcagcaattactagctgcacaaacacatcanatcctaatggtatgct

SEQ ID NO: 32334 - DNA, 366 bp, Oryza sativa
  Clone ID: uC-osflM202124g09b1
gttgaggcgaggagaggagagcgaaggagcagaggcgaagcacgagtccaatccaaacccgaaaaattcgcgtggcggccaagccatcgacgcgagcgaaacgcacgagcgcgtcgcctacgcctccgccgcgcctcgccatggcggcggccgtctccacggcgccgcgcgcgccgctccccgccggcgccgtgtcgtcctcctgctgctcgtcgtcggcctcctccgcgtcgatgtcgcggaggtgggatccgagcccgaaccctagcagcggcagcggcagcaggttgttcctcgcggcgcggcgcggggagcggttgcgcgtgcgccggcttgcgggcgccgggcccgcacccggaccgcgcc

SEQ ID NO: 32335 - DNA, 516 bp, Oryza sativa
  Clone ID: uC-osflM202124g10b1
ttgtttcaaaccttgttcatcacagtccaagtgggacttctagaaaccaaacccaagttcaatttcaagctgaacacatgagtttgaacattatttattcgttcaaattaaattcacctgaaatttggaaacacatggaagaattcctctctttcaaatttcttctgaatctgaaccatccaaattaacaaacgcagggcatgctgctgctcacactggccgtctccgtgccagcactgaagccgccgccgtgcgacggcggcggcggcgccgcctgcccgcgcgcgtcggcgctgcagctgggcgtctacttcggcgggctgtacaccatcgcgctcggccacggcggcacgaagccgaacatctccaccatcggcgccgaccagttcgacgacttccacccgccggagaagctgcataagctctccttcttcaactggtggatgttcaccatcttcctcggcatcctcttttccaccaccgtcctcgtctacctccaggacaacgtcagctgga

SEQ ID NO: 32336 - DNA, 246 bp, Oryza sativa
  Clone ID: uC-osflM202124h02b1
tttattttctctctctacttcacttcttcttctggtggtcttctcccaagcaaagcagcagctcgagatcgatctagtactgtggctgctagctgcatatataagtaatggcgcatatttgatctcgctttcagcaaccaggcgactggtctgaggatcaattgatttggagatttttttgagtgtgttcaattcatcactcatcagagagtgtgaagcgcctactgcatgagctagctgtgagcc

SEQ ID NO: 32337 - DNA, 472 bp, Oryza sativa
  Clone ID: uC-osflM202124h03b1
gtacttctagtggagcagagctggaaggtgtcgggaggagtgcagtctcatatgctgggaacaggcagataagcatggatgaccttaccaagcctttggatgaagaaagcattaaggttactatggatgattttgtgaatgcacttcatgaaattacccctgcatttggtgcttccactgatgaccttgaaagatgcaggctaaggggtatggttgattgtggcaaggcacataggcacttgtatgagagaggtatgcttcttgttgagcaagttaaagttagcaaaggtagtccacttgtgacatgcctcttggaaggtcctgctggaagtggtaaatcggctttggctgctactgttggcattgacagtgattatgcttacgtgaaaattatatcagcagagacaatgattggtttcaatgaaagcagcaaatgtgcacagatatgcaaggtttttgaggatgcatacaa

SEQ ID NO: 32338 - DNA, 473 bp, Oryza sativa
  unsure (1)..(473): unsure at all n locations
  Clone ID: uC-osflM202124h08b1
tttttgctttcctctaccttgactttggctggcggactctctcttcttcttgggaggctgggagctaccagcacaacacaccaaggaagctgagcaggtgcgttgatttcttgatatcatggccaagaggcacctcttgttggtgacaacttgtttgagggctctgtcatgtgccttgctgctacatgcttcctctgatgggttcctgagagtcaacctccacaagaagagattggacaaggaagatctgactgccgccaagttggcgcagcatggcaaccgtcttctgaagacctgcagttcagacagtgatcctgtccctctggtggactacctgaacagcccagactatgggtgtgattggcctcggctcaccgncgcagaacttcacggtgatatttgacactggaagctgcaacctggggggtccttcagcaaaatgctatacttcgatagcatgctacctccacagc

SEQ ID NO: 32339 - DNA, 511 bp, Oryza sativa
  Clone ID: uC-osflM202125a02b1
ggtttgttttacaaacatgtacccttcatccgctgtggggggacagaacaaggatgaggccattgccgctttaccagttgatgatctcattgagaaagctgatggctttgctggtgtattcccagagcacaagtatgagattgtgaaacgtctgcaagcaagaaagcacatatgtggaatgactggtgatggtgtcaatgatgctccagccctaaagaaagctgacattggtattgctgttgctgatgcaactgatgcagccaggagtgcttcagatattgtgctcacagaacctggtcttagtgtgatcatcagtgctgtgcttacaagtcgtgcaattttccagcgtatgaagaactacactatctatgctgtctcaatcaccattcgtatagtgcttggatttatgctacttgcgctcatctggaaattcgattttcccccttttatggtcctaatcatagcaattttaaatgatggtaccatcatgactatatcaaggatcgggtaa

SEQ ID NO: 32340 - DNA, 461 bp, Oryza sativa
  Clone ID: uC-osflM202125a08b1
tcgcgtatcgcaacccaaactcgcacaagggagaagggaagagaagcttcgagagagaggtggaggaggagacgagcgcgtggtggtggtggtgttggcggcgatggatcgggttcgcggatgcgcgttcctgctcggcgtcctgctcgcaggatccctgtttgcattttctgttgcgaaggaggagaccaagaagctcggtaccgtgatcggtattgatcttggtacaacctactcgtgtgtcggtgtgtacaagaatggtcatgtcgagattatcgccaatgaccagggtaaccgtatcacaccctcatgggttgcattcaccgatagcgagaggctcatcggtgaggctgccaagaaccaggcagctgtgaacccagagaggaccatcttcgatgtcaaacgtctcattggaagaaagtttgaagacaaggaagttcagagggacatgaaacttgtcc

SEQ ID NO: 32341 - DNA, 490 bp, Oryza sativa
  Clone ID: uC-osflM202125a09b1
tcgtttcgaccaaaccctaggcccccccaaatcgccgcactccaccaccccacgctgccttcgccgctaagtatatccctcccggcgaccgcgaatcggatcttgagagtgagagagaggttgggggaggtggatgagagggcggagatgacggtgatggagctcaagaagctgccgctcgggttcaggttccaccccaccgacgaggagctcgtcaggcactacctcaaggggaagatcacggggcagatcaggagcgaggccgatgtcatccccgagatcgatgtctgcaagtgcgagccgtgggatctccctgataagtctctgatccgctccgatgatccggagtggttcttcttcgcgccgaaggataggaagtatcccaatgggagcaggtcgaacagggcgacagaggccgggtactggaaggccaccggaaagacagggtgatcaagtccaagggtgacaagaagaagcacaaggtattgca

SEQ ID NO: 32342 - DNA, 283 bp, Oryza sativa
  Clone ID: uC-osflM202125a10b1
tttatttaatggtcttgacaaggctgttagtgctgtgttgggattcagaaccattgagcgaaaccaattactcgttagtattgctaaaagcaagtttaccaagcaccgggatgagaagaatgagaaaatcacaaaaccagaagaacttgttcggttgtatgatctggttattcaaaatacaacaaatctgactggtttaattagctcaggaagggataaaaacaagggagagaacacttttattcaggagtatgagctgaaaagtttggcttttccagcttag

SEQ ID NO: 32343 - DNA, 420 bp, Oryza sativa
  unsure (1)..(420): unsure at all n locations
  Clone ID: uC-osflM202125a11b1
ttgctttgctggtgcagcgcgcgcccatctccaaccgcaccggtgtacagggcgccgtcaacgtgcagggcgaggaccagaaaaaactcgacgtcgtctccaacgaggtgttcttcaactgcctcaaatcgagcgggcgcaccggcgtgatcgcgtccgaggaggaggacgtgccggtggccgtggaggagagctactcgggcaactacatcgtggtgttcgacccgctcgacggctcctccaacatcgacgccgccgtctccaccggctccatcttcggcatctacagccccaacgacgagtgcctagccgacatcgccgacgaccaaaatcttgaccaggtggagcaaaggtgcatcgtgagcgtgtgccagccggggagcaacctgctcgccgncggctactgcatgtactcgagct

SEQ ID NO: 32344 - DNA, 361 bp, Oryza sativa
  Clone ID: uC-osflM202125a12b1
gtttggtttgagcccttgggctattgcagactcagcacggacgcccttcttcctgtgcgactgtgtcgcactcccggtcagacgccgatcaggcttaatagacctactgtccttgacaatctctatgtccatctatctctatctatcactgtctctgaatgtcattccgcattctaaaacatgagcgctgaattccatttcttttattggcttttgagaacatatggcttcatggcccagcttcgatctaaaagtatggtcgagagtggccttcctttttttggaaaagcaaggaataattcagaatttgagggtgggacaaccaccatcaggtggaaaaggcctgaaccttttatacaac

SEQ ID NO: 32345 - DNA, 275 bp, Oryza sativa
  Clone ID: uC-osflM202125b01b1
gtttgttggacagagctatacaatccttggaggggcacctccattggcggcggactatatacaggattacagtctggagatcaatacataaaacccactcgctctacagggggaactcgtagcagcatgtgcagactaactgaaaaaactctgggcagatggtccaacttatatcactccacttgcattcaagacaaaagttgctcgtgatactacacagatcactggatacgatgaagatgattctcaagagtcacttagatttctattggatg

SEQ ID NO: 32346 - DNA, 355 bp, Oryza sativa
  Clone ID: uC-osflM202125b02b1
atttgttttaaagttgcgagagatagagagagagagatcatttagtttgttgggggggagcagatcacgaagatgctggagaagctgtgggacgacgtggtggccggtcctcgaccggagaccggcctcgagaagctccacaagggcggtacaacccgcccccttgtcatcaacaaagatggcgaccgcgaggcgagcggagtggcgtacaagcggacgcagtctatgccgacgaccccgacaacgcctgtgacgccgtcgtcttcttccccgacgacggggactacgactactcctcggggcagcaacctgtggaggagcgtgttccaccctgggagcaacctctccaccaaga

SEQ ID NO: 32347 - DNA, 462 bp, Oryza sativa
  unsure (1)..(462): unsure at all n locations
  Clone ID: uC-osflM202125b03b1
attatgtttccaaatccagagactccaaccagggtggatgatttcctgccaagggggaggacaacacgcacacacactcatacttgcaacccgcctgggccatcggcaacagcgcacacgcatacatgctaccacacccacacccatgtcttcagctcagatgatgatagttgtggaggtgacaaagccaagccaaagaagggccgcaagccattgggcaaccgtgagggtgtccgcaaataccggcagaagaagaaggctcatacagcacacttggaagaggaagtgaagaggcttcntgccattaaccaacagctggtgaagaggctgcaagggcaggctgcacttgaggcggaggtggtatggttgaggtcgttactggtggatgtgcgatcaaggatcaaaggtgcattgggtaggtacccgttccaagcacaatgtggagtaaatattggtttgggt

SEQ ID NO: 32348 - DNA, 298 bp, Oryza sativa
  Clone ID: uC-osflM202125b04b1
cttaattttactacccccgcaaagccaaccagggctggtttttttcataaatcctattgcttcataaaacttactctatatctctatcccccctatccaacaaactccccctccccttcaacataccatcttcctcccactcccccacctcattaactaactccatattcctcaacaacgataccctctctatcaaaaactctcccccacacctcaacccctccttacaatccttctttaacccctacataagaaaaaagctcctacttcactaaatccctaacaaataccaaatatt

SEQ ID NO: 32349 - DNA, 421 bp, Oryza sativa
  Clone ID: uC-osflM202125b05b1
gtttatttttcttcccgtgccgccgccgccgccgccggttcatctcgacgccgaaagcggcgcaacctaaacaattggaccagctcacacgcccatcttcggattccaaccaaatctccgggatggcctcgacctgcttccgcgccgccgctccgatggcctcctccgcctgccgctcggcggcctcccgctcaataccctccgccactcgatgcgagacccctcgcatatccaggctgccggtggagcttggcagcaccgcggggtcgacgctgctgccgctgcacagcacggtggcggcggcgaggctaacgtcacggctcatcacagggtcccggagctgctgggcgctctctgagggtaccctctgtagcacctatccctgacttttacatcaatcaataccaatgatgagatgcac

SEQ ID NO: 32350 - DNA, 392 bp, Oryza sativa
  unsure (1)..(392): unsure at all n locations
  Clone ID: uC-osflM202125b06b1
gtttatgttaggagaggagatcanggggaggagggggtggccggttcagcanatcggggcgggcggatttaggggaggagcgcgctagccgggagcggcggcgatggatgaggagtacgacgtgatcgtgctggggacggggctcaaggagtgcatcatcagcggcctcctctccgtcgatggcctcaaggtccttcacatggacaggaacgattactatggaggagaatctacatcccttaatctcactaagctctggaagagattcaaaggcaacgagaccgctcctgaacatctgggtgtcagcaaggagtacaatgttgacatggttcccaagttcatgatgggcaacggtgcactggtccgtgtactcatccacacgagtgtgacaa

SEQ ID NO: 32351 - DNA, 541 bp, Oryza sativa
  Clone ID: uC-osflM202125c02b1
atttacttctactcaactgagcttttctttggggtgggggtgctaagctagtgaatgggactcagctagctcggagaggcagagaggaacagactaatcattaatcaatggcgggcctggttggagtttggctgggggagttcgccaagatgggccggggggcggcaccggcggccgacgccggggtcggccagcgagctcagagcgaaggggagagctgcaagagtaaggttggtgatggtgttgtgcaggagatcacgacgaggacgagggacagcagcatcctcctctccgactccgaggccaccgtgtgcatgctcatggaccgcttcgcccctgcctgacgccgctcactggccgctgggctttcgccggtaaaatggattgatggaagcgtgtaccgtgtatatagtagatatactctctgtatataaccactttgccttgctattttgcataaattgtatcatatggggttgaatcctttaaatttggaggcgattcattgggtaatatatgcagcactaaggctggttctgat

SEQ ID NO: 32352 - DNA, 397 bp, Oryza sativa
  unsure (1)..(397): unsure at all n locations
  Clone ID: uC-osflM202125c08b1
gtttcctctacgcggattgcacgattgaggcggggacgaatgaagtggcgggggggaccgcacaacanaggagcaagaacattgccgaggccatcgacaccgggttctccttcctgcgctgcaagatcagcggcattgggcagatctacctggggcgggcatggggtgactcgtcccgggtgggttactcctacaccaccatgggcaaggaggttgtgccgatcggttgggacggctgggaagtccagaaacccgagcatagcgggatatactactgagagtacaagtgcagtgggcccggggcgctgtctatcaagaggatcgagtggtctctggtgctgagcgacatccaagccaagcccttcaccggatcacacttcgtctacggggactcctg

SEQ ID NO: 32353 - DNA, 452 bp, Oryza sativa
  Clone ID: uC-osflM202125c11b1
tcgtgttctctgctctagcacctcaccaagcagaaagctagagagctagcaatggcgcccaccgtgatggcctcgtcggccacctccgttgctcccttccaggggctcaaatccaccgccgggctccccgtcagccgccgctccaacagcgccggcctcggcagcgtcagcaacggtggaaggatcagctgtatgcaggtgtggccgattgaaggcatcaagaagtttgagaccctgtcgtacctgccaccgctcacggtcgaggacctcttgaagcagatcgagtacctgctccggtccaaatgggtgccttgcctcgagtttagtaaggtcgggttcgtctaccgtgagaaccacaggtctcctgggtactatgatggcaggtactggaccatgtggaagctgcctatgttcggatgcactgatgccacccaggtgctcaaggagctcga

SEQ ID NO: 32354 - DNA, 423 bp, Oryza sativa
  Clone ID: uC-osflM202125d04b1
gtttattttcgtttggaggaaccatcgcatgggggcggtttcagtggatcttcgccggggggccagactgtggcttcaaattcttccccacatttggcctcgaggcatataaacacggattcttcttcgatttcaccatggccaatgtcggcattggcatgatgtgcccgtacatgatcgtgttctccgttttcattggcaccatcatctcgtgcggtgtaatttggccgtacatcgagtcaaaggagggcatctggtacccaagcaaccttgggcccaacagccttaacggcatcagaggttacaaggtgttcatcggcttgtccatgataatggctgactgcctctttcgcttcctctgcatcatggtcccgacaacatgtgccatgatcaagcggcgtccgcaagcaatgcaaggtggtg

SEQ ID NO: 32355 - DNA, 393 bp, Oryza sativa
  Clone ID: uC-osflM202125d06b1
attatgatccaggctcgcgtcgcgtcctgctgaggccgcttctactccgccagcccgcgccgccggaagcgggcaattcgtcgagcacctggtgcgcgcgctccgccgccatggcgtccgccgcgcgggctctgggcgcgctcgtccacaagggctcgtcgctgtcctcctccgccgccgctctcaggagcgccgccgtcctccatgggagaggctctgctggcggcagcgccagattgttccagaggcacgcggcgaggcggaggatttcgacgttccagccgctttgcatgggacggcgctcctgcaagatcgccggaaggaagcattaagaaaggtggcccaagtccttcatcaaacacaactttagcaggaatattggagaaagcaagg

SEQ ID NO: 32356 - DNA, 416 bp, Oryza sativa
  unsure (1)..(416): unsure at all n locations
  Clone ID: uC-osflM202125d08b1
tcgcgttcatggcttcattcacgcctaattgcgctacgttgttctttttccttgtcttccttgctgcagtattcgtctctgctgcggcagcctccgagcacggccgggtgttggaggaggatcagaacattcggtaccgtgtggaggactcggaacttccggacctctactacgaaatctgcatgtatgcgagggagcacaggccatgtaggagggtgatggccaccatcccggatctaaaattcaagctctccggccaggttgatttagccttgctgctctctcacgtcatagccaaccggagcgccgaggccaaggccctggccgatccgttgctcgccgccgccgccgcaaagaagggcggtgatgagctccccaagtgtctcgcattctgcgccgncagcctcgacgacgtg

SEQ ID NO: 32357 - DNA, 431 bp, Oryza sativa
  Clone ID: uC-osflM202125d09b1
gttgtcttcgtactcgcctctctccgcgccctcctccgccgccgctcgccggcgttcgtctccgccgccaccgccgccgccatgagggagtgcatctcgatccacatcgggcaggccggtatccaggtcgggaacgcgtgctgggagctctattgcctcgagcatggcatccagcctgatggacagatgcccggtgacaagaccgttgggggaggtgatgatgcttttaacaccttcttcagtgagactggtgctgggaagcatgtcccccgtgctgtcttcgtcgatcttgagcctaccgtgattgatgaggtgaggactggtgactaccgccagctcttccaccctgagcagctcatcagtggcaaggaggatgcagccaacaactttgcccgtggtcactacaccattggcaaggagattgttgatct

SEQ ID NO: 32358 - DNA, 363 bp, Oryza sativa
  unsure (1)..(363): unsure at all n locations
  Clone ID: uC-osflM202125f01b1
cttgctttgccggtgctgccgctggttctccggcagggactactcccaggcgggtgtcccctacaaacatatatggactggattatggttctgacagttatgagagtgattcgtctggaggacactccgacggagatgatggctcggattgtgagattcttgatgacgcctctgggtcagctcgcaaacagtgggagaaggctgcttctaggaaaagcatgcctcaagggttccggaagagtacatccacatcaagggccgagtcaagtacacagccagatgaaagtgaggagaatgatgcanaatgcgatataaatgagtacatcaggaagtattttagtgaagatgtattgaagaaagggg

SEQ ID NO: 32359 - DNA, 166 bp, Oryza sativa
  Clone ID: uC-osflM202125f02b1
ggtcattccgccatccccatccccggccaatccggggggtctccttctctctggcgggggcaaggacggcgcctgcgtttacaaagacgacggagcatgggtacgacaacattggcgaccttcaccatgcctactgtgctgcccttctctaccatgatggcctcct

SEQ ID NO: 32360 - DNA, 323 bp, Oryza sativa
  Clone ID: uC-osflM202125f04b1
catcagtcggagccacccaggcacggccgccctggtggctttgtgctcgccgccggcggcgaggcgccaaccccctgccccctgccctacccccccggaggggactgtgtacgacgccctccttctccttctactattctgcgcagaccacgcaccgccggcaacgagcatggtttggagggtgtgacgcggtgccccaatgcttgtcacttgtacaagatgtgtggctctactaactatctatcctacttggactgaccattaatctatcatcctacacactatctactttagcccgaacaaaccaccctattggaattgga

SEQ ID NO: 32361 - DNA, 214 bp, Oryza sativa
  Clone ID: uC-osflM202125f08b1
gttttgttgcgaagtgatcatgaagccgtgtgcgtctcctgcgtttgggtcgtggggcggtcttccagcgaggctacgggcgcacctcaccctgctcaccgtgtatctgagcggttgtgctccgggtactttgttggcatcatgtcgtcatatcatccgggcgcctgcgagcaagccgtaccagacggacatactgtcgagcgccgagcacctc

SEQ ID NO: 32362 - DNA, 372 bp, Oryza sativa
  Clone ID: uC-osflM202125g07b1
tcgtttttctccggctcttcttcagtatcgaaggctgtcttcttctcgtgcccaccacgaccaccgtagcaatggcgggcaacgggccgatcaacaaggaggacccgctcaactggggcgcggcggcggccgagatggccggcagccaccttgacgaggtgaagcgcatggtggcgcagttccgcgagccgctggtcaagatccagggcgccaccctccgcgtcggccaggtggccgccgtcgcccaggccaaggacgccgccggcgtcgccgtcgagctcgacgaggaggcccgcccccgcgtcaaggccagcagcgagtggatcctcaactgcatcgcccacggcggcgacatctacggcgtcaccaccg

SEQ ID NO: 32363 - DNA, 368 bp, Oryza sativa
  Clone ID: uC-osflM202125g09b1
tcgttttcctctctctctctctctcgcaccaccgctctcttccgccgctgcggctcacggctacgcagctctcttcccctcctcctcggctccgctctcttcgatcgatctagggtttggtcttctgttgggggattgttgttgctcttccgcgcgatcgatcgacgccgcgtcctgagggtttgaggggtttccgccctcccgccgcacgcccgcacccccgcgatgtccggccggagctcgccgatgtacgaggggctcgcgtcgcgtcccgacgagtgggacgtcgtcctcaaggtgaagtatggtgaaactcttaagaggttccgtggggtatgtgcaaggaccacaattcagcctgaacttat

SEQ ID NO: 32364 - DNA, 333 bp, Oryza sativa
  unsure (1)..(333): unsure at all n locations
  Clone ID: uC-osflM202003a05b1
atttccgtactcgcgggcggcgacgatcccgagttgncattttgcgccagattctccgaagcccccgcaaccccaccgacgaggtcgatgtgcgctgctcacatggaaccttcgcaagggctgcagttcccagtggtgcatcaactggtgtctatgaagctctcgaattgagggacggtggatctgattacttgggaaagggtgtttccaaggctgccgacaatgtgaaccccgttattgccccagctctgattggcaaggacccctacgccacaacgctgagcttgatcactccatggttcagcagcttgacggaacccaaaatgagtgggg

SEQ ID NO: 32365 - DNA, 345 bp, Oryza sativa
  Clone ID: uC-osflM202003a06b1
ggtcggaatccagttcgatccacgcgcccgcatgcgttttaaccgggcgcccaaaagacaggtgcagttaggcgatcagttccgagaaccgccccgaaaggcctcccgccgccgccgggatatctcttccgcctccggccaggcggagcggaagggcgccatcctcggcgcggccggcggcatcgggcagccgttctccctcctaatgaagctgaacccgttcgactccgccctttccctctaacaatatcgggggaacccccggggatggccgcagacgtttcccacataaacgccccggcccaggtgaaggggttcatgggggatgaccagctcggggaggca

SEQ ID NO: 32366 - DNA, 498 bp, Oryza sativa
  Clone ID: uC-osflM202003a09b1
gatatggcctgtgccaaggagagggaagtagcattttgctctcctttgccttcagagaacccggaagcaatggcgtctgctactctcctcaagtcatctttccttcccaagaagtctgaatggggtgccacccgccaggctgccgcccccaagccggtgactgtctccatggttgtccgcgctggtgcctacgacgatgagcttgtcaagaccgcgaaaaccattgcatcaccaggaaggggtatccttgccatggatgagtcgaacgcgacctgcggtaagaggcttgcgtcaattggccttgagaacaccgaggccaaccgccaggcttaccggaccctccttgtcaccgcaccgggcttgggacagtacatctccggtgctatcctcttcgaggagactctgtaccagtcaactgtagatggcaagaagattgtccacatccttactgagcaaaaatcgttcccagtatcaaggtccacaagggtcctgtgcccc

SEQ ID NO: 32367 - DNA, 506 bp, Oryza sativa
  unsure (1)..(506): unsure at all n locations
  Clone ID: uC-osflM202003a10b1
catctctctttgagccgccgccggagagcaagaacacggatgagcgagcgggtcgtcgagggcgatggcgggaggcggcatgttcggcggcgccggcgcgttctgggcgacgcgggcgctggaggtggtgaagcggaacgactccccgggactgctctggaagcggatcaagctcaccaccacccgcaagaacaacgccaagaagcgccttaagcgcctctggcagaatgaggcagtaataagggcttgtggggaaacagaatcgtcgtcgtcgtcgtcaacaataaacaccggatcgggcttttggaaaccaccagagatcccaaagtcattctgatgacctgcacaccgggttaaatgcaatttgaaaaggcccagtcagtgaccttttgatgacaatgctgaaagcctctccatgttttcaagctttggtactttatcaactggaacaagtacatgcatgtacacatncaaccttttttcatcaagaggacacatacatcatt

SEQ ID NO: 32368 - DNA, 523 bp, Oryza sativa
  Clone ID: uC-osflM202003b01b1
gttaaaacttccttggtggtggccaacagatacagtacaatcttcccactaataagcttgagaggctcaatctcgcaggaaaccagttcactggaaatttaccctactcgattttctcgatgtctaatcttaagtatttaaatctaaatcataaccaattgcaaggaaatataactgatgtattttccagcctctatagcttgacaacactggatctttcctttaattctcttgctggtgacctaccacaagggttcacatcattgtcaagcctgaagaaattatatctgcagaacaatcaatttactggttatatcaatgtccttgctaatctcccccttgatgatctgaatgttgcaaacaatcatttcactggctggattcctagtcaacttaagaagataaacaatctacaaactgacggaaattcttggagtaatggaccagcaccaccacctccaccgtattcagctccacctccaccaaaccgtccaaacagcccaggtcaaaacaatggtggttc

SEQ ID NO: 32369 - DNA, 448 bp, Oryza sativa
  Clone ID: uC-osflM202003b02b1
gtttgctctaagacgttcttttggcaggtctgattcaacagcacgtggaaattctccgaaggagaggatggtaccaccgcctcagaaacctgcaacaacttccttgagaatcgatcgattgtgcgcccgttcactttgaaagctgtgcaagagcttcttggtaaaactggatctgtttgtagcttttggatggatcctatcaagactcattgctatgtcacattctcttcggtggaggaagctctggctaccaggaatgctgtttacaatctccaatggcctccaaacaatggcagttccttagttgctgaattcgttgatccacatgaggtgaaggccaaacttgaaccccctcccccacctccagcacctatcaaccccacagcagctacagcaccttcccaccaatccaaggccaaccaaatcatgccttcctatgctgctgata

SEQ ID NO: 32370 - DNA, 390 bp, Oryza sativa
  unsure (1)..(390): unsure at all n locations
  Clone ID: uC-osflM202003b12b1
tatcncttttccaccgcctccaagaacagcaaacgccaacttctaccccctcctctcctcgcatttcttcgacctgccattccacacccgcgcgcgcctcaaactctatgtgagggaagggaaacaatcgacttcccagctgagaaaccaagaagcagcagcagcagccatgcgtccgtccttcctcctcctcctagtcgagtttgccggcgtcttggccgtcggggcgcgcgcggggccgccgttggctggcgagaatctgccggggcagctgttgccgggcgagaagccgccggaacaaccgttgccaaaccagccgttgacggggcaaccgttgccagggcaatccgtgccggggcagccgttgccggggcagccgttgcagggcaa

SEQ ID NO: 32371 - DNA, 158 bp, Oryza sativa
  Clone ID: uC-osflM202003c11b1
ttctctttacgctctcttgcataagaactccccccccttttcgcttcccgccgccgtcgccgctttcttggagaggagaaatccgtaggctcagaggatttttggtagtcctgtctcgcgatattcgtgaagagggggggagctaaggggggattcgt

SEQ ID NO: 32372 - DNA, 554 bp, Oryza sativa
  Clone ID: uC-osflM202003c12b1
tgttaaatgtgcctccttgatgccatccatggcttctacatccgggcactcgccgtgctgcccacgggtgacgactccatgcgccttggccgccttctccgtgccctccttgtgtccggacactgctatggccccttggatcctgtgtcaaacataatcctgaatgctgtcttgtatgatgccgcataccctccgcaaccacacgaaggtgatggcaaggctgagttaccacatgatatctttgacacccgcgccatgcgggacatggcgtcctgttccctcgatggcctcgttgccctcctctgcaccatcaccaccaccaccactggcaccccgctctcaaagcatgaggctgtggagtacctttggtcctggcagtgtgacctcaccgagaagctgcagcagaccgtgatggcaaagaacccctacgccgctgcagccatggcttccaagcacccacagcacaccatgctccgcgcgctgctcgtgtccttctccagcgagaagctcgaccgcctgcgctactttctgagaatcattagtgatggctctgg

SEQ ID NO: 32373 - DNA, 523 bp, Oryza sativa
  Clone ID: uC-osflM202003d03b1
cttttggttgagttgatcagtgggcagaatctgtggaagggaaacttgagaagatgcattcacaggaggcatatgaaatgatcgagaaccacctcgctctcatcctggggcagcggcaagctgatgccactgttgcggccataagtaaactccgagttggtcaggtgtatgctgcttctgtgatgtatggttacttccttaagagagtcgatcagagatttcagctcgagaagtcaatgaagaccctcccttggggatcagaagaggaagacaagctcaaccaagttatgacaacggactcaaggccctcaccccagacttctacttcacatccagagatggcatcatggacttcccctaacttcagtgcaggcggacctagccaatctgttaagccatgccgtcttagatcgtatgtcatgtcatttgattcagagaccctacaaagttacgcaacaatcaggtccaaggaggcatttggcatcatcgagaagcacactgaggcactatttggtaaaccaga

SEQ ID NO: 32374 - DNA, 409 bp, Oryza sativa
  Clone ID: uC-osflM202003d04b1
cgaccggaccggatttccttgccttccacgcgcccggtacgttttggagaagacacccacagcggggtccgtttgattcaatttcgatgccgctgcaccgcagagggtcacaaggtaaaatagttgatcaaggttcccatcatgagttgatcaaggattccgtcggagcttactctgaacttattcagttacaacagacttatcctgaagaaatgcctgatgtacaactatagtgtggagtcaactttaagacttaaaagtagaagttagtctttggaacaatcaatgaccaatgatcctcctagaaatacaagaaaaaactctttagcaaaacatattggctcatctggatccgatggactgcacaatcatgggcttacagatgaacctgaagattaacaatgtggtg

SEQ ID NO: 32375 - DNA, 564 bp, Oryza sativa
  Clone ID: uC-osflM202003d05b1
atttgtttttgctgccatttcagaaaatgatgttgctgctgctgctgttttgtcgggcaaccgcaacttcgagggtcgtgtgcacccattgacccgggctaattaccttgcttcaccgcctcttgtggttgcatatgcacttgctggcactgttgacattgattttgagaaagagccgattggagttggaaaggatggtaaagaagtcttcttcagggacatatggccctcaactgaagaaattgcagaagtggtccaatctagcgtactgcctgatatgttcaaaagtacatacgaggctattacaaaaggcaacccgatgtggaatcagctgaccgtgcccgaagcatcgctctattcgtgggatccaaactccacctacatccatgagcctccatactttaaggacatgaccatgtccccacctggcccccatggggtgaagaatgcctactgcttactgaaccttggggacagcattacgacagaccatattacaccagcaggtagcattcacaaagacagccctgcctgccagtactttgcttgagcgtggtgtggacc

SEQ ID NO: 32376 - DNA, 562 bp, Oryza sativa
  unsure (1)..(562): unsure at all n locations
  Clone ID: uC-osflM202003d06b1
attcatatttgtcatagcaattgttgtggcaaatccaactgatcttgtcaaagtgagattgcaagctgatggaaaggccaccactgtcaagaggcactattctggagccctcaatgcgtatgctaccataatcagacaggaaggtattggagctttgtggactggcctcggtccaaacatagcacgcaatgctataattaatgctaccgagttggccagctacgaccaactcaaacagctggacttggtgctggattttttgctgtttgcattggctctccagtggatgtggtgaaatcaagaatgatgggtgacgcaacgtacaagagtacactagactgttttgcaaagacattaaagaatgatgtacggcaaacccttctccaaaactttcatagctcttctgttgtgtacaaccaaatcttttagatttttcgatgcaaatgtattttggtactatacaactaatcttcaaagttcaaacacttgtagcgagcacagaagtaattctccttggngataacagttcaacatttcagtaaacattcccttaaacattatg

SEQ ID NO: 32377 - DNA, 528 bp, Oryza sativa
  Clone ID: uC-osflM202003d07b1
tatcatggaaccctacctccggtgatagccgccgccgccgcctcgggcgatggcctccgcttccggcctcgtcaacgccgccctcccggacgacctgctcgcggaggtgttccgccgcgtcgccgccgcggggggcaaggccgaccttgacagctgcgcgctcgtgtgccgccgctggcgcggcgtcgagcgcgcgtcccgccgcgccgccagggtccccgtcgacgggcccgacggcgacgccgtcgtccgctgcgtcgccgaccggttcccgggcctcgccgatgtcttcctcgaccacggcctctacattgccgccggcgcctccgccgccgccgcggagcggagcagggcacagggttgggataacgaaaaccccaagttagatgagcaacatatgcagtgttccacactaagcgaagatacgcataagaaaatggcagtgatggtgtaacccaacctcattactgatgctgggctacttcatctcaatgagggttgcaagggcttgaaagctgactctaactg

SEQ ID NO: 32378 - DNA, 442 bp, Oryza sativa
  Clone ID: uC-osflM202003d08b1
tttcgtttatacagttcgatgagcccctggttttggttacttagtctcatggggtttgcttagatgacagttggtattcgtattgactgattttagctgagctttcattggtcagggggtatttgattatgaatatctgatgattttagctatgttttacaagagtttgaaagtgagctttcgtggaattttgaattgcaaaaaccgtgtgttgtactgttgtgattgccatcatagtttatccggcactttttgtttctaggacgagtctctacctgcgttacaacatgttcgatagatatgttggcaacttggcatgagcattgaagcccacgtttcccaaccatgcttattgaaataattcagaccacaataataaatggctgctgtatagtgtttcagaccgcttttaacttttacattttctcttgctgaaaacatt

SEQ ID NO: 32379 - DNA, 469 bp, Oryza sativa
  Clone ID: uC-osflM202003d10b1
tttcgttcggttcgtgctgccggcggcgagcccgcggccggacgccggcgtgcgggaggagctgcaggagctgatggacgcgcgcgaggccggcatggcgttcatcctcggccactcctacgtcaaggccaagagcggctccagcttcttccggcggctggtcatcaacttctgctacgacttcctccgccgcaacagccgcggccccaactacgccgtcaccatccctcacgcctccaccctcgaggtcggcatgatttactatgtctaatacaaaaaaaaaaatcaaaccaccatagatagatagaagaacaagaagagagacaaaacaggagacgaatcgaaacaaaaatgaagtttcgcttgtatatcctcgatcttgtaattgacccgagagtttttgttgtaaatgtagtagcctgatttctcctaaaaaaaaacaaaaacaaaaaaactatctactctaaat

SEQ ID NO: 32380 - DNA, 530 bp, Oryza sativa
  Clone ID: uC-osflM202003e05b1
ctaatatattcttggcattgctcattctggggaaagcattgtcactggaaaacttgaatgctaccaacatggtggggggatgtcgattggcaagtcagattcacaaagagtgggctatggggaaactattgaagcggacaagtcatcttctgatataggcgaagttagtaaaatgatcctgggaaagcaaccacctaaaggatcagccatacgcgaagtgagagatatgttcttcccatactggaaatcggtgttgtctcgacggttgcagctaaagatagttccatcctgtcaactaagcaggaaggacttgctaagtgctgaagcgagcacgaaggggaccaagagtatggaccacccgtgtaacccaatcaaatcaatgggaaatcttggttcgatgggctggcccccattgtcaagtgagtccagaaggatgctttatactgttgcttcaatgtcccggaaggtgtttaagcgcacttgactacagaaaaattcttggcggatttggattgcaaccatgtggacat

SEQ ID NO: 32381 - DNA, 516 bp, Oryza sativa
  Clone ID: uC-osflM202003e09b1
caggagcgataggctccgcggcgttcgtcgccgaaactccactgttcatcttcaacctccagccattcttgtgtgtgagagaaagagagctctgttcttgtgttcctaggctgattccaacagcgaccatctggactgccacggcggcgacgccttcggcgtggcgctggtgggcaccgacgtcgcgggaaccacgcacgccgccctctactcgtcggcgaccgacgcgtggagcggcccggcctccattgatcaccaccccgacgccttcgtccaggcgagaaggccaagcgtcctcgtggggaacgcgctctacttcctctgtgacaacaacaccagcatcgtcgagttcgacatggccacgatgacgctgtcggtgatcccctcgccgccgctaccggaggatgtgcacggcgctctcctcatgacggcggaaggtggcgggctcgggttcgccgccgtgctggagcggtccaacctccacctgtggtcgaagtcgatggatcaatgggagca

SEQ ID NO: 32382 - DNA, 513 bp, Oryza sativa
  unsure (1)..(513): unsure at all n locations
  Clone ID: uC-osflM202003f06b1
ctgtcgctttgtgcggtgggtcggacgtcggatccgattccaacctccctcccagacctggccatgtgcgtggcggtggcaggtcgccgcccctcgagctcgactacataggcctctcgcctccgccgccgccgccctcctcctcctccgccgccgccgcccgcgcggacgacgtcgacctgaagggcaccgagctccgcctcggcctccctggctccgagtcgccggaccgccgccctgcggctattgccgctgccgctgccactgccaccacccttgagctgctgcccgccaagggtgccaagcgcgtgttccccgacgaggccgcgctgacgccgcccactgccgccgccgggaagggcaaggcggcgagggagggggaggaggtggnggctgtgaagtaatgacaaaaaatgtctccgcgccccctcaaccggctgctaaagctcatgtggtgggatggccaccaatccggatatacccgaagaacacgatggcaaccaaccagattaa

SEQ ID NO: 32383 - DNA, 567 bp, Oryza sativa
  Clone ID: uC-osflM202003g05b1
attattcttagaaaggattgcttccaaggaggatagattaacatcatatcactggtcagaaagacaagattccatgaaggttcacacaggcctcagcgctcacatccattctgctaccaccattgccacctccaccaccacgaccctttcctctgcgtggactagcacacttcctgcagatgaacttctcagggacatcatcaaaatcactaatccctgaacacctggtgtgttgccaaactccacaaacatcacatgcaagcatcctctcgccatcatcgtccttggctccacaggtgcagtcgaccgtccagttctccaaccccctttccatcctgaattgcacaattcttcggttatccccagtgcaccttcctcttaccctcacgagctggcttgagccaagcacatgcttcacgagggttgtgtcactaaaatttgggaagtcagggagctgctcaacctggaagctttggaacatgaggtgcattatgaaccggaagaggtcccgaacagtcacaagctggcgatcagagagtgcccagtacagagcaatcgtgttctgca

SEQ ID NO: 32384 - DNA, 524 bp, Oryza sativa
  Clone ID: uC-osflM202003g07b1
ggtccggagttcggagttcgagccacgcccacgcgtacggtgttgccctggacctcgaagttgtcgtcgtatttgggatttggagagcgcgcgaggtaaaccaatgttctttctccgatggctcgtactaagcaaactgctcgcaagtcaactggaggaaaggctcccaggaagcaacttgccaccaaggctgctcgtaagtctgctcccacaactggaggagtgaagaagcctcaccgtttccggccttgaactggtgctcttcgtgaaatccgcaagtaccagaagagcactgagctgctcataaggaagcttccattccaaaggcttgttagggagatatgccatgattttaagactgatcttcgtttccagagccatgcggtgcttgcccttcaggaagctgccgaggcgtacctggtgggtctcttcgaggacaccaacctgtgcgccatccatgccaagcgtgtgaccatcatgcccaaggacattcagctggctaggaggatccgtggtgagagggc

SEQ ID NO: 32385 - DNA, 414 bp, Oryza sativa
  Clone ID: uC-osflM202003g10b1
attcaccgcactctctcttctccgctcctcctccgtcgatcacgcgctccgcatccgcatcgccggcgacgatgaggacgtcgcgtgcggcggcggcggcggcatctctgccgctgctgctgctggtggcgctactcgtggcggcggaggggaggaggcacaaggacggcagcggcgacgaggaggcgaaggcgtgcgacaaggggtgggagtgcagcgggagccggttctgctgcaacgacaccatcaccgactacttcaaggcgtaccagttcgaggagctcttcgcccaccgcaacgaccgctcgctcgcccacgccgccgggttctgggactaccacgccttcatcaccgccgccgcgctcttcgagccccgcgggttcggcaccacgggagggaaggaggttgggatga

SEQ ID NO: 32386 - DNA, 268 bp, Oryza sativa
  Clone ID: uC-osflM202003g11b1
gacccacgcgtttcgattgaaccaaccccgaacaaacaaaagggaaatttttgatcaaactggcctgacctccgcagccaaaaagccaatgcccatatctaaacatttaaaaaaattccatactcattcaaattgggtatatactcaacttgaaccttggagcccatactccatgtagcaccagttaactcaaattttatttatttgagaagcccgacattgatgtctgagcgccactttaagttaacaaacaatacgttcgtgcagc

SEQ ID NO: 32387 - DNA, 529 bp, Oryza sativa
  Clone ID: uC-osflM202003g12b1
cttatggcgagagtgagagagatggtggagatcccggcgatcgacctgcggctggccggcggcggcggcggcgcggaggagacggcgaggctgcgcgacgcgtgcgcgcggctgggctgcttccgggtgtcggggcacggcgtgccgccggggctccaggccgagatgaaggccgcggtgcgcgcgctcttcgacctccccgacgacgccaagcgccgcaacgccgacatcatcccgggcagcggctacgtcccgcccggcacagccaacccgctctacgaggccttcggcctctgcgacgccgccgcccccgccgacgtcgacgccttctgcgcccgcctcgacgcgccgccccacgtcagggagaccgtgaaggcgtacgccgagaggatgcactcgctgatcgtggacgtcgccggcaaggtcgccgcgagcctggggctgcacggcgcctcgttccaagactggccgtgcccgttccgatgaacaggtacaactacacgcaggacttcctgggctcccccggcgt

SEQ ID NO: 32388 - DNA, 410 bp, Oryza sativa
  Clone ID: uC-osflM202003h01b1
ctgttcgtttccaccacaggctacgcaaaattctctcccttcctcctccaccacctccactccgacgatcctcctcctgatcctgtgccggccggcgatggcgtaccggttgctggagctcacgctggtctccgcgagcgacctcaagaaggtcactctcttctcgcgcatgcatgtctacgccgtcgcctccatctccgggagcaacgtccccatgcccatgcacggcacccacgccgaccgcaacggcggcagcaaccccgcgtggaacaccgtgctccacttccccgtccccgcccgcttcgacacccgcggcctcgccctccacgtccagctccgcgcccggcgctccttcggcggccaccgcgacgtcggggccgtgttcgtgcccttcaacaacctcctcgccg

SEQ ID NO: 32389 - DNA, 419 bp, Oryza sativa
  Clone ID: uC-osflM202003h07b1
acccacgcgtctcattctggacacgggccagatgcttgacttgcgggtggcgctggtccttggctaacgggcacgtcgaaaggaaagatgacccttctctagaccagattcgctgctgagtatgatggaaaatgcgcagttttgcttactaaactgggtgacacctggccagcaaggactaaatggacagggcaccaactgacacacgattatggtgaagttccctttaagatatctcacagaagccctcacaagataaacatgaaactaaaagatgatgttttttacatggaactccagcatgacgaagatccactttacatatttgatgataagatgggagaatcagcacctacactattggaagattacagtgtccctcatctatttcaagaagatttctttgaaatcatggatta

SEQ ID NO: 32390 - DNA, 435 bp, Oryza sativa
  Clone ID: uC-osflM202003h08b1
gggccccgattccgagttcgagccacgcgccacgcctaggattgcttgcatccatccttccatgtcgcggcctcatcaggtggcactatgctggctcacacactggagacctctctatactgggagcgagctgacaacggtgcttgctgcctggatcactagacagattcagtgctgaaccgtactgctatgtcaccgacgcatgcactgatgagccgatccagcacggcggtggacgcgaagtacaccaagtatactcatcaatggcaactgcacagatgcactatctgggaagacgctctcgacggtggatgctctcactgcatatggcattgtccctacgaccataggctacacgtatgactataactaggtcacctccgtcgaccgccgggacatataataggtccccatgacgccgatgaccgcctacga

SEQ ID NO: 32391 - DNA, 193 bp, Oryza sativa
  Clone ID: uC-osflM202003h10b1
gcggaccggccggaatccggacgacccacgcttcgatcagcccagcaccgccaccgggagggcgagacaaggaccggaagccagccccaaagggaaccgcaaggacgcgacaacgaaggaggagaccgacggggagaagaacgaggcgagcaacagcgcaggcgccgacgacgccgggccaaggagcgcggga

SEQ ID NO: 32392 - DNA, 300 bp, Oryza sativa
  Clone ID: uC-osflM202003h11b1
tctgtttttgcggccaagcgcgacagaccggtggtagatttataaatactgcacctgcgatacgattccgtcaccgaatactttgttttcttgcagcaatttagtcgccgttagggcgggtggtatcgtggccatggcggtctccggtgcggcgcattgagcccagcgtgcgagggggcatggatctggaggccgtgcatggcgcggctgcggcgccagggaagcataggaggaggagggcgagggagtcatggggagcgtcgttgctgctcgcgtaccagagcctaggggtggtgtacg

SEQ ID NO: 32393 - DNA, 452 bp, Oryza sativa
  Clone ID: uC-osflM202003h12b1
ctttctcctctcccggcagcggcggccggcggcggtcggtgacggtggagggcggcggcggcgcgctcctggcccctccctcccatatctggccggaggggggcggggggagcacggcggcgggcggtggtggcgaggagggtcgaggcggcagcacgaccacggcggcgagggcggttgaggcggcggtggctgctcccggccgcccctccctcccagatctggagtgacgacggtgggccgtggccgtgcagcggcggcgcggacgcaggtgggccgcggccgtgcggcggcgacggcggctcccggccgcccctccctcctagatctggagtgaccacggcgggccgtggtcatgcggcggcggcgtggacgacggcaggcggcggcggctcccggccgcccctccctcccagatccacgttgacgacagcgggccggggcccggcggc

SEQ ID NO: 32394 - DNA, 274 bp, Oryza sativa
  unsure (1)..(274): unsure at all n locations
  Clone ID: uC-osflM202005a01b1
aaaaaaaaaaaaaaaaaacccccaaaaagagggcccnaccccaacaaacaanaaaaaaaagaanaaaaagaaaaaaaaaaaaacaaaagaaaaaaagaaaaaaaaaaacaaaaaaaaaaacaaaaagacgaagaaacaaaaaaaaacaaaaaaaaggaaacaaaaaaaccaaagaaaaaagaaacaaaaaaaaaaacacggaggccaaaaaaaaaaaaaaacgaacaaggaaaaaggaaaaaaaacaaacaaaaaaaaaaacaaaaaaacacaa

SEQ ID NO: 32395 - DNA, 308 bp, Oryza sativa
  unsure (1)..(308): unsure at all n locations
  Clone ID: uC-osflM202005a05b1
cataccttacctcacctcccgataaggcacgaggagactatctcctccccctcctcctcctctccccgccgacgaccccgccgagctacatctccgccgtgctgatcgcgtggagccgaggagaggagcggcggccaacgctacgaggagaggagagtgggggaggggaggggagcnaaccttatcttacccgctccgccgaagcctatggactcggagcactggatctcgggcctggccgccgccaagcggttctacgccgggcagctcggccacgcccaacgagcggggaaggaggaggtggacat

SEQ ID NO: 32396 - DNA, 230 bp, Oryza sativa
  Clone ID: uC-osflM202005a09b1
tcgactgttttaaaaaaaagaagggagcgccataattttatcccgccggttgataacaaagactgaccatgcaaaactaactaattatctacacacacataactaacttgggtggatagagatagattgatactcacttttttagtcagaggcgggcacgcagctacctttgtatggaatggcatgcctggcgcaggcggcggccggcaggtaggtccgccagtgagggg

SEQ ID NO: 32397 - DNA, 192 bp, Oryza sativa
  Clone ID: uC-osflM202005a11b1
ccggaccggacttcccgggccagacccacccgttttgtttctcgcggacaacaagagagggaggggtatttttaggaccaccggcactgcctcccgaggtaggagcccccccctgctttacctcctctcctccggcgtcgctgaggcagtcagccaagtcgtcccagcaagtggaaggctactagacccggg

SEQ ID NO: 32398 - DNA, 304 bp, Oryza sativa
  unsure (1)..(304): unsure at all n locations
  Clone ID: uC-osflM202005a12b1
cacgcgtccgctttccatatctcgcggccaacnagagagggagagggagtgctaggaccaccgccactgcctcgggaagtaggtggcccccctgctttccctcctctcctccgccgtcgccgaggcagccagccaagtcgtcccaagcaggtggtaggctactagtccgggtggccggcagtgagcaggaggaatcatctctggcgttcttggctccgaggaactttgattctttctgggaggggatttggggtgcctgtgctgctccagatgctttccaccaacagggacaagccccaacaga

SEQ ID NO: 32399 - DNA, 412 bp, Oryza sativa
  Clone ID: uC-osflM202005b01b1
gttagcgtaggagaggagaggagatcagggggaggaagggtggccggcgcagcagatcggggcgggcggatttaggggaggagcgcgctagccgggagcggcggcgatggatgaggagtacgacgtgatcgtgctggggacggggctcaaggagtgcatcatcagcggcctcctctccgtcgatggcctcaaggtccttcacatggacaggaacgattactatggaggagaatctacatcccttaatctcactaagctctggaagagattcaaaggcaacgagaccgctcctgaacatctgggtgtcagcaaggagtacaatgttgacatggttcccaagttcatgatggccaacggtgcactggtccgtgtactcatccacacgagtgtgacaaagtatctgaatttcaag

SEQ ID NO: 32400 - DNA, 336 bp, Oryza sativa
  Clone ID: uC-osflM202005b02b1
tttaagtgttcgcagatagccgctccatgatattctgatttgttggtgactaggaactggaactgcccctcccagtatacggagtaccaatctgtttcttgagcacatgtttaaacatagggacatcgatgtagatgatcgaacaaagtgcttcgggaccgttaccaccttacttcacgtgagtgatgctgaattatgcagggaaccttacatgggagacttgtaagccccattcagcgagcaaacagtacaaggaaaacctccaccccaaggccgccctctatacccacaacgactgccgtgccgcccaccttctacaggccgactggactattt

SEQ ID NO: 32401 - DNA, 501 bp, Oryza sativa
  Clone ID: uC-osflM202005b05b1
gttgcagtagaaaaaccccttcttgcccccgccctccgccgccgccgccgccgaggagccggccgtccgccgtctccctctcgcccgtgggcgtcagacggcggcggaggcgcccccccctccttctgctgctgctgggatggcctcgagcgccggaggggacccgccgccgccggggctcttcgctgctgccttacacgcttgtagtggtgcaagcgcacttgtagaacatatacatgctgatgatagcaacaccatttcagataataccctggaacagttgggttttctagaccaagagtcaaatgatgcaagcgttaacacagaaaagatacaatcaagcacaccaaaatgcaaatcagtggaagacataccaatagcaccagctgcaaagagatgtaagaacatggatttccagaaacttgtgccaaacagcaataacaattcatgtctcactgccagccaggctcccagaaagcttcccagtaagggggactaccc

SEQ ID NO: 32402 - DNA, 525 bp, Oryza sativa
  Clone ID: uC-osflM202005b08b1
gtataaaaaaaggaaaagaaaagaaaagaaaagagagagaaggtgtggtggtggaaggaaccctagcggcggcgaccggctccgatggcccctccaccgccgtctccgtccccatctccggcgagcggcgcgcagtacgcgcaccagttcctgaacacggcgctctcccagcgcgggccctccgccctgccctacgcggaggacgtgaagtggctgatccgcaaccacctcgtcgccctcgccgacgctttcccctcgctccaccccaaggccgccctcttcacccacaacgacggccgcgccgcccacctcctccaggccgacggcaccatccccatccaccacgccggcgcctcctacaacctccccgctgtcctctggctcccggagccctacccgggcggccggccctcgtcttcctctccccaacacgcgacatggtcatcaagccccaccaccccctcgtcgaccgctccggcctcgtcgccaacgccccttacctccgctcttgggttttcccctcct

SEQ ID NO: 32403 - DNA, 534 bp, Oryza sativa
  unsure (1)..(534): unsure at all n locations
  Clone ID: uC-osflM202005c03b1
cttcgacttcgcggctgcgcacgtccgcgtcttcgaggcgccggaggcctccggccggcacctctgcgccgagcgcgtcctgcaccgtgaggacgtcgtccacatcctcggcaagctcttccccgagtatcctgtgcccacaaggtgagtttctgtatgtgtgctagtgatctgtaatccatctcttgatctgcccatgcccttgcatgttaatcagttgtgtagatactagtagatatatagatagcttagcttcaaaaaagatagtactagattatgccgcttacatgcttaggacattttcattgctttagttaagcatttagcacttgtatgctcctgcccccggcacctataacttccacctctgtcgattaatgcatcaaacacaaacacatgttacaagtgatattcctatttttttttcctagatgctaggtgtagtcctataaatgtcttactaaggatatggtttttcatcccttaagcaatatcccttggtttctaatgtcattntcatatattcatgaaaca

SEQ ID NO: 32404 - DNA, 531 bp, Oryza sativa
  Clone ID: uC-osflM202005c08b1
tcgtttgcggcagcaggtgatggtctttctgagttccagaagaagatctttgacgttctgtacaaactcgctgacattccattcttggaaccctacaagactaagatcattgatgtaattgagaagggagagaagcagcccaacatcaccattggaattctggtctccatcgttgtcgtctttgtgactgtgctcttcaggatcctgttcggcggcaagaagccagcggctcctgtgaagcccgtagccgaggtcaaaaaaccaaagtctaccgagtccgaagcagctggaagcagcggtggcaaggaggacgagaaggaagaggaagagaaggatggagctgctgccccacgccggaggtcccgaagggagacatgagacacaacataagcctttgattttgacgtcttatcgcggccattttggcggctgcttttttcctttttcgagaacttgggcttttatgttttttgagtgtataataggagattcatgtcgcctatgctccctgcagatgatgatttggtaccc

SEQ ID NO: 32405 - DNA, 440 bp, Oryza sativa
  Clone ID: uC-osflM202005c09b1
ttcagatccaccaccaacacccgcggtcgccggcggccaccgcgcgcgccatggccgcgccagcgacgccgcggctactcctctcgccgacctccaaggacctcatcgccgccgcctcctcctccttcccgtcgccgccctccccgacgacctcttccgatcccgcctccccgctcgacgccttcgcctccgacccggtcctctccgcgttcctctccccgtccttctccccctccgacttctcctccgccgcgctctcctcgggcctcgccgcctcccgcgccgagcagctgcaggaggccatccgcctcctccgccgccacctccgcgccgaggtgctccgccgccacccgctcctcctctcccacctcctctccctacgatccgcctacggctagctctcctccctaccctaccacctacacctactctgctccacc

SEQ ID NO: 32406 - DNA, 451 bp, Oryza sativa
  Clone ID: uC-osflM202005c12b1
tcgcctccccacgccgcgagatctcgcagcaatggcggcgccgcgccaccaccacctcgccctcgccgtcgccctcgccctcctcgtcgtcaccgccgcggcggcggacgaggggggaccgcgggggaggcgggtgctggtgctcgtggacgacctggcggtgcggtcgtcgcactcggccttcttcgcgtcgctccaggggcgagggttcgatctcgacttccgcctcgccgacgaccccaagctctcactccaccgctacggccagtacctctacgacggcctcgtcctcttcgccccctccaccccgcgttttggaggatcagtggaccaaaattcaattctggaattcatcgatgctggtcatgatatgatcctggcagcagactcttcggcctctgatcttatccgaggcattgcaacagagtgtggggttgattttgatgaggat

SEQ ID NO: 32407 - DNA, 535 bp, Oryza sativa
  Clone ID: uC-osflM202005d03b1
cttctttttctagggtttcacgccctccgatcccgcggcggcggcgaagcttccactcgcctcggcggcggcgccggccagggacatgggaatggaggctgctggaactgaggctgcaccagcagaggttaaagtaactgatggagaagtgaaccttttccaagagaatgaaagtaaagcaactgccaaggaacgtgaggaggcggttctttttggttcagataacagcacagctacagcaaatggagccgcaaatggcgctgatttggcacccccaaaggatgcagaggaggactggcctgaagctaggaaaacacatagcttcttctttgtcaagatccgcttacttgaggaccctaagctgaaaatgaagattgatcaggcagaaaaggacttccagaagaagattcaagctcgttctcaaatttttgaggctataaaagccaagaagaatgagcgcttcggtattatctcagagctgaagccattggcttgtgagaacaagcaatacaacgaagccgtaagtgagaagttg

SEQ ID NO: 32408 - DNA, 483 bp, Oryza sativa
  unsure (1)..(483): unsure at all n locations
  Clone ID: uC-osflM202005e01b1
gtctcgttgtcgcaaccaccgccgcctcgccgcagcatcacccgcagccgccgccgccgccgccatggactccgtcgcgtcgtgggggctgaccccgctcgccgcggccgacccgctcgtccacgacctcctcgagcgggagaagcggcggcagcggagcggcatcgagctcatcgcctcggagaacttcacctccttcgccgtcatggaggccctcggctccgcgctcaccaacaagtactccgaggggatgcccggggcgcgctactacggcgggaacgacgtcatcgacgagatcgagaacctgtgccgcgaccgcgccctcgccgcgttccgcctcgacgccgcgtcgtggggcgtcaacgtgcagccctactccggctcgccggccaacttcgccgnctacacggngcttctcaacccgcacgaccgcatcatggggctcgacctccccttcgtggccacctcacccatggctactac

SEQ ID NO: 32409 - DNA, 467 bp, Oryza sativa
  Clone ID: uC-osflM202005e04b1
gatcaggagcacgcaaggcgcgcggccatggcgtcggagaccgagacgttcgccttccaggccgagatcaaccagctgctgtccctcatcatcaacaccttctactccaacaaggagatcttcctccgcgagctcatctccaactcctccgatgcattggataagattaggttcgagagcctcacggacaagagcaagctcgatgcgcagccggagctgttcatccacattgtccccgacaaggctagcaacaccctgtcgatcatcgacagtggtgtcggcatgaccaagtcggacctcgtcaacaacctcggtaccatcgccaggtcggggaccaaggagttcatggaggcgctcgctgctggtgctgatgtgtccatgattgggcagtttggtgtcgggttctactccgcctaccttgttgctgagagggttgctgtgaccaccaagcacaacgacgacgagca

SEQ ID NO: 32410 - DNA, 480 bp, Oryza sativa
  Clone ID: uC-osflM202005e08b1
tcgcttcaaaagagcagcgtcgcctctcctcctcctccctaacccctacgcttccagaaccttctcgaagctcccgctcccccccccttccgctccaatggcgaaggaaccgatgcgcgtgctcgtcaccggcgccgcaggacaaattggatatgctcttgtccccatgattgctaggggtgtgatgttgggtgctgaccagcctgttattctacacatgcttgacattccaccagctactgaatctcttaatggccttaagatggagctggctgatgctgcatttcctcttttgaagggaattgtcgcaacaactgatgttgtggaggcctgcactggtgtgaatgttgcggctatggctggtgggttccccaggacggagggaatggaaaggaaggatgttatgtcaaaaaatgtctccatctacaaatcccaagcttctgctcttgaggctcatgcagcccctaactgcaaggttct

SEQ ID NO: 32411 - DNA, 526 bp, Oryza sativa
  Clone ID: uC-osflM202005f08b1
ttccgcgctgcgtcagccgacgaacccaccgtggccacgcccccggaggcatcgagggcagcacagttgcgccgcgccgacggtgccggacgagcagccgaccggccgtcgaccagtggctcccaccgagtccaggttcctcccgcggcgccacccaaaggcgcagccgcgcgaggtaccccgggcggcggctgcggcaagtgagcagtatgaaagcattgaaaaaaaaactcctttgctgggccggtggaaaaaagaacaagtacattgagatgttcttgactccagaggatgcatttgagctggctacaaaagagctacagcatactgctgtgtccaggatattattgatttgaagaaaggctatttgaggcatgctgcttgtgatgggacacattttaagcttatactccactatgcccctttacacgtgccaggtgtgatccattgtgagttcttgtcaataagctaattgagtatttattcatatcatgggctcattgctaatctagttttggatatgagt

SEQ ID NO: 32412 - DNA, 514 bp, Oryza sativa
  unsure (1)..(514): unsure at all n locations
  Clone ID: uC-osflM202005f09b1
tttcttcagtatcgaatcctctcttctcctcgtgcccaccaccaccaccgtagcaatggcgggcaacgggccgatcaacaaggaggacccgctcaactggggcgcggcggcggccgagatggccggcagccacctcgacgaggtgaagcgcatggtggcgcagttccgcgagccgctggtcaagatccagggcgccaccctccgcgtcggccaggtggccgccgtcgcccaggccaaggacgccgccggcgtcgccgtcgagctcgacgaggaggcccgcccccgcgtcaaggccagcagcgagtggatcctcaactgcatcgcccacggcggcgacatctacggcgtcaccaccggcttcggcggcacctcccaccgccgcaccaaggacggccccgccctccaagtcgagctcctcaggcatctcaacgccggaatcttcggcactggctccgatggccacacgctgccgtcggagacggtgcggncggncatgctcgtgcgcatcaacacc

SEQ ID NO: 32413 - DNA, 524 bp, Oryza sativa
  unsure (1)..(524): unsure at all n locations
  Clone ID: uC-osflM202005f11b1
ctcgaggaagcaacgcctcccttgggaaaggaagagagagattttctcttcctctcgccgccgccgccgccgccgccgcggcgccggccatggcgacctccggcggcgaggacccatccggctctgcctcgtcgtccgccagcgcgctcgactccctgcccttctcctccgggaacccacgcatcgaggagacccgcggcgtcgtcctcctccaccccgaaccacccgccgcctcgtcctcgtcccttctcccggtggggaggaagccgcgggtgtgcgtgcctggcgtgcccaaccacctgacctacgccgacttcggccgcttctgcgcatcctgggcctcccacatcctcgagacgcgcatcatcaggattgatggggtggaggatcagtacggcgttcttataaaattcgacactcagagcttcacggatagcttctacatgagctntaacgggaatcggttctcatcactggaggggaatggttgccgtgttcgttttgtggagaacgtcactacactc

SEQ ID NO: 32414 - DNA, 419 bp, Oryza sativa
  unsure (1)..(419): unsure at all n locations
  Clone ID: uC-osflM202005g03b1
cttaatttaatttctctcttcatcatcatctcgctctcgatctcctacagaagctacaatagccagcaaatcaatcgatcgatcgatacgtgcaatggcggccatgaaggtgaacaagattgccgtggcggcgctgttcctcgtcgccgtggtggtggcgggcggcgccggcgctagcgcccacgtcggggttggggctggggccggggccgacgccggcgtcggtgccgccgtcggggccggcgctgacgccgccctcggggttggcgccaacgccgccggcgccgncggggctggagttggggctggaattggagccgccgccaacgtcgccgggtctctcaccggcgccgccgagggcgccgaccgcgtggcacccaaagtgcatgtgtgagaacgatcgatcgatcgaagcgggc

SEQ ID NO: 32415 - DNA, 500 bp, Oryza sativa
  Clone ID: uC-osflM202005g06b1
gtctagggttccgccgctcctccggccgccgccgccgccgccgccgacccccctcgatctcctccccgagccgccataggtggtggcgggggcgggggagctagcatccgtccgtcaacgcacatcgtcactgctgcttcctgaaatctgccaccatgtccgacatggagtccatggctacacttatggagtccacaggctccaagctgcagcagcttcagcgtgcatttgcagagctcgagagccagagcgctgtttccttgaacttaaagtggaagcaactggaggaccatttccatgggcttgagcagtcgctcaagaaaaagtttgatgatctgaaaaggcaggaagaggagttcgaggagacggttgcaaagtcagagcagatgctggagcaacaagaggctgttgtcgtggcaaaggaactgacttctcttgaaaaactgcagcagaaaagggatgccgcgttggctgtgatctttggcaagtccaagctgaac

SEQ ID NO: 32416 - DNA, 412 bp, Oryza sativa
  unsure (1)..(412): unsure at all n locations
  Clone ID: uC-osflM202005g08b1
tcggttcttcccaacttcgcaagacgcgattcaatggtggacgagattggagcggcaaagaaggggtgaagagtgagttcttggtcaggttcgtagtcagtatgcctgaatcgagctcagatcctaacaacgggagaggaaagtcatccaagaggaatctcccttcttggatgggttcgaaagacggggaggaaaatccaggcaagaagaagcacatggccacccacgagaaggtgcagaaaggatcggatttctccaaacttttggatggngtggtctttgtactttcagggtttgtgaaccctgaaagaagcacattgcgctcccaagcattggatatgggagccgagtatcgacccgattggacattaaattgcacacttctcgtttgtgcatttgccaatacccccaa

SEQ ID NO: 32417 - DNA, 402 bp, Oryza sativa
  unsure (1)..(402): unsure at all n locations
  Clone ID: uC-osflM202005g11b1
tcgccttcttccccgccgtcccgagaaaggaaccggaaaaaaaaaatccccaattccccctacgccgagcagcggcgtgccggcaatgtccctccgcaagcgccagcgttcggcgagcagctcccgcctcagcaccctctcctcctcgccggctccccacaccgccgccgccgccgcctccgcctcctcccctccgctctccttccccaacgccgacctcgtcctccgcctccacctcgacccctgccccgacgacgacgcggacctcgacgcccggcgaggatcaccgcccttccttngacttcaaggtttcttgggggtccttgttcggttccggttctttggcggtcttctcttcgaccggtggagccccgcccccaccttcgccgcgggggggacggg

SEQ ID NO: 32418 - DNA, 461 bp, Oryza sativa
  Clone ID: uC-osflM202005g12b1
tcgtttatccctccttctccttcctccgcctccgcgggcacgacgcaaggccgcctcgcgccgcccctggtcgaggatcgatctccccttcccctcctcggctcccgtctccttcgcccgcttgccggcagcgccggtctccgtcccgcgagctgcggtggtgccgccgtctctgtccctgctgctgctgctgcttccgccgccgatctggaagcttgtagcagtttatgtgttccccagaaagtttgggggttcaactgaccccttgcctgaagggagggagtatttgattcttgaagaagagagagagagagagagtatttgattcttgaattctactagtttggaaggaggggagctgcgttattattattattattattattattattattattattattattattattattattattattattattattaatatcattattattatttttggttcg

SEQ ID NO: 32419 - DNA, 353 bp, Oryza sativa
  Clone ID: uC-osflM202005h02b1
cttcttttttccaccgacctcgatctcgcccctccccccacgcgcgcgatctcgcccagatctcgctgagccgccgccgccgccgcagcagcagcggccatggagaacctgatctcgctcgtcaacaagctgcagcgggcctgcaccgccctcggcgaccacggcgaggagagcgccctccccaccctctgggactcgctgccggccatcgccgtcgtcggaggccagagttcgggtaaatcctcggtgctggagagcgttgttgggaaggatttcctaccaagaggctcaagcattgccacccgtcgtccctggggctgcagctcataggatcgaccgagacagagaatatg

SEQ ID NO: 32420 - DNA, 311 bp, Oryza sativa
  Clone ID: uC-osflM202005h03b1
gaccggaacggcaggcacgacccacgccaccgtttaggtagtccaccaaccgcaacgcaaccccgggagggtgaagaagaagcccgaggcggagacggccccccaacccacggggcggacgacacccgggcacaggccggcaaggccgccgccaaggcggaaggcgaggggcgcaaaaccaggcgcaaggaagcagcgaaacgcaagcagggcccacagggagaggagggggacggcgacacacgccggctacacgggggaccggagaaagggacccaacgaggcaaccagaccggaaaggaacccggaac

SEQ ID NO: 32421 - DNA, 483 bp, Oryza sativa
  Clone ID: uC-osflM202005h06b1
gtacgggttgcgccgctcccgctgccggcgccggcggcggcggcgaggcgactgaatgtactacaggagccgacataggtggtgcaggtggcgggggagctagcattcgttcgttaacgcacatcgtcactgctgcttcctgaaatctgccaccatgtccgacatggagtccatggctacacttatggagtccacaggctccaagctgcagcagcttcagcgtgcatttgcagagctcgagagccagagcgctgtttccttgaacttaaagtggaagcaactggaggaccatttccatgggcttgagcagtcgctcaagaaaaagtttgatgatctgaaaaggcaggaagaggagttcgaggagacggttgcaaagtcagagcagatgctggagcaacaagaagctgttgtcgtggcaaaggaactgacttctcttgaaaaactgcagcagaaaagggatgccgtcgtggctgtgatctttgc

SEQ ID NO: 32422 - DNA, 451 bp, Oryza sativa
  Clone ID: uC-osflM202005h10b1
tcggtgataacagcaaaaaaaaatcaaacaaaaagaaaaaatattccccatctgtgaaattcgcaaaaccctagcgcggcggcgatgtcgaacacgagggtgttcttcgacatgaccgtcggcggagctccggcggggcggatcgtgatggagctgtacgcgaaggacgtgccgcggacggcggagaacttccgcgcgctctgcaccggcgagaagggcgtgggcaagagcggcaagccgctgcactacaaggggagcaccttccaccgcgtgatcccggagttcatgtgccagggcggcgacttcacccgcggcaacggcacgggaggggagtcgatctacggcgagaagttcgccgacgaggtgttcatgttcaagcacgacagcccctgcatcctgtccatggcgaacgccgggcccaacactaacgggttccagttcttcatctgca

SEQ ID NO: 32423 - DNA, 418 bp, Oryza sativa
  Clone ID: uC-osflM202005h11b1
tcggttgtgcctggctccccgcctccgccggtcgcctccgccgccgcctcctccggtgccgccggggatcaccggacctacagcaaccccgcgttccaagtttccgggagcatcgaggaggcatggtacgactcgtttgccatgagcgagtcggacggggaggacgatttccacagcgtgcaagatgatgctttttcgttgaatgggttcgagaacgatgcggcattgagcacgagagatgccaatggggggagcttcaacggaagctcacattcatcggagcagcactacagaaagccgaggtccagcgagctgtcaagggggaatttggagaatggtgtgcggtcctctgtgagccatgaggatgtggcaagtgtttcagctgaggatagtgccacggcggtggaggaaggatact

SEQ ID NO: 32424 - DNA, 523 bp, Oryza sativa
  Clone ID: uC-osflM202005h12b1
tgttcggtttagaggaggaaagttctcttcggagtttagttgaatcacttaaacaagagttagaagctgttaaggaggagcatgatcaattgaaacagaaggatacagaaactgaatccatagttggagacctacatgtgaagcttcagaaatgcaaatctgagcttgaggcagccgtagctgctgaatcaaaagcaacgtcagcttctgatgacttgatgttggccctccaacagttgtcttccgagtcaaaaaatgccctgcaggaagctgaagtaatgcaaaagagtgctgcagatttaagggatgaagctgaagctgcacgagtagcattagcagaagctgaacaaaagttgcaatctgctttaaaagaagcagaagaggcaaaatcagctgaagcaaaggcccttgatcagatcaagcaactatcagaaagagcaagtgctgctcgggcctcaacatctgaatcaggtgcgaagataacattattcaaagaagagtttgaatctcttagccgaaaggt

SEQ ID NO: 32425 - DNA, 441 bp, Oryza sativa
  unsure (1)..(441): unsure at all n locations
  Clone ID: uC-osflM202006a03b1
gcgccttttatccgggacggcgtcgccgcagccgtccgggccgccgtggtggatgaagagagcaagaaggcgctcgccgccaacgccgggaagatgggggaggtggtggccgacacggagtgtcacgagaggtgcatcgacgctttcattcagcagctcaggtcctatacaacgacaaggactggttattagtacgtacctccattggacacatcatccctgcctaagattcgcatgtgttttattcagtgcttgccaagtttgctatattacaaggaaaatgcctcaaatcaggagcccgatgttggcaacccaaacctccttnacccntccattcttcgggcgccatcctcaccacgtgttcctgcgccgttcctgccacgtgtttccaaccactgaggccgttgtaataaaccgcctttgtaaagtgaatccttttta

SEQ ID NO: 32426 - DNA, 508 bp, Oryza sativa
  unsure (1)..(508): unsure at all n locations
  Clone ID: uC-osflM202006a09b1
gtgtttttttcagatagtttgcattgtaagccgaggggggttgtcatagatccatagggcttgtctagctttatggcacaatatgtgcacggggtgtaggcagctaccaagactaggttctaaaagactggggctatggttcaaaagaagcaatataattgagaactgatagctggataataattaaatactacataaactttcttaccacattgcatgatgcttaagggtttaaatgagcttatctttctataagaagtaaagtgggtcagcattatctgatagagaacattatcaaaacagcgcgatgcaatttttttaggacactgcaaattgacaactgatgttctcaaaatataactgcacaccgaacattaatgttgcattttgcattccatagatgtcaccctaatngntgtcttatgatgtcgtagaacaggaactgcagtggagatagttatgctggtcacgacatttctcatggtcccaataagctggtaggagggaa

SEQ ID NO: 32427 - DNA, 104 bp, Oryza sativa
  Clone ID: uC-osflM202006b02b1
ccttccatcacgctcatcgataggaggagagagagagagggaggtttgcacattgggtggtgtggttaaccccattattctcgagtacagaccccatatccacc

SEQ ID NO: 32428 - DNA, 340 bp, Oryza sativa
  Clone ID: uC-osflM202006b05b1
cggccgaattcccggtcacccaccctcgtaatatttctctcctacctttctctttcgggggggtttttaaaaatcagggggctctccctctcggcttatacacgagcgcttaaaccctctccacctttctatacggctcctaactcttatttctcctctatctaacgattgttctcgtcgccctacatctccactcgccatgggcaagattaagatccgaatcaacggtttccgaaggatcgggaggctcttggccacggtggccctccaaaacgaggatgcctagctcgtctccgtcaacgaccccttcatcacccccgactacatgacctacatgttc

SEQ ID NO: 32429 - DNA, 530 bp, Oryza sativa
  Clone ID: uC-osflM202006b10b1
cgtactcgtgggtaacgatgaagctttctttgcttggaaagatgatccaacaaactatgagaatcaactcgaggagctgaaggctgaaagagtatccaagtggctctcgcgtctcgctgaaagccctgatgtgaaagctttgccaaatggtctttcaattgttcttaacaagatgaatccttcaaagagggagcaggttattgatggtctcaggcagcttctgggttgaccaatgtgaattttgatatccagcatgaaccaaacagaatcatactcaaacgctaacactgaagtttaattgggctatcattgatgcaatggaagaggctttttgcacataaaatgggaggttttgagatggcatctcaagaaccatatacatacaaggatatgattgggcctctgccctactggatgtttggtgtgagttcttgcaaagagcagaataaagagcaatgcacagattagtcaggcacggcatggttgtcccattgtagtgatggaattaggatgtatttactagcattttt

SEQ ID NO: 32430 - DNA, 529 bp, Oryza sativa
  Clone ID: uC-osflM202006b12b1
atttttcttgcctatctaccccgaccaccgcaaccgggggtccattacaaaccctagggggcctcacctcatccgctgcgatgcccagacactctgcctctcgcacgcgtgtcatggccgcgagagctcttcccgtatgggccatctagccccacgcacagagcagcacagatcgcccatggaggctaccccggcggcgccgaccgactcatgggagaccgccgacctgtacgagcccatgagccggctccacctaccctgcgcgcgccgggactgctactctcccgacctcggcgaccccgatgccgacgaccctgagcacccgtggctcggtcgccccgattcgggtgaccagctcgatcagctcctccgggaggcgctcgagaagcccagggagcggctctctgtgctaaggatggagcaagacattctgagttcattcatgaccctactcagacagaggttgacttccatggtcttctacttcttacctgcggcttgctgcacaatggggtgcacagcattattt

SEQ ID NO: 32431 - DNA, 394 bp, Oryza sativa
  Clone ID: uC-osflM202006c05b1
ctggattgttccctgaagttcttcaaaagattggtcaggctatgtcaattaattttccaggagatgctgctacttccactacattgtctggacctgaagaaactgaagaggatggtggagatgatgatgagtccatttgtccatcatactgccagtgttggcgatgcggagggtctgaagaaagctttagaggatggagcagacatggatgaagaagacgctgagggaagaagggccttacattttgcgtgtggttaccgtgagttgaaatgcgcaaagatccttctggaggcaggtgctgctgtaaacgcactggataagaacaagaacaccccactgcattacgctgctggatatggtcggaaaggatgtgtggatcttctgctgaagcatg

SEQ ID NO: 32432 - DNA, 430 bp, Oryza sativa
  Clone ID: uC-osflM202006c08b1
atcggcgagcagaagaagagcagaggctgagctagcaggcgagagagatcagcgagcaggatggctggggctgcagggtcgccgtggtcctctctgctcctcgcagcggtggcggtggcgctcgccgtcgccgcagcgccgctgctcgccggcgacccggactacctccaggacatctgcgtcgccgacctcaactccgaggtgaaggtgaacgggttcccgtgcaaggcgaacgcgacggcggacgacttcttctccggcgtgcttcgccagccccggggccgccgccaacaccaccaccggcgccgtggtcaccggcgccaacgtcgagaaggtcccgggcctcaacaccctgggcgtctccctcgcccgcatcgactacgcccccggtggcctcaacccgtcgcacacccacccgtgcgccaccgag

SEQ ID NO: 32433 - DNA, 576 bp, Oryza sativa
  Clone ID: uC-osflM202006d04b1
ctcatgttttactcgagcaaagaaggagagagcttggtgagctgcatagatggccccctccgtgatggcgtcgtcggccaccaccgtcgctcccttccaggggctcaagtccaccgccggcatgcccgtcgcccgccgctccggcaactacagcttcggcaacgtcagcaatggcggcaggatcaggtgcatgcaggtgtggccgattgagggcatcaagaagttcgagaccctctcctacctgccaccgctcaccgtggaggacctcctgaagcagatcgagtacctgctccgttccaagtgggtgccctgcctcgagttcagcaaggtcggatttgtctaccgtgagaaccacaggtcccctggatactacgacggcaggtactggaccatgtggaagctgcccatgttcgggtgcaccgacgcccccaggtgctcaaggagctcgaggaggccaagaaggcgtaccctgatgcattcgtccgtatcatcgggtttgacaacgttaggcaggtgcagcttatcagcttcatcgcctacagcccccgggctgggaggagtctggtgcaactaact

SEQ ID NO: 32434 - DNA, 527 bp, Oryza sativa
  Clone ID: uC-osflM202006d11b1
gtgtcttgagctttcctgggaggcagcaacagagagatttgtcagggttgctgatattgcaccaatcatgtctatcaagcagcattctccctctccccagtatttcatgtatatatctccagatgaactgaagaagaacatggaggaggcgtcggcattttttcataatgcgatttctgggtttgaaacggcccgttgtgtttttggtgccataccgaatactctgcagcctgatgaacagcaatgcaaggaacttggctggaggctccaggaatgacagtcatttcttcccacgctgttgtcaatgacaatagaatgccaactaacagcccagggaacttggcttggggaactaactacgtaacgcaattatcttttgctccaaaactacgaaagactgaacagacaagggtgattcttgttttctgctatggtggtacactggtattgcaattctccttacaattgtgagtgtccatcagacatcagttactgtaatgcatcatatcttggaattgtaaatgtgc

SEQ ID NO: 32435 - DNA, 570 bp, Oryza sativa
  Clone ID: uC-osflM202006d12b1
gcgtgttataaataaacaaaatggtgaagttgtggggggtaagataatgaagaggaaggattattcttttgaggaatgcatgagtctacgtgaagtaaagtctttgcggcgcatgaatcaccctaacatcgtgaagctcaaggaggttataagggaaaatgacatattatacttcataatggaatacatggagtgcaatctctaccaacttatgaaggatagagtcaagcctttctcagaggcagaagtccggaattggtgctttcagatttttcaggctcttgcatacatgcaccagaggggttactttcatcgtgacctgaaacctgagaatctgttggttagcaaagatgtcataaagctggcggactttggtcttgcagggaagttacatccgtgccaccatacacagaatatgtgtcaactcgctggtaccgagcacctgaagtattgctccagtcatctatctatgattctgcagttgatatgtgggctatgggtgccataatgggccgagctgtgacacttcatcctctttttcctggcacaagtgaggctgatgagattctg

SEQ ID NO: 32436 - DNA, 437 bp, Oryza sativa
  Clone ID: uC-osflM202006e01b1
acgggtttttaaggcacatgaagccattcttaaagtggggaaccttgatagctttggtggggggccaaagttggatgaatgggtcgcaagagctacgttatttgatgcacttcaggatactgtgaggattgctatggttgagaagtatactggtctatctgattcatacctctctgtgttgaaggcactcttgcatgcttctgttgattgccgcaggaagcttcttgttgattgggttgcttctactgatctcgaagactccactgccattgaggcgcctgatgcttataaagcagcatgggatttactgaagggtgccaatggtgttttagtacctggtggctctggagatagaggtattcaagggaagattttggctgccaagtatgcccgtgaaaacaatgtaccatattttggcatatgccttggaatgcaac

SEQ ID NO: 32437 - DNA, 374 bp, Oryza sativa
  Clone ID: uC-osflM202006e08b1
catttttaaaaaaaagaaaaaaaacacaccatcactctctcgctccccatcgatcggagaaaatggcaaccgccgccgccgcctcacgcgccgccctctcaaggcctcacgccgccgccgccgaggggcgcgcgagccccgccgcgggggcgcgggtgacgctcccgcggcgccgaagcgtccgatccgcggagatctcgtcgttggcgtccgcggcggcggtggcggcgtcggagccggcggcggagagggtgacgctgggcgcggggacggacggggcgctgtggccgaagccggcggagctggaggcggagaagctgaacgaggccgggctggcggcgctgcgcggattcgcggacgtggagtgcgcgtac

SEQ ID NO: 32438 - DNA, 479 bp, Oryza sativa
  Clone ID: uC-osflM202006e12b1
ccgttgtggtggaccacgaggtggtgcgggtgctcggggactcttaggaagggaaggggggggagcgcctcctcctcgccgaccggcagctccgccacctgcccgagcagctcggccggatccccgggctcctcggcctcgacgtctcgcgaaatcagctcaagaatgtgccagatgccataggcgggctcgaacacctggaagagcttcgcctcgcttccaacgcgttggtctccctcccggactccataggcctcctcaccagcctcaagatcctcgacgtctggggcaacaagctgaggtctctccccgacagcatctcaaaatgcaggtcgctggtggagctggacgtgagctacaacgtgctgtcgtacctcccgacggggatcgggcaagagatggcgaggctggagaagctgtgggtgcacctgaacaagctggggtccctgccgtcctcagtgtgcgaaatgcgggcgctg

SEQ ID NO: 32439 - DNA, 201 bp, Oryza sativa
  Clone ID: uC-osflM202006f03b1
tgcattttgtgttttcgtgctcggtttcgtctcgtttttgctgatgacaatgttgtttgtttgatgcaggttgagtgagttggtgattatctgtagggggtgaaaatggcgcaggcggtggtgccggcgatgcagtgccaggtcggggccgtgcgggcgaggccggcggcggctgcggcggcggcgggggggcgggtgtgg

SEQ ID NO: 32440 - DNA, 555 bp, Oryza sativa
  Clone ID: uC-osflM202006f04b1
taactttttaaatgttcctccgacggcgttggtgaagatcacacactcaattttccatatcaattgtccggtgaacggcggcagtccagctcatgatcagaagcagcaggtttccagcaagatcgctttcgttcagcagttcatcgcgcatgacttcgatgccagtgatcatggcacgtcgagcttcccggttgctgctgttcataggatcggcatactggatatcagaattttcaacactgacaggcatgctggtaatgtgctggtgaggaagcttgatggtggcaccggtcgctttggttgtcagacggaattgcttccaattgatcatggcctgtgcttgccagagaatttggaggacccttatttcgagtggatccactgggctcagtcatcaatcccattctctgaagaggagctcgagtacattaagaatcttgatccaatgagggatgtggcaatgctgcgtagggagcttcctataatccgcgaggcctgccttcgtgtcctggtgctgtgcacaatcttccttaaggaggctgctgcttctggtct

SEQ ID NO: 32441 - DNA, 444 bp, Oryza sativa
  Clone ID: uC-osflM202006f11b1
aagcatctcaaccaaccaccacccgctcgctcgccgacgggcaccggcgacccaatcacccctcgccgccgccgccggagaaggaggaggagggagggagcagccggcagcggggagggggcgcgctgcgccgttgatgagatgaaggaggtggtgctccacgtgtacgacgtgacgaacagcgactcggagaagacgaacaacaccatcctccagatcaaccgcatcttcaaggaccggatcggcctcggcggcatcttccacagcgccgtccaggtctatggcgaggaggagtggtcgttcgggtactgcgagaacggcagcggcggcttaagctgccccatcgagaagaaccccatgtacacctaccggaagggcatcgtccctggtgagaccgaatgctccatccccaccgggaaccggatcctgcgggagctcagccgg

SEQ ID NO: 32442 - DNA, 399 bp, Oryza sativa
  unsure (1)..(399): unsure at all n locations
  Clone ID: uC-osflM202006g03b1
tagctttcttgctcctctagctgaccactctactatacacacacatatatacttttttcttggtgtattagtaagcacacctcatcgacatcaatggccaccgtagaggttgagacccagctgcggtcgagcccgcngcggaggaggtgaaggaggccgagcccgagccggccgagccggaggccgagcctgccaaggaggaggtggcgccagagcccgccgccgccgccgaggcggaggccaaggaggccgagccggcggcgcaggtggtcgaggaggtgaaggaggaggaggcgccgaaggaggagacgccggcggcgccggccgaggctgtggccgaggaggcggcgcccgccgaggccgaggtggcggaaaccaaggaggcggagccagctgcgg

SEQ ID NO: 32443 - DNA, 279 bp, Oryza sativa
  Clone ID: uC-osflM202006g04b1
cccgctctggcctccgtcgccgccgactcaccgctgcgcggcccgcgatggccgaagcggcggagggggcactcgccggagcgctgctcaggaggatggcgcgcgccgcccgcctgcgggctctggtcgccattgaggctgcgctgcaggaactaccatttgttaggagcatatccagaaacttaactaggataatagctccaggaacgacccacccgatgggttcaagaaagggtacatggctgggaagggaggtcccgaagaaaccaaatttactta

SEQ ID NO: 32444 - DNA, 213 bp, Oryza sativa
  Clone ID: uC-osflM202006g06b1
ctcaactattgatttgggtggttgccattcatctccatgtggtcgatccatttctccccccaaattcttctccaatcagctcgattccgtcctcttcgagcagatcagctcccgctgatcgaatcggtgttgaatttttgggttgtggttgctgctcttgggctggatcttggtggtgagaaagatcgcgatttttgttggtgggatttggga

SEQ ID NO: 32445 - DNA, 160 bp, Oryza sativa
  Clone ID: uC-osflM202006h01b1
gccgctttcacgctcctcctcgcctcgctcgccgccagggggtgggacctccgccgccacatggccgtcggcgccccggcgttcgccctcctcttcgccgcctccctcgccagcgcgacgggtctgtacttctacttcctggggctgcagctcgcgtcgc

SEQ ID NO: 32446 - DNA, 55 bp, Oryza sativa
  Clone ID: uC-osflM202006h02b1
accgaccataatggtttcctccacaagacccaccacctcctgcgggccctttata

SEQ ID NO: 32447 - DNA, 565 bp, Oryza sativa
  Clone ID: uC-osflM202006h06b1
aaacatgttttgagcaatccgtgctgagggctgttataaagggcattgaggatcgcaaactggaagctgagtttccactggaggaccttcagaggcagcttgaagaactggagaaggccaagactgagaagaaaaaggcaacttcaagtgcgtccagcggcggtagcagtggccctgccactaagcgcatccgggcaagcaatggaggcccgatgcctcctgcgaaggcaggtcgtctcactaacaatgcttgtgtgtcttctaccccagctgccaccacctttgtccgctccccctcgcacacatcgtacgccatggcctccccctacccttacgataggccggttggtcatggcctctactgcaaccaaagcccaccggcgatcagggagccatatgtctacccagccaaggaggtaactaattttgcgccaggtttgccgtactcttcccctcccataagctatccccacgcctatggcgggtacaacaatggaatgggagcttacacaatggaatggcacctgccttccaccaggcttactacccgtaggatcagtcagga

SEQ ID NO: 32448 - DNA, 358 bp, Oryza sativa
  Clone ID: uC-osflM202006h07b1
gctttgtcctcaaggcgaacggcctccatcttctcctggcagctcctcccatggcgtccctcgtcgccatcgccatcgccatggctctcatggtggttcaacctggccggcagatgactgcctttgctgctcggacgtcccccgcggcggcggcggaggcgttctggcgtgccgccatgcccggcgctcccatgccggacgccatcgtcgagctcctccaccatgagcacggcgttgctagcgccggcggcaaggccaacggcggcggcgacggtccaccgccgccgatgaacttcaactacgacgactacagggccctgcctcggagcgacgccccttccccggatgcattgaaccg

SEQ ID NO: 32449 - DNA, 525 bp, Oryza sativa
  Clone ID: uC-osflM202006h09b1
gtttttcatttataggaagtacaataggttcttccaacaacatgaacctctctgtagaaaagaatagttctgtccatggcgttggccttagatctgaagattcttctgtttctgaaccacacatccaagctgcatctgctgctcctacttccaggaagaatttaaccactactgatcgagctaaaaggaaacttgttccttctatggataattcgaacaggaccacaaacaaaacatctgaaattccagggaagagtgctgattctactgaacccagaaggtcgaaccgccgaattcaaccaacctcacggttactggagggtctgcagagttcccttatagtttccaaagttccaggcgaaaagggtcctaggactaactacagaagtgcttcctcaagagggcgaaaccttggctgagaaaaaggctatgctgcgctgttgttgggataattctcgttttgtacataactggttagctcgatggaggcaaaagaggataggaatggagtaaagactttcccgg

SEQ ID NO: 32450 - DNA, 557 bp, Oryza sativa
  Clone ID: uC-osflM202006h12b1
ggtggttgaggccacaagacgagagagcagcggcggggggaatatgaggccaccaccggagctgaggaggaggggagattgctccgtgcaagtgaggaagaagagaacgcgaaggaaaagcgatggccctgattcaatcgctgaaaccatcaagtggtggaaggagcaaaaccagaagctccaggaggagaatagctccaggaaagcgccagccaaggggtccaagaaagggtgcatggctgggaaaggaggtccggaaaattcaaattgtgcttaccgcggtgtcaggcaacggacatggggtaagtgggtggctgagatccgtgaaccaaaccgtggaaggcgcctatggctaggatcatttcctactgcgctggaggctgcgcatgcatacgatgaggcggcaagggcaatgtatggttccacagcacgtgtgaattttgcagataattccacagatgccaactctgggtgcacatcagcaccttcattgatgatgtctaaagggccggcactataccttctgatgagaaggatgagctgaaatctctccttta

SEQ ID NO: 32451 - DNA, 252 bp, Oryza sativa
  Clone ID: uC-osflM202007a05b1
cctgtgttgttctagtctaagctcgtagctagtctgcaagaaccccgacagataaccggcaggatcgtcggccgtcgtcgccgcacgcacgcacgtcgatcgggcggcgccggtgtgctcgtgatggggaactgcgccggcgtgctggggaacgccgagatcaacccttcgttcagtgctcccaactcgtcagggacaggttccaagaacagcagcatgaacggggccgattccagcacgttcggcaccaag

SEQ ID NO: 32452 - DNA, 482 bp, Oryza sativa
  Clone ID: uC-osflM202007a08b1
gctcgggctcgccgacgacgtggtggacctcctcgcgctcgcgtcccggcagtgccggcggagctcgccgtcggcggacgccgcggagcacgagctgaagaccggggtgctggcgctgatccaggaggtggagagggagatcgtgccggagagggagaggctggagggcatcctcgaggaggttggcatcaacgacccggcgtgctgcagcgacgagatcgagacactggagcgggagatcggcgaccgcgtggcggagaggtggacgtcggccatgattgcgctcgttgggctcctccggtacgccaagtgcgtcctcttcaccgcggccacgccgcggccgatggacaccaaggtggatgttgacgacgatgacgatgacgacgacgccgagccgccgtcgccgccgccggacttccggtgccccatctctctcgatctgatgcgcgacccggttgtgtcggcgagcggccagacgtacg

SEQ ID NO: 32453 - DNA, 422 bp, Oryza sativa
  Clone ID: uC-osflM202007a09b1
tcctccgcccccgcgccgcctcgccgccgcctcccccccacctcccgcttcagatccccccaaaaccctagcccccccacccgccgtcgccatggtcggcccgtctggcgccgccgcggcgtcctcgtcgtcgtcgtccacctcctcgacgacgtcgtcctcgtcgcagtcgtcgtcgactcgtggaggctacatgctgagcgaccggttctacagcccgcctcacgtccgccgccagcagatgctgctgctgcaacagcagcagctgctgcaggggcaacggccgccttcgctctccccctcgccggcgacggcgcccagggcggcgaggcagaagccgctgccgtcgccgtcgccgtcgccgccgactcccgcaccggcggaggcggcgaggcacaaggaggcagagaggcgggtggacg

SEQ ID NO: 32454 - DNA, 501 bp, Oryza sativa
  Clone ID: uC-osflM202007a12b1
catgaatggaaatagttttgtatgcaagaatctaattagtagtaatactgcactgtcttttcggttacatctgtatttaaaattttcaaaaagaacactttatggctataaaggaaactaaaataaatccttatctactaagcatgttatgtaataattgattttatcaactcttgctaggaaaggatgttctgttttgcggtagtataggttatgctaatttaatttcctttgtagttttgttagcaacaatggatgcctgctccttgtctttctgatctttttcttttccagggactcttgtccaaatttttttaactctcctcttttggattttgtggagcatgagaactagaattaagatccagattttcttttctgctcaacctgaatacatttgttcctgatttgcattctttttccacaccattttgcggagggactttctttgattgctcaaggggatgtgggttacatgcaggtacaaatttgataaagagg

SEQ ID NO: 32455 - DNA, 257 bp, Oryza sativa
  Clone ID: uC-osflM202007b01b1
gtttcatttgagttaacagtagaagatgtagctcgctgtcttgagaagaaaaccaacattaatggggagtctgctgcagcttcttttcgccttgtgcccaccggtaacggagatcacattcatcccagagaatcgaatgatacaagagcagggctatgtgttgatgaaacataccatgatctgcctgagaaagcacggcgctccttgtcccttcgtaaggctaaagaattcaagttcaacaattgttgatgctccta

SEQ ID NO: 32456 - DNA, 486 bp, Oryza sativa
  Clone ID: uC-osflM202007b02b1
ctttttctcccgcgacgatccatccatcgatcgcgacgcctagggagcgagcagcgccggcggcaactccggtagctcgctcgcttccccggcccggccggaagatatggccgatcacgccgtggtggtggacgacggcggttcacgaaggatgaggccggcgtccctgtcgtcgtcgtcggacgccgaagacgacgacgccggcagcaagaagcagttcctgcgggcggcgggacgagcgctggaggcggcgccgcccgtgcggcggaggccggggaggccgtcgcggccggtgaggatgttccacaccatgtgccggtcgctcccggtgctgacgccggggtgcgggcggctgcagccggccggggcggcgtgccggatcgcggcgccgtcgcggctgtccccttccgcctccctgatgtcgaactcgtggcgtcggcctccaccggcgccgccgggtgcgtcgcgccggcgcatgacggggac

SEQ ID NO: 32457 - DNA, 483 bp, Oryza sativa
  unsure (1)..(483): unsure at all n locations
  Clone ID: uC-osflM202007b03b1
catagaaaaggcctgtgtcaaggagagggtagtagcaccttgctctcctttgccttcagagaaaccggaagcaatggcgtctgctactctcctcaagtcatctttccttcccaagaagtctgaatggggtgccacccgccaggctgccgcccccaagccggtgactgtctccatggttgtccgcgctggtgcctacgacgatgagcttgtcaagaccgcgaaaaccattgcatcaccaggaaggggtatccttgccatggatgagtcgaacgcgacctgcggtaagaggcttgcgtcaattggccttgagaacaccgaggccaaccgccaggcttaccggaccctccttgtcaccgcaccgggcttgggacagtacatctccggtgctatcctcttcgaggagactctgtaccagtcaactgtagatggcaagaagattgtcgacatcctcactgagcagaannatcgtccaggtatcaaggt

SEQ ID NO: 32458 - DNA, 446 bp, Oryza sativa
  Clone ID: uC-osflM202007b04b1
gacggttacggcgctcaaccgcggcctccgctccgggatccgcctcctcgccaccggcgctgaggcctccaagacagattctcgtggattccatgccactggtgtgaagaggatgggagggcatggccatgatgagccctactacctccatgccaagcacatgtacaacttgcacaggatgaagcaccagaagccgaaggtgtatctttccgtgctgggagcagttggcattggcatcgcagtcccagtttatgcggttgttttccagcagaagaagaccgcctccggataagctctctaagtgctacataatgaacttactttctatagcactccgcgaagttaaaattgggacttcactttaaattggttattgcttgttactccattttgcacttgcctgaagttggtagctccttttctggcgtttgatgtaggaatactgc

SEQ ID NO: 32459 - DNA, 449 bp, Oryza sativa
  Clone ID: uC-osflM202007c02b1
gttgattgctgcaaagaaagctaaaactaagagcacatcatacgagatcgataatgattttgttacctccagatcaaaaagggatggcaataaaaggtctagggaatctactgatgctgataatagtgaagaggaacctacatctgacagtgagcttgatgcacaaaacaggaagcagaaagcagtcactgaatcacctgctaatgtaagaagcgagcctctgacaacacgtcgccgtgcccttcaatcatggatggatggaaacagcaacagtgctattgagttccctgatggtttgccaccagctccttcaagaggcaagaaggataagctttctgatgcggaaatgcttgccaagaaggcagaagctgctcagcggcgcaagatgcaagtcgagaaggctactaaagaaagcgaggcttgagctataggaaaattttgggcctgga

SEQ ID NO: 32460 - DNA, 488 bp, Oryza sativa
  Clone ID: uC-osflM202007c03b1
gtttttcttctggaatgccttggagatgagagacaattttggcatctggatttgcttcgacaagaggtgcattgttgactcgaggagagaggtagtgatctctctagccttgctcaaccgctttacaatcttgcagtcttccttgtctgaggctaccttcacagtcttcttgaaatgtttctttgccttcttcaccaagcggatgtatgaatggatcttggcaactgcattatctccttttctgagagacacttgcagatcttggatgatggccttcaactcagtgaagacctcactcatagcattgcagatatccagtagctcgagggagcattccatctctccatccaacaacttcctctgctgggatgagcaaatttggttgctaggcaggcacatgatctgctaatggagttgtagatgtcatcaagcctcctcaaaacatcagaaatcatctcgatggtcatggacggtgatgagacgcatgc

SEQ ID NO: 32461 - DNA, 452 bp, Oryza sativa
  Clone ID: uC-osflM202007c04b1
atacttacgtcttctccggcgggaagggggaccgggagcagaggatctacctctggttcgaccccaccaaggactaccactcctactccgtcctctggaacctctacatgatcgcgttcttcgtggacgacacgccgatcagggtgttcaagaacagcaaggacctgggcgtgcggtacccgttcaaccagccgatgaagctctactccagcctgtggaacgccgacgactgggccacccgcggcgggcgggagaagaccgactggtcgcgggcgccgttcgtcgcctcctaccggggcttccacgtcgatggctgcgaggcgtcggcggaggcccggtactgcgccacccagggcgcccggtggtgggaccagccggagttccgcgacctcgacgccgaccagtaccgccgtctcgcctggggtccgagacggacaccatttacaactact

SEQ ID NO: 32462 - DNA, 468 bp, Oryza sativa
  Clone ID: uC-osflM202007c05b1
ccagtttgcacttactggggagtcccttccagtgaccaagaaccctggtgatgaggtcttctctggctcgacctgcaagcagggtgagattgaggccgcggtcattgccactggagtgcacaccttcttcggcaaggcggcgcatcttgttgacagcaccaaccaagttggtcacttccagacggtgctcactgcgatcgggaacttctgtatctgctcgattgcggttggtatcgtgatcgagatcatcgttatgttcccgatccagcaccgtgcctaccgcagtggcattgagaacctgttggtcctcttgatcggtggtatcccaattgccatgcctaccgtgctctcggtcaccatggccattggttcccacaagttgtcccagcagggtgctatcaccaagaggatgactgccatcgaggagatggctggcatggatgttctgtgcagtgacaagaccggaac

SEQ ID NO: 32463 - DNA, 410 bp, Oryza sativa
  Clone ID: uC-osflM202007c09b1
gctacggagaagacttcagcataagagaatacttcgataagcttcaccagccgccgccgccggagtcggagagctcctcgtcggagttctcgtcggagttctaatctatctaacgtggctgctgcctctgtactcctcctaccttttctttgggtcatttttcggtttggtcctcgttaggttactattttgtaacgaaggggctgagggtgcgtgtatatacgtggagaggggcggcaatggaaattccgcggagaggcttgggagaatgggcaaacaaccattttggaagggtggccgacggtgcccgttcttgaatgaggctgtccaggccattttttttcggaatttttctggggccctttttcaagggctggccagaaaatttaccaaaattggcacactggcca

SEQ ID NO: 32464 - DNA, 434 bp, Oryza sativa
  Clone ID: uC-osflM202007d02b1
cattgttcttttgttcccctttcgtgattgcccggtcgcggcctcgccgctaaccctaaccgatcgaattcctccgaaaaaatccagccatggcgccggcggcgcaggagccttgggccattctggccgcaatccctaacgtggtggggtacaaggaggcgaagcgcatcttcccgccgggcaccgacatctccgtcgcccgcaaggaggtcccgcgagcctccgtcctgaccgtgccgcgccacatctccctcccggcctgcctcggactctacccctatgtcgtcgccgccgaccgctctggccttctcctcctcggcacgcatcctgtcacctgcgcctccgccatggtctcctaccacatctgtgatgcgcacaccggtgagggtagcctccctccgcgactgcaaaccaatgcgccccatgaccttcta

SEQ ID NO: 32465 - DNA, 465 bp, Oryza sativa
  Clone ID: uC-osflM202007d06b1
gttttagcgagcgcgtgggaggccggaggcgacgacgacgaccgcgccgccgtcggagaagaaggccgcggaagcaccagtaccagcacccgtatatgtcttctagccccttctccgatctggtggtagtcgtgctcctcgtctgcgccgtcgtcgccgcagccgtcctcctccccctcgtctgcgcccgccgatctatgcaccagaggctccacggctggaacaagtccacgtcgatgctcagggacgggttcggggtcaagtattccgggttcctccacataaggccggtgtggtttctgtcgaggagattgacggattcgatcgattcgtgttcgtctccgtcaaatttttgcacaagagaaaaaaaaagtttcccccttttaggagtttttccccttcagttctgtcagttttggtgaggaattttagagttcttttccggcaagagttagaagaagagag

SEQ ID NO: 32466 - DNA, 483 bp, Oryza sativa
  Clone ID: uC-osflM202007d10b1
gtgaaatccaagccaatttgcgacgaaccctaaccgcccaccaaatcctctcctccttccccaacggcgagcgtccccggcgaatccgccttgacggaggcaccccggcgagctcaccttcccggaggaatcccagctcagcctcatcgtcttcgggaaatatcttggtgattcttgggaaccttcagaaagaccacttaatagttttccttggcccagaaaggcttgaggcttgagagctgaaaagttctgctggagctagtgctataatggccacaaaacttgtggttcttggaatcccatgggatgtggacactgaaggattaagagagtacatgggcaagtttggacccctagatgattgcgtcgtcatgaaggagcgttcgtctggtcgatctcgtgggtttgggttatgtaacgttctcatcagctgatgatgccaagaatgctcttgagtgtgagcatgttctcggaaaccgaact

SEQ ID NO: 32467 - DNA, 300 bp, Oryza sativa
  Clone ID: uC-osflM202007e03b1
gcccgcggtaccggcccggacgtacttgccggacccacgcatccgttttatacttctgcatctgacacattccctccctttgtcgcacgcagctctgctccaagtggaaaggcgaggacagagagacatgacccccagatgaagtgctctggctgtcaaggctctcgaatgtaggggcagggcgtgcccttggggccagcaatgatgcaccacgcggaacatgttgcgcttgctcgcaagggaaccggggaggaccttggcccacccctgctgttcgatcgaggcctcgcactcagctga

SEQ ID NO: 32468 - DNA, 481 bp, Oryza sativa
  Clone ID: uC-osflM202007e07b1
gtaacagtgcaaggaggcgctgcagcggcagctgggcctgcaggtccgcgacgacgtgccgctgatcgggttcatcgggcggctcgaccaccagaagggcgtggacatcatcggcgacgcgatgccgtggatcgccgggcaggacgtgcaggtggtgatgctgggcacggggcggccggacctggaggagatgctgcggcggttcgagtcggagcacaacgacaaggtgcgcgggtgggtggggttcttcggtgcagctggcgcaccggatcacggcggggcccgacgtcctcctgatgcctccgcggttcgagccgtgcgggctgaaccagctgtacgccatggcgtacggcaccgtgcccgtggtgcacgccgtgggcgggcttcggacacgggggcgccggttgacccgttcgccgacacggggcttgggtggacgttcgaccgcgccgaggcgaaccgatgatcgacgcgctcgggc

SEQ ID NO: 32469 - DNA, 479 bp, Oryza sativa
  Clone ID: uC-osflM202007e11b1
aaaaaaaccagcatagcaaagcaagggtttagggcggcggcggcggattccgcggcggccatggcgacggcggtgcggctcctgcgaaggagcctgcgagggggcgaggcagcacctcggttcttatccgcttctcaaaatttggtacgactagttgcaaacaacaccagatcagttgatgttggccaaccaacaccccgatctcatcctgagttattagctgaaggagagattacaccaggtatcactagcgatgagtacatcttcagaagaaaaaagcttttggaggttctgccagagaagagcttggccattattgcgtccgcagagcagcagatgatgactgatgtagtgccatactcattcagacagaatggtgattacctgtatattacaggttgtgcacaacctggtgggcgggcaggtttaagtgaggaaactggtctgcgtatgttcatgccagatacaagtaagaggat

SEQ ID NO: 32470 - DNA, 487 bp, Oryza sativa
  Clone ID: uC-osflM202007f05b1
cctctcacattttccccaaataataatagaggaaggggaaaaacacatttgcagccacatcatccatggcctctctccgcaccattccggtgatcttcggcatcctcttctatgtccttgccagcactgccactgccaccgacgcaccggactacgtcgtccaaggccgtgtctactgtgacacgtgccgcgccgggttcgagaccaatgtcaccgagtatatcaagggtgccaaggtcaggctggagtgcaagcactttggcaccgacaaggtcgagcgtgcgattgacggtgtgactgatgagaccgggacatacaagattgagctcaaggacagccatgaggaggacatctgcgaggttgtcctcgtccacagcccccttgcaaactgctctgaaatcgaggccgaagggatcgtgcccgtgttttgctcaccggaatgtcggcatctgtgacaacctgcgcttagccaacccactcggctacc

SEQ ID NO: 32471 - DNA, 485 bp, Oryza sativa
  Clone ID: uC-osflM202007f11b1
tcaaacagcaaagtgaaagcatcaggaagaacatctcaaatggaaagcttcaaggacaagagcttatcaaatggacggtttttccttgaacttcttagtgcagtacaaccgagggttgtcaactggaaagttgttacaaagggggaagatgatgaggaaaagaagctaaatgctacatataccattagtgttgcaaggaaaatcggatgttccgtgtttctgctgccagaggacatcattgaggtaaatcagaagatgatcctaacgcttacggctagcatcatgtattggagtctacagaagcaaccacagtcacaatctgaaacgtcagaacaatcagagccatctagtatggcttcggatgcagcttctgatattgcttcggaggacgctgcttcaataacagctgcatctgagggagaagaggtgaattcgctatctgatagtatgtccaatttgaccacatatgatgctattttaaatgc

SEQ ID NO: 32472 - DNA, 281 bp, Oryza sativa
  Clone ID: uC-osflM202007g02b1
cacggtggcggcgacggcgcgctcttcttgtcgctacccctaccactactactaatcacgcccactactactactgccgctgctgccactgagctagtagtagccgcagcagcaggtagtagctggcgcggggagcgtaaccctagaatgtcgcagcaggaggtggcggatccggcgcaggcggcggaggaggaggggccggggcagctgccgcggagcggctcctccagcaggctcaacgcgcaggcgccggagttcgtgccgcgcgccgcggcggcacc

SEQ ID NO: 32473 - DNA, 435 bp, Oryza sativa
  Clone ID: uC-osflM202007g07b1
atgtgaaaggcgtcttcgtactcgcctctctccgcgcctccgcgcttttcctcctcctctcccctctctcccttctccgccgccgtcgcagcatcaacccaatccgccgccatgagggagtgcatctcgatccacatcggccaggccggtatccaggtcgggaacgcgtgctgggagctctactgcctcgagcatggcatccaggctgatggtcagatgcccagtgacaggactgttggtggaggtgatgatgctttcaacaccttcttcagtgagactggtgctgggaagcatgttccccgtgctgtatttgctgatcttgagcctactgtgattgatgaggcgaggacctggttgctaccgccagctcttccaccctgagcagctcatcaatggcaaggaggatgcagctaacaactttgcccgtggtcacta

SEQ ID NO: 32474 - DNA, 449 bp, Oryza sativa
  unsure (1)..(449): unsure at all n locations
  Clone ID: uC-osflM202007g08b1
ttagaaggccgctggattcctctcctccctcctcggcggcggcgaggaggtgccgccagagccggcggcgacggtgaggtcgatcctgatataccccatcaagtcatgcaggggaatctccgtgccccaggccccaatcacctccactgggttccggtgggatcggcagtgggtggtggtgaactccaaggggagggcctacacgcagagggtggagcccaagctcgcgctggcggaggtgncagatgccgccggaggcattcgccgaggagtggcggccgaccgccgattcctacttggttggaagagcacctggaatggacccattgaagatccctcttagtgctgaacaagccataattaatgatgtctctgatgggagtggtctggttctgcttatgatgaacgaaccttggcggctaagtggtttttagttacctttggaaccc

SEQ ID NO: 32475 - DNA, 86 bp, Oryza sativa
  Clone ID: uC-osflM202007g11b1
ataaaacattttttaatctatttttttagtcttgtgcttaattaatgttttcttaggttttatttcattatttttttttttttttt

SEQ ID NO: 32476 - DNA, 373 bp, Oryza sativa
  Clone ID: uC-osflM202007h01b1
ttttctttctcttcccccgctccgctctcgtctgcgctctgctctggtctgctctgctgcgagggtgggtgttgcttgtaccggtcggggatggaggcggcgacgatggcgtggacggcggcggtggtggggatggcgctggtgtactggttcgtgtgggtgatgggagcggcggaggtgaaggggaagcgggcggtggatctcaagatgggatccatcaccaacgacaaggtgaaggacaagtacacgcagtactggtcgttcttccgccgccccaaggagacggcgaccaccgaggcctccgacgagaaggtgccggccttggtcgacaccttgtacaacctcgtcaccgacatctacgagaggggttggg

SEQ ID NO: 32477 - DNA, 505 bp, Oryza sativa
  Clone ID: uC-osflM202007h02b1
gttgttttcgtcgtcggcagctcgcaccctcctctcgccggcggcgcctcctgtcccgcgccgcggcgtggtgcgtcccgcgaggtgctcgggggcgaaggtttgtacggtgagcaaccgcggggactccctggcgatatgccgggtgctcaacggcatgtggcagaccagcggcgggtggggccgcatcgaccgcgacgccgcggtggacgccatgctcgcctacgctgacgccggcctctccaccttcgacatggccgaccactatggaccagcagaggatttgtatggccttttcatcaatagagttcggcgtgagcggccacctgagttgcttgaagaaatcaaggggctaacaaagtgggtaccaccttcggttaaaatgaccagaagttatgttgaggataatattaacagatctcgaaagagaatggatgtttctgccttggacatgctggaggttcattggtgggattatgcaaaccctggatatctggatgcacta

SEQ ID NO: 32478 - DNA, 492 bp, Oryza sativa
  Clone ID: uC-osflM202007h04b1
gaagtctcttttggatctatccattcgggtcaccgtggcagttcggtaattttggcggagaggaggaggaggacgacgacgacgacgacgtgatgggtctcctcgacaagctgtgggacgacaccgtcgcggggccccgccccgacaccggcctcggccgcctccgcaagcacgccgccgcccgccccgccgccgtcaagatcaacgacccgacaggggacgcggcgatggtggccgtcccgccgacgacgccggccggggcggaggaggcgccggtgaaggtgacgcgcagcatcatgatcaagcgccccgcggggtacccggcgtcgccgaggagcgcggccagcacgccgccggcctcccccgccggatccacccctcccatctcgccgttcgccggcgccggtggtcgcttcagaaggaaatcatcgtccgacgcatatgagagggcaacacctgggacaaccagtcaccctcctccctatgaagtgg

SEQ ID NO: 32479 - DNA, 474 bp, Oryza sativa
  Clone ID: uC-osflM202007h05b1
attagccatcaacgaccagcatctcggctttgctcgccttctcgaagcttctgctgccatggcggaccagctctccgaagagcagattgtagagttcagggaggccttcagcctcttcgacaaggacggcgacggttctatcaccaccaaggagctaggaaccgtgatgcgaagtctggggcagaacccaacagaggcggagctgcaggacatgatcagcgaggtggacgcggacagcaacggcaacatcgaattcaaggagttcctgggcctgatggcgcgcaagctgagggacaaggactccgaggaggagctgaaggaggcgttccgcgtcttcgacaaggaccagaacggcttcatctccgccgccgagctccgccacgtgatggccaacatcggggagcggctcaccgacgaggaggtcggcgagatgatcagcgaggccgacgtcgacggcgacgggcagatcaacta

SEQ ID NO: 32480 - DNA, 467 bp, Oryza sativa
  Clone ID: uC-osflM202008a01b1
ctgtttcgaagcgaagcgaagaatcggcggcggcggcggcggcggcggtggggagaagccatggagcggctgcagcggatcttcggcgcctccggcatggggcagccgccgtcggactcgccgctgctcgactcctccgagcaggtctacatctcctccctcgccctcctcaagatgctcaagcacgggagggccggcgtgccgatggaggtgatggggctgatgctgggggagttcgtcgacgactacacggtcagggtggtcgacgtcttcgccatgccgcagagcgggaccggggtcagcgtcgaggccgtcgaccatgtcttccagaccaacatgctcgacatgctcaagcagaccgggaggccagaaatgggggtaggctggtacccatcccattccggaattgggtggtgggttttagggagtggccatcattcctaacagaggtttgaaggtttaaaccc

SEQ ID NO: 32481 - DNA, 490 bp, Oryza sativa
  Clone ID: uC-osflM202008a04b1
gcccgggacttcctggctggacccacgcgtgcgtgttctagatcgcgaacggccgcccttcttttgtttgttttttttgttaggaaactctaggcacaagccaagcatgaacataacaattcagtcagctaattattacagttacaggcagagcaaatatgcttctacagagcaacctgttaaaaaaaacaaaagaaaaggagaatgttgggatacagatacaacacaacagcatctacaaatcagggaacatgtctagaaaaaaaacattggttttctaatgactacaagttaatagggcataaatagcaaacaacaggatagagcccccagctaaatttggggggggcccaatttggtacaataatcgataaccatgcttttgcaccgatgatttcattcgcaggccaccttggggtcgaaactactcaagcagattgcaaaggcctggaaggcccaaagggggtaacgatagtccattgggaacata

SEQ ID NO: 32482 - DNA, 350 bp, Oryza sativa
  Clone ID: uC-osflM202008a08b1
acgcgctgaccggccggctccccggcgagatcggcggctgcgcgcggctcgtcgagatcgacgtctcccggaacgcgctcacgggcccgatcccggcgacgctgtcggcgctgtcgtcgctcaactcgctcaacctgtcgcacaacgcgatcaccggcgccatcccgacgcagctggtggtgctcaagctgagctccgtcgacttctcgtcgaaccggctcaccgggaacgtgccgccggcgctgctcgtgatcgacggcgacgtggcgttcgcgggcaacccggggctctgcgtccgcggcaggtcggagctcggcgtgtgcaaagtggaggaccgcccgcgcgaccgg

SEQ ID NO: 32483 - DNA, 296 bp, Oryza sativa
  Clone ID: uC-osflM202008a10b1
tcttctatttgctttcaggctggactgatcatgcttacatgctttttgtaagggttgctcgacaaggaaatcttgtggatcatttttcatgttctaagttgataaatgacctctgtagagttggaaatgtccagggggcttcaaatgtttgtaagattatgttagaacataatgttgtacctgatgtgatttcatatagcaaactcatatcaatctattggcagaatggagatatggacaaagctcacttatggttccatgatatggttcaacgaggactttctattgatggtatt

SEQ ID NO: 32484 - DNA, 417 bp, Oryza sativa
  Clone ID: uC-osflM202008b05b1
accttctcctccggctcttcttcagtatcgaatcctctcttctgctcgtgcccaccaccaccaccgtagcaatggcgggcaacgggccgatcaacaaggaggacccgttcaactggggcgcggtggcggccgagatggccggcagccacctcgacgaggtgaagcgcatggtgtcgcagttccgcgagccgctggtcaagatccagggcgccaccctccgcgtcggccaggtggccgccgccgcccaggccaaggacgccgtcgggttagtcgccgagctcgacgaggaggcctcgccccgtgtctgggtcagcagcgagtggatccctaactgcatcgcccacggtggacgacattacggggtgaccaccggcttcggggggacttactaccgacgtaccaaggacgggccctccc

SEQ ID NO: 32485 - DNA, 501 bp, Oryza sativa
  Clone ID: uC-osflM202008b07b1
tcgtttctccttcttctcttcttggaggatatttcttccccctccgtctccggcgccgatctgcatccacccgccgagcagagaccagcgccgccgccgtcgccgtccgttcctcctgtatcgcgtcctgaaatttcttttttctgggatgtccgacgttggagacgcccctgtgcagcgccgctcttgttcgaatccggccggtggtctgtaggattgggcggctgcggcggcggcgagatggacgacgacgccagcatgagcataagatgggggggattcttcgagtcgccggcgaggaacctcggcctgcagctcatgtcgtcggtgcctgctgagcgtgacaccaagcagctgctctctggtagccccttcctgcatcatcagcatcagcagcatgtgccgcaccaccaccatcagccccatcacccgcgtgactgcggcgccaatggcaatgccaatggtggtgctatgcctcctactcctgccacggaggctccc

SEQ ID NO: 32486 - DNA, 357 bp, Oryza sativa
  Clone ID: uC-osflM202008b09b1
tcgtgacgcctcgctagggatcctgcctctccctccgccgacgccgctgccgcgaggagaggagggggggagagcacccagccggcgagccatccatgacgctgcggacaagggagcgtatggaggcgcaccctgacccctacaggagtggggtggacgccgaggaggggaggcggcggcgctaggacaacatggtggcgatccgcaagagccgccgcgaggagagcctcctcaagaagcgccgcgaggggctccaggcccaggcccccttccgattctcacacaatgccgggcaaggtgagaagctccgaagccgacctgctatgattgtaggaggtgattcggaccataacagcc

SEQ ID NO: 32487 - DNA, 466 bp, Oryza sativa
  Clone ID: uC-osflM202008c01b1
tgccgtccgagccactacactatccacctcgccgccgccgccgccgccggaaatggccgccgccgcgcgccccctggtgtccgtgaaggccctggagggcgacatggcgacggactcggccggcatccagatgccgcaggtgctccgcgcgccgatccgccccgacgtggtcaccttcacccacaagctcctctcctgcaaccgccgccagccgtacgccgtgtcgcgccgcgcggggcaccagacctccgcggagtcgtggggcacgggccgcgccgtgtcccgcatcccgcgcgtcccggcggcggcacgcaccgcgcggggcaggacgcgttcggcaacatgtgccgcggcgggcgcatgttcgcgcccaccaagatctggcgccgctggcaccgtcgcgtcaacatccgcctccgtcgcatagccgtcgcgtacgcgctcgccgccaccgtcgtcccgtccc

SEQ ID NO: 32488 - DNA, 311 bp, Oryza sativa
  Clone ID: uC-osflM202008c06b1
ctgttagggaagggcatggcggcaatgtactcatggtcgtgcaagaggagctacaagaatggcttcgtgtggcacgacctatccgaggacgatctcgtcctgcccgcgcaagggaacgagtacatcctcaagggctccgagctcctcgaccgatcaccgccagatcgacagcagaatggcgttggcgagcccaaggttgagaccctcaagcaccctccagaagagtcccctcattcgcgaggatcgcatgaggggtgctcctcctcatcatcttcatctgctgttacaaaagaaggcttcccaacaccccc

SEQ ID NO: 32489 - DNA, 368 bp, Oryza sativa
  unsure (1)..(368): unsure at all n locations
  Clone ID: uC-osflM202008d02b1
ctcctcctcgtcgctgcattccggttgagtgagttggtgattatctgtagggggtgaaaatggcgcaggcggtggtgccggcgatgcagtgccaggtcggggccgtgcgggcgaggccggcggcggctgcggcggcggcgggggggagggtgtggggagtcangaggaccggtcgcggcacgtcggggttcagggtgatggccgtgagcacggagaccaccggggtggtgacgcggatggagcagctgcttaacatggacactacccctttcaccgactagatcatcggcgagtacatctgggttggaggtactggaattgaccttagaagcatatcaaggacaattataaaaccagcggaggacccc

SEQ ID NO: 32490 - DNA, 476 bp, Oryza sativa
  Clone ID: uC-osflM202008d07b1
tgctcagcgtgttccgggaggtggcgagccggaaggagtggcgcatccggcgctacatcccgagcaccatcggcatggccatcaccttcttcatgccgccgcgcgtgcccgtcggcatgtgcatcggcagcctggtggcgtacctgtgggagaagatggacgccggccgcgggcggatgctctcgccggcgctggcgtcggggctcatctgcggcgacggcgtcggctcgatcttgctgtccatgctgacactcatgggtgccagggcgcccatctgcatcaagttcttgtctcgaggcgacaatgtcaagttggacgccttcttggcaacactccatgacatgagatagctactagctagctatccatgtagggaaactagatcattttctcaggtgtcaaaacttttgtacatatgtatccacgtcataggggcttgagttaggagtcgtggcacactgtataatcaagtttca

SEQ ID NO: 32491 - DNA, 491 bp, Oryza sativa
  Clone ID: uC-osflM202008d09b1
gtgctcgcgcgcgcgcggccggcgaggggcgacgcagccggggcctccgtcctctcggcagcacgaattgaattggaggtaggtaggcacatttgtaaaaatgggagtttaccttagtacccccaaaaccgagaagctatctgaagatggcgaaaatgataagcttaaatttggactctcatctatgcaaggatggcgtgcaactatggaggatgctcattcagctttgctagatatcgataatgacacatcattctttggtgttttcgatggacatggaggaagtagtggttgctaaattctgtgcaaaatatctgcacagagaagttctcagaagtgaggcctattcagcaggtgacctgggcaatgcagcccataaagctttctttagaatggatgagatgatgcgaggtcaaagaggctggcgagaactacaagcacttggagataagataaaccagattagtggcatgatagaaagctcgatctgg

SEQ ID NO: 32492 - DNA, 479 bp, Oryza sativa
  Clone ID: uC-osflM202008e08b1
taccaatctgctttcctcagttttccaacttcggaaatctggacccacatggctttgcaaggaacaggacctggagtgttgaaaatgatccaccaccatttccagtaccaacttctaataaagcttacgtcgatttaatccttacgcatactgaagaagatctaaagatctggccacatagttacgagttccgtctgagagttgcacttggacctggtggagatctgatgctgacttcacgtataagaaataccaatgcagatggaaagccattctcatttacatttgcatatcacacatacttttcaatatctgatatcagcgaggtgcgagtagaaggcctggaaactctggattacctagacaacttacaagagagaaatcgatacactgaacaaggggatgcaattgtttttgaatctgaattggacagaatatatctgggcacaccgtcaaaaattgcccatattgatcatgag

SEQ ID NO: 32493 - DNA, 499 bp, Oryza sativa
  Clone ID: uC-osflM202008f04b1
gtttttctggtgctctagactcgtgatgccgaccaccagatgcggatcaatggcggtcaacgggccgattagcatggaggacctggttatctgaggagcggtggaggccgatagggacggaagtcacctagacgaggtgaagcgcatggtgggtcaattacctgagccggtggtcaagatccagggcgcgaccctccgcgtgggccaggtggacgccgtcgtccaggccaaggacgccgacggcgtagccgtcgagctcgacgaggaggaccgcccccgcgtcaaggccagcagcgagtggatccttaactgcatcgcccacggcggtgacatctacggcgtcaccaccggcttcggcggcaccttccaccgtcggaccaaggacggtcccgccctccaagtcgagctcctcaggcatctcaacgccggaatcttcggcactggctccgatggccacacgctgccgtcggagacggtgcgggcggacatgcttgtgcgc

SEQ ID NO: 32494 - DNA, 485 bp, Oryza sativa
  Clone ID: uC-osflM202008f05b1
actccactccacgcgcacctcgccgcgtccctgatctgattgattgatgccggggcggccgtgatggcggcgggagcaggagcgggcggcgggggcggggagggcgacagcaacgggggaggcacctccccgggtggcgtgtcggcggcggcgccggcgatcgggccccaccacctcggggttgccgccgcggaagaagcaatgtggcaaatgactttaggaggaggagagtctatggagtccactccataccctgagcggataggagagccagactgcagttattatatgaggactggactatgtaggtttgggatgacctgcaaattcaatcaccccccaaatagaaaactggctgttgctgctgcaaggatgaatggagagtatccttatagagttggtcacctgagtgtcaatactacttgaaaactggaacggcaagtttggtgcacatgcaagttttcataccccagggagaggctgca

SEQ ID NO: 32495 - DNA, 493 bp, Oryza sativa
  Clone ID: uC-osflM202008f06b1
tggtgttccagcagcatgagaccatgtttagcccaatgagtcttgaagatagttctagccaaggagcaatgagtttttctcctatcagctcgagttttgatataaccaatctgacatgcggaatttaaattgctctagtgaaagttgcatggccttgaatatccttttattttcttttaactacattgttgaacttacacgttactatacatctatgataggagtagcttagagtactcaactaggttcatcctgttatgtatggtcatcttatccttctcaattgtttctgatgatgcagcttgatgctgttcgagcaaaggtagtggagattagtggaaggggtgcaggagaggtcagggtggttgcttgcccctacaggatttgccctctgggggctcacatcgatcatcagggtggaactgtcacagctatgaccattaatatggtgtacttctcggatctgtggcctctgatgatgccgagatttcac

SEQ ID NO: 32496 - DNA, 486 bp, Oryza sativa
  Clone ID: uC-osflM202008f10b1
ctggccttatagcatttagaggtcatgttcatcctattgatccatcatggcatcttttaggcttggggtatcaggaaaagacagatatccccagtgttcagaaagcagcagtcatacattacaatgggcaaagtaaaccatggctggatattggttttaagcatctccagccattttggacaagacatgtgaactactcgaatgagttcataagaaactgtcatataatggagccccagttatagattggctagataaaccattctataaatattggcgtaaattatggaattaaattcattattttggagaccaataccagatagtccagaaggatacccacgaaatgctctctgaacagtaacccggagctggtacacgagcggatggagaatatttaatgaacacaaaggaaatattttcttcctatacactaggatctctttccctttatttattccatttgtatcatagcttatgaaatta

SEQ ID NO: 32497 - DNA, 392 bp, Oryza sativa
  Clone ID: uC-osflM202008g02b1
ttacaacaaggggcttgccttcaacgaaagggagcgcgaaacgcactacctccgtgggcttctgccaccagcaatcgtatcccaggagctccaggaaaggaaaatcatgcataacatccgacaataccagctgcctctgcagaaatacatggctatgatggacctccaggaggggaatgagaggcttttctacaagctcctcattgacaatgttgaggagctacttcctgtcgtttacactccaacagttggtgaggcctgccaaaagtatggatccatatttagccgtcctcagggtctttatatcagcttgaaggagaagggaaagatccttgaggtgctaaaaaaactggccagagaggagcattcaaggtatcgttggtactgatggt

SEQ ID NO: 32498 - DNA, 295 bp, Oryza sativa
  Clone ID: uC-osflM202008g03b1
tttgctattagaagaacttatttaggggttttccgatggctcttcgtcaccatgggggggggggtgacgcaggaggcgctgttcaggttgcacctctggagacaaagaggtcggggagattatcctatccttgaagatgaccatgaggacgaggatgatgatgatgacgaggatgacaaacaggatgaggttcaaggagctggaggtgatgcttgcggaaggtctaagcagagtacgagcgagaaaaagagcaggaaagccacgccgaaacttggcatgaagaccataactggtg

SEQ ID NO: 32499 - DNA, 501 bp, Oryza sativa
  Clone ID: uC-osflM202008g11b1
tatgagaggaagaaggagagaaacatctagagtgaataagaaagatggggttcgtccgtgccctgttcctgctggcgatggtgtgcgtggcggcgcacgcgaaggactaccccaaggaggagggcgcgaaggcggaggggccggccgccgcctcggggggcggcggcggtagcacccacgacgtggtgaagctgggcggcaagggcgacggcaagacggacagcaccaaggcggtcaacgaggcgtggacggcggcgtgcgctggcaccggcaagcagacgatcgtcgtccccaagggcgacttcttgacgggtcccctcaacttcaccgggccatgcaagggcgacatcgtcatccagctcgacggaaacctgctcggctccaccgacctcgccttattcaagtcgaactggatcgagatcatgcgcctcgaaagcctcgaaatcagcggcaagggcatgctcgacggccagggcgccgtcgtctggagcatgaactcct

SEQ ID NO: 32500 - DNA, 393 bp, Oryza sativa
  Clone ID: uC-osflM202008h02b1
gttagtggaaaccacacccacctccatctccgcctccgccgccgccgccgccgaccaagtcgagggggagatccagcgagagcgaggaggaggaggaggatggcggtgatggaggagcagcaggagggagccgcgggggtgatgcggcggaggcccaagacgaagatcgtgtgcacgctggggccggcgtcgaggtcggtggagatgatcgggcggctgctccgcgccgggatgtgcgttgtgcgctttaactttctgccacggatcccacgagtaccaccaggagacgcttgacaaccttcgcgccgtcatggagagcaccggcatcctttgcgccggcatgctcgacaccaaggggccagagatccgaactggatttttgaaagatggaaa

SEQ ID NO: 32501 - DNA, 344 bp, Oryza sativa
  Clone ID: uC-osflM202008h08b1
tcggttggagtcagaggaggaaaaatcttcgccttcaatatctttgtactcgaggaagtcaaggccgcgccctcaccccaaaaaggaggaggaggaggatggcaattaatggacgacctgttcttggcagagcttgatgacggctaaaacccgactccgacgggtgctcagaacctagaccggctcagtcatgggaggccgagccgtaccataacactccattccgcctgggggtggctccgtcatctccaggttgtatagatatacggacctgatcaccgagaacgcggcctacctaatgggggtacgtgggcgaccaccacctggtaagggacttcatcaaa

SEQ ID NO: 32502 - DNA, 407 bp, Oryza sativa
  Clone ID: uC-osflM202009a02b1
gttcatgctatgttatttgcactacttgtaaagaggcatgctttagccgcttgtgtggctgctgggggcttgagagctgctgccgaatgtattcagatctcacttggtcattcttccttgctggaaactcgtggtttgtcactttcgtctgttctgatgaagcaattcaaaccctctgttgagcaagcactggagtccagtttgaggagaattgaagagagtactgctgctttagctgcagctgatgactgggtactcacctatcctccatctggtatacggacgtttgctagatcatctgctagtagtttgttgctccaacctaagctctcaaacagtggccatcgcttcagttcaatggttcaggatttctttgaggatgttggcccactgcatagcttgcagta

SEQ ID NO: 32503 - DNA, 351 bp, Oryza sativa
  Clone ID: uC-osflM202009a05b1
ctcgttggccgggattggtccgatcaggcaggactgggagccggcggtggtgcggaagaaggcgcccaccgccgccgccaagaaggatgagaaggccgtgaacgccgcccgccgctccggcgccgagatcgagaccatgaagaagtataacgctggaacgaacaaggcggcgtcaagtggcacatccctcaacaccaagcggctggatgacgacaccgtgagccttgcccatgagcgtgtctcaagtgacctgaagaaaaacctcatgcaagcaaggctggacaagaagatgacccaggcacagcttgcacagatgatcaatgagaagccccaagtgatccaggagtacga

SEQ ID NO: 32504 - DNA, 410 bp, Oryza sativa
  Clone ID: uC-osflM202009a09b1
cttgaacccggcgtcctccgcggcggaccgcgacaacaagatccggcgcatgcggcgcgccctcgacgccgccgacatcgagctcgtcaaactgatggtcatgggcgagggcctggacctcgacgacgcgctcgccgtccactacgccgtgcagcactgcaaccgcgacgtcgtcaaggcgctgctcgagctcggcgccgccgacgtcaactcccgcgccggcccgacaggcaaaaccgccctgcacctggcggcggagatggtctccccggacatggtgtccgtgctgctcgaccaccacgccgacccgaactgcaggacgctcgacggcgtcacgccgctcgacgtgctccgcagcctcacctccgagttcctcttaagggcgccgtgcggggctgacgcacatcgag

SEQ ID NO: 32505 - DNA, 432 bp, Oryza sativa
  Clone ID: uC-osflM202009a11b1
tcggttacctttctagaataaattttcttgaattgatttgactaacctgataattcattctaatttgaccaaagactgcaccacggctgtgccgcgggaggtacacaactgaatttattttttggtaccgaccattttctgataggcaacatttgaagttgcagtatctgcattattaaagcgatcaactatgtttcagaactcattatctaaaagctatctttcagaactgttattaggacttcttggaccttactggactgtaaggtgctttggattaatcgccacttcatttagtggatcatttcatccctgatttttggacactactgaactgctatcttgctaagtgctttggaattatgctggtcatttcattcaatctcatgaataaatggctgcattgagtactaggttgtgctttaaaaccca

SEQ ID NO: 32506 - DNA, 312 bp, Oryza sativa
  Clone ID: uC-osflM202009a12b1
ttcgttttgagatatggatacccgcgtggagaatggtaccttgatgtgattcagagactggctcctgttatgattgagctcgaacgccagcgagcaccagtggtcgttatctaccaccaggctgccttgcggtcgctatatgcatatttcgctgacagggctctgagggaagtcccagatattgagatgcctgtccacaccataattgagatacaaatgggagtcacaggtgttgaggagaagaggtacaagctcatggactgaatatacatacatctaggctcagcaggacagcaagaatttgctgttttc

SEQ ID NO: 32507 - DNA, 350 bp, Oryza sativa
  Clone ID: uC-osflM202009b03b1
gggatccggaattcgaggcacgcgccacgctgttcttcaaaacagtaggggcctgaatgggctaccatgttgatcatcactagcctgttggtgcggaagcattattcgcgatagatgatgctggacaccgtggaaagagaagaaagaagcgatttgcagataaagaaagcatcttcagaggagtcgaatgagcaaagcagatgcgcccatgacaatagccaagctatcataacaggttccccgacaggtacttcacacaatcttcaagttggcctcttatccaccaaatctatgaggagggaggtgcgcacgcagaaacgccttgctgttgagaaagcttgtgatatttg

SEQ ID NO: 32508 - DNA, 437 bp, Oryza sativa
  Clone ID: uC-osflM202009b04b1
ctccttatctctccccttctctctgtctcgctccttgggtggctcgctttatcccccccgaataaaggcgagaagccgcagcggcggacgaagaagagggcagatagaaatggcggcggagacgttcctcttcacctccgagtccgtgaacgagggtcacccggacaagctgtgcgaccaggtgtcggacgcggtgctcgacgcgtgcctcgcccaggaccccgacagcaaggtggcgtgcgagacgtgcaccaagaccaacatggtgatcggtgttcggcgagatcaccaccaaggccaccgtcgactacgagaagatcgtccgcgacacctgccgcggcatcggcttcgtgtccgacgacgtcggcctcgacgccgaccgctgcaaggtgctcgtcaacatcgagcagcagtcgcccgacatcgcgcgggggtgc

SEQ ID NO: 32509 - DNA, 432 bp, Oryza sativa
  unsure (1)..(432): unsure at all n locations
  Clone ID: uC-osflM202009b05b1
ttcctgcaagacggaggtgctttcaaagttcagagataaaatggccatgaatattattgacctggttgccttctccctgctcttcgcagtgggaacccctatcagggacatcaccgatgtgtgctcgtgacagatcaaggatttccagtacctgaacagcacgggcctgcaccttgagctgcaccacccgcggagcccctgctcgccggcgccggtcccggccgacctcccgttacggccggtgctcacccacgacgatgcgcgcatctcgtccgctgggcggcgcgcctcgccaagacgccagacggcgcgcgccacctgcctggacgccgacgccgacgccggtctcgccggctccctgcggtccgtgccgctcagcccggcgcgtccggggncgtgggcaactacgtgacgcgcatgggcctcggcacg

SEQ ID NO: 32510 - DNA, 435 bp, Oryza sativa
  Clone ID: uC-osflM202009b11b1
tcggttatccacgggggcgcttcggatgcacggcggcggagcctccacgacgaccaccgccatcgccgcctcgcgggtagcacatgttgcatgagcagcacgcgccgccgccgcagccggagccggaggtttcgctacagctgtcggcgcccgccaccgccgccgacgatgtcgctgcaggcgacgaccaggaggtcaccgtcgtcaccacgtaccgtgacatccaccctctgacgccgccgtcgccgacgacgacgactacgccacccacgcggctcgggtccgccgcgtactcgtgggacacggccagcagccaccggtccgtgtcgtccgaggagcagttcatgacgatgagccgggagttcacggccatggtcgccgccgggacgaccatgcagactggccccaacgacggcaacaacggcggtgaccagc

SEQ ID NO: 32511 - DNA, 386 bp, Oryza sativa
  Clone ID: uC-osflM202009c04b1
attcacaacaataaagtgcttcaagttgatgcggtgtcatcaaacttgagtcccacggattgttttgtcctgcaatctggaaattcaatgtttacatggattggcaatgccagttcgtatgaacagcaacaatgggctgcaaaagttgctgaattcttgaagcctggtgttgctgtcaaacattgcaaggagggaactgagagctctgccttttggtttgctcttggtggaaagcagaattacacaagcagaaatgccacacatgatgttgttagagagcctcacttgtatacattctcattgaggaatgggaaatgggaggtcactgaaattttcaactttttacaagatgatttgctgactgaagacatgatggttcttgatac

SEQ ID NO: 32512 - DNA, 378 bp, Oryza sativa
  Clone ID: uC-osflM202009c05b1
ttttattagagtaatactcgaaggcgagtttaaggatgagtttgttttgcagggtgctaaatccggaaagctgaacttgcacttcaagtggacgccgcactcaatttatcgtgatcgtgatcgggaccagtgaaatctgtgtagatacatcacgtcaagcagctgataaatatttcttcccctacggtgcctgtacattagtttttctgtacagttaattcacttatcttgtagcaacaaggtgtaatggaataaaagaatggcggtttcatgttccgacggaaatgcgatgtgctatgaatggagggttgcagaaagatgcatggtaacacggggagatgggctacccaagtatggaaaaaaaaacaaaagggcggc

SEQ ID NO: 32513 - DNA, 428 bp, Oryza sativa
  Clone ID: uC-osflM202009d11b1
tttaaggctaaaaatggcattggatgtggcaaaagggatgaactacttgcatgctagccatcctactattgtgcatcgtgacttgaaatccccaaatcttttagtggataaaaattgggttgttaaggtgtcagattttggcatgtcaaggttgaaacatcacactttcctgtcctctaaatcaacagctggaacaccggagtggatggcaccagaggttctacgtaatgagccatcaaatgagaagtgtgacgtatacagttttggagtaatcctatgggaactagcaacaatgcgtgtaccatggagtggactgaatccaatgcaagttgtaggagcagttgggttccagaacaggcgactagaaattcccaaagaaattgacccactggtggctaccataatatcttcgtgctgggaaaacgatc

SEQ ID NO: 32514 - DNA, 346 bp, Oryza sativa
  Clone ID: uC-osflM202009e04b1
gttatttactatatatgtgttgctgcatgcttgcatgcatgcacatatatatccagagaaatattctttaaacgaaataatctataaatttctgagctaggattgtggagcatatacacgccagcactataatggcgtctgctctcccatcgaactggccctgtgacaatggggtcatttgtttttgcccacaatattttctgctaaattcattctctgattttgcgtgagattatcatgagaagcagtaaccatgttgtgtatccttttcttcgaaacagataggggacaaaaaaacagtagacagtataaaaccgttagatcaagaagaactgaaaaactgaaa

SEQ ID NO: 32515 - DNA, 434 bp, Oryza sativa
  Clone ID: uC-osflM202009e08b1
ttcggcgcgcacgacggcggcgagccgaggccggctagctaccaggtgcgccgccccatgtccgcccgcgcgcacggcacgctctacttctgctacaggttcaccgacgtcaagcatcccgccctcgaagccatcgaggccgcgaccgcgaccgcgacgagcagcgccaccaaacaagggcagtacgtgcccatgtacgcgcaggactctgatgagaaggcgacggagaagagcgtgtcgtcgccggtcaccgcctacccgccgccgtcgaacgccgtggtagcgcacccgccggtcgtgccgtacggcgcgccgtacggaggagggtacccaccgcatcagcagcagtacggttacgcgggtcagccgtcgtacgcgtacaacgccggcccaccgccgccggcgacgtacagctacgcggcggcacaacagcc

SEQ ID NO: 32516 - DNA, 356 bp, Oryza sativa
  Clone ID: uC-osflM202009e11b1
tttcgttctgaccattattgcgcgaccgctggatcggtccaccttgcagtcgccgtgctccggactgcccgcgtggccgaaaggtgtcagctaagccggccagccgaattgttacccaccagaattcgggtatttcctgatcgatgacgcagcgggcggatctggacacgctccggccggcggaggccgccgacgtgcaggtcgtcacgtgggacgggaagagcatcgccgcccataccgttgaccttgtaagatgcacccctggctcttttatgttcaaggcactgccatctgctccgctggagcggactgatctcatcgggcactcctttggtggaacccccagtgcaccatac

SEQ ID NO: 32517 - DNA, 288 bp, Oryza sativa
  Clone ID: uC-osflM202009f03b1
gcgttctgtgctcttctccatgggaaactgtgatgaggccacacacaagaatgttcttggatgccccctgccataaacattcctaggaccacatccgcacccaaagacccaaacaaacccaagaaccacccccctgtttcggcctgcacttaactttactctctctctctcccagttcttctaccactgcaggagcagggattgctggttccttgggttgattctttggtcggtggcttcttctcttggagttctgatttgggggggctcgagttccctgtctcaaag

SEQ ID NO: 32518 - DNA, 406 bp, Oryza sativa
  Clone ID: uC-osflM202009f04b1
ttaaatataaaaggaaaaaaaccacaccatcactctctcgctccccatcgatcggagaaaatggcaaccgccgccgccgcctaacgcgccgccctctcaaggcctcacgccgccgccgccgcggcgcgcgcgagccccgccgcgggggcgcgggtgacgctcccgcggcgccgaagcgtccgatccgcggtgatctcgtcgtcggcgtccgcggcggcggtggcggcgtcggagccggcggcggggagggctgacgctgggcgcggggacggacggggcgctgtggccgaaccggcggtgctggtgcggaaagctgagcgaggccggctggcggtgctgcgcggttcggggcgtggagtgcgcgtccggatgtcccgcgagctcctcccaggtgggcattcgacgc

SEQ ID NO: 32519 - DNA, 421 bp, Oryza sativa
  Clone ID: uC-osflM202009f12b1
gtttgtgggtgtgtccctgtctcccctccttcctcctctcctttcccctcctctcttcccccctctcacaagagagagagagcgccagactctccccaggattcagccatgaagggggccaaatccaagggcgccgccaagcccgacgccaagttggctgtgaagagtaagggcgcggagaagcccgccgccaagggcaggaaggggaaggccggcaaggaccccaacaagcccaagagggctccctccgctttcttcgtttttatggaggagttccgtacggagttcaaggagaagaaccccaagaataaatctgtcgctgctgtaggaaaagcagccggtgataggtggaaatccctgaccgaagcggacaaggctccctatgtagccaaggccaacaagctcaaggccgagtacaaca

SEQ ID NO: 32520 - DNA, 378 bp, Oryza sativa
  unsure (1)..(378): unsure at all n locations
  Clone ID: uC-osflM202009g07b1
tcgttctgattatcaagtacttagatcagcttttgttcagaggcactacccaaaccgtcctgattttgatttccacaagtacatggttcgtgctcttgagcatgattttaaagaagtagttggaatcagctggtacctatggcttttcgttattgtcttcctgctactgaatataaatgggtggcacacatacttctggctgtctttcttgcccttaattctcctactcattgttggcacaaagctggagctcataagcactaggctggcacaagaggcagcagactgcccagatgaagcaacaggaaacccctggacaaagccatgcaaggagcacttctggttcagcaagcctaggattgtnctcatttgatccac

SEQ ID NO: 32521 - DNA, 220 bp, Oryza sativa
  Clone ID: uC-osflM202009h07b1
gtttgactcacgttgtccaaggtcgagagtggtggaaatgagctcctgatcacgctctgtgtttgatctggacacgttcatttctcttggtagggcactggtgttctgcgtatcactgatggtgctttggtgcctgtcgactgtcctgagggtgtctgtgctaatactgatactgggctgggccaagccttgtggcgaggattattgaccttacttactg

SEQ ID NO: 32522 - DNA, 479 bp, Oryza sativa
  Clone ID: uC-osflM202011a01b1
ctcctcgcttctcctcgccggcgacgacgacttgcgccctcgagctctcccctatcctgcccatctcctggcgctccctccctcccttcgcttgcatcctcacgccatcgacggccccgccttccccttctcatctggtcccagcgacggcatggggatcaatctgctgacccaggcccttctcttctagcagggggagtggaccatgcgaagctagctttgggggcactgtgatagagatcgatggtgtggctgtgtggggatcgatctgttggcccatcgcctgattttgggtaggtgcactcaagctcaacatgaagttctcaatccagtgcgttgcgctcgaggtcagaatagccggcggcgccgcctgtctccctcctagctctcccttacgaacgacttttgagctcccttcctccccttgcattctcacgctacccgtgactcatctatcttcttctctgggagatgatgca

SEQ ID NO: 32523 - DNA, 372 bp, Oryza sativa
  unsure (1)..(372): unsure at all n locations
  Clone ID: uC-osflM202011a03b1
aattgtcaaaagaacagagatctgcatatcttgatgaactagactatcgtgaaactctgtacctaaagaaacagtggaaggagggaattaggaggcaaaagcttgttgaagctcaaaatgttgatgcatcaaatgctgttggtgatgattacgaagaaagcgtgtccccagaggttgtgcacatgtcagatatggaaattccgtcaagttttgactctgattatccagtccatcgctaccgttaccttattactgatgatatggtgttcagaccagttttagatccacanggatgggaccatgatattggatttgatgggatcaatttttgaagtatctcaagatttagaanagaataccactgcatcaatt

SEQ ID NO: 32524 - DNA, 339 bp, Oryza sativa
  Clone ID: uC-osflM202011a05b1
ctgcacgcgaccgcggactgactggctggaccgacccacgcgtttttttcgagcgaatcaccataaagagggagaccgcctgaacagctagtactgaagctggacatggaaggttagacctctcaccttgttgcagccgactgctgtggcagtacagttgatccattgaaggaaccttccttagtcacagtaaacaccgtcctttccattctttctggggattacccagctgaaaaggtttactgctatgcaacctgaagatggagctgcaatgctcacatttgaagcactggcagaaacatgtgaatttgcacagaaatgggtccctttctgcaaaaa

SEQ ID NO: 32525 - DNA, 420 bp, Oryza sativa
  Clone ID: uC-osflM202011a10b1
ttggttcttgtagctctcgacccccgcatctcatccctcctctcgcttagttcagatcgaaatcgcaaatggcgaagattaagatcgggatcaatgggttcgggaggatcgggaggctcgtggccagggtggccctgtagagcgacaacgtcgagctcgtcgccgtcaacgaccccttcatcaccaccgactacatgacatacatgttcaagtatgacactgtgcacggacagtggaagcatcatgaggttaaggtgaatgactccaagacccttctcttcggtgagaaagaggtcaccgtgttcggctgcaggaaccctgaggagatcccatggggtgagactggcgctgagtttgttgaggagtccactggtgttttcactgacaaggacaaggccgctgctcacctgaagggtgtgc

SEQ ID NO: 32526 - DNA, 482 bp, Oryza sativa
  unsure (1)..(482): unsure at all n locations
  Clone ID: uC-osflM202011b03b1
agccattggcttcggccaaggctgatgagacattcctaaccaccatgggcaccctcccaccattcccgcccctcctcctcctcgtcgccgacatcttctccttcctctcctcgtcgtgctttgctgtgaccagccatgaggcggcggccatcgcgcggcgccagctgctcaacttcgagaagcacggcgaccacgtccacatcgatatcgacatcgagatcaaggtgagcaacccgcggctggcggcggcgcacagggcgctgcacgcgctgaagcgggcgctctactccgaccccggcaacttcaccggcgactgggccggccccgacgtgtgcgcctacaacggcgtgctctgcgcgccgtctccggactacgcgtcggcgagcgccgtcgcgtcgctggacatgaacgccgccgacgtcgcgggctacctgcccagggagatcggnctcctgtccgacctcgccgtgctccacctcaac

SEQ ID NO: 32527 - DNA, 397 bp, Oryza sativa
  Clone ID: uC-osflM202011c05b1
cctcgttggcgtgggcgcgatcctcgtcgtcgcgggtcgtcgtcggcgtggtcgccaccgtcacccgctccggcaacaaggccggggacaacttcaccgtcccgggggaggccaacctcgccacctccggcaagtccgtcgagtccctgtgcgcgcccacgctgtacaaggagtcgtgcgagaagacgctcaccacggccaccagtggcaccgagaaccccaaggaggtgttctctaccgtcgccaagtcggcgctcgagtcgatcaagtcggcggtggagaagtcgaaggcgatcggcgaagccaagacgagcgacagcatgacggatagcgcgcgcgaggactgcaaggccctcctggaggactccgtggacgacctcaggggcatggtcgagat

SEQ ID NO: 32528 - DNA, 498 bp, Oryza sativa
  Clone ID: uC-osflM202011c06b1
ttcggaggagcccaacgcccgcgaaaccctagccctcgcgctcgcccaccgccttcctctccccccctaccctaccccgagctcgccacccgatccgatcgaagatgcataagctggggagaggaagccgcgacaaggtgcagcagttcatgaccataactggtgcgagtgagaaggtcgcccttcaggccctgaaagctagtgattggcacttggaaggagcttttgattttttctacagccaaccacaaatttctctgacgaactctcggcatcttgaagatctgtacaacagatacaaagaacctgatgttgatatgatcatggtggaagggtggtatctcagttttgcactgatcttcaggtggatccccaggatattgttatgcttgtcatatcatggcacatgaaagctgccacaatgtgtgaatttactcgccaggaattcattggtggactgcagtcaattggggtggattcaattgaaagctccgtgag

SEQ ID NO: 32529 - DNA, 467 bp, Oryza sativa
  Clone ID: uC-osflM202011c07b1
ttgtttccgtgtgcatgatctccaactccaccagcgtcgtcgaggtgttctcccgcatcgacatcaagttcgacctcatgtactccaagcgcgccttcgtccactggtacgtcggcgagggcatggaggagggggagttctccgaggcccgcgaggacctcgccgcgctggagaaggactacgaggaggtcggctccgagttcgacgatggtgacgagggtgatgagggtgacgagtactagagaggttcagggttcttgcctggtgccttggcaatgcttgattactgctgctatcctatgatctgtccgtgtgggcttctatctatcagtttgtgtgtctggttttgaaaaacatttgcttttcgattatgcagggtttgcttgtagctttcgctgctgtgacctgtgttgtttatgtgaaccttctttgtggcatctttaatatccaagttcgtggtttgtcgt

SEQ ID NO: 32530 - DNA, 330 bp, Oryza sativa
  Clone ID: uC-osflM202011c09b1
tcgttttcctcccacccaatcctattatgacattacgatgcctatccccattgccttcctcttcctcctccccctcctcctcgccgcctcctcccatgccaccgcctcctcccatgccaccgcctccgtcgtcccacaacctcgagggttctatataaactgtggatcggagaaggaggagcagatagggagcatcaagtggatacaggatgaggggttcatcgccgtcggcaacatgtccgccgtcgacaagccgaacatcctgccgctgctcgccaccgggcgctacttccccgacgcgaccggcaggaaagactgctaccagcttcc

SEQ ID NO: 32531 - DNA, 430 bp, Oryza sativa
  unsure (1)..(430): unsure at all n locations
  Clone ID: uC-osflM202011c10b1
tcgctccgaggggcacatcctggatctcctcaagtcggcgtccgacgaaggcatcatcaacgagagccagatcaccaaagggttcaaccgcctcatcgattccgtcgacgatctgacgctcgacgtgccaaacgcgaggcgcctcctgaaatcgatgatcctgaaggcctcgtcggagggatggctctgcgcgtcgtcgctgaagccgctgggccccgagccgaagaagggccgtcgtcgaggacgacgctgcggtgcggcagttcaaggcgaagacattgttcgatcataaaggagtacttcttgacaggggacatcatcgaggtgatgagcagcctggaggccgagactaccncgtgttcctcctcctacaacgccatctttgtcaagaagctgatcaccttcgcgatggacccggagagccgcgaga

SEQ ID NO: 32532 - DNA, 468 bp, Oryza sativa
  Clone ID: uC-osflM202011d04b1
ctactcaagatgaagtactacgaggagcgcgccgagatgtacgtcggcgacgacgtctcgccggacttctacggctgggtgttccccaagtgcgaccacgtcgccgtcggcaccggcaccgtcacccacaagcccgacatcaagaagttccaggccgccacccgccttcgcgccaaggaccggatcgagggcggcaagatcatccgcgtcgaggctcaccccatccccgagcacccgaggcctaagagggtggcggggagggtgacgctggtgggggacgcggcggggtacgtgacaaagtgctccggcaggggatctacttcgcggcgaatagcgggcggatgtgcgcggaggcgatcgtggccgggtcggcgaacgggacgcggatggtggaggagagcgacctgcgcaggtacctggccgagttcgaccgcctctactggccgacgtacaaggtgctcgacgtgc

SEQ ID NO: 32533 - DNA, 505 bp, Oryza sativa
  Clone ID: uC-osflM202011d07b1
tgtttatcgccatctctctcagctctcacagctcactgcatcaatggccgcggccaccatggcgctctcctccccggtgatggcccgcgcggagccgtggacctcctccgcgctcttcggcgaggcgcggatcaccatgcgcaagaccgccgcgaagcccaagccggcggcgtcgtcggggagcccgtggtacggcgcctaccgcgtcctctacctcggcccgctctccggagagccgtcgagctacctgaccggcgagttcccgggcgactacgggtgggacaccgtggggctctccgccgacccggagacgttcgccaagaaccgggagctggacgtgatccactcccggtgggcgatgctgggcgcgctcggctgcgtcttcccggagctcctcgcccggaacggagtgaagttcggcaggccgtgtggttcaaggcgggctcgcagatcttcagcgagggcgggctcgactaccttggcactccgagcctgatccacgcgc

SEQ ID NO: 32534 - DNA, 550 bp, Oryza sativa
  Clone ID: uC-osflM202011d08b1
gctggctcccccgccggcaccggcccggccggcccggccgggccgacccacgcgttttattttggctatttatcacgttggactatcttcgcttgctagtcaggacattatcatcgtcatcatcaattttccctttcaaatggtccaaaagaaatctcgtgtcaatggtcttcatacgcaaatgttgacagatgatcggcgaccactcgtgagaaacatagcacttggcagcaatttcatataagtatcgaacccacaagtgcaaagaaagacattgatccaaacaggtagctaagttctttggtggtcttggtcctggacttttgccttcagatcttaattcatcttttaattagagataaataagccaatactagcctataagaatggttagctgagaaatcattggtttattttagttgacggatcaagatacatagctttcccttcaacaataacatgggaccgaaaattgatcgaaaaaccatggtagatttggtttaaattgattcaccttttgctgctgtgcctggatattttgctctttttt

SEQ ID NO: 32535 - DNA, 473 bp, Oryza sativa
  Clone ID: uC-osflM202011d09b1
tcggtttaagaaggccgtcgtcgaggacgacgctgcggtgcggcagttcaaggcgaagacattgtcgatcataaaggagtacttcttgacaggggacatcatcgaggtgatgagcagcctggaggccgagaactacgcgtgttcctcctcctacaacgccatcttcgtcaagaagctgatcacctccgcgatggaccggaagagccgcgagaaggagatggcgtccgtgctgctgtcctcgctcggaatgccgccggaggacgtcgtgtcggggttccacctcctgatcgagtccgccgaggacgccgcgctggacaaccccgccatcgtcgaggacctgaccatgttcttcgccaggtcagtggtcgacgaaggtgatcgcgccatcgaacctagagaaaatggaggaggaggccggccgcggcaagccagagggatcctccaccggcttattggcgctccggaacgcccgt

SEQ ID NO: 32536 - DNA, 509 bp, Oryza sativa
  Clone ID: uC-osflM202011e03b1
tgttcattatccagattgatacaaaaaacattctcttcatttgtggtggtgcttttgttgatttggagaagactatttcggaaaggagacatgattcttccattggtttccaagcaccaattcgttcaaatatgcggactgggggtgtgataaatgctgagatcacatcctcgttactcgaatcagttgaaagtggtgatctcattgcatatggattgatcccagaatttgttggtagatttcccattcttgttagtctatcttcccttagtgaagaccaacttgttgaggttcttacaaaaccaaagaatgccctaggcaggcagtatacaaagttgtttgaaatgaatgatgtcaagttgcattttactgagaaggctttacggcttatttccaaaagagcaatagcgaagaacactggagctcgaggtttaaggtcaatattagaaagtttattgactgaatccatgtacgagattccagaaatacgaactggaaaagacaaaata

SEQ ID NO: 32537 - DNA, 494 bp, Oryza sativa
  Clone ID: uC-osflM202011e10b1
tcggtatagattgaccgtcctttaccaacatatagggagggccgtggtcgtgattatgatacaatgtctggttcaaaacgctcatatgctgagatggatgatgtgccacctcgatatcatgacattagtgttcgtcagtctaaggcacgcttagactatgatgttggtggcagcagtgcccggtatgcagatacatatagcgagaggcttggacgatcacatgcgggatacagtggtggcagatctgtctctggtcatgatccagtgtacagtagtggtcggcatggcatgagttatggaggttccgcaagcagtaatgatgctggtggaatgtactcatcaaatttcagtggtagctacatgtctcgtgggtctgatgttgtggggaagttcatattcatcactttactcagggcgtaatgtaagtagcagcagtggctactatggcggtagtggttctaggtcatattactgagaatttgcatcatatcgtc

SEQ ID NO: 32538 - DNA, 466 bp, Oryza sativa
  Clone ID: uC-osflM202011f01b1
tttgctcttagtgcaagtgtgatctttacaacatgacgatcgacgagtatgggcgcaaactcccaaaggactacattggtggtttatattgctgctatgatgagacgcagtgcaaggttaaggaaggtttcaacggtgagctacggaagctgttcttgcagtacactgtgacgtggcttgactggaatgatgcggttgtgccagtcaagatttacatatttgatgttactgacacttctccgcctgatgaaaaatccggaactgcctgcaaggttgagtaccaagttgaggaatgcagtccagaaaaccgggccaagaatgagtgcattgatgttaaagtaaccaaagaagtaataccttgtggaggcgatatcgtgtttggtgtcgcgcaccagcattcaggtggaattggtgcctctttacacggtcaggatggacgtctgctttgtgcatcgattccgagcta

SEQ ID NO: 32539 - DNA, 430 bp, Oryza sativa
  Clone ID: uC-osflM202011f07b1
ttgatggtggcgagaatggtttcaaccaagctattgaattgtcagctgagattctagcaaatgtcaagttcatacaggagaagaagctaattggcaagtattttgaagagatcagtcaagatactgggaaatatgtctttggggttgatgacactcttaaagctcttgagatgggtgctgttgagactctaatagtgtgggagaaccttgaaaccaacagatatgtgcttaagaacagtgcatctggtgaaactgtgatcaaacattttaacaaagagcaggaagctgaccagagtaatttccgtgatccggctagtaatgctgagttggaagttcaggaaaaaatgtctcttctggaatggtttgctaatgaatacaagaagtttggttgctcgcttgagtttgtcactaataaatctcagagggatct

SEQ ID NO: 32540 - DNA, 449 bp, Oryza sativa
  Clone ID: uC-osflM202011f08b1
tcgttctagagactgatgatggggataataagctgccaccagagactgggaatagagctgctgatgacaaatcgaaacatgttgataacacacctgctggcaagggaaagcggggccggcctcctgcatcaaagtcgcatgagaagaagaatgttggaaaaggcaaagtatcaggtttagagtctaaaaaagctgacgcagttagtgattctggtggaagggctacaaggcgactagctaaagatgatgatatcaagtcttcattcaaaaagactggtgaaggggaatcttcgaagaagaagcagaaggaaaatttgaaacagcaggaagatactccacccgatgaagacactgatgaggatctcagtttaaaggatatcgtatctcccaagtcttcggccaaaacaagtaaaaacaaaggccaggcaggtgacaagtggggcttcaaa

SEQ ID NO: 32541 - DNA, 509 bp, Oryza sativa
  Clone ID: uC-osflM202011g03b1
gttgtcttcgtcgtcgatcggctccggtgagggtgatcggtcgccggcagaggcttctgatgctggagaggccgccgatcctgaagagataccgcgcaccggggtgggcagtggtggctcgctggaaatgtcgtcgcagcagcagcacgccggtgaggcccccgcctccgtcgccgccgctgcccgggcgcggctcaggtggaccgggcagctgcacgagcggttcgtcctcgccgtggcggagctcggcggcgcggacagggcgacgcccaagtccgtgctgagggccatggccgtgccggggctcaccttgtaccacctcaagagccacctccagaagtaccggcaggcggtgagccgcggcggcaatggaggcggctgaggcagcggcagtctgaacgaccggtcatccttgtcggagcgccaaccagccgaccacgacggcgatagcgccgccgatgagccgcgcaccattgcttacgaccgcgacagcgatggcgatgctaaag

SEQ ID NO: 32542 - DNA, 352 bp, Oryza sativa
  Clone ID: uC-osflM202011g09b1
ctgcacgggcccggcctgacttcccggacccacccacgcgtttgctttttgcgcaaagcagacttgtgcacctggacgatatactggtcttgctacagcctccactgggggtgcttgggggtcaagtgagcatcgcatcaaccaatccatccggtggcaactagtgagtgcagctaagggctgcttgtgtgcacataacgagagatttgaatgtggcatgggctcaaaaggacagatctttcgatgtctgtattgagagtgcaagaggagaggacgttcctgtgtgatgatatgtccgtgactgcctgtgtgtgtgagtgccaggtaatctggatgcagtccacaaaaccgt

SEQ ID NO: 32543 - DNA, 472 bp, Oryza sativa
  Clone ID: uC-osflM202011g11b1
ttggttgtaccacgccctacgacaccaaccaaaccctcctcctagccccccggcggcgatggccggcgtcggcggcagcagcagcggcggcggcgacgtggagatgggcgggtggtcggagctcctccactcctccactaagcttctcgagcaggccgcccccaccccgcactttcctcccctccagaggaacctggaccagctggaggtgctctccaccaagctcaaggccaagacggtgcgcgccgaggcgcccgtgcagtcgctctccgccaccaggttgttggcgcgcgagggggatcaatgcggagcagctcgccagggacctcaaatccttcgaacttaaagtgatggccggcgagggatatcccatttcatagagggatattatactaatctcatttgctgattatcagatcgagcagtttgtccggtttgagattagacattttactgtactgctggttaaaac

SEQ ID NO: 32544 - DNA, 351 bp, Oryza sativa
  Clone ID: uC-osflM202011g12b1
tgatggacggatgcgaagacaaccacaggacctgcgtagtgaacccgcgcttcaaggcccccgcgggcaatgtagtggcagcacccgccgtaacgtatagagggatcggacgccaggaaggcccaccacctctgcggagaccccaagaacctgcggcggtgcggcgcacgttgatgcgacacaccattacctgcggaggaagcgttggaggtggctgctggcgccctctgcggagaacctggcgctcgcgtgcttactcggtgtcattctgggtctcgactgcgacctgtccctaaccgacgccggcgcgaaccgtcggctgcggcttcaatacctgcattacatctgcga

SEQ ID NO: 32545 - DNA, 485 bp, Oryza sativa
  Clone ID: uC-osflM202011h04b1
ctttcttggtttcttgatctgtagcttattagcggccatgtgcggcggagcaatcatctccgggttcatcccgccgtcggccgctgcggcggcggcggctgcggcggccaagaagcagcagggcaggagggtcacggccgacgtgctgtggccggggatgctgcggaaggggaaggcggcggcggcggaggaggactttgaggccgacttccgcgagttcgagcgtggcatgagcgacgacgaggcggaggggggcggcggcgaggaggaggaggacgacgacgacgtggtcgtggtggtccccccgccggcggcggcgaggttcgtcgtccgtgccgcggccaaggcggcgcccccaactgcagatgggatgttgactacaaagcttgtccaacatgatggacctactgctagatcagcaaagcacaagaggaagaatcagtacagggggatccgccagccgtcctggggcaaatgggcagctg

SEQ ID NO: 32546 - DNA, 394 bp, Oryza sativa
  Clone ID: uC-osflM202011h07b1
tgcgtttcgttttagggtagtagcaccttgctctcctttgccttcagagaaaccgggagcaatggcgtctgctactctactcaagtcatctttccttcccaagaagtctgaatggggtgccacccgccaggctgccgcccccaagccggtgactgtctccatggttgtccgcgctggtgcctacgacgataagcttgtcaagaccgcgaaaaccattgcatcaccaggaaggggtatccttgccatggatgagtcgaacgcgacctgcggtaagaggcttgcgtcaattggccttgagaacaccgaggccaaccgccaggcttaccggaccctccttgtcaccgcaccgggcttgggacagtacatttccggtgctatcctcttcgaggagact

SEQ ID NO: 32547 - DNA, 453 bp, Oryza sativa
  unsure (1)..(453): unsure at all n locations
  Clone ID: uC-osflM202011h09b1
tcggttcgtcgtcgtcttcccgtggctcgcgttcggccacctcctccctgccctcgagctcgccggccgcctggcctcgcgcggcctccgcgtgtccttcgtctccaccccgcgcaacatcgctcgcctccgccgcccgtgcccgtccgtcgagttcgtcgagctgccgctcccgcgcgtcgacggcctccccgacggcgccgaggccaccaccgacgtccccgatcacatgtcatccgctctctggaaggcctccgatgggctcaccgcgcccttctccgccttcctcgacgccgccgccgccgcggggaacaaggtcgactggctcatcctcgacggcatgctttcctgggccgccgnctccgccgccgaccgnaaggttccctgcgtcctcatgatgctgtacacggcgaccgcgtgcgcgcatttcggcgtgccggatgaggcgcggga

SEQ ID NO: 32548 - DNA, 357 bp, Oryza sativa
  Clone ID: uC-osflM202011h11b1
gcctgcgccgcgctcccgctcgcgccgtggtcagggtttcgtcgcgtgatggcgtcgtcggggaagatggaggggccgtcggcgccggcgatgcggcgggacccgtacgaggtgctctccgtgccaagggactcctccgaccaggagatcaagtccgcctaccgcaagctcgcgctcaagtatcaccctgacaagaatgctagtaacccagaagcatcagaactcttcaaagaggttgcatattcatatagtatcttgtcagatcctgagaaacggaggcaatatgatactgctggttttgaggcattggagaatgaaggaatggatatggaaattgacttatctaatcttggaact

SEQ ID NO: 32549 - DNA, 430 bp, Oryza sativa
  Clone ID: uC-osflM202012a04b1
atcttttgtcaccaaacaaattgttggataacctattttttgttattgtatgcattggtatatagcagagctctcaagttgtttttcctctattgaaaagcagcattattgaattcctgaatgattgcatcaggttgataagaaggttgctgatggattgctgaggctcatcctcctgaaaggacctctgggaagctgtgttttcactggcgattacgacaggaatgccctcgacgaaaccctccgtgcattctgcgactgctgattcttcctacttggatcttcagactgtatactaaataggctacattatcatttcagagaggagactgcattgtatatgtatgagatctttcccccttttttttttgtcggagaaataatggagaatgtggataggggttggtttctggttgtagcgcgtaagact

SEQ ID NO: 32550 - DNA, 462 bp, Oryza sativa
  unsure (1)..(462): unsure at all n locations
  Clone ID: uC-osflM202012a09b1
ctcgaggagtcgagacttctctcccccaaatccccagaaccctagcggagctccacctcgagatggcgacggcgagcgatgcgccggcgagctccacgataacgaccgccacggacgacgccgaggtggagcgcgaccagggcaacggcaatggcgccgtgtcagccgcacccgccgccgtggggaaggaggcggcggctgaggaggaggagatgatcggcccggctcccgtgccgccgcggccgaggaagaagcgcccgctccagttcgagcaggccttcctcgacgccctgccctccgcggccatgtacgagaagagctatatgcatcgggatgtcgtcacccacgtcgccgtctctcctgctgactacttcatcaccgggagcgcagatggacatttggaattttgggaagaagaaacccgctggngatcgaatttgctaaacatttttcgatctcatc

SEQ ID NO: 32551 - DNA, 146 bp, Oryza sativa
  Clone ID: uC-osflM202012b01b1
attccttttcgtcctcgcagagcatccattgcctggggattctattccaaattcccccacgcgaagaacagccagcggcctcctcctcctcctccttggcctttctcctggtttcgtgccatctttccagggaaggaggaaccgtg

SEQ ID NO: 32552 - DNA, 297 bp, Oryza sativa
  Clone ID: uC-osflM202012b07b1
tgttcatcaccacctcactccactaaccagagagagaacgcagctagtagcattattagcatcatgaccgcgatggcggcggcggcggcggtgttggtgtcgttgctgctggtggcggcggctgcggggcagcaggcggcgctggtgcccggggtgatgatattcggggactcggtggtggacgcccggaacaacaaccgggtggcgacgctggtgcgcggccgacttcccgccctacggtcgcgacttcccggagacgcactgtgcacccacggggcggttctgcaacgggaagct

SEQ ID NO: 32553 - DNA, 514 bp, Oryza sativa
  Clone ID: uC-osflM202012b08b1
tcggttgaagcattctgagttcatcagctaccctatctccctatggactgagaagacaactgagaaggagatttctgatgatgaagacgaggaagagaagaaggatgctgaggagggaaaggttgaggatgttgatgaggagaaggaagagaaagagaagaaaaagaagaagatcaaggaagtctctcacgagtggaacgtgatgaacaagcagaaacccatttggttgaggaagccagaggagatcaccaaggaagagtacgctgctttctacaagagcttgacaaacgactgggaggaacatctggctgtcaagcacttctctgtggagggtcagcttgaattcaaggccatcctgtttgtaccaaagagagcgccatttgacctctttgacaccaggaagaagcaaaacaacatcaagctgtacgtacgccgggtgtttatcatggacaactgtgaggagttgatcccagagtggctcagctttgtcaagggcattgttgattctgaagac

SEQ ID NO: 32554 - DNA, 252 bp, Oryza sativa
  Clone ID: uC-osflM202012b09b1
gtcgccgagtaaggccatacacaggggttggctctctatggagggctggccatggctcaaccaacgtggccatcaatggttctcctaatgccgctgtcaatggctcgatgaaagtggggacttgtggatcttttcatgggatcagtctggctaaaggcagaaatatgtctgctctagtgaagacccttaagcgaatgatacccaaggcttgatccctttgaacaggatctgcaaggtttgccctctcatgaa

SEQ ID NO: 32555 - DNA, 531 bp, Oryza sativa
  unsure (1)..(531): unsure at all n locations
  Clone ID: uC-osflM202012b10b1
gtggcggcggcgccccgcgggcgctctcccagcgggagcaggacatccagatgatgctcgcggcggacgtccacctcggcaccaagaactgcgacttccagatggagcgctacgtctacaagcgccgatccgacggcattttcatcattaaccttggcaaaacctgggagaagcttcagctggctgccagagtgattgttgccattgagaacccacaggacatcatcgtgcagtctgctaggccttatggtcagagggctgtcctcaagtttgcacagtacaccggagctcatgccattgctggcaggcacactcctggtacatttaccaaccaactgcaaacctcattcagtgagccacgtcttctcatccttactgaccccaggacagatcatcagccaatcaaggagtctgctcttggaaacatccncactattgctttctgtgacactgattctcccatgcgctatgtcgacattggtattcctgccaacaacnaggngaagcagagcattggttgcctcttctggc

SEQ ID NO: 32556 - DNA, 514 bp, Oryza sativa
  Clone ID: uC-osflM202012c06b1
gtcttgacgagggagagaaggagaagagggggccggccgcgggcgtcgacgtgttcctccccccctctctctcctctcctctcctctcgatctgcatccttccttccatccattcctccccgcacccttcgcattgctctcgtcgtctcgattcggacgaggatctccaggaaaagaggaggaagcgatatgggttgcttttcatgctgcggagcggatgatgtcggcaagaagaagaagcgcgacgatccttacgtcccgatccctgatccaggtggtaactatggacgcagcaagcccgggcccccagccccttcgcgttctccccccaccagcagaaatctgccaatcgcagtaccggcaattcccctcgatgaaataaagggaataaccaagaacttcagcagtgatgctctcatcggagaaggctcgtacgccagagttttctttggtgtgctgagagatggcaggagatctgcggtgaagaagctcgactccagcaaacagcctgatc

SEQ ID NO: 32557 - DNA, 388 bp, Oryza sativa
  Clone ID: uC-osflM202012c11b1
gtcgctgctttctccgcgtgtgctccggcgatgtcggcgacggcgacggcggcggccatccgctccggagagctactcgcgtgcccgatggctctgcggagggcggcggcgcccgtggcggcggcgatgtcgttccggatggggagagccgcgaccgcgagggcggggcggttggcgacgagggtgagggtgagggtggtggccgcggcggaggagggggcggcggaggagaagtcgtccgggaagaagaagagggcggcgagcgggatcatgaagcccaagcccatctccgacgagctgcgggagttcgtcggcggcgcggaggagctgcccaagacggaggcgctcaagatcatctgggcgcacatcaagggccacaacccttcag

SEQ ID NO: 32558 - DNA, 415 bp, Oryza sativa
  Clone ID: uC-osflM202012d06b1
ctcgagccgccgccaccttggctactcgccgttttcccctcccaaaaatcctccgccgcctgctcatggtctcatggagcctgtggtcagccgccgccttcccctcgagcttgagaagccggagccgctgccttcctctcaagctcgctgaaccagccgtcgctgacgtcgtgtggagccagtggttaccgtcgctgtcttcccagcgagccagcggcagctgccgccaccttcttgcgagttcgatgtccactgtcgccgtcatttcgtctccttctccatcccacgcgagcttggttctgcaagatctgtgccgcatcgagcgcctaccagcacgccggaacccacaggcctacatcttaagcttttttcttatcaaccttacataactggtggaaacctctacttgattttt

SEQ ID NO: 32559 - DNA, 516 bp, Oryza sativa
  Clone ID: uC-osflM202012d08b1
gttcccacccggcgcgcgaccgcgacctctgccgcttccacgccgacgactacgtcgccttcctccgctccgtcacgccggagacccagcaggaccagatccgggcgctcaagcgcttcaacgtcggcgaggactgccccgtcttcgacggcctctacagcttctgccagacctacgccgggggatccgtcggcggcgccgtcaagctcaaccacggccatgacatcgccatcaactgggccggcggcctccaccacgccaagaagtgcgaggcctccggcttctgctacgtcaacgacatcgtcctcgccatcctcgagctcctcaaataccaccagcgtgttctctatggggatatcgatatccaccatggggatggtgtggaggaggcgttctacacgacggacagggtgatgacggtctcgttccacatgtttggggattatttcccggggaccggggacattcgcgatattgggcactcaaaggggaagtattactctctgaatgtcccgt

SEQ ID NO: 32560 - DNA, 78 bp, Oryza sativa
  Clone ID: uC-osflM202012e02b1
gcgttcgtgctcctcccataccgcagcagagcacacagactctgtttttctctccctccgcgctctcgaaatctcggt

SEQ ID NO: 32561 - DNA, 514 bp, Oryza sativa
  Clone ID: uC-osflM202012e03b1
ttctttacagatttcttggcgatttgtctggttctgcctgctcttgctggtttcagatccgggaggggactgagcctccgaagttatcaggagagtgaaagacataatggggatcagcagcgaatcgccgaatgggagccagcagattgtacaaaaggaaacacgagatgagacaacaccacttctgccggtcaaggtggaggaggaggggtttcatgagttcaatggagcttcattttccggggcggttttcaatttatcgaccactattgttggggctggaattatggccttgccagccagtatcaagatgttgggcatcatcccagggattctgatgatcatcgttgtggcgttgctcacagaggcatcaattgacatgcttgtcaggtgcagccaccagggcaagattacatcttatggttggctaatgggtgaggcttacggacagtggggaagaattgcactgcaggcctctgtcgtcataaacacaatggcgtgatgattgttacat

SEQ ID NO: 32562 - DNA, 501 bp, Oryza sativa
  Clone ID: uC-osflM202012f02b1
tgatgggaagccagaaccccagttcagctccgggggctacatgtagctctacacgcggaggaacaacatgtgcacgcagaagacagagcacgactacctcgtagtcgatctacgagaagtactgcgagtccttcgaggagtacataacgtacagggtcttaccttcattaagagagaaacatgatgagttcatgctgtgagagttagcaaaacggtggtcaaacccatatagtgatggcatcgtggctctcacgctacccccataatgttgatcggtactttattttaaggcggttcctaacacagctaagcgagcttgggcttacctgactccgggaaccggtgtaacaagaggatctaaggacaagtacaaagtgcggtgacattcctaaatgatccagaacgtgagggtgaacaaaaagatagggacctgataaagaaggttctggaaatatctgtggaaaatggggtgaatattatggccttctccaaaaatgattt

SEQ ID NO: 32563 - DNA, 439 bp, Oryza sativa
  Clone ID: uC-osflM202012f10b1
tctttcgagcaagagagagagacagggcaaggaagaaggaggagaccaaccctagctaagcccctccctcctctacgctctactgcacaggagaggaggagatggagtcgccgccgaccgccgccgccgccgccgccgcagccgagcgaccgtccgaggcagccgcgctgcgtgcgctcgtggaccgcgtgcgcgccggggaggtggaggccgcgcgcgaggtgcgccgcctcacccgctcctcctccaggcaccgccgcaagctcgccgccgccgtcgagcccctcgtcgccatgctccgctcccccgcccccgacgccggcgaggccgcgctcctcgccctcctcaacctcgccgtcagggacgagaggaacaagaccaagatagtggatgctggagcactggagccactgctgggttatttgcaatcaagtgatct

SEQ ID NO: 32564 - DNA, 329 bp, Oryza sativa
  Clone ID: uC-osflM202012g01b1
tttgtgtgccccggccggtacaactttgacgggtacgttgagtttatggatatggctctctcgaccggtcaaaggttcatccgcacgaccttacaccagtgcggtggctatggaggggattccgtgatcatgctgtttcggtggtgagaggaggaggatatggagaaggacaacgacactgtgtctacatcgaccaatggggacgccgaaactgcgagtacaatagcctgggctgccactccatcctcgtgttgaagggccgaactttcgtggagggctacaccgacttcatgcgcgccttgggtgagcacttcacgtcgttgcttccc

SEQ ID NO: 32565 - DNA, 430 bp, Oryza sativa
  Clone ID: uC-osflM202012g02b1
aaggaaaaaaaaacaaaacacaccaagccaaataaaagcgacaatgggatcgctcaccaccaacatcgtcctcgccgtcgccgtggtggcagcgctggtcggtggcgggtcgtgcggcccgcccaaggtgccacccggcccgaacatcacgaccaactacaacgccccgtggctccccgccagggccacctggttcggccagccctacggctccggctccaccgacaatggtggcgcgtgcgggatcaagaacgtcaacctgcctccctacaacggcatgatctcctgcggcaacgtcccaatcttcaaggacggcaggggatgcggctcatgctacgaggtgatgtgtgagcagccggctgcgtgctcgaagcagccggtgacggtgttcatcacggacatgaactacgagcccatctcggcgtaccac

SEQ ID NO: 32566 - DNA, 521 bp, Oryza sativa
  Clone ID: uC-osflM202012g06b1
cttcaatgatcacagcatcagttctgaggaagaagacatgcttgtcaggagttatagcaatctcaacgtcagctttggataccattgtaattcttatcagtgtttttctctagacactgatgagtatgacatctctcccaacaagaggcttgaaactaataccatgatgacatcacaaaatggatccttcacttgtttgtctggtgctgcgattagtgccaatttcacgctggccaatacaaacatttgcaagggtcttatcggggaagaaattttaccagaactagactctcctaattctttcagaaaaattgtttcatccccatcaatgtcaagattggacttgttatccacctcacaaggcagccctgtatcgactgagagctctatatttgaaatcagtaaaaatatctggaggtccagtgccccaactactgtctcatccaattttctgacaagtacagagataaaaatggctggtggagctgctggagaggatagagtccaagctgtgtgctctg

SEQ ID NO: 32567 - DNA, 500 bp, Oryza sativa
  unsure (1)..(500): unsure at all n locations
  Clone ID: uC-osflM202012g07b1
ttcggccgggagggagaagtcgccatgaagcagcctcccgctgctgctttctctctctcgcctcgttaaaatctctcttccaccccgaaccccatccagttcagttccctctcgatcgcttcccgtgctctcgctctctcgcttgctagatcagagattcccctctgcggcggttgtgaggtttccgcttcggctcgctagctagctctgctgtttctgtgagagccgggagcaccaaccgcgcgtggggtgggtgcccggaggtttgatgcgcgtggccgccggtttctccccgtcgtttgatgggcaacgcatgcggcggttcccttagatccaagtacctgagcttcaagcagaccgcgtcgcagcgccacgacaccgacgacaacaacaacgccgccgcggccgactcgccaaaaaggccctcccgccctccagcagccgccaagacggacgaccacccagtcttccgngcgggccgcgccgcctcatgaggcgcg

SEQ ID NO: 32568 - DNA, 273 bp, Oryza sativa
  Clone ID: uC-osflM202012g10b1
tttgacgcgtgggcgcactcacgttctccatgaaccacgagccaactttggtgaggggacgcctgggtgtaaccatccattcaagaacgcacgaacgttccgccgcctgggtgctcgacctgatgaactccacgggcacggaccgtttgtcgtggttgttctcggcgagctctttgccgtccttgcaggggggggtcttggtcggctcctggtcgtcgattatgtcggacgtctacttctgcgccgccagtgtggtgaccatggtgcacgaca

SEQ ID NO: 32569 - DNA, 497 bp, Oryza sativa
  Clone ID: uC-osflM202012g12b1
tttttacgcgtgggctcccttgatctcctcacactaaatctgcgatcttttttcccctctcgcctcctggcgattgggttcggcgttctcctcatctcttgttgattcttgcgttgttttttggggccaaatttgttggtctgatttgttcttgaagaagtcggcatgcctccgttccacgattacagagatggtggtgttcttgtgatggagccggcggcgtcggcggctctgttcggcggcgtcaggtcgcggaagcgggcgcgggtcaccgccgtgccgccctgcggcttcgtctccgccgccgcggaggcggtggaggtggtggaggagagggggttgacggcggccaagaggcagaagcagcagcagcagcagcgggaggcgccgtcgttcgacgctctccccgacgagtgcctcttcgagatcctccgtcgcgtgaaggccgcccgcgcccggtgcgccttcgtggtcgtctcccgccgatggctcgctct

SEQ ID NO: 32570 - DNA, 369 bp, Oryza sativa
  Clone ID: uC-osflM202012h01b1
tttgtgtttctacaaaaccatgaacaccaatgtttacacaagtacaatcgcctactttctctccggtcgatggaacagagataaaagagatccaaaagcaccgagccaaacaccaacaaaaccgaaaaaaaaaaggaagagaaaaacttttgaattgaacaacgttatactacttgaatcgtgcagcttcgacaaattttgcgtgaacttttgtgccaatcgagtccatgaggcatacgatcgaacgcaggcaagtctcgacaccggacacgtacgcatggtgccgcgcgccgggccgtgcgcgatcgtacgtttaggtgacggcgcaccgtgcggcggcggcggaagggcgcttgacgacccgccctt

SEQ ID NO: 32571 - DNA, 511 bp, Oryza sativa
  unsure (1)..(511): unsure at all n locations
  Clone ID: uC-osflM202012h02b1
tttgtttcgtcttcttccccggcctttcttcctctctggctctccgctcgtgttcctctcgcgcggcggagatcgagggggcacaaccgcacaaattccattcgtttcgatccgtacgtttcggccttcccaaaatccccacttccatcatcacagcggtgctgcggggggggggggggaggananagatagatggagatctggttgttagcagcttgaggagcatatgacgcggtaggaggtacaggacgaagttgaaggtgtgcatcgtgctttagaggagggaagggaagcacaaatacttgatcctgcattggaagagcgtgctcaggatgaggaaatggaagcacataagcgtgcgcatgcacatgaagaaaaagaagcggctatagctgaagaggaagcaagaaagatggattgggctgctgatgaagaaacggcaggaagcatacaagtcaatgaggatcagatggatgttgacaactctaatgctgatggtgatgaattcgta

SEQ ID NO: 32572 - DNA, 500 bp, Oryza sativa
  Clone ID: uC-osflM202012h03b1
tttttggagcgggattcggagggggagcgcggccacggaggggcacacgggggcgcaacagggtcgggcgctcggcgccatggatgctaagaagggctcgggggagccggagttcttcagcgagtacggcgatgcgagccggtacgaggtcaccgaggtggtcggcaagggcagctacggcgtggtggccgccgacgtcgacactcacaccggcgggcgcgtcgccatcaagaagatcaacgacgtcttcgagcacatctccgacgccacccgcatccttcgcgagatcaagctactccgcctcctgcgccacccggacatcgtcgagatcaagcacatcatgctcccaccctcccgccgcgagtttcgcgacatttacattatcttacgactcatggagtccgatcttcaccaggtgatcaaggccaacgacgacctcacccccgagcaccaccagttctttctctaccagctgcttcgtgggatgaagtacattcatg

SEQ ID NO: 32573 - DNA, 94 bp, Oryza sativa
  Clone ID: uC-osflM202012h05b1
tttcttcttgggccttcatcagagtttatcaggggaggctattcggagacatggtccctcagcgtccattatctggggtgcaccaattgttcaa

SEQ ID NO: 32574 - DNA, 482 bp, Oryza sativa
  unsure (1)..(482): unsure at all n locations
  Clone ID: uC-osflM202014a02a2
aaaaaaaaanaaaaaaaaggggggggggcttttaaaaagaaaaaataaggggggggggaaaaaaaaaaaaaaaacaaggaaaaaaaaaataaaaacaaacacaaaaaaagaaaaaaaaaaaaaaaaacaaaaaaaaaaaaaaaaaaaaaaaaaaaaaaagaaaaaaacaaaaaagaagaaaataaaaaaagaaaaaaaacaaaaaaacaaaagaacaacaaaagacaaatgaaaaaaaaaacataagaaacaacaaaaacaaaacaaaaaacaaaaaaaaaaaaaaaaaaaacaaaacaaaaaacaaaataaaaaaaagaaaaaaaaaaaaaaaaaactaaacacaacagaataaaaaacaagtccaatcacaaacaaaaaaaaaacacaaaaaaaaataaaaacacaaaacaaaaaacacaaaaaacaaaaaaaataaaaaaaacaacaagaaaaacaaagaaaaaactaaaaacacaaaa

SEQ ID NO: 32575 - DNA, 278 bp, Oryza sativa
  unsure (1)..(278): unsure at all n locations
  Clone ID: uC-osflM202014a03a2
aaaaaaaaaaaaannaaaaggnnnggggnnccaaanaaaaaaaaaaaaaaaaaggggggggcgaaaaaaaaaaaaatnaaaaaaaaaaaacaaaaaaaacaacaaacaaaaaaacataaccacaaaacacaaaaaaaacaaaaacaacaaaaaacaaaaaaacagacaaaaaaaaaaaaaaacccaaaaaaaaaaacaacaaaaaggaaagaaaaaccacaaaaaaacatacaacaaaatggaggaaaaaaaaatgaaacgacaaacaagaagaacac

SEQ ID NO: 32576 - DNA, 386 bp, Oryza sativa
  Clone ID: uC-osflM202014b02a2
tttttggacaatcttcctactttatttcccactttctcatcctttggatgagagaattttggtttataacaaggaaattacatccttctgagatgatagaacagacccataacttatgggagaacaagatctaagacatcagattcaaggacagaacttggaggcagggcatttttgcatggtgccacttctcactccaaggtaacaaaaagaagtttaactttaaagaaggggggaaaaaagatctataccttacttataccaaaaatgactggttgtggcccatggactgaatcaaaccaaaggctcggatgaatcggcttccatctttcctcgtaaatacctctttccaggggaaggtgtttcgcagcaatgaaaatcgttgc

SEQ ID NO: 32577 - DNA, 77 bp, Oryza sativa
  Clone ID: uC-osflM202014b03a2
acccatttagtggacgcccttaatatttttttgggggttttaaaaaatttaggtttaaattaattatttttataatt

SEQ ID NO: 32578 - DNA, 192 bp, Oryza sativa
  Clone ID: uC-osflM202014b05a2
tttttgggggtatgtaatgtaatcaaaacttatttttctttccataacagagacgacagtccccaaatacttgacttggccactatgattttcttgacaaacttagggtaccagataacattgagaaaaagaaaaaagaaaaaacataacaataccacctataaacttacccatacttttaaaccctaacaa

SEQ ID NO: 32579 - DNA, 214 bp, Oryza sativa
  Clone ID: uC-osflM202014b07a2
tttgggttttttttttttttttggttttttggacacattaaccggcaaaaggaaccctacttataaaatttaaaagaacttggacaagatgacatggtcgccacaaagatgcacaattccgagaagaaacaacaacaatctttgcagacaggccagagacaattctcatgggcccatagtaaaatggggagcaaccaacgggtttaggttatac

SEQ ID NO: 32580 - DNA, 153 bp, Oryza sativa
  unsure (1)..(153): unsure at all n locations
  Clone ID: uC-osflM202014b08a2
nataccttctttgtagcgagccgcccttatttttttttgggggggaacaaaaaaatgttggggttcataccaatggcttttgaaccaaacctttttttaaacaagtagggcacctacgggagttgggtcatttcaaacaattgacagatttga

SEQ ID NO: 32581 - DNA, 147 bp, Oryza sativa
  Clone ID: uC-osflM202014c03a2
ggaggtctcaaatgaagcggtataaaactgtacaatgacatacaagacatgttaacattgcggttctggtactatttactgtttagtaaaaagtaccattttatgttatggttttcaacaatttttgacgttatcaaaggcttttac

SEQ ID NO: 32582 - DNA, 148 bp, Oryza sativa
  Clone ID: uC-osflM202014c04a2
ggacaacaccatatttcatggatcaggttcagaacctgcacagaaatacacactaccggtacagatctcaccttctttccaatactcgtacatccatccacgtcggttccacacgaatacgttacattctatacggtaacacgttacg

SEQ ID NO: 32583 - DNA, 126 bp, Oryza sativa
  Clone ID: uC-osflM202014c05a2
tttttttttttttttttttttttttttttttttttttttttttttttttttttttttttttttttttttttttttttttttttggggaaataatacccccttaaaaaaaaaaaaaaggttttttcc

SEQ ID NO: 32584 - DNA, 392 bp, Oryza sativa
  Clone ID: uC-osflM202014c06a2
ttttaagcatccaaacatcagtcgacatgctgcaaaataacacataattcggttcacttttaaactaaacaggaggttttatgacatcttaacaaactactaactactacagagatccggtataacaactggagaggcaaggggttacatgccttataggcatatcaaaagtctaccgattactgaatgaacatcccaaggggattcaaccggctacttcatataagcggcagcatcatgaggcaaaacatagtcttcaactagatcattgctgtcaataatgaggaacaaacctgaagcggcccattgtccaccatatccagcaggctgcggtgacaccccctttgcaacagcattgctgcgggtttgcaggaggtgcaacatagccactc

SEQ ID NO: 32585 - DNA, 424 bp, Oryza sativa
  Clone ID: uC-osflM202014c07a2
tttggttttttagtatcaaagttagacagctgctgttccgatataaaaaatattggtaaatcgttctacatcaaaacaggcctgtcttttacataccagagggctacctgctagtctatagtcacaaccactcccgcttcgtttttaataacacatctgtacttcacatttcatcccaacaactaacctatttgggctggatacatcgcaaaagatgggttcgttcgacccttctaccagctatgaagtaaagctccaattctatccgatacttgtactcttatacaaagctggattcctaaagcactcccagcatacggctggttcttttgtgaagtgaacaacaagttggcggcggcgaagatctttggacccattatgatggggggcttattgatggtctgatcctggcaagcatggtaag

SEQ ID NO: 32586 - DNA, 61 bp, Oryza sativa
  Clone ID: uC-osflM202014c08a2
tttggggggtttttttatttttgtttttttactactagacaggggaaaaaaccctttgaaa

SEQ ID NO: 32587 - DNA, 362 bp, Oryza sativa
  Clone ID: uC-osflM202014d03a2
ggaccaaaacaacacaccgattggcaattgggccttataccgagaataaagtaagggttgcagcagtgaaacaaaaattacggcaaaaaaattttggccggatcatatggaaagcctcgagatggtacaggtagaacaccaccaaaccactagtaggttggatgtgcgaataattgttcctcaatatggggttgggttagccctagttgaaatcaggctttttaagggttaagggcagccagaacgctggatgataacatttggggcatagccaaccagccttaacagagtcctaaatgcttttttgttgaaccaattgttgagaggaaggcctccaacaaaggcatttaccagcgccattg

SEQ ID NO: 32588 - DNA, 366 bp, Oryza sativa
  Clone ID: uC-osflM202014d05a2
gggaaaaaatatatctgcaacaaaatcatcgcgaatagtttacaactctgccacagcaataaaaaaaagaaagaaaatagaaaaaatagaaaaaccgaacacaaaagcaaaaggtacacgatctaaccgatacattttcattgcatttcaccatttccaatttgaattacagttcatacagtacgacttacaaattcgacaatagcttgaccctaagccaacaaagttaaaaacttccaatagtaaaacatttcttgcgccgtttatttttccaccgaacaaaaaccttttgtcgccccagtccacctttttgccgttgcccatcctgtagttgccacttttcggaaccgcgtgggttcgaacccg

SEQ ID NO: 32589 - DNA, 183 bp, Oryza sativa
  Clone ID: uC-osflM202014d07a2
ttgggggttttttcgtttacactgcgtgatggttcaaattttagcaactcaaaatatgatcacaatttttgtatgcaatttctcaacaaatacaccaaactataaaactttaccatttggcgtgagtaagtaagaatcctcttatttgcaataaagaaaatggaaattacaaaagtttaccca

SEQ ID NO: 32590 - DNA, 278 bp, Oryza sativa
  Clone ID: uC-osflM202014d08a2
aaccaaatatgttcatatgatattttgccgggacatgacttgtttgcccactcacaaggagaaaatagaacaagaagcaaagtcaagtaggtaaaagacatgtactaattttggtattccttatagccgtaagcaatatttggatcaaaaatatttctccacaatgttcgtgggagcccttgattgattatattggaattggggattattgaatctcttcttttgggaacttctgcaatccttttcgcttcaaaggttccttcgggggccatatgata

SEQ ID NO: 32591 - DNA, 120 bp, Oryza sativa
  Clone ID: uC-osflM202014d09a2
tttggtttttttttattttttttttttgttttttttttttttttttttttttttatttttatttttttttattttttttttttattttttttttttttttttttttttggaggggggaaa

SEQ ID NO: 32592 - DNA, 300 bp, Oryza sativa
  unsure (1)..(300): unsure at all n locations
  Clone ID: uC-osflM202014d10a2
agagccaattaaacttgtgaatgaatcaaatcaaataattgatgattaatttgacatcgactacatgaatgacctaacaacatgaatgaccattttgaatggcaaacttttcacatgtacaacaatcggtttccactcatatgaaagtacagtttagagccgcttgagccgctcggtacatgtcctttttctccctattcagcagncatactgttcaccgctattaagaaattgccttgcaacaaaccatagcattagnaatcttgtatgaatggaatcattgttgccggaatgaatacc

SEQ ID NO: 32593 - DNA, 74 bp, Oryza sativa
  Clone ID: uC-osflM202014e02a2
tttttgggtgaaaaacactaccaaatgaacatttggtaaggcttttaattaaacaattagatactggtacaaac

SEQ ID NO: 32594 - DNA, 309 bp, Oryza sativa
  unsure (1)..(309): unsure at all n locations
  Clone ID: uC-osflM202014e03a2
aatcatcgaacttcatatgattatatcaacacaggccatcatcaatttacagctttcaggtggcactatcaccggacaatcaaaggcgcctccgaaacatagcaacgcaggtcacacaaagtaaaccatgggngaaagcaaactttcccctactgactattttcaaagnaaatanngaaaagaatgtttttttgtgcgcccctttccaacattttcaaggaaatatcaggagggcgattgagggaatcacaacttactgatttcaattactttacaaaggttgtatgttaccagagttattttgggtgg

SEQ ID NO: 32595 - DNA, 338 bp, Oryza sativa
  unsure (1)..(338): unsure at all n locations
  Clone ID: uC-osflM202014e05a2
atcgaaagaaaaaaaccgaacttactactatgtacgtactggtttgatcacgcaaacttaatttgttcttctcatcataaacactgagatcttatactatacacatcacggtccgatcgatcaagaacacaagtcgtgtacgtatcgcacgcgttcgcctacctgctgcagaaaggtgcacacagaatcatgcattgagatgcaaagcatttgatcatggtggcttcatttgccatggncgttttttttttttttcgattcagcaaatggcgcaccgagttggggtttctcctccatgcttatgttgcggacgttgtagtactgcgggcggcggcacg

SEQ ID NO: 32596 - DNA, 460 bp, Oryza sativa
  Clone ID: uC-osflM202014e06a2
gggagtaagccaatttcattacacgttaatactttatacattacacagcagggctacgcaaatgaaaatacagcaattccaagcacagttttattacaacattattggaagttccaagtgctcaatgcaacgcagcagtgcatctggtggcgccggcgggtaaggtttttaagaactttccaagtcaggctttcttggatgttcccttctccatgcctgagttggaggaagttagtttgggcgcataagcgcttccaacaacaacgccccctcttttgtcgaaccaaagaactttggagaaagttccaatttgaataattgtccaccgaaaagaccacccttttgctggaactttcagaaaacttgtaagaaggggtgcaatgtttgtcaccattaacattcaaccttaataaaaattgggatactcggcccttgaagcggttgcaagccaaattggaca

SEQ ID NO: 32597 - DNA, 139 bp, Oryza sativa
  Clone ID: uC-osflM202014e07a2
ttgggtttttttttttttttttttttttgcttctaagtccttgttattgaatatacctgcattggtagtttggtacaaagggatcccttcggtatttgccctctgatcttgggactgaacaataaatacaaaaccctga

SEQ ID NO: 32598 - DNA, 55 bp, Oryza sativa
  Clone ID: uC-osflM202014e09a2
tttggggttttttattttttttttgtttttttatttttattttttggaaccacac

SEQ ID NO: 32599 - DNA, 92 bp, Oryza sativa
  Clone ID: uC-osflM202014e10a2
cgacactatttgaagagcaatgcacgttcgcatggcactgcgtaccgtaagtcttgggatacctttatgtagcgagaccgccctattttatt

SEQ ID NO: 32600 - DNA, 637 bp, Oryza sativa
  Clone ID: uC-osflM202014f01a2
caaaaaaaacaaaaaacaaaaaaggaggaccacacaaaaaaaaagccgcacaaaaaaaaaccaaacccaaggacaaaacgtggaaaaccccaaaaccccaaaaagaaaaaacgccaaaaaaaaattaaagaccaaaaaaaaccaaccaaaaaaagacacgggaaaaaaaacaaaaaaactacccaaaaaaaagaaagaaaaaaaaaaacaggccaaaaaaaaataccacccaacaaaaacaaaaaggagggggataaatgaccaaagaggacctcaaacctaaaacaaaaaaaaaagagcaaaccaaaaaaaaaaacccaatggtaaaagaaacaaaaaaacaaccccaaagggggttcaaaccaaaaaaaaacccccggaagaacaaaaaaaacaaaaaagggccagaggacacccaaaaaccaaaaaaaccaaaaattaaacaaaaaagaaaacccaaccggaacaaaaaagaccatagagaaaaaagaaaaaaccccctagaaaaaaaaggaccaaccacacaaaaaagcccaaaaaagccaaaaaataaatgaaagaaggcccaaaaaaacactcaccggggaagaaaaaaacacccaaaaaaaaaacgcatgggagtaaaaacccgaggccc

SEQ ID NO: 32601 - DNA, 280 bp, Oryza sativa
  unsure (1)..(280): unsure at all n locations
  Clone ID: uC-osflM202014f03a2
gggtaaaatagcagaaatcctgcagcatcaaattacagatgcatgaactgcagaactggcaagcttaactgcagaactgcagcactcttattccacttgcctcaccccacaaacaaacggatactttctgaggggcaaggcaaaaggcaatttacatctacaaagataaaaatagnacttcaattatcaaactcttcaaaacaatacaggtagatacctggttattagaacaccaaattttttcaaaaagcaattgaaacaaattcagaaaccacattgc

SEQ ID NO: 32602 - DNA, 86 bp, Oryza sativa
  Clone ID: uC-osflM202014f04a2
caaaaaggaaaacccggggtaaaatcaactatagtttaaaagatggttccactgaaaaaagaccccaaaacaaaaggggaagaaaa

SEQ ID NO: 32603 - DNA, 117 bp, Oryza sativa
  Clone ID: uC-osflM202014f05a2
acagcaaggaaatttattgacatgaaaactttacaggtacaggagtacaataaagattcagggatgcaaggggtttagtgcaaatagcaacctcgggaagatacatgttaaccaatt

SEQ ID NO: 32604 - DNA, 167 bp, Oryza sativa
  Clone ID: uC-osflM202014f06a2
aatttatttggacgcccttttttttttttttggggttttttatatttttttgtttttttacacaatcagggccattggacttctttcaacaaccaaccaaaaaacattgggttacacaaactgaacgaacgaagcaaaaaattcgggtacccggaaaagaggaaaac

SEQ ID NO: 32605 - DNA, 170 bp, Oryza sativa
  unsure (1)..(170): unsure at all n locations
  Clone ID: uC-osflM202014f07a2
tttcttgagatccttttttagcggtcctgccctttttattttttggtttttttttgattagatagatagatctaattaagcaaagcatgcactgtaggagctagctagggaacctgaaataatcgcccagnatattatatctaaagcccggaacttagtaatttaattta

SEQ ID NO: 32606 - DNA, 113 bp, Oryza sativa
  unsure (1)..(113): unsure at all n locations
  Clone ID: uC-osflM202014f08a2
acactattggaagagctatgcacgttcgcatggcacgtcgtaccgtaagtcttggataccttttttgtagcggccgtccncatttttttttttggggggtttttttttatttt

SEQ ID NO: 32607 - DNA, 104 bp, Oryza sativa
  Clone ID: uC-osflM202014g01a2
gggggaaaaaaaagatacaaggcataaaataagctccacatgaataatgtccagagtacattaattagattatatacatgaagttaaagaattaacaatgtatg

SEQ ID NO: 32608 - DNA, 83 bp, Oryza sativa
  Clone ID: uC-osflM202014g02a2
aaaaaaacaagaacaaaaacaagcctaacagaagaaatagaaagaacaaaacgcacatgttcaggaccaaggccaaaatacca

SEQ ID NO: 32609 - DNA, 219 bp, Oryza sativa
  unsure (1)..(219): unsure at all n locations
  Clone ID: uC-osflM202014g04a2
gggacacaaaagtgatcgagtcatatacataaaaagctatatacattatagactcgtatacaattacactgccacggtaatatctgaacaagaaaacatagccaggttagaccctggcttccctggatcttaatgcttgtcgtcgaaggattggcccggtttgaattgcttgtacaggngtgaaaaaagaccccacagaatcccgttgccaaagctgcg

SEQ ID NO: 32610 - DNA, 205 bp, Oryza sativa
  Clone ID: uC-osflM202014g06a2
cgccctaaaataaaaaatggagagaagagagacgtactacatagatgaactagtattagacgaagttctggacttctggtttactaggaacatagaaaacatcagatggaggatgagttacaaacatgggagttaaaaatgaaatgacacgtgcaggaggaccttgttgaagaatggcaacaattcgaacttaattctttctttc

SEQ ID NO: 32611 - DNA, 176 bp, Oryza sativa
  Clone ID: uC-osflM202014g07a2
ttcactctaatcacaccaaaaatttttatacatgagaaaatggccgagttaaattatttaatacaccaccaaattacctcactaaaagctccctttagctacaacaattgtccctccaactttagaactattctcccgttttaccatataaactcacaaaatcaactgaaagccta

SEQ ID NO: 32612 - DNA, 186 bp, Oryza sativa
  Clone ID: uC-osflM202014g08a2
ttggggggggaaacaagttaataattggggagtatatttaaaatcggaggagcggagtagtacacacacgggtaattagatccaatcgccaccacgcgaaatcaatcgtccaccagctagctcatcgtcgtcggtcgaagatcaatactcaaaatacaacatgttataaattgcgacgccgccgcg

SEQ ID NO: 32613 - DNA, 139 bp, Oryza sativa
  Clone ID: uC-osflM202014g10a2
atattatttggggggaagaaagaaagcctggagtgaattttattcatcatttcctgtgtattacactatacagtagtgcttcaagatacatgcacatatatggactgcaattctggtaattcgcataatcacaatctcg

SEQ ID NO: 32614 - DNA, 424 bp, Oryza sativa
  unsure (1)..(424): unsure at all n locations
  Clone ID: uC-osflM202014h05a2
aaaaaaaaacaactctgacaaaaaaaaactttgataaaaaaccaaacctctatcaaaaacccaaccccccaaaaaaaaaanaaaaaaaggagcggggagaacaaaaaaaaaaaaaaaagggggggcaaaaaaaaaaaataaaaaacaaaaaaaaaaaaaaaaaaaaaaaacacacagcaaacaaaacacaaaaaaaaacaaaagagcgcaacaaaaaaaaaagaaaaaaaaaaggaaaaaacaaaaaacaaacaaaaaaaagacaaaaaaaaaaaaaaaaagaaaaccaaacaacaaaaaaaaaaaaacaaaacacaaaaacaaaaaacaaaaaacaaacaaacaaagaaaaaaaccaaaacaaaaaacaaaaaaaaaaacacaaaaaagacacaaaaaaaaacaccaaaaaaaaataacacag

SEQ ID NO: 32615 - DNA, 179 bp, Oryza sativa
  Clone ID: uC-osflM202014h08a2
aaaggggggcttataaaggatcaggaaataacagctgctctggcctgaacactaccagatcttctttgttattatctagggtgccataatatacaaagaaagatctttacattgaaataaagtatggtttatatttcctttgttactataagcaatttcgataataagaacaaagattt

SEQ ID NO: 32616 - DNA, 144 bp, Oryza sativa
  unsure (1)..(144): unsure at all n locations
  Clone ID: uC-osflM202014h12a2
aaaaaagaaaaataaaattggaaaaaaaaatttattttaaaaaaaaaacccttttttttaaaaaaaaaaccccaanangaaaaaaaaaaaaananaagggggggggggggaanactataaaaaaaanaannaaggggggggggg

SEQ ID NO: 32617 - DNA, 418 bp, Oryza sativa
  unsure (1)..(418): unsure at all n locations
  Clone ID: uC-osflM202015a02b1
gttgtcttaaaaagggannaaaaggaaaataaaagtgcacgccttcatctcctngactccctgcgggcactgatctagcccgggctcgggaggccctgcgcccctttccattcctctccagatggtcagcccatggggcccagtcggactccgcttcacccccacgaagctacatctccccggcaggagcaccggcaggcatgcacaggtgctgctatcgcatggcaagggccgtaagcaccaaagattcggctgctatattggagactgcaagaaaggacctgccacttgtattggcaaccttttggaccccttgcctcaaatacaccacttatgataggaacagaatcgcatgagaggtgcaatcagataggaaacggcagaacacacttcctaagcacaacgaagctgaccatgg

SEQ ID NO: 32618 - DNA, 414 bp, Oryza sativa
  unsure (1)..(414): unsure at all n locations
  Clone ID: uC-osflM202015a09b1
cctttcctgcctcgcctcctcacgcgagccaccgctgttttcgcaccatcatactgtcgtcgccatctcctctcgctccggtggatgcatgcgccaacgaggagggctggaccgtcggatccggtgaccccggcctcattgtcggtggatccggccgcccggaggcgaggggagaccggctatcaccctctctactcttctccttctacgtccggcaccgctacaacgacggccgcgcggatcgcgtgaggcaacgggtggctgntcccttctcttctcccttctatctccactattcctttgcagatcggcggaagcctgcaacaacaacngncgcgcgggcgagcaatcgaagaggccgggaattaccaaatcccgaaggacggcggcccgattggagagggagcaacccga

SEQ ID NO: 32619 - DNA, 432 bp, Oryza sativa
  unsure (1)..(432): unsure at all n locations
  Clone ID: uC-osflM202015a10b1
tttactacctcctcctcctcctcccatccagcacgcgcctcctctctcgcgcggctttccatttcatctccccctcctcctcctacgtctccgccgctcctcacttcctccactcgatttcctttcttggcctctcctcctctgacacaggggtgtgcaggtttgtgtttgtgcgtggcgcgtccgccatggctcgcggcagcggggccggaggaggcggcggcggcggcggcggggggctggagctgtcggtcggggtcggcggcggcggcggccccctttgcggcggaggctgtgaggcggccgcggcggtggagacggcggcgccgatcagcctcgggaggctcatcctctccgggatggtcgccggcggcgtgcactacgggtgggcgctccaagntttcctccttaccccctacggtcagacacttg

SEQ ID NO: 32620 - DNA, 97 bp, Oryza sativa
  unsure (1)..(97): unsure at all n locations
  Clone ID: uC-osflM202015b04b1
gcacctacccgaattaattccggaccaacccaccnaacaatantntaaatccagcacccgncctttttttttttttttataaacacgaaaggggggg

SEQ ID NO: 32621 - DNA, 492 bp, Oryza sativa
  Clone ID: uC-osflM202015b10b1
tcttttctttccccctcccccctcttcagcgctggaggcggcggcggcggcgtcccctggatccctggcggcggcggtggcgcacggttatgccgagaggcacccaggttccaacaccgtgcactgccagggctctagcattctcattaaggatatggagtacaccctctacaccacaagttcctctgtattgcacatttcgctgctcgaggaagttcttggctggaggttttctctttacggagacttcctcgttatctattttgtcaactgcacctgaagatcacacctcattcagcagccgtcttgcctggtcccatgctattgcacattagagtcgactattgattacagtgcagctgtagcacatttcttcgagcatggtgcatctcatcctcttgcatccttccggtagtttttgctgtggcactgatcagccagcaaaagttaccatccgaacttctttggacaatcggatctgacattagatct

SEQ ID NO: 32622 - DNA, 412 bp, Oryza sativa
  unsure (1)..(412): unsure at all n locations
  Clone ID: uC-osflM202015c04b1
tttcttctcgtccgcccacgcgtccgatcgcgacgggcgccctttttttttttttttctttaaattgtgccaaactcgggaagcaacagtaatctttacattacacaggctacatgaaaagacagcattgntaatcacttcaactgccgcacatttacaattccaagatatgatgcattacagtaactgatgtctgatggacactccacaattgtgaaggagaattgcaataccagtgtaccaccatagcagaaaacaagaatcacccttgtctgttcantccttcctagttttggagcaaaagataattgcgttacgtagttagttccccaagccaagttccctgggctgttagttggcattctattgtcattgacaacagcgtgggaagaaatgactgtcattcctggag

SEQ ID NO: 32623 - DNA, 410 bp, Oryza sativa
  Clone ID: uC-osflM202015c06b1
tagatggattgagcaatcaagccctgctccggccgccgccgccgccgccgccgctgccgccggcgatccccttaccctcgctctgtgcacccgcaccccgcacttaccccctccatggcgtgatccgatgatagcaacgagagcggtgcttcccctctccctgacggcgtcggcctccggcctgtacggcgcgcgcaccaagaagaggaggaagctgctgctgctgccgcggctgccatgtcgcccaatctggagagccacatcaagagccaggtgccggcgctgctgctgaggcgcttcttcggcggggcggggcggcggcgggtgttcgtgcagaccgagactgggtgcgtgctgggcatggacctcgaccgcagcgacaacgcgcacacggtgaagcgccggctgca

SEQ ID NO: 32624 - DNA, 477 bp, Oryza sativa
  unsure (1)..(477): unsure at all n locations
  Clone ID: uC-osflM202015c07b1
agtttctctcccccctcctcattccccgccgacgccgccgttttcttggacattacaaatccctaggccanaggatttttggtagccttgtttcgtgatattcatcaatagggggggagctaaggggggattcctaagatcagaattggatcacgcgggggcgcgctcgggatctggggttgcaaacacagcttcttcgttgaatttaagcggatgtactaatggagtcaaagggtggcaaaaagaagtctagcagtagtcgttccttgatgtatgaagctccccttggctacaccatttatgaccttcgacctgccggaggcgtgaagaagctccagtctgctgcttactccaactgcgcgaagaagccatcctgatagccctttcggcttctgcatcctagtaggttaggatttcttgcaattccattttggcacttttcttctgacctatttctcttgctgctgcttcctgata

SEQ ID NO: 32625 - DNA, 433 bp, Oryza sativa
  Clone ID: uC-osflM202015c12b1
aagagatctatcatatcgtattttgtagtaatttagcagctagctagtgcagctgcaagctattacgactgcatgctttgatcgatccatctagctaattgttgaatccatctaagcttaatggctctgcagcagagcatggcgatgccgatgatggtagtgtctgaccttggcaccgctcctcggtcatcgccgatggttcagctgcagaggatgaagaagcatctggtggtggtggcggcgttcaagagcagaaccaaggcttcccccaaggtggacaagtcgaacaagaacaagtcgatcgtggaggacggcatcttcggcacctccggcggcatcgggttcaccaaggagaacgagctgttcgtggggaggggggccatgctggggttcgcggcgtcccttcctcgcgaggcggtcaccggcaagggca

SEQ ID NO: 32626 - DNA, 387 bp, Oryza sativa
  unsure (1)..(387): unsure at all n locations
  Clone ID: uC-osflM202015d01b1
ttccttcctacctacctactttangcngnagagatggtggggaagagccgcgtggcggaggaggcagagcggcggcggcagcggcggtgaggatgtgggtggaggcctccggggggagggtggggatgnacttcggtctggggacgtatctggaggtggggggggcgtaccttaacgaccctctctggaggggcaattgcctcctttggtccccgcacctcgtgcgcaaggtccatttagactacctagaagcaggagcaaatatcataatgacaactttataccaagctacaattcatggctttgaatccaagggattttcaaaagaactaattgaagacttgctcgctaagagtgttgagattgcacgtgaatcgcgtttcatgt

SEQ ID NO: 32627 - DNA, 330 bp, Oryza sativa
  unsure (1)..(330): unsure at all n locations
  Clone ID: uC-osflM202015d07b1
gctttatttatncttgttccnactgatgtaaatacccgtggacttgacatacctcatgtggcccatgacactcaatgtgtgacctgccagatgacatagatgactgtgctgatcntatcggaggaacaggaccagcanctaagactggattgacaactgcatttgtcaacgagtccaatctattcctggcaaggccgatatgtgagctaattcaggaagcataccatgaggatgctgactggatcgaacgatgctcagcccggacttggttaanagacaatttatacataaacctgctatcactccgtgcccgttttggtggccagaaca

SEQ ID NO: 32628 - DNA, 447 bp, Oryza sativa
  unsure (1)..(447): unsure at all n locations
  Clone ID: uC-osflM202015d10b1
gatcttttcatctcgcctccggctncgcctncgcctccccccacctcctaagctccaaaccgagagaaccctgctgctccgccgcccgccgcccaatccgacccgccggagcgcgaagggagaaacagggcatccagaagaagaagaagactaagaagaagaagaagaacaccaagaagaagggaggatgccgccgaagaaggcagcgccatcgaaggcggacctggccaagaagcagaaggtcgtggaggacaaaacgttcgggctcaaaaacaanaacaanancaataacgtccaaaagtacctccagtccctgcatcaggccgtccagcccaagcccgacccgaccaagaccgccgccaagaagaagaaagaggaggagaaggcgcgcgagaaggaactcaatgatctattcaaggtcgcccgcagccagcccaaggtcccagt

SEQ ID NO: 32629 - DNA, 490 bp, Oryza sativa
  Clone ID: uC-osflM202015d12b1
atttcgttaaattcatggccagggagatcctgatcctgaggaaactcgaccatcccaatgttataagctggaggggttggtcacgtcgaggatctcatgcagcctgtacctggtgttcgagtatatggagcatgaccttgctggcctggcagcgagcccggacgtcaagtttactctgccgcagataaaatgctatgtgcagcagctattgtcagggcttgagcattgccacaataataatgtattgcatcgggatatcaagggatcaaacttattgttggataacaatgggattcttaagatcgccgactttggcctggcaacattctttgacccacgacataaacgaccaatgacgagccgcgtggtcacgttgtggtaccggccacctgaattgttgttgggggcgacagactatggtgttggtgtggatttgtggagtgccgggtgcattctggcagagctcttgcatgggaagcccatcatgcct

SEQ ID NO: 32630 - DNA, 263 bp, Oryza sativa
  Clone ID: uC-osflM202015e02b1
tctcttattggtcaaggagaaacaagtcagtttgataagttatatatctttctcttttgtaaacgaggtagtctacaggtttcgtattcgaactagaaagattttacttattgatatactagcttttatgcagataaaaacatggtgagtgaaataatattccgagtttttaatacaatacaagagtgatttttaggctaaaaaaaaaaaaaaaaaaaaaaaaagaaggggaaggagggaaaaaaaaaaaaaaaaaaaaaaca

SEQ ID NO: 32631 - DNA, 432 bp, Oryza sativa
  unsure (1)..(432): unsure at all n locations
  Clone ID: uC-osflM202015e03b1
tcnctatccctcccagaaggggaaaacccccanaaacgccaaaccctatagccacgaaaccctaggagagccgcggcgggggcggccatccccaccggggacgacgagccggggtgggtccaccccgacatcgacagggccgaccgtgccacgcgggaggcacccgggtactcccacggccacgccggcggccgcttccgccccacggccaagggcaaacctaagccgaggccgaagcccgatcccaaggcggaggattcaaatttnaannnaaattattcgcctcccatgtccaaccccgaggagcccaaccctgaggctgcctcgccgatggaggactcgatggatgtgcatggggcggggccgagcgccaaccccagcgccggaggggtgggagcttccgaggaggaggacgaggaggacgaccacctg

SEQ ID NO: 32632 - DNA, 486 bp, Oryza sativa
  unsure (1)..(486): unsure at all n locations
  Clone ID: uC-osflM202015e07b1
aaaagcaataacagcggcggtgattcgggcggagtgattgtggctgctacgattcggcgaagcgacagcgtttccaacaagcatcaacagtacgaagtccgtgcctttctctcgtgaaaagcggcagcggcgaccattctgacgagcggcgatggcgcgtaacgtgaagctacggctgtccgagccactcngatctcgtgcaacgaactgatgccacccgagcccggtatgatgtcntgcatggggccgtcctggttttnctccacacncagccaatgccgcgacgactagcctcgacctcacgcgaccgacaaagacgggcgcaaggccagtccatggcgatggctagggtgcgtgcacggcggtgcggatgccgtgatcacatcacatgatggcggcgatttgccaaatcggcaagtcatcaatccgattcgcttagggatttgccaggctctattttgggggatttttgatttagggttctga

SEQ ID NO: 32633 - DNA, 491 bp, Oryza sativa
  unsure (1)..(491): unsure at all n locations
  Clone ID: uC-osflM202015e09b1
gtttttgtcttctccgccgcaacnnanacncgctcaaattaactccacctccgccaaccaccnggggcgccaccgctatggcgagccagggggatccctcgtcgtcggcccatgcgaaggggaagaaggactactcgacggcgatcctgcataggaagaaggcgccgaaccgccttttggtgtacgaggccaccaatgacgacaactccgtggtcgcgcttcacccggacaccatgtagaggctgcagctctatccgcggtacaccntcctgcgtaagggcaagaagaggaaagatactatttgcattgtccttgcggaccaaacctgtgaggagcccaagattaggatgaacaaggttgtcaggaagaacctgagggtgcgacttggtgatgttgtttctgtccaccagtgccaggatgtgaaatacgggaaacgtgtgcacattctttcgattgatgatacagttgaaggcatttccgggaacctgttt

SEQ ID NO: 32634 - DNA, 325 bp, Oryza sativa
  unsure (1)..(325): unsure at all n locations
  Clone ID: uC-osflM202015e11b1
ccttcaatacaacnacnacccnnnnncaccggcgcgccgccctcctcgccgccgccgtcgtcgtctctccggagggtgtgatcgatggcgccgtcgtcgacgtcgtcggagggtgcctccnactagtggttgccacccagccggctgccggagctggcgnacatggtccccctgacgcaagacgacaggccccacccgggggtggccatcgcctaccgggaccagttccccgaggccatggactactttcgagccctctacttagacggcgagctcaannttctctctcttcacctcaccgncgaggtcattgaccttaattccg

SEQ ID NO: 32635 - DNA, 415 bp, Oryza sativa
  unsure (1)..(415): unsure at all n locations
  Clone ID: uC-osflM202015f01b1
tggtgttttggcttctcctccccctctttaccttttcctcctcggttcggttccgtggttcgtctgggtttagtgggttgagatggcggcgccggatgtcgagtaccgctgcttcgtcggcggcctcgcctgggccaccgacgaccgctccctcgaggccgccttctccacctacggcgagatcctcgactccaagatcatcaacgacagggagacggggaggtcacgtgggtttggcttcgtcaccttctcctccgagcagtcgatgcgcgacgccatcnaaggcatgaacggcaaggagctcgacggccgcaacatcaccgtcaatgaggcccagtcccgccgctccggcggcggaagcggnggctacggcggcggcggtggcggctaccgcggcggtcgtggaggccgcggc

SEQ ID NO: 32636 - DNA, 410 bp, Oryza sativa
  unsure (1)..(410): unsure at all n locations
  Clone ID: uC-osflM202015f02b1
ctcttanatattnctntacttgaatctgatcaaggnccagatgttctgatcggggacccgcggcggttcggcaaatcattacaaatcttgtagggaattctatgaagtttactgaacaaggtcgtatcttcattcgagtgcatttaattgacgaagtgaagagaaaaatggaagctctggatgacacttctcctgaaaacatagaagttacagcgaattccaaaaatacgatgccatataatactctaagtgggcttgaagtagcaaataatcnnaaaacctttcacagtttcaggatgttcaaagattcatcacatgcaatagattcagtgaacttactagtgactgtcgaagacactggcataggaataactaaggatgctaaactcgcatttttacaccttttatgc

SEQ ID NO: 32637 - DNA, 487 bp, Oryza sativa
  unsure (1)..(487): unsure at all n locations
  Clone ID: uC-osflM202015f03b1
ttccttcatnaaccncaccttactactacagggcngagactgcgccgagagcttcaaggagttcacggcgacaacatgcgcgacaccttccgcttcctggtgcagatgtccgccgtcctcaccttcggcggccaaatgcccntcatcaaagctgggagaatggcggggcaattcgcgaagccgaggtcggaggcgttcgaggagaggtacngngttaagcttcccagctacaggggcgacaacatcaatggcgacacgttcaacgagaagaaccncatccctgacccgcagaggatggtccggacctattcncaatccgccgccacgctcaacctcctccgcgctttcgccaccggaggatacgccgccatgcagcgcgtgacgcagtggaacctctatttcacccagcacagcgagcaaggcgacaggtaccgtgaattggcacacagggttgatgaagcccttgctttatgtctgctgctggcct

SEQ ID NO: 32638 - DNA, 472 bp, Oryza sativa
  Clone ID: uC-osflM202015f06b1
ttcctctcgaagaaaggctctcaccaatccaacggtgctcgatccatccatccatccaatccgctcgctccatccatggcgtctgcggatgcggtctcgccggcgccggcgacgtccgccgcggcgcagcagcagctgcggaccgtggtgctgagggtgtccatccactgcctcggatgcaagaagaaggtcaggaaggtgctcaggagcatcgaaggcgtgaaggatgtgaaggtggacgccgcgatgcacaaggtgacggtgaccggcacggtggacggcgacacgctcgtcaagaggctgtacaagtccgggaagcaggccgtgccgtggcagcacccgcacgtggcgccggcgccggaggcggtcaaggcgatagaggccgcgccgcagcagcctgaggctgcgccggccggggaccacacctgccgcaagggtagtggtgccgccggcgccgcgggcaaggagggcc

SEQ ID NO: 32639 - DNA, 369 bp, Oryza sativa
  unsure (1)..(369): unsure at all n locations
  Clone ID: uC-osflM202015f09b1
atttttattttnaaaaanaanaacannnnaatgaaaaacttggggggagatcttctggaccacgaaccgctgtgaccgccattgcggagggtcacccctacaggggagatcaaggtggagagcattgggaaatagttcacgcgcatctcacctgaccaggggagcggcttgatatccctgaccatgaattgtgcaatgatctactatctttatataacaagaactatcaccccaatccanaactgactattctatgaagattgtcanaaaatctacacttcactaccatcaccgatctcactcatgaatcacttaccttacatgaaaatggccgcatccagcgccggccatgacccatgataacacatt

SEQ ID NO: 32640 - DNA, 458 bp, Oryza sativa
  unsure (1)..(458): unsure at all n locations
  Clone ID: uC-osflM202015h03b1
tttgcctaccaacgactccggcttagncgacggcatcgatccccatccatcccgcgagcgagcagagtgccgtagctcgtcctgctgcttcctgcgccgccgccgacccccatccatcccgcgagcgagcagggtcgccgtcgctcgtcctgttgcttgcgccgcatccatcctggtgttggctccactgccacctattgactcccccacggtgcccctgtcatgggcgacgaggccacacaagtcagcgcctcaagcgcagtancggcccatgctctgtgcttcactgggatcgtggcagcccatcaattgtctggccgcggcatgctcgtctccaatcccgcctacgccctccgcctactagtggtcttcgaagcgcctcttgtcatcgcagtgttcagtttgctcccgcgaaatcccaagcgctgctcggttcttaaggcagctgcgcgaggatt

SEQ ID NO: 32641 - DNA, 386 bp, Oryza sativa
  Clone ID: uC-osflM202015h05b1
taatctggatggttgccgccactctctccctgatggtctcatgagggctaccgatgttatgatcctggcaaggttgccgtggtctgcggttatggtgatgttggcaagggctgtgctgctgctctcaagcaggctggtgcccgtgtcattgttactgagattgaccccatctgtgccctccaggcccttatggagggtctccaggtcctcaccttggaggatgttgtctcggaggctgacatctttgtgaccaccactggcaacaaggacatcataatgtttgaccacatgaggaagatgaagaacaatgccatcgcttgcaacattggtcactttgacaatgagattgacatgctcggccttgaaacctaccctggtgtcaagcg

SEQ ID NO: 32642 - DNA, 384 bp, Oryza sativa
  unsure (1)..(384): unsure at all n locations
  Clone ID: uC-osflM202015h09b1
ctctttttttatcaacatcttncaacattgaaagatccctgtccagttcattagcaatggccaaagccgcgccctactccttgcagccatcgcggcatcggccgcgttagtgcaagtggaatgcgacgcccccgtcgagaagagcttcaacaaggccctcctcgcccctgtcgataagcgcttggatgaggcanctcaagccatcaacgaggccgccgactccgttgtggctgctgccccaccagcaaaaaaggatgaagttgaagctgccacgtggaagcggaaaatcttcgccataactgctctcgggatggcccaaggagatgagaagaaagttgctgcaacttcacttgcctacaagaaagcagctaaagctgtcctcga

SEQ ID NO: 32643 - DNA, 64 bp, Oryza sativa
  Clone ID: uC-osflM202016a01a2
ctggggggcatgcttttttaagttgaaatgcccaagggggttgtcccattacagctattagggg

SEQ ID NO: 32644 - DNA, 268 bp, Oryza sativa
  Clone ID: uC-osflM202016a02a2
cagcagccaaatgtgtttaattccacaccgatataagattgggccagtagcatgtgtcggcaaacattttaattgcatttacaaactcgcagcttgagctgtataataatcccaggagggaatgtgcctaacaactaatgacagtatttatcacccccagctcacaaaagttgccaaaatgatcctgtgagtcatctgaaggccgttcaggtttttatttctgacttttgagttgggaaccgattctgtacttttgtattgcgtaatg

SEQ ID NO: 32645 - DNA, 52 bp, Oryza sativa
  Clone ID: uC-osflM202016a03a2
aaaaaaccgcaggggcctttcaggggaaaaattcctcctagttgttaaaagg

SEQ ID NO: 32646 - DNA, 330 bp, Oryza sativa
  Clone ID: uC-osflM202016a04a2
ccatgttaaaaatgtatttgggtttaattagatattcatatttttaaccaaccattaaaaatttttaaaaataatcttttagaggaaaatttgtagtcggcgatgagctgctggccaaactagaattgttgacccctcaggattattcgcatgctttgttttagcgaaccatgatttcggtttttgtcactttgtaagaatagcctccatcagttgggcagtaaaagatttcatagtaggggattctggggaactacccaagaagccctcctttagcgcatatttaacagtggctgatgtgattttagcatcaacttgtcatggatcttg

SEQ ID NO: 32647 - DNA, 409 bp, Oryza sativa
  Clone ID: uC-osflM202016a05a2
gatggaagaccaacaatgatttgtggaaaaaatacaaatgttgcacatctatgtggtcggccgaccaatccggcccaattaacacaacacaaagaacaaacgggcctccaaaacagaattgattgggcccaattaaattggtaatagttactccgaaatatttgaatcactttggtggcgggaggatccttcaatcgccgtagatgaagttgtgactcaccgcgccgccgctgcacttatctactcgcctttgccggtgtgcttgaagcacttggcgtcgccggtggacccgagtaactctttggggcaggtgggtttgaactactcgccgtcgccggtgcaattgaattacttgccggcaccggtgcaattgagttgctgggtgtcgccggtgcagttgagttactta

SEQ ID NO: 32648 - DNA, 96 bp, Oryza sativa
  Clone ID: uC-osflM202016a06a2
atctattcaaaggcaggcaatgaattatttcattacaatgaaacggcactgcatttgtatttattctaatacacagacatcggcctatagactaga

SEQ ID NO: 32649 - DNA, 100 bp, Oryza sativa
  Clone ID: uC-osflM202016a07a2
ctggggggcatgcttttttaagttgaaatgcccaagggggttgtaccattacagaattagggggaaagacatttctacagcattcctatccctgggaagt

SEQ ID NO: 32650 - DNA, 425 bp, Oryza sativa
  unsure (1)..(425): unsure at all n locations
  Clone ID: uC-osflM202016a08a2
cagcagccaaatgtgtttaattccacaccgatataagattgggccagtagcatgtgtcggcaaacattttaattgcatttacaaactcgcagcttgagctgtataataatcccaggagggaatgtgcctaacaactaatgacagtatttatcacccccagctcacaaaagttgccaaaatgatccctgtgagttcattctgaaaggccgtcaggtttttattttctgacttctgagtcggaaccgattctgtactttctggatgcgtaatgctggactattctatccaactttgtaaaattacagnccactttctgatgggattgttgttaccatgttatcaattagcaacccaagggaagtggaaactggaaaaagaattgacattcatacagcttggaacagcaggagggttagatagtgagt

SEQ ID NO: 32651 - DNA, 76 bp, Oryza sativa
  Clone ID: uC-osflM202016a09a2
aaaaaaccgttggggcattggaggggaaaaattcctacttggggttaataggggttttcccaggagcaatttgaac

SEQ ID NO: 32652 - DNA, 386 bp, Oryza sativa
  Clone ID: uC-osflM202016a10a2
catgtaaaaaatgtttttgggtttaattagattttcatatatataaccaaactttaaaaatttttaaaaataacctttaagatgaaattttgtagccggcgatgagctgatggccaaactagaattgttcacccatcaggattcagcgcatgctttgttttagcgaaccatgatttcggtttttgtcacttggtaagaatagccctccagaagtagggcagtagaagatctcaaagtgggggatacgggaaaactacccaagaagccatcgtatagggcataattaacaggggctgatgggatttcagcatcaacttgacatggatctgggtttcctgcaattgagatctacagcaacagaaatttcagtttgggtcctgaaaatt

SEQ ID NO: 32653 - DNA, 502 bp, Oryza sativa
  Clone ID: uC-osflM202016a11a2
ggtatgcctcttgagcggcggccgtcctttttttttttttttgttgatagaccaccaaaaatgaattgggaaaaaaatacaaatgttacacatctatgtggccggccgaccaatccggcccaattaacacaacacaaagaacaaacgggcctccaaaacagaattgattgggcccaattaaattggtaatagttactccgaaatatttgaatcactttggtggcgggaggatccttcaatcgccgtagatgaagttgtgactcaccgcgccgccgctgcacttatctactcgcctttgccggtgtgcttgaagcacttggcgtcgccggtggacccgagtaactcttcgtggcaggtgggtttgaactactcgccgtcgccggtgcagttgaattacttgccgtcaccggtgcagttgagttgctgggtgtcgcccgtgcagttgagttacttaccattgccgtcgacggtgcaattgagttcctgggtatcgccgatgcgg

SEQ ID NO: 32654 - DNA, 387 bp, Oryza sativa
  Clone ID: uC-osflM202016a12a2
atctataaaggcaggaatattattcataaatgacgcatgatttttatcaaaaacgctggcttgatgatgtatatatgagtaagagtgagaccaagcacagacaactgcttgttgtccgaacaaagacactatcctcaccctaactcccaacataacttcacgtctcatttattgggtgggacaacaagaccggacgggcttaacccatttcctctcccttcaaccagttctcaaatccatacaaccccacaacaaatcctactaagtgacggcatataagatgatgaaaacaaagcaggatactccagagtcgtcatggcgaacttcaagttgacacttttcatgccacagccgctagtcgtgctgggcagcctagtaccggtagtg

SEQ ID NO: 32655 - DNA, 407 bp, Oryza sativa
  Clone ID: uC-osflM202016b01a2
gggaattaaaatttacttatggttttttttttttttcacaggtcacatggaaatcaaaagggagtagcaaaaggaaaagctggtttacactcgacaggggaacaaactaagagagcaacacaaggaacaagagggggagatttagagcttttttcggggggtctgcaaataaaactttccccttttggtacccctaaaccccaacccaagggagtagtaaggttaccccacttaaaggaaccgggcattttttacaaaaattggcgggctcctttgaatcaatcgaattagatcattatcatcatcatttacaggttggcatgctcggcgttgaagccgcccttgccgtgggggccgacacccggggggcccccgggcctttgggaaacgggggaaatgatggggtt

SEQ ID NO: 32656 - DNA, 69 bp, Oryza sativa
  Clone ID: uC-osflM202016b02a2
acccaaaagtgccttttttttttggaaaagaaaaaggggggaggaggataaaaatggggcccccgaaaa

SEQ ID NO: 32657 - DNA, 449 bp, Oryza sativa
  unsure (1)..(449): unsure at all n locations
  Clone ID: uC-osflM202016b03a2
ggcaacaatagatgttatataagaagtccatatggtcctcaacatggtccaaagccttcctcgtattcgggaagggcatacataacagtaagcacgttttactgttttagcattttaattacaagcagtttggtacacgacacactgaaaagatgagcgttttaagtatcaggcatcatatggttagatggcatgtggatcagtccgcggttccagctctgctccactatctcacgaacttnttcggttgtatttcccgcttgttctcactgaataggcgggcagcttcagagttggcaggtgaatttgggtttggatcgcaaagcaacgactggatggatgtgagtatagcagctacatcatatatggggctccactggttttgtagtatatctaagcatatgctcccatcagcataaatgttagatgaaacattcgagaaacaaatc

SEQ ID NO: 32658 - DNA, 451 bp, Oryza sativa
  Clone ID: uC-osflM202016b04a2
aaatgtgaaatgtgatgtacatgttcttgcacagatctaaagaatgtacaaaaaattcataaggatctcataaaatcgaccaaaacaatacagcagattctagatttagagttttgtactctttcacatgacctacaatacactggactgtttgcttgattctgccaagaaatcaagttggcgctgttgtacttgctgaattcttcagagcagcattgccagcagatggagctatatttgtttgcttgatgctagcaggtctgatagttctgaaatactaatttctgatactctccaagagcccatattgggaatatattgcgataagccatataacacaaggggccatttttcaagaaacttccgatcatttcctacagcaaaacaaataaactattagtaaatgagtgtgaacagcactgagtgctaagggtttaggctatttacatga

SEQ ID NO: 32659 - DNA, 456 bp, Oryza sativa
  Clone ID: uC-osflM202016b05a2
agaacagagaagaattgaattagatggggaattctgtttttacatcgttcaattcacatctcttctctgcggatccttatatagcaatgtgccattggatctctttcccttacatgtggcccagtcagtcactattaggtccactcactcccgtgataggccggtattgggccgccgttcacgacgcgactttctgagcccatcttggtgcgccgaagaagcttcatcgcttgtctaatcaggaacagaaggtgacgatgaccgcgacattctccccccgttgagacgaagcttgtccccaagcttcagccaatggaaagcgatgacgtaattcttgagcattctcctaggtgatcacctgaacatctggtccagaccaagcaacctgaacaaactccaccattttggctcccttgcgaatgaagcgccgatccaaaatgcggagaggagttggtg

SEQ ID NO: 32660 - DNA, 466 bp, Oryza sativa
  Clone ID: uC-osflM202016b06a2
atatagattccttttatttcctcatttattcacttgccacatcatttttcattctaggtggcaacttatttaatactatgaacactatcctagtcattgggttggaaatggtcctaatgcttactattgcgcatgaatcccgatgcatgtcttagacgtaaaaaatttggctcaaatttatgatatttttggacacctgaaaactaaaaaaattcataataaaatcaagtacttattttgagtaagttcgtttttatactagtatagtacacacggtacaagctgaggttcacaccacaaatgttccaagcttgatgcatgcaagtgcccagcatggtagcacgagcatctggtcggtctttgggacggaagaactcaacgagttgctagttctgaattctgatcatccagaaacgggtagtccgtgtagcccaccacaggatcagaggtttagaacgtgctcctg
